United States Patent Application Publication US 2005/0255487 A1 - sequence listing, part 14

SEQ ID NO: 362760 - RNA, 19 nt, Homo sapiens
  misc_RNA (1)...(19): siRNA sense strand
ugaacuugcuccaggugua

SEQ ID NO: 362761 - RNA, 19 nt, Homo sapiens
  misc_RNA (1)...(19): siRNA sense strand
gaacuugcuccagguguaa

SEQ ID NO: 362762 - RNA, 19 nt, Homo sapiens
  misc_RNA (1)...(19): siRNA sense strand
gguggugucuagugacuug

SEQ ID NO: 362763 - RNA, 19 nt, Homo sapiens
  misc_RNA (1)...(19): siRNA sense strand
uaucagugcugccaaugga

SEQ ID NO: 362764 - RNA, 19 nt, Homo sapiens
  misc_RNA (1)...(19): siRNA sense strand
ggauacaucauucuuguca

SEQ ID NO: 362765 - RNA, 19 nt, Homo sapiens
  misc_RNA (1)...(19): siRNA sense strand
gagccucaguccauuguuc

SEQ ID NO: 362766 - RNA, 19 nt, Homo sapiens
  misc_RNA (1)...(19): siRNA sense strand
ggaagauugucauucugau

SEQ ID NO: 362767 - RNA, 19 nt, Homo sapiens
  misc_RNA (1)...(19): siRNA sense strand
guccauuguuccacguuua

SEQ ID NO: 362768 - RNA, 19 nt, Homo sapiens
  misc_RNA (1)...(19): siRNA sense strand
cuaugaagccaucaaguuu

SEQ ID NO: 362769 - RNA, 19 nt, Homo sapiens
  misc_RNA (1)...(19): siRNA sense strand
aacagucucuugaugguuu

SEQ ID NO: 362770 - RNA, 19 nt, Homo sapiens
  misc_RNA (1)...(19): siRNA sense strand
gauggcguguauaucagua

SEQ ID NO: 362771 - RNA, 19 nt, Homo sapiens
  misc_RNA (1)...(19): siRNA sense strand
ucaggagucugugcuuaaa

SEQ ID NO: 362772 - RNA, 19 nt, Homo sapiens
  misc_RNA (1)...(19): siRNA sense strand
uaaugaugaugacagcaaa

SEQ ID NO: 362773 - RNA, 19 nt, Homo sapiens
  misc_RNA (1)...(19): siRNA sense strand
caccagagguucaacaaac

SEQ ID NO: 362774 - RNA, 19 nt, Homo sapiens
  misc_RNA (1)...(19): siRNA sense strand
caaucagaccaaaguauuu

SEQ ID NO: 362775 - RNA, 19 nt, Homo sapiens
  misc_RNA (1)...(19): siRNA sense strand
ugaagagccucaguccauu

SEQ ID NO: 362776 - RNA, 19 nt, Homo sapiens
  misc_RNA (1)...(19): siRNA sense strand
gaagagccucaguccauug

SEQ ID NO: 362777 - RNA, 19 nt, Homo sapiens
  misc_RNA (1)...(19): siRNA sense strand
caaaauggcagaucucuug

SEQ ID NO: 362778 - RNA, 19 nt, Homo sapiens
  misc_RNA (1)...(19): siRNA sense strand
aggcacaacuccagauguu

SEQ ID NO: 362779 - RNA, 19 nt, Homo sapiens
  misc_RNA (1)...(19): siRNA sense strand
ucagaucauuggagcaguu

SEQ ID NO: 362780 - RNA, 19 nt, Homo sapiens
  misc_RNA (1)...(19): siRNA sense strand
aaaugaaaguccugcugaa

SEQ ID NO: 362781 - RNA, 19 nt, Homo sapiens
  misc_RNA (1)...(19): siRNA sense strand
gcaacuuguaccugauaua

SEQ ID NO: 362782 - RNA, 19 nt, Homo sapiens
  misc_RNA (1)...(19): siRNA sense strand
gcucgagaacucuuccuaa

SEQ ID NO: 362783 - RNA, 19 nt, Homo sapiens
  misc_RNA (1)...(19): siRNA sense strand
ggaauauuacagguacaua

SEQ ID NO: 362784 - RNA, 19 nt, Homo sapiens
  misc_RNA (1)...(19): siRNA sense strand
guagggcuaugcaacuugu

SEQ ID NO: 362785 - RNA, 19 nt, Homo sapiens
  misc_RNA (1)...(19): siRNA sense strand
gagcucaguggauguuuga

SEQ ID NO: 362786 - RNA, 19 nt, Homo sapiens
  misc_RNA (1)...(19): siRNA sense strand
acaaucagaccaaaguauu

SEQ ID NO: 362787 - RNA, 19 nt, Homo sapiens
  misc_RNA (1)...(19): siRNA sense strand
gaggaagauugucauucug

SEQ ID NO: 362788 - RNA, 19 nt, Homo sapiens
  misc_RNA (1)...(19): siRNA sense strand
cagcuacauugaagauaau

SEQ ID NO: 362789 - RNA, 19 nt, Homo sapiens
  misc_RNA (1)...(19): siRNA sense strand
cucgagaacucuuccuaaa

SEQ ID NO: 362790 - RNA, 19 nt, Homo sapiens
  misc_RNA (1)...(19): siRNA sense strand
cagaaaacaucggcagaua

SEQ ID NO: 362791 - RNA, 19 nt, Homo sapiens
  misc_RNA (1)...(19): siRNA sense strand
gacaaucagaccaaaguau

SEQ ID NO: 362792 - RNA, 19 nt, Homo sapiens
  misc_RNA (1)...(19): siRNA sense strand
gagcagucagauucacaua

SEQ ID NO: 362793 - RNA, 19 nt, Homo sapiens
  misc_RNA (1)...(19): siRNA sense strand
caacuuguaccugauauag

SEQ ID NO: 362794 - RNA, 19 nt, Homo sapiens
  misc_RNA (1)...(19): siRNA sense strand
gaaacagcuacauugaaga

SEQ ID NO: 362795 - RNA, 19 nt, Homo sapiens
  misc_RNA (1)...(19): siRNA sense strand
caggacugaugcaauucua

SEQ ID NO: 362796 - RNA, 19 nt, Homo sapiens
  misc_RNA (1)...(19): siRNA sense strand
cggcagauaccaaaggaaa

SEQ ID NO: 362797 - RNA, 19 nt, Homo sapiens
  misc_RNA (1)...(19): siRNA sense strand
acaagaagcagaucagagu

SEQ ID NO: 362798 - RNA, 19 nt, Homo sapiens
  misc_RNA (1)...(19): siRNA sense strand
ugacuuggaccucagauca

SEQ ID NO: 362799 - RNA, 19 nt, Homo sapiens
  misc_RNA (1)...(19): siRNA sense strand
guuggaaacagcuacauug

SEQ ID NO: 362800 - RNA, 19 nt, Homo sapiens
  misc_RNA (1)...(19): siRNA sense strand
cguuuaagaacuaggaaua

SEQ ID NO: 362801 - RNA, 19 nt, Homo sapiens
  misc_RNA (1)...(19): siRNA sense strand
aaacaucggcagauaccaa

SEQ ID NO: 362802 - RNA, 19 nt, Homo sapiens
  misc_RNA (1)...(19): siRNA sense strand
gcaccaaguggaauauuac

SEQ ID NO: 362803 - RNA, 19 nt, Homo sapiens
  misc_RNA (1)...(19): siRNA sense strand
gaacagucucuugaugguu

SEQ ID NO: 362804 - RNA, 19 nt, Homo sapiens
  misc_RNA (1)...(19): siRNA sense strand
cgagaacucuuccuaaaag

SEQ ID NO: 362805 - RNA, 19 nt, Homo sapiens
  misc_RNA (1)...(19): siRNA sense strand
cgagcucaguggauguuug

SEQ ID NO: 362806 - RNA, 19 nt, Homo sapiens
  misc_RNA (1)...(19): siRNA sense strand
uuucaggagucugugcuua

SEQ ID NO: 362807 - RNA, 19 nt, Homo sapiens
  misc_RNA (1)...(19): siRNA sense strand
aaacagcuacauugaagau

SEQ ID NO: 362808 - RNA, 19 nt, Homo sapiens
  misc_RNA (1)...(19): siRNA sense strand
uaaaagcaguagaagaaga

SEQ ID NO: 362809 - RNA, 19 nt, Homo sapiens
  misc_RNA (1)...(19): siRNA sense strand
ucuaugaagccaucaaguu

SEQ ID NO: 362810 - RNA, 19 nt, Homo sapiens
  misc_RNA (1)...(19): siRNA sense strand
caguggauguuugaacuug

SEQ ID NO: 362811 - RNA, 19 nt, Homo sapiens
  misc_RNA (1)...(19): siRNA sense strand
cagcagcaacucacauuuc

SEQ ID NO: 362812 - RNA, 19 nt, Homo sapiens
  misc_RNA (1)...(19): siRNA sense strand
cagaagcugaggaagauug

SEQ ID NO: 362813 - RNA, 19 nt, Homo sapiens
  misc_RNA (1)...(19): siRNA sense strand
cuggauacaucauucuugu

SEQ ID NO: 362814 - RNA, 19 nt, Homo sapiens
  misc_RNA (1)...(19): siRNA sense strand
cacaagacacagacaauca

SEQ ID NO: 362815 - RNA, 19 nt, Homo sapiens
  misc_RNA (1)...(19): siRNA sense strand
cgucuggccugcuugaaag

SEQ ID NO: 362816 - RNA, 19 nt, Homo sapiens
  misc_RNA (1)...(19): siRNA sense strand
ugucagagcagaugaugau

SEQ ID NO: 362817 - RNA, 19 nt, Homo sapiens
  misc_RNA (1)...(19): siRNA sense strand
ucagagcagaugaugauga

SEQ ID NO: 362818 - RNA, 19 nt, Homo sapiens
  misc_RNA (1)...(19): siRNA sense strand
auacaucauucuugucaca

SEQ ID NO: 362819 - RNA, 19 nt, Homo sapiens
  misc_RNA (1)...(19): siRNA sense strand
aagaagcagaucagaguuu

SEQ ID NO: 362820 - RNA, 19 nt, Homo sapiens
  misc_RNA (1)...(19): siRNA sense strand
ccuaaaagcaguagaagaa

SEQ ID NO: 362821 - RNA, 19 nt, Homo sapiens
  misc_RNA (1)...(19): siRNA sense strand
guacaagaagcagaucaga

SEQ ID NO: 362822 - RNA, 19 nt, Homo sapiens
  misc_RNA (1)...(19): siRNA sense strand
ucgugucccuguacaagaa

SEQ ID NO: 362823 - RNA, 19 nt, Homo sapiens
  misc_RNA (1)...(19): siRNA sense strand
caagacacagacaaucaga

SEQ ID NO: 362824 - RNA, 19 nt, Homo sapiens
  misc_RNA (1)...(19): siRNA sense strand
gagcuugagagcagucaga

SEQ ID NO: 362825 - RNA, 19 nt, Homo sapiens
  misc_RNA (1)...(19): siRNA sense strand
uaccugauauagaguucaa

SEQ ID NO: 362826 - RNA, 19 nt, Homo sapiens
  misc_RNA (1)...(19): siRNA sense strand
acacagacaaucagaccaa

SEQ ID NO: 362827 - RNA, 19 nt, Homo sapiens
  misc_RNA (1)...(19): siRNA sense strand
caagaagcagaucagaguu

SEQ ID NO: 362828 - RNA, 19 nt, Homo sapiens
  misc_RNA (1)...(19): siRNA sense strand
ggaaacagcuacauugaag

SEQ ID NO: 362829 - RNA, 19 nt, Homo sapiens
  misc_RNA (1)...(19): siRNA sense strand
caauggagguccugaugua

SEQ ID NO: 362830 - RNA, 19 nt, Homo sapiens
  misc_RNA (1)...(19): siRNA sense strand
gcagucagauucacauauc

SEQ ID NO: 362831 - RNA, 19 nt, Homo sapiens
  misc_RNA (1)...(19): siRNA sense strand
ggcaccaaguggaauauua

SEQ ID NO: 362832 - RNA, 19 nt, Homo sapiens
  misc_RNA (1)...(19): siRNA sense strand
caucauucuugucacauua

SEQ ID NO: 362833 - RNA, 19 nt, Homo sapiens
  misc_RNA (1)...(19): siRNA sense strand
ggcagaagcuguauuaaac

SEQ ID NO: 362834 - RNA, 19 nt, Homo sapiens
  misc_RNA (1)...(19): siRNA sense strand
uggcagaucucuuguccua

SEQ ID NO: 362835 - RNA, 19 nt, Homo sapiens
  misc_RNA (1)...(19): siRNA sense strand
gggcagaagcuguauuaaa

SEQ ID NO: 362836 - RNA, 19 nt, Homo sapiens
  misc_RNA (1)...(19): siRNA sense strand
aaacucaucuggauacauc

SEQ ID NO: 362837 - RNA, 19 nt, Homo sapiens
  misc_RNA (1)...(19): siRNA sense strand
caacaaacucaucuggaua

SEQ ID NO: 362838 - RNA, 19 nt, Homo sapiens
  misc_RNA (1)...(19): siRNA sense strand
gaagcuguauuaaacuugu

SEQ ID NO: 362839 - RNA, 19 nt, Homo sapiens
  misc_RNA (1)...(19): siRNA sense strand
caaaucaacuggugagacu

SEQ ID NO: 362840 - RNA, 19 nt, Homo sapiens
  misc_RNA (1)...(19): siRNA sense strand
acagcuacauugaagauaa

SEQ ID NO: 362841 - RNA, 19 nt, Homo sapiens
  misc_RNA (1)...(19): siRNA sense strand
ccagagacccugaaauaug

SEQ ID NO: 362842 - RNA, 19 nt, Homo sapiens
  misc_RNA (1)...(19): siRNA sense strand
ccacuugacuauaaauaca

SEQ ID NO: 362843 - RNA, 19 nt, Homo sapiens
  misc_RNA (1)...(19): siRNA sense strand
uaccaggacugaugcaauu

SEQ ID NO: 362844 - RNA, 19 nt, Homo sapiens
  misc_RNA (1)...(19): siRNA sense strand
gcagaucucuuguccuacu

SEQ ID NO: 362845 - RNA, 19 nt, Homo sapiens
  misc_RNA (1)...(19): siRNA sense strand
ucaacaaacucaucuggau

SEQ ID NO: 362846 - RNA, 19 nt, Homo sapiens
  misc_RNA (1)...(19): siRNA sense strand
gauggguggugucuaguga

SEQ ID NO: 362847 - RNA, 19 nt, Homo sapiens
  misc_RNA (1)...(19): siRNA sense strand
ggaacagucucuugauggu

SEQ ID NO: 362848 - RNA, 19 nt, Homo sapiens
  misc_RNA (1)...(19): siRNA sense strand
cagagacccugaaauaugg

SEQ ID NO: 362849 - RNA, 19 nt, Homo sapiens
  misc_RNA (1)...(19): siRNA sense strand
ugccagagacccugaaaua

SEQ ID NO: 362850 - RNA, 19 nt, Homo sapiens
  misc_RNA (1)...(19): siRNA sense strand
cagaagcuguauuaaacuu

SEQ ID NO: 362851 - RNA, 19 nt, Homo sapiens
  misc_RNA (1)...(19): siRNA sense strand
gguggugucuagugacuug

SEQ ID NO: 362852 - RNA, 19 nt, Homo sapiens
  misc_RNA (1)...(19): siRNA sense strand
uaucagugcugccaaugga

SEQ ID NO: 362853 - RNA, 19 nt, Homo sapiens
  misc_RNA (1)...(19): siRNA sense strand
ggauacaucauucuuguca

SEQ ID NO: 362854 - RNA, 19 nt, Homo sapiens
  misc_RNA (1)...(19): siRNA sense strand
gagccucaguccauuguuc

SEQ ID NO: 362855 - RNA, 19 nt, Homo sapiens
  misc_RNA (1)...(19): siRNA sense strand
guccauuguuccacguuua

SEQ ID NO: 362856 - RNA, 19 nt, Homo sapiens
  misc_RNA (1)...(19): siRNA sense strand
ucaggagucugugcuuaaa

SEQ ID NO: 362857 - RNA, 19 nt, Homo sapiens
  misc_RNA (1)...(19): siRNA sense strand
aacagucucuugaugguuu

SEQ ID NO: 362858 - RNA, 19 nt, Homo sapiens
  misc_RNA (1)...(19): siRNA sense strand
gauggcguguauaucagua

SEQ ID NO: 362859 - RNA, 19 nt, Homo sapiens
  misc_RNA (1)...(19): siRNA sense strand
uaaugaugaugacagcaaa

SEQ ID NO: 362860 - RNA, 19 nt, Homo sapiens
  misc_RNA (1)...(19): siRNA sense strand
caccagagguucaacaaac

SEQ ID NO: 362861 - RNA, 19 nt, Homo sapiens
  misc_RNA (1)...(19): siRNA sense strand
caaucagaccaaaguauuu

SEQ ID NO: 362862 - RNA, 19 nt, Homo sapiens
  misc_RNA (1)...(19): siRNA sense strand
ugaagagccucaguccauu

SEQ ID NO: 362863 - RNA, 19 nt, Homo sapiens
  misc_RNA (1)...(19): siRNA sense strand
gaagagccucaguccauug

SEQ ID NO: 362864 - RNA, 19 nt, Homo sapiens
  misc_RNA (1)...(19): siRNA sense strand
caaaauggcagaucucuug

SEQ ID NO: 362865 - RNA, 19 nt, Homo sapiens
  misc_RNA (1)...(19): siRNA sense strand
ucagaucauuggagcaguu

SEQ ID NO: 362866 - RNA, 19 nt, Homo sapiens
  misc_RNA (1)...(19): siRNA sense strand
gcaacuuguaccugauaua

SEQ ID NO: 362867 - RNA, 19 nt, Homo sapiens
  misc_RNA (1)...(19): siRNA sense strand
ggaauauuacagguacaua

SEQ ID NO: 362868 - RNA, 19 nt, Homo sapiens
  misc_RNA (1)...(19): siRNA sense strand
cagcuacauugaagauaau

SEQ ID NO: 362869 - RNA, 19 nt, Homo sapiens
  misc_RNA (1)...(19): siRNA sense strand
acaaucagaccaaaguauu

SEQ ID NO: 362870 - RNA, 19 nt, Homo sapiens
  misc_RNA (1)...(19): siRNA sense strand
gagcagucagauucacaua

SEQ ID NO: 362871 - RNA, 19 nt, Homo sapiens
  misc_RNA (1)...(19): siRNA sense strand
gacaaucagaccaaaguau

SEQ ID NO: 362872 - RNA, 19 nt, Homo sapiens
  misc_RNA (1)...(19): siRNA sense strand
caacuuguaccugauauag

SEQ ID NO: 362873 - RNA, 19 nt, Homo sapiens
  misc_RNA (1)...(19): siRNA sense strand
caggacugaugcaauucua

SEQ ID NO: 362874 - RNA, 19 nt, Homo sapiens
  misc_RNA (1)...(19): siRNA sense strand
gaaacagcuacauugaaga

SEQ ID NO: 362875 - RNA, 19 nt, Homo sapiens
  misc_RNA (1)...(19): siRNA sense strand
ugacuuggaccucagauca

SEQ ID NO: 362876 - RNA, 19 nt, Homo sapiens
  misc_RNA (1)...(19): siRNA sense strand
acaagaagcagaucagagu

SEQ ID NO: 362877 - RNA, 19 nt, Homo sapiens
  misc_RNA (1)...(19): siRNA sense strand
guuggaaacagcuacauug

SEQ ID NO: 362878 - RNA, 19 nt, Homo sapiens
  misc_RNA (1)...(19): siRNA sense strand
cguuuaagaacuaggaaua

SEQ ID NO: 362879 - RNA, 19 nt, Homo sapiens
  misc_RNA (1)...(19): siRNA sense strand
gaacagucucuugaugguu

SEQ ID NO: 362880 - RNA, 19 nt, Homo sapiens
  misc_RNA (1)...(19): siRNA sense strand
gcaccaaguggaauauuac

SEQ ID NO: 362881 - RNA, 19 nt, Homo sapiens
  misc_RNA (1)...(19): siRNA sense strand
uuucaggagucugugcuua

SEQ ID NO: 362882 - RNA, 19 nt, Homo sapiens
  misc_RNA (1)...(19): siRNA sense strand
aaacagcuacauugaagau

SEQ ID NO: 362883 - RNA, 19 nt, Homo sapiens
  misc_RNA (1)...(19): siRNA sense strand
cagcagcaacucacauuuc

SEQ ID NO: 362884 - RNA, 19 nt, Homo sapiens
  misc_RNA (1)...(19): siRNA sense strand
cgucuggccugcuugaaag

SEQ ID NO: 362885 - RNA, 19 nt, Homo sapiens
  misc_RNA (1)...(19): siRNA sense strand
cuggauacaucauucuugu

SEQ ID NO: 362886 - RNA, 19 nt, Homo sapiens
  misc_RNA (1)...(19): siRNA sense strand
cacaagacacagacaauca

SEQ ID NO: 362887 - RNA, 19 nt, Homo sapiens
  misc_RNA (1)...(19): siRNA sense strand
aagaagcagaucagaguuu

SEQ ID NO: 362888 - RNA, 19 nt, Homo sapiens
  misc_RNA (1)...(19): siRNA sense strand
auacaucauucuugucaca

SEQ ID NO: 362889 - RNA, 19 nt, Homo sapiens
  misc_RNA (1)...(19): siRNA sense strand
gagcuugagagcagucaga

SEQ ID NO: 362890 - RNA, 19 nt, Homo sapiens
  misc_RNA (1)...(19): siRNA sense strand
uaccugauauagaguucaa

SEQ ID NO: 362891 - RNA, 19 nt, Homo sapiens
  misc_RNA (1)...(19): siRNA sense strand
guacaagaagcagaucaga

SEQ ID NO: 362892 - RNA, 19 nt, Homo sapiens
  misc_RNA (1)...(19): siRNA sense strand
ucgugucccuguacaagaa

SEQ ID NO: 362893 - RNA, 19 nt, Homo sapiens
  misc_RNA (1)...(19): siRNA sense strand
caagacacagacaaucaga

SEQ ID NO: 362894 - RNA, 19 nt, Homo sapiens
  misc_RNA (1)...(19): siRNA sense strand
gaagauaaugaugaugaca

SEQ ID NO: 362895 - RNA, 19 nt, Homo sapiens
  misc_RNA (1)...(19): siRNA sense strand
caagaagcagaucagaguu

SEQ ID NO: 362896 - RNA, 19 nt, Homo sapiens
  misc_RNA (1)...(19): siRNA sense strand
acacagacaaucagaccaa

SEQ ID NO: 362897 - RNA, 19 nt, Homo sapiens
  misc_RNA (1)...(19): siRNA sense strand
gguuugauggcguguauau

SEQ ID NO: 362898 - RNA, 19 nt, Homo sapiens
  misc_RNA (1)...(19): siRNA sense strand
gccagagacccugaaauau

SEQ ID NO: 362899 - RNA, 19 nt, Homo sapiens
  misc_RNA (1)...(19): siRNA sense strand
cuugagagcagucagauuc

SEQ ID NO: 362900 - RNA, 19 nt, Homo sapiens
  misc_RNA (1)...(19): siRNA sense strand
acaucauucuugucacauu

SEQ ID NO: 362901 - RNA, 19 nt, Homo sapiens
  misc_RNA (1)...(19): siRNA sense strand
ggacugaugcaauucuacu

SEQ ID NO: 362902 - RNA, 19 nt, Homo sapiens
  misc_RNA (1)...(19): siRNA sense strand
ucacauuucaggagucugu

SEQ ID NO: 362903 - RNA, 19 nt, Homo sapiens
  misc_RNA (1)...(19): siRNA sense strand
cagacaaucagaccaaagu

SEQ ID NO: 362904 - RNA, 19 nt, Homo sapiens
  misc_RNA (1)...(19): siRNA sense strand
caauucuacugggucacua

SEQ ID NO: 362905 - RNA, 19 nt, Homo sapiens
  misc_RNA (1)...(19): siRNA sense strand
gcagaagcuguauuaaacu

SEQ ID NO: 362906 - RNA, 19 nt, Homo sapiens
  misc_RNA (1)...(19): siRNA sense strand
gccaauggagguccugaug

SEQ ID NO: 362907 - RNA, 19 nt, Homo sapiens
  misc_RNA (1)...(19): siRNA sense strand
uggcguguauaucaguaaa

SEQ ID NO: 362908 - RNA, 19 nt, Homo sapiens
  misc_RNA (1)...(19): siRNA sense strand
agcagcaacucacauuuca

SEQ ID NO: 362909 - RNA, 19 nt, Homo sapiens
  misc_RNA (1)...(19): siRNA sense strand
gcgucuggccugcuugaaa

SEQ ID NO: 362910 - RNA, 19 nt, Homo sapiens
  misc_RNA (1)...(19): siRNA sense strand
ggugauggcguuggaaaca

SEQ ID NO: 362911 - RNA, 19 nt, Homo sapiens
  misc_RNA (1)...(19): siRNA sense strand
acauaucagugcugccaau

SEQ ID NO: 362912 - RNA, 19 nt, Homo sapiens
  misc_RNA (1)...(19): siRNA sense strand
ucaucuggauacaucauuc

SEQ ID NO: 362913 - RNA, 19 nt, Homo sapiens
  misc_RNA (1)...(19): siRNA sense strand
uggaaacagcuacauugaa

SEQ ID NO: 362914 - RNA, 19 nt, Homo sapiens
  misc_RNA (1)...(19): siRNA sense strand
cacagacaaucagaccaaa

SEQ ID NO: 362915 - RNA, 19 nt, Homo sapiens
  misc_RNA (1)...(19): siRNA sense strand
aggaauaccaggacugaug

SEQ ID NO: 362916 - RNA, 19 nt, Homo sapiens
  misc_RNA (1)...(19): siRNA sense strand
uuacagguacauaagauuc

SEQ ID NO: 362917 - RNA, 19 nt, Homo sapiens
  misc_RNA (1)...(19): siRNA sense strand
uauacccggucuccagaug

SEQ ID NO: 362918 - RNA, 19 nt, Homo sapiens
  misc_RNA (1)...(19): siRNA sense strand
gcuacacagcuuucucaga

SEQ ID NO: 362919 - RNA, 19 nt, Homo sapiens
  misc_RNA (1)...(19): siRNA sense strand
gagauugacaagauguaca

SEQ ID NO: 362920 - RNA, 19 nt, Homo sapiens
  misc_RNA (1)...(19): siRNA sense strand
agacaaucagaccaaagua

SEQ ID NO: 362921 - RNA, 19 nt, Homo sapiens
  misc_RNA (1)...(19): siRNA sense strand
gagagcagucagauucaca

SEQ ID NO: 362922 - RNA, 19 nt, Homo sapiens
  misc_RNA (1)...(19): siRNA sense strand
acuuguaccugauauagag

SEQ ID NO: 362923 - RNA, 19 nt, Homo sapiens
  misc_RNA (1)...(19): siRNA sense strand
ggccaugugaugauguuga

SEQ ID NO: 362924 - RNA, 19 nt, Homo sapiens
  misc_RNA (1)...(19): siRNA sense strand
gaucauuggagcaguuguc

SEQ ID NO: 362925 - RNA, 19 nt, Homo sapiens
  misc_RNA (1)...(19): siRNA sense strand
cuauagagccuggcaccaa

SEQ ID NO: 362926 - RNA, 19 nt, Homo sapiens
  misc_RNA (1)...(19): siRNA sense strand
agucagugcuuuugagauu

SEQ ID NO: 362927 - RNA, 19 nt, Homo sapiens
  misc_RNA (1)...(19): siRNA sense strand
ccagcagcaacucacauuu

SEQ ID NO: 362928 - RNA, 19 nt, Homo sapiens
  misc_RNA (1)...(19): siRNA sense strand
ggaggaaacacaauuauua

SEQ ID NO: 362929 - RNA, 19 nt, Homo sapiens
  misc_RNA (1)...(19): siRNA sense strand
ggacugcuguguagauaua

SEQ ID NO: 362930 - RNA, 19 nt, Homo sapiens
  misc_RNA (1)...(19): siRNA sense strand
gaaggaggaaacacaauua

SEQ ID NO: 362931 - RNA, 19 nt, Homo sapiens
  misc_RNA (1)...(19): siRNA sense strand
gcuaaagauuguccagaua

SEQ ID NO: 362932 - RNA, 19 nt, Homo sapiens
  misc_RNA (1)...(19): siRNA sense strand
ugagaugucuucauaaguu

SEQ ID NO: 362933 - RNA, 19 nt, Homo sapiens
  misc_RNA (1)...(19): siRNA sense strand
guaagaagcaaaccaaauu

SEQ ID NO: 362934 - RNA, 19 nt, Homo sapiens
  misc_RNA (1)...(19): siRNA sense strand
gaacuucauugacugucua

SEQ ID NO: 362935 - RNA, 19 nt, Homo sapiens
  misc_RNA (1)...(19): siRNA sense strand
guccagauaugaaacauuu

SEQ ID NO: 362936 - RNA, 19 nt, Homo sapiens
  misc_RNA (1)...(19): siRNA sense strand
aaagaucucucugccaaua

SEQ ID NO: 362937 - RNA, 19 nt, Homo sapiens
  misc_RNA (1)...(19): siRNA sense strand
gaacugaugaccauacuug

SEQ ID NO: 362938 - RNA, 19 nt, Homo sapiens
  misc_RNA (1)...(19): siRNA sense strand
cagcacagcuaagagaaua

SEQ ID NO: 362939 - RNA, 19 nt, Homo sapiens
  misc_RNA (1)...(19): siRNA sense strand
gaaaugaaggaguuaagaa

SEQ ID NO: 362940 - RNA, 19 nt, Homo sapiens
  misc_RNA (1)...(19): siRNA sense strand
ccucuucucuucccaagua

SEQ ID NO: 362941 - RNA, 19 nt, Homo sapiens
  misc_RNA (1)...(19): siRNA sense strand
ugacuacgguacucgauaa

SEQ ID NO: 362942 - RNA, 19 nt, Homo sapiens
  misc_RNA (1)...(19): siRNA sense strand
gucaacaucuccaugaauu

SEQ ID NO: 362943 - RNA, 19 nt, Homo sapiens
  misc_RNA (1)...(19): siRNA sense strand
agacagaccucuaucaucu

SEQ ID NO: 362944 - RNA, 19 nt, Homo sapiens
  misc_RNA (1)...(19): siRNA sense strand
gaaguaagaagcaaaccaa

SEQ ID NO: 362945 - RNA, 19 nt, Homo sapiens
  misc_RNA (1)...(19): siRNA sense strand
uauuagagcuguuucugaa

SEQ ID NO: 362946 - RNA, 19 nt, Homo sapiens
  misc_RNA (1)...(19): siRNA sense strand
ugucacagaucaugauuug

SEQ ID NO: 362947 - RNA, 19 nt, Homo sapiens
  misc_RNA (1)...(19): siRNA sense strand
cagaaguccuuauuggaaa

SEQ ID NO: 362948 - RNA, 19 nt, Homo sapiens
  misc_RNA (1)...(19): siRNA sense strand
ggcaaaggaugaacugaug

SEQ ID NO: 362949 - RNA, 19 nt, Homo sapiens
  misc_RNA (1)...(19): siRNA sense strand
gaaaagaacauaugggauu

SEQ ID NO: 362950 - RNA, 19 nt, Homo sapiens
  misc_RNA (1)...(19): siRNA sense strand
ugaaggauauggaaagcuu

SEQ ID NO: 362951 - RNA, 19 nt, Homo sapiens
  misc_RNA (1)...(19): siRNA sense strand
ucuaaggguugcuuuguuu

SEQ ID NO: 362952 - RNA, 19 nt, Homo sapiens
  misc_RNA (1)...(19): siRNA sense strand
gacuucagcuuucucuauu

SEQ ID NO: 362953 - RNA, 19 nt, Homo sapiens
  misc_RNA (1)...(19): siRNA sense strand
ggacuucagcuuucucuau

SEQ ID NO: 362954 - RNA, 19 nt, Homo sapiens
  misc_RNA (1)...(19): siRNA sense strand
ggaauagccacaucuccua

SEQ ID NO: 362955 - RNA, 19 nt, Homo sapiens
  misc_RNA (1)...(19): siRNA sense strand
gagaaaauguugugaacuu

SEQ ID NO: 362956 - RNA, 19 nt, Homo sapiens
  misc_RNA (1)...(19): siRNA sense strand
agacacagccucuccauga

SEQ ID NO: 362957 - RNA, 19 nt, Homo sapiens
  misc_RNA (1)...(19): siRNA sense strand
caccauauguagucucauu

SEQ ID NO: 362958 - RNA, 19 nt, Homo sapiens
  misc_RNA (1)...(19): siRNA sense strand
gaccauacuugagaaaugu

SEQ ID NO: 362959 - RNA, 19 nt, Homo sapiens
  misc_RNA (1)...(19): siRNA sense strand
gcagucaacaucuccauga

SEQ ID NO: 362960 - RNA, 19 nt, Homo sapiens
  misc_RNA (1)...(19): siRNA sense strand
cauacaaacugcaccuaga

SEQ ID NO: 362961 - RNA, 19 nt, Homo sapiens
  misc_RNA (1)...(19): siRNA sense strand
gaagacagaccucuaucau

SEQ ID NO: 362962 - RNA, 19 nt, Homo sapiens
  misc_RNA (1)...(19): siRNA sense strand
uaaagauuguccagauaug

SEQ ID NO: 362963 - RNA, 19 nt, Homo sapiens
  misc_RNA (1)...(19): siRNA sense strand
gcaguaucaucucuauugu

SEQ ID NO: 362964 - RNA, 19 nt, Homo sapiens
  misc_RNA (1)...(19): siRNA sense strand
ccaaagaggaggaaagugu

SEQ ID NO: 362965 - RNA, 19 nt, Homo sapiens
  misc_RNA (1)...(19): siRNA sense strand
uaaguguccugugcuguaa

SEQ ID NO: 362966 - RNA, 19 nt, Homo sapiens
  misc_RNA (1)...(19): siRNA sense strand
ggaaaugaaggaguuaaga

SEQ ID NO: 362967 - RNA, 19 nt, Homo sapiens
  misc_RNA (1)...(19): siRNA sense strand
ggaguaugcaucagucuug

SEQ ID NO: 362968 - RNA, 19 nt, Homo sapiens
  misc_RNA (1)...(19): siRNA sense strand
gaguuaagaagaaguaaga

SEQ ID NO: 362969 - RNA, 19 nt, Homo sapiens
  misc_RNA (1)...(19): siRNA sense strand
ugaccauacuugagaaaug

SEQ ID NO: 362970 - RNA, 19 nt, Homo sapiens
  misc_RNA (1)...(19): siRNA sense strand
guaaggagcaccugacuac

SEQ ID NO: 362971 - RNA, 19 nt, Homo sapiens
  misc_RNA (1)...(19): siRNA sense strand
ccaaagaaagacacauuau

SEQ ID NO: 362972 - RNA, 19 nt, Homo sapiens
  misc_RNA (1)...(19): siRNA sense strand
ucagaaguccuuauuggaa

SEQ ID NO: 362973 - RNA, 19 nt, Homo sapiens
  misc_RNA (1)...(19): siRNA sense strand
gaucaugauuugacauucg

SEQ ID NO: 362974 - RNA, 19 nt, Homo sapiens
  misc_RNA (1)...(19): siRNA sense strand
acagaagacugaccaugug

SEQ ID NO: 362975 - RNA, 19 nt, Homo sapiens
  misc_RNA (1)...(19): siRNA sense strand
gaucagagaguuguacugu

SEQ ID NO: 362976 - RNA, 19 nt, Homo sapiens
  misc_RNA (1)...(19): siRNA sense strand
ccaaugagagauauuugaa

SEQ ID NO: 362977 - RNA, 19 nt, Homo sapiens
  misc_RNA (1)...(19): siRNA sense strand
caugauuucucaguucaaa

SEQ ID NO: 362978 - RNA, 19 nt, Homo sapiens
  misc_RNA (1)...(19): siRNA sense strand
uaucaugauuucucaguuc

SEQ ID NO: 362979 - RNA, 19 nt, Homo sapiens
  misc_RNA (1)...(19): siRNA sense strand
guacuacaagacuucauaa

SEQ ID NO: 362980 - RNA, 19 nt, Homo sapiens
  misc_RNA (1)...(19): siRNA sense strand
gaccauguggcaagacuaa

SEQ ID NO: 362981 - RNA, 19 nt, Homo sapiens
  misc_RNA (1)...(19): siRNA sense strand
caagaaugaagcacugaaa

SEQ ID NO: 362982 - RNA, 19 nt, Homo sapiens
  misc_RNA (1)...(19): siRNA sense strand
gagaugucuucauaaguuc

SEQ ID NO: 362983 - RNA, 19 nt, Homo sapiens
  misc_RNA (1)...(19): siRNA sense strand
caacaucuccaugaauuuc

SEQ ID NO: 362984 - RNA, 19 nt, Homo sapiens
  misc_RNA (1)...(19): siRNA sense strand
acucaacaauccuuacuau

SEQ ID NO: 362985 - RNA, 19 nt, Homo sapiens
  misc_RNA (1)...(19): siRNA sense strand
ccacaucuccuauuaucau

SEQ ID NO: 362986 - RNA, 19 nt, Homo sapiens
  misc_RNA (1)...(19): siRNA sense strand
gcgacuacaagaggaauua

SEQ ID NO: 362987 - RNA, 19 nt, Homo sapiens
  misc_RNA (1)...(19): siRNA sense strand
gcaaaggaugaacugauga

SEQ ID NO: 362988 - RNA, 19 nt, Homo sapiens
  misc_RNA (1)...(19): siRNA sense strand
gaugaaaucugaaaaugag

SEQ ID NO: 362989 - RNA, 19 nt, Homo sapiens
  misc_RNA (1)...(19): siRNA sense strand
aaguugaucucacaguuga

SEQ ID NO: 362990 - RNA, 19 nt, Homo sapiens
  misc_RNA (1)...(19): siRNA sense strand
caaauuugaaguacucaga

SEQ ID NO: 362991 - RNA, 19 nt, Homo sapiens
  misc_RNA (1)...(19): siRNA sense strand
uccaaucuuugucuuguaa

SEQ ID NO: 362992 - RNA, 19 nt, Homo sapiens
  misc_RNA (1)...(19): siRNA sense strand
caaagaggaggaaaguguu

SEQ ID NO: 362993 - RNA, 19 nt, Homo sapiens
  misc_RNA (1)...(19): siRNA sense strand
cagaagaauucaagagacu

SEQ ID NO: 362994 - RNA, 19 nt, Homo sapiens
  misc_RNA (1)...(19): siRNA sense strand
ugaaggaggaaacacaauu

SEQ ID NO: 362995 - RNA, 19 nt, Homo sapiens
  misc_RNA (1)...(19): siRNA sense strand
uaaugucacaccauaugua

SEQ ID NO: 362996 - RNA, 19 nt, Homo sapiens
  misc_RNA (1)...(19): siRNA sense strand
gaguguagcaggcucauca

SEQ ID NO: 362997 - RNA, 19 nt, Homo sapiens
  misc_RNA (1)...(19): siRNA sense strand
cuaagagaauagaggaguu

SEQ ID NO: 362998 - RNA, 19 nt, Homo sapiens
  misc_RNA (1)...(19): siRNA sense strand
ccacaaaaguacuacaaga

SEQ ID NO: 362999 - RNA, 19 nt, Homo sapiens
  misc_RNA (1)...(19): siRNA sense strand
gaauaaugucacaccauau

SEQ ID NO: 363000 - RNA, 19 nt, Homo sapiens
  misc_RNA (1)...(19): siRNA sense strand
ggacaguaagcuucgauuc

SEQ ID NO: 363001 - RNA, 19 nt, Homo sapiens
  misc_RNA (1)...(19): siRNA sense strand
gaagaaguaagaagcaaac

SEQ ID NO: 363002 - RNA, 19 nt, Homo sapiens
  misc_RNA (1)...(19): siRNA sense strand
uauuggaaaugaaggaguu

SEQ ID NO: 363003 - RNA, 19 nt, Homo sapiens
  misc_RNA (1)...(19): siRNA sense strand
gcacagcuaagagaauaga

SEQ ID NO: 363004 - RNA, 19 nt, Homo sapiens
  misc_RNA (1)...(19): siRNA sense strand
gaggaaacacaauuauuac

SEQ ID NO: 363005 - RNA, 19 nt, Homo sapiens
  misc_RNA (1)...(19): siRNA sense strand
guccugugcuguaaucuuc

SEQ ID NO: 363006 - RNA, 19 nt, Homo sapiens
  misc_RNA (1)...(19): siRNA sense strand
uaucaucucuauugugcau

SEQ ID NO: 363007 - RNA, 19 nt, Homo sapiens
  misc_RNA (1)...(19): siRNA sense strand
cuaaagauuguccagauau

SEQ ID NO: 363008 - RNA, 19 nt, Homo sapiens
  misc_RNA (1)...(19): siRNA sense strand
cuaccaaacagaagacuga

SEQ ID NO: 363009 - RNA, 19 nt, Homo sapiens
  misc_RNA (1)...(19): siRNA sense strand
uccaugaggugguguacuu

SEQ ID NO: 363010 - RNA, 19 nt, Homo sapiens
  misc_RNA (1)...(19): siRNA sense strand
guuuugagaugucuucaua

SEQ ID NO: 363011 - RNA, 19 nt, Homo sapiens
  misc_RNA (1)...(19): siRNA sense strand
cugcauguuuaucauauga

SEQ ID NO: 363012 - RNA, 19 nt, Homo sapiens
  misc_RNA (1)...(19): siRNA sense strand
gaaaacauccgacgucuac

SEQ ID NO: 363013 - RNA, 19 nt, Homo sapiens
  misc_RNA (1)...(19): siRNA sense strand
gaaugucacagaucaugau

SEQ ID NO: 363014 - RNA, 19 nt, Homo sapiens
  misc_RNA (1)...(19): siRNA sense strand
cccaaagaaagacacauua

SEQ ID NO: 363015 - RNA, 19 nt, Homo sapiens
  misc_RNA (1)...(19): siRNA sense strand
ccucagaagaaaugaauga

SEQ ID NO: 363016 - RNA, 19 nt, Homo sapiens
  misc_RNA (1)...(19): siRNA sense strand
cgaauugcccuccauacug

SEQ ID NO: 363017 - RNA, 19 nt, Homo sapiens
  misc_RNA (1)...(19): siRNA sense strand
augaaggaguuaagaagaa

SEQ ID NO: 363018 - RNA, 19 nt, Homo sapiens
  misc_RNA (1)...(19): siRNA sense strand
ucagaagacagaccucuau

SEQ ID NO: 363019 - RNA, 19 nt, Homo sapiens
  misc_RNA (1)...(19): siRNA sense strand
guaucaugauuucucaguu

SEQ ID NO: 363020 - RNA, 19 nt, Homo sapiens
  misc_RNA (1)...(19): siRNA sense strand
uauuacagguucugaccaa

SEQ ID NO: 363021 - RNA, 19 nt, Homo sapiens
  misc_RNA (1)...(19): siRNA sense strand
cugauugaauuucugcaaa

SEQ ID NO: 363022 - RNA, 19 nt, Homo sapiens
  misc_RNA (1)...(19): siRNA sense strand
acagaccucuaucaucuuc

SEQ ID NO: 363023 - RNA, 19 nt, Homo sapiens
  misc_RNA (1)...(19): siRNA sense strand
cuucauaaguucaccucuu

SEQ ID NO: 363024 - RNA, 19 nt, Homo sapiens
  misc_RNA (1)...(19): siRNA sense strand
augaauuacuuccugguuu

SEQ ID NO: 363025 - RNA, 19 nt, Homo sapiens
  misc_RNA (1)...(19): siRNA sense strand
uuaaguguccugugcugua

SEQ ID NO: 363026 - RNA, 19 nt, Homo sapiens
  misc_RNA (1)...(19): siRNA sense strand
caugcaguaucaucucuau

SEQ ID NO: 363027 - RNA, 19 nt, Homo sapiens
  misc_RNA (1)...(19): siRNA sense strand
aauuauccaugcucgguuu

SEQ ID NO: 363028 - RNA, 19 nt, Homo sapiens
  misc_RNA (1)...(19): siRNA sense strand
ggaggaaacacaauuauua

SEQ ID NO: 363029 - RNA, 19 nt, Homo sapiens
  misc_RNA (1)...(19): siRNA sense strand
ggacugcuguguagauaua

SEQ ID NO: 363030 - RNA, 19 nt, Homo sapiens
  misc_RNA (1)...(19): siRNA sense strand
gaaggaggaaacacaauua

SEQ ID NO: 363031 - RNA, 19 nt, Homo sapiens
  misc_RNA (1)...(19): siRNA sense strand
gcuaaagauuguccagaua

SEQ ID NO: 363032 - RNA, 19 nt, Homo sapiens
  misc_RNA (1)...(19): siRNA sense strand
ugagaugucuucauaaguu

SEQ ID NO: 363033 - RNA, 19 nt, Homo sapiens
  misc_RNA (1)...(19): siRNA sense strand
guaagaagcaaaccaaauu

SEQ ID NO: 363034 - RNA, 19 nt, Homo sapiens
  misc_RNA (1)...(19): siRNA sense strand
gaacuucauugacugucua

SEQ ID NO: 363035 - RNA, 19 nt, Homo sapiens
  misc_RNA (1)...(19): siRNA sense strand
guccagauaugaaacauuu

SEQ ID NO: 363036 - RNA, 19 nt, Homo sapiens
  misc_RNA (1)...(19): siRNA sense strand
aaagaucucucugccaaua

SEQ ID NO: 363037 - RNA, 19 nt, Homo sapiens
  misc_RNA (1)...(19): siRNA sense strand
gaacugaugaccauacuug

SEQ ID NO: 363038 - RNA, 19 nt, Homo sapiens
  misc_RNA (1)...(19): siRNA sense strand
cagcacagcuaagagaaua

SEQ ID NO: 363039 - RNA, 19 nt, Homo sapiens
  misc_RNA (1)...(19): siRNA sense strand
gaaaugaaggaguuaagaa

SEQ ID NO: 363040 - RNA, 19 nt, Homo sapiens
  misc_RNA (1)...(19): siRNA sense strand
ccucuucucuucccaagua

SEQ ID NO: 363041 - RNA, 19 nt, Homo sapiens
  misc_RNA (1)...(19): siRNA sense strand
ugacuacgguacucgauaa

SEQ ID NO: 363042 - RNA, 19 nt, Homo sapiens
  misc_RNA (1)...(19): siRNA sense strand
gucaacaucuccaugaauu

SEQ ID NO: 363043 - RNA, 19 nt, Homo sapiens
  misc_RNA (1)...(19): siRNA sense strand
agacagaccucuaucaucu

SEQ ID NO: 363044 - RNA, 19 nt, Homo sapiens
  misc_RNA (1)...(19): siRNA sense strand
gaaguaagaagcaaaccaa

SEQ ID NO: 363045 - RNA, 19 nt, Homo sapiens
  misc_RNA (1)...(19): siRNA sense strand
uauuagagcuguuucugaa

SEQ ID NO: 363046 - RNA, 19 nt, Homo sapiens
  misc_RNA (1)...(19): siRNA sense strand
ugucacagaucaugauuug

SEQ ID NO: 363047 - RNA, 19 nt, Homo sapiens
  misc_RNA (1)...(19): siRNA sense strand
cagaaguccuuauuggaaa

SEQ ID NO: 363048 - RNA, 19 nt, Homo sapiens
  misc_RNA (1)...(19): siRNA sense strand
ggcaaaggaugaacugaug

SEQ ID NO: 363049 - RNA, 19 nt, Homo sapiens
  misc_RNA (1)...(19): siRNA sense strand
gaaaagaacauaugggauu

SEQ ID NO: 363050 - RNA, 19 nt, Homo sapiens
  misc_RNA (1)...(19): siRNA sense strand
ugaaggauauggaaagcuu

SEQ ID NO: 363051 - RNA, 19 nt, Homo sapiens
  misc_RNA (1)...(19): siRNA sense strand
ucuaaggguugcuuuguuu

SEQ ID NO: 363052 - RNA, 19 nt, Homo sapiens
  misc_RNA (1)...(19): siRNA sense strand
gacuucagcuuucucuauu

SEQ ID NO: 363053 - RNA, 19 nt, Homo sapiens
  misc_RNA (1)...(19): siRNA sense strand
ggacuucagcuuucucuau

SEQ ID NO: 363054 - RNA, 19 nt, Homo sapiens
  misc_RNA (1)...(19): siRNA sense strand
ggaauagccacaucuccua

SEQ ID NO: 363055 - RNA, 19 nt, Homo sapiens
  misc_RNA (1)...(19): siRNA sense strand
gagaaaauguugugaacuu

SEQ ID NO: 363056 - RNA, 19 nt, Homo sapiens
  misc_RNA (1)...(19): siRNA sense strand
agacacagccucuccauga

SEQ ID NO: 363057 - RNA, 19 nt, Homo sapiens
  misc_RNA (1)...(19): siRNA sense strand
caccauauguagucucauu

SEQ ID NO: 363058 - RNA, 19 nt, Homo sapiens
  misc_RNA (1)...(19): siRNA sense strand
gaccauacuugagaaaugu

SEQ ID NO: 363059 - RNA, 19 nt, Homo sapiens
  misc_RNA (1)...(19): siRNA sense strand
gcagucaacaucuccauga

SEQ ID NO: 363060 - RNA, 19 nt, Homo sapiens
  misc_RNA (1)...(19): siRNA sense strand
cauacaaacugcaccuaga

SEQ ID NO: 363061 - RNA, 19 nt, Homo sapiens
  misc_RNA (1)...(19): siRNA sense strand
gaagacagaccucuaucau

SEQ ID NO: 363062 - RNA, 19 nt, Homo sapiens
  misc_RNA (1)...(19): siRNA sense strand
uaaagauuguccagauaug

SEQ ID NO: 363063 - RNA, 19 nt, Homo sapiens
  misc_RNA (1)...(19): siRNA sense strand
gcaguaucaucucuauugu

SEQ ID NO: 363064 - RNA, 19 nt, Homo sapiens
  misc_RNA (1)...(19): siRNA sense strand
ccaaagaggaggaaagugu

SEQ ID NO: 363065 - RNA, 19 nt, Homo sapiens
  misc_RNA (1)...(19): siRNA sense strand
uaaguguccugugcuguaa

SEQ ID NO: 363066 - RNA, 19 nt, Homo sapiens
  misc_RNA (1)...(19): siRNA sense strand
ggaaaugaaggaguuaaga

SEQ ID NO: 363067 - RNA, 19 nt, Homo sapiens
  misc_RNA (1)...(19): siRNA sense strand
ggaguaugcaucagucuug

SEQ ID NO: 363068 - RNA, 19 nt, Homo sapiens
  misc_RNA (1)...(19): siRNA sense strand
gaguuaagaagaaguaaga

SEQ ID NO: 363069 - RNA, 19 nt, Homo sapiens
  misc_RNA (1)...(19): siRNA sense strand
ugaccauacuugagaaaug

SEQ ID NO: 363070 - RNA, 19 nt, Homo sapiens
  misc_RNA (1)...(19): siRNA sense strand
guaaggagcaccugacuac

SEQ ID NO: 363071 - RNA, 19 nt, Homo sapiens
  misc_RNA (1)...(19): siRNA sense strand
ccaaagaaagacacauuau

SEQ ID NO: 363072 - RNA, 19 nt, Homo sapiens
  misc_RNA (1)...(19): siRNA sense strand
ucagaaguccuuauuggaa

SEQ ID NO: 363073 - RNA, 19 nt, Homo sapiens
  misc_RNA (1)...(19): siRNA sense strand
gaucaugauuugacauucg

SEQ ID NO: 363074 - RNA, 19 nt, Homo sapiens
  misc_RNA (1)...(19): siRNA sense strand
acagaagacugaccaugug

SEQ ID NO: 363075 - RNA, 19 nt, Homo sapiens
  misc_RNA (1)...(19): siRNA sense strand
gaucagagaguuguacugu

SEQ ID NO: 363076 - RNA, 19 nt, Homo sapiens
  misc_RNA (1)...(19): siRNA sense strand
ccaaugagagauauuugaa

SEQ ID NO: 363077 - RNA, 19 nt, Homo sapiens
  misc_RNA (1)...(19): siRNA sense strand
caugauuucucaguucaaa

SEQ ID NO: 363078 - RNA, 19 nt, Homo sapiens
  misc_RNA (1)...(19): siRNA sense strand
uaucaugauuucucaguuc

SEQ ID NO: 363079 - RNA, 19 nt, Homo sapiens
  misc_RNA (1)...(19): siRNA sense strand
guacuacaagacuucauaa

SEQ ID NO: 363080 - RNA, 19 nt, Homo sapiens
  misc_RNA (1)...(19): siRNA sense strand
gaccauguggcaagacuaa

SEQ ID NO: 363081 - RNA, 19 nt, Homo sapiens
  misc_RNA (1)...(19): siRNA sense strand
caagaaugaagcacugaaa

SEQ ID NO: 363082 - RNA, 19 nt, Homo sapiens
  misc_RNA (1)...(19): siRNA sense strand
gagaugucuucauaaguuc

SEQ ID NO: 363083 - RNA, 19 nt, Homo sapiens
  misc_RNA (1)...(19): siRNA sense strand
caacaucuccaugaauuuc

SEQ ID NO: 363084 - RNA, 19 nt, Homo sapiens
  misc_RNA (1)...(19): siRNA sense strand
acucaacaauccuuacuau

SEQ ID NO: 363085 - RNA, 19 nt, Homo sapiens
  misc_RNA (1)...(19): siRNA sense strand
ccacaucuccuauuaucau

SEQ ID NO: 363086 - RNA, 19 nt, Homo sapiens
  misc_RNA (1)...(19): siRNA sense strand
gcgacuacaagaggaauua

SEQ ID NO: 363087 - RNA, 19 nt, Homo sapiens
  misc_RNA (1)...(19): siRNA sense strand
gcaaaggaugaacugauga

SEQ ID NO: 363088 - RNA, 19 nt, Homo sapiens
  misc_RNA (1)...(19): siRNA sense strand
gaugaaaucugaaaaugag

SEQ ID NO: 363089 - RNA, 19 nt, Homo sapiens
  misc_RNA (1)...(19): siRNA sense strand
aaguugaucucacaguuga

SEQ ID NO: 363090 - RNA, 19 nt, Homo sapiens
  misc_RNA (1)...(19): siRNA sense strand
caaauuugaaguacucaga

SEQ ID NO: 363091 - RNA, 19 nt, Homo sapiens
  misc_RNA (1)...(19): siRNA sense strand
uccaaucuuugucuuguaa

SEQ ID NO: 363092 - RNA, 19 nt, Homo sapiens
  misc_RNA (1)...(19): siRNA sense strand
caaagaggaggaaaguguu

SEQ ID NO: 363093 - RNA, 19 nt, Homo sapiens
  misc_RNA (1)...(19): siRNA sense strand
cagaagaauucaagagacu

SEQ ID NO: 363094 - RNA, 19 nt, Homo sapiens
  misc_RNA (1)...(19): siRNA sense strand
ugaaggaggaaacacaauu

SEQ ID NO: 363095 - RNA, 19 nt, Homo sapiens
  misc_RNA (1)...(19): siRNA sense strand
uaaugucacaccauaugua

SEQ ID NO: 363096 - RNA, 19 nt, Homo sapiens
  misc_RNA (1)...(19): siRNA sense strand
gaguguagcaggcucauca

SEQ ID NO: 363097 - RNA, 19 nt, Homo sapiens
  misc_RNA (1)...(19): siRNA sense strand
cuaagagaauagaggaguu

SEQ ID NO: 363098 - RNA, 19 nt, Homo sapiens
  misc_RNA (1)...(19): siRNA sense strand
ccacaaaaguacuacaaga

SEQ ID NO: 363099 - RNA, 19 nt, Homo sapiens
  misc_RNA (1)...(19): siRNA sense strand
gaauaaugucacaccauau

SEQ ID NO: 363100 - RNA, 19 nt, Homo sapiens
  misc_RNA (1)...(19): siRNA sense strand
ggacaguaagcuucgauuc

SEQ ID NO: 363101 - RNA, 19 nt, Homo sapiens
  misc_RNA (1)...(19): siRNA sense strand
gaagaaguaagaagcaaac

SEQ ID NO: 363102 - RNA, 19 nt, Homo sapiens
  misc_RNA (1)...(19): siRNA sense strand
uauuggaaaugaaggaguu

SEQ ID NO: 363103 - RNA, 19 nt, Homo sapiens
  misc_RNA (1)...(19): siRNA sense strand
gcacagcuaagagaauaga

SEQ ID NO: 363104 - RNA, 19 nt, Homo sapiens
  misc_RNA (1)...(19): siRNA sense strand
gaggaaacacaauuauuac

SEQ ID NO: 363105 - RNA, 19 nt, Homo sapiens
  misc_RNA (1)...(19): siRNA sense strand
guccugugcuguaaucuuc

SEQ ID NO: 363106 - RNA, 19 nt, Homo sapiens
  misc_RNA (1)...(19): siRNA sense strand
uaucaucucuauugugcau

SEQ ID NO: 363107 - RNA, 19 nt, Homo sapiens
  misc_RNA (1)...(19): siRNA sense strand
cuaaagauuguccagauau

SEQ ID NO: 363108 - RNA, 19 nt, Homo sapiens
  misc_RNA (1)...(19): siRNA sense strand
cuaccaaacagaagacuga

SEQ ID NO: 363109 - RNA, 19 nt, Homo sapiens
  misc_RNA (1)...(19): siRNA sense strand
uccaugaggugguguacuu

SEQ ID NO: 363110 - RNA, 19 nt, Homo sapiens
  misc_RNA (1)...(19): siRNA sense strand
guuuugagaugucuucaua

SEQ ID NO: 363111 - RNA, 19 nt, Homo sapiens
  misc_RNA (1)...(19): siRNA sense strand
cugcauguuuaucauauga

SEQ ID NO: 363112 - RNA, 19 nt, Homo sapiens
  misc_RNA (1)...(19): siRNA sense strand
gaaaacauccgacgucuac

SEQ ID NO: 363113 - RNA, 19 nt, Homo sapiens
  misc_RNA (1)...(19): siRNA sense strand
gaaugucacagaucaugau

SEQ ID NO: 363114 - RNA, 19 nt, Homo sapiens
  misc_RNA (1)...(19): siRNA sense strand
cccaaagaaagacacauua

SEQ ID NO: 363115 - RNA, 19 nt, Homo sapiens
  misc_RNA (1)...(19): siRNA sense strand
ccucagaagaaaugaauga

SEQ ID NO: 363116 - RNA, 19 nt, Homo sapiens
  misc_RNA (1)...(19): siRNA sense strand
cgaauugcccuccauacug

SEQ ID NO: 363117 - RNA, 19 nt, Homo sapiens
  misc_RNA (1)...(19): siRNA sense strand
augaaggaguuaagaagaa

SEQ ID NO: 363118 - RNA, 19 nt, Homo sapiens
  misc_RNA (1)...(19): siRNA sense strand
ucagaagacagaccucuau

SEQ ID NO: 363119 - RNA, 19 nt, Homo sapiens
  misc_RNA (1)...(19): siRNA sense strand
guaucaugauuucucaguu

SEQ ID NO: 363120 - RNA, 19 nt, Homo sapiens
  misc_RNA (1)...(19): siRNA sense strand
uauuacagguucugaccaa

SEQ ID NO: 363121 - RNA, 19 nt, Homo sapiens
  misc_RNA (1)...(19): siRNA sense strand
cugauugaauuucugcaaa

SEQ ID NO: 363122 - RNA, 19 nt, Homo sapiens
  misc_RNA (1)...(19): siRNA sense strand
acagaccucuaucaucuuc

SEQ ID NO: 363123 - RNA, 19 nt, Homo sapiens
  misc_RNA (1)...(19): siRNA sense strand
cuucauaaguucaccucuu

SEQ ID NO: 363124 - RNA, 19 nt, Homo sapiens
  misc_RNA (1)...(19): siRNA sense strand
augaauuacuuccugguuu

SEQ ID NO: 363125 - RNA, 19 nt, Homo sapiens
  misc_RNA (1)...(19): siRNA sense strand
uuaaguguccugugcugua

SEQ ID NO: 363126 - RNA, 19 nt, Homo sapiens
  misc_RNA (1)...(19): siRNA sense strand
caugcaguaucaucucuau

SEQ ID NO: 363127 - RNA, 19 nt, Homo sapiens
  misc_RNA (1)...(19): siRNA sense strand
aauuauccaugcucgguuu

SEQ ID NO: 363128 - RNA, 19 nt, Homo sapiens
  misc_RNA (1)...(19): siRNA sense strand
guaaacagcugaaggauga

SEQ ID NO: 363129 - RNA, 19 nt, Homo sapiens
  misc_RNA (1)...(19): siRNA sense strand
ggaugaagcacuacaguua

SEQ ID NO: 363130 - RNA, 19 nt, Homo sapiens
  misc_RNA (1)...(19): siRNA sense strand
gaagacaguuucagcaaau

SEQ ID NO: 363131 - RNA, 19 nt, Homo sapiens
  misc_RNA (1)...(19): siRNA sense strand
gcuaaugucucuucaugaa

SEQ ID NO: 363132 - RNA, 19 nt, Homo sapiens
  misc_RNA (1)...(19): siRNA sense strand
caaaugaugcuacccuaua

SEQ ID NO: 363133 - RNA, 19 nt, Homo sapiens
  misc_RNA (1)...(19): siRNA sense strand
gcacuacaguuaacuccaa

SEQ ID NO: 363134 - RNA, 19 nt, Homo sapiens
  misc_RNA (1)...(19): siRNA sense strand
gaaauggccguccagcaaa

SEQ ID NO: 363135 - RNA, 19 nt, Homo sapiens
  misc_RNA (1)...(19): siRNA sense strand
ccaaugaacccugaaauau

SEQ ID NO: 363136 - RNA, 19 nt, Homo sapiens
  misc_RNA (1)...(19): siRNA sense strand
gaagguagcacagaggauu

SEQ ID NO: 363137 - RNA, 19 nt, Homo sapiens
  misc_RNA (1)...(19): siRNA sense strand
gagauaauccuggcaauuc

SEQ ID NO: 363138 - RNA, 19 nt, Homo sapiens
  misc_RNA (1)...(19): siRNA sense strand
ccauagagacuguaacuga

SEQ ID NO: 363139 - RNA, 19 nt, Homo sapiens
  misc_RNA (1)...(19): siRNA sense strand
cauagagacuguaacugaa

SEQ ID NO: 363140 - RNA, 19 nt, Homo sapiens
  misc_RNA (1)...(19): siRNA sense strand
ugaaggcugugcugagaaa

SEQ ID NO: 363141 - RNA, 19 nt, Homo sapiens
  misc_RNA (1)...(19): siRNA sense strand
cuucacaucuauccaauga

SEQ ID NO: 363142 - RNA, 19 nt, Homo sapiens
  misc_RNA (1)...(19): siRNA sense strand
gaugaagcacuacaguuaa

SEQ ID NO: 363143 - RNA, 19 nt, Homo sapiens
  misc_RNA (1)...(19): siRNA sense strand
gugcuaaugucucuucaug

SEQ ID NO: 363144 - RNA, 19 nt, Homo sapiens
  misc_RNA (1)...(19): siRNA sense strand
acaguuaacuccaaaugau

SEQ ID NO: 363145 - RNA, 19 nt, Homo sapiens
  misc_RNA (1)...(19): siRNA sense strand
caacuugguuuaggagaga

SEQ ID NO: 363146 - RNA, 19 nt, Homo sapiens
  misc_RNA (1)...(19): siRNA sense strand
ucaaguagcccuucacauc

SEQ ID NO: 363147 - RNA, 19 nt, Homo sapiens
  misc_RNA (1)...(19): siRNA sense strand
caaugaacccugaaauaug

SEQ ID NO: 363148 - RNA, 19 nt, Homo sapiens
  misc_RNA (1)...(19): siRNA sense strand
gggaggcaauucagaagug

SEQ ID NO: 363149 - RNA, 19 nt, Homo sapiens
  misc_RNA (1)...(19): siRNA sense strand
agaagacaguuucagcaaa

SEQ ID NO: 363150 - RNA, 19 nt, Homo sapiens
  misc_RNA (1)...(19): siRNA sense strand
gagaaagagaagacaguuu

SEQ ID NO: 363151 - RNA, 19 nt, Homo sapiens
  misc_RNA (1)...(19): siRNA sense strand
uauacgagaugaaaucaca

SEQ ID NO: 363152 - RNA, 19 nt, Homo sapiens
  misc_RNA (1)...(19): siRNA sense strand
gagaagacaguuucagcaa

SEQ ID NO: 363153 - RNA, 19 nt, Homo sapiens
  misc_RNA (1)...(19): siRNA sense strand
ugaagcaccagcugaagua

SEQ ID NO: 363154 - RNA, 19 nt, Homo sapiens
  misc_RNA (1)...(19): siRNA sense strand
ugaaagugaugagauuguu

SEQ ID NO: 363155 - RNA, 19 nt, Homo sapiens
  misc_RNA (1)...(19): siRNA sense strand
gaugaaaucacaggugcua

SEQ ID NO: 363156 - RNA, 19 nt, Homo sapiens
  misc_RNA (1)...(19): siRNA sense strand
aaugaacccugaaauaugg

SEQ ID NO: 363157 - RNA, 19 nt, Homo sapiens
  misc_RNA (1)...(19): siRNA sense strand
gaaaucacaggugcuaaug

SEQ ID NO: 363158 - RNA, 19 nt, Homo sapiens
  misc_RNA (1)...(19): siRNA sense strand
ucacaucuauccaaugaac

SEQ ID NO: 363159 - RNA, 19 nt, Homo sapiens
  misc_RNA (1)...(19): siRNA sense strand
gaaagugaugagauuguug

SEQ ID NO: 363160 - RNA, 19 nt, Homo sapiens
  misc_RNA (1)...(19): siRNA sense strand
ccugaaauauggaaagaag

SEQ ID NO: 363161 - RNA, 19 nt, Homo sapiens
  misc_RNA (1)...(19): siRNA sense strand
agaaggauguaguugacaa

SEQ ID NO: 363162 - RNA, 19 nt, Homo sapiens
  misc_RNA (1)...(19): siRNA sense strand
agaaauggccguccagcaa

SEQ ID NO: 363163 - RNA, 19 nt, Homo sapiens
  misc_RNA (1)...(19): siRNA sense strand
ugaaauguucccagcagua

SEQ ID NO: 363164 - RNA, 19 nt, Homo sapiens
  misc_RNA (1)...(19): siRNA sense strand
aaaguaaacagcugaagga

SEQ ID NO: 363165 - RNA, 19 nt, Homo sapiens
  misc_RNA (1)...(19): siRNA sense strand
gagagauaauccuggcaau

SEQ ID NO: 363166 - RNA, 19 nt, Homo sapiens
  misc_RNA (1)...(19): siRNA sense strand
ggaugaaggagccaguuug

SEQ ID NO: 363167 - RNA, 19 nt, Homo sapiens
  misc_RNA (1)...(19): siRNA sense strand
aaguagcccuucacaucua

SEQ ID NO: 363168 - RNA, 19 nt, Homo sapiens
  misc_RNA (1)...(19): siRNA sense strand
gaugagauuguugcuguuu

SEQ ID NO: 363169 - RNA, 19 nt, Homo sapiens
  misc_RNA (1)...(19): siRNA sense strand
aaucacaggugcuaauguc

SEQ ID NO: 363170 - RNA, 19 nt, Homo sapiens
  misc_RNA (1)...(19): siRNA sense strand
ugagauuguugcuguuugu

SEQ ID NO: 363171 - RNA, 19 nt, Homo sapiens
  misc_RNA (1)...(19): siRNA sense strand
ucacuucccagcaguuuga

SEQ ID NO: 363172 - RNA, 19 nt, Homo sapiens
  misc_RNA (1)...(19): siRNA sense strand
uccaaugaacccugaaaua

SEQ ID NO: 363173 - RNA, 19 nt, Homo sapiens
  misc_RNA (1)...(19): siRNA sense strand
cauuaaacguaggaaagaa

SEQ ID NO: 363174 - RNA, 19 nt, Homo sapiens
  misc_RNA (1)...(19): siRNA sense strand
aaagauaucgggaggcaau

SEQ ID NO: 363175 - RNA, 19 nt, Homo sapiens
  misc_RNA (1)...(19): siRNA sense strand
ugagaaggauguaguugac

SEQ ID NO: 363176 - RNA, 19 nt, Homo sapiens
  misc_RNA (1)...(19): siRNA sense strand
aaaggaggauggugcuaca

SEQ ID NO: 363177 - RNA, 19 nt, Homo sapiens
  misc_RNA (1)...(19): siRNA sense strand
gacaguuucagcaaauaaa

SEQ ID NO: 363178 - RNA, 19 nt, Homo sapiens
  misc_RNA (1)...(19): siRNA sense strand
ugaagcugcugaugagaag

SEQ ID NO: 363179 - RNA, 19 nt, Homo sapiens
  misc_RNA (1)...(19): siRNA sense strand
caaguagcccuucacaucu

SEQ ID NO: 363180 - RNA, 19 nt, Homo sapiens
  misc_RNA (1)...(19): siRNA sense strand
uaacacacuuuucaccaaa

SEQ ID NO: 363181 - RNA, 19 nt, Homo sapiens
  misc_RNA (1)...(19): siRNA sense strand
ugaaaucacaggugcuaau

SEQ ID NO: 363182 - RNA, 19 nt, Homo sapiens
  misc_RNA (1)...(19): siRNA sense strand
cuucaugccauuaaacgua

SEQ ID NO: 363183 - RNA, 19 nt, Homo sapiens
  misc_RNA (1)...(19): siRNA sense strand
gaaauguucccagcaguac

SEQ ID NO: 363184 - RNA, 19 nt, Homo sapiens
  misc_RNA (1)...(19): siRNA sense strand
gggaugaagcacuacaguu

SEQ ID NO: 363185 - RNA, 19 nt, Homo sapiens
  misc_RNA (1)...(19): siRNA sense strand
gaagcaccagcugaaguaa

SEQ ID NO: 363186 - RNA, 19 nt, Homo sapiens
  misc_RNA (1)...(19): siRNA sense strand
caguuuggcugaaaauaaa

SEQ ID NO: 363187 - RNA, 19 nt, Homo sapiens
  misc_RNA (1)...(19): siRNA sense strand
aaacguaggaaagaaauuc

SEQ ID NO: 363188 - RNA, 19 nt, Homo sapiens
  misc_RNA (1)...(19): siRNA sense strand
aaaugaugcuacccuauac

SEQ ID NO: 363189 - RNA, 19 nt, Homo sapiens
  misc_RNA (1)...(19): siRNA sense strand
aagacaguuucagcaaaua

SEQ ID NO: 363190 - RNA, 19 nt, Homo sapiens
  misc_RNA (1)...(19): siRNA sense strand
ccauuaaacguaggaaaga

SEQ ID NO: 363191 - RNA, 19 nt, Homo sapiens
  misc_RNA (1)...(19): siRNA sense strand
cuugaaggcugugcugaga

SEQ ID NO: 363192 - RNA, 19 nt, Homo sapiens
  misc_RNA (1)...(19): siRNA sense strand
guaacacacuuuucaccaa

SEQ ID NO: 363193 - RNA, 19 nt, Homo sapiens
  misc_RNA (1)...(19): siRNA sense strand
gaugaaggagccaguuugg

SEQ ID NO: 363194 - RNA, 19 nt, Homo sapiens
  misc_RNA (1)...(19): siRNA sense strand
agacaguuucagcaaauaa

SEQ ID NO: 363195 - RNA, 19 nt, Homo sapiens
  misc_RNA (1)...(19): siRNA sense strand
gaugagaaggauguaguug

SEQ ID NO: 363196 - RNA, 19 nt, Homo sapiens
  misc_RNA (1)...(19): siRNA sense strand
ggacgugcucaacuugguu

SEQ ID NO: 363197 - RNA, 19 nt, Homo sapiens
  misc_RNA (1)...(19): siRNA sense strand
gauaucgggaggcaauuca

SEQ ID NO: 363198 - RNA, 19 nt, Homo sapiens
  misc_RNA (1)...(19): siRNA sense strand
ccaaaugaugcuacccuau

SEQ ID NO: 363199 - RNA, 19 nt, Homo sapiens
  misc_RNA (1)...(19): siRNA sense strand
gggacgugcucaacuuggu

SEQ ID NO: 363200 - RNA, 19 nt, Homo sapiens
  misc_RNA (1)...(19): siRNA sense strand
gccauuaaacguaggaaag

SEQ ID NO: 363201 - RNA, 19 nt, Homo sapiens
  misc_RNA (1)...(19): siRNA sense strand
uccagacuaugacuuugaa

SEQ ID NO: 363202 - RNA, 19 nt, Homo sapiens
  misc_RNA (1)...(19): siRNA sense strand
ggucacuucccagcaguuu

SEQ ID NO: 363203 - RNA, 19 nt, Homo sapiens
  misc_RNA (1)...(19): siRNA sense strand
agcaguacaugcagcagaa

SEQ ID NO: 363204 - RNA, 19 nt, Homo sapiens
  misc_RNA (1)...(19): siRNA sense strand
cuacaguuaacuccaaaug

SEQ ID NO: 363205 - RNA, 19 nt, Homo sapiens
  misc_RNA (1)...(19): siRNA sense strand
gaggaaaauuggugagaag

SEQ ID NO: 363206 - RNA, 19 nt, Homo sapiens
  misc_RNA (1)...(19): siRNA sense strand
gaacccugaaauauggaaa

SEQ ID NO: 363207 - RNA, 19 nt, Homo sapiens
  misc_RNA (1)...(19): siRNA sense strand
caauucagaagugggauga

SEQ ID NO: 363208 - RNA, 19 nt, Homo sapiens
  misc_RNA (1)...(19): siRNA sense strand
ccacauucaugggagucuu

SEQ ID NO: 363209 - RNA, 19 nt, Homo sapiens
  misc_RNA (1)...(19): siRNA sense strand
guacaugcagcagaaaugg

SEQ ID NO: 363210 - RNA, 19 nt, Homo sapiens
  misc_RNA (1)...(19): siRNA sense strand
cacuacaguuaacuccaaa

SEQ ID NO: 363211 - RNA, 19 nt, Homo sapiens
  misc_RNA (1)...(19): siRNA sense strand
ugagaaagagaagacaguu

SEQ ID NO: 363212 - RNA, 19 nt, Homo sapiens
  misc_RNA (1)...(19): siRNA sense strand
agcaccagcugaaguaaca

SEQ ID NO: 363213 - RNA, 19 nt, Homo sapiens
  misc_RNA (1)...(19): siRNA sense strand
aagguagcacagaggauua

SEQ ID NO: 363214 - RNA, 19 nt, Homo sapiens
  misc_RNA (1)...(19): siRNA sense strand
gauaauccuggcaauucga

SEQ ID NO: 363215 - RNA, 19 nt, Homo sapiens
  misc_RNA (1)...(19): siRNA sense strand
agagauaauccuggcaauu

SEQ ID NO: 363216 - RNA, 19 nt, Homo sapiens
  misc_RNA (1)...(19): siRNA sense strand
gacgugcucaacuugguuu

SEQ ID NO: 363217 - RNA, 19 nt, Homo sapiens
  misc_RNA (1)...(19): siRNA sense strand
cacaggugcuaaugucucu

SEQ ID NO: 363218 - RNA, 19 nt, Homo sapiens
  misc_RNA (1)...(19): siRNA sense strand
auagagacuguaacugaaa

SEQ ID NO: 363219 - RNA, 19 nt, Homo sapiens
  misc_RNA (1)...(19): siRNA sense strand
ccaguuuggcugaaaauaa

SEQ ID NO: 363220 - RNA, 19 nt, Homo sapiens
  misc_RNA (1)...(19): siRNA sense strand
ugaaauauggaaagaagac

SEQ ID NO: 363221 - RNA, 19 nt, Homo sapiens
  misc_RNA (1)...(19): siRNA sense strand
gugcucaacuugguuuagg

SEQ ID NO: 363222 - RNA, 19 nt, Homo sapiens
  misc_RNA (1)...(19): siRNA sense strand
uacaguuaacuccaaauga

SEQ ID NO: 363223 - RNA, 19 nt, Homo sapiens
  misc_RNA (1)...(19): siRNA sense strand
ugaugagauuguugcuguu

SEQ ID NO: 363224 - RNA, 19 nt, Homo sapiens
  misc_RNA (1)...(19): siRNA sense strand
gaagcacuacaguuaacuc

SEQ ID NO: 363225 - RNA, 19 nt, Homo sapiens
  misc_RNA (1)...(19): siRNA sense strand
cagcagaagguagcacaga

SEQ ID NO: 363226 - RNA, 19 nt, Homo sapiens
  misc_RNA (1)...(19): siRNA sense strand
uuugggacgugcucaacuu

SEQ ID NO: 363227 - RNA, 19 nt, Homo sapiens
  misc_RNA (1)...(19): siRNA sense strand
cuaaugucucuucaugaaa

SEQ ID NO: 363228 - RNA, 19 nt, Homo sapiens
  misc_RNA (1)...(19): siRNA sense strand
ccaaggagcugaagcacaa

SEQ ID NO: 363229 - RNA, 19 nt, Homo sapiens
  misc_RNA (1)...(19): siRNA sense strand
cauuggagaugacacauuu

SEQ ID NO: 363230 - RNA, 19 nt, Homo sapiens
  misc_RNA (1)...(19): siRNA sense strand
gcucaaggaagccguguua

SEQ ID NO: 363231 - RNA, 19 nt, Homo sapiens
  misc_RNA (1)...(19): siRNA sense strand
gacaaggucugcuccaaca

SEQ ID NO: 363232 - RNA, 19 nt, Homo sapiens
  misc_RNA (1)...(19): siRNA sense strand
gaaccuggaagcugagauu

SEQ ID NO: 363233 - RNA, 19 nt, Homo sapiens
  misc_RNA (1)...(19): siRNA sense strand
gcaucaaugugaaaugugu

SEQ ID NO: 363234 - RNA, 19 nt, Homo sapiens
  misc_RNA (1)...(19): siRNA sense strand
guaaucagcccaaaggaau

SEQ ID NO: 363235 - RNA, 19 nt, Homo sapiens
  misc_RNA (1)...(19): siRNA sense strand
ucaacaacaucgugcagaa

SEQ ID NO: 363236 - RNA, 19 nt, Homo sapiens
  misc_RNA (1)...(19): siRNA sense strand
aagauaacauggagacaga

SEQ ID NO: 363237 - RNA, 19 nt, Homo sapiens
  misc_RNA (1)...(19): siRNA sense strand
caaggaagccguguuagug

SEQ ID NO: 363238 - RNA, 19 nt, Homo sapiens
  misc_RNA (1)...(19): siRNA sense strand
gaugacacauuuaccuucu

SEQ ID NO: 363239 - RNA, 19 nt, Homo sapiens
  misc_RNA (1)...(19): siRNA sense strand
ggaaguccacccugaagga

SEQ ID NO: 363240 - RNA, 19 nt, Homo sapiens
  misc_RNA (1)...(19): siRNA sense strand
gauaacauggagacagaaa

SEQ ID NO: 363241 - RNA, 19 nt, Homo sapiens
  misc_RNA (1)...(19): siRNA sense strand
uagugaagauggcugaaga

SEQ ID NO: 363242 - RNA, 19 nt, Homo sapiens
  misc_RNA (1)...(19): siRNA sense strand
gcuucgagaugcuguacuu

SEQ ID NO: 363243 - RNA, 19 nt, Homo sapiens
  misc_RNA (1)...(19): siRNA sense strand
cagcagagccaaccucauc

SEQ ID NO: 363244 - RNA, 19 nt, Homo sapiens
  misc_RNA (1)...(19): siRNA sense strand
guacgacgagcauguaauc

SEQ ID NO: 363245 - RNA, 19 nt, Homo sapiens
  misc_RNA (1)...(19): siRNA sense strand
gagaugacacauuuaccuu

SEQ ID NO: 363246 - RNA, 19 nt, Homo sapiens
  misc_RNA (1)...(19): siRNA sense strand
gagcacacggccaccauug

SEQ ID NO: 363247 - RNA, 19 nt, Homo sapiens
  misc_RNA (1)...(19): siRNA sense strand
gaagccguguuagugaaga

SEQ ID NO: 363248 - RNA, 19 nt, Homo sapiens
  misc_RNA (1)...(19): siRNA sense strand
guagcacgguguucaaggu

SEQ ID NO: 363249 - RNA, 19 nt, Homo sapiens
  misc_RNA (1)...(19): siRNA sense strand
cggcaucaaugugaaaugu

SEQ ID NO: 363250 - RNA, 19 nt, Homo sapiens
  misc_RNA (1)...(19): siRNA sense strand
cacaaagauugaccucuca

SEQ ID NO: 363251 - RNA, 19 nt, Homo sapiens
  misc_RNA (1)...(19): siRNA sense strand
ccuggaagcugagauugug

SEQ ID NO: 363252 - RNA, 19 nt, Homo sapiens
  misc_RNA (1)...(19): siRNA sense strand
cgacgugagugugcacaug

SEQ ID NO: 363253 - RNA, 19 nt, Homo sapiens
  misc_RNA (1)...(19): siRNA sense strand
uggaggagguggugguugu

SEQ ID NO: 363254 - RNA, 19 nt, Homo sapiens
  misc_RNA (1)...(19): siRNA sense strand
gcacacggccaccauugag

SEQ ID NO: 363255 - RNA, 19 nt, Homo sapiens
  misc_RNA (1)...(19): siRNA sense strand
ccauagagaccugugaaga

SEQ ID NO: 363256 - RNA, 19 nt, Homo sapiens
  misc_RNA (1)...(19): siRNA sense strand
gcagcagugugaugagcau

SEQ ID NO: 363257 - RNA, 19 nt, Homo sapiens
  misc_RNA (1)...(19): siRNA sense strand
ggagaugacacauuuaccu

SEQ ID NO: 363258 - RNA, 19 nt, Homo sapiens
  misc_RNA (1)...(19): siRNA sense strand
caacaucgugcagaacuuc

SEQ ID NO: 363259 - RNA, 19 nt, Homo sapiens
  misc_RNA (1)...(19): siRNA sense strand
ucaaggaagccguguuagu

SEQ ID NO: 363260 - RNA, 19 nt, Homo sapiens
  misc_RNA (1)...(19): siRNA sense strand
ugacggaagauaacaugga

SEQ ID NO: 363261 - RNA, 19 nt, Homo sapiens
  misc_RNA (1)...(19): siRNA sense strand
ggagcacacggccaccauu

SEQ ID NO: 363262 - RNA, 19 nt, Homo sapiens
  misc_RNA (1)...(19): siRNA sense strand
gcuugcacgugccacauca

SEQ ID NO: 363263 - RNA, 19 nt, Homo sapiens
  misc_RNA (1)...(19): siRNA sense strand
gagccaaggagcugaagca

SEQ ID NO: 363264 - RNA, 19 nt, Homo sapiens
  misc_RNA (1)...(19): siRNA sense strand
ugcuggaccuggugaagaa

SEQ ID NO: 363265 - RNA, 19 nt, Homo sapiens
  misc_RNA (1)...(19): siRNA sense strand
ucaguacgacgagcaugua

SEQ ID NO: 363266 - RNA, 19 nt, Homo sapiens
  misc_RNA (1)...(19): siRNA sense strand
acacagucuuggccucuuc

SEQ ID NO: 363267 - RNA, 19 nt, Homo sapiens
  misc_RNA (1)...(19): siRNA sense strand
aggaagccguguuagugaa

SEQ ID NO: 363268 - RNA, 19 nt, Homo sapiens
  misc_RNA (1)...(19): siRNA sense strand
agagagccauccgcaugaa

SEQ ID NO: 363269 - RNA, 19 nt, Homo sapiens
  misc_RNA (1)...(19): siRNA sense strand
ccacgucggccgaguacau

SEQ ID NO: 363270 - RNA, 19 nt, Homo sapiens
  misc_RNA (1)...(19): siRNA sense strand
aaucagcccaaaggaauuu

SEQ ID NO: 363271 - RNA, 19 nt, Homo sapiens
  misc_RNA (1)...(19): siRNA sense strand
aaggaagccguguuaguga

SEQ ID NO: 363272 - RNA, 19 nt, Homo sapiens
  misc_RNA (1)...(19): siRNA sense strand
uguaaucagcccaaaggaa

SEQ ID NO: 363273 - RNA, 19 nt, Homo sapiens
  misc_RNA (1)...(19): siRNA sense strand
gcgaccaucaccauagaga

SEQ ID NO: 363274 - RNA, 19 nt, Homo sapiens
  misc_RNA (1)...(19): siRNA sense strand
cugcgaccaucaccauaga

SEQ ID NO: 363275 - RNA, 19 nt, Homo sapiens
  misc_RNA (1)...(19): siRNA sense strand
uaaucagcccaaaggaauu

SEQ ID NO: 363276 - RNA, 19 nt, Homo sapiens
  misc_RNA (1)...(19): siRNA sense strand
acaacaucgugcagaacuu

SEQ ID NO: 363277 - RNA, 19 nt, Homo sapiens
  misc_RNA (1)...(19): siRNA sense strand
gaggagguggugguuguga

SEQ ID NO: 363278 - RNA, 19 nt, Homo sapiens
  misc_RNA (1)...(19): siRNA sense strand
gcgaccugacggaagauaa

SEQ ID NO: 363279 - RNA, 19 nt, Homo sapiens
  misc_RNA (1)...(19): siRNA sense strand
ggagguggugguugugaca

SEQ ID NO: 363280 - RNA, 19 nt, Homo sapiens
  misc_RNA (1)...(19): siRNA sense strand
ggaagccguguuagugaag

SEQ ID NO: 363281 - RNA, 19 nt, Homo sapiens
  misc_RNA (1)...(19): siRNA sense strand
cgcugcagcugcucacguu

SEQ ID NO: 363282 - RNA, 19 nt, Homo sapiens
  misc_RNA (1)...(19): siRNA sense strand
cauagagaccugugaagac

SEQ ID NO: 363283 - RNA, 19 nt, Homo sapiens
  misc_RNA (1)...(19): siRNA sense strand
aagagagccauccgcauga

SEQ ID NO: 363284 - RNA, 19 nt, Homo sapiens
  misc_RNA (1)...(19): siRNA sense strand
cauguaaucagcccaaagg

SEQ ID NO: 363285 - RNA, 19 nt, Homo sapiens
  misc_RNA (1)...(19): siRNA sense strand
caccauagagaccugugaa

SEQ ID NO: 363286 - RNA, 19 nt, Homo sapiens
  misc_RNA (1)...(19): siRNA sense strand
gagauuguguaccccauca

SEQ ID NO: 363287 - RNA, 19 nt, Homo sapiens
  misc_RNA (1)...(19): siRNA sense strand
gaaggaguuucccaucaaa

SEQ ID NO: 363288 - RNA, 19 nt, Homo sapiens
  misc_RNA (1)...(19): siRNA sense strand
ggucugagauggacaaagu

SEQ ID NO: 363289 - RNA, 19 nt, Homo sapiens
  misc_RNA (1)...(19): siRNA sense strand
ccaaggacuucuucacaaa

SEQ ID NO: 363290 - RNA, 19 nt, Homo sapiens
  misc_RNA (1)...(19): siRNA sense strand
ugacuacucuggccaugaa

SEQ ID NO: 363291 - RNA, 19 nt, Homo sapiens
  misc_RNA (1)...(19): siRNA sense strand
gcgaagaccugcaggacau

SEQ ID NO: 363292 - RNA, 19 nt, Homo sapiens
  misc_RNA (1)...(19): siRNA sense strand
gaccagaagguucagauuu

SEQ ID NO: 363293 - RNA, 19 nt, Homo sapiens
  misc_RNA (1)...(19): siRNA sense strand
aagaagaaauccacagguu

SEQ ID NO: 363294 - RNA, 19 nt, Homo sapiens
  misc_RNA (1)...(19): siRNA sense strand
gaggugacccugacgauga

SEQ ID NO: 363295 - RNA, 19 nt, Homo sapiens
  misc_RNA (1)...(19): siRNA sense strand
agucaaagcucuacucuac

SEQ ID NO: 363296 - RNA, 19 nt, Homo sapiens
  misc_RNA (1)...(19): siRNA sense strand
ugacucagcuugacaucug

SEQ ID NO: 363297 - RNA, 19 nt, Homo sapiens
  misc_RNA (1)...(19): siRNA sense strand
ugaaggaguuucccaucaa

SEQ ID NO: 363298 - RNA, 19 nt, Homo sapiens
  misc_RNA (1)...(19): siRNA sense strand
ccagagcugugaaagauca

SEQ ID NO: 363299 - RNA, 19 nt, Homo sapiens
  misc_RNA (1)...(19): siRNA sense strand
gaaagcccuucuccuucaa

SEQ ID NO: 363300 - RNA, 19 nt, Homo sapiens
  misc_RNA (1)...(19): siRNA sense strand
ggagaucggcuacauccaa

SEQ ID NO: 363301 - RNA, 19 nt, Homo sapiens
  misc_RNA (1)...(19): siRNA sense strand
caggacaugucgcugauga

SEQ ID NO: 363302 - RNA, 19 nt, Homo sapiens
  misc_RNA (1)...(19): siRNA sense strand
caaacaagacauugagaga

SEQ ID NO: 363303 - RNA, 19 nt, Homo sapiens
  misc_RNA (1)...(19): siRNA sense strand
acagaggccugaaggaguu

SEQ ID NO: 363304 - RNA, 19 nt, Homo sapiens
  misc_RNA (1)...(19): siRNA sense strand
ggacaaagugaggguguuu

SEQ ID NO: 363305 - RNA, 19 nt, Homo sapiens
  misc_RNA (1)...(19): siRNA sense strand
ggacugcgaggaugaugaa

SEQ ID NO: 363306 - RNA, 19 nt, Homo sapiens
  misc_RNA (1)...(19): siRNA sense strand
cugugaagcucuauucuga

SEQ ID NO: 363307 - RNA, 19 nt, Homo sapiens
  misc_RNA (1)...(19): siRNA sense strand
gaaagcacaacauggacuu

SEQ ID NO: 363308 - RNA, 19 nt, Homo sapiens
  misc_RNA (1)...(19): siRNA sense strand
ucaacgacuucuucaccua

SEQ ID NO: 363309 - RNA, 19 nt, Homo sapiens
  misc_RNA (1)...(19): siRNA sense strand
aaccagagcugugaaagau

SEQ ID NO: 363310 - RNA, 19 nt, Homo sapiens
  misc_RNA (1)...(19): siRNA sense strand
ggccgagagugacaucauu

SEQ ID NO: 363311 - RNA, 19 nt, Homo sapiens
  misc_RNA (1)...(19): siRNA sense strand
agagaugcaucgacuggaa

SEQ ID NO: 363312 - RNA, 19 nt, Homo sapiens
  misc_RNA (1)...(19): siRNA sense strand
ccagaagguucagauuuca

SEQ ID NO: 363313 - RNA, 19 nt, Homo sapiens
  misc_RNA (1)...(19): siRNA sense strand
caaccagagcugugaaaga

SEQ ID NO: 363314 - RNA, 19 nt, Homo sapiens
  misc_RNA (1)...(19): siRNA sense strand
gcaccuucaucaacgacuu

SEQ ID NO: 363315 - RNA, 19 nt, Homo sapiens
  misc_RNA (1)...(19): siRNA sense strand
cccaaggacuucuucacaa

SEQ ID NO: 363316 - RNA, 19 nt, Homo sapiens
  misc_RNA (1)...(19): siRNA sense strand
guguacgcgugcaguauuu

SEQ ID NO: 363317 - RNA, 19 nt, Homo sapiens
  misc_RNA (1)...(19): siRNA sense strand
agaagguucagauuucaua

SEQ ID NO: 363318 - RNA, 19 nt, Homo sapiens
  misc_RNA (1)...(19): siRNA sense strand
gagagugacaucauugaca

SEQ ID NO: 363319 - RNA, 19 nt, Homo sapiens
  misc_RNA (1)...(19): siRNA sense strand
cgaggaugaugaagugcuu

SEQ ID NO: 363320 - RNA, 19 nt, Homo sapiens
  misc_RNA (1)...(19): siRNA sense strand
gcugcugccuggaggagaa

SEQ ID NO: 363321 - RNA, 19 nt, Homo sapiens
  misc_RNA (1)...(19): siRNA sense strand
ucucuaaggcggaagcuuu

SEQ ID NO: 363322 - RNA, 19 nt, Homo sapiens
  misc_RNA (1)...(19): siRNA sense strand
aaacaagacauugagagaa

SEQ ID NO: 363323 - RNA, 19 nt, Homo sapiens
  misc_RNA (1)...(19): siRNA sense strand
gcacguccuucagcaucaa

SEQ ID NO: 363324 - RNA, 19 nt, Homo sapiens
  misc_RNA (1)...(19): siRNA sense strand
guggaaagcacaacaugga

SEQ ID NO: 363325 - RNA, 19 nt, Homo sapiens
  misc_RNA (1)...(19): siRNA sense strand
ggcaaacuguccuccaagu

SEQ ID NO: 363326 - RNA, 19 nt, Homo sapiens
  misc_RNA (1)...(19): siRNA sense strand
gcaccuugacucagcuuga

SEQ ID NO: 363327 - RNA, 19 nt, Homo sapiens
  misc_RNA (1)...(19): siRNA sense strand
accagaagguucagauuuc

SEQ ID NO: 363328 - RNA, 19 nt, Homo sapiens
  misc_RNA (1)...(19): siRNA sense strand
agguucagauuucauacua

SEQ ID NO: 363329 - RNA, 19 nt, Homo sapiens
  misc_RNA (1)...(19): siRNA sense strand
gaacauucugucaaacaag

SEQ ID NO: 363330 - RNA, 19 nt, Homo sapiens
  misc_RNA (1)...(19): siRNA sense strand
gugaagcucuauucugacu

SEQ ID NO: 363331 - RNA, 19 nt, Homo sapiens
  misc_RNA (1)...(19): siRNA sense strand
gcaaacuguccuccaagug

SEQ ID NO: 363332 - RNA, 19 nt, Homo sapiens
  misc_RNA (1)...(19): siRNA sense strand
ucaaagcucuacucuaccu

SEQ ID NO: 363333 - RNA, 19 nt, Homo sapiens
  misc_RNA (1)...(19): siRNA sense strand
gcugugguguuccaagaca

SEQ ID NO: 363334 - RNA, 19 nt, Homo sapiens
  misc_RNA (1)...(19): siRNA sense strand
agagugacaucauugacau

SEQ ID NO: 363335 - RNA, 19 nt, Homo sapiens
  misc_RNA (1)...(19): siRNA sense strand
agacauugagagaacauaa

SEQ ID NO: 363336 - RNA, 19 nt, Homo sapiens
  misc_RNA (1)...(19): siRNA sense strand
guucgaagggaucaagaaa

SEQ ID NO: 363337 - RNA, 19 nt, Homo sapiens
  misc_RNA (1)...(19): siRNA sense strand
uccaggagcagcagaauga

SEQ ID NO: 363338 - RNA, 19 nt, Homo sapiens
  misc_RNA (1)...(19): siRNA sense strand
cgagugauggguccagauu

SEQ ID NO: 363339 - RNA, 19 nt, Homo sapiens
  misc_RNA (1)...(19): siRNA sense strand
cugaaggaguuucccauca

SEQ ID NO: 363340 - RNA, 19 nt, Homo sapiens
  misc_RNA (1)...(19): siRNA sense strand
gguguacgcgugcaguauu

SEQ ID NO: 363341 - RNA, 19 nt, Homo sapiens
  misc_RNA (1)...(19): siRNA sense strand
cugcgaggaugaugaagug

SEQ ID NO: 363342 - RNA, 19 nt, Homo sapiens
  misc_RNA (1)...(19): siRNA sense strand
aacauucugucaaacaaga

SEQ ID NO: 363343 - RNA, 19 nt, Homo sapiens
  misc_RNA (1)...(19): siRNA sense strand
ggacgaguuccugagcuuu

SEQ ID NO: 363344 - RNA, 19 nt, Homo sapiens
  misc_RNA (1)...(19): siRNA sense strand
gcacaacauggacuucuac

SEQ ID NO: 363345 - RNA, 19 nt, Homo sapiens
  misc_RNA (1)...(19): siRNA sense strand
gcacaggcgaccagaaggu

SEQ ID NO: 363346 - RNA, 19 nt, Homo sapiens
  misc_RNA (1)...(19): siRNA sense strand
gagguguacgcgugcagua

SEQ ID NO: 363347 - RNA, 19 nt, Homo sapiens
  misc_RNA (1)...(19): siRNA sense strand
aacaagacauugagagaac

SEQ ID NO: 363348 - RNA, 19 nt, Homo sapiens
  misc_RNA (1)...(19): siRNA sense strand
ccacagguuccuccacaug

SEQ ID NO: 363349 - RNA, 19 nt, Homo sapiens
  misc_RNA (1)...(19): siRNA sense strand
aaauggagaucggcuacau

SEQ ID NO: 363350 - RNA, 19 nt, Homo sapiens
  misc_RNA (1)...(19): siRNA sense strand
gaugaugaagugcuugaca

SEQ ID NO: 363351 - RNA, 19 nt, Homo sapiens
  misc_RNA (1)...(19): siRNA sense strand
ggaacagaggccugaagga

SEQ ID NO: 363352 - RNA, 19 nt, Homo sapiens
  misc_RNA (1)...(19): siRNA sense strand
accaguggaugcaggauga

SEQ ID NO: 363353 - RNA, 19 nt, Homo sapiens
  misc_RNA (1)...(19): siRNA sense strand
ggaugcaggaugaaaugga

SEQ ID NO: 363354 - RNA, 19 nt, Homo sapiens
  misc_RNA (1)...(19): siRNA sense strand
gacgaguuccugagcuuug

SEQ ID NO: 363355 - RNA, 19 nt, Homo sapiens
  misc_RNA (1)...(19): siRNA sense strand
gacauugagagaacauaau

SEQ ID NO: 363356 - RNA, 19 nt, Homo sapiens
  misc_RNA (1)...(19): siRNA sense strand
ugaugacccugagcacgaa

SEQ ID NO: 363357 - RNA, 19 nt, Homo sapiens
  misc_RNA (1)...(19): siRNA sense strand
uaauucauuuguggagaga

SEQ ID NO: 363358 - RNA, 19 nt, Homo sapiens
  misc_RNA (1)...(19): siRNA sense strand
gagugauggguccagauuu

SEQ ID NO: 363359 - RNA, 19 nt, Homo sapiens
  misc_RNA (1)...(19): siRNA sense strand
cgaccagaagguucagauu

SEQ ID NO: 363360 - RNA, 19 nt, Homo sapiens
  misc_RNA (1)...(19): siRNA sense strand
aggaggagaacauggauga

SEQ ID NO: 363361 - RNA, 19 nt, Homo sapiens
  misc_RNA (1)...(19): siRNA sense strand
gcaaugacagccggcagau

SEQ ID NO: 363362 - RNA, 19 nt, Homo sapiens
  misc_RNA (1)...(19): siRNA sense strand
ccaugaaagccaagugcaa

SEQ ID NO: 363363 - RNA, 19 nt, Homo sapiens
  misc_RNA (1)...(19): siRNA sense strand
gacaaucucgaaucuucug

SEQ ID NO: 363364 - RNA, 19 nt, Homo sapiens
  misc_RNA (1)...(19): siRNA sense strand
gaaauggagaucggcuaca

SEQ ID NO: 363365 - RNA, 19 nt, Homo sapiens
  misc_RNA (1)...(19): siRNA sense strand
acaaagugaggguguuuca

SEQ ID NO: 363366 - RNA, 19 nt, Homo sapiens
  misc_RNA (1)...(19): siRNA sense strand
uagcacaggcgaccagaag

SEQ ID NO: 363367 - RNA, 19 nt, Homo sapiens
  misc_RNA (1)...(19): siRNA sense strand
ugacaucccgcagcucuuc

SEQ ID NO: 363368 - RNA, 19 nt, Homo sapiens
  misc_RNA (1)...(19): siRNA sense strand
uggacgaguuccugagcuu

SEQ ID NO: 363369 - RNA, 19 nt, Homo sapiens
  misc_RNA (1)...(19): siRNA sense strand
cauccaagccccacacaaa

SEQ ID NO: 363370 - RNA, 19 nt, Homo sapiens
  misc_RNA (1)...(19): siRNA sense strand
guggaugcaggaugaaaug

SEQ ID NO: 363371 - RNA, 19 nt, Homo sapiens
  misc_RNA (1)...(19): siRNA sense strand
ucauuacccucaccaucuc

SEQ ID NO: 363372 - RNA, 19 nt, Homo sapiens
  misc_RNA (1)...(19): siRNA sense strand
agcacaacauggacuucua

SEQ ID NO: 363373 - RNA, 19 nt, Homo sapiens
  misc_RNA (1)...(19): siRNA sense strand
gaagaccugcaggacaugu

SEQ ID NO: 363374 - RNA, 19 nt, Homo sapiens
  misc_RNA (1)...(19): siRNA sense strand
ccagugcaccuucaucaac

SEQ ID NO: 363375 - RNA, 19 nt, Homo sapiens
  misc_RNA (1)...(19): siRNA sense strand
gccgagagugacaucauug

SEQ ID NO: 363376 - RNA, 19 nt, Homo sapiens
  misc_RNA (1)...(19): siRNA sense strand
agugcaagcugaccaucug

SEQ ID NO: 363377 - RNA, 19 nt, Homo sapiens
  misc_RNA (1)...(19): siRNA sense strand
aggcugugguguuccaaga

SEQ ID NO: 363378 - RNA, 19 nt, Homo sapiens
  misc_RNA (1)...(19): siRNA sense strand
gaaccaaguuguauuguua

SEQ ID NO: 363379 - RNA, 19 nt, Homo sapiens
  misc_RNA (1)...(19): siRNA sense strand
aaggauugcuuucucauua

SEQ ID NO: 363380 - RNA, 19 nt, Homo sapiens
  misc_RNA (1)...(19): siRNA sense strand
gaaggaguuugaaagagaa

SEQ ID NO: 363381 - RNA, 19 nt, Homo sapiens
  misc_RNA (1)...(19): siRNA sense strand
agaaggaguuugaaagaga

SEQ ID NO: 363382 - RNA, 19 nt, Homo sapiens
  misc_RNA (1)...(19): siRNA sense strand
ggacuugacuauagaagac

SEQ ID NO: 363383 - RNA, 19 nt, Homo sapiens
  misc_RNA (1)...(19): siRNA sense strand
ggauugcuuucucauuauu

SEQ ID NO: 363384 - RNA, 19 nt, Homo sapiens
  misc_RNA (1)...(19): siRNA sense strand
gcaacuggcagaaggauug

SEQ ID NO: 363385 - RNA, 19 nt, Homo sapiens
  misc_RNA (1)...(19): siRNA sense strand
caaguuguauuguuagaca

SEQ ID NO: 363386 - RNA, 19 nt, Homo sapiens
  misc_RNA (1)...(19): siRNA sense strand
gaaaagagaugcugaugcu

SEQ ID NO: 363387 - RNA, 19 nt, Homo sapiens
  misc_RNA (1)...(19): siRNA sense strand
gaaggauugcuuucucauu

SEQ ID NO: 363388 - RNA, 19 nt, Homo sapiens
  misc_RNA (1)...(19): siRNA sense strand
ugacacuucuccagaugaa

SEQ ID NO: 363389 - RNA, 19 nt, Homo sapiens
  misc_RNA (1)...(19): siRNA sense strand
gagaaggaguuugaaagag

SEQ ID NO: 363390 - RNA, 19 nt, Homo sapiens
  misc_RNA (1)...(19): siRNA sense strand
uagaggacuugacuauaga

SEQ ID NO: 363391 - RNA, 19 nt, Homo sapiens
  misc_RNA (1)...(19): siRNA sense strand
gagagaaggaguuugaaag

SEQ ID NO: 363392 - RNA, 19 nt, Homo sapiens
  misc_RNA (1)...(19): siRNA sense strand
uagacacacuggaacaaga

SEQ ID NO: 363393 - RNA, 19 nt, Homo sapiens
  misc_RNA (1)...(19): siRNA sense strand
gucauucuauguuggauau

SEQ ID NO: 363394 - RNA, 19 nt, Homo sapiens
  misc_RNA (1)...(19): siRNA sense strand
uccaggaacucacacagaa

SEQ ID NO: 363395 - RNA, 19 nt, Homo sapiens
  misc_RNA (1)...(19): siRNA sense strand
gcaacgagagaaggaguuu

SEQ ID NO: 363396 - RNA, 19 nt, Homo sapiens
  misc_RNA (1)...(19): siRNA sense strand
agaaccaaguuguauuguu

SEQ ID NO: 363397 - RNA, 19 nt, Homo sapiens
  misc_RNA (1)...(19): siRNA sense strand
acacuaucaugccaaguug

SEQ ID NO: 363398 - RNA, 19 nt, Homo sapiens
  misc_RNA (1)...(19): siRNA sense strand
cgagagaaggaguuugaaa

SEQ ID NO: 363399 - RNA, 19 nt, Homo sapiens
  misc_RNA (1)...(19): siRNA sense strand
acacagaaccaaguuguau

SEQ ID NO: 363400 - RNA, 19 nt, Homo sapiens
  misc_RNA (1)...(19): siRNA sense strand
agagaaggaguuugaaaga

SEQ ID NO: 363401 - RNA, 19 nt, Homo sapiens
  misc_RNA (1)...(19): siRNA sense strand
aagagaugcugaugcuuca

SEQ ID NO: 363402 - RNA, 19 nt, Homo sapiens
  misc_RNA (1)...(19): siRNA sense strand
cagaugaaggguuaauaga

SEQ ID NO: 363403 - RNA, 19 nt, Homo sapiens
  misc_RNA (1)...(19): siRNA sense strand
ggagccgacgccugguuua

SEQ ID NO: 363404 - RNA, 19 nt, Homo sapiens
  misc_RNA (1)...(19): siRNA sense strand
gagccgacgccugguuuaa

SEQ ID NO: 363405 - RNA, 19 nt, Homo sapiens
  misc_RNA (1)...(19): siRNA sense strand
ggaaagggagcagcaacga

SEQ ID NO: 363406 - RNA, 19 nt, Homo sapiens
  misc_RNA (1)...(19): siRNA sense strand
caaguuggugaauauaaga

SEQ ID NO: 363407 - RNA, 19 nt, Homo sapiens
  misc_RNA (1)...(19): siRNA sense strand
ccagaugaaggguuaauag

SEQ ID NO: 363408 - RNA, 19 nt, Homo sapiens
  misc_RNA (1)...(19): siRNA sense strand
acagaaccaaguuguauug

SEQ ID NO: 363409 - RNA, 19 nt, Homo sapiens
  misc_RNA (1)...(19): siRNA sense strand
gccgacgccugguuuaagu

SEQ ID NO: 363410 - RNA, 19 nt, Homo sapiens
  misc_RNA (1)...(19): siRNA sense strand
agacaaagcaguggagcaa

SEQ ID NO: 363411 - RNA, 19 nt, Homo sapiens
  misc_RNA (1)...(19): siRNA sense strand
gagaugcugaugcuucaug

SEQ ID NO: 363412 - RNA, 19 nt, Homo sapiens
  misc_RNA (1)...(19): siRNA sense strand
acaaagcaguggagcaacu

SEQ ID NO: 363413 - RNA, 19 nt, Homo sapiens
  misc_RNA (1)...(19): siRNA sense strand
ucacacagaaccaaguugu

SEQ ID NO: 363414 - RNA, 19 nt, Homo sapiens
  misc_RNA (1)...(19): siRNA sense strand
gacuauagaagacaaagca

SEQ ID NO: 363415 - RNA, 19 nt, Homo sapiens
  misc_RNA (1)...(19): siRNA sense strand
guuaauagaggacuugacu

SEQ ID NO: 363416 - RNA, 19 nt, Homo sapiens
  misc_RNA (1)...(19): siRNA sense strand
ggaacaagagauuucaaaa

SEQ ID NO: 363417 - RNA, 19 nt, Homo sapiens
  misc_RNA (1)...(19): siRNA sense strand
aggauugcuuucucauuau

SEQ ID NO: 363418 - RNA, 19 nt, Homo sapiens
  misc_RNA (1)...(19): siRNA sense strand
gaaagagaaaagcaguuaa

SEQ ID NO: 363419 - RNA, 19 nt, Homo sapiens
  misc_RNA (1)...(19): siRNA sense strand
ugaaagagaaaagcaguua

SEQ ID NO: 363420 - RNA, 19 nt, Homo sapiens
  misc_RNA (1)...(19): siRNA sense strand
gaggcuaaacacuaucaug

SEQ ID NO: 363421 - RNA, 19 nt, Homo sapiens
  misc_RNA (1)...(19): siRNA sense strand
uugcugaggcuaaacacua

SEQ ID NO: 363422 - RNA, 19 nt, Homo sapiens
  misc_RNA (1)...(19): siRNA sense strand
uggaacaagagauuucaaa

SEQ ID NO: 363423 - RNA, 19 nt, Homo sapiens
  misc_RNA (1)...(19): siRNA sense strand
ggaacucacacagaaccaa

SEQ ID NO: 363424 - RNA, 19 nt, Homo sapiens
  misc_RNA (1)...(19): siRNA sense strand
aacgagagaaggaguuuga

SEQ ID NO: 363425 - RNA, 19 nt, Homo sapiens
  misc_RNA (1)...(19): siRNA sense strand
cgacgccugguuuaaguga

SEQ ID NO: 363426 - RNA, 19 nt, Homo sapiens
  misc_RNA (1)...(19): siRNA sense strand
cacagaaccaaguuguauu

SEQ ID NO: 363427 - RNA, 19 nt, Homo sapiens
  misc_RNA (1)...(19): siRNA sense strand
aaaacaagcccuccaggaa

SEQ ID NO: 363428 - RNA, 19 nt, Homo sapiens
  misc_RNA (1)...(19): siRNA sense strand
agaugcugaugcuucauga

SEQ ID NO: 363429 - RNA, 19 nt, Homo sapiens
  misc_RNA (1)...(19): siRNA sense strand
ugacacggccacccuacug

SEQ ID NO: 363430 - RNA, 19 nt, Homo sapiens
  misc_RNA (1)...(19): siRNA sense strand
ggagcaacuggcagaagga

SEQ ID NO: 363431 - RNA, 19 nt, Homo sapiens
  misc_RNA (1)...(19): siRNA sense strand
aacaagcccuccaggaacu

SEQ ID NO: 363432 - RNA, 19 nt, Homo sapiens
  misc_RNA (1)...(19): siRNA sense strand
cacacagaaccaaguugua

SEQ ID NO: 363433 - RNA, 19 nt, Homo sapiens
  misc_RNA (1)...(19): siRNA sense strand
cauggaagcugaccacaua

SEQ ID NO: 363434 - RNA, 19 nt, Homo sapiens
  misc_RNA (1)...(19): siRNA sense strand
caauugggcuggacacuuu

SEQ ID NO: 363435 - RNA, 19 nt, Homo sapiens
  misc_RNA (1)...(19): siRNA sense strand
uaauggagcuucugacuau

SEQ ID NO: 363436 - RNA, 19 nt, Homo sapiens
  misc_RNA (1)...(19): siRNA sense strand
ccaacaacguccucaaauu

SEQ ID NO: 363437 - RNA, 19 nt, Homo sapiens
  misc_RNA (1)...(19): siRNA sense strand
caauggcccuaucaauaua

SEQ ID NO: 363438 - RNA, 19 nt, Homo sapiens
  misc_RNA (1)...(19): siRNA sense strand
gauccaagcuuccaguauc

SEQ ID NO: 363439 - RNA, 19 nt, Homo sapiens
  misc_RNA (1)...(19): siRNA sense strand
gaucaagcccaucauguuu

SEQ ID NO: 363440 - RNA, 19 nt, Homo sapiens
  misc_RNA (1)...(19): siRNA sense strand
caacaacguccucaaauuc

SEQ ID NO: 363441 - RNA, 19 nt, Homo sapiens
  misc_RNA (1)...(19): siRNA sense strand
gcagugcaauccagggaaa

SEQ ID NO: 363442 - RNA, 19 nt, Homo sapiens
  misc_RNA (1)...(19): siRNA sense strand
gcacugggcugaugaugac

SEQ ID NO: 363443 - RNA, 19 nt, Homo sapiens
  misc_RNA (1)...(19): siRNA sense strand
ggaaucaaaugcucuucug

SEQ ID NO: 363444 - RNA, 19 nt, Homo sapiens
  misc_RNA (1)...(19): siRNA sense strand
ggaguguccugucagaaga

SEQ ID NO: 363445 - RNA, 19 nt, Homo sapiens
  misc_RNA (1)...(19): siRNA sense strand
ucaauggcccuaucaauau

SEQ ID NO: 363446 - RNA, 19 nt, Homo sapiens
  misc_RNA (1)...(19): siRNA sense strand
ggaagguuacguagcauuu

SEQ ID NO: 363447 - RNA, 19 nt, Homo sapiens
  misc_RNA (1)...(19): siRNA sense strand
gagauggccuuugcuggaa

SEQ ID NO: 363448 - RNA, 19 nt, Homo sapiens
  misc_RNA (1)...(19): siRNA sense strand
gcauggaaguuguaaaggu

SEQ ID NO: 363449 - RNA, 19 nt, Homo sapiens
  misc_RNA (1)...(19): siRNA sense strand
guccucaaauucugugaua

SEQ ID NO: 363450 - RNA, 19 nt, Homo sapiens
  misc_RNA (1)...(19): siRNA sense strand
ucacaugccugcuggagau

SEQ ID NO: 363451 - RNA, 19 nt, Homo sapiens
  misc_RNA (1)...(19): siRNA sense strand
cauggaaguuguaaagguu

SEQ ID NO: 363452 - RNA, 19 nt, Homo sapiens
  misc_RNA (1)...(19): siRNA sense strand
gaggccaucugcucuaugu

SEQ ID NO: 363453 - RNA, 19 nt, Homo sapiens
  misc_RNA (1)...(19): siRNA sense strand
gaucgggaguguccuguca

SEQ ID NO: 363454 - RNA, 19 nt, Homo sapiens
  misc_RNA (1)...(19): siRNA sense strand
agacugaacugugcuacaa

SEQ ID NO: 363455 - RNA, 19 nt, Homo sapiens
  misc_RNA (1)...(19): siRNA sense strand
gaagaugaaccgugugauc

SEQ ID NO: 363456 - RNA, 19 nt, Homo sapiens
  misc_RNA (1)...(19): siRNA sense strand
ggaucaagcccaucauguu

SEQ ID NO: 363457 - RNA, 19 nt, Homo sapiens
  misc_RNA (1)...(19): siRNA sense strand
cagcagagacucacaacuu

SEQ ID NO: 363458 - RNA, 19 nt, Homo sapiens
  misc_RNA (1)...(19): siRNA sense strand
ccacuuagcuggguuugag

SEQ ID NO: 363459 - RNA, 19 nt, Homo sapiens
  misc_RNA (1)...(19): siRNA sense strand
ggagcuuggucuggcuuua

SEQ ID NO: 363460 - RNA, 19 nt, Homo sapiens
  misc_RNA (1)...(19): siRNA sense strand
ggccgaugccuuccacuua

SEQ ID NO: 363461 - RNA, 19 nt, Homo sapiens
  misc_RNA (1)...(19): siRNA sense strand
ggaccuuccugagaacuug

SEQ ID NO: 363462 - RNA, 19 nt, Homo sapiens
  misc_RNA (1)...(19): siRNA sense strand
cagcuggagccaucauuua

SEQ ID NO: 363463 - RNA, 19 nt, Homo sapiens
  misc_RNA (1)...(19): siRNA sense strand
gaacuccaagcucagauug

SEQ ID NO: 363464 - RNA, 19 nt, Homo sapiens
  misc_RNA (1)...(19): siRNA sense strand
guaauggagcuucugacua

SEQ ID NO: 363465 - RNA, 19 nt, Homo sapiens
  misc_RNA (1)...(19): siRNA sense strand
cccaggugcugaagcguua

SEQ ID NO: 363466 - RNA, 19 nt, Homo sapiens
  misc_RNA (1)...(19): siRNA sense strand
gaggagacccggagaugga

SEQ ID NO: 363467 - RNA, 19 nt, Homo sapiens
  misc_RNA (1)...(19): siRNA sense strand
gagaacagccagucaagag

SEQ ID NO: 363468 - RNA, 19 nt, Homo sapiens
  misc_RNA (1)...(19): siRNA sense strand
ucacugaccuccgggaugu

SEQ ID NO: 363469 - RNA, 19 nt, Homo sapiens
  misc_RNA (1)...(19): siRNA sense strand
cucaauggcccuaucaaua

SEQ ID NO: 363470 - RNA, 19 nt, Homo sapiens
  misc_RNA (1)...(19): siRNA sense strand
ugaggaugcugcagagaug

SEQ ID NO: 363471 - RNA, 19 nt, Homo sapiens
  misc_RNA (1)...(19): siRNA sense strand
ugaaugcccuggaaaucug

SEQ ID NO: 363472 - RNA, 19 nt, Homo sapiens
  misc_RNA (1)...(19): siRNA sense strand
gcaauggcaauguccuaaa

SEQ ID NO: 363473 - RNA, 19 nt, Homo sapiens
  misc_RNA (1)...(19): siRNA sense strand
guccuucacuucuauguuc

SEQ ID NO: 363474 - RNA, 19 nt, Homo sapiens
  misc_RNA (1)...(19): siRNA sense strand
caacuuucccacaggagua

SEQ ID NO: 363475 - RNA, 19 nt, Homo sapiens
  misc_RNA (1)...(19): siRNA sense strand
ccacugcacugggcugaug

SEQ ID NO: 363476 - RNA, 19 nt, Homo sapiens
  misc_RNA (1)...(19): siRNA sense strand
aagcugauguggcuguuug

SEQ ID NO: 363477 - RNA, 19 nt, Homo sapiens
  misc_RNA (1)...(19): siRNA sense strand
gagauggaacagaagauga

SEQ ID NO: 363478 - RNA, 19 nt, Homo sapiens
  misc_RNA (1)...(19): siRNA sense strand
ccaccaacaucgugucagu

SEQ ID NO: 363479 - RNA, 19 nt, Homo sapiens
  misc_RNA (1)...(19): siRNA sense strand
agcagagacucacaacuuu

SEQ ID NO: 363480 - RNA, 19 nt, Homo sapiens
  misc_RNA (1)...(19): siRNA sense strand
ucagggcgcugguggcaau

SEQ ID NO: 363481 - RNA, 19 nt, Homo sapiens
  misc_RNA (1)...(19): siRNA sense strand
gcacuguggaggccuuuga

SEQ ID NO: 363482 - RNA, 19 nt, Homo sapiens
  misc_RNA (1)...(19): siRNA sense strand
gcaagaugccucggaagga

SEQ ID NO: 363483 - RNA, 19 nt, Homo sapiens
  misc_RNA (1)...(19): siRNA sense strand
gugcugaggagacaaagaa

SEQ ID NO: 363484 - RNA, 19 nt, Homo sapiens
  misc_RNA (1)...(19): siRNA sense strand
gggaaaggaaguccgauuc

SEQ ID NO: 363485 - RNA, 19 nt, Homo sapiens
  misc_RNA (1)...(19): siRNA sense strand
cuccagcucuuuaucaaug

SEQ ID NO: 363486 - RNA, 19 nt, Homo sapiens
  misc_RNA (1)...(19): siRNA sense strand
gagcaguacccucugaauc

SEQ ID NO: 363487 - RNA, 19 nt, Homo sapiens
  misc_RNA (1)...(19): siRNA sense strand
ggaacuccaagcucagauu

SEQ ID NO: 363488 - RNA, 19 nt, Homo sapiens
  misc_RNA (1)...(19): siRNA sense strand
ggguugauguccugucugu

SEQ ID NO: 363489 - RNA, 19 nt, Homo sapiens
  misc_RNA (1)...(19): siRNA sense strand
agacaaagaagcugaugug

SEQ ID NO: 363490 - RNA, 19 nt, Homo sapiens
  misc_RNA (1)...(19): siRNA sense strand
gccgaugccuuccacuuag

SEQ ID NO: 363491 - RNA, 19 nt, Homo sapiens
  misc_RNA (1)...(19): siRNA sense strand
gaccuggaccuuccugaga

SEQ ID NO: 363492 - RNA, 19 nt, Homo sapiens
  misc_RNA (1)...(19): siRNA sense strand
agcgcuaccucaccaauaa

SEQ ID NO: 363493 - RNA, 19 nt, Homo sapiens
  misc_RNA (1)...(19): siRNA sense strand
ggagauggaacagaagaug

SEQ ID NO: 363494 - RNA, 19 nt, Homo sapiens
  misc_RNA (1)...(19): siRNA sense strand
cuacaggauuggaguugga

SEQ ID NO: 363495 - RNA, 19 nt, Homo sapiens
  misc_RNA (1)...(19): siRNA sense strand
ucaagcccaucauguuuag

SEQ ID NO: 363496 - RNA, 19 nt, Homo sapiens
  misc_RNA (1)...(19): siRNA sense strand
gcaauugggcuggacacuu

SEQ ID NO: 363497 - RNA, 19 nt, Homo sapiens
  misc_RNA (1)...(19): siRNA sense strand
gcuggugcacucacuguuu

SEQ ID NO: 363498 - RNA, 19 nt, Homo sapiens
  misc_RNA (1)...(19): siRNA sense strand
ggaagcggccagacaccuu

SEQ ID NO: 363499 - RNA, 19 nt, Homo sapiens
  misc_RNA (1)...(19): siRNA sense strand
ggagaacagccagucaaga

SEQ ID NO: 363500 - RNA, 19 nt, Homo sapiens
  misc_RNA (1)...(19): siRNA sense strand
gggacuuccugacucaugu

SEQ ID NO: 363501 - RNA, 19 nt, Homo sapiens
  misc_RNA (1)...(19): siRNA sense strand
ugacuauggcaacaaguuu

SEQ ID NO: 363502 - RNA, 19 nt, Homo sapiens
  misc_RNA (1)...(19): siRNA sense strand
gcagagacucacaacuuuc

SEQ ID NO: 363503 - RNA, 19 nt, Homo sapiens
  misc_RNA (1)...(19): siRNA sense strand
gaggaaacugcaagggaaa

SEQ ID NO: 363504 - RNA, 19 nt, Homo sapiens
  misc_RNA (1)...(19): siRNA sense strand
gaagcugaccacauaagca

SEQ ID NO: 363505 - RNA, 19 nt, Homo sapiens
  misc_RNA (1)...(19): siRNA sense strand
caauggcaauguccuaaaa

SEQ ID NO: 363506 - RNA, 19 nt, Homo sapiens
  misc_RNA (1)...(19): siRNA sense strand
ggucccgucuacaggauug

SEQ ID NO: 363507 - RNA, 19 nt, Homo sapiens
  misc_RNA (1)...(19): siRNA sense strand
gguuggaggucccgucuac

SEQ ID NO: 363508 - RNA, 19 nt, Homo sapiens
  misc_RNA (1)...(19): siRNA sense strand
gcauauuccagguuacaau

SEQ ID NO: 363509 - RNA, 19 nt, Homo sapiens
  misc_RNA (1)...(19): siRNA sense strand
cagaagaugaaccguguga

SEQ ID NO: 363510 - RNA, 19 nt, Homo sapiens
  misc_RNA (1)...(19): siRNA sense strand
ccacguggaugggcagaag

SEQ ID NO: 363511 - RNA, 19 nt, Homo sapiens
  misc_RNA (1)...(19): siRNA sense strand
uagcuggguuugagguaug

SEQ ID NO: 363512 - RNA, 19 nt, Homo sapiens
  misc_RNA (1)...(19): siRNA sense strand
uguuugcucuggucacuga

SEQ ID NO: 363513 - RNA, 19 nt, Homo sapiens
  misc_RNA (1)...(19): siRNA sense strand
acccggagauggaacagaa

SEQ ID NO: 363514 - RNA, 19 nt, Homo sapiens
  misc_RNA (1)...(19): siRNA sense strand
caagggcugagacauguug

SEQ ID NO: 363515 - RNA, 19 nt, Homo sapiens
  misc_RNA (1)...(19): siRNA sense strand
gcacugccggcuauugcuu

SEQ ID NO: 363516 - RNA, 19 nt, Homo sapiens
  misc_RNA (1)...(19): siRNA sense strand
ggccuuugcuggaaauugc

SEQ ID NO: 363517 - RNA, 19 nt, Homo sapiens
  misc_RNA (1)...(19): siRNA sense strand
ggaccuggagcucgaaugg

SEQ ID NO: 363518 - RNA, 19 nt, Homo sapiens
  misc_RNA (1)...(19): siRNA sense strand
gcuauugcuuuggaaaucu

SEQ ID NO: 363519 - RNA, 19 nt, Homo sapiens
  misc_RNA (1)...(19): siRNA sense strand
gagaggagggcaguaaugg

SEQ ID NO: 363520 - RNA, 19 nt, Homo sapiens
  misc_RNA (1)...(19): siRNA sense strand
gauggccuuugcuggaaau

SEQ ID NO: 363521 - RNA, 19 nt, Homo sapiens
  misc_RNA (1)...(19): siRNA sense strand
gcaaggacucccucagcau

SEQ ID NO: 363522 - RNA, 19 nt, Homo sapiens
  misc_RNA (1)...(19): siRNA sense strand
cugaguaccaggaaucaaa

SEQ ID NO: 363523 - RNA, 19 nt, Homo sapiens
  misc_RNA (1)...(19): siRNA sense strand
ccagcuggagccaucauuu

SEQ ID NO: 363524 - RNA, 19 nt, Homo sapiens
  misc_RNA (1)...(19): siRNA sense strand
gagccaggcauggaaguug

SEQ ID NO: 363525 - RNA, 19 nt, Homo sapiens
  misc_RNA (1)...(19): siRNA sense strand
cccuggagguugccauuga

SEQ ID NO: 363526 - RNA, 19 nt, Homo sapiens
  misc_RNA (1)...(19): siRNA sense strand
caacauccaccaacaucgu

SEQ ID NO: 363527 - RNA, 19 nt, Homo sapiens
  misc_RNA (1)...(19): siRNA sense strand
cgagaggagggcaguaaug

SEQ ID NO: 363528 - RNA, 19 nt, Homo sapiens
  misc_RNA (1)...(19): siRNA sense strand
gggaguguccugucagaag

SEQ ID NO: 363529 - RNA, 19 nt, Homo sapiens
  misc_RNA (1)...(19): siRNA sense strand
ccaguaauggagcuucuga

SEQ ID NO: 363530 - RNA, 19 nt, Homo sapiens
  misc_RNA (1)...(19): siRNA sense strand
ggcuauugcuuuggaaauc

SEQ ID NO: 363531 - RNA, 19 nt, Homo sapiens
  misc_RNA (1)...(19): siRNA sense strand
ggacacacucggaggaaac

SEQ ID NO: 363532 - RNA, 19 nt, Homo sapiens
  misc_RNA (1)...(19): siRNA sense strand
ggcuccagcucuuuaucaa

SEQ ID NO: 363533 - RNA, 19 nt, Homo sapiens
  misc_RNA (1)...(19): siRNA sense strand
gaaaccaccuacaagaaga

SEQ ID NO: 363534 - RNA, 19 nt, Homo sapiens
  misc_RNA (1)...(19): siRNA sense strand
ggacgcugcugcccaaguu

SEQ ID NO: 363535 - RNA, 19 nt, Homo sapiens
  misc_RNA (1)...(19): siRNA sense strand
gcaaugagccgcugaucga

SEQ ID NO: 363536 - RNA, 19 nt, Homo sapiens
  misc_RNA (1)...(19): siRNA sense strand
gcaagaaggagaaggagaa

SEQ ID NO: 363537 - RNA, 19 nt, Homo sapiens
  misc_RNA (1)...(19): siRNA sense strand
gaagaacuccucccugaag

SEQ ID NO: 363538 - RNA, 19 nt, Homo sapiens
  misc_RNA (1)...(19): siRNA sense strand
gcacaaggaggccgaguuc

SEQ ID NO: 363539 - RNA, 19 nt, Homo sapiens
  misc_RNA (1)...(19): siRNA sense strand
acaugaaccucaaccagaa

SEQ ID NO: 363540 - RNA, 19 nt, Homo sapiens
  misc_RNA (1)...(19): siRNA sense strand
gcgaaaccaccuacaagaa

SEQ ID NO: 363541 - RNA, 19 nt, Homo sapiens
  misc_RNA (1)...(19): siRNA sense strand
ggccagaugauuacuugua

SEQ ID NO: 363542 - RNA, 19 nt, Homo sapiens
  misc_RNA (1)...(19): siRNA sense strand
acaaggaccuggacuucau

SEQ ID NO: 363543 - RNA, 19 nt, Homo sapiens
  misc_RNA (1)...(19): siRNA sense strand
ggauccggccagaugauua

SEQ ID NO: 363544 - RNA, 19 nt, Homo sapiens
  misc_RNA (1)...(19): siRNA sense strand
gagaggagcuggguguacu

SEQ ID NO: 363545 - RNA, 19 nt, Homo sapiens
  misc_RNA (1)...(19): siRNA sense strand
caagaugcaccucaaguuc

SEQ ID NO: 363546 - RNA, 19 nt, Homo sapiens
  misc_RNA (1)...(19): siRNA sense strand
gcccagagcaccucagaug

SEQ ID NO: 363547 - RNA, 19 nt, Homo sapiens
  misc_RNA (1)...(19): siRNA sense strand
ggaagaacuccucccugaa

SEQ ID NO: 363548 - RNA, 19 nt, Homo sapiens
  misc_RNA (1)...(19): siRNA sense strand
ucaagaccgucaugcacaa

SEQ ID NO: 363549 - RNA, 19 nt, Homo sapiens
  misc_RNA (1)...(19): siRNA sense strand
ccacaucccucuccauucc

SEQ ID NO: 363550 - RNA, 19 nt, Homo sapiens
  misc_RNA (1)...(19): siRNA sense strand
guuucaagaucauggacua

SEQ ID NO: 363551 - RNA, 19 nt, Homo sapiens
  misc_RNA (1)...(19): siRNA sense strand
gcuacuacaugaaccucaa

SEQ ID NO: 363552 - RNA, 19 nt, Homo sapiens
  misc_RNA (1)...(19): siRNA sense strand
gacgacgaguucaucauca

SEQ ID NO: 363553 - RNA, 19 nt, Homo sapiens
  misc_RNA (1)...(19): siRNA sense strand
gagccuugcuagcugugaa

SEQ ID NO: 363554 - RNA, 19 nt, Homo sapiens
  misc_RNA (1)...(19): siRNA sense strand
ucaagaugcaccucaaguu

SEQ ID NO: 363555 - RNA, 19 nt, Homo sapiens
  misc_RNA (1)...(19): siRNA sense strand
ccuacagguucaucaagaa

SEQ ID NO: 363556 - RNA, 19 nt, Homo sapiens
  misc_RNA (1)...(19): siRNA sense strand
cgaaaccaccuacaagaag

SEQ ID NO: 363557 - RNA, 19 nt, Homo sapiens
  misc_RNA (1)...(19): siRNA sense strand
gccugguccuggaaaguuu

SEQ ID NO: 363558 - RNA, 19 nt, Homo sapiens
  misc_RNA (1)...(19): siRNA sense strand
gcacgccaccuucuuucga

SEQ ID NO: 363559 - RNA, 19 nt, Homo sapiens
  misc_RNA (1)...(19): siRNA sense strand
ggcgaaaccaccuacaaga

SEQ ID NO: 363560 - RNA, 19 nt, Homo sapiens
  misc_RNA (1)...(19): siRNA sense strand
ccggccagaugauuacuug

SEQ ID NO: 363561 - RNA, 19 nt, Homo sapiens
  misc_RNA (1)...(19): siRNA sense strand
gccagaugauuacuuguac

SEQ ID NO: 363562 - RNA, 19 nt, Homo sapiens
  misc_RNA (1)...(19): siRNA sense strand
uguacucccugugcaauga

SEQ ID NO: 363563 - RNA, 19 nt, Homo sapiens
  misc_RNA (1)...(19): siRNA sense strand
caaguucuaugggcuguac

SEQ ID NO: 363564 - RNA, 19 nt, Homo sapiens
  misc_RNA (1)...(19): siRNA sense strand
cggcagguuuggcucagaa

SEQ ID NO: 363565 - RNA, 19 nt, Homo sapiens
  misc_RNA (1)...(19): siRNA sense strand
cgacgacgaguucaucauc

SEQ ID NO: 363566 - RNA, 19 nt, Homo sapiens
  misc_RNA (1)...(19): siRNA sense strand
cuacagguucaucaagaaa

SEQ ID NO: 363567 - RNA, 19 nt, Homo sapiens
  misc_RNA (1)...(19): siRNA sense strand
gcugcucccuggcuacuac

SEQ ID NO: 363568 - RNA, 19 nt, Homo sapiens
  misc_RNA (1)...(19): siRNA sense strand
cggcgagagcgacacauaa

SEQ ID NO: 363569 - RNA, 19 nt, Homo sapiens
  misc_RNA (1)...(19): siRNA sense strand
ccaccgacaucuacuuucc

SEQ ID NO: 363570 - RNA, 19 nt, Homo sapiens
  misc_RNA (1)...(19): siRNA sense strand
cacgccaccuucuuucgaa

SEQ ID NO: 363571 - RNA, 19 nt, Homo sapiens
  misc_RNA (1)...(19): siRNA sense strand
ccagcaagaaggagaagga

SEQ ID NO: 363572 - RNA, 19 nt, Homo sapiens
  misc_RNA (1)...(19): siRNA sense strand
gaagaaguugggccaucga

SEQ ID NO: 363573 - RNA, 19 nt, Homo sapiens
  misc_RNA (1)...(19): siRNA sense strand
gacgaguucaucaucaaga

SEQ ID NO: 363574 - RNA, 19 nt, Homo sapiens
  misc_RNA (1)...(19): siRNA sense strand
cuacaaggaccuggacuuc

SEQ ID NO: 363575 - RNA, 19 nt, Homo sapiens
  misc_RNA (1)...(19): siRNA sense strand
caccagcgacgacgaguuc

SEQ ID NO: 363576 - RNA, 19 nt, Homo sapiens
  misc_RNA (1)...(19): siRNA sense strand
cucaagggcuccaccuaca

SEQ ID NO: 363577 - RNA, 19 nt, Homo sapiens
  misc_RNA (1)...(19): siRNA sense strand
uccuacagguucaucaaga

SEQ ID NO: 363578 - RNA, 19 nt, Homo sapiens
  misc_RNA (1)...(19): siRNA sense strand
agaaggagaaggagaagag

SEQ ID NO: 363579 - RNA, 19 nt, Homo sapiens
  misc_RNA (1)...(19): siRNA sense strand
agaugcaccucaaguucga

SEQ ID NO: 363580 - RNA, 19 nt, Homo sapiens
  misc_RNA (1)...(19): siRNA sense strand
acagucgucuggacaggau

SEQ ID NO: 363581 - RNA, 19 nt, Homo sapiens
  misc_RNA (1)...(19): siRNA sense strand
cagguuuggcucagaagaa

SEQ ID NO: 363582 - RNA, 19 nt, Homo sapiens
  misc_RNA (1)...(19): siRNA sense strand
ucaagaucauggacuacag

SEQ ID NO: 363583 - RNA, 19 nt, Homo sapiens
  misc_RNA (1)...(19): siRNA sense strand
gcagguuuggcucagaaga

SEQ ID NO: 363584 - RNA, 19 nt, Homo sapiens
  misc_RNA (1)...(19): siRNA sense strand
caagggcuccaccuacaag

SEQ ID NO: 363585 - RNA, 19 nt, Homo sapiens
  misc_RNA (1)...(19): siRNA sense strand
cucccuggcuacuacauga

SEQ ID NO: 363586 - RNA, 19 nt, Homo sapiens
  misc_RNA (1)...(19): siRNA sense strand
acgacgaguucaucaucaa

SEQ ID NO: 363587 - RNA, 19 nt, Homo sapiens
  misc_RNA (1)...(19): siRNA sense strand
cugcugcuguugaaguaga

SEQ ID NO: 363588 - RNA, 19 nt, Homo sapiens
  misc_RNA (1)...(19): siRNA sense strand
gcucaugcaggacuucuac

SEQ ID NO: 363589 - RNA, 19 nt, Homo sapiens
  misc_RNA (1)...(19): siRNA sense strand
ucgacauccugcaguccua

SEQ ID NO: 363590 - RNA, 19 nt, Homo sapiens
  misc_RNA (1)...(19): siRNA sense strand
gauccggccagaugauuac

SEQ ID NO: 363591 - RNA, 19 nt, Homo sapiens
  misc_RNA (1)...(19): siRNA sense strand
aagaacuccucccugaagu

SEQ ID NO: 363592 - RNA, 19 nt, Homo sapiens
  misc_RNA (1)...(19): siRNA sense strand
gccagaaggcgcucuacuc

SEQ ID NO: 363593 - RNA, 19 nt, Homo sapiens
  misc_RNA (1)...(19): siRNA sense strand
aggccgaguuccugcagaa

SEQ ID NO: 363594 - RNA, 19 nt, Homo sapiens
  misc_RNA (1)...(19): siRNA sense strand
uaaccaaccugaacaacua

SEQ ID NO: 363595 - RNA, 19 nt, Homo sapiens
  misc_RNA (1)...(19): siRNA sense strand
ggacaacagucagucaaau

SEQ ID NO: 363596 - RNA, 19 nt, Homo sapiens
  misc_RNA (1)...(19): siRNA sense strand
ccucacagaugaauuugaa

SEQ ID NO: 363597 - RNA, 19 nt, Homo sapiens
  misc_RNA (1)...(19): siRNA sense strand
uuaagaagcuugaacuaag

SEQ ID NO: 363598 - RNA, 19 nt, Homo sapiens
  misc_RNA (1)...(19): siRNA sense strand
ccaaaccucauacaucuaa

SEQ ID NO: 363599 - RNA, 19 nt, Homo sapiens
  misc_RNA (1)...(19): siRNA sense strand
uggaaggccucacagauga

SEQ ID NO: 363600 - RNA, 19 nt, Homo sapiens
  misc_RNA (1)...(19): siRNA sense strand
uuaaagaccucagcacaau

SEQ ID NO: 363601 - RNA, 19 nt, Homo sapiens
  misc_RNA (1)...(19): siRNA sense strand
guccaaaccucauacaucu

SEQ ID NO: 363602 - RNA, 19 nt, Homo sapiens
  misc_RNA (1)...(19): siRNA sense strand
ggagaugggcaaauggauu

SEQ ID NO: 363603 - RNA, 19 nt, Homo sapiens
  misc_RNA (1)...(19): siRNA sense strand
ucagucaaaugaaggcaaa

SEQ ID NO: 363604 - RNA, 19 nt, Homo sapiens
  misc_RNA (1)...(19): siRNA sense strand
caaaugaaggcaaauugga

SEQ ID NO: 363605 - RNA, 19 nt, Homo sapiens
  misc_RNA (1)...(19): siRNA sense strand
ggccucaccucaauugcaa

SEQ ID NO: 363606 - RNA, 19 nt, Homo sapiens
  misc_RNA (1)...(19): siRNA sense strand
ucaccucaauugcaaacuu

SEQ ID NO: 363607 - RNA, 19 nt, Homo sapiens
  misc_RNA (1)...(19): siRNA sense strand
gcuuagaccuuuucacuug

SEQ ID NO: 363608 - RNA, 19 nt, Homo sapiens
  misc_RNA (1)...(19): siRNA sense strand
cuagaaguauuggcagaaa

SEQ ID NO: 363609 - RNA, 19 nt, Homo sapiens
  misc_RNA (1)...(19): siRNA sense strand
gagaugggcaaauggauuc

SEQ ID NO: 363610 - RNA, 19 nt, Homo sapiens
  misc_RNA (1)...(19): siRNA sense strand
uaaagaccucagcacaaua

SEQ ID NO: 363611 - RNA, 19 nt, Homo sapiens
  misc_RNA (1)...(19): siRNA sense strand
acauaggccucaccucaau

SEQ ID NO: 363612 - RNA, 19 nt, Homo sapiens
  misc_RNA (1)...(19): siRNA sense strand
cucgagagcuuagaccuuu

SEQ ID NO: 363613 - RNA, 19 nt, Homo sapiens
  misc_RNA (1)...(19): siRNA sense strand
gacaacagucagucaaaug

SEQ ID NO: 363614 - RNA, 19 nt, Homo sapiens
  misc_RNA (1)...(19): siRNA sense strand
ucacagaugaauuugaaga

SEQ ID NO: 363615 - RNA, 19 nt, Homo sapiens
  misc_RNA (1)...(19): siRNA sense strand
caacagucagucaaaugaa

SEQ ID NO: 363616 - RNA, 19 nt, Homo sapiens
  misc_RNA (1)...(19): siRNA sense strand
caaauuggaaggccucaca

SEQ ID NO: 363617 - RNA, 19 nt, Homo sapiens
  misc_RNA (1)...(19): siRNA sense strand
caccucaauugcaaacuug

SEQ ID NO: 363618 - RNA, 19 nt, Homo sapiens
  misc_RNA (1)...(19): siRNA sense strand
cagaugaauuugaagaacu

SEQ ID NO: 363619 - RNA, 19 nt, Homo sapiens
  misc_RNA (1)...(19): siRNA sense strand
acaacagucagucaaauga

SEQ ID NO: 363620 - RNA, 19 nt, Homo sapiens
  misc_RNA (1)...(19): siRNA sense strand
caaccugaacaacuacuga

SEQ ID NO: 363621 - RNA, 19 nt, Homo sapiens
  misc_RNA (1)...(19): siRNA sense strand
cuuaagaagcuugaacuaa

SEQ ID NO: 363622 - RNA, 19 nt, Homo sapiens
  misc_RNA (1)...(19): siRNA sense strand
uagaaaaccucgagagcuu

SEQ ID NO: 363623 - RNA, 19 nt, Homo sapiens
  misc_RNA (1)...(19): siRNA sense strand
aaaugaaggcaaauuggaa

SEQ ID NO: 363624 - RNA, 19 nt, Homo sapiens
  misc_RNA (1)...(19): siRNA sense strand
gcccuccgaugugaaagaa

SEQ ID NO: 363625 - RNA, 19 nt, Homo sapiens
  misc_RNA (1)...(19): siRNA sense strand
ucagugggccuagaaguau

SEQ ID NO: 363626 - RNA, 19 nt, Homo sapiens
  misc_RNA (1)...(19): siRNA sense strand
caaaccucauacaucuaaa

SEQ ID NO: 363627 - RNA, 19 nt, Homo sapiens
  misc_RNA (1)...(19): siRNA sense strand
ggaaggccucacagaugaa

SEQ ID NO: 363628 - RNA, 19 nt, Homo sapiens
  misc_RNA (1)...(19): siRNA sense strand
aaagaccucagcacaauag

SEQ ID NO: 363629 - RNA, 19 nt, Homo sapiens
  misc_RNA (1)...(19): siRNA sense strand
gucaaaugaaggcaaauug

SEQ ID NO: 363630 - RNA, 19 nt, Homo sapiens
  misc_RNA (1)...(19): siRNA sense strand
cagugggccuagaaguauu

SEQ ID NO: 363631 - RNA, 19 nt, Homo sapiens
  misc_RNA (1)...(19): siRNA sense strand
ugaauuugaagaacuggaa

SEQ ID NO: 363632 - RNA, 19 nt, Homo sapiens
  misc_RNA (1)...(19): siRNA sense strand
agaugaauuugaagaacug

SEQ ID NO: 363633 - RNA, 19 nt, Homo sapiens
  misc_RNA (1)...(19): siRNA sense strand
ugaacuaagcaguaacaga

SEQ ID NO: 363634 - RNA, 19 nt, Homo sapiens
  misc_RNA (1)...(19): siRNA sense strand
aaaguguccaaaccucaua

SEQ ID NO: 363635 - RNA, 19 nt, Homo sapiens
  misc_RNA (1)...(19): siRNA sense strand
gaaggccucacagaugaau

SEQ ID NO: 363636 - RNA, 19 nt, Homo sapiens
  misc_RNA (1)...(19): siRNA sense strand
guaaccaaccugaacaacu

SEQ ID NO: 363637 - RNA, 19 nt, Homo sapiens
  misc_RNA (1)...(19): siRNA sense strand
ucaaaugaaggcaaauugg

SEQ ID NO: 363638 - RNA, 19 nt, Homo sapiens
  misc_RNA (1)...(19): siRNA sense strand
gcagaaaaguguccaaacc

SEQ ID NO: 363639 - RNA, 19 nt, Homo sapiens
  misc_RNA (1)...(19): siRNA sense strand
acaggacgcccuccgaugu

SEQ ID NO: 363640 - RNA, 19 nt, Homo sapiens
  misc_RNA (1)...(19): siRNA sense strand
gaauuugaagaacuggaau

SEQ ID NO: 363641 - RNA, 19 nt, Homo sapiens
  misc_RNA (1)...(19): siRNA sense strand
gcaguaacagagccucagu

SEQ ID NO: 363642 - RNA, 19 nt, Homo sapiens
  misc_RNA (1)...(19): siRNA sense strand
gagccucagugggccuaga

SEQ ID NO: 363643 - RNA, 19 nt, Homo sapiens
  misc_RNA (1)...(19): siRNA sense strand
cacagaugaauuugaagaa

SEQ ID NO: 363644 - RNA, 19 nt, Homo sapiens
  misc_RNA (1)...(19): siRNA sense strand
cucagugggccuagaagua

SEQ ID NO: 363645 - RNA, 19 nt, Homo sapiens
  misc_RNA (1)...(19): siRNA sense strand
acagaugaauuugaagaac

SEQ ID NO: 363646 - RNA, 19 nt, Homo sapiens
  misc_RNA (1)...(19): siRNA sense strand
aggccucacagaugaauuu

SEQ ID NO: 363647 - RNA, 19 nt, Homo sapiens
  misc_RNA (1)...(19): siRNA sense strand
cuaaggaucucaaaguaaa

SEQ ID NO: 363648 - RNA, 19 nt, Homo sapiens
  misc_RNA (1)...(19): siRNA sense strand
gugcugcgauucuggagua

SEQ ID NO: 363649 - RNA, 19 nt, Homo sapiens
  misc_RNA (1)...(19): siRNA sense strand
ggccaaggcuaaggcagua

SEQ ID NO: 363650 - RNA, 19 nt, Homo sapiens
  misc_RNA (1)...(19): siRNA sense strand
guacagugcugcgauucug

SEQ ID NO: 363651 - RNA, 19 nt, Homo sapiens
  misc_RNA (1)...(19): siRNA sense strand
gaguuggauucucuuauca

SEQ ID NO: 363652 - RNA, 19 nt, Homo sapiens
  misc_RNA (1)...(19): siRNA sense strand
gagcugggcuacaguuucc

SEQ ID NO: 363653 - RNA, 19 nt, Homo sapiens
  misc_RNA (1)...(19): siRNA sense strand
gugggaaggccaaggcuaa

SEQ ID NO: 363654 - RNA, 19 nt, Homo sapiens
  misc_RNA (1)...(19): siRNA sense strand
acagagagcugggcuacag

SEQ ID NO: 363655 - RNA, 19 nt, Homo sapiens
  misc_RNA (1)...(19): siRNA sense strand
ugcuggagcuggcagguaa

SEQ ID NO: 363656 - RNA, 19 nt, Homo sapiens
  misc_RNA (1)...(19): siRNA sense strand
uucuaaggaucucaaagua

SEQ ID NO: 363657 - RNA, 19 nt, Homo sapiens
  misc_RNA (1)...(19): siRNA sense strand
ucuaaggaucucaaaguaa

SEQ ID NO: 363658 - RNA, 19 nt, Homo sapiens
  misc_RNA (1)...(19): siRNA sense strand
caaaguaaagcguaucacu

SEQ ID NO: 363659 - RNA, 19 nt, Homo sapiens
  misc_RNA (1)...(19): siRNA sense strand
cagguaaugcuucuaagga

SEQ ID NO: 363660 - RNA, 19 nt, Homo sapiens
  misc_RNA (1)...(19): siRNA sense strand
gagagcugggcuacaguuu

SEQ ID NO: 363661 - RNA, 19 nt, Homo sapiens
  misc_RNA (1)...(19): siRNA sense strand
ugcaauccguggugaugaa

SEQ ID NO: 363662 - RNA, 19 nt, Homo sapiens
  misc_RNA (1)...(19): siRNA sense strand
guuggauucucuuaucaag

SEQ ID NO: 363663 - RNA, 19 nt, Homo sapiens
  misc_RNA (1)...(19): siRNA sense strand
gaugaagaguuggauucuc

SEQ ID NO: 363664 - RNA, 19 nt, Homo sapiens
  misc_RNA (1)...(19): siRNA sense strand
uggcagguaaugcuucuaa

SEQ ID NO: 363665 - RNA, 19 nt, Homo sapiens
  misc_RNA (1)...(19): siRNA sense strand
cguguacagugcugcgauu

SEQ ID NO: 363666 - RNA, 19 nt, Homo sapiens
  misc_RNA (1)...(19): siRNA sense strand
gugaugaagaguuggauuc

SEQ ID NO: 363667 - RNA, 19 nt, Homo sapiens
  misc_RNA (1)...(19): siRNA sense strand
gcagguaaugcuucuaagg

SEQ ID NO: 363668 - RNA, 19 nt, Homo sapiens
  misc_RNA (1)...(19): siRNA sense strand
guaaugcuucuaaggaucu

SEQ ID NO: 363669 - RNA, 19 nt, Homo sapiens
  misc_RNA (1)...(19): siRNA sense strand
gagcuggcagguaaugcuu

SEQ ID NO: 363670 - RNA, 19 nt, Homo sapiens
  misc_RNA (1)...(19): siRNA sense strand
ccacagacacuugaagacu

SEQ ID NO: 363671 - RNA, 19 nt, Homo sapiens
  misc_RNA (1)...(19): siRNA sense strand
gcuggcagguaaugcuucu

SEQ ID NO: 363672 - RNA, 19 nt, Homo sapiens
  misc_RNA (1)...(19): siRNA sense strand
ccguggugaugaagaguug

SEQ ID NO: 363673 - RNA, 19 nt, Homo sapiens
  misc_RNA (1)...(19): siRNA sense strand
gcaguaucucgcucacaga

SEQ ID NO: 363674 - RNA, 19 nt, Homo sapiens
  misc_RNA (1)...(19): siRNA sense strand
ugaagacucgcaccacaag

SEQ ID NO: 363675 - RNA, 19 nt, Homo sapiens
  misc_RNA (1)...(19): siRNA sense strand
cuucuaaggaucucaaagu

SEQ ID NO: 363676 - RNA, 19 nt, Homo sapiens
  misc_RNA (1)...(19): siRNA sense strand
cuaaggaucucaaaguaaa

SEQ ID NO: 363677 - RNA, 19 nt, Homo sapiens
  misc_RNA (1)...(19): siRNA sense strand
gugcugcgauucuggagua

SEQ ID NO: 363678 - RNA, 19 nt, Homo sapiens
  misc_RNA (1)...(19): siRNA sense strand
ggccaaggcuaaggcagua

SEQ ID NO: 363679 - RNA, 19 nt, Homo sapiens
  misc_RNA (1)...(19): siRNA sense strand
guacagugcugcgauucug

SEQ ID NO: 363680 - RNA, 19 nt, Homo sapiens
  misc_RNA (1)...(19): siRNA sense strand
gaguuggauucucuuauca

SEQ ID NO: 363681 - RNA, 19 nt, Homo sapiens
  misc_RNA (1)...(19): siRNA sense strand
gagcugggcuacaguuucc

SEQ ID NO: 363682 - RNA, 19 nt, Homo sapiens
  misc_RNA (1)...(19): siRNA sense strand
gugggaaggccaaggcuaa

SEQ ID NO: 363683 - RNA, 19 nt, Homo sapiens
  misc_RNA (1)...(19): siRNA sense strand
acagagagcugggcuacag

SEQ ID NO: 363684 - RNA, 19 nt, Homo sapiens
  misc_RNA (1)...(19): siRNA sense strand
ugcuggagcuggcagguaa

SEQ ID NO: 363685 - RNA, 19 nt, Homo sapiens
  misc_RNA (1)...(19): siRNA sense strand
uucuaaggaucucaaagua

SEQ ID NO: 363686 - RNA, 19 nt, Homo sapiens
  misc_RNA (1)...(19): siRNA sense strand
ucuaaggaucucaaaguaa

SEQ ID NO: 363687 - RNA, 19 nt, Homo sapiens
  misc_RNA (1)...(19): siRNA sense strand
caaaguaaagcguaucacu

SEQ ID NO: 363688 - RNA, 19 nt, Homo sapiens
  misc_RNA (1)...(19): siRNA sense strand
cagguaaugcuucuaagga

SEQ ID NO: 363689 - RNA, 19 nt, Homo sapiens
  misc_RNA (1)...(19): siRNA sense strand
gagagcugggcuacaguuu

SEQ ID NO: 363690 - RNA, 19 nt, Homo sapiens
  misc_RNA (1)...(19): siRNA sense strand
ugcaauccguggugaugaa

SEQ ID NO: 363691 - RNA, 19 nt, Homo sapiens
  misc_RNA (1)...(19): siRNA sense strand
guuggauucucuuaucaag

SEQ ID NO: 363692 - RNA, 19 nt, Homo sapiens
  misc_RNA (1)...(19): siRNA sense strand
gaugaagaguuggauucuc

SEQ ID NO: 363693 - RNA, 19 nt, Homo sapiens
  misc_RNA (1)...(19): siRNA sense strand
uggcagguaaugcuucuaa

SEQ ID NO: 363694 - RNA, 19 nt, Homo sapiens
  misc_RNA (1)...(19): siRNA sense strand
cguguacagugcugcgauu

SEQ ID NO: 363695 - RNA, 19 nt, Homo sapiens
  misc_RNA (1)...(19): siRNA sense strand
gugaugaagaguuggauuc

SEQ ID NO: 363696 - RNA, 19 nt, Homo sapiens
  misc_RNA (1)...(19): siRNA sense strand
gcagguaaugcuucuaagg

SEQ ID NO: 363697 - RNA, 19 nt, Homo sapiens
  misc_RNA (1)...(19): siRNA sense strand
guaaugcuucuaaggaucu

SEQ ID NO: 363698 - RNA, 19 nt, Homo sapiens
  misc_RNA (1)...(19): siRNA sense strand
gagcuggcagguaaugcuu

SEQ ID NO: 363699 - RNA, 19 nt, Homo sapiens
  misc_RNA (1)...(19): siRNA sense strand
ccacagacacuugaagacu

SEQ ID NO: 363700 - RNA, 19 nt, Homo sapiens
  misc_RNA (1)...(19): siRNA sense strand
gcuggcagguaaugcuucu

SEQ ID NO: 363701 - RNA, 19 nt, Homo sapiens
  misc_RNA (1)...(19): siRNA sense strand
ccguggugaugaagaguug

SEQ ID NO: 363702 - RNA, 19 nt, Homo sapiens
  misc_RNA (1)...(19): siRNA sense strand
gcaguaucucgcucacaga

SEQ ID NO: 363703 - RNA, 19 nt, Homo sapiens
  misc_RNA (1)...(19): siRNA sense strand
ugaagacucgcaccacaag

SEQ ID NO: 363704 - RNA, 19 nt, Homo sapiens
  misc_RNA (1)...(19): siRNA sense strand
cuucuaaggaucucaaagu

SEQ ID NO: 363705 - RNA, 19 nt, Homo sapiens
  misc_RNA (1)...(19): siRNA sense strand
ggaacuugcucgugccuua

SEQ ID NO: 363706 - RNA, 19 nt, Homo sapiens
  misc_RNA (1)...(19): siRNA sense strand
ggaaauagacaccuucuug

SEQ ID NO: 363707 - RNA, 19 nt, Homo sapiens
  misc_RNA (1)...(19): siRNA sense strand
gcaaugauguuggaacuug

SEQ ID NO: 363708 - RNA, 19 nt, Homo sapiens
  misc_RNA (1)...(19): siRNA sense strand
cgaaagacuucaagcaauu

SEQ ID NO: 363709 - RNA, 19 nt, Homo sapiens
  misc_RNA (1)...(19): siRNA sense strand
acacuuagcugcaaagaug

SEQ ID NO: 363710 - RNA, 19 nt, Homo sapiens
  misc_RNA (1)...(19): siRNA sense strand
ggccagaggagaagaauua

SEQ ID NO: 363711 - RNA, 19 nt, Homo sapiens
  misc_RNA (1)...(19): siRNA sense strand
cagcugaucuucuuugaug

SEQ ID NO: 363712 - RNA, 19 nt, Homo sapiens
  misc_RNA (1)...(19): siRNA sense strand
gcucaaggaucacucuuug

SEQ ID NO: 363713 - RNA, 19 nt, Homo sapiens
  misc_RNA (1)...(19): siRNA sense strand
gaaauagacaccuucuuga

SEQ ID NO: 363714 - RNA, 19 nt, Homo sapiens
  misc_RNA (1)...(19): siRNA sense strand
ggcgguauuuccagaauua

SEQ ID NO: 363715 - RNA, 19 nt, Homo sapiens
  misc_RNA (1)...(19): siRNA sense strand
aagaagagguguuccaguu

SEQ ID NO: 363716 - RNA, 19 nt, Homo sapiens
  misc_RNA (1)...(19): siRNA sense strand
cuaugggucucgacacuua

SEQ ID NO: 363717 - RNA, 19 nt, Homo sapiens
  misc_RNA (1)...(19): siRNA sense strand
ggaugaccauauuccauuu

SEQ ID NO: 363718 - RNA, 19 nt, Homo sapiens
  misc_RNA (1)...(19): siRNA sense strand
gcaccaguaucucugaaau

SEQ ID NO: 363719 - RNA, 19 nt, Homo sapiens
  misc_RNA (1)...(19): siRNA sense strand
gaagagguguuccaguucu

SEQ ID NO: 363720 - RNA, 19 nt, Homo sapiens
  misc_RNA (1)...(19): siRNA sense strand
guaccggucuuucucaaau

SEQ ID NO: 363721 - RNA, 19 nt, Homo sapiens
  misc_RNA (1)...(19): siRNA sense strand
gaggugugauucaggauga

SEQ ID NO: 363722 - RNA, 19 nt, Homo sapiens
  misc_RNA (1)...(19): siRNA sense strand
ucacuggucuccucaagau

SEQ ID NO: 363723 - RNA, 19 nt, Homo sapiens
  misc_RNA (1)...(19): siRNA sense strand
caccauggaugacaaugaa

SEQ ID NO: 363724 - RNA, 19 nt, Homo sapiens
  misc_RNA (1)...(19): siRNA sense strand
gcagaaggcaccaguaucu

SEQ ID NO: 363725 - RNA, 19 nt, Homo sapiens
  misc_RNA (1)...(19): siRNA sense strand
gauucaggaugaccauauu

SEQ ID NO: 363726 - RNA, 19 nt, Homo sapiens
  misc_RNA (1)...(19): siRNA sense strand
gaucuucuuugauggugaa

SEQ ID NO: 363727 - RNA, 19 nt, Homo sapiens
  misc_RNA (1)...(19): siRNA sense strand
ggauuuauuggucuuauug

SEQ ID NO: 363728 - RNA, 19 nt, Homo sapiens
  misc_RNA (1)...(19): siRNA sense strand
gcucgugccuuagacaaga

SEQ ID NO: 363729 - RNA, 19 nt, Homo sapiens
  misc_RNA (1)...(19): siRNA sense strand
ucgaaagacuucaagcaau

SEQ ID NO: 363730 - RNA, 19 nt, Homo sapiens
  misc_RNA (1)...(19): siRNA sense strand
gaaagacuucaagcaauug

SEQ ID NO: 363731 - RNA, 19 nt, Homo sapiens
  misc_RNA (1)...(19): siRNA sense strand
acccaacguuucccaauuu

SEQ ID NO: 363732 - RNA, 19 nt, Homo sapiens
  misc_RNA (1)...(19): siRNA sense strand
ugacugggucuuggaaaua

SEQ ID NO: 363733 - RNA, 19 nt, Homo sapiens
  misc_RNA (1)...(19): siRNA sense strand
ggucuuauuggauuugauu

SEQ ID NO: 363734 - RNA, 19 nt, Homo sapiens
  misc_RNA (1)...(19): siRNA sense strand
cacuaugacuccaaguauu

SEQ ID NO: 363735 - RNA, 19 nt, Homo sapiens
  misc_RNA (1)...(19): siRNA sense strand
ccacuaugacuccaaguau

SEQ ID NO: 363736 - RNA, 19 nt, Homo sapiens
  misc_RNA (1)...(19): siRNA sense strand
ucaaggaucacucuuugga

SEQ ID NO: 363737 - RNA, 19 nt, Homo sapiens
  misc_RNA (1)...(19): siRNA sense strand
gguccucgccugccacuau

SEQ ID NO: 363738 - RNA, 19 nt, Homo sapiens
  misc_RNA (1)...(19): siRNA sense strand
gggcgguauuuccagaauu

SEQ ID NO: 363739 - RNA, 19 nt, Homo sapiens
  misc_RNA (1)...(19): siRNA sense strand
ucagccaggugguucgaaa

SEQ ID NO: 363740 - RNA, 19 nt, Homo sapiens
  misc_RNA (1)...(19): siRNA sense strand
uaccggucuuucucaaaua

SEQ ID NO: 363741 - RNA, 19 nt, Homo sapiens
  misc_RNA (1)...(19): siRNA sense strand
ugaauuggguuugcucaag

SEQ ID NO: 363742 - RNA, 19 nt, Homo sapiens
  misc_RNA (1)...(19): siRNA sense strand
caucggcucuucggcaaau

SEQ ID NO: 363743 - RNA, 19 nt, Homo sapiens
  misc_RNA (1)...(19): siRNA sense strand
gcauggauuuauuggucuu

SEQ ID NO: 363744 - RNA, 19 nt, Homo sapiens
  misc_RNA (1)...(19): siRNA sense strand
gcacaucaugcagcgaauu

SEQ ID NO: 363745 - RNA, 19 nt, Homo sapiens
  misc_RNA (1)...(19): siRNA sense strand
ccuuaaagacuguuucaga

SEQ ID NO: 363746 - RNA, 19 nt, Homo sapiens
  misc_RNA (1)...(19): siRNA sense strand
caugugcaaugauguugga

SEQ ID NO: 363747 - RNA, 19 nt, Homo sapiens
  misc_RNA (1)...(19): siRNA sense strand
acuaugacuccaaguauuu

SEQ ID NO: 363748 - RNA, 19 nt, Homo sapiens
  misc_RNA (1)...(19): siRNA sense strand
gcaauugaacaugaacuuc

SEQ ID NO: 363749 - RNA, 19 nt, Homo sapiens
  misc_RNA (1)...(19): siRNA sense strand
ggaugacaaugaagaaaau

SEQ ID NO: 363750 - RNA, 19 nt, Homo sapiens
  misc_RNA (1)...(19): siRNA sense strand
gacugggucuuggaaauag

SEQ ID NO: 363751 - RNA, 19 nt, Homo sapiens
  misc_RNA (1)...(19): siRNA sense strand
uuggaugaaucaaccauug

SEQ ID NO: 363752 - RNA, 19 nt, Homo sapiens
  misc_RNA (1)...(19): siRNA sense strand
ccucaagauucucucuaug

SEQ ID NO: 363753 - RNA, 19 nt, Homo sapiens
  misc_RNA (1)...(19): siRNA sense strand
gccacuaugacuccaagua

SEQ ID NO: 363754 - RNA, 19 nt, Homo sapiens
  misc_RNA (1)...(19): siRNA sense strand
aacccaacguuucccaauu

SEQ ID NO: 363755 - RNA, 19 nt, Homo sapiens
  misc_RNA (1)...(19): siRNA sense strand
gacaccuucuugagucaga

SEQ ID NO: 363756 - RNA, 19 nt, Homo sapiens
  misc_RNA (1)...(19): siRNA sense strand
accaguaucucugaaaugu

SEQ ID NO: 363757 - RNA, 19 nt, Homo sapiens
  misc_RNA (1)...(19): siRNA sense strand
gugcaaugauguuggaacu

SEQ ID NO: 363758 - RNA, 19 nt, Homo sapiens
  misc_RNA (1)...(19): siRNA sense strand
caaucccacugcuaaacga

SEQ ID NO: 363759 - RNA, 19 nt, Homo sapiens
  misc_RNA (1)...(19): siRNA sense strand
uguaggagccacugauuca

SEQ ID NO: 363760 - RNA, 19 nt, Homo sapiens
  misc_RNA (1)...(19): siRNA sense strand
caucugauaccgucuccuu

SEQ ID NO: 363761 - RNA, 19 nt, Homo sapiens
  misc_RNA (1)...(19): siRNA sense strand
uggguuugcucaaggauca

SEQ ID NO: 363762 - RNA, 19 nt, Homo sapiens
  misc_RNA (1)...(19): siRNA sense strand
gccgugccaugugcaauga

SEQ ID NO: 363763 - RNA, 19 nt, Homo sapiens
  misc_RNA (1)...(19): siRNA sense strand
gcacaccauggaugacaau

SEQ ID NO: 363764 - RNA, 19 nt, Homo sapiens
  misc_RNA (1)...(19): siRNA sense strand
gagaggcaccagccaacug

SEQ ID NO: 363765 - RNA, 19 nt, Homo sapiens
  misc_RNA (1)...(19): siRNA sense strand
caaaauccuacaagucuuu

SEQ ID NO: 363766 - RNA, 19 nt, Homo sapiens
  misc_RNA (1)...(19): siRNA sense strand
ggguaccggucuuucucaa

SEQ ID NO: 363767 - RNA, 19 nt, Homo sapiens
  misc_RNA (1)...(19): siRNA sense strand
ccaggugguucgaaagacu

SEQ ID NO: 363768 - RNA, 19 nt, Homo sapiens
  misc_RNA (1)...(19): siRNA sense strand
cuuauuggauuugauugga

SEQ ID NO: 363769 - RNA, 19 nt, Homo sapiens
  misc_RNA (1)...(19): siRNA sense strand
gaacuugcucgugccuuag

SEQ ID NO: 363770 - RNA, 19 nt, Homo sapiens
  misc_RNA (1)...(19): siRNA sense strand
ccauggaugacaaugaaga

SEQ ID NO: 363771 - RNA, 19 nt, Homo sapiens
  misc_RNA (1)...(19): siRNA sense strand
ggcacaccauggaugacaa

SEQ ID NO: 363772 - RNA, 19 nt, Homo sapiens
  misc_RNA (1)...(19): siRNA sense strand
aggaugaccauauuccauu

SEQ ID NO: 363773 - RNA, 19 nt, Homo sapiens
  misc_RNA (1)...(19): siRNA sense strand
ucugaaauguggcaaaaug

SEQ ID NO: 363774 - RNA, 19 nt, Homo sapiens
  misc_RNA (1)...(19): siRNA sense strand
uagacaccuucuugaguca

SEQ ID NO: 363775 - RNA, 19 nt, Homo sapiens
  misc_RNA (1)...(19): siRNA sense strand
cugacugggucuuggaaau

SEQ ID NO: 363776 - RNA, 19 nt, Homo sapiens
  misc_RNA (1)...(19): siRNA sense strand
ucucgacacuuagcugcaa

SEQ ID NO: 363777 - RNA, 19 nt, Homo sapiens
  misc_RNA (1)...(19): siRNA sense strand
aaauagacaccuucuugag

SEQ ID NO: 363778 - RNA, 19 nt, Homo sapiens
  misc_RNA (1)...(19): siRNA sense strand
ugauucaggaugaccauau

SEQ ID NO: 363779 - RNA, 19 nt, Homo sapiens
  misc_RNA (1)...(19): siRNA sense strand
uccucaagauucucucuau

SEQ ID NO: 363780 - RNA, 19 nt, Homo sapiens
  misc_RNA (1)...(19): siRNA sense strand
cagacuccaagccagauuu

SEQ ID NO: 363781 - RNA, 19 nt, Homo sapiens
  misc_RNA (1)...(19): siRNA sense strand
gguaccggucuuucucaaa

SEQ ID NO: 363782 - RNA, 19 nt, Homo sapiens
  misc_RNA (1)...(19): siRNA sense strand
aauagacaccuucuugagu

SEQ ID NO: 363783 - RNA, 19 nt, Homo sapiens
  misc_RNA (1)...(19): siRNA sense strand
cggucuuucucaaauauca

SEQ ID NO: 363784 - RNA, 19 nt, Homo sapiens
  misc_RNA (1)...(19): siRNA sense strand
gagcuccaaacccaacguu

SEQ ID NO: 363785 - RNA, 19 nt, Homo sapiens
  misc_RNA (1)...(19): siRNA sense strand
cacuccagcugaucuucuu

SEQ ID NO: 363786 - RNA, 19 nt, Homo sapiens
  misc_RNA (1)...(19): siRNA sense strand
ccacugcuaaacgacauuu

SEQ ID NO: 363787 - RNA, 19 nt, Homo sapiens
  misc_RNA (1)...(19): siRNA sense strand
acacaaaccuugaacauuu

SEQ ID NO: 363788 - RNA, 19 nt, Homo sapiens
  misc_RNA (1)...(19): siRNA sense strand
gaagaggcauugguuauaa

SEQ ID NO: 363789 - RNA, 19 nt, Homo sapiens
  misc_RNA (1)...(19): siRNA sense strand
caagacaucugaacauauu

SEQ ID NO: 363790 - RNA, 19 nt, Homo sapiens
  misc_RNA (1)...(19): siRNA sense strand
gaauguagcucaacuugug

SEQ ID NO: 363791 - RNA, 19 nt, Homo sapiens
  misc_RNA (1)...(19): siRNA sense strand
ggagagauggucagaaaua

SEQ ID NO: 363792 - RNA, 19 nt, Homo sapiens
  misc_RNA (1)...(19): siRNA sense strand
agaaugaucugcaagaauu

SEQ ID NO: 363793 - RNA, 19 nt, Homo sapiens
  misc_RNA (1)...(19): siRNA sense strand
gaacuucgaccuacugaaa

SEQ ID NO: 363794 - RNA, 19 nt, Homo sapiens
  misc_RNA (1)...(19): siRNA sense strand
auaaauaucucccaccuaa

SEQ ID NO: 363795 - RNA, 19 nt, Homo sapiens
  misc_RNA (1)...(19): siRNA sense strand
gaagaaaguacuagagaaa

SEQ ID NO: 363796 - RNA, 19 nt, Homo sapiens
  misc_RNA (1)...(19): siRNA sense strand
cuacaacccucuccuguuu

SEQ ID NO: 363797 - RNA, 19 nt, Homo sapiens
  misc_RNA (1)...(19): siRNA sense strand
gaagcuuggugaauaauug

SEQ ID NO: 363798 - RNA, 19 nt, Homo sapiens
  misc_RNA (1)...(19): siRNA sense strand
gaagagggccaaacacuga

SEQ ID NO: 363799 - RNA, 19 nt, Homo sapiens
  misc_RNA (1)...(19): siRNA sense strand
gugaaaggaucaagauauu

SEQ ID NO: 363800 - RNA, 19 nt, Homo sapiens
  misc_RNA (1)...(19): siRNA sense strand
gagcuauucuugcugauga

SEQ ID NO: 363801 - RNA, 19 nt, Homo sapiens
  misc_RNA (1)...(19): siRNA sense strand
gaagaacagugccauuaag

SEQ ID NO: 363802 - RNA, 19 nt, Homo sapiens
  misc_RNA (1)...(19): siRNA sense strand
uagaagaacccaagaaauu

SEQ ID NO: 363803 - RNA, 19 nt, Homo sapiens
  misc_RNA (1)...(19): siRNA sense strand
uggaggaucucacuuaauu

SEQ ID NO: 363804 - RNA, 19 nt, Homo sapiens
  misc_RNA (1)...(19): siRNA sense strand
gagaaugaauggcagaugu

SEQ ID NO: 363805 - RNA, 19 nt, Homo sapiens
  misc_RNA (1)...(19): siRNA sense strand
gcagauuguugauggcuuu

SEQ ID NO: 363806 - RNA, 19 nt, Homo sapiens
  misc_RNA (1)...(19): siRNA sense strand
gaaauggguuuagggaaga

SEQ ID NO: 363807 - RNA, 19 nt, Homo sapiens
  misc_RNA (1)...(19): siRNA sense strand
gaaaucugauagccuaguu

SEQ ID NO: 363808 - RNA, 19 nt, Homo sapiens
  misc_RNA (1)...(19): siRNA sense strand
gaaaauaguccccaucuaa

SEQ ID NO: 363809 - RNA, 19 nt, Homo sapiens
  misc_RNA (1)...(19): siRNA sense strand
ggaagaggcauugguuaua

SEQ ID NO: 363810 - RNA, 19 nt, Homo sapiens
  misc_RNA (1)...(19): siRNA sense strand
guuuaaaucugccuaguga

SEQ ID NO: 363811 - RNA, 19 nt, Homo sapiens
  misc_RNA (1)...(19): siRNA sense strand
gguguaagccuucaaagaa

SEQ ID NO: 363812 - RNA, 19 nt, Homo sapiens
  misc_RNA (1)...(19): siRNA sense strand
ucagaaagaaggaaucaua

SEQ ID NO: 363813 - RNA, 19 nt, Homo sapiens
  misc_RNA (1)...(19): siRNA sense strand
agauugagcuuuaucgaaa

SEQ ID NO: 363814 - RNA, 19 nt, Homo sapiens
  misc_RNA (1)...(19): siRNA sense strand
uagcucaacuugugauaaa

SEQ ID NO: 363815 - RNA, 19 nt, Homo sapiens
  misc_RNA (1)...(19): siRNA sense strand
gcaagccaguaauaaagaa

SEQ ID NO: 363816 - RNA, 19 nt, Homo sapiens
  misc_RNA (1)...(19): siRNA sense strand
ccuggaagcuuggugaaua

SEQ ID NO: 363817 - RNA, 19 nt, Homo sapiens
  misc_RNA (1)...(19): siRNA sense strand
gaaaguucagauuguguua

SEQ ID NO: 363818 - RNA, 19 nt, Homo sapiens
  misc_RNA (1)...(19): siRNA sense strand
gaagaacccaagaaauuau

SEQ ID NO: 363819 - RNA, 19 nt, Homo sapiens
  misc_RNA (1)...(19): siRNA sense strand
gaucuuagaauaugcaguu

SEQ ID NO: 363820 - RNA, 19 nt, Homo sapiens
  misc_RNA (1)...(19): siRNA sense strand
guucaacucuauaaaggaa

SEQ ID NO: 363821 - RNA, 19 nt, Homo sapiens
  misc_RNA (1)...(19): siRNA sense strand
gcuguuaaauucucagguu

SEQ ID NO: 363822 - RNA, 19 nt, Homo sapiens
  misc_RNA (1)...(19): siRNA sense strand
gaacagugccauuaagaca

SEQ ID NO: 363823 - RNA, 19 nt, Homo sapiens
  misc_RNA (1)...(19): siRNA sense strand
guaaugggaaugagaauga

SEQ ID NO: 363824 - RNA, 19 nt, Homo sapiens
  misc_RNA (1)...(19): siRNA sense strand
aaaccaaguucaaaggaaa

SEQ ID NO: 363825 - RNA, 19 nt, Homo sapiens
  misc_RNA (1)...(19): siRNA sense strand
cugauagccuaguuaaaua

SEQ ID NO: 363826 - RNA, 19 nt, Homo sapiens
  misc_RNA (1)...(19): siRNA sense strand
cagauuguguuacucauga

SEQ ID NO: 363827 - RNA, 19 nt, Homo sapiens
  misc_RNA (1)...(19): siRNA sense strand
uacaaaggcuugcuaagug

SEQ ID NO: 363828 - RNA, 19 nt, Homo sapiens
  misc_RNA (1)...(19): siRNA sense strand
agaagaacccaagaaauua

SEQ ID NO: 363829 - RNA, 19 nt, Homo sapiens
  misc_RNA (1)...(19): siRNA sense strand
guacugcuaucucgcauuc

SEQ ID NO: 363830 - RNA, 19 nt, Homo sapiens
  misc_RNA (1)...(19): siRNA sense strand
ggaaggugaugcuguucuu

SEQ ID NO: 363831 - RNA, 19 nt, Homo sapiens
  misc_RNA (1)...(19): siRNA sense strand
ugaagaaaguacuagagaa

SEQ ID NO: 363832 - RNA, 19 nt, Homo sapiens
  misc_RNA (1)...(19): siRNA sense strand
gagagauggucagaaauau

SEQ ID NO: 363833 - RNA, 19 nt, Homo sapiens
  misc_RNA (1)...(19): siRNA sense strand
ggccaaacacugaugauuu

SEQ ID NO: 363834 - RNA, 19 nt, Homo sapiens
  misc_RNA (1)...(19): siRNA sense strand
cacuacagauugagcuuua

SEQ ID NO: 363835 - RNA, 19 nt, Homo sapiens
  misc_RNA (1)...(19): siRNA sense strand
ggaguuaggagaaagaaga

SEQ ID NO: 363836 - RNA, 19 nt, Homo sapiens
  misc_RNA (1)...(19): siRNA sense strand
ggaucaagauauuuacugu

SEQ ID NO: 363837 - RNA, 19 nt, Homo sapiens
  misc_RNA (1)...(19): siRNA sense strand
gauugauccuuaccuugua

SEQ ID NO: 363838 - RNA, 19 nt, Homo sapiens
  misc_RNA (1)...(19): siRNA sense strand
uaaaccaaguucaaaggaa

SEQ ID NO: 363839 - RNA, 19 nt, Homo sapiens
  misc_RNA (1)...(19): siRNA sense strand
ucagaaauauccuguacau

SEQ ID NO: 363840 - RNA, 19 nt, Homo sapiens
  misc_RNA (1)...(19): siRNA sense strand
guguaagccuucaaagaaa

SEQ ID NO: 363841 - RNA, 19 nt, Homo sapiens
  misc_RNA (1)...(19): siRNA sense strand
gaaaaggaguuaggagaaa

SEQ ID NO: 363842 - RNA, 19 nt, Homo sapiens
  misc_RNA (1)...(19): siRNA sense strand
ucauuagccuuucuuguga

SEQ ID NO: 363843 - RNA, 19 nt, Homo sapiens
  misc_RNA (1)...(19): siRNA sense strand
gaagugaaaggaucaagau

SEQ ID NO: 363844 - RNA, 19 nt, Homo sapiens
  misc_RNA (1)...(19): siRNA sense strand
gaaagcuguuaaauucuca

SEQ ID NO: 363845 - RNA, 19 nt, Homo sapiens
  misc_RNA (1)...(19): siRNA sense strand
caggagcacuacagauuga

SEQ ID NO: 363846 - RNA, 19 nt, Homo sapiens
  misc_RNA (1)...(19): siRNA sense strand
uaucaaaggcagaucagua

SEQ ID NO: 363847 - RNA, 19 nt, Homo sapiens
  misc_RNA (1)...(19): siRNA sense strand
ggucagaaauauccuguac

SEQ ID NO: 363848 - RNA, 19 nt, Homo sapiens
  misc_RNA (1)...(19): siRNA sense strand
caccuacacuggcaacauu

SEQ ID NO: 363849 - RNA, 19 nt, Homo sapiens
  misc_RNA (1)...(19): siRNA sense strand
cgucauggauaugcuuaua

SEQ ID NO: 363850 - RNA, 19 nt, Homo sapiens
  misc_RNA (1)...(19): siRNA sense strand
gggcaucguuugaagaaca

SEQ ID NO: 363851 - RNA, 19 nt, Homo sapiens
  misc_RNA (1)...(19): siRNA sense strand
gaggcaagccaguaauaaa

SEQ ID NO: 363852 - RNA, 19 nt, Homo sapiens
  misc_RNA (1)...(19): siRNA sense strand
gaaaguacuagagaaauca

SEQ ID NO: 363853 - RNA, 19 nt, Homo sapiens
  misc_RNA (1)...(19): siRNA sense strand
ccacaucaccagaaaucua

SEQ ID NO: 363854 - RNA, 19 nt, Homo sapiens
  misc_RNA (1)...(19): siRNA sense strand
acuggacucuuuauccuua

SEQ ID NO: 363855 - RNA, 19 nt, Homo sapiens
  misc_RNA (1)...(19): siRNA sense strand
caagaagagaaaucugaua

SEQ ID NO: 363856 - RNA, 19 nt, Homo sapiens
  misc_RNA (1)...(19): siRNA sense strand
agagauaauugcaguggaa

SEQ ID NO: 363857 - RNA, 19 nt, Homo sapiens
  misc_RNA (1)...(19): siRNA sense strand
gaaaucuaacucccugaaa

SEQ ID NO: 363858 - RNA, 19 nt, Homo sapiens
  misc_RNA (1)...(19): siRNA sense strand
ucuaugacauugauuggaa

SEQ ID NO: 363859 - RNA, 19 nt, Homo sapiens
  misc_RNA (1)...(19): siRNA sense strand
uauguaagcgucauggaua

SEQ ID NO: 363860 - RNA, 19 nt, Homo sapiens
  misc_RNA (1)...(19): siRNA sense strand
ugaagaacagugccauuaa

SEQ ID NO: 363861 - RNA, 19 nt, Homo sapiens
  misc_RNA (1)...(19): siRNA sense strand
caaggaacaagaagagaaa

SEQ ID NO: 363862 - RNA, 19 nt, Homo sapiens
  misc_RNA (1)...(19): siRNA sense strand
ucauucggcuccuaaagaa

SEQ ID NO: 363863 - RNA, 19 nt, Homo sapiens
  misc_RNA (1)...(19): siRNA sense strand
ggaggcaagccaguaauaa

SEQ ID NO: 363864 - RNA, 19 nt, Homo sapiens
  misc_RNA (1)...(19): siRNA sense strand
gaaaaggaauguagcucaa

SEQ ID NO: 363865 - RNA, 19 nt, Homo sapiens
  misc_RNA (1)...(19): siRNA sense strand
gugaauaauuggaagaaag

SEQ ID NO: 363866 - RNA, 19 nt, Homo sapiens
  misc_RNA (1)...(19): siRNA sense strand
aucgaaagcuguuaaauuc

SEQ ID NO: 363867 - RNA, 19 nt, Homo sapiens
  misc_RNA (1)...(19): siRNA sense strand
ggcaaugucuagaguaugg

SEQ ID NO: 363868 - RNA, 19 nt, Homo sapiens
  misc_RNA (1)...(19): siRNA sense strand
uggauaugcuuauacaaga

SEQ ID NO: 363869 - RNA, 19 nt, Homo sapiens
  misc_RNA (1)...(19): siRNA sense strand
cgaaagcuguuaaauucuc

SEQ ID NO: 363870 - RNA, 19 nt, Homo sapiens
  misc_RNA (1)...(19): siRNA sense strand
agaaaguacuagagaaauc

SEQ ID NO: 363871 - RNA, 19 nt, Homo sapiens
  misc_RNA (1)...(19): siRNA sense strand
gaauauaaccacucaagcu

SEQ ID NO: 363872 - RNA, 19 nt, Homo sapiens
  misc_RNA (1)...(19): siRNA sense strand
gaauccagccacugacauu

SEQ ID NO: 363873 - RNA, 19 nt, Homo sapiens
  misc_RNA (1)...(19): siRNA sense strand
gaucucacuuaauucucua

SEQ ID NO: 363874 - RNA, 19 nt, Homo sapiens
  misc_RNA (1)...(19): siRNA sense strand
ggaucucacuuaauucucu

SEQ ID NO: 363875 - RNA, 19 nt, Homo sapiens
  misc_RNA (1)...(19): siRNA sense strand
cuucaaggguuguuggaaa

SEQ ID NO: 363876 - RNA, 19 nt, Homo sapiens
  misc_RNA (1)...(19): siRNA sense strand
uggcagauguggagcuauu

SEQ ID NO: 363877 - RNA, 19 nt, Homo sapiens
  misc_RNA (1)...(19): siRNA sense strand
gaaggugaugcuguucuua

SEQ ID NO: 363878 - RNA, 19 nt, Homo sapiens
  misc_RNA (1)...(19): siRNA sense strand
cuagagaaaucaauaacag

SEQ ID NO: 363879 - RNA, 19 nt, Homo sapiens
  misc_RNA (1)...(19): siRNA sense strand
gaaaagagucuauacaaag

SEQ ID NO: 363880 - RNA, 19 nt, Homo sapiens
  misc_RNA (1)...(19): siRNA sense strand
ggaagugaaaggaucaaga

SEQ ID NO: 363881 - RNA, 19 nt, Homo sapiens
  misc_RNA (1)...(19): siRNA sense strand
guaaauccaggaauauuag

SEQ ID NO: 363882 - RNA, 19 nt, Homo sapiens
  misc_RNA (1)...(19): siRNA sense strand
cauuggaggaucucacuua

SEQ ID NO: 363883 - RNA, 19 nt, Homo sapiens
  misc_RNA (1)...(19): siRNA sense strand
gaggguguugcaauuaaua

SEQ ID NO: 363884 - RNA, 19 nt, Homo sapiens
  misc_RNA (1)...(19): siRNA sense strand
gaaguaauccaggucugaa

SEQ ID NO: 363885 - RNA, 19 nt, Homo sapiens
  misc_RNA (1)...(19): siRNA sense strand
aagaagagcagcugaacuu

SEQ ID NO: 363886 - RNA, 19 nt, Homo sapiens
  misc_RNA (1)...(19): siRNA sense strand
aaacaccaaucucucaaag

SEQ ID NO: 363887 - RNA, 19 nt, Homo sapiens
  misc_RNA (1)...(19): siRNA sense strand
gaagaaaguacuagagaaa

SEQ ID NO: 363888 - RNA, 19 nt, Homo sapiens
  misc_RNA (1)...(19): siRNA sense strand
guuuaaaucugccuaguga

SEQ ID NO: 363889 - RNA, 19 nt, Homo sapiens
  misc_RNA (1)...(19): siRNA sense strand
gaucuuagaauaugcaguu

SEQ ID NO: 363890 - RNA, 19 nt, Homo sapiens
  misc_RNA (1)...(19): siRNA sense strand
ugaagaaaguacuagagaa

SEQ ID NO: 363891 - RNA, 19 nt, Homo sapiens
  misc_RNA (1)...(19): siRNA sense strand
caccuacacuggcaacauu

SEQ ID NO: 363892 - RNA, 19 nt, Homo sapiens
  misc_RNA (1)...(19): siRNA sense strand
gaaaguacuagagaaauca

SEQ ID NO: 363893 - RNA, 19 nt, Homo sapiens
  misc_RNA (1)...(19): siRNA sense strand
agagauaauugcaguggaa

SEQ ID NO: 363894 - RNA, 19 nt, Homo sapiens
  misc_RNA (1)...(19): siRNA sense strand
agaaaguacuagagaaauc

SEQ ID NO: 363895 - RNA, 19 nt, Homo sapiens
  misc_RNA (1)...(19): siRNA sense strand
cuagagaaaucaauaacag

SEQ ID NO: 363896 - RNA, 19 nt, Homo sapiens
  misc_RNA (1)...(19): siRNA sense strand
gaaguaauccaggucugaa

SEQ ID NO: 363897 - RNA, 19 nt, Homo sapiens
  misc_RNA (1)...(19): siRNA sense strand
gaggguguugcaauuaaua

SEQ ID NO: 363898 - RNA, 19 nt, Homo sapiens
  misc_RNA (1)...(19): siRNA sense strand
gcaggggaauuccuucaaa

SEQ ID NO: 363899 - RNA, 19 nt, Homo sapiens
  misc_RNA (1)...(19): siRNA sense strand
gugaagaaaguacuagaga

SEQ ID NO: 363900 - RNA, 19 nt, Homo sapiens
  misc_RNA (1)...(19): siRNA sense strand
guaauccaggucugaauga

SEQ ID NO: 363901 - RNA, 19 nt, Homo sapiens
  misc_RNA (1)...(19): siRNA sense strand
gaagagauuacaaaacuga

SEQ ID NO: 363902 - RNA, 19 nt, Homo sapiens
  misc_RNA (1)...(19): siRNA sense strand
gagaaaucaauaacagaga

SEQ ID NO: 363903 - RNA, 19 nt, Homo sapiens
  misc_RNA (1)...(19): siRNA sense strand
uugaggguguugcaauuaa

SEQ ID NO: 363904 - RNA, 19 nt, Homo sapiens
  misc_RNA (1)...(19): siRNA sense strand
aaaucugccuagugaagaa

SEQ ID NO: 363905 - RNA, 19 nt, Homo sapiens
  misc_RNA (1)...(19): siRNA sense strand
gcaauuaauaacaccuuuc

SEQ ID NO: 363906 - RNA, 19 nt, Homo sapiens
  misc_RNA (1)...(19): siRNA sense strand
aaauuuauaccuccaggaa

SEQ ID NO: 363907 - RNA, 19 nt, Homo sapiens
  misc_RNA (1)...(19): siRNA sense strand
ggucugaaugaagagauua

SEQ ID NO: 363908 - RNA, 19 nt, Homo sapiens
  misc_RNA (1)...(19): siRNA sense strand
auuuauaccuccaggaaga

SEQ ID NO: 363909 - RNA, 19 nt, Homo sapiens
  misc_RNA (1)...(19): siRNA sense strand
uaauccaggucugaaugaa

SEQ ID NO: 363910 - RNA, 19 nt, Homo sapiens
  misc_RNA (1)...(19): siRNA sense strand
ugaggguguugcaauuaau

SEQ ID NO: 363911 - RNA, 19 nt, Homo sapiens
  misc_RNA (1)...(19): siRNA sense strand
uaaaucugccuagugaaga

SEQ ID NO: 363912 - RNA, 19 nt, Homo sapiens
  misc_RNA (1)...(19): siRNA sense strand
gaucugcagcaccaaguca

SEQ ID NO: 363913 - RNA, 19 nt, Homo sapiens
  misc_RNA (1)...(19): siRNA sense strand
gagauaauugcaguggaaa

SEQ ID NO: 363914 - RNA, 19 nt, Homo sapiens
  misc_RNA (1)...(19): siRNA sense strand
auccaggucugaaugaaga

SEQ ID NO: 363915 - RNA, 19 nt, Homo sapiens
  misc_RNA (1)...(19): siRNA sense strand
gcaccuacacuggcaacau

SEQ ID NO: 363916 - RNA, 19 nt, Homo sapiens
  misc_RNA (1)...(19): siRNA sense strand
aacauuagauccaccucau

SEQ ID NO: 363917 - RNA, 19 nt, Homo sapiens
  misc_RNA (1)...(19): siRNA sense strand
uuaaaucugccuagugaag

SEQ ID NO: 363918 - RNA, 19 nt, Homo sapiens
  misc_RNA (1)...(19): siRNA sense strand
agaaguaauccaggucuga

SEQ ID NO: 363919 - RNA, 19 nt, Homo sapiens
  misc_RNA (1)...(19): siRNA sense strand
acaccuuucucccgucaca

SEQ ID NO: 363920 - RNA, 19 nt, Homo sapiens
  misc_RNA (1)...(19): siRNA sense strand
cauuagauccaccucauac

SEQ ID NO: 363921 - RNA, 19 nt, Homo sapiens
  misc_RNA (1)...(19): siRNA sense strand
acauuagauccaccucaua

SEQ ID NO: 363922 - RNA, 19 nt, Homo sapiens
  misc_RNA (1)...(19): siRNA sense strand
gagagaaguuugcuuuauu

SEQ ID NO: 363923 - RNA, 19 nt, Homo sapiens
  misc_RNA (1)...(19): siRNA sense strand
ccaaagacguggagagaga

SEQ ID NO: 363924 - RNA, 19 nt, Homo sapiens
  misc_RNA (1)...(19): siRNA sense strand
ggagagagaaguuugcuuu

SEQ ID NO: 363925 - RNA, 19 nt, Homo sapiens
  misc_RNA (1)...(19): siRNA sense strand
ggcaugcacucuucagaua

SEQ ID NO: 363926 - RNA, 19 nt, Homo sapiens
  misc_RNA (1)...(19): siRNA sense strand
ggacagcuguacaugauca

SEQ ID NO: 363927 - RNA, 19 nt, Homo sapiens
  misc_RNA (1)...(19): siRNA sense strand
gauauugccugcgaugaaa

SEQ ID NO: 363928 - RNA, 19 nt, Homo sapiens
  misc_RNA (1)...(19): siRNA sense strand
ccgaaauucuccauucaua

SEQ ID NO: 363929 - RNA, 19 nt, Homo sapiens
  misc_RNA (1)...(19): siRNA sense strand
gaauacacauguuccuuuc

SEQ ID NO: 363930 - RNA, 19 nt, Homo sapiens
  misc_RNA (1)...(19): siRNA sense strand
ggaugaaguccgagaauuu

SEQ ID NO: 363931 - RNA, 19 nt, Homo sapiens
  misc_RNA (1)...(19): siRNA sense strand
gaacuauuaucccuacaca

SEQ ID NO: 363932 - RNA, 19 nt, Homo sapiens
  misc_RNA (1)...(19): siRNA sense strand
gaccagaguggaacaauuu

SEQ ID NO: 363933 - RNA, 19 nt, Homo sapiens
  misc_RNA (1)...(19): siRNA sense strand
gagaaggcuuggaacuauu

SEQ ID NO: 363934 - RNA, 19 nt, Homo sapiens
  misc_RNA (1)...(19): siRNA sense strand
agggaaggcuggagagaua

SEQ ID NO: 363935 - RNA, 19 nt, Homo sapiens
  misc_RNA (1)...(19): siRNA sense strand
gagagagaaguuugcuuua

SEQ ID NO: 363936 - RNA, 19 nt, Homo sapiens
  misc_RNA (1)...(19): siRNA sense strand
agagaaguuugcuuuauug

SEQ ID NO: 363937 - RNA, 19 nt, Homo sapiens
  misc_RNA (1)...(19): siRNA sense strand
agagaaggcuuggaacuau

SEQ ID NO: 363938 - RNA, 19 nt, Homo sapiens
  misc_RNA (1)...(19): siRNA sense strand
gcuggugacugugaaguuu

SEQ ID NO: 363939 - RNA, 19 nt, Homo sapiens
  misc_RNA (1)...(19): siRNA sense strand
ccuacacaauuacagaaua

SEQ ID NO: 363940 - RNA, 19 nt, Homo sapiens
  misc_RNA (1)...(19): siRNA sense strand
ccagagcgcuacuacaaag

SEQ ID NO: 363941 - RNA, 19 nt, Homo sapiens
  misc_RNA (1)...(19): siRNA sense strand
ccuacaagcuggugacugu

SEQ ID NO: 363942 - RNA, 19 nt, Homo sapiens
  misc_RNA (1)...(19): siRNA sense strand
ggguguaucucaacagcaa

SEQ ID NO: 363943 - RNA, 19 nt, Homo sapiens
  misc_RNA (1)...(19): siRNA sense strand
ggaagccaccaacaagaaa

SEQ ID NO: 363944 - RNA, 19 nt, Homo sapiens
  misc_RNA (1)...(19): siRNA sense strand
agagagaaguuugcuuuau

SEQ ID NO: 363945 - RNA, 19 nt, Homo sapiens
  misc_RNA (1)...(19): siRNA sense strand
ugacagagaaggcuuggaa

SEQ ID NO: 363946 - RNA, 19 nt, Homo sapiens
  misc_RNA (1)...(19): siRNA sense strand
gaugaaguccgagaauuug

SEQ ID NO: 363947 - RNA, 19 nt, Homo sapiens
  misc_RNA (1)...(19): siRNA sense strand
gcaugccgcucaccguaga

SEQ ID NO: 363948 - RNA, 19 nt, Homo sapiens
  misc_RNA (1)...(19): siRNA sense strand
ccacagacgcacccgaauu

SEQ ID NO: 363949 - RNA, 19 nt, Homo sapiens
  misc_RNA (1)...(19): siRNA sense strand
gcaaacacagccaugaaca

SEQ ID NO: 363950 - RNA, 19 nt, Homo sapiens
  misc_RNA (1)...(19): siRNA sense strand
cacagacgcacccgaauuu

SEQ ID NO: 363951 - RNA, 19 nt, Homo sapiens
  misc_RNA (1)...(19): siRNA sense strand
ggacaacaaaggaagcaau

SEQ ID NO: 363952 - RNA, 19 nt, Homo sapiens
  misc_RNA (1)...(19): siRNA sense strand
agaaggcuuggaacuauua

SEQ ID NO: 363953 - RNA, 19 nt, Homo sapiens
  misc_RNA (1)...(19): siRNA sense strand
cagagaaggcuuggaacua

SEQ ID NO: 363954 - RNA, 19 nt, Homo sapiens
  misc_RNA (1)...(19): siRNA sense strand
gcaugcacucuucagauaa

SEQ ID NO: 363955 - RNA, 19 nt, Homo sapiens
  misc_RNA (1)...(19): siRNA sense strand
cccagaaacucucacacuu

SEQ ID NO: 363956 - RNA, 19 nt, Homo sapiens
  misc_RNA (1)...(19): siRNA sense strand
agaccagaguggaacaauu

SEQ ID NO: 363957 - RNA, 19 nt, Homo sapiens
  misc_RNA (1)...(19): siRNA sense strand
agaauacacauguuccuuu

SEQ ID NO: 363958 - RNA, 19 nt, Homo sapiens
  misc_RNA (1)...(19): siRNA sense strand
ccaaguaugaggacaacaa

SEQ ID NO: 363959 - RNA, 19 nt, Homo sapiens
  misc_RNA (1)...(19): siRNA sense strand
caaagaaucugaggauccu

SEQ ID NO: 363960 - RNA, 19 nt, Homo sapiens
  misc_RNA (1)...(19): siRNA sense strand
acacagccaugaacagagu

SEQ ID NO: 363961 - RNA, 19 nt, Homo sapiens
  misc_RNA (1)...(19): siRNA sense strand
aaacacagccaugaacaga

SEQ ID NO: 363962 - RNA, 19 nt, Homo sapiens
  misc_RNA (1)...(19): siRNA sense strand
gagacauucugcugauugg

SEQ ID NO: 363963 - RNA, 19 nt, Homo sapiens
  misc_RNA (1)...(19): siRNA sense strand
caaggugguccgagacauu

SEQ ID NO: 363964 - RNA, 19 nt, Homo sapiens
  misc_RNA (1)...(19): siRNA sense strand
cuacaaagaaucugaggau

SEQ ID NO: 363965 - RNA, 19 nt, Homo sapiens
  misc_RNA (1)...(19): siRNA sense strand
cuacacaauuacagaauac

SEQ ID NO: 363966 - RNA, 19 nt, Homo sapiens
  misc_RNA (1)...(19): siRNA sense strand
gagcgcuacuacaaagaau

SEQ ID NO: 363967 - RNA, 19 nt, Homo sapiens
  misc_RNA (1)...(19): siRNA sense strand
caaguaugaggacaacaaa

SEQ ID NO: 363968 - RNA, 19 nt, Homo sapiens
  misc_RNA (1)...(19): siRNA sense strand
ugaacgagccacucaggaa

SEQ ID NO: 363969 - RNA, 19 nt, Homo sapiens
  misc_RNA (1)...(19): siRNA sense strand
ccagaaacucucacacuuc

SEQ ID NO: 363970 - RNA, 19 nt, Homo sapiens
  misc_RNA (1)...(19): siRNA sense strand
gagaaguuugcuuuauuga

SEQ ID NO: 363971 - RNA, 19 nt, Homo sapiens
  misc_RNA (1)...(19): siRNA sense strand
cgaaauucuccauucauau

SEQ ID NO: 363972 - RNA, 19 nt, Homo sapiens
  misc_RNA (1)...(19): siRNA sense strand
uggaugaaguccgagaauu

SEQ ID NO: 363973 - RNA, 19 nt, Homo sapiens
  misc_RNA (1)...(19): siRNA sense strand
gacaacaaaggaagcaaug

SEQ ID NO: 363974 - RNA, 19 nt, Homo sapiens
  misc_RNA (1)...(19): siRNA sense strand
cagcaaacacagccaugaa

SEQ ID NO: 363975 - RNA, 19 nt, Homo sapiens
  misc_RNA (1)...(19): siRNA sense strand
caauuucuaucuccagcau

SEQ ID NO: 363976 - RNA, 19 nt, Homo sapiens
  misc_RNA (1)...(19): siRNA sense strand
cgagacauucugcugauug

SEQ ID NO: 363977 - RNA, 19 nt, Homo sapiens
  misc_RNA (1)...(19): siRNA sense strand
caugucggcccaaaucuga

SEQ ID NO: 363978 - RNA, 19 nt, Homo sapiens
  misc_RNA (1)...(19): siRNA sense strand
acuauuaucccuacacaau

SEQ ID NO: 363979 - RNA, 19 nt, Homo sapiens
  misc_RNA (1)...(19): siRNA sense strand
caacaaaggaagcaaugac

SEQ ID NO: 363980 - RNA, 19 nt, Homo sapiens
  misc_RNA (1)...(19): siRNA sense strand
auacacauguuccuuucug

SEQ ID NO: 363981 - RNA, 19 nt, Homo sapiens
  misc_RNA (1)...(19): siRNA sense strand
uuggacagcuguacaugau

SEQ ID NO: 363982 - RNA, 19 nt, Homo sapiens
  misc_RNA (1)...(19): siRNA sense strand
ccauucauauagaaaccaa

SEQ ID NO: 363983 - RNA, 19 nt, Homo sapiens
  misc_RNA (1)...(19): siRNA sense strand
caugcacucuucagauaag

SEQ ID NO: 363984 - RNA, 19 nt, Homo sapiens
  misc_RNA (1)...(19): siRNA sense strand
ggacauagacaggcuuuug

SEQ ID NO: 363985 - RNA, 19 nt, Homo sapiens
  misc_RNA (1)...(19): siRNA sense strand
ugauauugccugcgaugaa

SEQ ID NO: 363986 - RNA, 19 nt, Homo sapiens
  misc_RNA (1)...(19): siRNA sense strand
caccguagacgaguacaaa

SEQ ID NO: 363987 - RNA, 19 nt, Homo sapiens
  misc_RNA (1)...(19): siRNA sense strand
ccgagaagcggguguaucu

SEQ ID NO: 363988 - RNA, 19 nt, Homo sapiens
  misc_RNA (1)...(19): siRNA sense strand
ucaggaagccaccaacaag

SEQ ID NO: 363989 - RNA, 19 nt, Homo sapiens
  misc_RNA (1)...(19): siRNA sense strand
agaagcggguguaucucaa

SEQ ID NO: 363990 - RNA, 19 nt, Homo sapiens
  misc_RNA (1)...(19): siRNA sense strand
gcuacuacaaagaaucuga

SEQ ID NO: 363991 - RNA, 19 nt, Homo sapiens
  misc_RNA (1)...(19): siRNA sense strand
guagacgaguacaaaauug

SEQ ID NO: 363992 - RNA, 19 nt, Homo sapiens
  misc_RNA (1)...(19): siRNA sense strand
uuacagaauacacauguuc

SEQ ID NO: 363993 - RNA, 19 nt, Homo sapiens
  misc_RNA (1)...(19): siRNA sense strand
cugccgaaauucuccauuc

SEQ ID NO: 363994 - RNA, 19 nt, Homo sapiens
  misc_RNA (1)...(19): siRNA sense strand
caggaagccaccaacaaga

SEQ ID NO: 363995 - RNA, 19 nt, Homo sapiens
  misc_RNA (1)...(19): siRNA sense strand
ugaaguccgagaauuugaa

SEQ ID NO: 363996 - RNA, 19 nt, Homo sapiens
  misc_RNA (1)...(19): siRNA sense strand
aagaaucugaggauccuaa

SEQ ID NO: 363997 - RNA, 19 nt, Homo sapiens
  misc_RNA (1)...(19): siRNA sense strand
uuucgacaaugaagccaaa

SEQ ID NO: 363998 - RNA, 19 nt, Homo sapiens
  misc_RNA (1)...(19): siRNA sense strand
guaugaggacaacaaagga

SEQ ID NO: 363999 - RNA, 19 nt, Homo sapiens
  misc_RNA (1)...(19): siRNA sense strand
gucaucagccuaucaugug

SEQ ID NO: 364000 - RNA, 19 nt, Homo sapiens
  misc_RNA (1)...(19): siRNA sense strand
uaguugggcuagagcuguu

SEQ ID NO: 364001 - RNA, 19 nt, Homo sapiens
  misc_RNA (1)...(19): siRNA sense strand
acaagcuggugacugugaa

SEQ ID NO: 364002 - RNA, 19 nt, Homo sapiens
  misc_RNA (1)...(19): siRNA sense strand
caaagacguggagagagaa

SEQ ID NO: 364003 - RNA, 19 nt, Homo sapiens
  misc_RNA (1)...(19): siRNA sense strand
ugccgaaauucuccauuca

SEQ ID NO: 364004 - RNA, 19 nt, Homo sapiens
  misc_RNA (1)...(19): siRNA sense strand
uaagccaugucggcccaaa

SEQ ID NO: 364005 - RNA, 19 nt, Homo sapiens
  misc_RNA (1)...(19): siRNA sense strand
uggugacugugaaguuuga

SEQ ID NO: 364006 - RNA, 19 nt, Homo sapiens
  misc_RNA (1)...(19): siRNA sense strand
ccuaucaugugcuccuaca

SEQ ID NO: 364007 - RNA, 19 nt, Homo sapiens
  misc_RNA (1)...(19): siRNA sense strand
gagggaaggcuggagagau

SEQ ID NO: 364008 - RNA, 19 nt, Homo sapiens
  misc_RNA (1)...(19): siRNA sense strand
aaaccaaguaugaggacaa

SEQ ID NO: 364009 - RNA, 19 nt, Homo sapiens
  misc_RNA (1)...(19): siRNA sense strand
cuauuaucccuacacaauu

SEQ ID NO: 364010 - RNA, 19 nt, Homo sapiens
  misc_RNA (1)...(19): siRNA sense strand
cugaggauccuaagcacuu

SEQ ID NO: 364011 - RNA, 19 nt, Homo sapiens
  misc_RNA (1)...(19): siRNA sense strand
agacguggagagagaaguu

SEQ ID NO: 364012 - RNA, 19 nt, Homo sapiens
  misc_RNA (1)...(19): siRNA sense strand
aggaagccaccaacaagaa

SEQ ID NO: 364013 - RNA, 19 nt, Homo sapiens
  misc_RNA (1)...(19): siRNA sense strand
acaugacaauggaugaagu

SEQ ID NO: 364014 - RNA, 19 nt, Homo sapiens
  misc_RNA (1)...(19): siRNA sense strand
ccgagacauucugcugauu

SEQ ID NO: 364015 - RNA, 19 nt, Homo sapiens
  misc_RNA (1)...(19): siRNA sense strand
uaucaugugcuccuacaag

SEQ ID NO: 364016 - RNA, 19 nt, Homo sapiens
  misc_RNA (1)...(19): siRNA sense strand
gagcuguuguccccaaaau

SEQ ID NO: 364017 - RNA, 19 nt, Homo sapiens
  misc_RNA (1)...(19): siRNA sense strand
gcgcuacuacaaagaaucu

SEQ ID NO: 364018 - RNA, 19 nt, Homo sapiens
  misc_RNA (1)...(19): siRNA sense strand
uuccagagcgcuacuacaa

SEQ ID NO: 364019 - RNA, 19 nt, Homo sapiens
  misc_RNA (1)...(19): siRNA sense strand
ggaaggcuggagagauagu

SEQ ID NO: 364020 - RNA, 19 nt, Homo sapiens
  misc_RNA (1)...(19): siRNA sense strand
uacaugaucagcaaacaca

SEQ ID NO: 364021 - RNA, 19 nt, Homo sapiens
  misc_RNA (1)...(19): siRNA sense strand
gaaggcuuggaacuauuau

SEQ ID NO: 364022 - RNA, 19 nt, Homo sapiens
  misc_RNA (1)...(19): siRNA sense strand
gagagaaguuugcuuuauu

SEQ ID NO: 364023 - RNA, 19 nt, Homo sapiens
  misc_RNA (1)...(19): siRNA sense strand
ccaaagacguggagagaga

SEQ ID NO: 364024 - RNA, 19 nt, Homo sapiens
  misc_RNA (1)...(19): siRNA sense strand
ggagagagaaguuugcuuu

SEQ ID NO: 364025 - RNA, 19 nt, Homo sapiens
  misc_RNA (1)...(19): siRNA sense strand
ggacagcuguacaugauca

SEQ ID NO: 364026 - RNA, 19 nt, Homo sapiens
  misc_RNA (1)...(19): siRNA sense strand
gauauugccugcgaugaaa

SEQ ID NO: 364027 - RNA, 19 nt, Homo sapiens
  misc_RNA (1)...(19): siRNA sense strand
ccgaaauucuccauucaua

SEQ ID NO: 364028 - RNA, 19 nt, Homo sapiens
  misc_RNA (1)...(19): siRNA sense strand
gaauacacauguuccuuuc

SEQ ID NO: 364029 - RNA, 19 nt, Homo sapiens
  misc_RNA (1)...(19): siRNA sense strand
gaacuauuaucccuacaca

SEQ ID NO: 364030 - RNA, 19 nt, Homo sapiens
  misc_RNA (1)...(19): siRNA sense strand
gaccagaguggaacaauuu

SEQ ID NO: 364031 - RNA, 19 nt, Homo sapiens
  misc_RNA (1)...(19): siRNA sense strand
gagaaggcuuggaacuauu

SEQ ID NO: 364032 - RNA, 19 nt, Homo sapiens
  misc_RNA (1)...(19): siRNA sense strand
agggaaggcuggagagaua

SEQ ID NO: 364033 - RNA, 19 nt, Homo sapiens
  misc_RNA (1)...(19): siRNA sense strand
gagagagaaguuugcuuua

SEQ ID NO: 364034 - RNA, 19 nt, Homo sapiens
  misc_RNA (1)...(19): siRNA sense strand
agagaaguuugcuuuauug

SEQ ID NO: 364035 - RNA, 19 nt, Homo sapiens
  misc_RNA (1)...(19): siRNA sense strand
agagaaggcuuggaacuau

SEQ ID NO: 364036 - RNA, 19 nt, Homo sapiens
  misc_RNA (1)...(19): siRNA sense strand
gcuggugacugugaaguuu

SEQ ID NO: 364037 - RNA, 19 nt, Homo sapiens
  misc_RNA (1)...(19): siRNA sense strand
ccuacacaauuacagaaua

SEQ ID NO: 364038 - RNA, 19 nt, Homo sapiens
  misc_RNA (1)...(19): siRNA sense strand
ccagagcgcuacuacaaag

SEQ ID NO: 364039 - RNA, 19 nt, Homo sapiens
  misc_RNA (1)...(19): siRNA sense strand
ccuacaagcuggugacugu

SEQ ID NO: 364040 - RNA, 19 nt, Homo sapiens
  misc_RNA (1)...(19): siRNA sense strand
ggguguaucucaacagcaa

SEQ ID NO: 364041 - RNA, 19 nt, Homo sapiens
  misc_RNA (1)...(19): siRNA sense strand
agagagaaguuugcuuuau

SEQ ID NO: 364042 - RNA, 19 nt, Homo sapiens
  misc_RNA (1)...(19): siRNA sense strand
ugacagagaaggcuuggaa

SEQ ID NO: 364043 - RNA, 19 nt, Homo sapiens
  misc_RNA (1)...(19): siRNA sense strand
gcaugccgcucaccguaga

SEQ ID NO: 364044 - RNA, 19 nt, Homo sapiens
  misc_RNA (1)...(19): siRNA sense strand
gcaaacacagccaugaaca

SEQ ID NO: 364045 - RNA, 19 nt, Homo sapiens
  misc_RNA (1)...(19): siRNA sense strand
ggacaacaaaggaagcaau

SEQ ID NO: 364046 - RNA, 19 nt, Homo sapiens
  misc_RNA (1)...(19): siRNA sense strand
agaaggcuuggaacuauua

SEQ ID NO: 364047 - RNA, 19 nt, Homo sapiens
  misc_RNA (1)...(19): siRNA sense strand
cagagaaggcuuggaacua

SEQ ID NO: 364048 - RNA, 19 nt, Homo sapiens
  misc_RNA (1)...(19): siRNA sense strand
agaccagaguggaacaauu

SEQ ID NO: 364049 - RNA, 19 nt, Homo sapiens
  misc_RNA (1)...(19): siRNA sense strand
agaauacacauguuccuuu

SEQ ID NO: 364050 - RNA, 19 nt, Homo sapiens
  misc_RNA (1)...(19): siRNA sense strand
acacagccaugaacagagu

SEQ ID NO: 364051 - RNA, 19 nt, Homo sapiens
  misc_RNA (1)...(19): siRNA sense strand
caaagaaucugaggauccu

SEQ ID NO: 364052 - RNA, 19 nt, Homo sapiens
  misc_RNA (1)...(19): siRNA sense strand
ccaaguaugaggacaacaa

SEQ ID NO: 364053 - RNA, 19 nt, Homo sapiens
  misc_RNA (1)...(19): siRNA sense strand
aaacacagccaugaacaga

SEQ ID NO: 364054 - RNA, 19 nt, Homo sapiens
  misc_RNA (1)...(19): siRNA sense strand
gagacauucugcugauugg

SEQ ID NO: 364055 - RNA, 19 nt, Homo sapiens
  misc_RNA (1)...(19): siRNA sense strand
caaggugguccgagacauu

SEQ ID NO: 364056 - RNA, 19 nt, Homo sapiens
  misc_RNA (1)...(19): siRNA sense strand
cuacaaagaaucugaggau

SEQ ID NO: 364057 - RNA, 19 nt, Homo sapiens
  misc_RNA (1)...(19): siRNA sense strand
cuacacaauuacagaauac

SEQ ID NO: 364058 - RNA, 19 nt, Homo sapiens
  misc_RNA (1)...(19): siRNA sense strand
gagcgcuacuacaaagaau

SEQ ID NO: 364059 - RNA, 19 nt, Homo sapiens
  misc_RNA (1)...(19): siRNA sense strand
caaguaugaggacaacaaa

SEQ ID NO: 364060 - RNA, 19 nt, Homo sapiens
  misc_RNA (1)...(19): siRNA sense strand
gagaaguuugcuuuauuga

SEQ ID NO: 364061 - RNA, 19 nt, Homo sapiens
  misc_RNA (1)...(19): siRNA sense strand
cgaaauucuccauucauau

SEQ ID NO: 364062 - RNA, 19 nt, Homo sapiens
  misc_RNA (1)...(19): siRNA sense strand
gacaacaaaggaagcaaug

SEQ ID NO: 364063 - RNA, 19 nt, Homo sapiens
  misc_RNA (1)...(19): siRNA sense strand
cagcaaacacagccaugaa

SEQ ID NO: 364064 - RNA, 19 nt, Homo sapiens
  misc_RNA (1)...(19): siRNA sense strand
cgagacauucugcugauug

SEQ ID NO: 364065 - RNA, 19 nt, Homo sapiens
  misc_RNA (1)...(19): siRNA sense strand
acuauuaucccuacacaau

SEQ ID NO: 364066 - RNA, 19 nt, Homo sapiens
  misc_RNA (1)...(19): siRNA sense strand
caacaaaggaagcaaugac

SEQ ID NO: 364067 - RNA, 19 nt, Homo sapiens
  misc_RNA (1)...(19): siRNA sense strand
uuggacagcuguacaugau

SEQ ID NO: 364068 - RNA, 19 nt, Homo sapiens
  misc_RNA (1)...(19): siRNA sense strand
auacacauguuccuuucug

SEQ ID NO: 364069 - RNA, 19 nt, Homo sapiens
  misc_RNA (1)...(19): siRNA sense strand
ccauucauauagaaaccaa

SEQ ID NO: 364070 - RNA, 19 nt, Homo sapiens
  misc_RNA (1)...(19): siRNA sense strand
ggacauagacaggcuuuug

SEQ ID NO: 364071 - RNA, 19 nt, Homo sapiens
  misc_RNA (1)...(19): siRNA sense strand
ugauauugccugcgaugaa

SEQ ID NO: 364072 - RNA, 19 nt, Homo sapiens
  misc_RNA (1)...(19): siRNA sense strand
agaagcggguguaucucaa

SEQ ID NO: 364073 - RNA, 19 nt, Homo sapiens
  misc_RNA (1)...(19): siRNA sense strand
guagacgaguacaaaauug

SEQ ID NO: 364074 - RNA, 19 nt, Homo sapiens
  misc_RNA (1)...(19): siRNA sense strand
gcuacuacaaagaaucuga

SEQ ID NO: 364075 - RNA, 19 nt, Homo sapiens
  misc_RNA (1)...(19): siRNA sense strand
caccguagacgaguacaaa

SEQ ID NO: 364076 - RNA, 19 nt, Homo sapiens
  misc_RNA (1)...(19): siRNA sense strand
ccgagaagcggguguaucu

SEQ ID NO: 364077 - RNA, 19 nt, Homo sapiens
  misc_RNA (1)...(19): siRNA sense strand
uuacagaauacacauguuc

SEQ ID NO: 364078 - RNA, 19 nt, Homo sapiens
  misc_RNA (1)...(19): siRNA sense strand
cugccgaaauucuccauuc

SEQ ID NO: 364079 - RNA, 19 nt, Homo sapiens
  misc_RNA (1)...(19): siRNA sense strand
aagaaucugaggauccuaa

SEQ ID NO: 364080 - RNA, 19 nt, Homo sapiens
  misc_RNA (1)...(19): siRNA sense strand
uuucgacaaugaagccaaa

SEQ ID NO: 364081 - RNA, 19 nt, Homo sapiens
  misc_RNA (1)...(19): siRNA sense strand
guaugaggacaacaaagga

SEQ ID NO: 364082 - RNA, 19 nt, Homo sapiens
  misc_RNA (1)...(19): siRNA sense strand
gucaucagccuaucaugug

SEQ ID NO: 364083 - RNA, 19 nt, Homo sapiens
  misc_RNA (1)...(19): siRNA sense strand
uaguugggcuagagcuguu

SEQ ID NO: 364084 - RNA, 19 nt, Homo sapiens
  misc_RNA (1)...(19): siRNA sense strand
acaagcuggugacugugaa

SEQ ID NO: 364085 - RNA, 19 nt, Homo sapiens
  misc_RNA (1)...(19): siRNA sense strand
caaagacguggagagagaa

SEQ ID NO: 364086 - RNA, 19 nt, Homo sapiens
  misc_RNA (1)...(19): siRNA sense strand
ugccgaaauucuccauuca

SEQ ID NO: 364087 - RNA, 19 nt, Homo sapiens
  misc_RNA (1)...(19): siRNA sense strand
uggugacugugaaguuuga

SEQ ID NO: 364088 - RNA, 19 nt, Homo sapiens
  misc_RNA (1)...(19): siRNA sense strand
ccuaucaugugcuccuaca

SEQ ID NO: 364089 - RNA, 19 nt, Homo sapiens
  misc_RNA (1)...(19): siRNA sense strand
gagggaaggcuggagagau

SEQ ID NO: 364090 - RNA, 19 nt, Homo sapiens
  misc_RNA (1)...(19): siRNA sense strand
aaaccaaguaugaggacaa

SEQ ID NO: 364091 - RNA, 19 nt, Homo sapiens
  misc_RNA (1)...(19): siRNA sense strand
cuauuaucccuacacaauu

SEQ ID NO: 364092 - RNA, 19 nt, Homo sapiens
  misc_RNA (1)...(19): siRNA sense strand
cugaggauccuaagcacuu

SEQ ID NO: 364093 - RNA, 19 nt, Homo sapiens
  misc_RNA (1)...(19): siRNA sense strand
agacguggagagagaaguu

SEQ ID NO: 364094 - RNA, 19 nt, Homo sapiens
  misc_RNA (1)...(19): siRNA sense strand
ccgagacauucugcugauu

SEQ ID NO: 364095 - RNA, 19 nt, Homo sapiens
  misc_RNA (1)...(19): siRNA sense strand
uaucaugugcuccuacaag

SEQ ID NO: 364096 - RNA, 19 nt, Homo sapiens
  misc_RNA (1)...(19): siRNA sense strand
gagcuguuguccccaaaau

SEQ ID NO: 364097 - RNA, 19 nt, Homo sapiens
  misc_RNA (1)...(19): siRNA sense strand
gcgcuacuacaaagaaucu

SEQ ID NO: 364098 - RNA, 19 nt, Homo sapiens
  misc_RNA (1)...(19): siRNA sense strand
uuccagagcgcuacuacaa

SEQ ID NO: 364099 - RNA, 19 nt, Homo sapiens
  misc_RNA (1)...(19): siRNA sense strand
gaaggcuuggaacuauuau

SEQ ID NO: 364100 - RNA, 19 nt, Homo sapiens
  misc_RNA (1)...(19): siRNA sense strand
ggaaggcuggagagauagu

SEQ ID NO: 364101 - RNA, 19 nt, Homo sapiens
  misc_RNA (1)...(19): siRNA sense strand
uacaugaucagcaaacaca

SEQ ID NO: 364102 - RNA, 19 nt, Homo sapiens
  misc_RNA (1)...(19): siRNA sense strand
cagaauacacauguuccuu

SEQ ID NO: 364103 - RNA, 19 nt, Homo sapiens
  misc_RNA (1)...(19): siRNA sense strand
ggaagacccuggcgaguau

SEQ ID NO: 364104 - RNA, 19 nt, Homo sapiens
  misc_RNA (1)...(19): siRNA sense strand
ugacaucacuggccauaaa

SEQ ID NO: 364105 - RNA, 19 nt, Homo sapiens
  misc_RNA (1)...(19): siRNA sense strand
gaaagccgcuccugacauc

SEQ ID NO: 364106 - RNA, 19 nt, Homo sapiens
  misc_RNA (1)...(19): siRNA sense strand
ggagugagaacaagaauga

SEQ ID NO: 364107 - RNA, 19 nt, Homo sapiens
  misc_RNA (1)...(19): siRNA sense strand
ccaacaaucacaaagauaa

SEQ ID NO: 364108 - RNA, 19 nt, Homo sapiens
  misc_RNA (1)...(19): siRNA sense strand
gaagaggccagaugagguu

SEQ ID NO: 364109 - RNA, 19 nt, Homo sapiens
  misc_RNA (1)...(19): siRNA sense strand
ccagagaaacacaaauuaa

SEQ ID NO: 364110 - RNA, 19 nt, Homo sapiens
  misc_RNA (1)...(19): siRNA sense strand
ugaaccagcuggaccaaug

SEQ ID NO: 364111 - RNA, 19 nt, Homo sapiens
  misc_RNA (1)...(19): siRNA sense strand
acacugaguugaacauugu

SEQ ID NO: 364112 - RNA, 19 nt, Homo sapiens
  misc_RNA (1)...(19): siRNA sense strand
ggugaucauuguuguguau

SEQ ID NO: 364113 - RNA, 19 nt, Homo sapiens
  misc_RNA (1)...(19): siRNA sense strand
gugaagaggucauuauucg

SEQ ID NO: 364114 - RNA, 19 nt, Homo sapiens
  misc_RNA (1)...(19): siRNA sense strand
ggauauggcgcaagaagga

SEQ ID NO: 364115 - RNA, 19 nt, Homo sapiens
  misc_RNA (1)...(19): siRNA sense strand
gcucucacacccuuacaua

SEQ ID NO: 364116 - RNA, 19 nt, Homo sapiens
  misc_RNA (1)...(19): siRNA sense strand
gccagagaaacacaaauua

SEQ ID NO: 364117 - RNA, 19 nt, Homo sapiens
  misc_RNA (1)...(19): siRNA sense strand
gccgagagcugaggauuca

SEQ ID NO: 364118 - RNA, 19 nt, Homo sapiens
  misc_RNA (1)...(19): siRNA sense strand
ugucagcgcuccuaaagca

SEQ ID NO: 364119 - RNA, 19 nt, Homo sapiens
  misc_RNA (1)...(19): siRNA sense strand
gcaggaugccacuauguau

SEQ ID NO: 364120 - RNA, 19 nt, Homo sapiens
  misc_RNA (1)...(19): siRNA sense strand
ccacugcguauaucacuuu

SEQ ID NO: 364121 - RNA, 19 nt, Homo sapiens
  misc_RNA (1)...(19): siRNA sense strand
gaaccagcuggaccaauga

SEQ ID NO: 364122 - RNA, 19 nt, Homo sapiens
  misc_RNA (1)...(19): siRNA sense strand
uaccaacaaucacaaagau

SEQ ID NO: 364123 - RNA, 19 nt, Homo sapiens
  misc_RNA (1)...(19): siRNA sense strand
uaaagcaaacgccaccauu

SEQ ID NO: 364124 - RNA, 19 nt, Homo sapiens
  misc_RNA (1)...(19): siRNA sense strand
gacuggauauggcgcaaga

SEQ ID NO: 364125 - RNA, 19 nt, Homo sapiens
  misc_RNA (1)...(19): siRNA sense strand
acauacagcuacuggacaa

SEQ ID NO: 364126 - RNA, 19 nt, Homo sapiens
  misc_RNA (1)...(19): siRNA sense strand
ggccauaaacggagugaga

SEQ ID NO: 364127 - RNA, 19 nt, Homo sapiens
  misc_RNA (1)...(19): siRNA sense strand
uggaguacaggaucaauaa

SEQ ID NO: 364128 - RNA, 19 nt, Homo sapiens
  misc_RNA (1)...(19): siRNA sense strand
uaagaaugccagcaacaug

SEQ ID NO: 364129 - RNA, 19 nt, Homo sapiens
  misc_RNA (1)...(19): siRNA sense strand
gcaaacgccaccauugaag

SEQ ID NO: 364130 - RNA, 19 nt, Homo sapiens
  misc_RNA (1)...(19): siRNA sense strand
aagcaaacgccaccauuga

SEQ ID NO: 364131 - RNA, 19 nt, Homo sapiens
  misc_RNA (1)...(19): siRNA sense strand
ggaugcccauggacauugu

SEQ ID NO: 364132 - RNA, 19 nt, Homo sapiens
  misc_RNA (1)...(19): siRNA sense strand
cggaagacccuggcgagua

SEQ ID NO: 364133 - RNA, 19 nt, Homo sapiens
  misc_RNA (1)...(19): siRNA sense strand
ccaacucuaccaacaauca

SEQ ID NO: 364134 - RNA, 19 nt, Homo sapiens
  misc_RNA (1)...(19): siRNA sense strand
ccagugaagaggucauuau

SEQ ID NO: 364135 - RNA, 19 nt, Homo sapiens
  misc_RNA (1)...(19): siRNA sense strand
aaagcaaacgccaccauug

SEQ ID NO: 364136 - RNA, 19 nt, Homo sapiens
  misc_RNA (1)...(19): siRNA sense strand
aaccaacucuaccaacaau

SEQ ID NO: 364137 - RNA, 19 nt, Homo sapiens
  misc_RNA (1)...(19): siRNA sense strand
uacacugaguugaacauug

SEQ ID NO: 364138 - RNA, 19 nt, Homo sapiens
  misc_RNA (1)...(19): siRNA sense strand
cgccagagaaacacaaauu

SEQ ID NO: 364139 - RNA, 19 nt, Homo sapiens
  misc_RNA (1)...(19): siRNA sense strand
agaggaagaggccagauga

SEQ ID NO: 364140 - RNA, 19 nt, Homo sapiens
  misc_RNA (1)...(19): siRNA sense strand
caggaugccacuauguauu

SEQ ID NO: 364141 - RNA, 19 nt, Homo sapiens
  misc_RNA (1)...(19): siRNA sense strand
cagugaagaggucauuauu

SEQ ID NO: 364142 - RNA, 19 nt, Homo sapiens
  misc_RNA (1)...(19): siRNA sense strand
cacuauguauugcaaguca

SEQ ID NO: 364143 - RNA, 19 nt, Homo sapiens
  misc_RNA (1)...(19): siRNA sense strand
agaacgggaugcccaugga

SEQ ID NO: 364144 - RNA, 19 nt, Homo sapiens
  misc_RNA (1)...(19): siRNA sense strand
cuaccaacaaucacaaaga

SEQ ID NO: 364145 - RNA, 19 nt, Homo sapiens
  misc_RNA (1)...(19): siRNA sense strand
guaagaaugccagcaacau

SEQ ID NO: 364146 - RNA, 19 nt, Homo sapiens
  misc_RNA (1)...(19): siRNA sense strand
aaaccaacucuaccaacaa

SEQ ID NO: 364147 - RNA, 19 nt, Homo sapiens
  misc_RNA (1)...(19): siRNA sense strand
ugagguuccugacgaugau

SEQ ID NO: 364148 - RNA, 19 nt, Homo sapiens
  misc_RNA (1)...(19): siRNA sense strand
ugggaauucuggcugaaau

SEQ ID NO: 364149 - RNA, 19 nt, Homo sapiens
  misc_RNA (1)...(19): siRNA sense strand
ucuggccgcuucuucauca

SEQ ID NO: 364150 - RNA, 19 nt, Homo sapiens
  misc_RNA (1)...(19): siRNA sense strand
ccagcaacauggaguacag

SEQ ID NO: 364151 - RNA, 19 nt, Homo sapiens
  misc_RNA (1)...(19): siRNA sense strand
ggccgcuucuucaucauca

SEQ ID NO: 364152 - RNA, 19 nt, Homo sapiens
  misc_RNA (1)...(19): siRNA sense strand
aaacggagugagaacaaga

SEQ ID NO: 364153 - RNA, 19 nt, Homo sapiens
  misc_RNA (1)...(19): siRNA sense strand
uacagcuacuggacaaaga

SEQ ID NO: 364154 - RNA, 19 nt, Homo sapiens
  misc_RNA (1)...(19): siRNA sense strand
cugcguauaucacuuuguc

SEQ ID NO: 364155 - RNA, 19 nt, Homo sapiens
  misc_RNA (1)...(19): siRNA sense strand
uggcgaguaugaauguaau

SEQ ID NO: 364156 - RNA, 19 nt, Homo sapiens
  misc_RNA (1)...(19): siRNA sense strand
gccacuauguauugcaagu

SEQ ID NO: 364157 - RNA, 19 nt, Homo sapiens
  misc_RNA (1)...(19): siRNA sense strand
uaaacggagugagaacaag

SEQ ID NO: 364158 - RNA, 19 nt, Homo sapiens
  misc_RNA (1)...(19): siRNA sense strand
ucucacacccuuacauaca

SEQ ID NO: 364159 - RNA, 19 nt, Homo sapiens
  misc_RNA (1)...(19): siRNA sense strand
caaacgccaccauugaagu

SEQ ID NO: 364160 - RNA, 19 nt, Homo sapiens
  misc_RNA (1)...(19): siRNA sense strand
ucagcgcuccuaaagcaaa

SEQ ID NO: 364161 - RNA, 19 nt, Homo sapiens
  misc_RNA (1)...(19): siRNA sense strand
gaaaauuacacugaguuga

SEQ ID NO: 364162 - RNA, 19 nt, Homo sapiens
  misc_RNA (1)...(19): siRNA sense strand
gccauaaacggagugagaa

SEQ ID NO: 364163 - RNA, 19 nt, Homo sapiens
  misc_RNA (1)...(19): siRNA sense strand
cgccaccauugaagugaaa

SEQ ID NO: 364164 - RNA, 19 nt, Homo sapiens
  misc_RNA (1)...(19): siRNA sense strand
aaacgccaccauugaagug

SEQ ID NO: 364165 - RNA, 19 nt, Homo sapiens
  misc_RNA (1)...(19): siRNA sense strand
gggaugcccauggacauug

SEQ ID NO: 364166 - RNA, 19 nt, Homo sapiens
  misc_RNA (1)...(19): siRNA sense strand
aggaugccacuauguauug

SEQ ID NO: 364167 - RNA, 19 nt, Homo sapiens
  misc_RNA (1)...(19): siRNA sense strand
cugaaauuaucauccuugu

SEQ ID NO: 364168 - RNA, 19 nt, Homo sapiens
  misc_RNA (1)...(19): siRNA sense strand
aaauuacacugaguugaac

SEQ ID NO: 364169 - RNA, 19 nt, Homo sapiens
  misc_RNA (1)...(19): siRNA sense strand
ggaaaauuacacugaguug

SEQ ID NO: 364170 - RNA, 19 nt, Homo sapiens
  misc_RNA (1)...(19): siRNA sense strand
cugucacccugcaguguaa

SEQ ID NO: 364171 - RNA, 19 nt, Homo sapiens
  misc_RNA (1)...(19): siRNA sense strand
gugaaagccgcuccugaca

SEQ ID NO: 364172 - RNA, 19 nt, Homo sapiens
  misc_RNA (1)...(19): siRNA sense strand
gcuacuggacaaagaaugg

SEQ ID NO: 364173 - RNA, 19 nt, Homo sapiens
  misc_RNA (1)...(19): siRNA sense strand
ccugucacccugcagugua

SEQ ID NO: 364174 - RNA, 19 nt, Homo sapiens
  misc_RNA (1)...(19): siRNA sense strand
aaaaccaacucuaccaaca

SEQ ID NO: 364175 - RNA, 19 nt, Homo sapiens
  misc_RNA (1)...(19): siRNA sense strand
gcaacauggaguacaggau

SEQ ID NO: 364176 - RNA, 19 nt, Homo sapiens
  misc_RNA (1)...(19): siRNA sense strand
ggaagacccuggcgaguau

SEQ ID NO: 364177 - RNA, 19 nt, Homo sapiens
  misc_RNA (1)...(19): siRNA sense strand
ugacaucacuggccauaaa

SEQ ID NO: 364178 - RNA, 19 nt, Homo sapiens
  misc_RNA (1)...(19): siRNA sense strand
gaaagccgcuccugacauc

SEQ ID NO: 364179 - RNA, 19 nt, Homo sapiens
  misc_RNA (1)...(19): siRNA sense strand
ggagugagaacaagaauga

SEQ ID NO: 364180 - RNA, 19 nt, Homo sapiens
  misc_RNA (1)...(19): siRNA sense strand
ccaacaaucacaaagauaa

SEQ ID NO: 364181 - RNA, 19 nt, Homo sapiens
  misc_RNA (1)...(19): siRNA sense strand
gaagaggccagaugagguu

SEQ ID NO: 364182 - RNA, 19 nt, Homo sapiens
  misc_RNA (1)...(19): siRNA sense strand
ccagagaaacacaaauuaa

SEQ ID NO: 364183 - RNA, 19 nt, Homo sapiens
  misc_RNA (1)...(19): siRNA sense strand
ugaaccagcuggaccaaug

SEQ ID NO: 364184 - RNA, 19 nt, Homo sapiens
  misc_RNA (1)...(19): siRNA sense strand
acacugaguugaacauugu

SEQ ID NO: 364185 - RNA, 19 nt, Homo sapiens
  misc_RNA (1)...(19): siRNA sense strand
ggugaucauuguuguguau

SEQ ID NO: 364186 - RNA, 19 nt, Homo sapiens
  misc_RNA (1)...(19): siRNA sense strand
ggauauggcgcaagaagga

SEQ ID NO: 364187 - RNA, 19 nt, Homo sapiens
  misc_RNA (1)...(19): siRNA sense strand
gcucucacacccuuacaua

SEQ ID NO: 364188 - RNA, 19 nt, Homo sapiens
  misc_RNA (1)...(19): siRNA sense strand
gccagagaaacacaaauua

SEQ ID NO: 364189 - RNA, 19 nt, Homo sapiens
  misc_RNA (1)...(19): siRNA sense strand
gccgagagcugaggauuca

SEQ ID NO: 364190 - RNA, 19 nt, Homo sapiens
  misc_RNA (1)...(19): siRNA sense strand
ugucagcgcuccuaaagca

SEQ ID NO: 364191 - RNA, 19 nt, Homo sapiens
  misc_RNA (1)...(19): siRNA sense strand
gcaggaugccacuauguau

SEQ ID NO: 364192 - RNA, 19 nt, Homo sapiens
  misc_RNA (1)...(19): siRNA sense strand
ccacugcguauaucacuuu

SEQ ID NO: 364193 - RNA, 19 nt, Homo sapiens
  misc_RNA (1)...(19): siRNA sense strand
gaaccagcuggaccaauga

SEQ ID NO: 364194 - RNA, 19 nt, Homo sapiens
  misc_RNA (1)...(19): siRNA sense strand
uaccaacaaucacaaagau

SEQ ID NO: 364195 - RNA, 19 nt, Homo sapiens
  misc_RNA (1)...(19): siRNA sense strand
uaaagcaaacgccaccauu

SEQ ID NO: 364196 - RNA, 19 nt, Homo sapiens
  misc_RNA (1)...(19): siRNA sense strand
gacuggauauggcgcaaga

SEQ ID NO: 364197 - RNA, 19 nt, Homo sapiens
  misc_RNA (1)...(19): siRNA sense strand
acauacagcuacuggacaa

SEQ ID NO: 364198 - RNA, 19 nt, Homo sapiens
  misc_RNA (1)...(19): siRNA sense strand
ggccauaaacggagugaga

SEQ ID NO: 364199 - RNA, 19 nt, Homo sapiens
  misc_RNA (1)...(19): siRNA sense strand
uggaguacaggaucaauaa

SEQ ID NO: 364200 - RNA, 19 nt, Homo sapiens
  misc_RNA (1)...(19): siRNA sense strand
uaagaaugccagcaacaug

SEQ ID NO: 364201 - RNA, 19 nt, Homo sapiens
  misc_RNA (1)...(19): siRNA sense strand
gcaaacgccaccauugaag

SEQ ID NO: 364202 - RNA, 19 nt, Homo sapiens
  misc_RNA (1)...(19): siRNA sense strand
aagcaaacgccaccauuga

SEQ ID NO: 364203 - RNA, 19 nt, Homo sapiens
  misc_RNA (1)...(19): siRNA sense strand
ggaugcccauggacauugu

SEQ ID NO: 364204 - RNA, 19 nt, Homo sapiens
  misc_RNA (1)...(19): siRNA sense strand
cggaagacccuggcgagua

SEQ ID NO: 364205 - RNA, 19 nt, Homo sapiens
  misc_RNA (1)...(19): siRNA sense strand
ccaacucuaccaacaauca

SEQ ID NO: 364206 - RNA, 19 nt, Homo sapiens
  misc_RNA (1)...(19): siRNA sense strand
aaagcaaacgccaccauug

SEQ ID NO: 364207 - RNA, 19 nt, Homo sapiens
  misc_RNA (1)...(19): siRNA sense strand
aaccaacucuaccaacaau

SEQ ID NO: 364208 - RNA, 19 nt, Homo sapiens
  misc_RNA (1)...(19): siRNA sense strand
uacacugaguugaacauug

SEQ ID NO: 364209 - RNA, 19 nt, Homo sapiens
  misc_RNA (1)...(19): siRNA sense strand
cgccagagaaacacaaauu

SEQ ID NO: 364210 - RNA, 19 nt, Homo sapiens
  misc_RNA (1)...(19): siRNA sense strand
agaggaagaggccagauga

SEQ ID NO: 364211 - RNA, 19 nt, Homo sapiens
  misc_RNA (1)...(19): siRNA sense strand
caggaugccacuauguauu

SEQ ID NO: 364212 - RNA, 19 nt, Homo sapiens
  misc_RNA (1)...(19): siRNA sense strand
cacuauguauugcaaguca

SEQ ID NO: 364213 - RNA, 19 nt, Homo sapiens
  misc_RNA (1)...(19): siRNA sense strand
agaacgggaugcccaugga

SEQ ID NO: 364214 - RNA, 19 nt, Homo sapiens
  misc_RNA (1)...(19): siRNA sense strand
cuaccaacaaucacaaaga

SEQ ID NO: 364215 - RNA, 19 nt, Homo sapiens
  misc_RNA (1)...(19): siRNA sense strand
guaagaaugccagcaacau

SEQ ID NO: 364216 - RNA, 19 nt, Homo sapiens
  misc_RNA (1)...(19): siRNA sense strand
aaaccaacucuaccaacaa

SEQ ID NO: 364217 - RNA, 19 nt, Homo sapiens
  misc_RNA (1)...(19): siRNA sense strand
ugagguuccugacgaugau

SEQ ID NO: 364218 - RNA, 19 nt, Homo sapiens
  misc_RNA (1)...(19): siRNA sense strand
ugggaauucuggcugaaau

SEQ ID NO: 364219 - RNA, 19 nt, Homo sapiens
  misc_RNA (1)...(19): siRNA sense strand
ucuggccgcuucuucauca

SEQ ID NO: 364220 - RNA, 19 nt, Homo sapiens
  misc_RNA (1)...(19): siRNA sense strand
uacagcuacuggacaaaga

SEQ ID NO: 364221 - RNA, 19 nt, Homo sapiens
  misc_RNA (1)...(19): siRNA sense strand
ggccgcuucuucaucauca

SEQ ID NO: 364222 - RNA, 19 nt, Homo sapiens
  misc_RNA (1)...(19): siRNA sense strand
ccagcaacauggaguacag

SEQ ID NO: 364223 - RNA, 19 nt, Homo sapiens
  misc_RNA (1)...(19): siRNA sense strand
aaacggagugagaacaaga

SEQ ID NO: 364224 - RNA, 19 nt, Homo sapiens
  misc_RNA (1)...(19): siRNA sense strand
cugcguauaucacuuuguc

SEQ ID NO: 364225 - RNA, 19 nt, Homo sapiens
  misc_RNA (1)...(19): siRNA sense strand
uggcgaguaugaauguaau

SEQ ID NO: 364226 - RNA, 19 nt, Homo sapiens
  misc_RNA (1)...(19): siRNA sense strand
gccacuauguauugcaagu

SEQ ID NO: 364227 - RNA, 19 nt, Homo sapiens
  misc_RNA (1)...(19): siRNA sense strand
uaaacggagugagaacaag

SEQ ID NO: 364228 - RNA, 19 nt, Homo sapiens
  misc_RNA (1)...(19): siRNA sense strand
ucucacacccuuacauaca

SEQ ID NO: 364229 - RNA, 19 nt, Homo sapiens
  misc_RNA (1)...(19): siRNA sense strand
caaacgccaccauugaagu

SEQ ID NO: 364230 - RNA, 19 nt, Homo sapiens
  misc_RNA (1)...(19): siRNA sense strand
ucagcgcuccuaaagcaaa

SEQ ID NO: 364231 - RNA, 19 nt, Homo sapiens
  misc_RNA (1)...(19): siRNA sense strand
gaaaauuacacugaguuga

SEQ ID NO: 364232 - RNA, 19 nt, Homo sapiens
  misc_RNA (1)...(19): siRNA sense strand
gccauaaacggagugagaa

SEQ ID NO: 364233 - RNA, 19 nt, Homo sapiens
  misc_RNA (1)...(19): siRNA sense strand
cgccaccauugaagugaaa

SEQ ID NO: 364234 - RNA, 19 nt, Homo sapiens
  misc_RNA (1)...(19): siRNA sense strand
aaacgccaccauugaagug

SEQ ID NO: 364235 - RNA, 19 nt, Homo sapiens
  misc_RNA (1)...(19): siRNA sense strand
gggaugcccauggacauug

SEQ ID NO: 364236 - RNA, 19 nt, Homo sapiens
  misc_RNA (1)...(19): siRNA sense strand
aggaugccacuauguauug

SEQ ID NO: 364237 - RNA, 19 nt, Homo sapiens
  misc_RNA (1)...(19): siRNA sense strand
cugaaauuaucauccuugu

SEQ ID NO: 364238 - RNA, 19 nt, Homo sapiens
  misc_RNA (1)...(19): siRNA sense strand
aaauuacacugaguugaac

SEQ ID NO: 364239 - RNA, 19 nt, Homo sapiens
  misc_RNA (1)...(19): siRNA sense strand
ggaaaauuacacugaguug

SEQ ID NO: 364240 - RNA, 19 nt, Homo sapiens
  misc_RNA (1)...(19): siRNA sense strand
cugucacccugcaguguaa

SEQ ID NO: 364241 - RNA, 19 nt, Homo sapiens
  misc_RNA (1)...(19): siRNA sense strand
gugaaagccgcuccugaca

SEQ ID NO: 364242 - RNA, 19 nt, Homo sapiens
  misc_RNA (1)...(19): siRNA sense strand
ccugucacccugcagugua

SEQ ID NO: 364243 - RNA, 19 nt, Homo sapiens
  misc_RNA (1)...(19): siRNA sense strand
gcuacuggacaaagaaugg

SEQ ID NO: 364244 - RNA, 19 nt, Homo sapiens
  misc_RNA (1)...(19): siRNA sense strand
aaaaccaacucuaccaaca

SEQ ID NO: 364245 - RNA, 19 nt, Homo sapiens
  misc_RNA (1)...(19): siRNA sense strand
gcaacauggaguacaggau

SEQ ID NO: 364246 - RNA, 19 nt, Homo sapiens
  misc_RNA (1)...(19): siRNA sense strand
gaacacagcgugcagauuu

SEQ ID NO: 364247 - RNA, 19 nt, Homo sapiens
  misc_RNA (1)...(19): siRNA sense strand
gcaaauccaagaucaacua

SEQ ID NO: 364248 - RNA, 19 nt, Homo sapiens
  misc_RNA (1)...(19): siRNA sense strand
ggaggccuauggagaguuu

SEQ ID NO: 364249 - RNA, 19 nt, Homo sapiens
  misc_RNA (1)...(19): siRNA sense strand
ggacauugacaacaucauu

SEQ ID NO: 364250 - RNA, 19 nt, Homo sapiens
  misc_RNA (1)...(19): siRNA sense strand
gagaccaucaccauaauuu

SEQ ID NO: 364251 - RNA, 19 nt, Homo sapiens
  misc_RNA (1)...(19): siRNA sense strand
ggaggaagguggagaccau

SEQ ID NO: 364252 - RNA, 19 nt, Homo sapiens
  misc_RNA (1)...(19): siRNA sense strand
gggagaauguccaggaugu

SEQ ID NO: 364253 - RNA, 19 nt, Homo sapiens
  misc_RNA (1)...(19): siRNA sense strand
gacaaagccucagaagaga

SEQ ID NO: 364254 - RNA, 19 nt, Homo sapiens
  misc_RNA (1)...(19): siRNA sense strand
ggaaggagguuuuacugaa

SEQ ID NO: 364255 - RNA, 19 nt, Homo sapiens
  misc_RNA (1)...(19): siRNA sense strand
gaguuucucugcauguuug

SEQ ID NO: 364256 - RNA, 19 nt, Homo sapiens
  misc_RNA (1)...(19): siRNA sense strand
gacauugacaacaucauua

SEQ ID NO: 364257 - RNA, 19 nt, Homo sapiens
  misc_RNA (1)...(19): siRNA sense strand
guccucagguggcaguuua

SEQ ID NO: 364258 - RNA, 19 nt, Homo sapiens
  misc_RNA (1)...(19): siRNA sense strand
cagaggugauccaacagua

SEQ ID NO: 364259 - RNA, 19 nt, Homo sapiens
  misc_RNA (1)...(19): siRNA sense strand
gaaggagguuuuacugaaa

SEQ ID NO: 364260 - RNA, 19 nt, Homo sapiens
  misc_RNA (1)...(19): siRNA sense strand
ugacugacccugauggaaa

SEQ ID NO: 364261 - RNA, 19 nt, Homo sapiens
  misc_RNA (1)...(19): siRNA sense strand
agacaaagccucagaagag

SEQ ID NO: 364262 - RNA, 19 nt, Homo sapiens
  misc_RNA (1)...(19): siRNA sense strand
gacaacaccuacagcuuca

SEQ ID NO: 364263 - RNA, 19 nt, Homo sapiens
  misc_RNA (1)...(19): siRNA sense strand
gaauccagaugacuauuuu

SEQ ID NO: 364264 - RNA, 19 nt, Homo sapiens
  misc_RNA (1)...(19): siRNA sense strand
gcagugauccuggcaucua

SEQ ID NO: 364265 - RNA, 19 nt, Homo sapiens
  misc_RNA (1)...(19): siRNA sense strand
guggagaccaucaccauaa

SEQ ID NO: 364266 - RNA, 19 nt, Homo sapiens
  misc_RNA (1)...(19): siRNA sense strand
cagaagagaagaugaaaca

SEQ ID NO: 364267 - RNA, 19 nt, Homo sapiens
  misc_RNA (1)...(19): siRNA sense strand
gaaacacugaagcgucuuu

SEQ ID NO: 364268 - RNA, 19 nt, Homo sapiens
  misc_RNA (1)...(19): siRNA sense strand
ccaagaaggucaauuucac

SEQ ID NO: 364269 - RNA, 19 nt, Homo sapiens
  misc_RNA (1)...(19): siRNA sense strand
ugaaacagcaguaugaaca

SEQ ID NO: 364270 - RNA, 19 nt, Homo sapiens
  misc_RNA (1)...(19): siRNA sense strand
caucaaacccuuccugagu

SEQ ID NO: 364271 - RNA, 19 nt, Homo sapiens
  misc_RNA (1)...(19): siRNA sense strand
gguggcaguuuaugucaga

SEQ ID NO: 364272 - RNA, 19 nt, Homo sapiens
  misc_RNA (1)...(19): siRNA sense strand
ucaaacccuuccugaguga

SEQ ID NO: 364273 - RNA, 19 nt, Homo sapiens
  misc_RNA (1)...(19): siRNA sense strand
cgaauccagaugacuauuu

SEQ ID NO: 364274 - RNA, 19 nt, Homo sapiens
  misc_RNA (1)...(19): siRNA sense strand
ugaggacacucguaagaag

SEQ ID NO: 364275 - RNA, 19 nt, Homo sapiens
  misc_RNA (1)...(19): siRNA sense strand
caacaccuacagcuucauu

SEQ ID NO: 364276 - RNA, 19 nt, Homo sapiens
  misc_RNA (1)...(19): siRNA sense strand
ggaaaauuaucccgaaaca

SEQ ID NO: 364277 - RNA, 19 nt, Homo sapiens
  misc_RNA (1)...(19): siRNA sense strand
ccaagggucugcuguucuc

SEQ ID NO: 364278 - RNA, 19 nt, Homo sapiens
  misc_RNA (1)...(19): siRNA sense strand
ccaagaugcgggaguguga

SEQ ID NO: 364279 - RNA, 19 nt, Homo sapiens
  misc_RNA (1)...(19): siRNA sense strand
gugagcugcuucugcaaga

SEQ ID NO: 364280 - RNA, 19 nt, Homo sapiens
  misc_RNA (1)...(19): siRNA sense strand
gguccugcuuccagacaaa

SEQ ID NO: 364281 - RNA, 19 nt, Homo sapiens
  misc_RNA (1)...(19): siRNA sense strand
ggagaccaucaccauaauu

SEQ ID NO: 364282 - RNA, 19 nt, Homo sapiens
  misc_RNA (1)...(19): siRNA sense strand
ggaggcauuggccaaguuu

SEQ ID NO: 364283 - RNA, 19 nt, Homo sapiens
  misc_RNA (1)...(19): siRNA sense strand
ccuauaaccucaucaaacc

SEQ ID NO: 364284 - RNA, 19 nt, Homo sapiens
  misc_RNA (1)...(19): siRNA sense strand
caccaugacugacccugau

SEQ ID NO: 364285 - RNA, 19 nt, Homo sapiens
  misc_RNA (1)...(19): siRNA sense strand
gccaagaaggucaauuuca

SEQ ID NO: 364286 - RNA, 19 nt, Homo sapiens
  misc_RNA (1)...(19): siRNA sense strand
gaaagcaaaaggacauuga

SEQ ID NO: 364287 - RNA, 19 nt, Homo sapiens
  misc_RNA (1)...(19): siRNA sense strand
gcaaauuggaaggagguuu

SEQ ID NO: 364288 - RNA, 19 nt, Homo sapiens
  misc_RNA (1)...(19): siRNA sense strand
gaggacacucguaagaaga

SEQ ID NO: 364289 - RNA, 19 nt, Homo sapiens
  misc_RNA (1)...(19): siRNA sense strand
agaccaucaccauaauuua

SEQ ID NO: 364290 - RNA, 19 nt, Homo sapiens
  misc_RNA (1)...(19): siRNA sense strand
aaaggacauugacaacauc

SEQ ID NO: 364291 - RNA, 19 nt, Homo sapiens
  misc_RNA (1)...(19): siRNA sense strand
aaacagcaguaugaacaca

SEQ ID NO: 364292 - RNA, 19 nt, Homo sapiens
  misc_RNA (1)...(19): siRNA sense strand
cuccagaggugauccaaca

SEQ ID NO: 364293 - RNA, 19 nt, Homo sapiens
  misc_RNA (1)...(19): siRNA sense strand
ccaccagaccacaaaguug

SEQ ID NO: 364294 - RNA, 19 nt, Homo sapiens
  misc_RNA (1)...(19): siRNA sense strand
gaggugauccaacaguauc

SEQ ID NO: 364295 - RNA, 19 nt, Homo sapiens
  misc_RNA (1)...(19): siRNA sense strand
ccucagaagagaagaugaa

SEQ ID NO: 364296 - RNA, 19 nt, Homo sapiens
  misc_RNA (1)...(19): siRNA sense strand
ccaaguggaguaugagauc

SEQ ID NO: 364297 - RNA, 19 nt, Homo sapiens
  misc_RNA (1)...(19): siRNA sense strand
ccaaguuucgggagaaugu

SEQ ID NO: 364298 - RNA, 19 nt, Homo sapiens
  misc_RNA (1)...(19): siRNA sense strand
cagaggugcugcccaacca

SEQ ID NO: 364299 - RNA, 19 nt, Homo sapiens
  misc_RNA (1)...(19): siRNA sense strand
cagugauccuggcaucuau

SEQ ID NO: 364300 - RNA, 19 nt, Homo sapiens
  misc_RNA (1)...(19): siRNA sense strand
uggagaccaucaccauaau

SEQ ID NO: 364301 - RNA, 19 nt, Homo sapiens
  misc_RNA (1)...(19): siRNA sense strand
gaggaaaauuaucccgaaa

SEQ ID NO: 364302 - RNA, 19 nt, Homo sapiens
  misc_RNA (1)...(19): siRNA sense strand
aaaaggacauugacaacau

SEQ ID NO: 364303 - RNA, 19 nt, Homo sapiens
  misc_RNA (1)...(19): siRNA sense strand
ccacaaaguuggggaggaa

SEQ ID NO: 364304 - RNA, 19 nt, Homo sapiens
  misc_RNA (1)...(19): siRNA sense strand
cagacaaagccucagaaga

SEQ ID NO: 364305 - RNA, 19 nt, Homo sapiens
  misc_RNA (1)...(19): siRNA sense strand
accuacagcuucauucaug

SEQ ID NO: 364306 - RNA, 19 nt, Homo sapiens
  misc_RNA (1)...(19): siRNA sense strand
gauguugguuuugggauuu

SEQ ID NO: 364307 - RNA, 19 nt, Homo sapiens
  misc_RNA (1)...(19): siRNA sense strand
caaauuggaaggagguuuu

SEQ ID NO: 364308 - RNA, 19 nt, Homo sapiens
  misc_RNA (1)...(19): siRNA sense strand
caaagccucagaagagaag

SEQ ID NO: 364309 - RNA, 19 nt, Homo sapiens
  misc_RNA (1)...(19): siRNA sense strand
uguuuccuguggccuauaa

SEQ ID NO: 364310 - RNA, 19 nt, Homo sapiens
  misc_RNA (1)...(19): siRNA sense strand
gggcaggcaccccgaaaua

SEQ ID NO: 364311 - RNA, 19 nt, Homo sapiens
  misc_RNA (1)...(19): siRNA sense strand
ggacacucguaagaagauc

SEQ ID NO: 364312 - RNA, 19 nt, Homo sapiens
  misc_RNA (1)...(19): siRNA sense strand
gugaggacacucguaagaa

SEQ ID NO: 364313 - RNA, 19 nt, Homo sapiens
  misc_RNA (1)...(19): siRNA sense strand
ggugaaacagcaguaugaa

SEQ ID NO: 364314 - RNA, 19 nt, Homo sapiens
  misc_RNA (1)...(19): siRNA sense strand
agucugguacgacauaauu

SEQ ID NO: 364315 - RNA, 19 nt, Homo sapiens
  misc_RNA (1)...(19): siRNA sense strand
caagugcaaauccaagauc

SEQ ID NO: 364316 - RNA, 19 nt, Homo sapiens
  misc_RNA (1)...(19): siRNA sense strand
gacugacccugauggaaac

SEQ ID NO: 364317 - RNA, 19 nt, Homo sapiens
  misc_RNA (1)...(19): siRNA sense strand
guucucagccuccaaacag

SEQ ID NO: 364318 - RNA, 19 nt, Homo sapiens
  misc_RNA (1)...(19): siRNA sense strand
ucuauguccugcgguuuga

SEQ ID NO: 364319 - RNA, 19 nt, Homo sapiens
  misc_RNA (1)...(19): siRNA sense strand
ggauguugguuuugggauu

SEQ ID NO: 364320 - RNA, 19 nt, Homo sapiens
  misc_RNA (1)...(19): siRNA sense strand
ggaguaugagauccucuuc

SEQ ID NO: 364321 - RNA, 19 nt, Homo sapiens
  misc_RNA (1)...(19): siRNA sense strand
ccaggcagaaggaggcauu

SEQ ID NO: 364322 - RNA, 19 nt, Homo sapiens
  misc_RNA (1)...(19): siRNA sense strand
guggaguuccgaaagcaaa

SEQ ID NO: 364323 - RNA, 19 nt, Homo sapiens
  misc_RNA (1)...(19): siRNA sense strand
gcauguuugaggaaaauua

SEQ ID NO: 364324 - RNA, 19 nt, Homo sapiens
  misc_RNA (1)...(19): siRNA sense strand
gcauguggaguuccgaaag

SEQ ID NO: 364325 - RNA, 19 nt, Homo sapiens
  misc_RNA (1)...(19): siRNA sense strand
caagaaggucaauuucacu

SEQ ID NO: 364326 - RNA, 19 nt, Homo sapiens
  misc_RNA (1)...(19): siRNA sense strand
ggccuauaaccucaucaaa

SEQ ID NO: 364327 - RNA, 19 nt, Homo sapiens
  misc_RNA (1)...(19): siRNA sense strand
gccuauaaccucaucaaac

SEQ ID NO: 364328 - RNA, 19 nt, Homo sapiens
  misc_RNA (1)...(19): siRNA sense strand
ggccaaguuucgggagaau

SEQ ID NO: 364329 - RNA, 19 nt, Homo sapiens
  misc_RNA (1)...(19): siRNA sense strand
ucagauggagcggauguug

SEQ ID NO: 364330 - RNA, 19 nt, Homo sapiens
  misc_RNA (1)...(19): siRNA sense strand
gaaacagcaguaugaacac

SEQ ID NO: 364331 - RNA, 19 nt, Homo sapiens
  misc_RNA (1)...(19): siRNA sense strand
gagcugcuucugcaagagu

SEQ ID NO: 364332 - RNA, 19 nt, Homo sapiens
  misc_RNA (1)...(19): siRNA sense strand
augccaagaaggucaauuu

SEQ ID NO: 364333 - RNA, 19 nt, Homo sapiens
  misc_RNA (1)...(19): siRNA sense strand
aagugcaaauccaagauca

SEQ ID NO: 364334 - RNA, 19 nt, Homo sapiens
  misc_RNA (1)...(19): siRNA sense strand
caacauguaucucuaugaa

SEQ ID NO: 364335 - RNA, 19 nt, Homo sapiens
  misc_RNA (1)...(19): siRNA sense strand
uaaaggugcugguaagauu

SEQ ID NO: 364336 - RNA, 19 nt, Homo sapiens
  misc_RNA (1)...(19): siRNA sense strand
gggcaaggcucccgauuau

SEQ ID NO: 364337 - RNA, 19 nt, Homo sapiens
  misc_RNA (1)...(19): siRNA sense strand
gcaaggcucccgauuauga

SEQ ID NO: 364338 - RNA, 19 nt, Homo sapiens
  misc_RNA (1)...(19): siRNA sense strand
cagaaggaguucauuacua

SEQ ID NO: 364339 - RNA, 19 nt, Homo sapiens
  misc_RNA (1)...(19): siRNA sense strand
ggaccaagcagcgauauaa

SEQ ID NO: 364340 - RNA, 19 nt, Homo sapiens
  misc_RNA (1)...(19): siRNA sense strand
ccaggucucuuucaacaaa

SEQ ID NO: 364341 - RNA, 19 nt, Homo sapiens
  misc_RNA (1)...(19): siRNA sense strand
ccugauagauguacacuga

SEQ ID NO: 364342 - RNA, 19 nt, Homo sapiens
  misc_RNA (1)...(19): siRNA sense strand
gaacaaagcacaggaaugc

SEQ ID NO: 364343 - RNA, 19 nt, Homo sapiens
  misc_RNA (1)...(19): siRNA sense strand
ccaagcagcgauauaauaa

SEQ ID NO: 364344 - RNA, 19 nt, Homo sapiens
  misc_RNA (1)...(19): siRNA sense strand
gaggaaacuugcucaacuu

SEQ ID NO: 364345 - RNA, 19 nt, Homo sapiens
  misc_RNA (1)...(19): siRNA sense strand
gagauggacugccacuuuc

SEQ ID NO: 364346 - RNA, 19 nt, Homo sapiens
  misc_RNA (1)...(19): siRNA sense strand
ggcggaaugucaaaucuuu

SEQ ID NO: 364347 - RNA, 19 nt, Homo sapiens
  misc_RNA (1)...(19): siRNA sense strand
gauaaaucuuucugacaug

SEQ ID NO: 364348 - RNA, 19 nt, Homo sapiens
  misc_RNA (1)...(19): siRNA sense strand
gcagagugauggugaugau

SEQ ID NO: 364349 - RNA, 19 nt, Homo sapiens
  misc_RNA (1)...(19): siRNA sense strand
ugauagauguacacugaaa

SEQ ID NO: 364350 - RNA, 19 nt, Homo sapiens
  misc_RNA (1)...(19): siRNA sense strand
gcugaggccuccuuaucaa

SEQ ID NO: 364351 - RNA, 19 nt, Homo sapiens
  misc_RNA (1)...(19): siRNA sense strand
guggagcucugaauuuaau

SEQ ID NO: 364352 - RNA, 19 nt, Homo sapiens
  misc_RNA (1)...(19): siRNA sense strand
gcaacucugucagggauug

SEQ ID NO: 364353 - RNA, 19 nt, Homo sapiens
  misc_RNA (1)...(19): siRNA sense strand
gggagcauuuguuacacua

SEQ ID NO: 364354 - RNA, 19 nt, Homo sapiens
  misc_RNA (1)...(19): siRNA sense strand
ugucagggauuguaggauu

SEQ ID NO: 364355 - RNA, 19 nt, Homo sapiens
  misc_RNA (1)...(19): siRNA sense strand
cgaggaaacuugcucaacu

SEQ ID NO: 364356 - RNA, 19 nt, Homo sapiens
  misc_RNA (1)...(19): siRNA sense strand
agaaggaguucauuacuac

SEQ ID NO: 364357 - RNA, 19 nt, Homo sapiens
  misc_RNA (1)...(19): siRNA sense strand
ggaguucauuacuacuuau

SEQ ID NO: 364358 - RNA, 19 nt, Homo sapiens
  misc_RNA (1)...(19): siRNA sense strand
aagcagcgauauaauaauc

SEQ ID NO: 364359 - RNA, 19 nt, Homo sapiens
  misc_RNA (1)...(19): siRNA sense strand
gagcauuuguuacacuaca

SEQ ID NO: 364360 - RNA, 19 nt, Homo sapiens
  misc_RNA (1)...(19): siRNA sense strand
gaaacuugcucaacuuccu

SEQ ID NO: 364361 - RNA, 19 nt, Homo sapiens
  misc_RNA (1)...(19): siRNA sense strand
gaggccuccuuaucaaauu

SEQ ID NO: 364362 - RNA, 19 nt, Homo sapiens
  misc_RNA (1)...(19): siRNA sense strand
gaaaauuacccaaauguuc

SEQ ID NO: 364363 - RNA, 19 nt, Homo sapiens
  misc_RNA (1)...(19): siRNA sense strand
agagauggacugccacuuu

SEQ ID NO: 364364 - RNA, 19 nt, Homo sapiens
  misc_RNA (1)...(19): siRNA sense strand
gaccauacuguuucauuga

SEQ ID NO: 364365 - RNA, 19 nt, Homo sapiens
  misc_RNA (1)...(19): siRNA sense strand
aggaguucauuacuacuua

SEQ ID NO: 364366 - RNA, 19 nt, Homo sapiens
  misc_RNA (1)...(19): siRNA sense strand
agaccauacuguuucauug

SEQ ID NO: 364367 - RNA, 19 nt, Homo sapiens
  misc_RNA (1)...(19): siRNA sense strand
aauaaucccaggucucuuu

SEQ ID NO: 364368 - RNA, 19 nt, Homo sapiens
  misc_RNA (1)...(19): siRNA sense strand
caaauguucucgccuucuc

SEQ ID NO: 364369 - RNA, 19 nt, Homo sapiens
  misc_RNA (1)...(19): siRNA sense strand
ggacugccacuuucugcuu

SEQ ID NO: 364370 - RNA, 19 nt, Homo sapiens
  misc_RNA (1)...(19): siRNA sense strand
ucaacuuccugauagaugu

SEQ ID NO: 364371 - RNA, 19 nt, Homo sapiens
  misc_RNA (1)...(19): siRNA sense strand
gcaacauguaucucuauga

SEQ ID NO: 364372 - RNA, 19 nt, Homo sapiens
  misc_RNA (1)...(19): siRNA sense strand
auucgaggcuuucaugcua

SEQ ID NO: 364373 - RNA, 19 nt, Homo sapiens
  misc_RNA (1)...(19): siRNA sense strand
auguggagcucugaauuua

SEQ ID NO: 364374 - RNA, 19 nt, Homo sapiens
  misc_RNA (1)...(19): siRNA sense strand
aaagucuccugcagaguga

SEQ ID NO: 364375 - RNA, 19 nt, Homo sapiens
  misc_RNA (1)...(19): siRNA sense strand
ggaaccagcaacucuguca

SEQ ID NO: 364376 - RNA, 19 nt, Homo sapiens
  misc_RNA (1)...(19): siRNA sense strand
gucagggauuguaggauuu

SEQ ID NO: 364377 - RNA, 19 nt, Homo sapiens
  misc_RNA (1)...(19): siRNA sense strand
gaacuggggucagccaaug

SEQ ID NO: 364378 - RNA, 19 nt, Homo sapiens
  misc_RNA (1)...(19): siRNA sense strand
cgcaaccucuggcagcuuu

SEQ ID NO: 364379 - RNA, 19 nt, Homo sapiens
  misc_RNA (1)...(19): siRNA sense strand
gcaggagugcagaaaguau

SEQ ID NO: 364380 - RNA, 19 nt, Homo sapiens
  misc_RNA (1)...(19): siRNA sense strand
uaugcaacauguaucucua

SEQ ID NO: 364381 - RNA, 19 nt, Homo sapiens
  misc_RNA (1)...(19): siRNA sense strand
agagugauggugaugauuu

SEQ ID NO: 364382 - RNA, 19 nt, Homo sapiens
  misc_RNA (1)...(19): siRNA sense strand
uauguggagcucugaauuu

SEQ ID NO: 364383 - RNA, 19 nt, Homo sapiens
  misc_RNA (1)...(19): siRNA sense strand
acauguaucucuaugaacu

SEQ ID NO: 364384 - RNA, 19 nt, Homo sapiens
  misc_RNA (1)...(19): siRNA sense strand
ucgaggcuuucaugcuaua

SEQ ID NO: 364385 - RNA, 19 nt, Homo sapiens
  misc_RNA (1)...(19): siRNA sense strand
caacuuccugauagaugua

SEQ ID NO: 364386 - RNA, 19 nt, Homo sapiens
  misc_RNA (1)...(19): siRNA sense strand
ggcuuaaucugucuaugca

SEQ ID NO: 364387 - RNA, 19 nt, Homo sapiens
  misc_RNA (1)...(19): siRNA sense strand
uuaaaaugcuuucgaggaa

SEQ ID NO: 364388 - RNA, 19 nt, Homo sapiens
  misc_RNA (1)...(19): siRNA sense strand
guaaaggugcugguaagau

SEQ ID NO: 364389 - RNA, 19 nt, Homo sapiens
  misc_RNA (1)...(19): siRNA sense strand
ggagucacaucagcauuuu

SEQ ID NO: 364390 - RNA, 19 nt, Homo sapiens
  misc_RNA (1)...(19): siRNA sense strand
accaagcagcgauauaaua

SEQ ID NO: 364391 - RNA, 19 nt, Homo sapiens
  misc_RNA (1)...(19): siRNA sense strand
auacugcugucagaccaua

SEQ ID NO: 364392 - RNA, 19 nt, Homo sapiens
  misc_RNA (1)...(19): siRNA sense strand
ucccaggucucuuucaaca

SEQ ID NO: 364393 - RNA, 19 nt, Homo sapiens
  misc_RNA (1)...(19): siRNA sense strand
gggagugagcuacaugaug

SEQ ID NO: 364394 - RNA, 19 nt, Homo sapiens
  misc_RNA (1)...(19): siRNA sense strand
uaccaguguuauuuacuug

SEQ ID NO: 364395 - RNA, 19 nt, Homo sapiens
  misc_RNA (1)...(19): siRNA sense strand
uugcucaacuuccugauag

SEQ ID NO: 364396 - RNA, 19 nt, Homo sapiens
  misc_RNA (1)...(19): siRNA sense strand
gcacugaaaauuacccaaa

SEQ ID NO: 364397 - RNA, 19 nt, Homo sapiens
  misc_RNA (1)...(19): siRNA sense strand
ucagggauuguaggauuua

SEQ ID NO: 364398 - RNA, 19 nt, Homo sapiens
  misc_RNA (1)...(19): siRNA sense strand
uggagucacaucagcauuu

SEQ ID NO: 364399 - RNA, 19 nt, Homo sapiens
  misc_RNA (1)...(19): siRNA sense strand
gaccaagcagcgauauaau

SEQ ID NO: 364400 - RNA, 19 nt, Homo sapiens
  misc_RNA (1)...(19): siRNA sense strand
cuuauaacaugaugaagac

SEQ ID NO: 364401 - RNA, 19 nt, Homo sapiens
  misc_RNA (1)...(19): siRNA sense strand
cagcuuuucuuucauguga

SEQ ID NO: 364402 - RNA, 19 nt, Homo sapiens
  misc_RNA (1)...(19): siRNA sense strand
gccuuuaccaguguuauuu

SEQ ID NO: 364403 - RNA, 19 nt, Homo sapiens
  misc_RNA (1)...(19): siRNA sense strand
cuuaucaaauuuccaugug

SEQ ID NO: 364404 - RNA, 19 nt, Homo sapiens
  misc_RNA (1)...(19): siRNA sense strand
cagaccauacuguuucauu

SEQ ID NO: 364405 - RNA, 19 nt, Homo sapiens
  misc_RNA (1)...(19): siRNA sense strand
cugcuucuacugauuauga

SEQ ID NO: 364406 - RNA, 19 nt, Homo sapiens
  misc_RNA (1)...(19): siRNA sense strand
caggagugcagaaaguauu

SEQ ID NO: 364407 - RNA, 19 nt, Homo sapiens
  misc_RNA (1)...(19): siRNA sense strand
ccaguguuauuuacuuguc

SEQ ID NO: 364408 - RNA, 19 nt, Homo sapiens
  misc_RNA (1)...(19): siRNA sense strand
gagugauggugaugauuuu

SEQ ID NO: 364409 - RNA, 19 nt, Homo sapiens
  misc_RNA (1)...(19): siRNA sense strand
aaucccaggucucuuucaa

SEQ ID NO: 364410 - RNA, 19 nt, Homo sapiens
  misc_RNA (1)...(19): siRNA sense strand
ugucagaccauacuguuuc

SEQ ID NO: 364411 - RNA, 19 nt, Homo sapiens
  misc_RNA (1)...(19): siRNA sense strand
gcugucagaccauacuguu

SEQ ID NO: 364412 - RNA, 19 nt, Homo sapiens
  misc_RNA (1)...(19): siRNA sense strand
acugaaaacuggacauuau

SEQ ID NO: 364413 - RNA, 19 nt, Homo sapiens
  misc_RNA (1)...(19): siRNA sense strand
cgccuucucuuuccuggau

SEQ ID NO: 364414 - RNA, 19 nt, Homo sapiens
  misc_RNA (1)...(19): siRNA sense strand
acacuacagaucuggcuaa

SEQ ID NO: 364415 - RNA, 19 nt, Homo sapiens
  misc_RNA (1)...(19): siRNA sense strand
acugugggagcauuuguua

SEQ ID NO: 364416 - RNA, 19 nt, Homo sapiens
  misc_RNA (1)...(19): siRNA sense strand
aggcuuucaugcuauagaa

SEQ ID NO: 364417 - RNA, 19 nt, Homo sapiens
  misc_RNA (1)...(19): siRNA sense strand
uuaauucgaggcuuucaug

SEQ ID NO: 364418 - RNA, 19 nt, Homo sapiens
  misc_RNA (1)...(19): siRNA sense strand
aaaggugcugguaagauuu

SEQ ID NO: 364419 - RNA, 19 nt, Homo sapiens
  misc_RNA (1)...(19): siRNA sense strand
uuucugcuucuacugauua

SEQ ID NO: 364420 - RNA, 19 nt, Homo sapiens
  misc_RNA (1)...(19): siRNA sense strand
agggcaaggcucccgauua

SEQ ID NO: 364421 - RNA, 19 nt, Homo sapiens
  misc_RNA (1)...(19): siRNA sense strand
ccuuuaccaguguuauuua

SEQ ID NO: 364422 - RNA, 19 nt, Homo sapiens
  misc_RNA (1)...(19): siRNA sense strand
ucaagcugaggccuccuua

SEQ ID NO: 364423 - RNA, 19 nt, Homo sapiens
  misc_RNA (1)...(19): siRNA sense strand
gucagaccauacuguuuca

SEQ ID NO: 364424 - RNA, 19 nt, Homo sapiens
  misc_RNA (1)...(19): siRNA sense strand
gcauuuguuacacuacaga

SEQ ID NO: 364425 - RNA, 19 nt, Homo sapiens
  misc_RNA (1)...(19): siRNA sense strand
ugaacaaagcacaggaaug

SEQ ID NO: 364426 - RNA, 19 nt, Homo sapiens
  misc_RNA (1)...(19): siRNA sense strand
caagcagcgauauaauaau

SEQ ID NO: 364427 - RNA, 19 nt, Homo sapiens
  misc_RNA (1)...(19): siRNA sense strand
caucagcauuuucuguuga

SEQ ID NO: 364428 - RNA, 19 nt, Homo sapiens
  misc_RNA (1)...(19): siRNA sense strand
ugaggccuccuuaucaaau

SEQ ID NO: 364429 - RNA, 19 nt, Homo sapiens
  misc_RNA (1)...(19): siRNA sense strand
aagcugaggccuccuuauc

SEQ ID NO: 364430 - RNA, 19 nt, Homo sapiens
  misc_RNA (1)...(19): siRNA sense strand
aggccuccuuaucaaauuu

SEQ ID NO: 364431 - RNA, 19 nt, Homo sapiens
  misc_RNA (1)...(19): siRNA sense strand
cauuuucuguugacuguaa

SEQ ID NO: 364432 - RNA, 19 nt, Homo sapiens
  misc_RNA (1)...(19): siRNA sense strand
uacaccggcuggcggaaug

SEQ ID NO: 364433 - RNA, 19 nt, Homo sapiens
  misc_RNA (1)...(19): siRNA sense strand
ucccgauuaugaugucuga

SEQ ID NO: 364434 - RNA, 19 nt, Homo sapiens
  misc_RNA (1)...(19): siRNA sense strand
caacaaagccucacgacua

SEQ ID NO: 364435 - RNA, 19 nt, Homo sapiens
  misc_RNA (1)...(19): siRNA sense strand
caaagcagcugcauuaucu

SEQ ID NO: 364436 - RNA, 19 nt, Homo sapiens
  misc_RNA (1)...(19): siRNA sense strand
gaacaggaacccacaagga

SEQ ID NO: 364437 - RNA, 19 nt, Homo sapiens
  misc_RNA (1)...(19): siRNA sense strand
gaucgggucccuaacuaua

SEQ ID NO: 364438 - RNA, 19 nt, Homo sapiens
  misc_RNA (1)...(19): siRNA sense strand
gacauuaaagggaagcuua

SEQ ID NO: 364439 - RNA, 19 nt, Homo sapiens
  misc_RNA (1)...(19): siRNA sense strand
aagggaagcuuaugguuug

SEQ ID NO: 364440 - RNA, 19 nt, Homo sapiens
  misc_RNA (1)...(19): siRNA sense strand
gcagcugcauuaucuacaa

SEQ ID NO: 364441 - RNA, 19 nt, Homo sapiens
  misc_RNA (1)...(19): siRNA sense strand
ggaagcuuaugguuugcua

SEQ ID NO: 364442 - RNA, 19 nt, Homo sapiens
  misc_RNA (1)...(19): siRNA sense strand
ugccaaagcagcugcauua

SEQ ID NO: 364443 - RNA, 19 nt, Homo sapiens
  misc_RNA (1)...(19): siRNA sense strand
gucgcgaucuuuagacaua

SEQ ID NO: 364444 - RNA, 19 nt, Homo sapiens
  misc_RNA (1)...(19): siRNA sense strand
cagaucgggucccuaacua

SEQ ID NO: 364445 - RNA, 19 nt, Homo sapiens
  misc_RNA (1)...(19): siRNA sense strand
acaaccaccuugggaauuu

SEQ ID NO: 364446 - RNA, 19 nt, Homo sapiens
  misc_RNA (1)...(19): siRNA sense strand
gcacuacaacugaccauag

SEQ ID NO: 364447 - RNA, 19 nt, Homo sapiens
  misc_RNA (1)...(19): siRNA sense strand
gcuuaugguuugcuaugaa

SEQ ID NO: 364448 - RNA, 19 nt, Homo sapiens
  misc_RNA (1)...(19): siRNA sense strand
gccagugccuccucuacaa

SEQ ID NO: 364449 - RNA, 19 nt, Homo sapiens
  misc_RNA (1)...(19): siRNA sense strand
aaagggaagcuuaugguuu

SEQ ID NO: 364450 - RNA, 19 nt, Homo sapiens
  misc_RNA (1)...(19): siRNA sense strand
gcuuugagcccgucuaugu

SEQ ID NO: 364451 - RNA, 19 nt, Homo sapiens
  misc_RNA (1)...(19): siRNA sense strand
ccugagaccuucuggauac

SEQ ID NO: 364452 - RNA, 19 nt, Homo sapiens
  misc_RNA (1)...(19): siRNA sense strand
gcucaggacacuugcacua

SEQ ID NO: 364453 - RNA, 19 nt, Homo sapiens
  misc_RNA (1)...(19): siRNA sense strand
ucauggagccguccucuga

SEQ ID NO: 364454 - RNA, 19 nt, Homo sapiens
  misc_RNA (1)...(19): siRNA sense strand
ccaaccaccuggaucaagu

SEQ ID NO: 364455 - RNA, 19 nt, Homo sapiens
  misc_RNA (1)...(19): siRNA sense strand
caacugggaggaagagaga

SEQ ID NO: 364456 - RNA, 19 nt, Homo sapiens
  misc_RNA (1)...(19): siRNA sense strand
ccaugggagucuuggcuuu

SEQ ID NO: 364457 - RNA, 19 nt, Homo sapiens
  misc_RNA (1)...(19): siRNA sense strand
cagcugcauuaucuacaaa

SEQ ID NO: 364458 - RNA, 19 nt, Homo sapiens
  misc_RNA (1)...(19): siRNA sense strand
cggcuuuacccacaauaua

SEQ ID NO: 364459 - RNA, 19 nt, Homo sapiens
  misc_RNA (1)...(19): siRNA sense strand
gugaagccaugcuggagau

SEQ ID NO: 364460 - RNA, 19 nt, Homo sapiens
  misc_RNA (1)...(19): siRNA sense strand
acacuggcccugacucuga

SEQ ID NO: 364461 - RNA, 19 nt, Homo sapiens
  misc_RNA (1)...(19): siRNA sense strand
ccaaagcagcugcauuauc

SEQ ID NO: 364462 - RNA, 19 nt, Homo sapiens
  misc_RNA (1)...(19): siRNA sense strand
caggacacuugcacuacaa

SEQ ID NO: 364463 - RNA, 19 nt, Homo sapiens
  misc_RNA (1)...(19): siRNA sense strand
ucaggacacuugcacuaca

SEQ ID NO: 364464 - RNA, 19 nt, Homo sapiens
  misc_RNA (1)...(19): siRNA sense strand
gcugcauuaucuacaaaga

SEQ ID NO: 364465 - RNA, 19 nt, Homo sapiens
  misc_RNA (1)...(19): siRNA sense strand
uaaagggaagcuuaugguu

SEQ ID NO: 364466 - RNA, 19 nt, Homo sapiens
  misc_RNA (1)...(19): siRNA sense strand
acacuugcacuacaacuga

SEQ ID NO: 364467 - RNA, 19 nt, Homo sapiens
  misc_RNA (1)...(19): siRNA sense strand
uggcagaucgggucccuaa

SEQ ID NO: 364468 - RNA, 19 nt, Homo sapiens
  misc_RNA (1)...(19): siRNA sense strand
gcagaucgggucccuaacu

SEQ ID NO: 364469 - RNA, 19 nt, Homo sapiens
  misc_RNA (1)...(19): siRNA sense strand
cuuaugguuugcuaugaaa

SEQ ID NO: 364470 - RNA, 19 nt, Homo sapiens
  misc_RNA (1)...(19): siRNA sense strand
aaacaaccaccuugggaau

SEQ ID NO: 364471 - RNA, 19 nt, Homo sapiens
  misc_RNA (1)...(19): siRNA sense strand
aaacgucuauuggccacuu

SEQ ID NO: 364472 - RNA, 19 nt, Homo sapiens
  misc_RNA (1)...(19): siRNA sense strand
gucuauguuuccuguauug

SEQ ID NO: 364473 - RNA, 19 nt, Homo sapiens
  misc_RNA (1)...(19): siRNA sense strand
aacaaagccucacgacuac

SEQ ID NO: 364474 - RNA, 19 nt, Homo sapiens
  misc_RNA (1)...(19): siRNA sense strand
ccaccaaccaccuggauca

SEQ ID NO: 364475 - RNA, 19 nt, Homo sapiens
  misc_RNA (1)...(19): siRNA sense strand
gagcucagccccuguauuc

SEQ ID NO: 364476 - RNA, 19 nt, Homo sapiens
  misc_RNA (1)...(19): siRNA sense strand
guauugcucaggacacuug

SEQ ID NO: 364477 - RNA, 19 nt, Homo sapiens
  misc_RNA (1)...(19): siRNA sense strand
cgucuauguuuccuguauu

SEQ ID NO: 364478 - RNA, 19 nt, Homo sapiens
  misc_RNA (1)...(19): siRNA sense strand
ccagcgcccuguucugagu

SEQ ID NO: 364479 - RNA, 19 nt, Homo sapiens
  misc_RNA (1)...(19): siRNA sense strand
caccaggaaacgucuauug

SEQ ID NO: 364480 - RNA, 19 nt, Homo sapiens
  misc_RNA (1)...(19): siRNA sense strand
ccgucuauguuuccuguau

SEQ ID NO: 364481 - RNA, 19 nt, Homo sapiens
  misc_RNA (1)...(19): siRNA sense strand
aacaggaacccacaaggaa

SEQ ID NO: 364482 - RNA, 19 nt, Homo sapiens
  misc_RNA (1)...(19): siRNA sense strand
cuucaccacugccaaagca

SEQ ID NO: 364483 - RNA, 19 nt, Homo sapiens
  misc_RNA (1)...(19): siRNA sense strand
gcagaacaggaacccacaa

SEQ ID NO: 364484 - RNA, 19 nt, Homo sapiens
  misc_RNA (1)...(19): siRNA sense strand
cagcaucagaucuguaaag

SEQ ID NO: 364485 - RNA, 19 nt, Homo sapiens
  misc_RNA (1)...(19): siRNA sense strand
ccacccagaaagacucgua

SEQ ID NO: 364486 - RNA, 19 nt, Homo sapiens
  misc_RNA (1)...(19): siRNA sense strand
gcccuguucugaguucaug

SEQ ID NO: 364487 - RNA, 19 nt, Homo sapiens
  misc_RNA (1)...(19): siRNA sense strand
ggcuuuacccacaauauag

SEQ ID NO: 364488 - RNA, 19 nt, Homo sapiens
  misc_RNA (1)...(19): siRNA sense strand
agcaucagaucuguaaaga

SEQ ID NO: 364489 - RNA, 19 nt, Homo sapiens
  misc_RNA (1)...(19): siRNA sense strand
gcaugcaggauggcucuga

SEQ ID NO: 364490 - RNA, 19 nt, Homo sapiens
  misc_RNA (1)...(19): siRNA sense strand
ggugcaggcagaacaggaa

SEQ ID NO: 364491 - RNA, 19 nt, Homo sapiens
  misc_RNA (1)...(19): siRNA sense strand
ugcagcaucagaucuguaa

SEQ ID NO: 364492 - RNA, 19 nt, Homo sapiens
  misc_RNA (1)...(19): siRNA sense strand
uuugagcccgucuauguuu

SEQ ID NO: 364493 - RNA, 19 nt, Homo sapiens
  misc_RNA (1)...(19): siRNA sense strand
gcucuucgagguugagucu

SEQ ID NO: 364494 - RNA, 19 nt, Homo sapiens
  misc_RNA (1)...(19): siRNA sense strand
ccagcaccacccagaaaga

SEQ ID NO: 364495 - RNA, 19 nt, Homo sapiens
  misc_RNA (1)...(19): siRNA sense strand
gacccggcuuuacccacaa

SEQ ID NO: 364496 - RNA, 19 nt, Homo sapiens
  misc_RNA (1)...(19): siRNA sense strand
caacaaagccucacgacua

SEQ ID NO: 364497 - RNA, 19 nt, Homo sapiens
  misc_RNA (1)...(19): siRNA sense strand
caaagcagcugcauuaucu

SEQ ID NO: 364498 - RNA, 19 nt, Homo sapiens
  misc_RNA (1)...(19): siRNA sense strand
caaauaggcucugccauca

SEQ ID NO: 364499 - RNA, 19 nt, Homo sapiens
  misc_RNA (1)...(19): siRNA sense strand
gaacaggaacccacaagga

SEQ ID NO: 364500 - RNA, 19 nt, Homo sapiens
  misc_RNA (1)...(19): siRNA sense strand
gaucgggucccuaacuaua

SEQ ID NO: 364501 - RNA, 19 nt, Homo sapiens
  misc_RNA (1)...(19): siRNA sense strand
ggaaaugggaagcaagaaa

SEQ ID NO: 364502 - RNA, 19 nt, Homo sapiens
  misc_RNA (1)...(19): siRNA sense strand
gacauuaaagggaagcuua

SEQ ID NO: 364503 - RNA, 19 nt, Homo sapiens
  misc_RNA (1)...(19): siRNA sense strand
aagggaagcuuaugguuug

SEQ ID NO: 364504 - RNA, 19 nt, Homo sapiens
  misc_RNA (1)...(19): siRNA sense strand
gcagcugcauuaucuacaa

SEQ ID NO: 364505 - RNA, 19 nt, Homo sapiens
  misc_RNA (1)...(19): siRNA sense strand
ggaagcuuaugguuugcua

SEQ ID NO: 364506 - RNA, 19 nt, Homo sapiens
  misc_RNA (1)...(19): siRNA sense strand
ugccaaagcagcugcauua

SEQ ID NO: 364507 - RNA, 19 nt, Homo sapiens
  misc_RNA (1)...(19): siRNA sense strand
gucgcgaucuuuagacaua

SEQ ID NO: 364508 - RNA, 19 nt, Homo sapiens
  misc_RNA (1)...(19): siRNA sense strand
cagaucgggucccuaacua

SEQ ID NO: 364509 - RNA, 19 nt, Homo sapiens
  misc_RNA (1)...(19): siRNA sense strand
acaaccaccuugggaauuu

SEQ ID NO: 364510 - RNA, 19 nt, Homo sapiens
  misc_RNA (1)...(19): siRNA sense strand
aagacuaucugacuuggaa

SEQ ID NO: 364511 - RNA, 19 nt, Homo sapiens
  misc_RNA (1)...(19): siRNA sense strand
agcaggacauggacaaaua

SEQ ID NO: 364512 - RNA, 19 nt, Homo sapiens
  misc_RNA (1)...(19): siRNA sense strand
gcacuacaacugaccauag

SEQ ID NO: 364513 - RNA, 19 nt, Homo sapiens
  misc_RNA (1)...(19): siRNA sense strand
gcuuaugguuugcuaugaa

SEQ ID NO: 364514 - RNA, 19 nt, Homo sapiens
  misc_RNA (1)...(19): siRNA sense strand
gccagugccuccucuacaa

SEQ ID NO: 364515 - RNA, 19 nt, Homo sapiens
  misc_RNA (1)...(19): siRNA sense strand
aaagggaagcuuaugguuu

SEQ ID NO: 364516 - RNA, 19 nt, Homo sapiens
  misc_RNA (1)...(19): siRNA sense strand
gcuuugagcccgucuaugu

SEQ ID NO: 364517 - RNA, 19 nt, Homo sapiens
  misc_RNA (1)...(19): siRNA sense strand
ccugagaccuucuggauac

SEQ ID NO: 364518 - RNA, 19 nt, Homo sapiens
  misc_RNA (1)...(19): siRNA sense strand
gcucaggacacuugcacua

SEQ ID NO: 364519 - RNA, 19 nt, Homo sapiens
  misc_RNA (1)...(19): siRNA sense strand
uaucugacuuggaaagaau

SEQ ID NO: 364520 - RNA, 19 nt, Homo sapiens
  misc_RNA (1)...(19): siRNA sense strand
ucauggagccguccucuga

SEQ ID NO: 364521 - RNA, 19 nt, Homo sapiens
  misc_RNA (1)...(19): siRNA sense strand
ccaaccaccuggaucaagu

SEQ ID NO: 364522 - RNA, 19 nt, Homo sapiens
  misc_RNA (1)...(19): siRNA sense strand
caacugggaggaagagaga

SEQ ID NO: 364523 - RNA, 19 nt, Homo sapiens
  misc_RNA (1)...(19): siRNA sense strand
gaaaugggaagcaagaaaa

SEQ ID NO: 364524 - RNA, 19 nt, Homo sapiens
  misc_RNA (1)...(19): siRNA sense strand
ccaugggagucuuggcuuu

SEQ ID NO: 364525 - RNA, 19 nt, Homo sapiens
  misc_RNA (1)...(19): siRNA sense strand
gcucugccaucaggaaaug

SEQ ID NO: 364526 - RNA, 19 nt, Homo sapiens
  misc_RNA (1)...(19): siRNA sense strand
cagcugcauuaucuacaaa

SEQ ID NO: 364527 - RNA, 19 nt, Homo sapiens
  misc_RNA (1)...(19): siRNA sense strand
cggcuuuacccacaauaua

SEQ ID NO: 364528 - RNA, 19 nt, Homo sapiens
  misc_RNA (1)...(19): siRNA sense strand
gugaagccaugcuggagau

SEQ ID NO: 364529 - RNA, 19 nt, Homo sapiens
  misc_RNA (1)...(19): siRNA sense strand
ccaaagcagcugcauuauc

SEQ ID NO: 364530 - RNA, 19 nt, Homo sapiens
  misc_RNA (1)...(19): siRNA sense strand
acacuggcccugacucuga

SEQ ID NO: 364531 - RNA, 19 nt, Homo sapiens
  misc_RNA (1)...(19): siRNA sense strand
caggacacuugcacuacaa

SEQ ID NO: 364532 - RNA, 19 nt, Homo sapiens
  misc_RNA (1)...(19): siRNA sense strand
ucaggacacuugcacuaca

SEQ ID NO: 364533 - RNA, 19 nt, Homo sapiens
  misc_RNA (1)...(19): siRNA sense strand
gcugcauuaucuacaaaga

SEQ ID NO: 364534 - RNA, 19 nt, Homo sapiens
  misc_RNA (1)...(19): siRNA sense strand
ccagguaccagcagcagaa

SEQ ID NO: 364535 - RNA, 19 nt, Homo sapiens
  misc_RNA (1)...(19): siRNA sense strand
uaaagggaagcuuaugguu

SEQ ID NO: 364536 - RNA, 19 nt, Homo sapiens
  misc_RNA (1)...(19): siRNA sense strand
acacuugcacuacaacuga

SEQ ID NO: 364537 - RNA, 19 nt, Homo sapiens
  misc_RNA (1)...(19): siRNA sense strand
uggcagaucgggucccuaa

SEQ ID NO: 364538 - RNA, 19 nt, Homo sapiens
  misc_RNA (1)...(19): siRNA sense strand
gcagaucgggucccuaacu

SEQ ID NO: 364539 - RNA, 19 nt, Homo sapiens
  misc_RNA (1)...(19): siRNA sense strand
gcaagaaaacgguaacuca

SEQ ID NO: 364540 - RNA, 19 nt, Homo sapiens
  misc_RNA (1)...(19): siRNA sense strand
ccuuuccgcucuccuaaga

SEQ ID NO: 364541 - RNA, 19 nt, Homo sapiens
  misc_RNA (1)...(19): siRNA sense strand
cuuaugguuugcuaugaaa

SEQ ID NO: 364542 - RNA, 19 nt, Homo sapiens
  misc_RNA (1)...(19): siRNA sense strand
aaacaaccaccuugggaau

SEQ ID NO: 364543 - RNA, 19 nt, Homo sapiens
  misc_RNA (1)...(19): siRNA sense strand
aaacgucuauuggccacuu

SEQ ID NO: 364544 - RNA, 19 nt, Homo sapiens
  misc_RNA (1)...(19): siRNA sense strand
gucuauguuuccuguauug

SEQ ID NO: 364545 - RNA, 19 nt, Homo sapiens
  misc_RNA (1)...(19): siRNA sense strand
aacaaagccucacgacuac

SEQ ID NO: 364546 - RNA, 19 nt, Homo sapiens
  misc_RNA (1)...(19): siRNA sense strand
ccaccaaccaccuggauca

SEQ ID NO: 364547 - RNA, 19 nt, Homo sapiens
  misc_RNA (1)...(19): siRNA sense strand
gagcucagccccuguauuc

SEQ ID NO: 364548 - RNA, 19 nt, Homo sapiens
  misc_RNA (1)...(19): siRNA sense strand
guauugcucaggacacuug

SEQ ID NO: 364549 - RNA, 19 nt, Homo sapiens
  misc_RNA (1)...(19): siRNA sense strand
cgucuauguuuccuguauu

SEQ ID NO: 364550 - RNA, 19 nt, Homo sapiens
  misc_RNA (1)...(19): siRNA sense strand
ccagcgcccuguucugagu

SEQ ID NO: 364551 - RNA, 19 nt, Homo sapiens
  misc_RNA (1)...(19): siRNA sense strand
caggaaaugggaagcaaga

SEQ ID NO: 364552 - RNA, 19 nt, Homo sapiens
  misc_RNA (1)...(19): siRNA sense strand
gcaggacauggacaaauag

SEQ ID NO: 364553 - RNA, 19 nt, Homo sapiens
  misc_RNA (1)...(19): siRNA sense strand
caccaggaaacgucuauug

SEQ ID NO: 364554 - RNA, 19 nt, Homo sapiens
  misc_RNA (1)...(19): siRNA sense strand
caguaaacauuugcggaau

SEQ ID NO: 364555 - RNA, 19 nt, Homo sapiens
  misc_RNA (1)...(19): siRNA sense strand
gccauugcccacccaggua

SEQ ID NO: 364556 - RNA, 19 nt, Homo sapiens
  misc_RNA (1)...(19): siRNA sense strand
agaaaacgguaacucaaga

SEQ ID NO: 364557 - RNA, 19 nt, Homo sapiens
  misc_RNA (1)...(19): siRNA sense strand
cuaucugacuuggaaagaa

SEQ ID NO: 364558 - RNA, 19 nt, Homo sapiens
  misc_RNA (1)...(19): siRNA sense strand
ccgucuauguuuccuguau

SEQ ID NO: 364559 - RNA, 19 nt, Homo sapiens
  misc_RNA (1)...(19): siRNA sense strand
gaagacuaucugacuugga

SEQ ID NO: 364560 - RNA, 19 nt, Homo sapiens
  misc_RNA (1)...(19): siRNA sense strand
aacaggaacccacaaggaa

SEQ ID NO: 364561 - RNA, 19 nt, Homo sapiens
  misc_RNA (1)...(19): siRNA sense strand
gcccuguucugaguucaug

SEQ ID NO: 364562 - RNA, 19 nt, Homo sapiens
  misc_RNA (1)...(19): siRNA sense strand
cuucaccacugccaaagca

SEQ ID NO: 364563 - RNA, 19 nt, Homo sapiens
  misc_RNA (1)...(19): siRNA sense strand
gcagaacaggaacccacaa

SEQ ID NO: 364564 - RNA, 19 nt, Homo sapiens
  misc_RNA (1)...(19): siRNA sense strand
cagcaucagaucuguaaag

SEQ ID NO: 364565 - RNA, 19 nt, Homo sapiens
  misc_RNA (1)...(19): siRNA sense strand
ccacccagaaagacucgua

SEQ ID NO: 364566 - RNA, 19 nt, Homo sapiens
  misc_RNA (1)...(19): siRNA sense strand
agcaucagaucuguaaaga

SEQ ID NO: 364567 - RNA, 19 nt, Homo sapiens
  misc_RNA (1)...(19): siRNA sense strand
gcagcaggacauggacaaa

SEQ ID NO: 364568 - RNA, 19 nt, Homo sapiens
  misc_RNA (1)...(19): siRNA sense strand
ggcuuuacccacaauauag

SEQ ID NO: 364569 - RNA, 19 nt, Homo sapiens
  misc_RNA (1)...(19): siRNA sense strand
gcaugcaggauggcucuga

SEQ ID NO: 364570 - RNA, 19 nt, Homo sapiens
  misc_RNA (1)...(19): siRNA sense strand
ggugcaggcagaacaggaa

SEQ ID NO: 364571 - RNA, 19 nt, Homo sapiens
  misc_RNA (1)...(19): siRNA sense strand
ugcagcaucagaucuguaa

SEQ ID NO: 364572 - RNA, 19 nt, Homo sapiens
  misc_RNA (1)...(19): siRNA sense strand
caagaaaacgguaacucaa

SEQ ID NO: 364573 - RNA, 19 nt, Homo sapiens
  misc_RNA (1)...(19): siRNA sense strand
gguccuuuccgcucuccua

SEQ ID NO: 364574 - RNA, 19 nt, Homo sapiens
  misc_RNA (1)...(19): siRNA sense strand
gacccggcuuuacccacaa

SEQ ID NO: 364575 - RNA, 19 nt, Homo sapiens
  misc_RNA (1)...(19): siRNA sense strand
gcucuucgagguugagucu

SEQ ID NO: 364576 - RNA, 19 nt, Homo sapiens
  misc_RNA (1)...(19): siRNA sense strand
uuugagcccgucuauguuu

SEQ ID NO: 364577 - RNA, 19 nt, Homo sapiens
  misc_RNA (1)...(19): siRNA sense strand
ccagcaccacccagaaaga

SEQ ID NO: 364578 - RNA, 19 nt, Homo sapiens
  misc_RNA (1)...(19): siRNA sense strand
gcacuuagauauauugcaa

SEQ ID NO: 364579 - RNA, 19 nt, Homo sapiens
  misc_RNA (1)...(19): siRNA sense strand
gaacccugaugcuaaauug

SEQ ID NO: 364580 - RNA, 19 nt, Homo sapiens
  misc_RNA (1)...(19): siRNA sense strand
ggacagcuaucaaccacuu

SEQ ID NO: 364581 - RNA, 19 nt, Homo sapiens
  misc_RNA (1)...(19): siRNA sense strand
ccagcuagcucaggcaaua

SEQ ID NO: 364582 - RNA, 19 nt, Homo sapiens
  misc_RNA (1)...(19): siRNA sense strand
gaaccggaagaucauauua

SEQ ID NO: 364583 - RNA, 19 nt, Homo sapiens
  misc_RNA (1)...(19): siRNA sense strand
gcagaacgcggguguaaug

SEQ ID NO: 364584 - RNA, 19 nt, Homo sapiens
  misc_RNA (1)...(19): siRNA sense strand
gcuaucaaccacuuaauaa

SEQ ID NO: 364585 - RNA, 19 nt, Homo sapiens
  misc_RNA (1)...(19): siRNA sense strand
gaacgcggguguaaugucu

SEQ ID NO: 364586 - RNA, 19 nt, Homo sapiens
  misc_RNA (1)...(19): siRNA sense strand
ggagacuggccaauuauaa

SEQ ID NO: 364587 - RNA, 19 nt, Homo sapiens
  misc_RNA (1)...(19): siRNA sense strand
aaagcauucuccagaguua

SEQ ID NO: 364588 - RNA, 19 nt, Homo sapiens
  misc_RNA (1)...(19): siRNA sense strand
uuucacagcugguaguuaa

SEQ ID NO: 364589 - RNA, 19 nt, Homo sapiens
  misc_RNA (1)...(19): siRNA sense strand
ccaauauucugaaacaugu

SEQ ID NO: 364590 - RNA, 19 nt, Homo sapiens
  misc_RNA (1)...(19): siRNA sense strand
gcaaagcauucuccagagu

SEQ ID NO: 364591 - RNA, 19 nt, Homo sapiens
  misc_RNA (1)...(19): siRNA sense strand
gccagaaauugcuuugaaa

SEQ ID NO: 364592 - RNA, 19 nt, Homo sapiens
  misc_RNA (1)...(19): siRNA sense strand
cagaagaaccggaagauca

SEQ ID NO: 364593 - RNA, 19 nt, Homo sapiens
  misc_RNA (1)...(19): siRNA sense strand
cagaagcuguugugaagug

SEQ ID NO: 364594 - RNA, 19 nt, Homo sapiens
  misc_RNA (1)...(19): siRNA sense strand
ugaaggacaaggaugaaua

SEQ ID NO: 364595 - RNA, 19 nt, Homo sapiens
  misc_RNA (1)...(19): siRNA sense strand
uggcagaaaugguuguuga

SEQ ID NO: 364596 - RNA, 19 nt, Homo sapiens
  misc_RNA (1)...(19): siRNA sense strand
caugaugcuugguuaugua

SEQ ID NO: 364597 - RNA, 19 nt, Homo sapiens
  misc_RNA (1)...(19): siRNA sense strand
ucauaugcuuggaagauuu

SEQ ID NO: 364598 - RNA, 19 nt, Homo sapiens
  misc_RNA (1)...(19): siRNA sense strand
gaagacacacuccugaaca

SEQ ID NO: 364599 - RNA, 19 nt, Homo sapiens
  misc_RNA (1)...(19): siRNA sense strand
cugaggaucuccaaguaaa

SEQ ID NO: 364600 - RNA, 19 nt, Homo sapiens
  misc_RNA (1)...(19): siRNA sense strand
ucaacagacugcugcuuug

SEQ ID NO: 364601 - RNA, 19 nt, Homo sapiens
  misc_RNA (1)...(19): siRNA sense strand
uggauacgcuggucauaug

SEQ ID NO: 364602 - RNA, 19 nt, Homo sapiens
  misc_RNA (1)...(19): siRNA sense strand
uuccacagcuuguuuauuc

SEQ ID NO: 364603 - RNA, 19 nt, Homo sapiens
  misc_RNA (1)...(19): siRNA sense strand
ucagugauauugcaaagca

SEQ ID NO: 364604 - RNA, 19 nt, Homo sapiens
  misc_RNA (1)...(19): siRNA sense strand
agaaaugguuguugaagca

SEQ ID NO: 364605 - RNA, 19 nt, Homo sapiens
  misc_RNA (1)...(19): siRNA sense strand
ccugaacccugaugcuaaa

SEQ ID NO: 364606 - RNA, 19 nt, Homo sapiens
  misc_RNA (1)...(19): siRNA sense strand
gaagaaccggaagaucaua

SEQ ID NO: 364607 - RNA, 19 nt, Homo sapiens
  misc_RNA (1)...(19): siRNA sense strand
uaccagcccuugaaccauu

SEQ ID NO: 364608 - RNA, 19 nt, Homo sapiens
  misc_RNA (1)...(19): siRNA sense strand
gcugcagccugggcacuua

SEQ ID NO: 364609 - RNA, 19 nt, Homo sapiens
  misc_RNA (1)...(19): siRNA sense strand
cauaaagaauauccugcaa

SEQ ID NO: 364610 - RNA, 19 nt, Homo sapiens
  misc_RNA (1)...(19): siRNA sense strand
uggcagucaucauuucuaa

SEQ ID NO: 364611 - RNA, 19 nt, Homo sapiens
  misc_RNA (1)...(19): siRNA sense strand
guaaugucuuugcugagaa

SEQ ID NO: 364612 - RNA, 19 nt, Homo sapiens
  misc_RNA (1)...(19): siRNA sense strand
aaacauacacccgagcuuu

SEQ ID NO: 364613 - RNA, 19 nt, Homo sapiens
  misc_RNA (1)...(19): siRNA sense strand
ggacccaguucgugcagau

SEQ ID NO: 364614 - RNA, 19 nt, Homo sapiens
  misc_RNA (1)...(19): siRNA sense strand
ggacagauuggaagacaca

SEQ ID NO: 364615 - RNA, 19 nt, Homo sapiens
  misc_RNA (1)...(19): siRNA sense strand
gcuguugcagucacaaaua

SEQ ID NO: 364616 - RNA, 19 nt, Homo sapiens
  misc_RNA (1)...(19): siRNA sense strand
ugccaguucugcuuucuuu

SEQ ID NO: 364617 - RNA, 19 nt, Homo sapiens
  misc_RNA (1)...(19): siRNA sense strand
gagacuggccaauuauaau

SEQ ID NO: 364618 - RNA, 19 nt, Homo sapiens
  misc_RNA (1)...(19): siRNA sense strand
guacaugucaacagaaagu

SEQ ID NO: 364619 - RNA, 19 nt, Homo sapiens
  misc_RNA (1)...(19): siRNA sense strand
ggaugaauacgugaagaaa

SEQ ID NO: 364620 - RNA, 19 nt, Homo sapiens
  misc_RNA (1)...(19): siRNA sense strand
gaaggacaaggaugaauac

SEQ ID NO: 364621 - RNA, 19 nt, Homo sapiens
  misc_RNA (1)...(19): siRNA sense strand
uguaaugucuuugcugaga

SEQ ID NO: 364622 - RNA, 19 nt, Homo sapiens
  misc_RNA (1)...(19): siRNA sense strand
gggagacuggccaauuaua

SEQ ID NO: 364623 - RNA, 19 nt, Homo sapiens
  misc_RNA (1)...(19): siRNA sense strand
caguucugcuuucuuugua

SEQ ID NO: 364624 - RNA, 19 nt, Homo sapiens
  misc_RNA (1)...(19): siRNA sense strand
ccugggcacuuagauauau

SEQ ID NO: 364625 - RNA, 19 nt, Homo sapiens
  misc_RNA (1)...(19): siRNA sense strand
caucauuucuaagggugua

SEQ ID NO: 364626 - RNA, 19 nt, Homo sapiens
  misc_RNA (1)...(19): siRNA sense strand
gcagucaucauuucuaagg

SEQ ID NO: 364627 - RNA, 19 nt, Homo sapiens
  misc_RNA (1)...(19): siRNA sense strand
caaagcauucuccagaguu

SEQ ID NO: 364628 - RNA, 19 nt, Homo sapiens
  misc_RNA (1)...(19): siRNA sense strand
agccagaaauugcuuugaa

SEQ ID NO: 364629 - RNA, 19 nt, Homo sapiens
  misc_RNA (1)...(19): siRNA sense strand
gucauaugcuuggaagauu

SEQ ID NO: 364630 - RNA, 19 nt, Homo sapiens
  misc_RNA (1)...(19): siRNA sense strand
gaaccauuucuauaugaug

SEQ ID NO: 364631 - RNA, 19 nt, Homo sapiens
  misc_RNA (1)...(19): siRNA sense strand
cuacuuaccagcccuugaa

SEQ ID NO: 364632 - RNA, 19 nt, Homo sapiens
  misc_RNA (1)...(19): siRNA sense strand
gacguggucccaacaauuc

SEQ ID NO: 364633 - RNA, 19 nt, Homo sapiens
  misc_RNA (1)...(19): siRNA sense strand
ggucauaugcuuggaagau

SEQ ID NO: 364634 - RNA, 19 nt, Homo sapiens
  misc_RNA (1)...(19): siRNA sense strand
ucaaccacuuaauaacuga

SEQ ID NO: 364635 - RNA, 19 nt, Homo sapiens
  misc_RNA (1)...(19): siRNA sense strand
ugcaaguguucgagcaaua

SEQ ID NO: 364636 - RNA, 19 nt, Homo sapiens
  misc_RNA (1)...(19): siRNA sense strand
agaguuagcacagacagua

SEQ ID NO: 364637 - RNA, 19 nt, Homo sapiens
  misc_RNA (1)...(19): siRNA sense strand
cgacauucuuccacagcuu

SEQ ID NO: 364638 - RNA, 19 nt, Homo sapiens
  misc_RNA (1)...(19): siRNA sense strand
gauuguggagcacuggaua

SEQ ID NO: 364639 - RNA, 19 nt, Homo sapiens
  misc_RNA (1)...(19): siRNA sense strand
uagcagaagcuguugugaa

SEQ ID NO: 364640 - RNA, 19 nt, Homo sapiens
  misc_RNA (1)...(19): siRNA sense strand
gcagaggguggacagcuau

SEQ ID NO: 364641 - RNA, 19 nt, Homo sapiens
  misc_RNA (1)...(19): siRNA sense strand
cuugaaccauuucuauaug

SEQ ID NO: 364642 - RNA, 19 nt, Homo sapiens
  misc_RNA (1)...(19): siRNA sense strand
agcagaagcuguugugaag

SEQ ID NO: 364643 - RNA, 19 nt, Homo sapiens
  misc_RNA (1)...(19): siRNA sense strand
ugaccuagcagaagcuguu

SEQ ID NO: 364644 - RNA, 19 nt, Homo sapiens
  misc_RNA (1)...(19): siRNA sense strand
ggaagacacacuccugaac

SEQ ID NO: 364645 - RNA, 19 nt, Homo sapiens
  misc_RNA (1)...(19): siRNA sense strand
ucaugaugcuugguuaugu

SEQ ID NO: 364646 - RNA, 19 nt, Homo sapiens
  misc_RNA (1)...(19): siRNA sense strand
uuagagagauugcaaaaca

SEQ ID NO: 364647 - RNA, 19 nt, Homo sapiens
  misc_RNA (1)...(19): siRNA sense strand
gagcaguugguaaacauuc

SEQ ID NO: 364648 - RNA, 19 nt, Homo sapiens
  misc_RNA (1)...(19): siRNA sense strand
gcagaaaugguuguugaag

SEQ ID NO: 364649 - RNA, 19 nt, Homo sapiens
  misc_RNA (1)...(19): siRNA sense strand
uagcccagaugauccugaa

SEQ ID NO: 364650 - RNA, 19 nt, Homo sapiens
  misc_RNA (1)...(19): siRNA sense strand
uaaauugaagcaucagauc

SEQ ID NO: 364651 - RNA, 19 nt, Homo sapiens
  misc_RNA (1)...(19): siRNA sense strand
ccuugaaccauuucuauau

SEQ ID NO: 364652 - RNA, 19 nt, Homo sapiens
  misc_RNA (1)...(19): siRNA sense strand
uaugaugcuccucccaaua

SEQ ID NO: 364653 - RNA, 19 nt, Homo sapiens
  misc_RNA (1)...(19): siRNA sense strand
guugugaagugcgacauuc

SEQ ID NO: 364654 - RNA, 19 nt, Homo sapiens
  misc_RNA (1)...(19): siRNA sense strand
gcccuugaaccauuucuau

SEQ ID NO: 364655 - RNA, 19 nt, Homo sapiens
  misc_RNA (1)...(19): siRNA sense strand
cagccugggcacuuagaua

SEQ ID NO: 364656 - RNA, 19 nt, Homo sapiens
  misc_RNA (1)...(19): siRNA sense strand
gcagcugccuuuguguuac

SEQ ID NO: 364657 - RNA, 19 nt, Homo sapiens
  misc_RNA (1)...(19): siRNA sense strand
cacagcuuguuuauucauu

SEQ ID NO: 364658 - RNA, 19 nt, Homo sapiens
  misc_RNA (1)...(19): siRNA sense strand
uaggacagauuggaagaca

SEQ ID NO: 364659 - RNA, 19 nt, Homo sapiens
  misc_RNA (1)...(19): siRNA sense strand
acagcuuguuuauucauug

SEQ ID NO: 364660 - RNA, 19 nt, Homo sapiens
  misc_RNA (1)...(19): siRNA sense strand
acgcggguguaaugucuuu

SEQ ID NO: 364661 - RNA, 19 nt, Homo sapiens
  misc_RNA (1)...(19): siRNA sense strand
ugcagaggguggacagcua

SEQ ID NO: 364662 - RNA, 19 nt, Homo sapiens
  misc_RNA (1)...(19): siRNA sense strand
ugaugcuccucccaauauu

SEQ ID NO: 364663 - RNA, 19 nt, Homo sapiens
  misc_RNA (1)...(19): siRNA sense strand
ccaguucugcuuucuuugu

SEQ ID NO: 364664 - RNA, 19 nt, Homo sapiens
  misc_RNA (1)...(19): siRNA sense strand
agacuggccaauuauaaug

SEQ ID NO: 364665 - RNA, 19 nt, Homo sapiens
  misc_RNA (1)...(19): siRNA sense strand
ugaagcaucagauccuuuc

SEQ ID NO: 364666 - RNA, 19 nt, Homo sapiens
  misc_RNA (1)...(19): siRNA sense strand
gcuucggcccucagugaua

SEQ ID NO: 364667 - RNA, 19 nt, Homo sapiens
  misc_RNA (1)...(19): siRNA sense strand
aaccggaagaucauauuaa

SEQ ID NO: 364668 - RNA, 19 nt, Homo sapiens
  misc_RNA (1)...(19): siRNA sense strand
gcuugggccuuaggacaga

SEQ ID NO: 364669 - RNA, 19 nt, Homo sapiens
  misc_RNA (1)...(19): siRNA sense strand
uauccaggagccagaaauu

SEQ ID NO: 364670 - RNA, 19 nt, Homo sapiens
  misc_RNA (1)...(19): siRNA sense strand
uuguacaugucaacagaaa

SEQ ID NO: 364671 - RNA, 19 nt, Homo sapiens
  misc_RNA (1)...(19): siRNA sense strand
cuuuguacaugucaacaga

SEQ ID NO: 364672 - RNA, 19 nt, Homo sapiens
  misc_RNA (1)...(19): siRNA sense strand
uuauaaugaugaccuagca

SEQ ID NO: 364673 - RNA, 19 nt, Homo sapiens
  misc_RNA (1)...(19): siRNA sense strand
ccucagugauauugcaaag

SEQ ID NO: 364674 - RNA, 19 nt, Homo sapiens
  misc_RNA (1)...(19): siRNA sense strand
gcaaguguucgagcaauac

SEQ ID NO: 364675 - RNA, 19 nt, Homo sapiens
  misc_RNA (1)...(19): siRNA sense strand
gugguuggacaguucagua

SEQ ID NO: 364676 - RNA, 19 nt, Homo sapiens
  misc_RNA (1)...(19): siRNA sense strand
acaugugguuggacaguuc

SEQ ID NO: 364677 - RNA, 19 nt, Homo sapiens
  misc_RNA (1)...(19): siRNA sense strand
gacuggccaauuauaauga

SEQ ID NO: 364678 - RNA, 19 nt, Homo sapiens
  misc_RNA (1)...(19): siRNA sense strand
gcacuuagauauauugcaa

SEQ ID NO: 364679 - RNA, 19 nt, Homo sapiens
  misc_RNA (1)...(19): siRNA sense strand
gaacccugaugcuaaauug

SEQ ID NO: 364680 - RNA, 19 nt, Homo sapiens
  misc_RNA (1)...(19): siRNA sense strand
ggacagcuaucaaccacuu

SEQ ID NO: 364681 - RNA, 19 nt, Homo sapiens
  misc_RNA (1)...(19): siRNA sense strand
ccagcuagcucaggcaaua

SEQ ID NO: 364682 - RNA, 19 nt, Homo sapiens
  misc_RNA (1)...(19): siRNA sense strand
gaaccggaagaucauauua

SEQ ID NO: 364683 - RNA, 19 nt, Homo sapiens
  misc_RNA (1)...(19): siRNA sense strand
gcagaacgcggguguaaug

SEQ ID NO: 364684 - RNA, 19 nt, Homo sapiens
  misc_RNA (1)...(19): siRNA sense strand
gaacgcggguguaaugucu

SEQ ID NO: 364685 - RNA, 19 nt, Homo sapiens
  misc_RNA (1)...(19): siRNA sense strand
ggagacuggccaauuauaa

SEQ ID NO: 364686 - RNA, 19 nt, Homo sapiens
  misc_RNA (1)...(19): siRNA sense strand
aaagcauucuccagaguua

SEQ ID NO: 364687 - RNA, 19 nt, Homo sapiens
  misc_RNA (1)...(19): siRNA sense strand
uuucacagcugguaguuaa

SEQ ID NO: 364688 - RNA, 19 nt, Homo sapiens
  misc_RNA (1)...(19): siRNA sense strand
ccaauauucugaaacaugu

SEQ ID NO: 364689 - RNA, 19 nt, Homo sapiens
  misc_RNA (1)...(19): siRNA sense strand
gcaaagcauucuccagagu

SEQ ID NO: 364690 - RNA, 19 nt, Homo sapiens
  misc_RNA (1)...(19): siRNA sense strand
gccagaaauugcuuugaaa

SEQ ID NO: 364691 - RNA, 19 nt, Homo sapiens
  misc_RNA (1)...(19): siRNA sense strand
cagaagaaccggaagauca

SEQ ID NO: 364692 - RNA, 19 nt, Homo sapiens
  misc_RNA (1)...(19): siRNA sense strand
cagaagcuguugugaagug

SEQ ID NO: 364693 - RNA, 19 nt, Homo sapiens
  misc_RNA (1)...(19): siRNA sense strand
ugaaggacaaggaugaaua

SEQ ID NO: 364694 - RNA, 19 nt, Homo sapiens
  misc_RNA (1)...(19): siRNA sense strand
uggcagaaaugguuguuga

SEQ ID NO: 364695 - RNA, 19 nt, Homo sapiens
  misc_RNA (1)...(19): siRNA sense strand
caugaugcuugguuaugua

SEQ ID NO: 364696 - RNA, 19 nt, Homo sapiens
  misc_RNA (1)...(19): siRNA sense strand
ucauaugcuuggaagauuu

SEQ ID NO: 364697 - RNA, 19 nt, Homo sapiens
  misc_RNA (1)...(19): siRNA sense strand
gaagacacacuccugaaca

SEQ ID NO: 364698 - RNA, 19 nt, Homo sapiens
  misc_RNA (1)...(19): siRNA sense strand
cugaggaucuccaaguaaa

SEQ ID NO: 364699 - RNA, 19 nt, Homo sapiens
  misc_RNA (1)...(19): siRNA sense strand
ucaacagacugcugcuuug

SEQ ID NO: 364700 - RNA, 19 nt, Homo sapiens
  misc_RNA (1)...(19): siRNA sense strand
uggauacgcuggucauaug

SEQ ID NO: 364701 - RNA, 19 nt, Homo sapiens
  misc_RNA (1)...(19): siRNA sense strand
uuccacagcuuguuuauuc

SEQ ID NO: 364702 - RNA, 19 nt, Homo sapiens
  misc_RNA (1)...(19): siRNA sense strand
ucagugauauugcaaagca

SEQ ID NO: 364703 - RNA, 19 nt, Homo sapiens
  misc_RNA (1)...(19): siRNA sense strand
agaaaugguuguugaagca

SEQ ID NO: 364704 - RNA, 19 nt, Homo sapiens
  misc_RNA (1)...(19): siRNA sense strand
ccugaacccugaugcuaaa

SEQ ID NO: 364705 - RNA, 19 nt, Homo sapiens
  misc_RNA (1)...(19): siRNA sense strand
gaagaaccggaagaucaua

SEQ ID NO: 364706 - RNA, 19 nt, Homo sapiens
  misc_RNA (1)...(19): siRNA sense strand
uaccagcccuugaaccauu

SEQ ID NO: 364707 - RNA, 19 nt, Homo sapiens
  misc_RNA (1)...(19): siRNA sense strand
gcugcagccugggcacuua

SEQ ID NO: 364708 - RNA, 19 nt, Homo sapiens
  misc_RNA (1)...(19): siRNA sense strand
cauaaagaauauccugcaa

SEQ ID NO: 364709 - RNA, 19 nt, Homo sapiens
  misc_RNA (1)...(19): siRNA sense strand
uggcagucaucauuucuaa

SEQ ID NO: 364710 - RNA, 19 nt, Homo sapiens
  misc_RNA (1)...(19): siRNA sense strand
guaaugucuuugcugagaa

SEQ ID NO: 364711 - RNA, 19 nt, Homo sapiens
  misc_RNA (1)...(19): siRNA sense strand
aaacauacacccgagcuuu

SEQ ID NO: 364712 - RNA, 19 nt, Homo sapiens
  misc_RNA (1)...(19): siRNA sense strand
ggacccaguucgugcagau

SEQ ID NO: 364713 - RNA, 19 nt, Homo sapiens
  misc_RNA (1)...(19): siRNA sense strand
ggacagauuggaagacaca

SEQ ID NO: 364714 - RNA, 19 nt, Homo sapiens
  misc_RNA (1)...(19): siRNA sense strand
gcuguugcagucacaaaua

SEQ ID NO: 364715 - RNA, 19 nt, Homo sapiens
  misc_RNA (1)...(19): siRNA sense strand
ugccaguucugcuuucuuu

SEQ ID NO: 364716 - RNA, 19 nt, Homo sapiens
  misc_RNA (1)...(19): siRNA sense strand
gagacuggccaauuauaau

SEQ ID NO: 364717 - RNA, 19 nt, Homo sapiens
  misc_RNA (1)...(19): siRNA sense strand
guacaugucaacagaaagu

SEQ ID NO: 364718 - RNA, 19 nt, Homo sapiens
  misc_RNA (1)...(19): siRNA sense strand
uguaaugucuuugcugaga

SEQ ID NO: 364719 - RNA, 19 nt, Homo sapiens
  misc_RNA (1)...(19): siRNA sense strand
ggaugaauacgugaagaaa

SEQ ID NO: 364720 - RNA, 19 nt, Homo sapiens
  misc_RNA (1)...(19): siRNA sense strand
gaaggacaaggaugaauac

SEQ ID NO: 364721 - RNA, 19 nt, Homo sapiens
  misc_RNA (1)...(19): siRNA sense strand
gggagacuggccaauuaua

SEQ ID NO: 364722 - RNA, 19 nt, Homo sapiens
  misc_RNA (1)...(19): siRNA sense strand
caguucugcuuucuuugua

SEQ ID NO: 364723 - RNA, 19 nt, Homo sapiens
  misc_RNA (1)...(19): siRNA sense strand
ccugggcacuuagauauau

SEQ ID NO: 364724 - RNA, 19 nt, Homo sapiens
  misc_RNA (1)...(19): siRNA sense strand
caucauuucuaagggugua

SEQ ID NO: 364725 - RNA, 19 nt, Homo sapiens
  misc_RNA (1)...(19): siRNA sense strand
gcagucaucauuucuaagg

SEQ ID NO: 364726 - RNA, 19 nt, Homo sapiens
  misc_RNA (1)...(19): siRNA sense strand
caaagcauucuccagaguu

SEQ ID NO: 364727 - RNA, 19 nt, Homo sapiens
  misc_RNA (1)...(19): siRNA sense strand
agccagaaauugcuuugaa

SEQ ID NO: 364728 - RNA, 19 nt, Homo sapiens
  misc_RNA (1)...(19): siRNA sense strand
gacguggucccaacaauuc

SEQ ID NO: 364729 - RNA, 19 nt, Homo sapiens
  misc_RNA (1)...(19): siRNA sense strand
gaaccauuucuauaugaug

SEQ ID NO: 364730 - RNA, 19 nt, Homo sapiens
  misc_RNA (1)...(19): siRNA sense strand
cuacuuaccagcccuugaa

SEQ ID NO: 364731 - RNA, 19 nt, Homo sapiens
  misc_RNA (1)...(19): siRNA sense strand
gucauaugcuuggaagauu

SEQ ID NO: 364732 - RNA, 19 nt, Homo sapiens
  misc_RNA (1)...(19): siRNA sense strand
ggucauaugcuuggaagau

SEQ ID NO: 364733 - RNA, 19 nt, Homo sapiens
  misc_RNA (1)...(19): siRNA sense strand
ugcaaguguucgagcaaua

SEQ ID NO: 364734 - RNA, 19 nt, Homo sapiens
  misc_RNA (1)...(19): siRNA sense strand
agaguuagcacagacagua

SEQ ID NO: 364735 - RNA, 19 nt, Homo sapiens
  misc_RNA (1)...(19): siRNA sense strand
cgacauucuuccacagcuu

SEQ ID NO: 364736 - RNA, 19 nt, Homo sapiens
  misc_RNA (1)...(19): siRNA sense strand
gauuguggagcacuggaua

SEQ ID NO: 364737 - RNA, 19 nt, Homo sapiens
  misc_RNA (1)...(19): siRNA sense strand
uagcagaagcuguugugaa

SEQ ID NO: 364738 - RNA, 19 nt, Homo sapiens
  misc_RNA (1)...(19): siRNA sense strand
gcagaggguggacagcuau

SEQ ID NO: 364739 - RNA, 19 nt, Homo sapiens
  misc_RNA (1)...(19): siRNA sense strand
cuugaaccauuucuauaug

SEQ ID NO: 364740 - RNA, 19 nt, Homo sapiens
  misc_RNA (1)...(19): siRNA sense strand
agcagaagcuguugugaag

SEQ ID NO: 364741 - RNA, 19 nt, Homo sapiens
  misc_RNA (1)...(19): siRNA sense strand
ugaccuagcagaagcuguu

SEQ ID NO: 364742 - RNA, 19 nt, Homo sapiens
  misc_RNA (1)...(19): siRNA sense strand
ggaagacacacuccugaac

SEQ ID NO: 364743 - RNA, 19 nt, Homo sapiens
  misc_RNA (1)...(19): siRNA sense strand
ucaugaugcuugguuaugu

SEQ ID NO: 364744 - RNA, 19 nt, Homo sapiens
  misc_RNA (1)...(19): siRNA sense strand
uuagagagauugcaaaaca

SEQ ID NO: 364745 - RNA, 19 nt, Homo sapiens
  misc_RNA (1)...(19): siRNA sense strand
gagcaguugguaaacauuc

SEQ ID NO: 364746 - RNA, 19 nt, Homo sapiens
  misc_RNA (1)...(19): siRNA sense strand
gcagaaaugguuguugaag

SEQ ID NO: 364747 - RNA, 19 nt, Homo sapiens
  misc_RNA (1)...(19): siRNA sense strand
uagcccagaugauccugaa

SEQ ID NO: 364748 - RNA, 19 nt, Homo sapiens
  misc_RNA (1)...(19): siRNA sense strand
uaaauugaagcaucagauc

SEQ ID NO: 364749 - RNA, 19 nt, Homo sapiens
  misc_RNA (1)...(19): siRNA sense strand
ccuugaaccauuucuauau

SEQ ID NO: 364750 - RNA, 19 nt, Homo sapiens
  misc_RNA (1)...(19): siRNA sense strand
uaugaugcuccucccaaua

SEQ ID NO: 364751 - RNA, 19 nt, Homo sapiens
  misc_RNA (1)...(19): siRNA sense strand
guugugaagugcgacauuc

SEQ ID NO: 364752 - RNA, 19 nt, Homo sapiens
  misc_RNA (1)...(19): siRNA sense strand
gcccuugaaccauuucuau

SEQ ID NO: 364753 - RNA, 19 nt, Homo sapiens
  misc_RNA (1)...(19): siRNA sense strand
cagccugggcacuuagaua

SEQ ID NO: 364754 - RNA, 19 nt, Homo sapiens
  misc_RNA (1)...(19): siRNA sense strand
gcagcugccuuuguguuac

SEQ ID NO: 364755 - RNA, 19 nt, Homo sapiens
  misc_RNA (1)...(19): siRNA sense strand
cacagcuuguuuauucauu

SEQ ID NO: 364756 - RNA, 19 nt, Homo sapiens
  misc_RNA (1)...(19): siRNA sense strand
uaggacagauuggaagaca

SEQ ID NO: 364757 - RNA, 19 nt, Homo sapiens
  misc_RNA (1)...(19): siRNA sense strand
acagcuuguuuauucauug

SEQ ID NO: 364758 - RNA, 19 nt, Homo sapiens
  misc_RNA (1)...(19): siRNA sense strand
gcuucggcccucagugaua

SEQ ID NO: 364759 - RNA, 19 nt, Homo sapiens
  misc_RNA (1)...(19): siRNA sense strand
ugcagaggguggacagcua

SEQ ID NO: 364760 - RNA, 19 nt, Homo sapiens
  misc_RNA (1)...(19): siRNA sense strand
ugaugcuccucccaauauu

SEQ ID NO: 364761 - RNA, 19 nt, Homo sapiens
  misc_RNA (1)...(19): siRNA sense strand
ccaguucugcuuucuuugu

SEQ ID NO: 364762 - RNA, 19 nt, Homo sapiens
  misc_RNA (1)...(19): siRNA sense strand
agacuggccaauuauaaug

SEQ ID NO: 364763 - RNA, 19 nt, Homo sapiens
  misc_RNA (1)...(19): siRNA sense strand
acgcggguguaaugucuuu

SEQ ID NO: 364764 - RNA, 19 nt, Homo sapiens
  misc_RNA (1)...(19): siRNA sense strand
ugaagcaucagauccuuuc

SEQ ID NO: 364765 - RNA, 19 nt, Homo sapiens
  misc_RNA (1)...(19): siRNA sense strand
aaccggaagaucauauuaa

SEQ ID NO: 364766 - RNA, 19 nt, Homo sapiens
  misc_RNA (1)...(19): siRNA sense strand
gcuugggccuuaggacaga

SEQ ID NO: 364767 - RNA, 19 nt, Homo sapiens
  misc_RNA (1)...(19): siRNA sense strand
uauccaggagccagaaauu

SEQ ID NO: 364768 - RNA, 19 nt, Homo sapiens
  misc_RNA (1)...(19): siRNA sense strand
uuguacaugucaacagaaa

SEQ ID NO: 364769 - RNA, 19 nt, Homo sapiens
  misc_RNA (1)...(19): siRNA sense strand
cuuuguacaugucaacaga

SEQ ID NO: 364770 - RNA, 19 nt, Homo sapiens
  misc_RNA (1)...(19): siRNA sense strand
uuauaaugaugaccuagca

SEQ ID NO: 364771 - RNA, 19 nt, Homo sapiens
  misc_RNA (1)...(19): siRNA sense strand
ccucagugauauugcaaag

SEQ ID NO: 364772 - RNA, 19 nt, Homo sapiens
  misc_RNA (1)...(19): siRNA sense strand
gcaaguguucgagcaauac

SEQ ID NO: 364773 - RNA, 19 nt, Homo sapiens
  misc_RNA (1)...(19): siRNA sense strand
gugguuggacaguucagua

SEQ ID NO: 364774 - RNA, 19 nt, Homo sapiens
  misc_RNA (1)...(19): siRNA sense strand
acaugugguuggacaguuc

SEQ ID NO: 364775 - RNA, 19 nt, Homo sapiens
  misc_RNA (1)...(19): siRNA sense strand
gacuggccaauuauaauga

SEQ ID NO: 364776 - RNA, 19 nt, Homo sapiens
  misc_RNA (1)...(19): siRNA sense strand
ucugaaacaugugguugga

SEQ ID NO: 364777 - RNA, 19 nt, Homo sapiens
  misc_RNA (1)...(19): siRNA sense strand
guuggacaguucaguaagg

SEQ ID NO: 364778 - RNA, 19 nt, Homo sapiens
  misc_RNA (1)...(19): siRNA sense strand
ggacacagagaaugaguua

SEQ ID NO: 364779 - RNA, 19 nt, Homo sapiens
  misc_RNA (1)...(19): siRNA sense strand
gaaguuugauucucaggaa

SEQ ID NO: 364780 - RNA, 19 nt, Homo sapiens
  misc_RNA (1)...(19): siRNA sense strand
ccaagucucugcucaagaa

SEQ ID NO: 364781 - RNA, 19 nt, Homo sapiens
  misc_RNA (1)...(19): siRNA sense strand
cuaaagcuguugauggaua

SEQ ID NO: 364782 - RNA, 19 nt, Homo sapiens
  misc_RNA (1)...(19): siRNA sense strand
gagaacacccgcaaugauu

SEQ ID NO: 364783 - RNA, 19 nt, Homo sapiens
  misc_RNA (1)...(19): siRNA sense strand
gaacaacugcugcgucaug

SEQ ID NO: 364784 - RNA, 19 nt, Homo sapiens
  misc_RNA (1)...(19): siRNA sense strand
gagauucagugacucagaa

SEQ ID NO: 364785 - RNA, 19 nt, Homo sapiens
  misc_RNA (1)...(19): siRNA sense strand
ccauugaggugcggcauua

SEQ ID NO: 364786 - RNA, 19 nt, Homo sapiens
  misc_RNA (1)...(19): siRNA sense strand
gcacguucaucauugagaa

SEQ ID NO: 364787 - RNA, 19 nt, Homo sapiens
  misc_RNA (1)...(19): siRNA sense strand
ggaccuuccuccugagauu

SEQ ID NO: 364788 - RNA, 19 nt, Homo sapiens
  misc_RNA (1)...(19): siRNA sense strand
ugaauuaccuuaucuacgu

SEQ ID NO: 364789 - RNA, 19 nt, Homo sapiens
  misc_RNA (1)...(19): siRNA sense strand
gcaaguggucccugaguuu

SEQ ID NO: 364790 - RNA, 19 nt, Homo sapiens
  misc_RNA (1)...(19): siRNA sense strand
gaaagaauguuuuggaauc

SEQ ID NO: 364791 - RNA, 19 nt, Homo sapiens
  misc_RNA (1)...(19): siRNA sense strand
gcaacaggcccaugaccua

SEQ ID NO: 364792 - RNA, 19 nt, Homo sapiens
  misc_RNA (1)...(19): siRNA sense strand
gcagccaccuggaggacua

SEQ ID NO: 364793 - RNA, 19 nt, Homo sapiens
  misc_RNA (1)...(19): siRNA sense strand
agaaacaccuccagaucaa

SEQ ID NO: 364794 - RNA, 19 nt, Homo sapiens
  misc_RNA (1)...(19): siRNA sense strand
acacagagaaugaguuaaa

SEQ ID NO: 364795 - RNA, 19 nt, Homo sapiens
  misc_RNA (1)...(19): siRNA sense strand
gaugaaguauacuccaaau

SEQ ID NO: 364796 - RNA, 19 nt, Homo sapiens
  misc_RNA (1)...(19): siRNA sense strand
ccacacagcuccagaacac

SEQ ID NO: 364797 - RNA, 19 nt, Homo sapiens
  misc_RNA (1)...(19): siRNA sense strand
caccauugcuuggaaguuu

SEQ ID NO: 364798 - RNA, 19 nt, Homo sapiens
  misc_RNA (1)...(19): siRNA sense strand
cagagucggugacagaaga

SEQ ID NO: 364799 - RNA, 19 nt, Homo sapiens
  misc_RNA (1)...(19): siRNA sense strand
gaaauucaaggccgaagug

SEQ ID NO: 364800 - RNA, 19 nt, Homo sapiens
  misc_RNA (1)...(19): siRNA sense strand
ggacggaauuacacuuucu

SEQ ID NO: 364801 - RNA, 19 nt, Homo sapiens
  misc_RNA (1)...(19): siRNA sense strand
cuacaguccuggugugaga

SEQ ID NO: 364802 - RNA, 19 nt, Homo sapiens
  misc_RNA (1)...(19): siRNA sense strand
gaccagcacguucaucauu

SEQ ID NO: 364803 - RNA, 19 nt, Homo sapiens
  misc_RNA (1)...(19): siRNA sense strand
gaaguuggccgagaucauc

SEQ ID NO: 364804 - RNA, 19 nt, Homo sapiens
  misc_RNA (1)...(19): siRNA sense strand
gaaucccaguucaguguug

SEQ ID NO: 364805 - RNA, 19 nt, Homo sapiens
  misc_RNA (1)...(19): siRNA sense strand
uuacaauccuguuugaauc

SEQ ID NO: 364806 - RNA, 19 nt, Homo sapiens
  misc_RNA (1)...(19): siRNA sense strand
gaauuuaccaggacggaau

SEQ ID NO: 364807 - RNA, 19 nt, Homo sapiens
  misc_RNA (1)...(19): siRNA sense strand
gaggauccaagcucaguuu

SEQ ID NO: 364808 - RNA, 19 nt, Homo sapiens
  misc_RNA (1)...(19): siRNA sense strand
uuuggaaucugaugccuuu

SEQ ID NO: 364809 - RNA, 19 nt, Homo sapiens
  misc_RNA (1)...(19): siRNA sense strand
agacggcccuccagcagaa

SEQ ID NO: 364810 - RNA, 19 nt, Homo sapiens
  misc_RNA (1)...(19): siRNA sense strand
cagaaacaccuccagauca

SEQ ID NO: 364811 - RNA, 19 nt, Homo sapiens
  misc_RNA (1)...(19): siRNA sense strand
ggcgagaucuugaacaacu

SEQ ID NO: 364812 - RNA, 19 nt, Homo sapiens
  misc_RNA (1)...(19): siRNA sense strand
gaagacccagaccaaguuu

SEQ ID NO: 364813 - RNA, 19 nt, Homo sapiens
  misc_RNA (1)...(19): siRNA sense strand
ccagcacguucaucauuga

SEQ ID NO: 364814 - RNA, 19 nt, Homo sapiens
  misc_RNA (1)...(19): siRNA sense strand
caguagaucuugauaaucc

SEQ ID NO: 364815 - RNA, 19 nt, Homo sapiens
  misc_RNA (1)...(19): siRNA sense strand
uauaacauguacccacaga

SEQ ID NO: 364816 - RNA, 19 nt, Homo sapiens
  misc_RNA (1)...(19): siRNA sense strand
agacuugaauuaccuuauc

SEQ ID NO: 364817 - RNA, 19 nt, Homo sapiens
  misc_RNA (1)...(19): siRNA sense strand
gcaucaccauugcuuggaa

SEQ ID NO: 364818 - RNA, 19 nt, Homo sapiens
  misc_RNA (1)...(19): siRNA sense strand
aaacaucucaagccucauu

SEQ ID NO: 364819 - RNA, 19 nt, Homo sapiens
  misc_RNA (1)...(19): siRNA sense strand
gggcagagucggugacaga

SEQ ID NO: 364820 - RNA, 19 nt, Homo sapiens
  misc_RNA (1)...(19): siRNA sense strand
gaauaugucccugaaacga

SEQ ID NO: 364821 - RNA, 19 nt, Homo sapiens
  misc_RNA (1)...(19): siRNA sense strand
agaacacccgcaaugauua

SEQ ID NO: 364822 - RNA, 19 nt, Homo sapiens
  misc_RNA (1)...(19): siRNA sense strand
guggcgagaucuugaacaa

SEQ ID NO: 364823 - RNA, 19 nt, Homo sapiens
  misc_RNA (1)...(19): siRNA sense strand
ucucaagccucauuggaau

SEQ ID NO: 364824 - RNA, 19 nt, Homo sapiens
  misc_RNA (1)...(19): siRNA sense strand
ggaagcagcagaccaucau

SEQ ID NO: 364825 - RNA, 19 nt, Homo sapiens
  misc_RNA (1)...(19): siRNA sense strand
gccaaaagaugaaguauac

SEQ ID NO: 364826 - RNA, 19 nt, Homo sapiens
  misc_RNA (1)...(19): siRNA sense strand
caaauacuacacaccaguu

SEQ ID NO: 364827 - RNA, 19 nt, Homo sapiens
  misc_RNA (1)...(19): siRNA sense strand
cgagaagccaacaauggua

SEQ ID NO: 364828 - RNA, 19 nt, Homo sapiens
  misc_RNA (1)...(19): siRNA sense strand
gcuugggagacuugaauua

SEQ ID NO: 364829 - RNA, 19 nt, Homo sapiens
  misc_RNA (1)...(19): siRNA sense strand
ugaggugcggcauuauuua

SEQ ID NO: 364830 - RNA, 19 nt, Homo sapiens
  misc_RNA (1)...(19): siRNA sense strand
cucaguagaucuugauaau

SEQ ID NO: 364831 - RNA, 19 nt, Homo sapiens
  misc_RNA (1)...(19): siRNA sense strand
gcaugggacucaguagauc

SEQ ID NO: 364832 - RNA, 19 nt, Homo sapiens
  misc_RNA (1)...(19): siRNA sense strand
gugagaaguuggccgagau

SEQ ID NO: 364833 - RNA, 19 nt, Homo sapiens
  misc_RNA (1)...(19): siRNA sense strand
gcgagucugcuacugcuaa

SEQ ID NO: 364834 - RNA, 19 nt, Homo sapiens
  misc_RNA (1)...(19): siRNA sense strand
ugaagacccagaccaaguu

SEQ ID NO: 364835 - RNA, 19 nt, Homo sapiens
  misc_RNA (1)...(19): siRNA sense strand
ugcuaaagcuguugaugga

SEQ ID NO: 364836 - RNA, 19 nt, Homo sapiens
  misc_RNA (1)...(19): siRNA sense strand
gaggugcggcauuauuuau

SEQ ID NO: 364837 - RNA, 19 nt, Homo sapiens
  misc_RNA (1)...(19): siRNA sense strand
guucaacagggagaauuua

SEQ ID NO: 364838 - RNA, 19 nt, Homo sapiens
  misc_RNA (1)...(19): siRNA sense strand
ccagaaacaccuccagauc

SEQ ID NO: 364839 - RNA, 19 nt, Homo sapiens
  misc_RNA (1)...(19): siRNA sense strand
ccaaggagaaccucguguu

SEQ ID NO: 364840 - RNA, 19 nt, Homo sapiens
  misc_RNA (1)...(19): siRNA sense strand
guucaguguugguggaaau

SEQ ID NO: 364841 - RNA, 19 nt, Homo sapiens
  misc_RNA (1)...(19): siRNA sense strand
ccaagcaugggacucagua

SEQ ID NO: 364842 - RNA, 19 nt, Homo sapiens
  misc_RNA (1)...(19): siRNA sense strand
gaacacccgcaaugauuac

SEQ ID NO: 364843 - RNA, 19 nt, Homo sapiens
  misc_RNA (1)...(19): siRNA sense strand
gaacgagaacacccgcaau

SEQ ID NO: 364844 - RNA, 19 nt, Homo sapiens
  misc_RNA (1)...(19): siRNA sense strand
gcuggaagccuugcugaug

SEQ ID NO: 364845 - RNA, 19 nt, Homo sapiens
  misc_RNA (1)...(19): siRNA sense strand
cgagucugcuacugcuaaa

SEQ ID NO: 364846 - RNA, 19 nt, Homo sapiens
  misc_RNA (1)...(19): siRNA sense strand
aagaugaaguauacuccaa

SEQ ID NO: 364847 - RNA, 19 nt, Homo sapiens
  misc_RNA (1)...(19): siRNA sense strand
aagcugaacgugcacauga

SEQ ID NO: 364848 - RNA, 19 nt, Homo sapiens
  misc_RNA (1)...(19): siRNA sense strand
ggacucaguagaucuugau

SEQ ID NO: 364849 - RNA, 19 nt, Homo sapiens
  misc_RNA (1)...(19): siRNA sense strand
ggagacuugaauuaccuua

SEQ ID NO: 364850 - RNA, 19 nt, Homo sapiens
  misc_RNA (1)...(19): siRNA sense strand
cgagaacacccgcaaugau

SEQ ID NO: 364851 - RNA, 19 nt, Homo sapiens
  misc_RNA (1)...(19): siRNA sense strand
gggacucaguagaucuuga

SEQ ID NO: 364852 - RNA, 19 nt, Homo sapiens
  misc_RNA (1)...(19): siRNA sense strand
cuuggaaguuugauucuca

SEQ ID NO: 364853 - RNA, 19 nt, Homo sapiens
  misc_RNA (1)...(19): siRNA sense strand
caggacggaauuacacuuu

SEQ ID NO: 364854 - RNA, 19 nt, Homo sapiens
  misc_RNA (1)...(19): siRNA sense strand
ggccaagucucugcucaag

SEQ ID NO: 364855 - RNA, 19 nt, Homo sapiens
  misc_RNA (1)...(19): siRNA sense strand
uaacauguacccacagaac

SEQ ID NO: 364856 - RNA, 19 nt, Homo sapiens
  misc_RNA (1)...(19): siRNA sense strand
caacagggagaauuuacca

SEQ ID NO: 364857 - RNA, 19 nt, Homo sapiens
  misc_RNA (1)...(19): siRNA sense strand
ccacuguucucugggacaa

SEQ ID NO: 364858 - RNA, 19 nt, Homo sapiens
  misc_RNA (1)...(19): siRNA sense strand
caagccacaggcacccuua

SEQ ID NO: 364859 - RNA, 19 nt, Homo sapiens
  misc_RNA (1)...(19): siRNA sense strand
caaguggucccugaguuug

SEQ ID NO: 364860 - RNA, 19 nt, Homo sapiens
  misc_RNA (1)...(19): siRNA sense strand
uaaagcuguugauggauac

SEQ ID NO: 364861 - RNA, 19 nt, Homo sapiens
  misc_RNA (1)...(19): siRNA sense strand
acaagcaacaggcccauga

SEQ ID NO: 364862 - RNA, 19 nt, Homo sapiens
  misc_RNA (1)...(19): siRNA sense strand
ccagaucaaccagacguuu

SEQ ID NO: 364863 - RNA, 19 nt, Homo sapiens
  misc_RNA (1)...(19): siRNA sense strand
ggaggacacaauggacgua

SEQ ID NO: 364864 - RNA, 19 nt, Homo sapiens
  misc_RNA (1)...(19): siRNA sense strand
gaaggccaccaucaucagu

SEQ ID NO: 364865 - RNA, 19 nt, Homo sapiens
  misc_RNA (1)...(19): siRNA sense strand
gaggucaacgccaccauca

SEQ ID NO: 364866 - RNA, 19 nt, Homo sapiens
  misc_RNA (1)...(19): siRNA sense strand
gugaaggccaccaucauca

SEQ ID NO: 364867 - RNA, 19 nt, Homo sapiens
  misc_RNA (1)...(19): siRNA sense strand
gcauccgccauauauugua

SEQ ID NO: 364868 - RNA, 19 nt, Homo sapiens
  misc_RNA (1)...(19): siRNA sense strand
caggcucacuauaacaugu

SEQ ID NO: 364869 - RNA, 19 nt, Homo sapiens
  misc_RNA (1)...(19): siRNA sense strand
aggaauaugucccugaaac

SEQ ID NO: 364870 - RNA, 19 nt, Homo sapiens
  misc_RNA (1)...(19): siRNA sense strand
cugcauccgccauauauug

SEQ ID NO: 364871 - RNA, 19 nt, Homo sapiens
  misc_RNA (1)...(19): siRNA sense strand
cagaucaaccagacguuug

SEQ ID NO: 364872 - RNA, 19 nt, Homo sapiens
  misc_RNA (1)...(19): siRNA sense strand
ucacgcaggacacagagaa

SEQ ID NO: 364873 - RNA, 19 nt, Homo sapiens
  misc_RNA (1)...(19): siRNA sense strand
cguuauauggccagcauuu

SEQ ID NO: 364874 - RNA, 19 nt, Homo sapiens
  misc_RNA (1)...(19): siRNA sense strand
gacuugaauuaccuuaucu

SEQ ID NO: 364875 - RNA, 19 nt, Homo sapiens
  misc_RNA (1)...(19): siRNA sense strand
gguccgagaagccaacaau

SEQ ID NO: 364876 - RNA, 19 nt, Homo sapiens
  misc_RNA (1)...(19): siRNA sense strand
ugccgugccugacaaagug

SEQ ID NO: 364877 - RNA, 19 nt, Homo sapiens
  misc_RNA (1)...(19): siRNA sense strand
uucagugacucagaaauug

SEQ ID NO: 364878 - RNA, 19 nt, Homo sapiens
  misc_RNA (1)...(19): siRNA sense strand
ggaaguaauucacccuuua

SEQ ID NO: 364879 - RNA, 19 nt, Homo sapiens
  misc_RNA (1)...(19): siRNA sense strand
ggagagaauuucacuauau

SEQ ID NO: 364880 - RNA, 19 nt, Homo sapiens
  misc_RNA (1)...(19): siRNA sense strand
uaaagaagaugccuggauu

SEQ ID NO: 364881 - RNA, 19 nt, Homo sapiens
  misc_RNA (1)...(19): siRNA sense strand
ggaagaagauacugaagau

SEQ ID NO: 364882 - RNA, 19 nt, Homo sapiens
  misc_RNA (1)...(19): siRNA sense strand
gcaauuguccaacuucaua

SEQ ID NO: 364883 - RNA, 19 nt, Homo sapiens
  misc_RNA (1)...(19): siRNA sense strand
uggaauaaguggauagaua

SEQ ID NO: 364884 - RNA, 19 nt, Homo sapiens
  misc_RNA (1)...(19): siRNA sense strand
ggagaaauuuagaagaaga

SEQ ID NO: 364885 - RNA, 19 nt, Homo sapiens
  misc_RNA (1)...(19): siRNA sense strand
gaagacgauuauuugcaua

SEQ ID NO: 364886 - RNA, 19 nt, Homo sapiens
  misc_RNA (1)...(19): siRNA sense strand
caacuucccaucaacaaua

SEQ ID NO: 364887 - RNA, 19 nt, Homo sapiens
  misc_RNA (1)...(19): siRNA sense strand
ggagagaccagcaugcuaa

SEQ ID NO: 364888 - RNA, 19 nt, Homo sapiens
  misc_RNA (1)...(19): siRNA sense strand
ugagauauguucccaguug

SEQ ID NO: 364889 - RNA, 19 nt, Homo sapiens
  misc_RNA (1)...(19): siRNA sense strand
gaaccaaguauaagaaguu

SEQ ID NO: 364890 - RNA, 19 nt, Homo sapiens
  misc_RNA (1)...(19): siRNA sense strand
ggaauaaguggauagauau

SEQ ID NO: 364891 - RNA, 19 nt, Homo sapiens
  misc_RNA (1)...(19): siRNA sense strand
gcacacacaggaacucuuu

SEQ ID NO: 364892 - RNA, 19 nt, Homo sapiens
  misc_RNA (1)...(19): siRNA sense strand
gaagaacuuuggaaaauga

SEQ ID NO: 364893 - RNA, 19 nt, Homo sapiens
  misc_RNA (1)...(19): siRNA sense strand
gguauacaccuccaacuuu

SEQ ID NO: 364894 - RNA, 19 nt, Homo sapiens
  misc_RNA (1)...(19): siRNA sense strand
ugacaucuauuccaucugu

SEQ ID NO: 364895 - RNA, 19 nt, Homo sapiens
  misc_RNA (1)...(19): siRNA sense strand
ugacugcccuucagaacuu

SEQ ID NO: 364896 - RNA, 19 nt, Homo sapiens
  misc_RNA (1)...(19): siRNA sense strand
gggaaguaauucacccuuu

SEQ ID NO: 364897 - RNA, 19 nt, Homo sapiens
  misc_RNA (1)...(19): siRNA sense strand
agaagaagacgauuauuug

SEQ ID NO: 364898 - RNA, 19 nt, Homo sapiens
  misc_RNA (1)...(19): siRNA sense strand
gaagacgucaccaaaauua

SEQ ID NO: 364899 - RNA, 19 nt, Homo sapiens
  misc_RNA (1)...(19): siRNA sense strand
ggauugagcaugauguuug

SEQ ID NO: 364900 - RNA, 19 nt, Homo sapiens
  misc_RNA (1)...(19): siRNA sense strand
auaagaaguuuccacauug

SEQ ID NO: 364901 - RNA, 19 nt, Homo sapiens
  misc_RNA (1)...(19): siRNA sense strand
gaaaagacaucacaaacca

SEQ ID NO: 364902 - RNA, 19 nt, Homo sapiens
  misc_RNA (1)...(19): siRNA sense strand
cauaauggaaccaaguaua

SEQ ID NO: 364903 - RNA, 19 nt, Homo sapiens
  misc_RNA (1)...(19): siRNA sense strand
caacagguccaacaaaaua

SEQ ID NO: 364904 - RNA, 19 nt, Homo sapiens
  misc_RNA (1)...(19): siRNA sense strand
guaauucacccuuuagcaa

SEQ ID NO: 364905 - RNA, 19 nt, Homo sapiens
  misc_RNA (1)...(19): siRNA sense strand
caacaaagucuugccaaug

SEQ ID NO: 364906 - RNA, 19 nt, Homo sapiens
  misc_RNA (1)...(19): siRNA sense strand
uggagagaauuucacuaua

SEQ ID NO: 364907 - RNA, 19 nt, Homo sapiens
  misc_RNA (1)...(19): siRNA sense strand
guacugcaugcaauuuaua

SEQ ID NO: 364908 - RNA, 19 nt, Homo sapiens
  misc_RNA (1)...(19): siRNA sense strand
ggagaauggagauuuaugu

SEQ ID NO: 364909 - RNA, 19 nt, Homo sapiens
  misc_RNA (1)...(19): siRNA sense strand
gaauuugacugcccuucag

SEQ ID NO: 364910 - RNA, 19 nt, Homo sapiens
  misc_RNA (1)...(19): siRNA sense strand
caauuguuguccugauauu

SEQ ID NO: 364911 - RNA, 19 nt, Homo sapiens
  misc_RNA (1)...(19): siRNA sense strand
caucacaaaccaagaagaa

SEQ ID NO: 364912 - RNA, 19 nt, Homo sapiens
  misc_RNA (1)...(19): siRNA sense strand
ggaaccaaguauaagaagu

SEQ ID NO: 364913 - RNA, 19 nt, Homo sapiens
  misc_RNA (1)...(19): siRNA sense strand
agaagauacugaagauuag

SEQ ID NO: 364914 - RNA, 19 nt, Homo sapiens
  misc_RNA (1)...(19): siRNA sense strand
gauaaguggauguuaacaa

SEQ ID NO: 364915 - RNA, 19 nt, Homo sapiens
  misc_RNA (1)...(19): siRNA sense strand
gcacuugccaauuaaaaua

SEQ ID NO: 364916 - RNA, 19 nt, Homo sapiens
  misc_RNA (1)...(19): siRNA sense strand
uuggauaaguggauguuaa

SEQ ID NO: 364917 - RNA, 19 nt, Homo sapiens
  misc_RNA (1)...(19): siRNA sense strand
ccacauugguuggauaagu

SEQ ID NO: 364918 - RNA, 19 nt, Homo sapiens
  misc_RNA (1)...(19): siRNA sense strand
gaccugugcuuuugcauuu

SEQ ID NO: 364919 - RNA, 19 nt, Homo sapiens
  misc_RNA (1)...(19): siRNA sense strand
ucaacaaagucuugccaau

SEQ ID NO: 364920 - RNA, 19 nt, Homo sapiens
  misc_RNA (1)...(19): siRNA sense strand
gaaguaauucacccuuuag

SEQ ID NO: 364921 - RNA, 19 nt, Homo sapiens
  misc_RNA (1)...(19): siRNA sense strand
agaagacgauuauuugcau

SEQ ID NO: 364922 - RNA, 19 nt, Homo sapiens
  misc_RNA (1)...(19): siRNA sense strand
uuuggagaauggagauuua

SEQ ID NO: 364923 - RNA, 19 nt, Homo sapiens
  misc_RNA (1)...(19): siRNA sense strand
uaagaaguuuccacauugg

SEQ ID NO: 364924 - RNA, 19 nt, Homo sapiens
  misc_RNA (1)...(19): siRNA sense strand
aguuugggcuucucaguuu

SEQ ID NO: 364925 - RNA, 19 nt, Homo sapiens
  misc_RNA (1)...(19): siRNA sense strand
gggaagacgucaccaaaau

SEQ ID NO: 364926 - RNA, 19 nt, Homo sapiens
  misc_RNA (1)...(19): siRNA sense strand
gaagaagauacugaagauu

SEQ ID NO: 364927 - RNA, 19 nt, Homo sapiens
  misc_RNA (1)...(19): siRNA sense strand
guauacaccuccaacuuuu

SEQ ID NO: 364928 - RNA, 19 nt, Homo sapiens
  misc_RNA (1)...(19): siRNA sense strand
aaaugaagccuaggagaaa

SEQ ID NO: 364929 - RNA, 19 nt, Homo sapiens
  misc_RNA (1)...(19): siRNA sense strand
gaagaagacgauuauuugc

SEQ ID NO: 364930 - RNA, 19 nt, Homo sapiens
  misc_RNA (1)...(19): siRNA sense strand
gagauauguucccaguugu

SEQ ID NO: 364931 - RNA, 19 nt, Homo sapiens
  misc_RNA (1)...(19): siRNA sense strand
aacaaagucuugccaaugg

SEQ ID NO: 364932 - RNA, 19 nt, Homo sapiens
  misc_RNA (1)...(19): siRNA sense strand
ggucaucaacaaagucuug

SEQ ID NO: 364933 - RNA, 19 nt, Homo sapiens
  misc_RNA (1)...(19): siRNA sense strand
aaguggauguuaacaagaa

SEQ ID NO: 364934 - RNA, 19 nt, Homo sapiens
  misc_RNA (1)...(19): siRNA sense strand
uaugauagcuguuuuccuu

SEQ ID NO: 364935 - RNA, 19 nt, Homo sapiens
  misc_RNA (1)...(19): siRNA sense strand
gcugugacaucuauuccau

SEQ ID NO: 364936 - RNA, 19 nt, Homo sapiens
  misc_RNA (1)...(19): siRNA sense strand
gauagcagcaauuguccaa

SEQ ID NO: 364937 - RNA, 19 nt, Homo sapiens
  misc_RNA (1)...(19): siRNA sense strand
uccaauuguuguccugaua

SEQ ID NO: 364938 - RNA, 19 nt, Homo sapiens
  misc_RNA (1)...(19): siRNA sense strand
gagaauggagauuuaugug

SEQ ID NO: 364939 - RNA, 19 nt, Homo sapiens
  misc_RNA (1)...(19): siRNA sense strand
auaaguggauguuaacaag

SEQ ID NO: 364940 - RNA, 19 nt, Homo sapiens
  misc_RNA (1)...(19): siRNA sense strand
ccaucacucucuuggcauu

SEQ ID NO: 364941 - RNA, 19 nt, Homo sapiens
  misc_RNA (1)...(19): siRNA sense strand
cacauugguuggauaagug

SEQ ID NO: 364942 - RNA, 19 nt, Homo sapiens
  misc_RNA (1)...(19): siRNA sense strand
ccaaugaggcgauccuaca

SEQ ID NO: 364943 - RNA, 19 nt, Homo sapiens
  misc_RNA (1)...(19): siRNA sense strand
gaagauacugaagauuaga

SEQ ID NO: 364944 - RNA, 19 nt, Homo sapiens
  misc_RNA (1)...(19): siRNA sense strand
cagcaauuguccaacuuca

SEQ ID NO: 364945 - RNA, 19 nt, Homo sapiens
  misc_RNA (1)...(19): siRNA sense strand
agacaucacaaaccaagaa

SEQ ID NO: 364946 - RNA, 19 nt, Homo sapiens
  misc_RNA (1)...(19): siRNA sense strand
caugauguuuggagaaugg

SEQ ID NO: 364947 - RNA, 19 nt, Homo sapiens
  misc_RNA (1)...(19): siRNA sense strand
gagcaugauguuuggagaa

SEQ ID NO: 364948 - RNA, 19 nt, Homo sapiens
  misc_RNA (1)...(19): siRNA sense strand
gauccuacagauacaaguu

SEQ ID NO: 364949 - RNA, 19 nt, Homo sapiens
  misc_RNA (1)...(19): siRNA sense strand
gcagaaaagacaucacaaa

SEQ ID NO: 364950 - RNA, 19 nt, Homo sapiens
  misc_RNA (1)...(19): siRNA sense strand
gauugagcaugauguuugg

SEQ ID NO: 364951 - RNA, 19 nt, Homo sapiens
  misc_RNA (1)...(19): siRNA sense strand
agcccaugcugaugaauuu

SEQ ID NO: 364952 - RNA, 19 nt, Homo sapiens
  misc_RNA (1)...(19): siRNA sense strand
acagauacaaguugcuaaa

SEQ ID NO: 364953 - RNA, 19 nt, Homo sapiens
  misc_RNA (1)...(19): siRNA sense strand
gagagaccagcaugcuaaa

SEQ ID NO: 364954 - RNA, 19 nt, Homo sapiens
  misc_RNA (1)...(19): siRNA sense strand
gagcaagcuaggaauuguu

SEQ ID NO: 364955 - RNA, 19 nt, Homo sapiens
  misc_RNA (1)...(19): siRNA sense strand
uaacaagaaagcaguuugg

SEQ ID NO: 364956 - RNA, 19 nt, Homo sapiens
  misc_RNA (1)...(19): siRNA sense strand
gggagagaccagcaugcua

SEQ ID NO: 364957 - RNA, 19 nt, Homo sapiens
  misc_RNA (1)...(19): siRNA sense strand
ugacauggagagaauuuca

SEQ ID NO: 364958 - RNA, 19 nt, Homo sapiens
  misc_RNA (1)...(19): siRNA sense strand
uaucaacagguccaacaaa

SEQ ID NO: 364959 - RNA, 19 nt, Homo sapiens
  misc_RNA (1)...(19): siRNA sense strand
uguacugcaugcaauuuau

SEQ ID NO: 364960 - RNA, 19 nt, Homo sapiens
  misc_RNA (1)...(19): siRNA sense strand
ugaggaagaagauacugaa

SEQ ID NO: 364961 - RNA, 19 nt, Homo sapiens
  misc_RNA (1)...(19): siRNA sense strand
gaggcgauccuacagauac

SEQ ID NO: 364962 - RNA, 19 nt, Homo sapiens
  misc_RNA (1)...(19): siRNA sense strand
caaagucuugccaaugguu

SEQ ID NO: 364963 - RNA, 19 nt, Homo sapiens
  misc_RNA (1)...(19): siRNA sense strand
caagaagaacuuuggaaaa

SEQ ID NO: 364964 - RNA, 19 nt, Homo sapiens
  misc_RNA (1)...(19): siRNA sense strand
ucagagcaagcuaggaauu

SEQ ID NO: 364965 - RNA, 19 nt, Homo sapiens
  misc_RNA (1)...(19): siRNA sense strand
uggcaauacuggcucuguu

SEQ ID NO: 364966 - RNA, 19 nt, Homo sapiens
  misc_RNA (1)...(19): siRNA sense strand
gaagccuaggagaaauuua

SEQ ID NO: 364967 - RNA, 19 nt, Homo sapiens
  misc_RNA (1)...(19): siRNA sense strand
uagcagcaauuguccaacu

SEQ ID NO: 364968 - RNA, 19 nt, Homo sapiens
  misc_RNA (1)...(19): siRNA sense strand
uuuagcaacuucccaucaa

SEQ ID NO: 364969 - RNA, 19 nt, Homo sapiens
  misc_RNA (1)...(19): siRNA sense strand
agagcaagcuaggaauugu

SEQ ID NO: 364970 - RNA, 19 nt, Homo sapiens
  misc_RNA (1)...(19): siRNA sense strand
gcaugauguuuggagaaug

SEQ ID NO: 364971 - RNA, 19 nt, Homo sapiens
  misc_RNA (1)...(19): siRNA sense strand
gcuaaacugggcauaucaa

SEQ ID NO: 364972 - RNA, 19 nt, Homo sapiens
  misc_RNA (1)...(19): siRNA sense strand
cuacagauacaaguugcua

SEQ ID NO: 364973 - RNA, 19 nt, Homo sapiens
  misc_RNA (1)...(19): siRNA sense strand
caauuguccaacuucauaa

SEQ ID NO: 364974 - RNA, 19 nt, Homo sapiens
  misc_RNA (1)...(19): siRNA sense strand
gcaacuucccaucaacaau

SEQ ID NO: 364975 - RNA, 19 nt, Homo sapiens
  misc_RNA (1)...(19): siRNA sense strand
uuaugugucucugggaauu

SEQ ID NO: 364976 - RNA, 19 nt, Homo sapiens
  misc_RNA (1)...(19): siRNA sense strand
ccaauuguuguccugauau

SEQ ID NO: 364977 - RNA, 19 nt, Homo sapiens
  misc_RNA (1)...(19): siRNA sense strand
ggcaauacuggcucuguug

SEQ ID NO: 364978 - RNA, 19 nt, Homo sapiens
  misc_RNA (1)...(19): siRNA sense strand
uaugaugccugacaacuaa

SEQ ID NO: 364979 - RNA, 19 nt, Homo sapiens
  misc_RNA (1)...(19): siRNA sense strand
cagcgaagccgugcaguuu

SEQ ID NO: 364980 - RNA, 19 nt, Homo sapiens
  misc_RNA (1)...(19): siRNA sense strand
cagcguggccugcagcuuu

SEQ ID NO: 364981 - RNA, 19 nt, Homo sapiens
  misc_RNA (1)...(19): siRNA sense strand
cagcuccacugcauucuca

SEQ ID NO: 364982 - RNA, 19 nt, Homo sapiens
  misc_RNA (1)...(19): siRNA sense strand
gcuguucucugggcaguug

SEQ ID NO: 364983 - RNA, 19 nt, Homo sapiens
  misc_RNA (1)...(19): siRNA sense strand
gcgaagccgugcaguuucu

SEQ ID NO: 364984 - RNA, 19 nt, Homo sapiens
  misc_RNA (1)...(19): siRNA sense strand
uccaggaccuccgaaauga

SEQ ID NO: 364985 - RNA, 19 nt, Homo sapiens
  misc_RNA (1)...(19): siRNA sense strand
cccaacagccugaguuaug

SEQ ID NO: 364986 - RNA, 19 nt, Homo sapiens
  misc_RNA (1)...(19): siRNA sense strand
ugagaaggcccaagaccau

SEQ ID NO: 364987 - RNA, 19 nt, Homo sapiens
  misc_RNA (1)...(19): siRNA sense strand
ccaacagccugaguuaugc

SEQ ID NO: 364988 - RNA, 19 nt, Homo sapiens
  misc_RNA (1)...(19): siRNA sense strand
acaagcgcuuccuggauga

SEQ ID NO: 364989 - RNA, 19 nt, Homo sapiens
  misc_RNA (1)...(19): siRNA sense strand
cuaugaugccugacaacua

SEQ ID NO: 364990 - RNA, 19 nt, Homo sapiens
  misc_RNA (1)...(19): siRNA sense strand
gaagccgugcaguuucuga

SEQ ID NO: 364991 - RNA, 19 nt, Homo sapiens
  misc_RNA (1)...(19): siRNA sense strand
caggaccuccgaaaugaug

SEQ ID NO: 364992 - RNA, 19 nt, Homo sapiens
  misc_RNA (1)...(19): siRNA sense strand
acacaggagacccgcauug

SEQ ID NO: 364993 - RNA, 19 nt, Homo sapiens
  misc_RNA (1)...(19): siRNA sense strand
ucugggcaguugucugguu

SEQ ID NO: 364994 - RNA, 19 nt, Homo sapiens
  misc_RNA (1)...(19): siRNA sense strand
gcacagaggcucagaagca

SEQ ID NO: 364995 - RNA, 19 nt, Homo sapiens
  misc_RNA (1)...(19): siRNA sense strand
ggacagcacccuaagcaau

SEQ ID NO: 364996 - RNA, 19 nt, Homo sapiens
  misc_RNA (1)...(19): siRNA sense strand
uaagcaaugugcauacuuc

SEQ ID NO: 364997 - RNA, 19 nt, Homo sapiens
  misc_RNA (1)...(19): siRNA sense strand
gcaaggagcaaggcaaguu

SEQ ID NO: 364998 - RNA, 19 nt, Homo sapiens
  misc_RNA (1)...(19): siRNA sense strand
gcaaugugcauacuucugu

SEQ ID NO: 364999 - RNA, 19 nt, Homo sapiens
  misc_RNA (1)...(19): siRNA sense strand
caccagagcucaggagaca

SEQ ID NO: 365000 - RNA, 19 nt, Homo sapiens
  misc_RNA (1)...(19): siRNA sense strand
ggccaagucuucccaggau

SEQ ID NO: 365001 - RNA, 19 nt, Homo sapiens
  misc_RNA (1)...(19): siRNA sense strand
gggaagguaccaaggauug

SEQ ID NO: 365002 - RNA, 19 nt, Homo sapiens
  misc_RNA (1)...(19): siRNA sense strand
gagcaaggcaaguucuaug

SEQ ID NO: 365003 - RNA, 19 nt, Homo sapiens
  misc_RNA (1)...(19): siRNA sense strand
gacagcacccuaagcaaug

SEQ ID NO: 365004 - RNA, 19 nt, Homo sapiens
  misc_RNA (1)...(19): siRNA sense strand
gacaguggccuuggcauug

SEQ ID NO: 365005 - RNA, 19 nt, Homo sapiens
  misc_RNA (1)...(19): siRNA sense strand
caaguucuaugaccaucuc

SEQ ID NO: 365006 - RNA, 19 nt, Homo sapiens
  misc_RNA (1)...(19): siRNA sense strand
guggagaccugcagcuucu

SEQ ID NO: 365007 - RNA, 19 nt, Homo sapiens
  misc_RNA (1)...(19): siRNA sense strand
ucagacaacucgggaaggu

SEQ ID NO: 365008 - RNA, 19 nt, Homo sapiens
  misc_RNA (1)...(19): siRNA sense strand
cacagaggcucagaagcaa

SEQ ID NO: 365009 - RNA, 19 nt, Homo sapiens
  misc_RNA (1)...(19): siRNA sense strand
ggagcaaggcaaguucuau

SEQ ID NO: 365010 - RNA, 19 nt, Homo sapiens
  misc_RNA (1)...(19): siRNA sense strand
acagcggaguggagaaguu

SEQ ID NO: 365011 - RNA, 19 nt, Homo sapiens
  misc_RNA (1)...(19): siRNA sense strand
guggagaaguugaaaacaa

SEQ ID NO: 365012 - RNA, 19 nt, Homo sapiens
  misc_RNA (1)...(19): siRNA sense strand
ggaccaggaggagcgcuuu

SEQ ID NO: 365013 - RNA, 19 nt, Homo sapiens
  misc_RNA (1)...(19): siRNA sense strand
cagcugugccuccaucugu

SEQ ID NO: 365014 - RNA, 19 nt, Homo sapiens
  misc_RNA (1)...(19): siRNA sense strand
agacaguggccuuggcauu

SEQ ID NO: 365015 - RNA, 19 nt, Homo sapiens
  misc_RNA (1)...(19): siRNA sense strand
caaggagcaaggcaaguuc

SEQ ID NO: 365016 - RNA, 19 nt, Homo sapiens
  misc_RNA (1)...(19): siRNA sense strand
acaguggccuuggcauugu

SEQ ID NO: 365017 - RNA, 19 nt, Homo sapiens
  misc_RNA (1)...(19): siRNA sense strand
gaaaacaauucagacaacu

SEQ ID NO: 365018 - RNA, 19 nt, Homo sapiens
  misc_RNA (1)...(19): siRNA sense strand
ccaagucuucccaggauca

SEQ ID NO: 365019 - RNA, 19 nt, Homo sapiens
  misc_RNA (1)...(19): siRNA sense strand
gcaaggcaaguucuaugac

SEQ ID NO: 365020 - RNA, 19 nt, Homo sapiens
  misc_RNA (1)...(19): siRNA sense strand
aaaguccggccaagucuuc

SEQ ID NO: 365021 - RNA, 19 nt, Homo sapiens
  misc_RNA (1)...(19): siRNA sense strand
caaaguccggccaagucuu

SEQ ID NO: 365022 - RNA, 19 nt, Homo sapiens
  misc_RNA (1)...(19): siRNA sense strand
guggacagcacccuaagca

SEQ ID NO: 365023 - RNA, 19 nt, Homo sapiens
  misc_RNA (1)...(19): siRNA sense strand
ccaagaagcagaaacaaua

SEQ ID NO: 365024 - RNA, 19 nt, Homo sapiens
  misc_RNA (1)...(19): siRNA sense strand
ugacaucacuggccgcuuu

SEQ ID NO: 365025 - RNA, 19 nt, Homo sapiens
  misc_RNA (1)...(19): siRNA sense strand
gaaacaauaucagcggauu

SEQ ID NO: 365026 - RNA, 19 nt, Homo sapiens
  misc_RNA (1)...(19): siRNA sense strand
gaagacaggccgcuuugaa

SEQ ID NO: 365027 - RNA, 19 nt, Homo sapiens
  misc_RNA (1)...(19): siRNA sense strand
gcaguaguauucaucucua

SEQ ID NO: 365028 - RNA, 19 nt, Homo sapiens
  misc_RNA (1)...(19): siRNA sense strand
gaugguacauggaaacugu

SEQ ID NO: 365029 - RNA, 19 nt, Homo sapiens
  misc_RNA (1)...(19): siRNA sense strand
acagggaaguuuaucauga

SEQ ID NO: 365030 - RNA, 19 nt, Homo sapiens
  misc_RNA (1)...(19): siRNA sense strand
gcacaaggcgccugucauc

SEQ ID NO: 365031 - RNA, 19 nt, Homo sapiens
  misc_RNA (1)...(19): siRNA sense strand
ggagaagccucaacaacac

SEQ ID NO: 365032 - RNA, 19 nt, Homo sapiens
  misc_RNA (1)...(19): siRNA sense strand
caagugcugucuaccauca

SEQ ID NO: 365033 - RNA, 19 nt, Homo sapiens
  misc_RNA (1)...(19): siRNA sense strand
gcuaacacagggaaguuua

SEQ ID NO: 365034 - RNA, 19 nt, Homo sapiens
  misc_RNA (1)...(19): siRNA sense strand
caacacacacgcugcugua

SEQ ID NO: 365035 - RNA, 19 nt, Homo sapiens
  misc_RNA (1)...(19): siRNA sense strand
ggaaggagaagccucaaca

SEQ ID NO: 365036 - RNA, 19 nt, Homo sapiens
  misc_RNA (1)...(19): siRNA sense strand
ccagaggacuucccuaaaa

SEQ ID NO: 365037 - RNA, 19 nt, Homo sapiens
  misc_RNA (1)...(19): siRNA sense strand
gauguggaauacaagaaga

SEQ ID NO: 365038 - RNA, 19 nt, Homo sapiens
  misc_RNA (1)...(19): siRNA sense strand
gugcgagccuucgaacuaa

SEQ ID NO: 365039 - RNA, 19 nt, Homo sapiens
  misc_RNA (1)...(19): siRNA sense strand
ggugcgagccuucgaacua

SEQ ID NO: 365040 - RNA, 19 nt, Homo sapiens
  misc_RNA (1)...(19): siRNA sense strand
cgagagcaccgcagcauga

SEQ ID NO: 365041 - RNA, 19 nt, Homo sapiens
  misc_RNA (1)...(19): siRNA sense strand
caaggaugguacauggaaa

SEQ ID NO: 365042 - RNA, 19 nt, Homo sapiens
  misc_RNA (1)...(19): siRNA sense strand
uagcagcaauggcaaauac

SEQ ID NO: 365043 - RNA, 19 nt, Homo sapiens
  misc_RNA (1)...(19): siRNA sense strand
gcugugcacucguuugcuu

SEQ ID NO: 365044 - RNA, 19 nt, Homo sapiens
  misc_RNA (1)...(19): siRNA sense strand
caagaagcagaaacaauau

SEQ ID NO: 365045 - RNA, 19 nt, Homo sapiens
  misc_RNA (1)...(19): siRNA sense strand
gaaggagaagccucaacaa

SEQ ID NO: 365046 - RNA, 19 nt, Homo sapiens
  misc_RNA (1)...(19): siRNA sense strand
ugggaagucugcuuuggaa

SEQ ID NO: 365047 - RNA, 19 nt, Homo sapiens
  misc_RNA (1)...(19): siRNA sense strand
gauccaagaagcagaaaca

SEQ ID NO: 365048 - RNA, 19 nt, Homo sapiens
  misc_RNA (1)...(19): siRNA sense strand
uaucuugcauggacuuuag

SEQ ID NO: 365049 - RNA, 19 nt, Homo sapiens
  misc_RNA (1)...(19): siRNA sense strand
ccaaggaugguacauggaa

SEQ ID NO: 365050 - RNA, 19 nt, Homo sapiens
  misc_RNA (1)...(19): siRNA sense strand
cacacacgcugcuguaucu

SEQ ID NO: 365051 - RNA, 19 nt, Homo sapiens
  misc_RNA (1)...(19): siRNA sense strand
gcugaagacaggccgcuuu

SEQ ID NO: 365052 - RNA, 19 nt, Homo sapiens
  misc_RNA (1)...(19): siRNA sense strand
gcagaugucggagcucaug

SEQ ID NO: 365053 - RNA, 19 nt, Homo sapiens
  misc_RNA (1)...(19): siRNA sense strand
gcauggacuuuagcagcaa

SEQ ID NO: 365054 - RNA, 19 nt, Homo sapiens
  misc_RNA (1)...(19): siRNA sense strand
agacaggccgcuuugaaga

SEQ ID NO: 365055 - RNA, 19 nt, Homo sapiens
  misc_RNA (1)...(19): siRNA sense strand
gaaggaggagugcuuugag

SEQ ID NO: 365056 - RNA, 19 nt, Homo sapiens
  misc_RNA (1)...(19): siRNA sense strand
gagccaugguggaggagau

SEQ ID NO: 365057 - RNA, 19 nt, Homo sapiens
  misc_RNA (1)...(19): siRNA sense strand
gucaagugcugucuaccau

SEQ ID NO: 365058 - RNA, 19 nt, Homo sapiens
  misc_RNA (1)...(19): siRNA sense strand
gcgagaaggaggagugcuu

SEQ ID NO: 365059 - RNA, 19 nt, Homo sapiens
  misc_RNA (1)...(19): siRNA sense strand
ccaaccagaugaacaacac

SEQ ID NO: 365060 - RNA, 19 nt, Homo sapiens
  misc_RNA (1)...(19): siRNA sense strand
gacauuggcauugcuaaca

SEQ ID NO: 365061 - RNA, 19 nt, Homo sapiens
  misc_RNA (1)...(19): siRNA sense strand
gagccacagcgggaacaua

SEQ ID NO: 365062 - RNA, 19 nt, Homo sapiens
  misc_RNA (1)...(19): siRNA sense strand
ucgccaacuuguccuuuga

SEQ ID NO: 365063 - RNA, 19 nt, Homo sapiens
  misc_RNA (1)...(19): siRNA sense strand
gagaaggaggagugcuuug

SEQ ID NO: 365064 - RNA, 19 nt, Homo sapiens
  misc_RNA (1)...(19): siRNA sense strand
uggcuucugucuccaagga

SEQ ID NO: 365065 - RNA, 19 nt, Homo sapiens
  misc_RNA (1)...(19): siRNA sense strand
acaccaaccagaugaacaa

SEQ ID NO: 365066 - RNA, 19 nt, Homo sapiens
  misc_RNA (1)...(19): siRNA sense strand
gcgggaacauaucuugcau

SEQ ID NO: 365067 - RNA, 19 nt, Homo sapiens
  misc_RNA (1)...(19): siRNA sense strand
ugggugcccugaagaagug

SEQ ID NO: 365068 - RNA, 19 nt, Homo sapiens
  misc_RNA (1)...(19): siRNA sense strand
cgagaaggaggagugcuuu

SEQ ID NO: 365069 - RNA, 19 nt, Homo sapiens
  misc_RNA (1)...(19): siRNA sense strand
aggagaagccucaacaaca

SEQ ID NO: 365070 - RNA, 19 nt, Homo sapiens
  misc_RNA (1)...(19): siRNA sense strand
cacggaggauggcuucugu

SEQ ID NO: 365071 - RNA, 19 nt, Homo sapiens
  misc_RNA (1)...(19): siRNA sense strand
agaagcagaaacaauauca

SEQ ID NO: 365072 - RNA, 19 nt, Homo sapiens
  misc_RNA (1)...(19): siRNA sense strand
ugucuaccaucaacaccaa

SEQ ID NO: 365073 - RNA, 19 nt, Homo sapiens
  misc_RNA (1)...(19): siRNA sense strand
cagggaaguuuaucaugac

SEQ ID NO: 365074 - RNA, 19 nt, Homo sapiens
  misc_RNA (1)...(19): siRNA sense strand
gaguguaucgccaacuugu

SEQ ID NO: 365075 - RNA, 19 nt, Homo sapiens
  misc_RNA (1)...(19): siRNA sense strand
agaaggaggagugcuuuga

SEQ ID NO: 365076 - RNA, 19 nt, Homo sapiens
  misc_RNA (1)...(19): siRNA sense strand
ccacagcgggaacauaucu

SEQ ID NO: 365077 - RNA, 19 nt, Homo sapiens
  misc_RNA (1)...(19): siRNA sense strand
gaucgcaccauccgcaucu

SEQ ID NO: 365078 - RNA, 19 nt, Homo sapiens
  misc_RNA (1)...(19): siRNA sense strand
acaaggcgccugucaucga

SEQ ID NO: 365079 - RNA, 19 nt, Homo sapiens
  misc_RNA (1)...(19): siRNA sense strand
ggucaagugcugucuacca

SEQ ID NO: 365080 - RNA, 19 nt, Homo sapiens
  misc_RNA (1)...(19): siRNA sense strand
gguuugggaagucugcuuu

SEQ ID NO: 365081 - RNA, 19 nt, Homo sapiens
  misc_RNA (1)...(19): siRNA sense strand
gagaagccucaacaacaca

SEQ ID NO: 365082 - RNA, 19 nt, Homo sapiens
  misc_RNA (1)...(19): siRNA sense strand
gaagcaggaccccuacuug

SEQ ID NO: 365083 - RNA, 19 nt, Homo sapiens
  misc_RNA (1)...(19): siRNA sense strand
uaacacagggaaguuuauc

SEQ ID NO: 365084 - RNA, 19 nt, Homo sapiens
  misc_RNA (1)...(19): siRNA sense strand
gcaucuggagcaccaagga

SEQ ID NO: 365085 - RNA, 19 nt, Homo sapiens
  misc_RNA (1)...(19): siRNA sense strand
cccaagagacccugaagag

SEQ ID NO: 365086 - RNA, 19 nt, Homo sapiens
  misc_RNA (1)...(19): siRNA sense strand
acacagggaaguuuaucau

SEQ ID NO: 365087 - RNA, 19 nt, Homo sapiens
  misc_RNA (1)...(19): siRNA sense strand
gcagaugucggagcucaug

SEQ ID NO: 365088 - RNA, 19 nt, Homo sapiens
  misc_RNA (1)...(19): siRNA sense strand
ggaacgagccaacauguga

SEQ ID NO: 365089 - RNA, 19 nt, Homo sapiens
  misc_RNA (1)...(19): siRNA sense strand
ggaugacggacaaguguuu

SEQ ID NO: 365090 - RNA, 19 nt, Homo sapiens
  misc_RNA (1)...(19): siRNA sense strand
ggacccagggcucauaaug

SEQ ID NO: 365091 - RNA, 19 nt, Homo sapiens
  misc_RNA (1)...(19): siRNA sense strand
ggacaacuccgagcagaag

SEQ ID NO: 365092 - RNA, 19 nt, Homo sapiens
  misc_RNA (1)...(19): siRNA sense strand
uaauggagcaggugaaagu

SEQ ID NO: 365093 - RNA, 19 nt, Homo sapiens
  misc_RNA (1)...(19): siRNA sense strand
gaggaugacggacaagugu

SEQ ID NO: 365094 - RNA, 19 nt, Homo sapiens
  misc_RNA (1)...(19): siRNA sense strand
gacaaguguuuccggaagu

SEQ ID NO: 365095 - RNA, 19 nt, Homo sapiens
  misc_RNA (1)...(19): siRNA sense strand
acccagggcucauaaugga

SEQ ID NO: 365096 - RNA, 19 nt, Homo sapiens
  misc_RNA (1)...(19): siRNA sense strand
agaagugcaucgccaugug

SEQ ID NO: 365097 - RNA, 19 nt, Homo sapiens
  misc_RNA (1)...(19): siRNA sense strand
cauaauggagcaggugaaa

SEQ ID NO: 365098 - RNA, 19 nt, Homo sapiens
  misc_RNA (1)...(19): siRNA sense strand
ccggaaguguauagggaaa

SEQ ID NO: 365099 - RNA, 19 nt, Homo sapiens
  misc_RNA (1)...(19): siRNA sense strand
gacccagggcucauaaugg

SEQ ID NO: 365100 - RNA, 19 nt, Homo sapiens
  misc_RNA (1)...(19): siRNA sense strand
ugcagaggaugacggacaa

SEQ ID NO: 365101 - RNA, 19 nt, Homo sapiens
  misc_RNA (1)...(19): siRNA sense strand
ggaaguguauagggaaacc

SEQ ID NO: 365102 - RNA, 19 nt, Homo sapiens
  misc_RNA (1)...(19): siRNA sense strand
acaaguguuuccggaagug

SEQ ID NO: 365103 - RNA, 19 nt, Homo sapiens
  misc_RNA (1)...(19): siRNA sense strand
cagaagggcuguuuccaua

SEQ ID NO: 365104 - RNA, 19 nt, Homo sapiens
  misc_RNA (1)...(19): siRNA sense strand
gaagggcuguuuccauaaa

SEQ ID NO: 365105 - RNA, 19 nt, Homo sapiens
  misc_RNA (1)...(19): siRNA sense strand
gugaauaacuacacagauu

SEQ ID NO: 365106 - RNA, 19 nt, Homo sapiens
  misc_RNA (1)...(19): siRNA sense strand
ucugggagcugcagugaua

SEQ ID NO: 365107 - RNA, 19 nt, Homo sapiens
  misc_RNA (1)...(19): siRNA sense strand
ggaacuuggucauggagaa

SEQ ID NO: 365108 - RNA, 19 nt, Homo sapiens
  misc_RNA (1)...(19): siRNA sense strand
ggaagaauuacagagguua

SEQ ID NO: 365109 - RNA, 19 nt, Homo sapiens
  misc_RNA (1)...(19): siRNA sense strand
gaaauccacacuccguauu

SEQ ID NO: 365110 - RNA, 19 nt, Homo sapiens
  misc_RNA (1)...(19): siRNA sense strand
guaaauccaucggaagugu

SEQ ID NO: 365111 - RNA, 19 nt, Homo sapiens
  misc_RNA (1)...(19): siRNA sense strand
gggccucucugacgaaugu

SEQ ID NO: 365112 - RNA, 19 nt, Homo sapiens
  misc_RNA (1)...(19): siRNA sense strand
caacgagccagacgacuau

SEQ ID NO: 365113 - RNA, 19 nt, Homo sapiens
  misc_RNA (1)...(19): siRNA sense strand
caaacgucauccaccagaa

SEQ ID NO: 365114 - RNA, 19 nt, Homo sapiens
  misc_RNA (1)...(19): siRNA sense strand
gguauggagcgacuaaaga

SEQ ID NO: 365115 - RNA, 19 nt, Homo sapiens
  misc_RNA (1)...(19): siRNA sense strand
gacgcgaugugucuccaaa

SEQ ID NO: 365116 - RNA, 19 nt, Homo sapiens
  misc_RNA (1)...(19): siRNA sense strand
cccaggaguugcuguaaau

SEQ ID NO: 365117 - RNA, 19 nt, Homo sapiens
  misc_RNA (1)...(19): siRNA sense strand
ugacaacgggccacaccua

SEQ ID NO: 365118 - RNA, 19 nt, Homo sapiens
  misc_RNA (1)...(19): siRNA sense strand
gcaggcuggucuugaacug

SEQ ID NO: 365119 - RNA, 19 nt, Homo sapiens
  misc_RNA (1)...(19): siRNA sense strand
gaggcacgcucuuguuuug

SEQ ID NO: 365120 - RNA, 19 nt, Homo sapiens
  misc_RNA (1)...(19): siRNA sense strand
ucggaaguguguccuguga

SEQ ID NO: 365121 - RNA, 19 nt, Homo sapiens
  misc_RNA (1)...(19): siRNA sense strand
acaacgagccagacgacua

SEQ ID NO: 365122 - RNA, 19 nt, Homo sapiens
  misc_RNA (1)...(19): siRNA sense strand
gcuguggggugaauaacua

SEQ ID NO: 365123 - RNA, 19 nt, Homo sapiens
  misc_RNA (1)...(19): siRNA sense strand
ugcauccugucaaugguua

SEQ ID NO: 365124 - RNA, 19 nt, Homo sapiens
  misc_RNA (1)...(19): siRNA sense strand
ucaccaagacucagagcuu

SEQ ID NO: 365125 - RNA, 19 nt, Homo sapiens
  misc_RNA (1)...(19): siRNA sense strand
ugacccugaggaagaauua

SEQ ID NO: 365126 - RNA, 19 nt, Homo sapiens
  misc_RNA (1)...(19): siRNA sense strand
aggaagaauuacagagguu

SEQ ID NO: 365127 - RNA, 19 nt, Homo sapiens
  misc_RNA (1)...(19): siRNA sense strand
ggugguauggagcgacuaa

SEQ ID NO: 365128 - RNA, 19 nt, Homo sapiens
  misc_RNA (1)...(19): siRNA sense strand
guccucaucauggaaguua

SEQ ID NO: 365129 - RNA, 19 nt, Homo sapiens
  misc_RNA (1)...(19): siRNA sense strand
ugaaauccacacuccguau

SEQ ID NO: 365130 - RNA, 19 nt, Homo sapiens
  misc_RNA (1)...(19): siRNA sense strand
gagccagacgacuauucua

SEQ ID NO: 365131 - RNA, 19 nt, Homo sapiens
  misc_RNA (1)...(19): siRNA sense strand
gagauguggccuuggaaca

SEQ ID NO: 365132 - RNA, 19 nt, Homo sapiens
  misc_RNA (1)...(19): siRNA sense strand
gaagaauuacagagguuac

SEQ ID NO: 365133 - RNA, 19 nt, Homo sapiens
  misc_RNA (1)...(19): siRNA sense strand
gaaacuguuaucuuuacuc

SEQ ID NO: 365134 - RNA, 19 nt, Homo sapiens
  misc_RNA (1)...(19): siRNA sense strand
gaacuuggucauggagaag

SEQ ID NO: 365135 - RNA, 19 nt, Homo sapiens
  misc_RNA (1)...(19): siRNA sense strand
ccagaagggcuguuuccau

SEQ ID NO: 365136 - RNA, 19 nt, Homo sapiens
  misc_RNA (1)...(19): siRNA sense strand
guauggagcgacuaaagag

SEQ ID NO: 365137 - RNA, 19 nt, Homo sapiens
  misc_RNA (1)...(19): siRNA sense strand
cuaguuggccugggcauug

SEQ ID NO: 365138 - RNA, 19 nt, Homo sapiens
  misc_RNA (1)...(19): siRNA sense strand
ucauggagaagcuaaagug

SEQ ID NO: 365139 - RNA, 19 nt, Homo sapiens
  misc_RNA (1)...(19): siRNA sense strand
agaagggcuguuuccauaa

SEQ ID NO: 365140 - RNA, 19 nt, Homo sapiens
  misc_RNA (1)...(19): siRNA sense strand
ggagcugcagugauacaga

SEQ ID NO: 365141 - RNA, 19 nt, Homo sapiens
  misc_RNA (1)...(19): siRNA sense strand
ggcugugucuggcaucauc

SEQ ID NO: 365142 - RNA, 19 nt, Homo sapiens
  misc_RNA (1)...(19): siRNA sense strand
ggccugggcauugguggua

SEQ ID NO: 365143 - RNA, 19 nt, Homo sapiens
  misc_RNA (1)...(19): siRNA sense strand
ccagacgacuauucuacac

SEQ ID NO: 365144 - RNA, 19 nt, Homo sapiens
  misc_RNA (1)...(19): siRNA sense strand
gaauuacagagguuacaac

SEQ ID NO: 365145 - RNA, 19 nt, Homo sapiens
  misc_RNA (1)...(19): siRNA sense strand
ugacggacgcgaugugucu

SEQ ID NO: 365146 - RNA, 19 nt, Homo sapiens
  misc_RNA (1)...(19): siRNA sense strand
uuggagauguggccuugga

SEQ ID NO: 365147 - RNA, 19 nt, Homo sapiens
  misc_RNA (1)...(19): siRNA sense strand
gggugaauaacuacacaga

SEQ ID NO: 365148 - RNA, 19 nt, Homo sapiens
  misc_RNA (1)...(19): siRNA sense strand
gcucuuccuucgaaaugac

SEQ ID NO: 365149 - RNA, 19 nt, Homo sapiens
  misc_RNA (1)...(19): siRNA sense strand
gaacuggagaucacuuugu

SEQ ID NO: 365150 - RNA, 19 nt, Homo sapiens
  misc_RNA (1)...(19): siRNA sense strand
ccuccuggcuggcuuauuc

SEQ ID NO: 365151 - RNA, 19 nt, Homo sapiens
  misc_RNA (1)...(19): siRNA sense strand
ggugcaggcuggcauugug

SEQ ID NO: 365152 - RNA, 19 nt, Homo sapiens
  misc_RNA (1)...(19): siRNA sense strand
gggaacuggagaucacuuu

SEQ ID NO: 365153 - RNA, 19 nt, Homo sapiens
  misc_RNA (1)...(19): siRNA sense strand
ggaacuggagaucacuuug

SEQ ID NO: 365154 - RNA, 19 nt, Homo sapiens
  misc_RNA (1)...(19): siRNA sense strand
ggaggccucagaugacuuc

SEQ ID NO: 365155 - RNA, 19 nt, Homo sapiens
  misc_RNA (1)...(19): siRNA sense strand
ccgggucccugaacucauc

SEQ ID NO: 365156 - RNA, 19 nt, Homo sapiens
  misc_RNA (1)...(19): siRNA sense strand
ucacagcugcccacugcuu

SEQ ID NO: 365157 - RNA, 19 nt, Homo sapiens
  misc_RNA (1)...(19): siRNA sense strand
ucccggaggccucagauga

SEQ ID NO: 365158 - RNA, 19 nt, Homo sapiens
  misc_RNA (1)...(19): siRNA sense strand
guacaaagauucccucgaa

SEQ ID NO: 365159 - RNA, 19 nt, Homo sapiens
  misc_RNA (1)...(19): siRNA sense strand
gaaccugaguuaagugaug

SEQ ID NO: 365160 - RNA, 19 nt, Homo sapiens
  misc_RNA (1)...(19): siRNA sense strand
gcuagaagaaccugaguua

SEQ ID NO: 365161 - RNA, 19 nt, Homo sapiens
  misc_RNA (1)...(19): siRNA sense strand
gagcugucuuccagaaaua

SEQ ID NO: 365162 - RNA, 19 nt, Homo sapiens
  misc_RNA (1)...(19): siRNA sense strand
gagccaaccuaauguggaa

SEQ ID NO: 365163 - RNA, 19 nt, Homo sapiens
  misc_RNA (1)...(19): siRNA sense strand
gagcagcacucgaccucuu

SEQ ID NO: 365164 - RNA, 19 nt, Homo sapiens
  misc_RNA (1)...(19): siRNA sense strand
agaaauauguucccuccuu

SEQ ID NO: 365165 - RNA, 19 nt, Homo sapiens
  misc_RNA (1)...(19): siRNA sense strand
gagagccaccuguuaauau

SEQ ID NO: 365166 - RNA, 19 nt, Homo sapiens
  misc_RNA (1)...(19): siRNA sense strand
gauccaagcuaccauuugc

SEQ ID NO: 365167 - RNA, 19 nt, Homo sapiens
  misc_RNA (1)...(19): siRNA sense strand
agaagaaccugaguuaagu

SEQ ID NO: 365168 - RNA, 19 nt, Homo sapiens
  misc_RNA (1)...(19): siRNA sense strand
gcaagauuguggaccuguu

SEQ ID NO: 365169 - RNA, 19 nt, Homo sapiens
  misc_RNA (1)...(19): siRNA sense strand
guuggcaugucuacaauga

SEQ ID NO: 365170 - RNA, 19 nt, Homo sapiens
  misc_RNA (1)...(19): siRNA sense strand
ggccugagccacccacuuu

SEQ ID NO: 365171 - RNA, 19 nt, Homo sapiens
  misc_RNA (1)...(19): siRNA sense strand
uucaguagguguagacuuu

SEQ ID NO: 365172 - RNA, 19 nt, Homo sapiens
  misc_RNA (1)...(19): siRNA sense strand
gcaggaugcccaagaguuc

SEQ ID NO: 365173 - RNA, 19 nt, Homo sapiens
  misc_RNA (1)...(19): siRNA sense strand
cgagagccaccuguuaaua

SEQ ID NO: 365174 - RNA, 19 nt, Homo sapiens
  misc_RNA (1)...(19): siRNA sense strand
ccacccacuuugagacgua

SEQ ID NO: 365175 - RNA, 19 nt, Homo sapiens
  misc_RNA (1)...(19): siRNA sense strand
cgagcugucuuccagaaau

SEQ ID NO: 365176 - RNA, 19 nt, Homo sapiens
  misc_RNA (1)...(19): siRNA sense strand
uagaagaaccugaguuaag

SEQ ID NO: 365177 - RNA, 19 nt, Homo sapiens
  misc_RNA (1)...(19): siRNA sense strand
gagcuagagucggagaaug

SEQ ID NO: 365178 - RNA, 19 nt, Homo sapiens
  misc_RNA (1)...(19): siRNA sense strand
cuucgggacuucugucuga

SEQ ID NO: 365179 - RNA, 19 nt, Homo sapiens
  misc_RNA (1)...(19): siRNA sense strand
cgagaggacagcaagauug

SEQ ID NO: 365180 - RNA, 19 nt, Homo sapiens
  misc_RNA (1)...(19): siRNA sense strand
ugaccgagccaaccuaaug

SEQ ID NO: 365181 - RNA, 19 nt, Homo sapiens
  misc_RNA (1)...(19): siRNA sense strand
agagcucacugaagccuuu

SEQ ID NO: 365182 - RNA, 19 nt, Homo sapiens
  misc_RNA (1)...(19): siRNA sense strand
aaaguugacaguacaaaga

SEQ ID NO: 365183 - RNA, 19 nt, Homo sapiens
  misc_RNA (1)...(19): siRNA sense strand
caagauuguggaccuguuu

SEQ ID NO: 365184 - RNA, 19 nt, Homo sapiens
  misc_RNA (1)...(19): siRNA sense strand
gagccuuucuacucugaug

SEQ ID NO: 365185 - RNA, 19 nt, Homo sapiens
  misc_RNA (1)...(19): siRNA sense strand
gagaggacagcaagauugu

SEQ ID NO: 365186 - RNA, 19 nt, Homo sapiens
  misc_RNA (1)...(19): siRNA sense strand
aaccuaauguggaaacguu

SEQ ID NO: 365187 - RNA, 19 nt, Homo sapiens
  misc_RNA (1)...(19): siRNA sense strand
gugcuguucuaccaacuga

SEQ ID NO: 365188 - RNA, 19 nt, Homo sapiens
  misc_RNA (1)...(19): siRNA sense strand
uacaaugacucucgugucu

SEQ ID NO: 365189 - RNA, 19 nt, Homo sapiens
  misc_RNA (1)...(19): siRNA sense strand
gaugaccgagccaaccuaa

SEQ ID NO: 365190 - RNA, 19 nt, Homo sapiens
  misc_RNA (1)...(19): siRNA sense strand
gaaacacgugcuuccugaa

SEQ ID NO: 365191 - RNA, 19 nt, Homo sapiens
  misc_RNA (1)...(19): siRNA sense strand
cgggauuguuucaaccuuu

SEQ ID NO: 365192 - RNA, 19 nt, Homo sapiens
  misc_RNA (1)...(19): siRNA sense strand
gcgagaggacagcaagauu

SEQ ID NO: 365193 - RNA, 19 nt, Homo sapiens
  misc_RNA (1)...(19): siRNA sense strand
gaagaaccugaguuaagug

SEQ ID NO: 365194 - RNA, 19 nt, Homo sapiens
  misc_RNA (1)...(19): siRNA sense strand
gagcggcuacaccuugaaa

SEQ ID NO: 365195 - RNA, 19 nt, Homo sapiens
  misc_RNA (1)...(19): siRNA sense strand
cuacucugaugacaagaug

SEQ ID NO: 365196 - RNA, 19 nt, Homo sapiens
  misc_RNA (1)...(19): siRNA sense strand
gaugaacggcucaagaaac

SEQ ID NO: 365197 - RNA, 19 nt, Homo sapiens
  misc_RNA (1)...(19): siRNA sense strand
ugaguuaagugaugaugac

SEQ ID NO: 365198 - RNA, 19 nt, Homo sapiens
  misc_RNA (1)...(19): siRNA sense strand
gcuacgugcuguucuacca

SEQ ID NO: 365199 - RNA, 19 nt, Homo sapiens
  misc_RNA (1)...(19): siRNA sense strand
ccucugagccuuucuacuc

SEQ ID NO: 365200 - RNA, 19 nt, Homo sapiens
  misc_RNA (1)...(19): siRNA sense strand
agagccaccuguuaauauc

SEQ ID NO: 365201 - RNA, 19 nt, Homo sapiens
  misc_RNA (1)...(19): siRNA sense strand
gcagcaaggagcgcagaaa

SEQ ID NO: 365202 - RNA, 19 nt, Homo sapiens
  misc_RNA (1)...(19): siRNA sense strand
ucugggcucuggucauguu

SEQ ID NO: 365203 - RNA, 19 nt, Homo sapiens
  misc_RNA (1)...(19): siRNA sense strand
cccgagagccaccuguuaa

SEQ ID NO: 365204 - RNA, 19 nt, Homo sapiens
  misc_RNA (1)...(19): siRNA sense strand
ggauccaagcuaccauuug

SEQ ID NO: 365205 - RNA, 19 nt, Homo sapiens
  misc_RNA (1)...(19): siRNA sense strand
aaacacgugcuuccugaau

SEQ ID NO: 365206 - RNA, 19 nt, Homo sapiens
  misc_RNA (1)...(19): siRNA sense strand
gaggggcucugcuagaaga

SEQ ID NO: 365207 - RNA, 19 nt, Homo sapiens
  misc_RNA (1)...(19): siRNA sense strand
caccgauacuugccaaugg

SEQ ID NO: 365208 - RNA, 19 nt, Homo sapiens
  misc_RNA (1)...(19): siRNA sense strand
gggauccaagcuaccauuu

SEQ ID NO: 365209 - RNA, 19 nt, Homo sapiens
  misc_RNA (1)...(19): siRNA sense strand
ccagcaggaugcccaagag

SEQ ID NO: 365210 - RNA, 19 nt, Homo sapiens
  misc_RNA (1)...(19): siRNA sense strand
cugaugaacggcucaagaa

SEQ ID NO: 365211 - RNA, 19 nt, Homo sapiens
  misc_RNA (1)...(19): siRNA sense strand
guuucaaccuuuucacuaa

SEQ ID NO: 365212 - RNA, 19 nt, Homo sapiens
  misc_RNA (1)...(19): siRNA sense strand
uuucuacucugaugacaag

SEQ ID NO: 365213 - RNA, 19 nt, Homo sapiens
  misc_RNA (1)...(19): siRNA sense strand
cuucugggcucuggucaug

SEQ ID NO: 365214 - RNA, 19 nt, Homo sapiens
  misc_RNA (1)...(19): siRNA sense strand
uggagcggcuacaccuuga

SEQ ID NO: 365215 - RNA, 19 nt, Homo sapiens
  misc_RNA (1)...(19): siRNA sense strand
gcuguucuaccaacugaug

SEQ ID NO: 365216 - RNA, 19 nt, Homo sapiens
  misc_RNA (1)...(19): siRNA sense strand
gggauuguuucaaccuuuu

SEQ ID NO: 365217 - RNA, 19 nt, Homo sapiens
  misc_RNA (1)...(19): siRNA sense strand
gcgggauuguuucaaccuu

SEQ ID NO: 365218 - RNA, 19 nt, Homo sapiens
  misc_RNA (1)...(19): siRNA sense strand
cuagaagaaccugaguuaa

SEQ ID NO: 365219 - RNA, 19 nt, Homo sapiens
  misc_RNA (1)...(19): siRNA sense strand
cccaagaguuccugaagcu

SEQ ID NO: 365220 - RNA, 19 nt, Homo sapiens
  misc_RNA (1)...(19): siRNA sense strand
ugaugaacggcucaagaaa

SEQ ID NO: 365221 - RNA, 19 nt, Homo sapiens
  misc_RNA (1)...(19): siRNA sense strand
uggcaugucuacaaugacu

SEQ ID NO: 365222 - RNA, 19 nt, Homo sapiens
  misc_RNA (1)...(19): siRNA sense strand
gaccgagccaaccuaaugu

SEQ ID NO: 365223 - RNA, 19 nt, Homo sapiens
  misc_RNA (1)...(19): siRNA sense strand
uccugaagcuccucaugga

SEQ ID NO: 365224 - RNA, 19 nt, Homo sapiens
  misc_RNA (1)...(19): siRNA sense strand
ggucauguuggccuucgaa

SEQ ID NO: 365225 - RNA, 19 nt, Homo sapiens
  misc_RNA (1)...(19): siRNA sense strand
ccacuauggccacuacaca

SEQ ID NO: 365226 - RNA, 19 nt, Homo sapiens
  misc_RNA (1)...(19): siRNA sense strand
aaccugaguuaagugauga

SEQ ID NO: 365227 - RNA, 19 nt, Homo sapiens
  misc_RNA (1)...(19): siRNA sense strand
ugaagccuuugcagaugug

SEQ ID NO: 365228 - RNA, 19 nt, Homo sapiens
  misc_RNA (1)...(19): siRNA sense strand
cugaagccuuugcagaugu

SEQ ID NO: 365229 - RNA, 19 nt, Homo sapiens
  misc_RNA (1)...(19): siRNA sense strand
acugaagccuuugcagaug

SEQ ID NO: 365230 - RNA, 19 nt, Homo sapiens
  misc_RNA (1)...(19): siRNA sense strand
augaacggcucaagaaacu

SEQ ID NO: 365231 - RNA, 19 nt, Homo sapiens
  misc_RNA (1)...(19): siRNA sense strand
gcggcuacaccuugaaauc

SEQ ID NO: 365232 - RNA, 19 nt, Homo sapiens
  misc_RNA (1)...(19): siRNA sense strand
aacacgugcuuccugaaug

SEQ ID NO: 365233 - RNA, 19 nt, Homo sapiens
  misc_RNA (1)...(19): siRNA sense strand
ggagaaugccccagugugu

SEQ ID NO: 365234 - RNA, 19 nt, Homo sapiens
  misc_RNA (1)...(19): siRNA sense strand
gugccaggccuguggguau

SEQ ID NO: 365235 - RNA, 19 nt, Homo sapiens
  misc_RNA (1)...(19): siRNA sense strand
cggcuacaccuugaaauca

SEQ ID NO: 365236 - RNA, 19 nt, Homo sapiens
  misc_RNA (1)...(19): siRNA sense strand
acacgugcuuccugaaugc

SEQ ID NO: 365237 - RNA, 19 nt, Homo sapiens
  misc_RNA (1)...(19): siRNA sense strand
ccugagccacccacuuuga

SEQ ID NO: 365238 - RNA, 19 nt, Homo sapiens
  misc_RNA (1)...(19): siRNA sense strand
guugacaguacaaagauuc

SEQ ID NO: 365239 - RNA, 19 nt, Homo sapiens
  misc_RNA (1)...(19): siRNA sense strand
ccaccgauacuugccaaug

SEQ ID NO: 365240 - RNA, 19 nt, Homo sapiens
  misc_RNA (1)...(19): siRNA sense strand
guacaaagauucccucgaa

SEQ ID NO: 365241 - RNA, 19 nt, Homo sapiens
  misc_RNA (1)...(19): siRNA sense strand
gaaccugaguuaagugaug

SEQ ID NO: 365242 - RNA, 19 nt, Homo sapiens
  misc_RNA (1)...(19): siRNA sense strand
gcuagaagaaccugaguua

SEQ ID NO: 365243 - RNA, 19 nt, Homo sapiens
  misc_RNA (1)...(19): siRNA sense strand
gagcugucuuccagaaaua

SEQ ID NO: 365244 - RNA, 19 nt, Homo sapiens
  misc_RNA (1)...(19): siRNA sense strand
gagccaaccuaauguggaa

SEQ ID NO: 365245 - RNA, 19 nt, Homo sapiens
  misc_RNA (1)...(19): siRNA sense strand
gagcagcacucgaccucuu

SEQ ID NO: 365246 - RNA, 19 nt, Homo sapiens
  misc_RNA (1)...(19): siRNA sense strand
agaaauauguucccuccuu

SEQ ID NO: 365247 - RNA, 19 nt, Homo sapiens
  misc_RNA (1)...(19): siRNA sense strand
gagagccaccuguuaauau

SEQ ID NO: 365248 - RNA, 19 nt, Homo sapiens
  misc_RNA (1)...(19): siRNA sense strand
gauccaagcuaccauuugc

SEQ ID NO: 365249 - RNA, 19 nt, Homo sapiens
  misc_RNA (1)...(19): siRNA sense strand
agaagaaccugaguuaagu

SEQ ID NO: 365250 - RNA, 19 nt, Homo sapiens
  misc_RNA (1)...(19): siRNA sense strand
gcaagauuguggaccuguu

SEQ ID NO: 365251 - RNA, 19 nt, Homo sapiens
  misc_RNA (1)...(19): siRNA sense strand
guuggcaugucuacaauga

SEQ ID NO: 365252 - RNA, 19 nt, Homo sapiens
  misc_RNA (1)...(19): siRNA sense strand
ggccugagccacccacuuu

SEQ ID NO: 365253 - RNA, 19 nt, Homo sapiens
  misc_RNA (1)...(19): siRNA sense strand
uucaguagguguagacuuu

SEQ ID NO: 365254 - RNA, 19 nt, Homo sapiens
  misc_RNA (1)...(19): siRNA sense strand
gcaggaugcccaagaguuc

SEQ ID NO: 365255 - RNA, 19 nt, Homo sapiens
  misc_RNA (1)...(19): siRNA sense strand
cgagagccaccuguuaaua

SEQ ID NO: 365256 - RNA, 19 nt, Homo sapiens
  misc_RNA (1)...(19): siRNA sense strand
ccacccacuuugagacgua

SEQ ID NO: 365257 - RNA, 19 nt, Homo sapiens
  misc_RNA (1)...(19): siRNA sense strand
cgagcugucuuccagaaau

SEQ ID NO: 365258 - RNA, 19 nt, Homo sapiens
  misc_RNA (1)...(19): siRNA sense strand
uagaagaaccugaguuaag

SEQ ID NO: 365259 - RNA, 19 nt, Homo sapiens
  misc_RNA (1)...(19): siRNA sense strand
gagcuagagucggagaaug

SEQ ID NO: 365260 - RNA, 19 nt, Homo sapiens
  misc_RNA (1)...(19): siRNA sense strand
cuucgggacuucugucuga

SEQ ID NO: 365261 - RNA, 19 nt, Homo sapiens
  misc_RNA (1)...(19): siRNA sense strand
cgagaggacagcaagauug

SEQ ID NO: 365262 - RNA, 19 nt, Homo sapiens
  misc_RNA (1)...(19): siRNA sense strand
ugaccgagccaaccuaaug

SEQ ID NO: 365263 - RNA, 19 nt, Homo sapiens
  misc_RNA (1)...(19): siRNA sense strand
agagcucacugaagccuuu

SEQ ID NO: 365264 - RNA, 19 nt, Homo sapiens
  misc_RNA (1)...(19): siRNA sense strand
aaaguugacaguacaaaga

SEQ ID NO: 365265 - RNA, 19 nt, Homo sapiens
  misc_RNA (1)...(19): siRNA sense strand
caagauuguggaccuguuu

SEQ ID NO: 365266 - RNA, 19 nt, Homo sapiens
  misc_RNA (1)...(19): siRNA sense strand
gagccuuucuacucugaug

SEQ ID NO: 365267 - RNA, 19 nt, Homo sapiens
  misc_RNA (1)...(19): siRNA sense strand
gagaggacagcaagauugu

SEQ ID NO: 365268 - RNA, 19 nt, Homo sapiens
  misc_RNA (1)...(19): siRNA sense strand
aaccuaauguggaaacguu

SEQ ID NO: 365269 - RNA, 19 nt, Homo sapiens
  misc_RNA (1)...(19): siRNA sense strand
gugcuguucuaccaacuga

SEQ ID NO: 365270 - RNA, 19 nt, Homo sapiens
  misc_RNA (1)...(19): siRNA sense strand
uacaaugacucucgugucu

SEQ ID NO: 365271 - RNA, 19 nt, Homo sapiens
  misc_RNA (1)...(19): siRNA sense strand
gaugaccgagccaaccuaa

SEQ ID NO: 365272 - RNA, 19 nt, Homo sapiens
  misc_RNA (1)...(19): siRNA sense strand
gaaacacgugcuuccugaa

SEQ ID NO: 365273 - RNA, 19 nt, Homo sapiens
  misc_RNA (1)...(19): siRNA sense strand
cgggauuguuucaaccuuu

SEQ ID NO: 365274 - RNA, 19 nt, Homo sapiens
  misc_RNA (1)...(19): siRNA sense strand
gcgagaggacagcaagauu

SEQ ID NO: 365275 - RNA, 19 nt, Homo sapiens
  misc_RNA (1)...(19): siRNA sense strand
gaagaaccugaguuaagug

SEQ ID NO: 365276 - RNA, 19 nt, Homo sapiens
  misc_RNA (1)...(19): siRNA sense strand
gagcggcuacaccuugaaa

SEQ ID NO: 365277 - RNA, 19 nt, Homo sapiens
  misc_RNA (1)...(19): siRNA sense strand
cuacucugaugacaagaug

SEQ ID NO: 365278 - RNA, 19 nt, Homo sapiens
  misc_RNA (1)...(19): siRNA sense strand
gaugaacggcucaagaaac

SEQ ID NO: 365279 - RNA, 19 nt, Homo sapiens
  misc_RNA (1)...(19): siRNA sense strand
ugaguuaagugaugaugac

SEQ ID NO: 365280 - RNA, 19 nt, Homo sapiens
  misc_RNA (1)...(19): siRNA sense strand
gcuacgugcuguucuacca

SEQ ID NO: 365281 - RNA, 19 nt, Homo sapiens
  misc_RNA (1)...(19): siRNA sense strand
ccucugagccuuucuacuc

SEQ ID NO: 365282 - RNA, 19 nt, Homo sapiens
  misc_RNA (1)...(19): siRNA sense strand
agagccaccuguuaauauc

SEQ ID NO: 365283 - RNA, 19 nt, Homo sapiens
  misc_RNA (1)...(19): siRNA sense strand
gcagcaaggagcgcagaaa

SEQ ID NO: 365284 - RNA, 19 nt, Homo sapiens
  misc_RNA (1)...(19): siRNA sense strand
ucugggcucuggucauguu

SEQ ID NO: 365285 - RNA, 19 nt, Homo sapiens
  misc_RNA (1)...(19): siRNA sense strand
cccgagagccaccuguuaa

SEQ ID NO: 365286 - RNA, 19 nt, Homo sapiens
  misc_RNA (1)...(19): siRNA sense strand
ggauccaagcuaccauuug

SEQ ID NO: 365287 - RNA, 19 nt, Homo sapiens
  misc_RNA (1)...(19): siRNA sense strand
aaacacgugcuuccugaau

SEQ ID NO: 365288 - RNA, 19 nt, Homo sapiens
  misc_RNA (1)...(19): siRNA sense strand
gaggggcucugcuagaaga

SEQ ID NO: 365289 - RNA, 19 nt, Homo sapiens
  misc_RNA (1)...(19): siRNA sense strand
caccgauacuugccaaugg

SEQ ID NO: 365290 - RNA, 19 nt, Homo sapiens
  misc_RNA (1)...(19): siRNA sense strand
gggauccaagcuaccauuu

SEQ ID NO: 365291 - RNA, 19 nt, Homo sapiens
  misc_RNA (1)...(19): siRNA sense strand
ccagcaggaugcccaagag

SEQ ID NO: 365292 - RNA, 19 nt, Homo sapiens
  misc_RNA (1)...(19): siRNA sense strand
cugaugaacggcucaagaa

SEQ ID NO: 365293 - RNA, 19 nt, Homo sapiens
  misc_RNA (1)...(19): siRNA sense strand
guuucaaccuuuucacuaa

SEQ ID NO: 365294 - RNA, 19 nt, Homo sapiens
  misc_RNA (1)...(19): siRNA sense strand
uuucuacucugaugacaag

SEQ ID NO: 365295 - RNA, 19 nt, Homo sapiens
  misc_RNA (1)...(19): siRNA sense strand
cuucugggcucuggucaug

SEQ ID NO: 365296 - RNA, 19 nt, Homo sapiens
  misc_RNA (1)...(19): siRNA sense strand
uggagcggcuacaccuuga

SEQ ID NO: 365297 - RNA, 19 nt, Homo sapiens
  misc_RNA (1)...(19): siRNA sense strand
gcuguucuaccaacugaug

SEQ ID NO: 365298 - RNA, 19 nt, Homo sapiens
  misc_RNA (1)...(19): siRNA sense strand
gggauuguuucaaccuuuu

SEQ ID NO: 365299 - RNA, 19 nt, Homo sapiens
  misc_RNA (1)...(19): siRNA sense strand
gcgggauuguuucaaccuu

SEQ ID NO: 365300 - RNA, 19 nt, Homo sapiens
  misc_RNA (1)...(19): siRNA sense strand
cuagaagaaccugaguuaa

SEQ ID NO: 365301 - RNA, 19 nt, Homo sapiens
  misc_RNA (1)...(19): siRNA sense strand
cccaagaguuccugaagcu

SEQ ID NO: 365302 - RNA, 19 nt, Homo sapiens
  misc_RNA (1)...(19): siRNA sense strand
ugaugaacggcucaagaaa

SEQ ID NO: 365303 - RNA, 19 nt, Homo sapiens
  misc_RNA (1)...(19): siRNA sense strand
uggcaugucuacaaugacu

SEQ ID NO: 365304 - RNA, 19 nt, Homo sapiens
  misc_RNA (1)...(19): siRNA sense strand
gaccgagccaaccuaaugu

SEQ ID NO: 365305 - RNA, 19 nt, Homo sapiens
  misc_RNA (1)...(19): siRNA sense strand
uccugaagcuccucaugga

SEQ ID NO: 365306 - RNA, 19 nt, Homo sapiens
  misc_RNA (1)...(19): siRNA sense strand
ggucauguuggccuucgaa

SEQ ID NO: 365307 - RNA, 19 nt, Homo sapiens
  misc_RNA (1)...(19): siRNA sense strand
ccacuauggccacuacaca

SEQ ID NO: 365308 - RNA, 19 nt, Homo sapiens
  misc_RNA (1)...(19): siRNA sense strand
aaccugaguuaagugauga

SEQ ID NO: 365309 - RNA, 19 nt, Homo sapiens
  misc_RNA (1)...(19): siRNA sense strand
ugaagccuuugcagaugug

SEQ ID NO: 365310 - RNA, 19 nt, Homo sapiens
  misc_RNA (1)...(19): siRNA sense strand
cugaagccuuugcagaugu

SEQ ID NO: 365311 - RNA, 19 nt, Homo sapiens
  misc_RNA (1)...(19): siRNA sense strand
acugaagccuuugcagaug

SEQ ID NO: 365312 - RNA, 19 nt, Homo sapiens
  misc_RNA (1)...(19): siRNA sense strand
augaacggcucaagaaacu

SEQ ID NO: 365313 - RNA, 19 nt, Homo sapiens
  misc_RNA (1)...(19): siRNA sense strand
gcggcuacaccuugaaauc

SEQ ID NO: 365314 - RNA, 19 nt, Homo sapiens
  misc_RNA (1)...(19): siRNA sense strand
aacacgugcuuccugaaug

SEQ ID NO: 365315 - RNA, 19 nt, Homo sapiens
  misc_RNA (1)...(19): siRNA sense strand
ggagaaugccccagugugu

SEQ ID NO: 365316 - RNA, 19 nt, Homo sapiens
  misc_RNA (1)...(19): siRNA sense strand
gugccaggccuguggguau

SEQ ID NO: 365317 - RNA, 19 nt, Homo sapiens
  misc_RNA (1)...(19): siRNA sense strand
cggcuacaccuugaaauca

SEQ ID NO: 365318 - RNA, 19 nt, Homo sapiens
  misc_RNA (1)...(19): siRNA sense strand
acacgugcuuccugaaugc

SEQ ID NO: 365319 - RNA, 19 nt, Homo sapiens
  misc_RNA (1)...(19): siRNA sense strand
ccugagccacccacuuuga

SEQ ID NO: 365320 - RNA, 19 nt, Homo sapiens
  misc_RNA (1)...(19): siRNA sense strand
guugacaguacaaagauuc

SEQ ID NO: 365321 - RNA, 19 nt, Homo sapiens
  misc_RNA (1)...(19): siRNA sense strand
ccaccgauacuugccaaug

SEQ ID NO: 365322 - RNA, 19 nt, Homo sapiens
  misc_RNA (1)...(19): siRNA sense strand
caagaaagcuaacacuuaa

SEQ ID NO: 365323 - RNA, 19 nt, Homo sapiens
  misc_RNA (1)...(19): siRNA sense strand
gcaagaaagcuaacacuua

SEQ ID NO: 365324 - RNA, 19 nt, Homo sapiens
  misc_RNA (1)...(19): siRNA sense strand
gcaccaagcagaagaaaga

SEQ ID NO: 365325 - RNA, 19 nt, Homo sapiens
  misc_RNA (1)...(19): siRNA sense strand
gaaauuguccugccuaagg

SEQ ID NO: 365326 - RNA, 19 nt, Homo sapiens
  misc_RNA (1)...(19): siRNA sense strand
gggaaauuguccugccuaa

SEQ ID NO: 365327 - RNA, 19 nt, Homo sapiens
  misc_RNA (1)...(19): siRNA sense strand
gagcagagaccuggagaag

SEQ ID NO: 365328 - RNA, 19 nt, Homo sapiens
  misc_RNA (1)...(19): siRNA sense strand
ucugccagcugucugcuuu

SEQ ID NO: 365329 - RNA, 19 nt, Homo sapiens
  misc_RNA (1)...(19): siRNA sense strand
agaaagaccagagcagaga

SEQ ID NO: 365330 - RNA, 19 nt, Homo sapiens
  misc_RNA (1)...(19): siRNA sense strand
aaagggacaauucgggaaa

SEQ ID NO: 365331 - RNA, 19 nt, Homo sapiens
  misc_RNA (1)...(19): siRNA sense strand
uuccagcgcugccaguaug

SEQ ID NO: 365332 - RNA, 19 nt, Homo sapiens
  misc_RNA (1)...(19): siRNA sense strand
ccacaggggcaccuccuua

SEQ ID NO: 365333 - RNA, 19 nt, Homo sapiens
  misc_RNA (1)...(19): siRNA sense strand
gaugccaaagggacaauuc

SEQ ID NO: 365334 - RNA, 19 nt, Homo sapiens
  misc_RNA (1)...(19): siRNA sense strand
cagcugcccugcccacuuu

SEQ ID NO: 365335 - RNA, 19 nt, Homo sapiens
  misc_RNA (1)...(19): siRNA sense strand
acuaugagcucuggugguu

SEQ ID NO: 365336 - RNA, 19 nt, Homo sapiens
  misc_RNA (1)...(19): siRNA sense strand
ucaaggaggugaggguuag

SEQ ID NO: 365337 - RNA, 19 nt, Homo sapiens
  misc_RNA (1)...(19): siRNA sense strand
ugaaggaacaaauguggaa

SEQ ID NO: 365338 - RNA, 19 nt, Homo sapiens
  misc_RNA (1)...(19): siRNA sense strand
gagcugugcccaggaguga

SEQ ID NO: 365339 - RNA, 19 nt, Homo sapiens
  misc_RNA (1)...(19): siRNA sense strand
cagcagcggcagcgugaaa

SEQ ID NO: 365340 - RNA, 19 nt, Homo sapiens
  misc_RNA (1)...(19): siRNA sense strand
uaugagcucuggugguucu

SEQ ID NO: 365341 - RNA, 19 nt, Homo sapiens
  misc_RNA (1)...(19): siRNA sense strand
gcccaggagugaacaacca

SEQ ID NO: 365342 - RNA, 19 nt, Homo sapiens
  misc_RNA (1)...(19): siRNA sense strand
cugccgcuaucgccguuua

SEQ ID NO: 365343 - RNA, 19 nt, Homo sapiens
  misc_RNA (1)...(19): siRNA sense strand
gucaaggaggugaggguua

SEQ ID NO: 365344 - RNA, 19 nt, Homo sapiens
  misc_RNA (1)...(19): siRNA sense strand
aaacucaggcugcaacaac

SEQ ID NO: 365345 - RNA, 19 nt, Homo sapiens
  misc_RNA (1)...(19): siRNA sense strand
gcugcugcaccuacuacua

SEQ ID NO: 365346 - RNA, 19 nt, Homo sapiens
  misc_RNA (1)...(19): siRNA sense strand
uaacuggcgacuccgguau

SEQ ID NO: 365347 - RNA, 19 nt, Homo sapiens
  misc_RNA (1)...(19): siRNA sense strand
cugcugcaccuacuacuau

SEQ ID NO: 365348 - RNA, 19 nt, Homo sapiens
  misc_RNA (1)...(19): siRNA sense strand
agcgugaaaucaacuuguu

SEQ ID NO: 365349 - RNA, 19 nt, Homo sapiens
  misc_RNA (1)...(19): siRNA sense strand
agacaaagcugagaacaaa

SEQ ID NO: 365350 - RNA, 19 nt, Homo sapiens
  misc_RNA (1)...(19): siRNA sense strand
ucacggagauugaauacaa

SEQ ID NO: 365351 - RNA, 19 nt, Homo sapiens
  misc_RNA (1)...(19): siRNA sense strand
ugaccgaggugacggguua

SEQ ID NO: 365352 - RNA, 19 nt, Homo sapiens
  misc_RNA (1)...(19): siRNA sense strand
gaaggaaaauggcgaguuu

SEQ ID NO: 365353 - RNA, 19 nt, Homo sapiens
  misc_RNA (1)...(19): siRNA sense strand
agaucaagcuguacaguaa

SEQ ID NO: 365354 - RNA, 19 nt, Homo sapiens
  misc_RNA (1)...(19): siRNA sense strand
gaccgcuucuguccauuua

SEQ ID NO: 365355 - RNA, 19 nt, Homo sapiens
  misc_RNA (1)...(19): siRNA sense strand
ucaccgagaucaagcugua

SEQ ID NO: 365356 - RNA, 19 nt, Homo sapiens
  misc_RNA (1)...(19): siRNA sense strand
gaaauuagugaaacccaaa

SEQ ID NO: 365357 - RNA, 19 nt, Homo sapiens
  misc_RNA (1)...(19): siRNA sense strand
gggcaacaguauuuaugaa

SEQ ID NO: 365358 - RNA, 19 nt, Homo sapiens
  misc_RNA (1)...(19): siRNA sense strand
gcagugaccuucuguacac

SEQ ID NO: 365359 - RNA, 19 nt, Homo sapiens
  misc_RNA (1)...(19): siRNA sense strand
auaccaagaugaagacaaa

SEQ ID NO: 365360 - RNA, 19 nt, Homo sapiens
  misc_RNA (1)...(19): siRNA sense strand
gagaucaagcuguacagua

SEQ ID NO: 365361 - RNA, 19 nt, Homo sapiens
  misc_RNA (1)...(19): siRNA sense strand
gcuccaagaguaugagaua

SEQ ID NO: 365362 - RNA, 19 nt, Homo sapiens
  misc_RNA (1)...(19): siRNA sense strand
caucgugagugucaauuau

SEQ ID NO: 365363 - RNA, 19 nt, Homo sapiens
  misc_RNA (1)...(19): siRNA sense strand
gagaggucguucuuucuuc

SEQ ID NO: 365364 - RNA, 19 nt, Homo sapiens
  misc_RNA (1)...(19): siRNA sense strand
aagcugauauuccuggauu

SEQ ID NO: 365365 - RNA, 19 nt, Homo sapiens
  misc_RNA (1)...(19): siRNA sense strand
ccaaauggacaaacuggaa

SEQ ID NO: 365366 - RNA, 19 nt, Homo sapiens
  misc_RNA (1)...(19): siRNA sense strand
gacuuuggauggauuuguu

SEQ ID NO: 365367 - RNA, 19 nt, Homo sapiens
  misc_RNA (1)...(19): siRNA sense strand
ggagauugaauacaaggaa

SEQ ID NO: 365368 - RNA, 19 nt, Homo sapiens
  misc_RNA (1)...(19): siRNA sense strand
auagagaggucguucuuuc

SEQ ID NO: 365369 - RNA, 19 nt, Homo sapiens
  misc_RNA (1)...(19): siRNA sense strand
agaagacccuauaccauca

SEQ ID NO: 365370 - RNA, 19 nt, Homo sapiens
  misc_RNA (1)...(19): siRNA sense strand
aaggagaaguccaagaaug

SEQ ID NO: 365371 - RNA, 19 nt, Homo sapiens
  misc_RNA (1)...(19): siRNA sense strand
gcaucgugagugucaauua

SEQ ID NO: 365372 - RNA, 19 nt, Homo sapiens
  misc_RNA (1)...(19): siRNA sense strand
cgagaccgcuucuguccau

SEQ ID NO: 365373 - RNA, 19 nt, Homo sapiens
  misc_RNA (1)...(19): siRNA sense strand
gaaggagaaguccaagaau

SEQ ID NO: 365374 - RNA, 19 nt, Homo sapiens
  misc_RNA (1)...(19): siRNA sense strand
cacaagaaacuaggaaauu

SEQ ID NO: 365375 - RNA, 19 nt, Homo sapiens
  misc_RNA (1)...(19): siRNA sense strand
caagaaacuaggaaauuag

SEQ ID NO: 365376 - RNA, 19 nt, Homo sapiens
  misc_RNA (1)...(19): siRNA sense strand
gaauacauccauccuucug

SEQ ID NO: 365377 - RNA, 19 nt, Homo sapiens
  misc_RNA (1)...(19): siRNA sense strand
gaagaucaggcaguauaug

SEQ ID NO: 365378 - RNA, 19 nt, Homo sapiens
  misc_RNA (1)...(19): siRNA sense strand
gagcucacgggcaacagua

SEQ ID NO: 365379 - RNA, 19 nt, Homo sapiens
  misc_RNA (1)...(19): siRNA sense strand
gaaagcagugaccuucugu

SEQ ID NO: 365380 - RNA, 19 nt, Homo sapiens
  misc_RNA (1)...(19): siRNA sense strand
gggugugggugcagagcua

SEQ ID NO: 365381 - RNA, 19 nt, Homo sapiens
  misc_RNA (1)...(19): siRNA sense strand
gggccagccuugaccugaa

SEQ ID NO: 365382 - RNA, 19 nt, Homo sapiens
  misc_RNA (1)...(19): siRNA sense strand
gaaaugugucuuggcgaaa

SEQ ID NO: 365383 - RNA, 19 nt, Homo sapiens
  misc_RNA (1)...(19): siRNA sense strand
gcuguacaguaacauguuc

SEQ ID NO: 365384 - RNA, 19 nt, Homo sapiens
  misc_RNA (1)...(19): siRNA sense strand
uugaagaucaggcaguaua

SEQ ID NO: 365385 - RNA, 19 nt, Homo sapiens
  misc_RNA (1)...(19): siRNA sense strand
gauagagaggucguucuuu

SEQ ID NO: 365386 - RNA, 19 nt, Homo sapiens
  misc_RNA (1)...(19): siRNA sense strand
cgcacuugcugcagacuuu

SEQ ID NO: 365387 - RNA, 19 nt, Homo sapiens
  misc_RNA (1)...(19): siRNA sense strand
ggcaguauaugcuggacau

SEQ ID NO: 365388 - RNA, 19 nt, Homo sapiens
  misc_RNA (1)...(19): siRNA sense strand
ccaagaguaugagauagag

SEQ ID NO: 365389 - RNA, 19 nt, Homo sapiens
  misc_RNA (1)...(19): siRNA sense strand
ucacaagaaacuaggaaau

SEQ ID NO: 365390 - RNA, 19 nt, Homo sapiens
  misc_RNA (1)...(19): siRNA sense strand
ucacgggcaacaguauuua

SEQ ID NO: 365391 - RNA, 19 nt, Homo sapiens
  misc_RNA (1)...(19): siRNA sense strand
caaauggacaaacuggaau

SEQ ID NO: 365392 - RNA, 19 nt, Homo sapiens
  misc_RNA (1)...(19): siRNA sense strand
gaagacaaagcugagaaca

SEQ ID NO: 365393 - RNA, 19 nt, Homo sapiens
  misc_RNA (1)...(19): siRNA sense strand
ugcaguggcuacuugaaga

SEQ ID NO: 365394 - RNA, 19 nt, Homo sapiens
  misc_RNA (1)...(19): siRNA sense strand
ucacuucgcagcuggacaa

SEQ ID NO: 365395 - RNA, 19 nt, Homo sapiens
  misc_RNA (1)...(19): siRNA sense strand
ccagugccaucaccgagau

SEQ ID NO: 365396 - RNA, 19 nt, Homo sapiens
  misc_RNA (1)...(19): siRNA sense strand
cgagaagacccuauaccau

SEQ ID NO: 365397 - RNA, 19 nt, Homo sapiens
  misc_RNA (1)...(19): siRNA sense strand
cgacuccugcuaccagauu

SEQ ID NO: 365398 - RNA, 19 nt, Homo sapiens
  misc_RNA (1)...(19): siRNA sense strand
gcagacuuuggauggauuu

SEQ ID NO: 365399 - RNA, 19 nt, Homo sapiens
  misc_RNA (1)...(19): siRNA sense strand
ggcaacaguauuuaugaau

SEQ ID NO: 365400 - RNA, 19 nt, Homo sapiens
  misc_RNA (1)...(19): siRNA sense strand
gcucacgggcaacaguauu

SEQ ID NO: 365401 - RNA, 19 nt, Homo sapiens
  misc_RNA (1)...(19): siRNA sense strand
acuugaagaucaggcagua

SEQ ID NO: 365402 - RNA, 19 nt, Homo sapiens
  misc_RNA (1)...(19): siRNA sense strand
gccuugaccugaagcugau

SEQ ID NO: 365403 - RNA, 19 nt, Homo sapiens
  misc_RNA (1)...(19): siRNA sense strand
ggucguucuuucuucgaau

SEQ ID NO: 365404 - RNA, 19 nt, Homo sapiens
  misc_RNA (1)...(19): siRNA sense strand
acacuucccucuggacucu

SEQ ID NO: 365405 - RNA, 19 nt, Homo sapiens
  misc_RNA (1)...(19): siRNA sense strand
ggaggaccgccuugucuac

SEQ ID NO: 365406 - RNA, 19 nt, Homo sapiens
  misc_RNA (1)...(19): siRNA sense strand
ugaucgagaagacccuaua

SEQ ID NO: 365407 - RNA, 19 nt, Homo sapiens
  misc_RNA (1)...(19): siRNA sense strand
ugaagaucaggcaguauau

SEQ ID NO: 365408 - RNA, 19 nt, Homo sapiens
  misc_RNA (1)...(19): siRNA sense strand
ucgaaugaaaugugucuug

SEQ ID NO: 365409 - RNA, 19 nt, Homo sapiens
  misc_RNA (1)...(19): siRNA sense strand
gaugaagacaaagcugaga

SEQ ID NO: 365410 - RNA, 19 nt, Homo sapiens
  misc_RNA (1)...(19): siRNA sense strand
cuucgcagcuggacaaagc

SEQ ID NO: 365411 - RNA, 19 nt, Homo sapiens
  misc_RNA (1)...(19): siRNA sense strand
ccaagaaugcggccaagac

SEQ ID NO: 365412 - RNA, 19 nt, Homo sapiens
  misc_RNA (1)...(19): siRNA sense strand
uauccgagaccgcuucugu

SEQ ID NO: 365413 - RNA, 19 nt, Homo sapiens
  misc_RNA (1)...(19): siRNA sense strand
accacgagcuaccugaaga

SEQ ID NO: 365414 - RNA, 19 nt, Homo sapiens
  misc_RNA (1)...(19): siRNA sense strand
gccaggucaccaccaagua

SEQ ID NO: 365415 - RNA, 19 nt, Homo sapiens
  misc_RNA (1)...(19): siRNA sense strand
ggccagccuugaccugaag

SEQ ID NO: 365416 - RNA, 19 nt, Homo sapiens
  misc_RNA (1)...(19): siRNA sense strand
gcugcagacuuuggaugga

SEQ ID NO: 365417 - RNA, 19 nt, Homo sapiens
  misc_RNA (1)...(19): siRNA sense strand
agagaggucguucuuucuu

SEQ ID NO: 365418 - RNA, 19 nt, Homo sapiens
  misc_RNA (1)...(19): siRNA sense strand
guacucacggagauugaau

SEQ ID NO: 365419 - RNA, 19 nt, Homo sapiens
  misc_RNA (1)...(19): siRNA sense strand
ucgugagugucaauuaugu

SEQ ID NO: 365420 - RNA, 19 nt, Homo sapiens
  misc_RNA (1)...(19): siRNA sense strand
aguauaugcuggacauguc

SEQ ID NO: 365421 - RNA, 19 nt, Homo sapiens
  misc_RNA (1)...(19): siRNA sense strand
gcaguggcuacuugaagau

SEQ ID NO: 365422 - RNA, 19 nt, Homo sapiens
  misc_RNA (1)...(19): siRNA sense strand
agauagagaggucguucuu

SEQ ID NO: 365423 - RNA, 19 nt, Homo sapiens
  misc_RNA (1)...(19): siRNA sense strand
aagacaaagcugagaacaa

SEQ ID NO: 365424 - RNA, 19 nt, Homo sapiens
  misc_RNA (1)...(19): siRNA sense strand
gaucgagaagacccuauac

SEQ ID NO: 365425 - RNA, 19 nt, Homo sapiens
  misc_RNA (1)...(19): siRNA sense strand
caagcuguacaguaacaug

SEQ ID NO: 365426 - RNA, 19 nt, Homo sapiens
  misc_RNA (1)...(19): siRNA sense strand
cgggcaacaguauuuauga

SEQ ID NO: 365427 - RNA, 19 nt, Homo sapiens
  misc_RNA (1)...(19): siRNA sense strand
agacaaagcugagaacaaa

SEQ ID NO: 365428 - RNA, 19 nt, Homo sapiens
  misc_RNA (1)...(19): siRNA sense strand
ucacggagauugaauacaa

SEQ ID NO: 365429 - RNA, 19 nt, Homo sapiens
  misc_RNA (1)...(19): siRNA sense strand
ugaccgaggugacggguua

SEQ ID NO: 365430 - RNA, 19 nt, Homo sapiens
  misc_RNA (1)...(19): siRNA sense strand
gaaggaaaauggcgaguuu

SEQ ID NO: 365431 - RNA, 19 nt, Homo sapiens
  misc_RNA (1)...(19): siRNA sense strand
agaucaagcuguacaguaa

SEQ ID NO: 365432 - RNA, 19 nt, Homo sapiens
  misc_RNA (1)...(19): siRNA sense strand
gaccgcuucuguccauuua

SEQ ID NO: 365433 - RNA, 19 nt, Homo sapiens
  misc_RNA (1)...(19): siRNA sense strand
ucaccgagaucaagcugua

SEQ ID NO: 365434 - RNA, 19 nt, Homo sapiens
  misc_RNA (1)...(19): siRNA sense strand
gaaauuagugaaacccaaa

SEQ ID NO: 365435 - RNA, 19 nt, Homo sapiens
  misc_RNA (1)...(19): siRNA sense strand
gggcaacaguauuuaugaa

SEQ ID NO: 365436 - RNA, 19 nt, Homo sapiens
  misc_RNA (1)...(19): siRNA sense strand
gcagugaccuucuguacac

SEQ ID NO: 365437 - RNA, 19 nt, Homo sapiens
  misc_RNA (1)...(19): siRNA sense strand
auaccaagaugaagacaaa

SEQ ID NO: 365438 - RNA, 19 nt, Homo sapiens
  misc_RNA (1)...(19): siRNA sense strand
gagaucaagcuguacagua

SEQ ID NO: 365439 - RNA, 19 nt, Homo sapiens
  misc_RNA (1)...(19): siRNA sense strand
gcuccaagaguaugagaua

SEQ ID NO: 365440 - RNA, 19 nt, Homo sapiens
  misc_RNA (1)...(19): siRNA sense strand
caucgugagugucaauuau

SEQ ID NO: 365441 - RNA, 19 nt, Homo sapiens
  misc_RNA (1)...(19): siRNA sense strand
gagaggucguucuuucuuc

SEQ ID NO: 365442 - RNA, 19 nt, Homo sapiens
  misc_RNA (1)...(19): siRNA sense strand
aagcugauauuccuggauu

SEQ ID NO: 365443 - RNA, 19 nt, Homo sapiens
  misc_RNA (1)...(19): siRNA sense strand
ccaaauggacaaacuggaa

SEQ ID NO: 365444 - RNA, 19 nt, Homo sapiens
  misc_RNA (1)...(19): siRNA sense strand
gacuuuggauggauuuguu

SEQ ID NO: 365445 - RNA, 19 nt, Homo sapiens
  misc_RNA (1)...(19): siRNA sense strand
ggagauugaauacaaggaa

SEQ ID NO: 365446 - RNA, 19 nt, Homo sapiens
  misc_RNA (1)...(19): siRNA sense strand
auagagaggucguucuuuc

SEQ ID NO: 365447 - RNA, 19 nt, Homo sapiens
  misc_RNA (1)...(19): siRNA sense strand
agaagacccuauaccauca

SEQ ID NO: 365448 - RNA, 19 nt, Homo sapiens
  misc_RNA (1)...(19): siRNA sense strand
aaggagaaguccaagaaug

SEQ ID NO: 365449 - RNA, 19 nt, Homo sapiens
  misc_RNA (1)...(19): siRNA sense strand
gcaucgugagugucaauua

SEQ ID NO: 365450 - RNA, 19 nt, Homo sapiens
  misc_RNA (1)...(19): siRNA sense strand
cgagaccgcuucuguccau

SEQ ID NO: 365451 - RNA, 19 nt, Homo sapiens
  misc_RNA (1)...(19): siRNA sense strand
gaaggagaaguccaagaau

SEQ ID NO: 365452 - RNA, 19 nt, Homo sapiens
  misc_RNA (1)...(19): siRNA sense strand
cacaagaaacuaggaaauu

SEQ ID NO: 365453 - RNA, 19 nt, Homo sapiens
  misc_RNA (1)...(19): siRNA sense strand
caagaaacuaggaaauuag

SEQ ID NO: 365454 - RNA, 19 nt, Homo sapiens
  misc_RNA (1)...(19): siRNA sense strand
gaauacauccauccuucug

SEQ ID NO: 365455 - RNA, 19 nt, Homo sapiens
  misc_RNA (1)...(19): siRNA sense strand
gaagaucaggcaguauaug

SEQ ID NO: 365456 - RNA, 19 nt, Homo sapiens
  misc_RNA (1)...(19): siRNA sense strand
gagcucacgggcaacagua

SEQ ID NO: 365457 - RNA, 19 nt, Homo sapiens
  misc_RNA (1)...(19): siRNA sense strand
gaaagcagugaccuucugu

SEQ ID NO: 365458 - RNA, 19 nt, Homo sapiens
  misc_RNA (1)...(19): siRNA sense strand
gggugugggugcagagcua

SEQ ID NO: 365459 - RNA, 19 nt, Homo sapiens
  misc_RNA (1)...(19): siRNA sense strand
gggccagccuugaccugaa

SEQ ID NO: 365460 - RNA, 19 nt, Homo sapiens
  misc_RNA (1)...(19): siRNA sense strand
gaaaugugucuuggcgaaa

SEQ ID NO: 365461 - RNA, 19 nt, Homo sapiens
  misc_RNA (1)...(19): siRNA sense strand
gcuguacaguaacauguuc

SEQ ID NO: 365462 - RNA, 19 nt, Homo sapiens
  misc_RNA (1)...(19): siRNA sense strand
uugaagaucaggcaguaua

SEQ ID NO: 365463 - RNA, 19 nt, Homo sapiens
  misc_RNA (1)...(19): siRNA sense strand
gauagagaggucguucuuu

SEQ ID NO: 365464 - RNA, 19 nt, Homo sapiens
  misc_RNA (1)...(19): siRNA sense strand
cgcacuugcugcagacuuu

SEQ ID NO: 365465 - RNA, 19 nt, Homo sapiens
  misc_RNA (1)...(19): siRNA sense strand
ggcaguauaugcuggacau

SEQ ID NO: 365466 - RNA, 19 nt, Homo sapiens
  misc_RNA (1)...(19): siRNA sense strand
ccaagaguaugagauagag

SEQ ID NO: 365467 - RNA, 19 nt, Homo sapiens
  misc_RNA (1)...(19): siRNA sense strand
ucacaagaaacuaggaaau

SEQ ID NO: 365468 - RNA, 19 nt, Homo sapiens
  misc_RNA (1)...(19): siRNA sense strand
ucacgggcaacaguauuua

SEQ ID NO: 365469 - RNA, 19 nt, Homo sapiens
  misc_RNA (1)...(19): siRNA sense strand
caaauggacaaacuggaau

SEQ ID NO: 365470 - RNA, 19 nt, Homo sapiens
  misc_RNA (1)...(19): siRNA sense strand
gaagacaaagcugagaaca

SEQ ID NO: 365471 - RNA, 19 nt, Homo sapiens
  misc_RNA (1)...(19): siRNA sense strand
ugcaguggcuacuugaaga

SEQ ID NO: 365472 - RNA, 19 nt, Homo sapiens
  misc_RNA (1)...(19): siRNA sense strand
ucacuucgcagcuggacaa

SEQ ID NO: 365473 - RNA, 19 nt, Homo sapiens
  misc_RNA (1)...(19): siRNA sense strand
ccagugccaucaccgagau

SEQ ID NO: 365474 - RNA, 19 nt, Homo sapiens
  misc_RNA (1)...(19): siRNA sense strand
cgagaagacccuauaccau

SEQ ID NO: 365475 - RNA, 19 nt, Homo sapiens
  misc_RNA (1)...(19): siRNA sense strand
cgacuccugcuaccagauu

SEQ ID NO: 365476 - RNA, 19 nt, Homo sapiens
  misc_RNA (1)...(19): siRNA sense strand
gcagacuuuggauggauuu

SEQ ID NO: 365477 - RNA, 19 nt, Homo sapiens
  misc_RNA (1)...(19): siRNA sense strand
ggcaacaguauuuaugaau

SEQ ID NO: 365478 - RNA, 19 nt, Homo sapiens
  misc_RNA (1)...(19): siRNA sense strand
gcucacgggcaacaguauu

SEQ ID NO: 365479 - RNA, 19 nt, Homo sapiens
  misc_RNA (1)...(19): siRNA sense strand
acuugaagaucaggcagua

SEQ ID NO: 365480 - RNA, 19 nt, Homo sapiens
  misc_RNA (1)...(19): siRNA sense strand
gccuugaccugaagcugau

SEQ ID NO: 365481 - RNA, 19 nt, Homo sapiens
  misc_RNA (1)...(19): siRNA sense strand
ggucguucuuucuucgaau

SEQ ID NO: 365482 - RNA, 19 nt, Homo sapiens
  misc_RNA (1)...(19): siRNA sense strand
acacuucccucuggacucu

SEQ ID NO: 365483 - RNA, 19 nt, Homo sapiens
  misc_RNA (1)...(19): siRNA sense strand
ggaggaccgccuugucuac

SEQ ID NO: 365484 - RNA, 19 nt, Homo sapiens
  misc_RNA (1)...(19): siRNA sense strand
ugaucgagaagacccuaua

SEQ ID NO: 365485 - RNA, 19 nt, Homo sapiens
  misc_RNA (1)...(19): siRNA sense strand
ugaagaucaggcaguauau

SEQ ID NO: 365486 - RNA, 19 nt, Homo sapiens
  misc_RNA (1)...(19): siRNA sense strand
ucgaaugaaaugugucuug

SEQ ID NO: 365487 - RNA, 19 nt, Homo sapiens
  misc_RNA (1)...(19): siRNA sense strand
gaugaagacaaagcugaga

SEQ ID NO: 365488 - RNA, 19 nt, Homo sapiens
  misc_RNA (1)...(19): siRNA sense strand
cuucgcagcuggacaaagc

SEQ ID NO: 365489 - RNA, 19 nt, Homo sapiens
  misc_RNA (1)...(19): siRNA sense strand
ccaagaaugcggccaagac

SEQ ID NO: 365490 - RNA, 19 nt, Homo sapiens
  misc_RNA (1)...(19): siRNA sense strand
uauccgagaccgcuucugu

SEQ ID NO: 365491 - RNA, 19 nt, Homo sapiens
  misc_RNA (1)...(19): siRNA sense strand
accacgagcuaccugaaga

SEQ ID NO: 365492 - RNA, 19 nt, Homo sapiens
  misc_RNA (1)...(19): siRNA sense strand
gccaggucaccaccaagua

SEQ ID NO: 365493 - RNA, 19 nt, Homo sapiens
  misc_RNA (1)...(19): siRNA sense strand
ggccagccuugaccugaag

SEQ ID NO: 365494 - RNA, 19 nt, Homo sapiens
  misc_RNA (1)...(19): siRNA sense strand
gcugcagacuuuggaugga

SEQ ID NO: 365495 - RNA, 19 nt, Homo sapiens
  misc_RNA (1)...(19): siRNA sense strand
agagaggucguucuuucuu

SEQ ID NO: 365496 - RNA, 19 nt, Homo sapiens
  misc_RNA (1)...(19): siRNA sense strand
guacucacggagauugaau

SEQ ID NO: 365497 - RNA, 19 nt, Homo sapiens
  misc_RNA (1)...(19): siRNA sense strand
ucgugagugucaauuaugu

SEQ ID NO: 365498 - RNA, 19 nt, Homo sapiens
  misc_RNA (1)...(19): siRNA sense strand
aguauaugcuggacauguc

SEQ ID NO: 365499 - RNA, 19 nt, Homo sapiens
  misc_RNA (1)...(19): siRNA sense strand
gcaguggcuacuugaagau

SEQ ID NO: 365500 - RNA, 19 nt, Homo sapiens
  misc_RNA (1)...(19): siRNA sense strand
agauagagaggucguucuu

SEQ ID NO: 365501 - RNA, 19 nt, Homo sapiens
  misc_RNA (1)...(19): siRNA sense strand
aagacaaagcugagaacaa

SEQ ID NO: 365502 - RNA, 19 nt, Homo sapiens
  misc_RNA (1)...(19): siRNA sense strand
gaucgagaagacccuauac

SEQ ID NO: 365503 - RNA, 19 nt, Homo sapiens
  misc_RNA (1)...(19): siRNA sense strand
caagcuguacaguaacaug

SEQ ID NO: 365504 - RNA, 19 nt, Homo sapiens
  misc_RNA (1)...(19): siRNA sense strand
cgggcaacaguauuuauga

SEQ ID NO: 365505 - RNA, 19 nt, Homo sapiens
  misc_RNA (1)...(19): siRNA sense strand
gaacaaugcucgcguagau

SEQ ID NO: 365506 - RNA, 19 nt, Homo sapiens
  misc_RNA (1)...(19): siRNA sense strand
gaaaggacagcauccaaua

SEQ ID NO: 365507 - RNA, 19 nt, Homo sapiens
  misc_RNA (1)...(19): siRNA sense strand
caacaaggcaauagcauuu

SEQ ID NO: 365508 - RNA, 19 nt, Homo sapiens
  misc_RNA (1)...(19): siRNA sense strand
ggacagaccuagagaacag

SEQ ID NO: 365509 - RNA, 19 nt, Homo sapiens
  misc_RNA (1)...(19): siRNA sense strand
gagcaaagcccaccucagu

SEQ ID NO: 365510 - RNA, 19 nt, Homo sapiens
  misc_RNA (1)...(19): siRNA sense strand
ggacgacccugcaguaggu

SEQ ID NO: 365511 - RNA, 19 nt, Homo sapiens
  misc_RNA (1)...(19): siRNA sense strand
gaugaaagccagaggauca

SEQ ID NO: 365512 - RNA, 19 nt, Homo sapiens
  misc_RNA (1)...(19): siRNA sense strand
ggaauccacacuucaauug

SEQ ID NO: 365513 - RNA, 19 nt, Homo sapiens
  misc_RNA (1)...(19): siRNA sense strand
ggaauggccugguguuugc

SEQ ID NO: 365514 - RNA, 19 nt, Homo sapiens
  misc_RNA (1)...(19): siRNA sense strand
acacugcgcuccaggauca

SEQ ID NO: 365515 - RNA, 19 nt, Homo sapiens
  misc_RNA (1)...(19): siRNA sense strand
acaaggcaauagcauuuaa

SEQ ID NO: 365516 - RNA, 19 nt, Homo sapiens
  misc_RNA (1)...(19): siRNA sense strand
ucagugaugucuucagguu

SEQ ID NO: 365517 - RNA, 19 nt, Homo sapiens
  misc_RNA (1)...(19): siRNA sense strand
cuggagugcuguuugguua

SEQ ID NO: 365518 - RNA, 19 nt, Homo sapiens
  misc_RNA (1)...(19): siRNA sense strand
gcacagugguccgggcauu

SEQ ID NO: 365519 - RNA, 19 nt, Homo sapiens
  misc_RNA (1)...(19): siRNA sense strand
ggaaaggacagcauccaau

SEQ ID NO: 365520 - RNA, 19 nt, Homo sapiens
  misc_RNA (1)...(19): siRNA sense strand
gcaauagcauuuaaaagga

SEQ ID NO: 365521 - RNA, 19 nt, Homo sapiens
  misc_RNA (1)...(19): siRNA sense strand
gagaaggaccguaccacuu

SEQ ID NO: 365522 - RNA, 19 nt, Homo sapiens
  misc_RNA (1)...(19): siRNA sense strand
gccaggagauagaggagaa

SEQ ID NO: 365523 - RNA, 19 nt, Homo sapiens
  misc_RNA (1)...(19): siRNA sense strand
ccaagugucuacauuucug

SEQ ID NO: 365524 - RNA, 19 nt, Homo sapiens
  misc_RNA (1)...(19): siRNA sense strand
gagcagggcaugaaucucu

SEQ ID NO: 365525 - RNA, 19 nt, Homo sapiens
  misc_RNA (1)...(19): siRNA sense strand
caacaaggcccaggcuuuc

SEQ ID NO: 365526 - RNA, 19 nt, Homo sapiens
  misc_RNA (1)...(19): siRNA sense strand
guuacuggcuucucugcuu

SEQ ID NO: 365527 - RNA, 19 nt, Homo sapiens
  misc_RNA (1)...(19): siRNA sense strand
ucgcagagauggguuccua

SEQ ID NO: 365528 - RNA, 19 nt, Homo sapiens
  misc_RNA (1)...(19): siRNA sense strand
ggaggccacugagaccaaa

SEQ ID NO: 365529 - RNA, 19 nt, Homo sapiens
  misc_RNA (1)...(19): siRNA sense strand
ggauacaggaggccacuga

SEQ ID NO: 365530 - RNA, 19 nt, Homo sapiens
  misc_RNA (1)...(19): siRNA sense strand
ucauagugcuggcaaaugg

SEQ ID NO: 365531 - RNA, 19 nt, Homo sapiens
  misc_RNA (1)...(19): siRNA sense strand
gaaggauugcaucaccaua

SEQ ID NO: 365532 - RNA, 19 nt, Homo sapiens
  misc_RNA (1)...(19): siRNA sense strand
gcacaacaaggcaauagca

SEQ ID NO: 365533 - RNA, 19 nt, Homo sapiens
  misc_RNA (1)...(19): siRNA sense strand
ggcugucgcucuuuggaaa

SEQ ID NO: 365534 - RNA, 19 nt, Homo sapiens
  misc_RNA (1)...(19): siRNA sense strand
ucaacaaggcccaggcuuu

SEQ ID NO: 365535 - RNA, 19 nt, Homo sapiens
  misc_RNA (1)...(19): siRNA sense strand
uggcagguguuccauucua

SEQ ID NO: 365536 - RNA, 19 nt, Homo sapiens
  misc_RNA (1)...(19): siRNA sense strand
gggaauggccugguguuug

SEQ ID NO: 365537 - RNA, 19 nt, Homo sapiens
  misc_RNA (1)...(19): siRNA sense strand
gcacggcucaccagcucua

SEQ ID NO: 365538 - RNA, 19 nt, Homo sapiens
  misc_RNA (1)...(19): siRNA sense strand
gggaauccacacuucaauu

SEQ ID NO: 365539 - RNA, 19 nt, Homo sapiens
  misc_RNA (1)...(19): siRNA sense strand
gaaagccagaggaucaguu

SEQ ID NO: 365540 - RNA, 19 nt, Homo sapiens
  misc_RNA (1)...(19): siRNA sense strand
uuacuggcuucucugcuuu

SEQ ID NO: 365541 - RNA, 19 nt, Homo sapiens
  misc_RNA (1)...(19): siRNA sense strand
ggccgagaaugcuaugaau

SEQ ID NO: 365542 - RNA, 19 nt, Homo sapiens
  misc_RNA (1)...(19): siRNA sense strand
gagggaauccacacuucaa

SEQ ID NO: 365543 - RNA, 19 nt, Homo sapiens
  misc_RNA (1)...(19): siRNA sense strand
ucaaggugcugcagaugag

SEQ ID NO: 365544 - RNA, 19 nt, Homo sapiens
  misc_RNA (1)...(19): siRNA sense strand
gaucauagugcuggcaaau

SEQ ID NO: 365545 - RNA, 19 nt, Homo sapiens
  misc_RNA (1)...(19): siRNA sense strand
ucacuggccugguguacag

SEQ ID NO: 365546 - RNA, 19 nt, Homo sapiens
  misc_RNA (1)...(19): siRNA sense strand
guggugcgaucucccauca

SEQ ID NO: 365547 - RNA, 19 nt, Homo sapiens
  misc_RNA (1)...(19): siRNA sense strand
gagagaaggugggcaucgu

SEQ ID NO: 365548 - RNA, 19 nt, Homo sapiens
  misc_RNA (1)...(19): siRNA sense strand
ggacauuccagacaaacuc

SEQ ID NO: 365549 - RNA, 19 nt, Homo sapiens
  misc_RNA (1)...(19): siRNA sense strand
acgaugagcuucgcagugu

SEQ ID NO: 365550 - RNA, 19 nt, Homo sapiens
  misc_RNA (1)...(19): siRNA sense strand
acaaugcucgcguagauga

SEQ ID NO: 365551 - RNA, 19 nt, Homo sapiens
  misc_RNA (1)...(19): siRNA sense strand
gaggagaaggagaaacaga

SEQ ID NO: 365552 - RNA, 19 nt, Homo sapiens
  misc_RNA (1)...(19): siRNA sense strand
cuguguaccugcuggauga

SEQ ID NO: 365553 - RNA, 19 nt, Homo sapiens
  misc_RNA (1)...(19): siRNA sense strand
ucucacaguucucaacauc

SEQ ID NO: 365554 - RNA, 19 nt, Homo sapiens
  misc_RNA (1)...(19): siRNA sense strand
ggccuccucuucucugugu

SEQ ID NO: 365555 - RNA, 19 nt, Homo sapiens
  misc_RNA (1)...(19): siRNA sense strand
ggaacucgaagaccaucaa

SEQ ID NO: 365556 - RNA, 19 nt, Homo sapiens
  misc_RNA (1)...(19): siRNA sense strand
gcaguguuccugauucaca

SEQ ID NO: 365557 - RNA, 19 nt, Homo sapiens
  misc_RNA (1)...(19): siRNA sense strand
caaggcaauagcauuuaaa

SEQ ID NO: 365558 - RNA, 19 nt, Homo sapiens
  misc_RNA (1)...(19): siRNA sense strand
caacuggacagaccuagag

SEQ ID NO: 365559 - RNA, 19 nt, Homo sapiens
  misc_RNA (1)...(19): siRNA sense strand
cgagagguccaucaaguca

SEQ ID NO: 365560 - RNA, 19 nt, Homo sapiens
  misc_RNA (1)...(19): siRNA sense strand
cgaagaccaucaaguucca

SEQ ID NO: 365561 - RNA, 19 nt, Homo sapiens
  misc_RNA (1)...(19): siRNA sense strand
acucgaagaccaucaaguu

SEQ ID NO: 365562 - RNA, 19 nt, Homo sapiens
  misc_RNA (1)...(19): siRNA sense strand
gaacauguacaggcucaag

SEQ ID NO: 365563 - RNA, 19 nt, Homo sapiens
  misc_RNA (1)...(19): siRNA sense strand
caucuggagugcuguuugg

SEQ ID NO: 365564 - RNA, 19 nt, Homo sapiens
  misc_RNA (1)...(19): siRNA sense strand
cagaaaggcagcuguguac

SEQ ID NO: 365565 - RNA, 19 nt, Homo sapiens
  misc_RNA (1)...(19): siRNA sense strand
ucacugccaucgcugucuu

SEQ ID NO: 365566 - RNA, 19 nt, Homo sapiens
  misc_RNA (1)...(19): siRNA sense strand
gggcguguccuucaagauc

SEQ ID NO: 365567 - RNA, 19 nt, Homo sapiens
  misc_RNA (1)...(19): siRNA sense strand
gcaacuggacagaccuaga

SEQ ID NO: 365568 - RNA, 19 nt, Homo sapiens
  misc_RNA (1)...(19): siRNA sense strand
caggauggccagcaggaaa

SEQ ID NO: 365569 - RNA, 19 nt, Homo sapiens
  misc_RNA (1)...(19): siRNA sense strand
ggaucauagugcuggcaaa

SEQ ID NO: 365570 - RNA, 19 nt, Homo sapiens
  misc_RNA (1)...(19): siRNA sense strand
agugaugucuucagguuca

SEQ ID NO: 365571 - RNA, 19 nt, Homo sapiens
  misc_RNA (1)...(19): siRNA sense strand
ccggccagcugcaguacaa

SEQ ID NO: 365572 - RNA, 19 nt, Homo sapiens
  misc_RNA (1)...(19): siRNA sense strand
ggacuuugggcuaagauac

SEQ ID NO: 365573 - RNA, 19 nt, Homo sapiens
  misc_RNA (1)...(19): siRNA sense strand
gcuuggauucgcccucaua

SEQ ID NO: 365574 - RNA, 19 nt, Homo sapiens
  misc_RNA (1)...(19): siRNA sense strand
aaagccagaggaucaguuu

SEQ ID NO: 365575 - RNA, 19 nt, Homo sapiens
  misc_RNA (1)...(19): siRNA sense strand
cgcgagagguccaucaagu

SEQ ID NO: 365576 - RNA, 19 nt, Homo sapiens
  misc_RNA (1)...(19): siRNA sense strand
uagaggagaaggagaaaca

SEQ ID NO: 365577 - RNA, 19 nt, Homo sapiens
  misc_RNA (1)...(19): siRNA sense strand
ccaucuaccuccucuucau

SEQ ID NO: 365578 - RNA, 19 nt, Homo sapiens
  misc_RNA (1)...(19): siRNA sense strand
gaaaggcagcuguguaccu

SEQ ID NO: 365579 - RNA, 19 nt, Homo sapiens
  misc_RNA (1)...(19): siRNA sense strand
gcugguguccuuccaagug

SEQ ID NO: 365580 - RNA, 19 nt, Homo sapiens
  misc_RNA (1)...(19): siRNA sense strand
caucaggaggagcaaauga

SEQ ID NO: 365581 - RNA, 19 nt, Homo sapiens
  misc_RNA (1)...(19): siRNA sense strand
ccagugcggugggugaugu

SEQ ID NO: 365582 - RNA, 19 nt, Homo sapiens
  misc_RNA (1)...(19): siRNA sense strand
uggcuucucugcuuugucu

SEQ ID NO: 365583 - RNA, 19 nt, Homo sapiens
  misc_RNA (1)...(19): siRNA sense strand
cagagccuguaugugguua

SEQ ID NO: 365584 - RNA, 19 nt, Homo sapiens
  misc_RNA (1)...(19): siRNA sense strand
gaugagcuucgcaguguuc

SEQ ID NO: 365585 - RNA, 19 nt, Homo sapiens
  misc_RNA (1)...(19): siRNA sense strand
ggagugcuguuugguuacu

SEQ ID NO: 365586 - RNA, 19 nt, Homo sapiens
  misc_RNA (1)...(19): siRNA sense strand
gaaccagacagagccugaa

SEQ ID NO: 365587 - RNA, 19 nt, Homo sapiens
  misc_RNA (1)...(19): siRNA sense strand
uaaaccgcuucuccaagga

SEQ ID NO: 365588 - RNA, 19 nt, Homo sapiens
  misc_RNA (1)...(19): siRNA sense strand
gaucucccaucagcuucuu

SEQ ID NO: 365589 - RNA, 19 nt, Homo sapiens
  misc_RNA (1)...(19): siRNA sense strand
ggaccguaccacuucagaa

SEQ ID NO: 365590 - RNA, 19 nt, Homo sapiens
  misc_RNA (1)...(19): siRNA sense strand
gauagaggagaaggagaaa

SEQ ID NO: 365591 - RNA, 19 nt, Homo sapiens
  misc_RNA (1)...(19): siRNA sense strand
ucuggcagguguuccauuc

SEQ ID NO: 365592 - RNA, 19 nt, Homo sapiens
  misc_RNA (1)...(19): siRNA sense strand
acaacaaggcaauagcauu

SEQ ID NO: 365593 - RNA, 19 nt, Homo sapiens
  misc_RNA (1)...(19): siRNA sense strand
aaacuccucagaagaacuu

SEQ ID NO: 365594 - RNA, 19 nt, Homo sapiens
  misc_RNA (1)...(19): siRNA sense strand
cgagaaugcuaugaaugca

SEQ ID NO: 365595 - RNA, 19 nt, Homo sapiens
  misc_RNA (1)...(19): siRNA sense strand
uggagcggaugcaggacua

SEQ ID NO: 365596 - RNA, 19 nt, Homo sapiens
  misc_RNA (1)...(19): siRNA sense strand
uccggucccugcugaugua

SEQ ID NO: 365597 - RNA, 19 nt, Homo sapiens
  misc_RNA (1)...(19): siRNA sense strand
agauagaggagaaggagaa

SEQ ID NO: 365598 - RNA, 19 nt, Homo sapiens
  misc_RNA (1)...(19): siRNA sense strand
ccagggaacaacacggauu

SEQ ID NO: 365599 - RNA, 19 nt, Homo sapiens
  misc_RNA (1)...(19): siRNA sense strand
ggaaggauugcaucaccau

SEQ ID NO: 365600 - RNA, 19 nt, Homo sapiens
  misc_RNA (1)...(19): siRNA sense strand
gcugucugcuggcuguugu

SEQ ID NO: 365601 - RNA, 19 nt, Homo sapiens
  misc_RNA (1)...(19): siRNA sense strand
ggaagacccagauccucau

SEQ ID NO: 365602 - RNA, 19 nt, Homo sapiens
  misc_RNA (1)...(19): siRNA sense strand
gauccacgcaggagagaag

SEQ ID NO: 365603 - RNA, 19 nt, Homo sapiens
  misc_RNA (1)...(19): siRNA sense strand
gagccugugcuuccugaga

SEQ ID NO: 365604 - RNA, 19 nt, Homo sapiens
  misc_RNA (1)...(19): siRNA sense strand
cacccuggcuggagagagu

SEQ ID NO: 365605 - RNA, 19 nt, Homo sapiens
  misc_RNA (1)...(19): siRNA sense strand
gaagugguaccagagcaua

SEQ ID NO: 365606 - RNA, 19 nt, Homo sapiens
  misc_RNA (1)...(19): siRNA sense strand
ucuggaagcuuggccauca

SEQ ID NO: 365607 - RNA, 19 nt, Homo sapiens
  misc_RNA (1)...(19): siRNA sense strand
cuccaugacuccaauccaa

SEQ ID NO: 365608 - RNA, 19 nt, Homo sapiens
  misc_RNA (1)...(19): siRNA sense strand
caccguacccuuccuaugg

SEQ ID NO: 365609 - RNA, 19 nt, Homo sapiens
  misc_RNA (1)...(19): siRNA sense strand
caacacuccaugacuccaa

SEQ ID NO: 365610 - RNA, 19 nt, Homo sapiens
  misc_RNA (1)...(19): siRNA sense strand
ggaccuggauuuuauuugc

SEQ ID NO: 365611 - RNA, 19 nt, Homo sapiens
  misc_RNA (1)...(19): siRNA sense strand
aagcuuggccaucaacaga

SEQ ID NO: 365612 - RNA, 19 nt, Homo sapiens
  misc_RNA (1)...(19): siRNA sense strand
gcuuggccaucaacagaca

SEQ ID NO: 365613 - RNA, 19 nt, Homo sapiens
  misc_RNA (1)...(19): siRNA sense strand
caucaacagacaagaccaa

SEQ ID NO: 365614 - RNA, 19 nt, Homo sapiens
  misc_RNA (1)...(19): siRNA sense strand
gaucugacucuggaagcuu

SEQ ID NO: 365615 - RNA, 19 nt, Homo sapiens
  misc_RNA (1)...(19): siRNA sense strand
gcgggaggaaguggauuaa

SEQ ID NO: 365616 - RNA, 19 nt, Homo sapiens
  misc_RNA (1)...(19): siRNA sense strand
agaccaagcgggaggaagu

SEQ ID NO: 365617 - RNA, 19 nt, Homo sapiens
  misc_RNA (1)...(19): siRNA sense strand
gaagugguaccagagcaua

SEQ ID NO: 365618 - RNA, 19 nt, Homo sapiens
  misc_RNA (1)...(19): siRNA sense strand
ucuggaagcuuggccauca

SEQ ID NO: 365619 - RNA, 19 nt, Homo sapiens
  misc_RNA (1)...(19): siRNA sense strand
cuccaugacuccaauccaa

SEQ ID NO: 365620 - RNA, 19 nt, Homo sapiens
  misc_RNA (1)...(19): siRNA sense strand
caccguacccuuccuaugg

SEQ ID NO: 365621 - RNA, 19 nt, Homo sapiens
  misc_RNA (1)...(19): siRNA sense strand
caacacuccaugacuccaa

SEQ ID NO: 365622 - RNA, 19 nt, Homo sapiens
  misc_RNA (1)...(19): siRNA sense strand
ggaccuggauuuuauuugc

SEQ ID NO: 365623 - RNA, 19 nt, Homo sapiens
  misc_RNA (1)...(19): siRNA sense strand
aagcuuggccaucaacaga

SEQ ID NO: 365624 - RNA, 19 nt, Homo sapiens
  misc_RNA (1)...(19): siRNA sense strand
gcuuggccaucaacagaca

SEQ ID NO: 365625 - RNA, 19 nt, Homo sapiens
  misc_RNA (1)...(19): siRNA sense strand
caucaacagacaagaccaa

SEQ ID NO: 365626 - RNA, 19 nt, Homo sapiens
  misc_RNA (1)...(19): siRNA sense strand
gaucugacucuggaagcuu

SEQ ID NO: 365627 - RNA, 19 nt, Homo sapiens
  misc_RNA (1)...(19): siRNA sense strand
gcgggaggaaguggauuaa

SEQ ID NO: 365628 - RNA, 19 nt, Homo sapiens
  misc_RNA (1)...(19): siRNA sense strand
agaccaagcgggaggaagu

SEQ ID NO: 365629 - RNA, 19 nt, Homo sapiens
  misc_RNA (1)...(19): siRNA sense strand
gaagugguaccagagcaua

SEQ ID NO: 365630 - RNA, 19 nt, Homo sapiens
  misc_RNA (1)...(19): siRNA sense strand
ucuggaagcuuggccauca

SEQ ID NO: 365631 - RNA, 19 nt, Homo sapiens
  misc_RNA (1)...(19): siRNA sense strand
cuccaugacuccaauccaa

SEQ ID NO: 365632 - RNA, 19 nt, Homo sapiens
  misc_RNA (1)...(19): siRNA sense strand
caccguacccuuccuaugg

SEQ ID NO: 365633 - RNA, 19 nt, Homo sapiens
  misc_RNA (1)...(19): siRNA sense strand
caacacuccaugacuccaa

SEQ ID NO: 365634 - RNA, 19 nt, Homo sapiens
  misc_RNA (1)...(19): siRNA sense strand
ggaccuggauuuuauuugc

SEQ ID NO: 365635 - RNA, 19 nt, Homo sapiens
  misc_RNA (1)...(19): siRNA sense strand
aagcuuggccaucaacaga

SEQ ID NO: 365636 - RNA, 19 nt, Homo sapiens
  misc_RNA (1)...(19): siRNA sense strand
gcuuggccaucaacagaca

SEQ ID NO: 365637 - RNA, 19 nt, Homo sapiens
  misc_RNA (1)...(19): siRNA sense strand
caucaacagacaagaccaa

SEQ ID NO: 365638 - RNA, 19 nt, Homo sapiens
  misc_RNA (1)...(19): siRNA sense strand
gaucugacucuggaagcuu

SEQ ID NO: 365639 - RNA, 19 nt, Homo sapiens
  misc_RNA (1)...(19): siRNA sense strand
gcgggaggaaguggauuaa

SEQ ID NO: 365640 - RNA, 19 nt, Homo sapiens
  misc_RNA (1)...(19): siRNA sense strand
agaccaagcgggaggaagu

SEQ ID NO: 365641 - RNA, 19 nt, Homo sapiens
  misc_RNA (1)...(19): siRNA sense strand
gaacaugaguaaugacgau

SEQ ID NO: 365642 - RNA, 19 nt, Homo sapiens
  misc_RNA (1)...(19): siRNA sense strand
gcuauaaguucuucuucaa

SEQ ID NO: 365643 - RNA, 19 nt, Homo sapiens
  misc_RNA (1)...(19): siRNA sense strand
gccaggagauauguuguua

SEQ ID NO: 365644 - RNA, 19 nt, Homo sapiens
  misc_RNA (1)...(19): siRNA sense strand
uacauuggcucuaucauga

SEQ ID NO: 365645 - RNA, 19 nt, Homo sapiens
  misc_RNA (1)...(19): siRNA sense strand
gcauguggcucaagauuac

SEQ ID NO: 365646 - RNA, 19 nt, Homo sapiens
  misc_RNA (1)...(19): siRNA sense strand
aggagaaccuggacaauga

SEQ ID NO: 365647 - RNA, 19 nt, Homo sapiens
  misc_RNA (1)...(19): siRNA sense strand
gaggagaucucggaugaca

SEQ ID NO: 365648 - RNA, 19 nt, Homo sapiens
  misc_RNA (1)...(19): siRNA sense strand
gauagcucauccacccuua

SEQ ID NO: 365649 - RNA, 19 nt, Homo sapiens
  misc_RNA (1)...(19): siRNA sense strand
ggaugacaaugccaagcua

SEQ ID NO: 365650 - RNA, 19 nt, Homo sapiens
  misc_RNA (1)...(19): siRNA sense strand
ggagaccaccagcuucuuu

SEQ ID NO: 365651 - RNA, 19 nt, Homo sapiens
  misc_RNA (1)...(19): siRNA sense strand
caggagauauguuguuaca

SEQ ID NO: 365652 - RNA, 19 nt, Homo sapiens
  misc_RNA (1)...(19): siRNA sense strand
gguaaacgagaucaacuuu

SEQ ID NO: 365653 - RNA, 19 nt, Homo sapiens
  misc_RNA (1)...(19): siRNA sense strand
caaccugucucuccacgau

SEQ ID NO: 365654 - RNA, 19 nt, Homo sapiens
  misc_RNA (1)...(19): siRNA sense strand
ggagaucucggaugacaau

SEQ ID NO: 365655 - RNA, 19 nt, Homo sapiens
  misc_RNA (1)...(19): siRNA sense strand
aggaggagaucucggauga

SEQ ID NO: 365656 - RNA, 19 nt, Homo sapiens
  misc_RNA (1)...(19): siRNA sense strand
caacauggccaaccugucu

SEQ ID NO: 365657 - RNA, 19 nt, Homo sapiens
  misc_RNA (1)...(19): siRNA sense strand
gaccgcauguggcucaaga

SEQ ID NO: 365658 - RNA, 19 nt, Homo sapiens
  misc_RNA (1)...(19): siRNA sense strand
gcaucuacauuggcucuau

SEQ ID NO: 365659 - RNA, 19 nt, Homo sapiens
  misc_RNA (1)...(19): siRNA sense strand
gcagugcuacuacaucuuc

SEQ ID NO: 365660 - RNA, 19 nt, Homo sapiens
  misc_RNA (1)...(19): siRNA sense strand
gagacgccguaccuuguga

SEQ ID NO: 365661 - RNA, 19 nt, Homo sapiens
  misc_RNA (1)...(19): siRNA sense strand
gaucaucuaccacuuggau

SEQ ID NO: 365662 - RNA, 19 nt, Homo sapiens
  misc_RNA (1)...(19): siRNA sense strand
gagcgguccucguccuuca

SEQ ID NO: 365663 - RNA, 19 nt, Homo sapiens
  misc_RNA (1)...(19): siRNA sense strand
gagcaugcaacccggcuaa

SEQ ID NO: 365664 - RNA, 19 nt, Homo sapiens
  misc_RNA (1)...(19): siRNA sense strand
gaaccuggacaaugacaca

SEQ ID NO: 365665 - RNA, 19 nt, Homo sapiens
  misc_RNA (1)...(19): siRNA sense strand
ucaacaagaucaccuucuc

SEQ ID NO: 365666 - RNA, 19 nt, Homo sapiens
  misc_RNA (1)...(19): siRNA sense strand
gcaacccggcuaaauggaa

SEQ ID NO: 365667 - RNA, 19 nt, Homo sapiens
  misc_RNA (1)...(19): siRNA sense strand
gccauaccgucaacaagau

SEQ ID NO: 365668 - RNA, 19 nt, Homo sapiens
  misc_RNA (1)...(19): siRNA sense strand
uugagaacaugaguaauga

SEQ ID NO: 365669 - RNA, 19 nt, Homo sapiens
  misc_RNA (1)...(19): siRNA sense strand
gaagguuucucggauugag

SEQ ID NO: 365670 - RNA, 19 nt, Homo sapiens
  misc_RNA (1)...(19): siRNA sense strand
cgacccagcuauaaguucu

SEQ ID NO: 365671 - RNA, 19 nt, Homo sapiens
  misc_RNA (1)...(19): siRNA sense strand
gcuccuccaucaccaguuc

SEQ ID NO: 365672 - RNA, 19 nt, Homo sapiens
  misc_RNA (1)...(19): siRNA sense strand
cacggucacucucaacaug

SEQ ID NO: 365673 - RNA, 19 nt, Homo sapiens
  misc_RNA (1)...(19): siRNA sense strand
cuagacgacuuccacuugu

SEQ ID NO: 365674 - RNA, 19 nt, Homo sapiens
  misc_RNA (1)...(19): siRNA sense strand
ccacgugguugcuucacau

SEQ ID NO: 365675 - RNA, 19 nt, Homo sapiens
  misc_RNA (1)...(19): siRNA sense strand
guaaacgagaucaacuuug

SEQ ID NO: 365676 - RNA, 19 nt, Homo sapiens
  misc_RNA (1)...(19): siRNA sense strand
cuacauuggcucuaucaug

SEQ ID NO: 365677 - RNA, 19 nt, Homo sapiens
  misc_RNA (1)...(19): siRNA sense strand
uaccaucccuaaugcuuuc

SEQ ID NO: 365678 - RNA, 19 nt, Homo sapiens
  misc_RNA (1)...(19): siRNA sense strand
caugcaacccggcuaaaug

SEQ ID NO: 365679 - RNA, 19 nt, Homo sapiens
  misc_RNA (1)...(19): siRNA sense strand
ccuagacgacuuccacuug

SEQ ID NO: 365680 - RNA, 19 nt, Homo sapiens
  misc_RNA (1)...(19): siRNA sense strand
uggacuggcuguaccacaa

SEQ ID NO: 365681 - RNA, 19 nt, Homo sapiens
  misc_RNA (1)...(19): siRNA sense strand
ucaagauuaccaucccuaa

SEQ ID NO: 365682 - RNA, 19 nt, Homo sapiens
  misc_RNA (1)...(19): siRNA sense strand
gagaccaccagcuucuuug

SEQ ID NO: 365683 - RNA, 19 nt, Homo sapiens
  misc_RNA (1)...(19): siRNA sense strand
gagcugccaccaccuaugg

SEQ ID NO: 365684 - RNA, 19 nt, Homo sapiens
  misc_RNA (1)...(19): siRNA sense strand
cgcauguggcucaagauua

SEQ ID NO: 365685 - RNA, 19 nt, Homo sapiens
  misc_RNA (1)...(19): siRNA sense strand
ucaccuuggcggacuuuaa

SEQ ID NO: 365686 - RNA, 19 nt, Homo sapiens
  misc_RNA (1)...(19): siRNA sense strand
gcaucgagccaggagauau

SEQ ID NO: 365687 - RNA, 19 nt, Homo sapiens
  misc_RNA (1)...(19): siRNA sense strand
cagcuucuuugacucagau

SEQ ID NO: 365688 - RNA, 19 nt, Homo sapiens
  misc_RNA (1)...(19): siRNA sense strand
gcaugcaacccggcuaaau

SEQ ID NO: 365689 - RNA, 19 nt, Homo sapiens
  misc_RNA (1)...(19): siRNA sense strand
guucagcagcuccacagaa

SEQ ID NO: 365690 - RNA, 19 nt, Homo sapiens
  misc_RNA (1)...(19): siRNA sense strand
ggagacgccguaccuugug

SEQ ID NO: 365691 - RNA, 19 nt, Homo sapiens
  misc_RNA (1)...(19): siRNA sense strand
gcagcgacccagcuauaag

SEQ ID NO: 365692 - RNA, 19 nt, Homo sapiens
  misc_RNA (1)...(19): siRNA sense strand
cgccauaccgucaacaaga

SEQ ID NO: 365693 - RNA, 19 nt, Homo sapiens
  misc_RNA (1)...(19): siRNA sense strand
ggacuggcuguaccacaau

SEQ ID NO: 365694 - RNA, 19 nt, Homo sapiens
  misc_RNA (1)...(19): siRNA sense strand
uuugagaacaugaguaaug

SEQ ID NO: 365695 - RNA, 19 nt, Homo sapiens
  misc_RNA (1)...(19): siRNA sense strand
gcccaucacccugacugua

SEQ ID NO: 365696 - RNA, 19 nt, Homo sapiens
  misc_RNA (1)...(19): siRNA sense strand
caucuacauuggcucuauc

SEQ ID NO: 365697 - RNA, 19 nt, Homo sapiens
  misc_RNA (1)...(19): siRNA sense strand
gacccaaguccacgugguu

SEQ ID NO: 365698 - RNA, 19 nt, Homo sapiens
  misc_RNA (1)...(19): siRNA sense strand
gacggacucuuuggugucu

SEQ ID NO: 365699 - RNA, 19 nt, Homo sapiens
  misc_RNA (1)...(19): siRNA sense strand
gcagcgaucggaggaagga

SEQ ID NO: 365700 - RNA, 19 nt, Homo sapiens
  misc_RNA (1)...(19): siRNA sense strand
ccacuuguccauccacagu

SEQ ID NO: 365701 - RNA, 19 nt, Homo sapiens
  misc_RNA (1)...(19): siRNA sense strand
caucgagccaggagauaug

SEQ ID NO: 365702 - RNA, 19 nt, Homo sapiens
  misc_RNA (1)...(19): siRNA sense strand
uugcagcgacccagcuaua

SEQ ID NO: 365703 - RNA, 19 nt, Homo sapiens
  misc_RNA (1)...(19): siRNA sense strand
ggcggaagcagaagguuuc

SEQ ID NO: 365704 - RNA, 19 nt, Homo sapiens
  misc_RNA (1)...(19): siRNA sense strand
cgccguaccuugugaagcu

SEQ ID NO: 365705 - RNA, 19 nt, Homo sapiens
  misc_RNA (1)...(19): siRNA sense strand
cagagcgccuagacgacuu

SEQ ID NO: 365706 - RNA, 19 nt, Homo sapiens
  misc_RNA (1)...(19): siRNA sense strand
uccaccagcuccuccauca

SEQ ID NO: 365707 - RNA, 19 nt, Homo sapiens
  misc_RNA (1)...(19): siRNA sense strand
cgagccaggagauauguug

SEQ ID NO: 365708 - RNA, 19 nt, Homo sapiens
  misc_RNA (1)...(19): siRNA sense strand
ggugaccucugcggcaaca

SEQ ID NO: 365709 - RNA, 19 nt, Homo sapiens
  misc_RNA (1)...(19): siRNA sense strand
cauuggcucuaucaugaag

SEQ ID NO: 365710 - RNA, 19 nt, Homo sapiens
  misc_RNA (1)...(19): siRNA sense strand
cagcgacccagcuauaagu

SEQ ID NO: 365711 - RNA, 19 nt, Homo sapiens
  misc_RNA (1)...(19): siRNA sense strand
ccgcauguggcucaagauu

SEQ ID NO: 365712 - RNA, 19 nt, Homo sapiens
  misc_RNA (1)...(19): siRNA sense strand
caugaguaaugacgaugca

SEQ ID NO: 365713 - RNA, 19 nt, Homo sapiens
  misc_RNA (1)...(19): siRNA sense strand
acuuugagaacaugaguaa

SEQ ID NO: 365714 - RNA, 19 nt, Homo sapiens
  misc_RNA (1)...(19): siRNA sense strand
gugaguucuuuguggaugu

SEQ ID NO: 365715 - RNA, 19 nt, Homo sapiens
  misc_RNA (1)...(19): siRNA sense strand
uuaccaucccuaaugcuuu

SEQ ID NO: 365716 - RNA, 19 nt, Homo sapiens
  misc_RNA (1)...(19): siRNA sense strand
uagcucauccacccuuaug

SEQ ID NO: 365717 - RNA, 19 nt, Homo sapiens
  misc_RNA (1)...(19): siRNA sense strand
ggagcugccaccaccuaug

SEQ ID NO: 365718 - RNA, 19 nt, Homo sapiens
  misc_RNA (1)...(19): siRNA sense strand
gcgaucggaggaaggagaa

SEQ ID NO: 365719 - RNA, 19 nt, Homo sapiens
  misc_RNA (1)...(19): siRNA sense strand
gacuggcuguaccacaaug

SEQ ID NO: 365720 - RNA, 19 nt, Homo sapiens
  misc_RNA (1)...(19): siRNA sense strand
caacuuugagaacaugagu

SEQ ID NO: 365721 - RNA, 19 nt, Homo sapiens
  misc_RNA (1)...(19): siRNA sense strand
cggcggaagcagaagguuu

SEQ ID NO: 365722 - RNA, 19 nt, Homo sapiens
  misc_RNA (1)...(19): siRNA sense strand
gcucagagguuccacauca

SEQ ID NO: 365723 - RNA, 19 nt, Homo sapiens
  misc_RNA (1)...(19): siRNA sense strand
ggacagauguucucuacuc

SEQ ID NO: 365724 - RNA, 19 nt, Homo sapiens
  misc_RNA (1)...(19): siRNA sense strand
ggccagagcuucucagugu

SEQ ID NO: 365725 - RNA, 19 nt, Homo sapiens
  misc_RNA (1)...(19): siRNA sense strand
gugcagagcucagauuuca

SEQ ID NO: 365726 - RNA, 19 nt, Homo sapiens
  misc_RNA (1)...(19): siRNA sense strand
gucagcaccuguuugaaua

SEQ ID NO: 365727 - RNA, 19 nt, Homo sapiens
  misc_RNA (1)...(19): siRNA sense strand
gacauugccuuccacuuca

SEQ ID NO: 365728 - RNA, 19 nt, Homo sapiens
  misc_RNA (1)...(19): siRNA sense strand
acacaugccuuuccagaag

SEQ ID NO: 365729 - RNA, 19 nt, Homo sapiens
  misc_RNA (1)...(19): siRNA sense strand
gaggguacguggugugcaa

SEQ ID NO: 365730 - RNA, 19 nt, Homo sapiens
  misc_RNA (1)...(19): siRNA sense strand
ggucagcaccuguuugaau

SEQ ID NO: 365731 - RNA, 19 nt, Homo sapiens
  misc_RNA (1)...(19): siRNA sense strand
cagguuugcugugaacuuu

SEQ ID NO: 365732 - RNA, 19 nt, Homo sapiens
  misc_RNA (1)...(19): siRNA sense strand
gcucagauuucaaggugau

SEQ ID NO: 365733 - RNA, 19 nt, Homo sapiens
  misc_RNA (1)...(19): siRNA sense strand
ugacauugccuuccacuuc

SEQ ID NO: 365734 - RNA, 19 nt, Homo sapiens
  misc_RNA (1)...(19): siRNA sense strand
gugcagcuguccuacauca

SEQ ID NO: 365735 - RNA, 19 nt, Homo sapiens
  misc_RNA (1)...(19): siRNA sense strand
gcaccuguuugaauacuac

SEQ ID NO: 365736 - RNA, 19 nt, Homo sapiens
  misc_RNA (1)...(19): siRNA sense strand
gcagagcucagauuucaag

SEQ ID NO: 365737 - RNA, 19 nt, Homo sapiens
  misc_RNA (1)...(19): siRNA sense strand
ggacuucagaucacuguca

SEQ ID NO: 365738 - RNA, 19 nt, Homo sapiens
  misc_RNA (1)...(19): siRNA sense strand
ugaggaaccugcccaccau

SEQ ID NO: 365739 - RNA, 19 nt, Homo sapiens
  misc_RNA (1)...(19): siRNA sense strand
ggacggacuucagaucacu

SEQ ID NO: 365740 - RNA, 19 nt, Homo sapiens
  misc_RNA (1)...(19): siRNA sense strand
gcaacacccagaucgacaa

SEQ ID NO: 365741 - RNA, 19 nt, Homo sapiens
  misc_RNA (1)...(19): siRNA sense strand
gacuucagaucacugucaa

SEQ ID NO: 365742 - RNA, 19 nt, Homo sapiens
  misc_RNA (1)...(19): siRNA sense strand
gcucugugcagcuguccua

SEQ ID NO: 365743 - RNA, 19 nt, Homo sapiens
  misc_RNA (1)...(19): siRNA sense strand
ccgccuauccgaugccuuu

SEQ ID NO: 365744 - RNA, 19 nt, Homo sapiens
  misc_RNA (1)...(19): siRNA sense strand
gccaacccggcucccauua

SEQ ID NO: 365745 - RNA, 19 nt, Homo sapiens
  misc_RNA (1)...(19): siRNA sense strand
agacagucauccacacagu

SEQ ID NO: 365746 - RNA, 19 nt, Homo sapiens
  misc_RNA (1)...(19): siRNA sense strand
gaaccugcccaccaucaac

SEQ ID NO: 365747 - RNA, 19 nt, Homo sapiens
  misc_RNA (1)...(19): siRNA sense strand
ggaaccugcccaccaucaa

SEQ ID NO: 365748 - RNA, 19 nt, Homo sapiens
  misc_RNA (1)...(19): siRNA sense strand
cuggacagauguucucuac

SEQ ID NO: 365749 - RNA, 19 nt, Homo sapiens
  misc_RNA (1)...(19): siRNA sense strand
acacccagaucgacaacuc

SEQ ID NO: 365750 - RNA, 19 nt, Homo sapiens
  misc_RNA (1)...(19): siRNA sense strand
gaguccagcuguccccuuu

SEQ ID NO: 365751 - RNA, 19 nt, Homo sapiens
  misc_RNA (1)...(19): siRNA sense strand
ggauggucagcaccuguuu

SEQ ID NO: 365752 - RNA, 19 nt, Homo sapiens
  misc_RNA (1)...(19): siRNA sense strand
caacccggcucccauuacc

SEQ ID NO: 365753 - RNA, 19 nt, Homo sapiens
  misc_RNA (1)...(19): siRNA sense strand
caggacggacuucagauca

SEQ ID NO: 365754 - RNA, 19 nt, Homo sapiens
  misc_RNA (1)...(19): siRNA sense strand
ggagggcuguacccaucca

SEQ ID NO: 365755 - RNA, 19 nt, Homo sapiens
  misc_RNA (1)...(19): siRNA sense strand
ugaacgggauccucuucgu

SEQ ID NO: 365756 - RNA, 19 nt, Homo sapiens
  misc_RNA (1)...(19): siRNA sense strand
gauggucagcaccuguuug

SEQ ID NO: 365757 - RNA, 19 nt, Homo sapiens
  misc_RNA (1)...(19): siRNA sense strand
ggauccucuucgugcagua

SEQ ID NO: 365758 - RNA, 19 nt, Homo sapiens
  misc_RNA (1)...(19): siRNA sense strand
gcucagagguuccacauca

SEQ ID NO: 365759 - RNA, 19 nt, Homo sapiens
  misc_RNA (1)...(19): siRNA sense strand
ggacagauguucucuacuc

SEQ ID NO: 365760 - RNA, 19 nt, Homo sapiens
  misc_RNA (1)...(19): siRNA sense strand
ggccagagcuucucagugu

SEQ ID NO: 365761 - RNA, 19 nt, Homo sapiens
  misc_RNA (1)...(19): siRNA sense strand
gugcagagcucagauuuca

SEQ ID NO: 365762 - RNA, 19 nt, Homo sapiens
  misc_RNA (1)...(19): siRNA sense strand
gucagcaccuguuugaaua

SEQ ID NO: 365763 - RNA, 19 nt, Homo sapiens
  misc_RNA (1)...(19): siRNA sense strand
gacauugccuuccacuuca

SEQ ID NO: 365764 - RNA, 19 nt, Homo sapiens
  misc_RNA (1)...(19): siRNA sense strand
acacaugccuuuccagaag

SEQ ID NO: 365765 - RNA, 19 nt, Homo sapiens
  misc_RNA (1)...(19): siRNA sense strand
gaggguacguggugugcaa

SEQ ID NO: 365766 - RNA, 19 nt, Homo sapiens
  misc_RNA (1)...(19): siRNA sense strand
ggucagcaccuguuugaau

SEQ ID NO: 365767 - RNA, 19 nt, Homo sapiens
  misc_RNA (1)...(19): siRNA sense strand
cagguuugcugugaacuuu

SEQ ID NO: 365768 - RNA, 19 nt, Homo sapiens
  misc_RNA (1)...(19): siRNA sense strand
gcucagauuucaaggugau

SEQ ID NO: 365769 - RNA, 19 nt, Homo sapiens
  misc_RNA (1)...(19): siRNA sense strand
ugacauugccuuccacuuc

SEQ ID NO: 365770 - RNA, 19 nt, Homo sapiens
  misc_RNA (1)...(19): siRNA sense strand
gugcagcuguccuacauca

SEQ ID NO: 365771 - RNA, 19 nt, Homo sapiens
  misc_RNA (1)...(19): siRNA sense strand
gcaccuguuugaauacuac

SEQ ID NO: 365772 - RNA, 19 nt, Homo sapiens
  misc_RNA (1)...(19): siRNA sense strand
gcagagcucagauuucaag

SEQ ID NO: 365773 - RNA, 19 nt, Homo sapiens
  misc_RNA (1)...(19): siRNA sense strand
ggacuucagaucacuguca

SEQ ID NO: 365774 - RNA, 19 nt, Homo sapiens
  misc_RNA (1)...(19): siRNA sense strand
ugaggaaccugcccaccau

SEQ ID NO: 365775 - RNA, 19 nt, Homo sapiens
  misc_RNA (1)...(19): siRNA sense strand
ggacggacuucagaucacu

SEQ ID NO: 365776 - RNA, 19 nt, Homo sapiens
  misc_RNA (1)...(19): siRNA sense strand
gcaacacccagaucgacaa

SEQ ID NO: 365777 - RNA, 19 nt, Homo sapiens
  misc_RNA (1)...(19): siRNA sense strand
gacuucagaucacugucaa

SEQ ID NO: 365778 - RNA, 19 nt, Homo sapiens
  misc_RNA (1)...(19): siRNA sense strand
gcucugugcagcuguccua

SEQ ID NO: 365779 - RNA, 19 nt, Homo sapiens
  misc_RNA (1)...(19): siRNA sense strand
ccgccuauccgaugccuuu

SEQ ID NO: 365780 - RNA, 19 nt, Homo sapiens
  misc_RNA (1)...(19): siRNA sense strand
gccaacccggcucccauua

SEQ ID NO: 365781 - RNA, 19 nt, Homo sapiens
  misc_RNA (1)...(19): siRNA sense strand
agacagucauccacacagu

SEQ ID NO: 365782 - RNA, 19 nt, Homo sapiens
  misc_RNA (1)...(19): siRNA sense strand
gaaccugcccaccaucaac

SEQ ID NO: 365783 - RNA, 19 nt, Homo sapiens
  misc_RNA (1)...(19): siRNA sense strand
ggaaccugcccaccaucaa

SEQ ID NO: 365784 - RNA, 19 nt, Homo sapiens
  misc_RNA (1)...(19): siRNA sense strand
cuggacagauguucucuac

SEQ ID NO: 365785 - RNA, 19 nt, Homo sapiens
  misc_RNA (1)...(19): siRNA sense strand
acacccagaucgacaacuc

SEQ ID NO: 365786 - RNA, 19 nt, Homo sapiens
  misc_RNA (1)...(19): siRNA sense strand
gaguccagcuguccccuuu

SEQ ID NO: 365787 - RNA, 19 nt, Homo sapiens
  misc_RNA (1)...(19): siRNA sense strand
ggauggucagcaccuguuu

SEQ ID NO: 365788 - RNA, 19 nt, Homo sapiens
  misc_RNA (1)...(19): siRNA sense strand
caacccggcucccauuacc

SEQ ID NO: 365789 - RNA, 19 nt, Homo sapiens
  misc_RNA (1)...(19): siRNA sense strand
caggacggacuucagauca

SEQ ID NO: 365790 - RNA, 19 nt, Homo sapiens
  misc_RNA (1)...(19): siRNA sense strand
ggagggcuguacccaucca

SEQ ID NO: 365791 - RNA, 19 nt, Homo sapiens
  misc_RNA (1)...(19): siRNA sense strand
ugaacgggauccucuucgu

SEQ ID NO: 365792 - RNA, 19 nt, Homo sapiens
  misc_RNA (1)...(19): siRNA sense strand
gauggucagcaccuguuug

SEQ ID NO: 365793 - RNA, 19 nt, Homo sapiens
  misc_RNA (1)...(19): siRNA sense strand
ggauccucuucgugcagua

SEQ ID NO: 365794 - RNA, 19 nt, Homo sapiens
  misc_RNA (1)...(19): siRNA sense strand
ccacuucucuggugaccuu

SEQ ID NO: 365795 - RNA, 19 nt, Homo sapiens
  misc_RNA (1)...(19): siRNA sense strand
ucuauuaccucuacugucu

SEQ ID NO: 365796 - RNA, 19 nt, Homo sapiens
  misc_RNA (1)...(19): siRNA sense strand
gguacgggccucucuggua

SEQ ID NO: 365797 - RNA, 19 nt, Homo sapiens
  misc_RNA (1)...(19): siRNA sense strand
gcgagaggguguacgucaa

SEQ ID NO: 365798 - RNA, 19 nt, Homo sapiens
  misc_RNA (1)...(19): siRNA sense strand
gcugggagacgacgaagga

SEQ ID NO: 365799 - RNA, 19 nt, Homo sapiens
  misc_RNA (1)...(19): siRNA sense strand
gcaggacggccucuauuac

SEQ ID NO: 365800 - RNA, 19 nt, Homo sapiens
  misc_RNA (1)...(19): siRNA sense strand
cgcaggacggccucuauua

SEQ ID NO: 365801 - RNA, 19 nt, Homo sapiens
  misc_RNA (1)...(19): siRNA sense strand
ggaggagccagaaacagau

SEQ ID NO: 365802 - RNA, 19 nt, Homo sapiens
  misc_RNA (1)...(19): siRNA sense strand
cgaaggaacaggcguuucu

SEQ ID NO: 365803 - RNA, 19 nt, Homo sapiens
  misc_RNA (1)...(19): siRNA sense strand
cauaggcgcuccgcugaag

SEQ ID NO: 365804 - RNA, 19 nt, Homo sapiens
  misc_RNA (1)...(19): siRNA sense strand
gggagacgacgaaggaaca

SEQ ID NO: 365805 - RNA, 19 nt, Homo sapiens
  misc_RNA (1)...(19): siRNA sense strand
gagaggguguacgucaaca

SEQ ID NO: 365806 - RNA, 19 nt, Homo sapiens
  misc_RNA (1)...(19): siRNA sense strand
aggaggagccagaaacaga

SEQ ID NO: 365807 - RNA, 19 nt, Homo sapiens
  misc_RNA (1)...(19): siRNA sense strand
gaggguguacgucaacauc

SEQ ID NO: 365808 - RNA, 19 nt, Homo sapiens
  misc_RNA (1)...(19): siRNA sense strand
gaaggaacaggcguuucug

SEQ ID NO: 365809 - RNA, 19 nt, Homo sapiens
  misc_RNA (1)...(19): siRNA sense strand
gacgaaggaacaggcguuu

SEQ ID NO: 365810 - RNA, 19 nt, Homo sapiens
  misc_RNA (1)...(19): siRNA sense strand
uggcugugcuggccuuagu

SEQ ID NO: 365811 - RNA, 19 nt, Homo sapiens
  misc_RNA (1)...(19): siRNA sense strand
ccagaggaggagccagaaa

SEQ ID NO: 365812 - RNA, 19 nt, Homo sapiens
  misc_RNA (1)...(19): siRNA sense strand
ccgcaggacggccucuauu

SEQ ID NO: 365813 - RNA, 19 nt, Homo sapiens
  misc_RNA (1)...(19): siRNA sense strand
ccacuucucuggugaccuu

SEQ ID NO: 365814 - RNA, 19 nt, Homo sapiens
  misc_RNA (1)...(19): siRNA sense strand
ggaggagccagaaacagau

SEQ ID NO: 365815 - RNA, 19 nt, Homo sapiens
  misc_RNA (1)...(19): siRNA sense strand
aggaggagccagaaacaga

SEQ ID NO: 365816 - RNA, 19 nt, Homo sapiens
  misc_RNA (1)...(19): siRNA sense strand
uggcugugcuggccuuagu

SEQ ID NO: 365817 - RNA, 19 nt, Homo sapiens
  misc_RNA (1)...(19): siRNA sense strand
ccagaggaggagccagaaa

SEQ ID NO: 365818 - RNA, 19 nt, Homo sapiens
  misc_RNA (1)...(19): siRNA sense strand
gcaaaugccuuuaaaccaa

SEQ ID NO: 365819 - RNA, 19 nt, Homo sapiens
  misc_RNA (1)...(19): siRNA sense strand
gaagacgugugaaccuaaa

SEQ ID NO: 365820 - RNA, 19 nt, Homo sapiens
  misc_RNA (1)...(19): siRNA sense strand
ccaaauauccuacugauca

SEQ ID NO: 365821 - RNA, 19 nt, Homo sapiens
  misc_RNA (1)...(19): siRNA sense strand
gaagcuguuuccuauauug

SEQ ID NO: 365822 - RNA, 19 nt, Homo sapiens
  misc_RNA (1)...(19): siRNA sense strand
gagauggacuggcucauag

SEQ ID NO: 365823 - RNA, 19 nt, Homo sapiens
  misc_RNA (1)...(19): siRNA sense strand
caaaugccuuuaaaccaaa

SEQ ID NO: 365824 - RNA, 19 nt, Homo sapiens
  misc_RNA (1)...(19): siRNA sense strand
caaccggccucauaggaaa

SEQ ID NO: 365825 - RNA, 19 nt, Homo sapiens
  misc_RNA (1)...(19): siRNA sense strand
ggagauggacuggcucaua

SEQ ID NO: 365826 - RNA, 19 nt, Homo sapiens
  misc_RNA (1)...(19): siRNA sense strand
ugagaacgccgaauauuga

SEQ ID NO: 365827 - RNA, 19 nt, Homo sapiens
  misc_RNA (1)...(19): siRNA sense strand
cagcgagucuuaugcuaaa

SEQ ID NO: 365828 - RNA, 19 nt, Homo sapiens
  misc_RNA (1)...(19): siRNA sense strand
gugcgacgcuggaacugua

SEQ ID NO: 365829 - RNA, 19 nt, Homo sapiens
  misc_RNA (1)...(19): siRNA sense strand
ccacggauuugacuauuuc

SEQ ID NO: 365830 - RNA, 19 nt, Homo sapiens
  misc_RNA (1)...(19): siRNA sense strand
gaaccacggauuugacuau

SEQ ID NO: 365831 - RNA, 19 nt, Homo sapiens
  misc_RNA (1)...(19): siRNA sense strand
acacugagaacgccgaaua

SEQ ID NO: 365832 - RNA, 19 nt, Homo sapiens
  misc_RNA (1)...(19): siRNA sense strand
gagaaaacagcgagucuua

SEQ ID NO: 365833 - RNA, 19 nt, Homo sapiens
  misc_RNA (1)...(19): siRNA sense strand
gcaaccggccucauaggaa

SEQ ID NO: 365834 - RNA, 19 nt, Homo sapiens
  misc_RNA (1)...(19): siRNA sense strand
guacuccuccuucggguuu

SEQ ID NO: 365835 - RNA, 19 nt, Homo sapiens
  misc_RNA (1)...(19): siRNA sense strand
aaacugcaaaugccuuuaa

SEQ ID NO: 365836 - RNA, 19 nt, Homo sapiens
  misc_RNA (1)...(19): siRNA sense strand
gugauaauguggaggagau

SEQ ID NO: 365837 - RNA, 19 nt, Homo sapiens
  misc_RNA (1)...(19): siRNA sense strand
caaauauccuacugaucau

SEQ ID NO: 365838 - RNA, 19 nt, Homo sapiens
  misc_RNA (1)...(19): siRNA sense strand
ggaacuguauccugaugag

SEQ ID NO: 365839 - RNA, 19 nt, Homo sapiens
  misc_RNA (1)...(19): siRNA sense strand
aaagucagcauggcuuaua

SEQ ID NO: 365840 - RNA, 19 nt, Homo sapiens
  misc_RNA (1)...(19): siRNA sense strand
gaaaacagcgagucuuaug

SEQ ID NO: 365841 - RNA, 19 nt, Homo sapiens
  misc_RNA (1)...(19): siRNA sense strand
ccauuucuccucuuccuuu

SEQ ID NO: 365842 - RNA, 19 nt, Homo sapiens
  misc_RNA (1)...(19): siRNA sense strand
uaaaccaaauauccuacug

SEQ ID NO: 365843 - RNA, 19 nt, Homo sapiens
  misc_RNA (1)...(19): siRNA sense strand
gaaaagucagcauggcuua

SEQ ID NO: 365844 - RNA, 19 nt, Homo sapiens
  misc_RNA (1)...(19): siRNA sense strand
cgaaaccacuuuugcaaga

SEQ ID NO: 365845 - RNA, 19 nt, Homo sapiens
  misc_RNA (1)...(19): siRNA sense strand
agggagacauuccuucaga

SEQ ID NO: 365846 - RNA, 19 nt, Homo sapiens
  misc_RNA (1)...(19): siRNA sense strand
ggccagaccugcgguuucu

SEQ ID NO: 365847 - RNA, 19 nt, Homo sapiens
  misc_RNA (1)...(19): siRNA sense strand
ggagacauuccuucagauc

SEQ ID NO: 365848 - RNA, 19 nt, Homo sapiens
  misc_RNA (1)...(19): siRNA sense strand
cugaagacgugugaaccua

SEQ ID NO: 365849 - RNA, 19 nt, Homo sapiens
  misc_RNA (1)...(19): siRNA sense strand
gggagacauuccuucagau

SEQ ID NO: 365850 - RNA, 19 nt, Homo sapiens
  misc_RNA (1)...(19): siRNA sense strand
aaccaaauauccuacugau

SEQ ID NO: 365851 - RNA, 19 nt, Homo sapiens
  misc_RNA (1)...(19): siRNA sense strand
gagacauuccuucagauca

SEQ ID NO: 365852 - RNA, 19 nt, Homo sapiens
  misc_RNA (1)...(19): siRNA sense strand
ugaagacgugugaaccuaa

SEQ ID NO: 365853 - RNA, 19 nt, Homo sapiens
  misc_RNA (1)...(19): siRNA sense strand
aaaccaaauauccuacuga

SEQ ID NO: 365854 - RNA, 19 nt, Homo sapiens
  misc_RNA (1)...(19): siRNA sense strand
cugagaacgccgaauauug

SEQ ID NO: 365855 - RNA, 19 nt, Homo sapiens
  misc_RNA (1)...(19): siRNA sense strand
cgagucuuaugcuaaagga

SEQ ID NO: 365856 - RNA, 19 nt, Homo sapiens
  misc_RNA (1)...(19): siRNA sense strand
agacauuccuucagaucag

SEQ ID NO: 365857 - RNA, 19 nt, Homo sapiens
  misc_RNA (1)...(19): siRNA sense strand
acuguauccugaugagaaa

SEQ ID NO: 365858 - RNA, 19 nt, Homo sapiens
  misc_RNA (1)...(19): siRNA sense strand
gaacuguauccugaugaga

SEQ ID NO: 365859 - RNA, 19 nt, Homo sapiens
  misc_RNA (1)...(19): siRNA sense strand
gaaaccacuuuugcaagaa

SEQ ID NO: 365860 - RNA, 19 nt, Homo sapiens
  misc_RNA (1)...(19): siRNA sense strand
gaacgaaaccacuuuugca

SEQ ID NO: 365861 - RNA, 19 nt, Homo sapiens
  misc_RNA (1)...(19): siRNA sense strand
gggaacaauacacugagaa

SEQ ID NO: 365862 - RNA, 19 nt, Homo sapiens
  misc_RNA (1)...(19): siRNA sense strand
ugaccagcuugcagaggaa

SEQ ID NO: 365863 - RNA, 19 nt, Homo sapiens
  misc_RNA (1)...(19): siRNA sense strand
ggaacaauacacugagaac

SEQ ID NO: 365864 - RNA, 19 nt, Homo sapiens
  misc_RNA (1)...(19): siRNA sense strand
acagcgagucuuaugcuaa

SEQ ID NO: 365865 - RNA, 19 nt, Homo sapiens
  misc_RNA (1)...(19): siRNA sense strand
ucacagggagacauuccuu

SEQ ID NO: 365866 - RNA, 19 nt, Homo sapiens
  misc_RNA (1)...(19): siRNA sense strand
ggcgugggcugccuguuuu

SEQ ID NO: 365867 - RNA, 19 nt, Homo sapiens
  misc_RNA (1)...(19): siRNA sense strand
gaauauugaccagcuugca

SEQ ID NO: 365868 - RNA, 19 nt, Homo sapiens
  misc_RNA (1)...(19): siRNA sense strand
ccagaccugcgguuucuuc

SEQ ID NO: 365869 - RNA, 19 nt, Homo sapiens
  misc_RNA (1)...(19): siRNA sense strand
ccuucacgcucacaaacga

SEQ ID NO: 365870 - RNA, 19 nt, Homo sapiens
  misc_RNA (1)...(19): siRNA sense strand
accacggauuugacuauuu

SEQ ID NO: 365871 - RNA, 19 nt, Homo sapiens
  misc_RNA (1)...(19): siRNA sense strand
aaccacggauuugacuauu

SEQ ID NO: 365872 - RNA, 19 nt, Homo sapiens
  misc_RNA (1)...(19): siRNA sense strand
aacagcgagucuuaugcua

SEQ ID NO: 365873 - RNA, 19 nt, Homo sapiens
  misc_RNA (1)...(19): siRNA sense strand
aagucagcauggcuuauau

SEQ ID NO: 365874 - RNA, 19 nt, Homo sapiens
  misc_RNA (1)...(19): siRNA sense strand
aacugcaaaugccuuuaaa

SEQ ID NO: 365875 - RNA, 19 nt, Homo sapiens
  misc_RNA (1)...(19): siRNA sense strand
gcaaaugccuuuaaaccaa

SEQ ID NO: 365876 - RNA, 19 nt, Homo sapiens
  misc_RNA (1)...(19): siRNA sense strand
gaagacgugugaaccuaaa

SEQ ID NO: 365877 - RNA, 19 nt, Homo sapiens
  misc_RNA (1)...(19): siRNA sense strand
ccaaauauccuacugauca

SEQ ID NO: 365878 - RNA, 19 nt, Homo sapiens
  misc_RNA (1)...(19): siRNA sense strand
gaagcuguuuccuauauug

SEQ ID NO: 365879 - RNA, 19 nt, Homo sapiens
  misc_RNA (1)...(19): siRNA sense strand
gagauggacuggcucauag

SEQ ID NO: 365880 - RNA, 19 nt, Homo sapiens
  misc_RNA (1)...(19): siRNA sense strand
caaaugccuuuaaaccaaa

SEQ ID NO: 365881 - RNA, 19 nt, Homo sapiens
  misc_RNA (1)...(19): siRNA sense strand
caaccggccucauaggaaa

SEQ ID NO: 365882 - RNA, 19 nt, Homo sapiens
  misc_RNA (1)...(19): siRNA sense strand
ggagauggacuggcucaua

SEQ ID NO: 365883 - RNA, 19 nt, Homo sapiens
  misc_RNA (1)...(19): siRNA sense strand
ugagaacgccgaauauuga

SEQ ID NO: 365884 - RNA, 19 nt, Homo sapiens
  misc_RNA (1)...(19): siRNA sense strand
cagcgagucuuaugcuaaa

SEQ ID NO: 365885 - RNA, 19 nt, Homo sapiens
  misc_RNA (1)...(19): siRNA sense strand
gugcgacgcuggaacugua

SEQ ID NO: 365886 - RNA, 19 nt, Homo sapiens
  misc_RNA (1)...(19): siRNA sense strand
ccacggauuugacuauuuc

SEQ ID NO: 365887 - RNA, 19 nt, Homo sapiens
  misc_RNA (1)...(19): siRNA sense strand
gaaccacggauuugacuau

SEQ ID NO: 365888 - RNA, 19 nt, Homo sapiens
  misc_RNA (1)...(19): siRNA sense strand
acacugagaacgccgaaua

SEQ ID NO: 365889 - RNA, 19 nt, Homo sapiens
  misc_RNA (1)...(19): siRNA sense strand
gagaaaacagcgagucuua

SEQ ID NO: 365890 - RNA, 19 nt, Homo sapiens
  misc_RNA (1)...(19): siRNA sense strand
gcaaccggccucauaggaa

SEQ ID NO: 365891 - RNA, 19 nt, Homo sapiens
  misc_RNA (1)...(19): siRNA sense strand
guacuccuccuucggguuu

SEQ ID NO: 365892 - RNA, 19 nt, Homo sapiens
  misc_RNA (1)...(19): siRNA sense strand
aaacugcaaaugccuuuaa

SEQ ID NO: 365893 - RNA, 19 nt, Homo sapiens
  misc_RNA (1)...(19): siRNA sense strand
gugauaauguggaggagau

SEQ ID NO: 365894 - RNA, 19 nt, Homo sapiens
  misc_RNA (1)...(19): siRNA sense strand
caaauauccuacugaucau

SEQ ID NO: 365895 - RNA, 19 nt, Homo sapiens
  misc_RNA (1)...(19): siRNA sense strand
ggaacuguauccugaugag

SEQ ID NO: 365896 - RNA, 19 nt, Homo sapiens
  misc_RNA (1)...(19): siRNA sense strand
aaagucagcauggcuuaua

SEQ ID NO: 365897 - RNA, 19 nt, Homo sapiens
  misc_RNA (1)...(19): siRNA sense strand
gaaaacagcgagucuuaug

SEQ ID NO: 365898 - RNA, 19 nt, Homo sapiens
  misc_RNA (1)...(19): siRNA sense strand
ccauuucuccucuuccuuu

SEQ ID NO: 365899 - RNA, 19 nt, Homo sapiens
  misc_RNA (1)...(19): siRNA sense strand
uaaaccaaauauccuacug

SEQ ID NO: 365900 - RNA, 19 nt, Homo sapiens
  misc_RNA (1)...(19): siRNA sense strand
gaaaagucagcauggcuua

SEQ ID NO: 365901 - RNA, 19 nt, Homo sapiens
  misc_RNA (1)...(19): siRNA sense strand
cgaaaccacuuuugcaaga

SEQ ID NO: 365902 - RNA, 19 nt, Homo sapiens
  misc_RNA (1)...(19): siRNA sense strand
agggagacauuccuucaga

SEQ ID NO: 365903 - RNA, 19 nt, Homo sapiens
  misc_RNA (1)...(19): siRNA sense strand
ggccagaccugcgguuucu

SEQ ID NO: 365904 - RNA, 19 nt, Homo sapiens
  misc_RNA (1)...(19): siRNA sense strand
ggagacauuccuucagauc

SEQ ID NO: 365905 - RNA, 19 nt, Homo sapiens
  misc_RNA (1)...(19): siRNA sense strand
cugaagacgugugaaccua

SEQ ID NO: 365906 - RNA, 19 nt, Homo sapiens
  misc_RNA (1)...(19): siRNA sense strand
gggagacauuccuucagau

SEQ ID NO: 365907 - RNA, 19 nt, Homo sapiens
  misc_RNA (1)...(19): siRNA sense strand
aaccaaauauccuacugau

SEQ ID NO: 365908 - RNA, 19 nt, Homo sapiens
  misc_RNA (1)...(19): siRNA sense strand
gagacauuccuucagauca

SEQ ID NO: 365909 - RNA, 19 nt, Homo sapiens
  misc_RNA (1)...(19): siRNA sense strand
ugaagacgugugaaccuaa

SEQ ID NO: 365910 - RNA, 19 nt, Homo sapiens
  misc_RNA (1)...(19): siRNA sense strand
aaaccaaauauccuacuga

SEQ ID NO: 365911 - RNA, 19 nt, Homo sapiens
  misc_RNA (1)...(19): siRNA sense strand
cugagaacgccgaauauug

SEQ ID NO: 365912 - RNA, 19 nt, Homo sapiens
  misc_RNA (1)...(19): siRNA sense strand
cgagucuuaugcuaaagga

SEQ ID NO: 365913 - RNA, 19 nt, Homo sapiens
  misc_RNA (1)...(19): siRNA sense strand
agacauuccuucagaucag

SEQ ID NO: 365914 - RNA, 19 nt, Homo sapiens
  misc_RNA (1)...(19): siRNA sense strand
acuguauccugaugagaaa

SEQ ID NO: 365915 - RNA, 19 nt, Homo sapiens
  misc_RNA (1)...(19): siRNA sense strand
gaacuguauccugaugaga

SEQ ID NO: 365916 - RNA, 19 nt, Homo sapiens
  misc_RNA (1)...(19): siRNA sense strand
gaaaccacuuuugcaagaa

SEQ ID NO: 365917 - RNA, 19 nt, Homo sapiens
  misc_RNA (1)...(19): siRNA sense strand
gaacgaaaccacuuuugca

SEQ ID NO: 365918 - RNA, 19 nt, Homo sapiens
  misc_RNA (1)...(19): siRNA sense strand
gggaacaauacacugagaa

SEQ ID NO: 365919 - RNA, 19 nt, Homo sapiens
  misc_RNA (1)...(19): siRNA sense strand
ugaccagcuugcagaggaa

SEQ ID NO: 365920 - RNA, 19 nt, Homo sapiens
  misc_RNA (1)...(19): siRNA sense strand
ggaacaauacacugagaac

SEQ ID NO: 365921 - RNA, 19 nt, Homo sapiens
  misc_RNA (1)...(19): siRNA sense strand
acagcgagucuuaugcuaa

SEQ ID NO: 365922 - RNA, 19 nt, Homo sapiens
  misc_RNA (1)...(19): siRNA sense strand
ucacagggagacauuccuu

SEQ ID NO: 365923 - RNA, 19 nt, Homo sapiens
  misc_RNA (1)...(19): siRNA sense strand
ggcgugggcugccuguuuu

SEQ ID NO: 365924 - RNA, 19 nt, Homo sapiens
  misc_RNA (1)...(19): siRNA sense strand
gaauauugaccagcuugca

SEQ ID NO: 365925 - RNA, 19 nt, Homo sapiens
  misc_RNA (1)...(19): siRNA sense strand
ccagaccugcgguuucuuc

SEQ ID NO: 365926 - RNA, 19 nt, Homo sapiens
  misc_RNA (1)...(19): siRNA sense strand
ccuucacgcucacaaacga

SEQ ID NO: 365927 - RNA, 19 nt, Homo sapiens
  misc_RNA (1)...(19): siRNA sense strand
accacggauuugacuauuu

SEQ ID NO: 365928 - RNA, 19 nt, Homo sapiens
  misc_RNA (1)...(19): siRNA sense strand
aaccacggauuugacuauu

SEQ ID NO: 365929 - RNA, 19 nt, Homo sapiens
  misc_RNA (1)...(19): siRNA sense strand
aacagcgagucuuaugcua

SEQ ID NO: 365930 - RNA, 19 nt, Homo sapiens
  misc_RNA (1)...(19): siRNA sense strand
aagucagcauggcuuauau

SEQ ID NO: 365931 - RNA, 19 nt, Homo sapiens
  misc_RNA (1)...(19): siRNA sense strand
aacugcaaaugccuuuaaa

SEQ ID NO: 365932 - RNA, 19 nt, Homo sapiens
  misc_RNA (1)...(19): siRNA sense strand
gaacagaguuggcuucuug

SEQ ID NO: 365933 - RNA, 19 nt, Homo sapiens
  misc_RNA (1)...(19): siRNA sense strand
gcacuacuaugcagacuug

SEQ ID NO: 365934 - RNA, 19 nt, Homo sapiens
  misc_RNA (1)...(19): siRNA sense strand
ggacauccauauauuagug

SEQ ID NO: 365935 - RNA, 19 nt, Homo sapiens
  misc_RNA (1)...(19): siRNA sense strand
gggcaacuaugacuacauu

SEQ ID NO: 365936 - RNA, 19 nt, Homo sapiens
  misc_RNA (1)...(19): siRNA sense strand
gagcugaguuuacacagau

SEQ ID NO: 365937 - RNA, 19 nt, Homo sapiens
  misc_RNA (1)...(19): siRNA sense strand
cugaagacgugguguuuaa

SEQ ID NO: 365938 - RNA, 19 nt, Homo sapiens
  misc_RNA (1)...(19): siRNA sense strand
caacaaugaaacccucuua

SEQ ID NO: 365939 - RNA, 19 nt, Homo sapiens
  misc_RNA (1)...(19): siRNA sense strand
gcugagagcugaguuuaca

SEQ ID NO: 365940 - RNA, 19 nt, Homo sapiens
  misc_RNA (1)...(19): siRNA sense strand
gaugcugacucgcuauuug

SEQ ID NO: 365941 - RNA, 19 nt, Homo sapiens
  misc_RNA (1)...(19): siRNA sense strand
gaaaggaggaggagucaca

SEQ ID NO: 365942 - RNA, 19 nt, Homo sapiens
  misc_RNA (1)...(19): siRNA sense strand
gcaccacaauuaccuucaa

SEQ ID NO: 365943 - RNA, 19 nt, Homo sapiens
  misc_RNA (1)...(19): siRNA sense strand
gcaaggaaaccugguggua

SEQ ID NO: 365944 - RNA, 19 nt, Homo sapiens
  misc_RNA (1)...(19): siRNA sense strand
ccuauaacuucuuugauga

SEQ ID NO: 365945 - RNA, 19 nt, Homo sapiens
  misc_RNA (1)...(19): siRNA sense strand
gcaacuaugacuacauuug

SEQ ID NO: 365946 - RNA, 19 nt, Homo sapiens
  misc_RNA (1)...(19): siRNA sense strand
acacaugccuuccacuuca

SEQ ID NO: 365947 - RNA, 19 nt, Homo sapiens
  misc_RNA (1)...(19): siRNA sense strand
gcaucuaucaccagaauga

SEQ ID NO: 365948 - RNA, 19 nt, Homo sapiens
  misc_RNA (1)...(19): siRNA sense strand
caaugaaacccucuuagga

SEQ ID NO: 365949 - RNA, 19 nt, Homo sapiens
  misc_RNA (1)...(19): siRNA sense strand
aggaggaccugacagcuuu

SEQ ID NO: 365950 - RNA, 19 nt, Homo sapiens
  misc_RNA (1)...(19): siRNA sense strand
ggacaacugcaucuucuca

SEQ ID NO: 365951 - RNA, 19 nt, Homo sapiens
  misc_RNA (1)...(19): siRNA sense strand
uagcaucuaucaccagaau

SEQ ID NO: 365952 - RNA, 19 nt, Homo sapiens
  misc_RNA (1)...(19): siRNA sense strand
ucacagagcaguagcaucu

SEQ ID NO: 365953 - RNA, 19 nt, Homo sapiens
  misc_RNA (1)...(19): siRNA sense strand
ugacuacauuugggacuuu

SEQ ID NO: 365954 - RNA, 19 nt, Homo sapiens
  misc_RNA (1)...(19): siRNA sense strand
cccuauaacuucuuugaug

SEQ ID NO: 365955 - RNA, 19 nt, Homo sapiens
  misc_RNA (1)...(19): siRNA sense strand
ggccagagccagcuguuug

SEQ ID NO: 365956 - RNA, 19 nt, Homo sapiens
  misc_RNA (1)...(19): siRNA sense strand
ggucaggucugugucaucu

SEQ ID NO: 365957 - RNA, 19 nt, Homo sapiens
  misc_RNA (1)...(19): siRNA sense strand
ucugaaagauguggagcua

SEQ ID NO: 365958 - RNA, 19 nt, Homo sapiens
  misc_RNA (1)...(19): siRNA sense strand
ggaguugacagcugugaug

SEQ ID NO: 365959 - RNA, 19 nt, Homo sapiens
  misc_RNA (1)...(19): siRNA sense strand
gaguguguaucuaucuaug

SEQ ID NO: 365960 - RNA, 19 nt, Homo sapiens
  misc_RNA (1)...(19): siRNA sense strand
gcuccgacccuauaacuuc

SEQ ID NO: 365961 - RNA, 19 nt, Homo sapiens
  misc_RNA (1)...(19): siRNA sense strand
gcugugaugcgcuuucuga

SEQ ID NO: 365962 - RNA, 19 nt, Homo sapiens
  misc_RNA (1)...(19): siRNA sense strand
gcuagcaaccagacuaaug

SEQ ID NO: 365963 - RNA, 19 nt, Homo sapiens
  misc_RNA (1)...(19): siRNA sense strand
cugacucgcuauuuggaua

SEQ ID NO: 365964 - RNA, 19 nt, Homo sapiens
  misc_RNA (1)...(19): siRNA sense strand
guuccagggugagcgaaua

SEQ ID NO: 365965 - RNA, 19 nt, Homo sapiens
  misc_RNA (1)...(19): siRNA sense strand
caaggaaaccuggugguau

SEQ ID NO: 365966 - RNA, 19 nt, Homo sapiens
  misc_RNA (1)...(19): siRNA sense strand
aaggaaaccuggugguauc

SEQ ID NO: 365967 - RNA, 19 nt, Homo sapiens
  misc_RNA (1)...(19): siRNA sense strand
gcugaagacgugguguuua

SEQ ID NO: 365968 - RNA, 19 nt, Homo sapiens
  misc_RNA (1)...(19): siRNA sense strand
acagagcaguagcaucuau

SEQ ID NO: 365969 - RNA, 19 nt, Homo sapiens
  misc_RNA (1)...(19): siRNA sense strand
ggaacagaguuggcuucuu

SEQ ID NO: 365970 - RNA, 19 nt, Homo sapiens
  misc_RNA (1)...(19): siRNA sense strand
caccacaauuaccuucaaa

SEQ ID NO: 365971 - RNA, 19 nt, Homo sapiens
  misc_RNA (1)...(19): siRNA sense strand
caacuaugacuacauuugg

SEQ ID NO: 365972 - RNA, 19 nt, Homo sapiens
  misc_RNA (1)...(19): siRNA sense strand
ucaggucugugucaucugu

SEQ ID NO: 365973 - RNA, 19 nt, Homo sapiens
  misc_RNA (1)...(19): siRNA sense strand
gugcugagagcugaguuua

SEQ ID NO: 365974 - RNA, 19 nt, Homo sapiens
  misc_RNA (1)...(19): siRNA sense strand
ucauuucuauggugguuug

SEQ ID NO: 365975 - RNA, 19 nt, Homo sapiens
  misc_RNA (1)...(19): siRNA sense strand
uaucuauggugccgauuca

SEQ ID NO: 365976 - RNA, 19 nt, Homo sapiens
  misc_RNA (1)...(19): siRNA sense strand
gacccuauaacuucuuuga

SEQ ID NO: 365977 - RNA, 19 nt, Homo sapiens
  misc_RNA (1)...(19): siRNA sense strand
gguuggaagugguuagagu

SEQ ID NO: 365978 - RNA, 19 nt, Homo sapiens
  misc_RNA (1)...(19): siRNA sense strand
ugucaucugugggcaacua

SEQ ID NO: 365979 - RNA, 19 nt, Homo sapiens
  misc_RNA (1)...(19): siRNA sense strand
uucgaaggcaccacaauua

SEQ ID NO: 365980 - RNA, 19 nt, Homo sapiens
  misc_RNA (1)...(19): siRNA sense strand
ccaggaguguguaucuauc

SEQ ID NO: 365981 - RNA, 19 nt, Homo sapiens
  misc_RNA (1)...(19): siRNA sense strand
ggcaguguguacuuugaga

SEQ ID NO: 365982 - RNA, 19 nt, Homo sapiens
  misc_RNA (1)...(19): siRNA sense strand
gaagacgugguguuuaaac

SEQ ID NO: 365983 - RNA, 19 nt, Homo sapiens
  misc_RNA (1)...(19): siRNA sense strand
gcuuuggacucggccguaa

SEQ ID NO: 365984 - RNA, 19 nt, Homo sapiens
  misc_RNA (1)...(19): siRNA sense strand
gcacugucccucauuacca

SEQ ID NO: 365985 - RNA, 19 nt, Homo sapiens
  misc_RNA (1)...(19): siRNA sense strand
uaccuuugcugacuucauc

SEQ ID NO: 365986 - RNA, 19 nt, Homo sapiens
  misc_RNA (1)...(19): siRNA sense strand
gagaaaggaggaggaguca

SEQ ID NO: 365987 - RNA, 19 nt, Homo sapiens
  misc_RNA (1)...(19): siRNA sense strand
ccaguacagugugcaagga

SEQ ID NO: 365988 - RNA, 19 nt, Homo sapiens
  misc_RNA (1)...(19): siRNA sense strand
ggauguggcagggcugaaa

SEQ ID NO: 365989 - RNA, 19 nt, Homo sapiens
  misc_RNA (1)...(19): siRNA sense strand
ggaguguguaucuaucuau

SEQ ID NO: 365990 - RNA, 19 nt, Homo sapiens
  misc_RNA (1)...(19): siRNA sense strand
uauccucccucuggucauu

SEQ ID NO: 365991 - RNA, 19 nt, Homo sapiens
  misc_RNA (1)...(19): siRNA sense strand
ggaacgggaguuuaagucu

SEQ ID NO: 365992 - RNA, 19 nt, Homo sapiens
  misc_RNA (1)...(19): siRNA sense strand
ccucuggucauuuaccuuu

SEQ ID NO: 365993 - RNA, 19 nt, Homo sapiens
  misc_RNA (1)...(19): siRNA sense strand
cuggcacugucccucauua

SEQ ID NO: 365994 - RNA, 19 nt, Homo sapiens
  misc_RNA (1)...(19): siRNA sense strand
ggacacccacaguuaccuu

SEQ ID NO: 365995 - RNA, 19 nt, Homo sapiens
  misc_RNA (1)...(19): siRNA sense strand
caucugugggcaacuauga

SEQ ID NO: 365996 - RNA, 19 nt, Homo sapiens
  misc_RNA (1)...(19): siRNA sense strand
gcucagcccucggacaacu

SEQ ID NO: 365997 - RNA, 19 nt, Homo sapiens
  misc_RNA (1)...(19): siRNA sense strand
ccucuaccauaacaucuca

SEQ ID NO: 365998 - RNA, 19 nt, Homo sapiens
  misc_RNA (1)...(19): siRNA sense strand
agagcugaguuuacacaga

SEQ ID NO: 365999 - RNA, 19 nt, Homo sapiens
  misc_RNA (1)...(19): siRNA sense strand
gggaaaggaggaccugaca

SEQ ID NO: 366000 - RNA, 19 nt, Homo sapiens
  misc_RNA (1)...(19): siRNA sense strand
uuugggacuuuguguugua

SEQ ID NO: 366001 - RNA, 19 nt, Homo sapiens
  misc_RNA (1)...(19): siRNA sense strand
guccaggaguguguaucua

SEQ ID NO: 366002 - RNA, 19 nt, Homo sapiens
  misc_RNA (1)...(19): siRNA sense strand
gaaggcaccacaauuaccu

SEQ ID NO: 366003 - RNA, 19 nt, Homo sapiens
  misc_RNA (1)...(19): siRNA sense strand
gaggagucacagagcagua

SEQ ID NO: 366004 - RNA, 19 nt, Homo sapiens
  misc_RNA (1)...(19): siRNA sense strand
cauuugggacuuuguguug

SEQ ID NO: 366005 - RNA, 19 nt, Homo sapiens
  misc_RNA (1)...(19): siRNA sense strand
uugcugacuucaucaacaa

SEQ ID NO: 366006 - RNA, 19 nt, Homo sapiens
  misc_RNA (1)...(19): siRNA sense strand
gcaguguguacuuugagaa

SEQ ID NO: 366007 - RNA, 19 nt, Homo sapiens
  misc_RNA (1)...(19): siRNA sense strand
ugggaacggugcacacaca

SEQ ID NO: 366008 - RNA, 19 nt, Homo sapiens
  misc_RNA (1)...(19): siRNA sense strand
acaguuaccuuugcugacu

SEQ ID NO: 366009 - RNA, 19 nt, Homo sapiens
  misc_RNA (1)...(19): siRNA sense strand
caucuggacacccacaguu

SEQ ID NO: 366010 - RNA, 19 nt, Homo sapiens
  misc_RNA (1)...(19): siRNA sense strand
ggaacggugcacacacaug

SEQ ID NO: 366011 - RNA, 19 nt, Homo sapiens
  misc_RNA (1)...(19): siRNA sense strand
ccaguuggaacgggaguuu

SEQ ID NO: 366012 - RNA, 19 nt, Homo sapiens
  misc_RNA (1)...(19): siRNA sense strand
ggacaaccccaacccaaug

SEQ ID NO: 366013 - RNA, 19 nt, Homo sapiens
  misc_RNA (1)...(19): siRNA sense strand
acacacaugccuuccacuu

SEQ ID NO: 366014 - RNA, 19 nt, Homo sapiens
  misc_RNA (1)...(19): siRNA sense strand
gguuauaucaacacagcuu

SEQ ID NO: 366015 - RNA, 19 nt, Homo sapiens
  misc_RNA (1)...(19): siRNA sense strand
aaucauuucuauggugguu

SEQ ID NO: 366016 - RNA, 19 nt, Homo sapiens
  misc_RNA (1)...(19): siRNA sense strand
aggaguguguaucuaucua

SEQ ID NO: 366017 - RNA, 19 nt, Homo sapiens
  misc_RNA (1)...(19): siRNA sense strand
ccgacccuauaacuucuuu

SEQ ID NO: 366018 - RNA, 19 nt, Homo sapiens
  misc_RNA (1)...(19): siRNA sense strand
ucuuugcccuggccuaugu

SEQ ID NO: 366019 - RNA, 19 nt, Homo sapiens
  misc_RNA (1)...(19): siRNA sense strand
guguguaucuaucuauggu

SEQ ID NO: 366020 - RNA, 19 nt, Homo sapiens
  misc_RNA (1)...(19): siRNA sense strand
gaacucuccagguccucuu

SEQ ID NO: 366021 - RNA, 19 nt, Homo sapiens
  misc_RNA (1)...(19): siRNA sense strand
ucggacaacugcaucuucu

SEQ ID NO: 366022 - RNA, 19 nt, Homo sapiens
  misc_RNA (1)...(19): siRNA sense strand
cuucgaaggcaccacaauu

SEQ ID NO: 366023 - RNA, 19 nt, Homo sapiens
  misc_RNA (1)...(19): siRNA sense strand
ugucguccaccuucaacua

SEQ ID NO: 366024 - RNA, 19 nt, Homo sapiens
  misc_RNA (1)...(19): siRNA sense strand
guccaugccacggguuaua

SEQ ID NO: 366025 - RNA, 19 nt, Homo sapiens
  misc_RNA (1)...(19): siRNA sense strand
uguggaggcaucugaaaga

SEQ ID NO: 366026 - RNA, 19 nt, Homo sapiens
  misc_RNA (1)...(19): siRNA sense strand
ggaguggacugccccuauc

SEQ ID NO: 366027 - RNA, 19 nt, Homo sapiens
  misc_RNA (1)...(19): siRNA sense strand
gacacccacaguuaccuuu

SEQ ID NO: 366028 - RNA, 19 nt, Homo sapiens
  misc_RNA (1)...(19): siRNA sense strand
gacuacauuugggacuuug

SEQ ID NO: 366029 - RNA, 19 nt, Homo sapiens
  misc_RNA (1)...(19): siRNA sense strand
gggcuguguguguauuuga

SEQ ID NO: 366030 - RNA, 19 nt, Homo sapiens
  misc_RNA (1)...(19): siRNA sense strand
ugaagacgugguguuuaaa

SEQ ID NO: 366031 - RNA, 19 nt, Homo sapiens
  misc_RNA (1)...(19): siRNA sense strand
acaaugaaacccucuuagg

SEQ ID NO: 366032 - RNA, 19 nt, Homo sapiens
  misc_RNA (1)...(19): siRNA sense strand
gaacagaguuggcuucuug

SEQ ID NO: 366033 - RNA, 19 nt, Homo sapiens
  misc_RNA (1)...(19): siRNA sense strand
gcacuacuaugcagacuug

SEQ ID NO: 366034 - RNA, 19 nt, Homo sapiens
  misc_RNA (1)...(19): siRNA sense strand
ggacauccauauauuagug

SEQ ID NO: 366035 - RNA, 19 nt, Homo sapiens
  misc_RNA (1)...(19): siRNA sense strand
gggcaacuaugacuacauu

SEQ ID NO: 366036 - RNA, 19 nt, Homo sapiens
  misc_RNA (1)...(19): siRNA sense strand
gagcugaguuuacacagau

SEQ ID NO: 366037 - RNA, 19 nt, Homo sapiens
  misc_RNA (1)...(19): siRNA sense strand
cugaagacgugguguuuaa

SEQ ID NO: 366038 - RNA, 19 nt, Homo sapiens
  misc_RNA (1)...(19): siRNA sense strand
caacaaugaaacccucuua

SEQ ID NO: 366039 - RNA, 19 nt, Homo sapiens
  misc_RNA (1)...(19): siRNA sense strand
gcugagagcugaguuuaca

SEQ ID NO: 366040 - RNA, 19 nt, Homo sapiens
  misc_RNA (1)...(19): siRNA sense strand
gaugcugacucgcuauuug

SEQ ID NO: 366041 - RNA, 19 nt, Homo sapiens
  misc_RNA (1)...(19): siRNA sense strand
gaaaggaggaggagucaca

SEQ ID NO: 366042 - RNA, 19 nt, Homo sapiens
  misc_RNA (1)...(19): siRNA sense strand
gcaccacaauuaccuucaa

SEQ ID NO: 366043 - RNA, 19 nt, Homo sapiens
  misc_RNA (1)...(19): siRNA sense strand
gcaaggaaaccugguggua

SEQ ID NO: 366044 - RNA, 19 nt, Homo sapiens
  misc_RNA (1)...(19): siRNA sense strand
ccuauaacuucuuugauga

SEQ ID NO: 366045 - RNA, 19 nt, Homo sapiens
  misc_RNA (1)...(19): siRNA sense strand
gcaacuaugacuacauuug

SEQ ID NO: 366046 - RNA, 19 nt, Homo sapiens
  misc_RNA (1)...(19): siRNA sense strand
acacaugccuuccacuuca

SEQ ID NO: 366047 - RNA, 19 nt, Homo sapiens
  misc_RNA (1)...(19): siRNA sense strand
gcaucuaucaccagaauga

SEQ ID NO: 366048 - RNA, 19 nt, Homo sapiens
  misc_RNA (1)...(19): siRNA sense strand
caaugaaacccucuuagga

SEQ ID NO: 366049 - RNA, 19 nt, Homo sapiens
  misc_RNA (1)...(19): siRNA sense strand
aggaggaccugacagcuuu

SEQ ID NO: 366050 - RNA, 19 nt, Homo sapiens
  misc_RNA (1)...(19): siRNA sense strand
ggacaacugcaucuucuca

SEQ ID NO: 366051 - RNA, 19 nt, Homo sapiens
  misc_RNA (1)...(19): siRNA sense strand
uagcaucuaucaccagaau

SEQ ID NO: 366052 - RNA, 19 nt, Homo sapiens
  misc_RNA (1)...(19): siRNA sense strand
ucacagagcaguagcaucu

SEQ ID NO: 366053 - RNA, 19 nt, Homo sapiens
  misc_RNA (1)...(19): siRNA sense strand
ugacuacauuugggacuuu

SEQ ID NO: 366054 - RNA, 19 nt, Homo sapiens
  misc_RNA (1)...(19): siRNA sense strand
cccuauaacuucuuugaug

SEQ ID NO: 366055 - RNA, 19 nt, Homo sapiens
  misc_RNA (1)...(19): siRNA sense strand
ggccagagccagcuguuug

SEQ ID NO: 366056 - RNA, 19 nt, Homo sapiens
  misc_RNA (1)...(19): siRNA sense strand
ggucaggucugugucaucu

SEQ ID NO: 366057 - RNA, 19 nt, Homo sapiens
  misc_RNA (1)...(19): siRNA sense strand
ucugaaagauguggagcua

SEQ ID NO: 366058 - RNA, 19 nt, Homo sapiens
  misc_RNA (1)...(19): siRNA sense strand
ggaguugacagcugugaug

SEQ ID NO: 366059 - RNA, 19 nt, Homo sapiens
  misc_RNA (1)...(19): siRNA sense strand
gaguguguaucuaucuaug

SEQ ID NO: 366060 - RNA, 19 nt, Homo sapiens
  misc_RNA (1)...(19): siRNA sense strand
gcuccgacccuauaacuuc

SEQ ID NO: 366061 - RNA, 19 nt, Homo sapiens
  misc_RNA (1)...(19): siRNA sense strand
gcugugaugcgcuuucuga

SEQ ID NO: 366062 - RNA, 19 nt, Homo sapiens
  misc_RNA (1)...(19): siRNA sense strand
gcuagcaaccagacuaaug

SEQ ID NO: 366063 - RNA, 19 nt, Homo sapiens
  misc_RNA (1)...(19): siRNA sense strand
cugacucgcuauuuggaua

SEQ ID NO: 366064 - RNA, 19 nt, Homo sapiens
  misc_RNA (1)...(19): siRNA sense strand
guuccagggugagcgaaua

SEQ ID NO: 366065 - RNA, 19 nt, Homo sapiens
  misc_RNA (1)...(19): siRNA sense strand
caaggaaaccuggugguau

SEQ ID NO: 366066 - RNA, 19 nt, Homo sapiens
  misc_RNA (1)...(19): siRNA sense strand
aaggaaaccuggugguauc

SEQ ID NO: 366067 - RNA, 19 nt, Homo sapiens
  misc_RNA (1)...(19): siRNA sense strand
gcugaagacgugguguuua

SEQ ID NO: 366068 - RNA, 19 nt, Homo sapiens
  misc_RNA (1)...(19): siRNA sense strand
acagagcaguagcaucuau

SEQ ID NO: 366069 - RNA, 19 nt, Homo sapiens
  misc_RNA (1)...(19): siRNA sense strand
ggaacagaguuggcuucuu

SEQ ID NO: 366070 - RNA, 19 nt, Homo sapiens
  misc_RNA (1)...(19): siRNA sense strand
caccacaauuaccuucaaa

SEQ ID NO: 366071 - RNA, 19 nt, Homo sapiens
  misc_RNA (1)...(19): siRNA sense strand
caacuaugacuacauuugg

SEQ ID NO: 366072 - RNA, 19 nt, Homo sapiens
  misc_RNA (1)...(19): siRNA sense strand
ucaggucugugucaucugu

SEQ ID NO: 366073 - RNA, 19 nt, Homo sapiens
  misc_RNA (1)...(19): siRNA sense strand
gugcugagagcugaguuua

SEQ ID NO: 366074 - RNA, 19 nt, Homo sapiens
  misc_RNA (1)...(19): siRNA sense strand
ucauuucuauggugguuug

SEQ ID NO: 366075 - RNA, 19 nt, Homo sapiens
  misc_RNA (1)...(19): siRNA sense strand
uaucuauggugccgauuca

SEQ ID NO: 366076 - RNA, 19 nt, Homo sapiens
  misc_RNA (1)...(19): siRNA sense strand
gacccuauaacuucuuuga

SEQ ID NO: 366077 - RNA, 19 nt, Homo sapiens
  misc_RNA (1)...(19): siRNA sense strand
gguuggaagugguuagagu

SEQ ID NO: 366078 - RNA, 19 nt, Homo sapiens
  misc_RNA (1)...(19): siRNA sense strand
ugucaucugugggcaacua

SEQ ID NO: 366079 - RNA, 19 nt, Homo sapiens
  misc_RNA (1)...(19): siRNA sense strand
uucgaaggcaccacaauua

SEQ ID NO: 366080 - RNA, 19 nt, Homo sapiens
  misc_RNA (1)...(19): siRNA sense strand
ccaggaguguguaucuauc

SEQ ID NO: 366081 - RNA, 19 nt, Homo sapiens
  misc_RNA (1)...(19): siRNA sense strand
ggcaguguguacuuugaga

SEQ ID NO: 366082 - RNA, 19 nt, Homo sapiens
  misc_RNA (1)...(19): siRNA sense strand
gaagacgugguguuuaaac

SEQ ID NO: 366083 - RNA, 19 nt, Homo sapiens
  misc_RNA (1)...(19): siRNA sense strand
gcuuuggacucggccguaa

SEQ ID NO: 366084 - RNA, 19 nt, Homo sapiens
  misc_RNA (1)...(19): siRNA sense strand
gcacugucccucauuacca

SEQ ID NO: 366085 - RNA, 19 nt, Homo sapiens
  misc_RNA (1)...(19): siRNA sense strand
uaccuuugcugacuucauc

SEQ ID NO: 366086 - RNA, 19 nt, Homo sapiens
  misc_RNA (1)...(19): siRNA sense strand
gagaaaggaggaggaguca

SEQ ID NO: 366087 - RNA, 19 nt, Homo sapiens
  misc_RNA (1)...(19): siRNA sense strand
ccaguacagugugcaagga

SEQ ID NO: 366088 - RNA, 19 nt, Homo sapiens
  misc_RNA (1)...(19): siRNA sense strand
ggauguggcagggcugaaa

SEQ ID NO: 366089 - RNA, 19 nt, Homo sapiens
  misc_RNA (1)...(19): siRNA sense strand
ggaguguguaucuaucuau

SEQ ID NO: 366090 - RNA, 19 nt, Homo sapiens
  misc_RNA (1)...(19): siRNA sense strand
uauccucccucuggucauu

SEQ ID NO: 366091 - RNA, 19 nt, Homo sapiens
  misc_RNA (1)...(19): siRNA sense strand
ggaacgggaguuuaagucu

SEQ ID NO: 366092 - RNA, 19 nt, Homo sapiens
  misc_RNA (1)...(19): siRNA sense strand
ccucuggucauuuaccuuu

SEQ ID NO: 366093 - RNA, 19 nt, Homo sapiens
  misc_RNA (1)...(19): siRNA sense strand
cuggcacugucccucauua

SEQ ID NO: 366094 - RNA, 19 nt, Homo sapiens
  misc_RNA (1)...(19): siRNA sense strand
ggacacccacaguuaccuu

SEQ ID NO: 366095 - RNA, 19 nt, Homo sapiens
  misc_RNA (1)...(19): siRNA sense strand
caucugugggcaacuauga

SEQ ID NO: 366096 - RNA, 19 nt, Homo sapiens
  misc_RNA (1)...(19): siRNA sense strand
gcucagcccucggacaacu

SEQ ID NO: 366097 - RNA, 19 nt, Homo sapiens
  misc_RNA (1)...(19): siRNA sense strand
ccucuaccauaacaucuca

SEQ ID NO: 366098 - RNA, 19 nt, Homo sapiens
  misc_RNA (1)...(19): siRNA sense strand
agagcugaguuuacacaga

SEQ ID NO: 366099 - RNA, 19 nt, Homo sapiens
  misc_RNA (1)...(19): siRNA sense strand
gggaaaggaggaccugaca

SEQ ID NO: 366100 - RNA, 19 nt, Homo sapiens
  misc_RNA (1)...(19): siRNA sense strand
uuugggacuuuguguugua

SEQ ID NO: 366101 - RNA, 19 nt, Homo sapiens
  misc_RNA (1)...(19): siRNA sense strand
guccaggaguguguaucua

SEQ ID NO: 366102 - RNA, 19 nt, Homo sapiens
  misc_RNA (1)...(19): siRNA sense strand
gaaggcaccacaauuaccu

SEQ ID NO: 366103 - RNA, 19 nt, Homo sapiens
  misc_RNA (1)...(19): siRNA sense strand
gaggagucacagagcagua

SEQ ID NO: 366104 - RNA, 19 nt, Homo sapiens
  misc_RNA (1)...(19): siRNA sense strand
cauuugggacuuuguguug

SEQ ID NO: 366105 - RNA, 19 nt, Homo sapiens
  misc_RNA (1)...(19): siRNA sense strand
uugcugacuucaucaacaa

SEQ ID NO: 366106 - RNA, 19 nt, Homo sapiens
  misc_RNA (1)...(19): siRNA sense strand
gcaguguguacuuugagaa

SEQ ID NO: 366107 - RNA, 19 nt, Homo sapiens
  misc_RNA (1)...(19): siRNA sense strand
ugggaacggugcacacaca

SEQ ID NO: 366108 - RNA, 19 nt, Homo sapiens
  misc_RNA (1)...(19): siRNA sense strand
acaguuaccuuugcugacu

SEQ ID NO: 366109 - RNA, 19 nt, Homo sapiens
  misc_RNA (1)...(19): siRNA sense strand
caucuggacacccacaguu

SEQ ID NO: 366110 - RNA, 19 nt, Homo sapiens
  misc_RNA (1)...(19): siRNA sense strand
ggaacggugcacacacaug

SEQ ID NO: 366111 - RNA, 19 nt, Homo sapiens
  misc_RNA (1)...(19): siRNA sense strand
ccaguuggaacgggaguuu

SEQ ID NO: 366112 - RNA, 19 nt, Homo sapiens
  misc_RNA (1)...(19): siRNA sense strand
ggacaaccccaacccaaug

SEQ ID NO: 366113 - RNA, 19 nt, Homo sapiens
  misc_RNA (1)...(19): siRNA sense strand
acacacaugccuuccacuu

SEQ ID NO: 366114 - RNA, 19 nt, Homo sapiens
  misc_RNA (1)...(19): siRNA sense strand
gguuauaucaacacagcuu

SEQ ID NO: 366115 - RNA, 19 nt, Homo sapiens
  misc_RNA (1)...(19): siRNA sense strand
aaucauuucuauggugguu

SEQ ID NO: 366116 - RNA, 19 nt, Homo sapiens
  misc_RNA (1)...(19): siRNA sense strand
aggaguguguaucuaucua

SEQ ID NO: 366117 - RNA, 19 nt, Homo sapiens
  misc_RNA (1)...(19): siRNA sense strand
ccgacccuauaacuucuuu

SEQ ID NO: 366118 - RNA, 19 nt, Homo sapiens
  misc_RNA (1)...(19): siRNA sense strand
ucuuugcccuggccuaugu

SEQ ID NO: 366119 - RNA, 19 nt, Homo sapiens
  misc_RNA (1)...(19): siRNA sense strand
guguguaucuaucuauggu

SEQ ID NO: 366120 - RNA, 19 nt, Homo sapiens
  misc_RNA (1)...(19): siRNA sense strand
gaacucuccagguccucuu

SEQ ID NO: 366121 - RNA, 19 nt, Homo sapiens
  misc_RNA (1)...(19): siRNA sense strand
ucggacaacugcaucuucu

SEQ ID NO: 366122 - RNA, 19 nt, Homo sapiens
  misc_RNA (1)...(19): siRNA sense strand
cuucgaaggcaccacaauu

SEQ ID NO: 366123 - RNA, 19 nt, Homo sapiens
  misc_RNA (1)...(19): siRNA sense strand
ugucguccaccuucaacua

SEQ ID NO: 366124 - RNA, 19 nt, Homo sapiens
  misc_RNA (1)...(19): siRNA sense strand
guccaugccacggguuaua

SEQ ID NO: 366125 - RNA, 19 nt, Homo sapiens
  misc_RNA (1)...(19): siRNA sense strand
uguggaggcaucugaaaga

SEQ ID NO: 366126 - RNA, 19 nt, Homo sapiens
  misc_RNA (1)...(19): siRNA sense strand
ggaguggacugccccuauc

SEQ ID NO: 366127 - RNA, 19 nt, Homo sapiens
  misc_RNA (1)...(19): siRNA sense strand
gacacccacaguuaccuuu

SEQ ID NO: 366128 - RNA, 19 nt, Homo sapiens
  misc_RNA (1)...(19): siRNA sense strand
gacuacauuugggacuuug

SEQ ID NO: 366129 - RNA, 19 nt, Homo sapiens
  misc_RNA (1)...(19): siRNA sense strand
gggcuguguguguauuuga

SEQ ID NO: 366130 - RNA, 19 nt, Homo sapiens
  misc_RNA (1)...(19): siRNA sense strand
ugaagacgugguguuuaaa

SEQ ID NO: 366131 - RNA, 19 nt, Homo sapiens
  misc_RNA (1)...(19): siRNA sense strand
acaaugaaacccucuuagg

SEQ ID NO: 366132 - RNA, 19 nt, Homo sapiens
  misc_RNA (1)...(19): siRNA sense strand
caauugaacuggcuuauau

SEQ ID NO: 366133 - RNA, 19 nt, Homo sapiens
  misc_RNA (1)...(19): siRNA sense strand
gaaagaagcagcugauaug

SEQ ID NO: 366134 - RNA, 19 nt, Homo sapiens
  misc_RNA (1)...(19): siRNA sense strand
ggagccagcuagauauuaa

SEQ ID NO: 366135 - RNA, 19 nt, Homo sapiens
  misc_RNA (1)...(19): siRNA sense strand
gaaacaggcuagccagaga

SEQ ID NO: 366136 - RNA, 19 nt, Homo sapiens
  misc_RNA (1)...(19): siRNA sense strand
ugacuugucuucuucguaa

SEQ ID NO: 366137 - RNA, 19 nt, Homo sapiens
  misc_RNA (1)...(19): siRNA sense strand
agaauuaccuucagcugua

SEQ ID NO: 366138 - RNA, 19 nt, Homo sapiens
  misc_RNA (1)...(19): siRNA sense strand
caaaggcaguaaugcauuu

SEQ ID NO: 366139 - RNA, 19 nt, Homo sapiens
  misc_RNA (1)...(19): siRNA sense strand
caaggagccagucaaauua

SEQ ID NO: 366140 - RNA, 19 nt, Homo sapiens
  misc_RNA (1)...(19): siRNA sense strand
ggaacaaaguaucuugcua

SEQ ID NO: 366141 - RNA, 19 nt, Homo sapiens
  misc_RNA (1)...(19): siRNA sense strand
guaaauuucuucacaccaa

SEQ ID NO: 366142 - RNA, 19 nt, Homo sapiens
  misc_RNA (1)...(19): siRNA sense strand
ggaaagaagcagcugauau

SEQ ID NO: 366143 - RNA, 19 nt, Homo sapiens
  misc_RNA (1)...(19): siRNA sense strand
ggaauaauuggaguaguua

SEQ ID NO: 366144 - RNA, 19 nt, Homo sapiens
  misc_RNA (1)...(19): siRNA sense strand
gcaaaucaaacgucuagaa

SEQ ID NO: 366145 - RNA, 19 nt, Homo sapiens
  misc_RNA (1)...(19): siRNA sense strand
caucagagauuguuuacca

SEQ ID NO: 366146 - RNA, 19 nt, Homo sapiens
  misc_RNA (1)...(19): siRNA sense strand
caauagaaauggaacaaag

SEQ ID NO: 366147 - RNA, 19 nt, Homo sapiens
  misc_RNA (1)...(19): siRNA sense strand
acaagaagauaaacggaaa

SEQ ID NO: 366148 - RNA, 19 nt, Homo sapiens
  misc_RNA (1)...(19): siRNA sense strand
cguaaaagguugccuguua

SEQ ID NO: 366149 - RNA, 19 nt, Homo sapiens
  misc_RNA (1)...(19): siRNA sense strand
gcagaacccuagcuguaau

SEQ ID NO: 366150 - RNA, 19 nt, Homo sapiens
  misc_RNA (1)...(19): siRNA sense strand
caaauuugccacagaauau

SEQ ID NO: 366151 - RNA, 19 nt, Homo sapiens
  misc_RNA (1)...(19): siRNA sense strand
gcaauugaacuggcuuaua

SEQ ID NO: 366152 - RNA, 19 nt, Homo sapiens
  misc_RNA (1)...(19): siRNA sense strand
gaugaaauucgacaagaaa

SEQ ID NO: 366153 - RNA, 19 nt, Homo sapiens
  misc_RNA (1)...(19): siRNA sense strand
acaaggagccagucaaauu

SEQ ID NO: 366154 - RNA, 19 nt, Homo sapiens
  misc_RNA (1)...(19): siRNA sense strand
caggcuagccagagaauua

SEQ ID NO: 366155 - RNA, 19 nt, Homo sapiens
  misc_RNA (1)...(19): siRNA sense strand
cacccaacguugucaauuu

SEQ ID NO: 366156 - RNA, 19 nt, Homo sapiens
  misc_RNA (1)...(19): siRNA sense strand
gaacuggcuuauaucaaca

SEQ ID NO: 366157 - RNA, 19 nt, Homo sapiens
  misc_RNA (1)...(19): siRNA sense strand
ugaaggaacugcaaaauau

SEQ ID NO: 366158 - RNA, 19 nt, Homo sapiens
  misc_RNA (1)...(19): siRNA sense strand
gaaccaauucaucuuaaga

SEQ ID NO: 366159 - RNA, 19 nt, Homo sapiens
  misc_RNA (1)...(19): siRNA sense strand
gcuaaaggcauuacaagga

SEQ ID NO: 366160 - RNA, 19 nt, Homo sapiens
  misc_RNA (1)...(19): siRNA sense strand
gggcuaaugaacaauaaua

SEQ ID NO: 366161 - RNA, 19 nt, Homo sapiens
  misc_RNA (1)...(19): siRNA sense strand
uggcuuauaucaacacaaa

SEQ ID NO: 366162 - RNA, 19 nt, Homo sapiens
  misc_RNA (1)...(19): siRNA sense strand
caguaucagucucuucuaa

SEQ ID NO: 366163 - RNA, 19 nt, Homo sapiens
  misc_RNA (1)...(19): siRNA sense strand
guuauugaacgacucauua

SEQ ID NO: 366164 - RNA, 19 nt, Homo sapiens
  misc_RNA (1)...(19): siRNA sense strand
ccaaauuugccacagaaua

SEQ ID NO: 366165 - RNA, 19 nt, Homo sapiens
  misc_RNA (1)...(19): siRNA sense strand
ucacuaaacuugaucucau

SEQ ID NO: 366166 - RNA, 19 nt, Homo sapiens
  misc_RNA (1)...(19): siRNA sense strand
gcacagcgcaggaaagaag

SEQ ID NO: 366167 - RNA, 19 nt, Homo sapiens
  misc_RNA (1)...(19): siRNA sense strand
gcuaauuccugucauaaac

SEQ ID NO: 366168 - RNA, 19 nt, Homo sapiens
  misc_RNA (1)...(19): siRNA sense strand
uaaacuucaugaugccaua

SEQ ID NO: 366169 - RNA, 19 nt, Homo sapiens
  misc_RNA (1)...(19): siRNA sense strand
ucacaucagagauuguuua

SEQ ID NO: 366170 - RNA, 19 nt, Homo sapiens
  misc_RNA (1)...(19): siRNA sense strand
uggaauaauuggaguaguu

SEQ ID NO: 366171 - RNA, 19 nt, Homo sapiens
  misc_RNA (1)...(19): siRNA sense strand
caacaucagaggcacuuaa

SEQ ID NO: 366172 - RNA, 19 nt, Homo sapiens
  misc_RNA (1)...(19): siRNA sense strand
gugaacccguggaugauaa

SEQ ID NO: 366173 - RNA, 19 nt, Homo sapiens
  misc_RNA (1)...(19): siRNA sense strand
guaucagucucuucuaaau

SEQ ID NO: 366174 - RNA, 19 nt, Homo sapiens
  misc_RNA (1)...(19): siRNA sense strand
gaaaacaacaggagaagaa

SEQ ID NO: 366175 - RNA, 19 nt, Homo sapiens
  misc_RNA (1)...(19): siRNA sense strand
gaacgacucauuaaaucau

SEQ ID NO: 366176 - RNA, 19 nt, Homo sapiens
  misc_RNA (1)...(19): siRNA sense strand
gaaauggaacaaaguaucu

SEQ ID NO: 366177 - RNA, 19 nt, Homo sapiens
  misc_RNA (1)...(19): siRNA sense strand
caagaagaguguaacugau

SEQ ID NO: 366178 - RNA, 19 nt, Homo sapiens
  misc_RNA (1)...(19): siRNA sense strand
cuaaggauauugagcuuca

SEQ ID NO: 366179 - RNA, 19 nt, Homo sapiens
  misc_RNA (1)...(19): siRNA sense strand
aguaagcccugaaccaauu

SEQ ID NO: 366180 - RNA, 19 nt, Homo sapiens
  misc_RNA (1)...(19): siRNA sense strand
ggaaauaauaagggaguaa

SEQ ID NO: 366181 - RNA, 19 nt, Homo sapiens
  misc_RNA (1)...(19): siRNA sense strand
ggugcuagaauuuguuaua

SEQ ID NO: 366182 - RNA, 19 nt, Homo sapiens
  misc_RNA (1)...(19): siRNA sense strand
gcuguaaucacuaaacuug

SEQ ID NO: 366183 - RNA, 19 nt, Homo sapiens
  misc_RNA (1)...(19): siRNA sense strand
ggaguaagcccugaaccaa

SEQ ID NO: 366184 - RNA, 19 nt, Homo sapiens
  misc_RNA (1)...(19): siRNA sense strand
gcuaugcgguggugcuaga

SEQ ID NO: 366185 - RNA, 19 nt, Homo sapiens
  misc_RNA (1)...(19): siRNA sense strand
ugccugagguuucauuuga

SEQ ID NO: 366186 - RNA, 19 nt, Homo sapiens
  misc_RNA (1)...(19): siRNA sense strand
auacagauauggcaacauc

SEQ ID NO: 366187 - RNA, 19 nt, Homo sapiens
  misc_RNA (1)...(19): siRNA sense strand
gggaacagcgagauuguga

SEQ ID NO: 366188 - RNA, 19 nt, Homo sapiens
  misc_RNA (1)...(19): siRNA sense strand
ucaaaacccauuccaauua

SEQ ID NO: 366189 - RNA, 19 nt, Homo sapiens
  misc_RNA (1)...(19): siRNA sense strand
gaagaguuauuagcagaag

SEQ ID NO: 366190 - RNA, 19 nt, Homo sapiens
  misc_RNA (1)...(19): siRNA sense strand
uaacuuaguggcaauugaa

SEQ ID NO: 366191 - RNA, 19 nt, Homo sapiens
  misc_RNA (1)...(19): siRNA sense strand
gaagauaaacggaaaacaa

SEQ ID NO: 366192 - RNA, 19 nt, Homo sapiens
  misc_RNA (1)...(19): siRNA sense strand
cuacuuuacuccaacuuau

SEQ ID NO: 366193 - RNA, 19 nt, Homo sapiens
  misc_RNA (1)...(19): siRNA sense strand
acaagaagaguguaacuga

SEQ ID NO: 366194 - RNA, 19 nt, Homo sapiens
  misc_RNA (1)...(19): siRNA sense strand
gaaggguuauuccagucaa

SEQ ID NO: 366195 - RNA, 19 nt, Homo sapiens
  misc_RNA (1)...(19): siRNA sense strand
ugaugaaauucgacaagaa

SEQ ID NO: 366196 - RNA, 19 nt, Homo sapiens
  misc_RNA (1)...(19): siRNA sense strand
ugaacuggcuuauaucaac

SEQ ID NO: 366197 - RNA, 19 nt, Homo sapiens
  misc_RNA (1)...(19): siRNA sense strand
gagauuguuuaccagaguu

SEQ ID NO: 366198 - RNA, 19 nt, Homo sapiens
  misc_RNA (1)...(19): siRNA sense strand
guacugaugccauggaugu

SEQ ID NO: 366199 - RNA, 19 nt, Homo sapiens
  misc_RNA (1)...(19): siRNA sense strand
ggugaucaaccuaaggaua

SEQ ID NO: 366200 - RNA, 19 nt, Homo sapiens
  misc_RNA (1)...(19): siRNA sense strand
caaggugccuguaggugau

SEQ ID NO: 366201 - RNA, 19 nt, Homo sapiens
  misc_RNA (1)...(19): siRNA sense strand
gguuggagaugguguucaa

SEQ ID NO: 366202 - RNA, 19 nt, Homo sapiens
  misc_RNA (1)...(19): siRNA sense strand
gaauuaccuucagcuguau

SEQ ID NO: 366203 - RNA, 19 nt, Homo sapiens
  misc_RNA (1)...(19): siRNA sense strand
acacaggaauuguuacgau

SEQ ID NO: 366204 - RNA, 19 nt, Homo sapiens
  misc_RNA (1)...(19): siRNA sense strand
aaucaaacgucuagaagag

SEQ ID NO: 366205 - RNA, 19 nt, Homo sapiens
  misc_RNA (1)...(19): siRNA sense strand
guauugaugggaaggguua

SEQ ID NO: 366206 - RNA, 19 nt, Homo sapiens
  misc_RNA (1)...(19): siRNA sense strand
gagauugugagguuauuga

SEQ ID NO: 366207 - RNA, 19 nt, Homo sapiens
  misc_RNA (1)...(19): siRNA sense strand
cuaaauagcuacggugaac

SEQ ID NO: 366208 - RNA, 19 nt, Homo sapiens
  misc_RNA (1)...(19): siRNA sense strand
aaagguugccuguuacaaa

SEQ ID NO: 366209 - RNA, 19 nt, Homo sapiens
  misc_RNA (1)...(19): siRNA sense strand
auucagcacuguagcaauu

SEQ ID NO: 366210 - RNA, 19 nt, Homo sapiens
  misc_RNA (1)...(19): siRNA sense strand
ugagguuucauuugaguua

SEQ ID NO: 366211 - RNA, 19 nt, Homo sapiens
  misc_RNA (1)...(19): siRNA sense strand
uaccaaauuugccacagaa

SEQ ID NO: 366212 - RNA, 19 nt, Homo sapiens
  misc_RNA (1)...(19): siRNA sense strand
ccuuaacacuauugacauu

SEQ ID NO: 366213 - RNA, 19 nt, Homo sapiens
  misc_RNA (1)...(19): siRNA sense strand
acagcgagauugugagguu

SEQ ID NO: 366214 - RNA, 19 nt, Homo sapiens
  misc_RNA (1)...(19): siRNA sense strand
acaggcaacuggagaggaa

SEQ ID NO: 366215 - RNA, 19 nt, Homo sapiens
  misc_RNA (1)...(19): siRNA sense strand
agacuuugcugaugcuugu

SEQ ID NO: 366216 - RNA, 19 nt, Homo sapiens
  misc_RNA (1)...(19): siRNA sense strand
gaggaaaugcaaaggauca

SEQ ID NO: 366217 - RNA, 19 nt, Homo sapiens
  misc_RNA (1)...(19): siRNA sense strand
gugaucaaccuaaggauau

SEQ ID NO: 366218 - RNA, 19 nt, Homo sapiens
  misc_RNA (1)...(19): siRNA sense strand
uaggccagcuguauaaauc

SEQ ID NO: 366219 - RNA, 19 nt, Homo sapiens
  misc_RNA (1)...(19): siRNA sense strand
caaaacccauuccaauuau

SEQ ID NO: 366220 - RNA, 19 nt, Homo sapiens
  misc_RNA (1)...(19): siRNA sense strand
cacaaaacauccagacuuu

SEQ ID NO: 366221 - RNA, 19 nt, Homo sapiens
  misc_RNA (1)...(19): siRNA sense strand
gaauuguuacgauuuccua

SEQ ID NO: 366222 - RNA, 19 nt, Homo sapiens
  misc_RNA (1)...(19): siRNA sense strand
cacaggaauuguuacgauu

SEQ ID NO: 366223 - RNA, 19 nt, Homo sapiens
  misc_RNA (1)...(19): siRNA sense strand
caauuacaguacacaggaa

SEQ ID NO: 366224 - RNA, 19 nt, Homo sapiens
  misc_RNA (1)...(19): siRNA sense strand
gggcgaaccuuagaaucug

SEQ ID NO: 366225 - RNA, 19 nt, Homo sapiens
  misc_RNA (1)...(19): siRNA sense strand
ggcgcuaauuccugucaua

SEQ ID NO: 366226 - RNA, 19 nt, Homo sapiens
  misc_RNA (1)...(19): siRNA sense strand
uaaacuugaucucauggau

SEQ ID NO: 366227 - RNA, 19 nt, Homo sapiens
  misc_RNA (1)...(19): siRNA sense strand
gaacgcagagcagcggaaa

SEQ ID NO: 366228 - RNA, 19 nt, Homo sapiens
  misc_RNA (1)...(19): siRNA sense strand
gaggaaugcugaaaacuuc

SEQ ID NO: 366229 - RNA, 19 nt, Homo sapiens
  misc_RNA (1)...(19): siRNA sense strand
gguugccuguuacaaauga

SEQ ID NO: 366230 - RNA, 19 nt, Homo sapiens
  misc_RNA (1)...(19): siRNA sense strand
gcuacuuuacuccaacuua

SEQ ID NO: 366231 - RNA, 19 nt, Homo sapiens
  misc_RNA (1)...(19): siRNA sense strand
cagcgagauugugagguua

SEQ ID NO: 366232 - RNA, 19 nt, Homo sapiens
  misc_RNA (1)...(19): siRNA sense strand
caauugaacuggcuuauau

SEQ ID NO: 366233 - RNA, 19 nt, Homo sapiens
  misc_RNA (1)...(19): siRNA sense strand
gaaagaagcagcugauaug

SEQ ID NO: 366234 - RNA, 19 nt, Homo sapiens
  misc_RNA (1)...(19): siRNA sense strand
ggagccagcuagauauuaa

SEQ ID NO: 366235 - RNA, 19 nt, Homo sapiens
  misc_RNA (1)...(19): siRNA sense strand
gaaacaggcuagccagaga

SEQ ID NO: 366236 - RNA, 19 nt, Homo sapiens
  misc_RNA (1)...(19): siRNA sense strand
ugacuugucuucuucguaa

SEQ ID NO: 366237 - RNA, 19 nt, Homo sapiens
  misc_RNA (1)...(19): siRNA sense strand
agaauuaccuucagcugua

SEQ ID NO: 366238 - RNA, 19 nt, Homo sapiens
  misc_RNA (1)...(19): siRNA sense strand
caaaggcaguaaugcauuu

SEQ ID NO: 366239 - RNA, 19 nt, Homo sapiens
  misc_RNA (1)...(19): siRNA sense strand
caaggagccagucaaauua

SEQ ID NO: 366240 - RNA, 19 nt, Homo sapiens
  misc_RNA (1)...(19): siRNA sense strand
ggaacaaaguaucuugcua

SEQ ID NO: 366241 - RNA, 19 nt, Homo sapiens
  misc_RNA (1)...(19): siRNA sense strand
guaaauuucuucacaccaa

SEQ ID NO: 366242 - RNA, 19 nt, Homo sapiens
  misc_RNA (1)...(19): siRNA sense strand
ggaaagaagcagcugauau

SEQ ID NO: 366243 - RNA, 19 nt, Homo sapiens
  misc_RNA (1)...(19): siRNA sense strand
ggaauaauuggaguaguua

SEQ ID NO: 366244 - RNA, 19 nt, Homo sapiens
  misc_RNA (1)...(19): siRNA sense strand
gcaaaucaaacgucuagaa

SEQ ID NO: 366245 - RNA, 19 nt, Homo sapiens
  misc_RNA (1)...(19): siRNA sense strand
caucagagauuguuuacca

SEQ ID NO: 366246 - RNA, 19 nt, Homo sapiens
  misc_RNA (1)...(19): siRNA sense strand
caauagaaauggaacaaag

SEQ ID NO: 366247 - RNA, 19 nt, Homo sapiens
  misc_RNA (1)...(19): siRNA sense strand
acaagaagauaaacggaaa

SEQ ID NO: 366248 - RNA, 19 nt, Homo sapiens
  misc_RNA (1)...(19): siRNA sense strand
cguaaaagguugccuguua

SEQ ID NO: 366249 - RNA, 19 nt, Homo sapiens
  misc_RNA (1)...(19): siRNA sense strand
gcagaacccuagcuguaau

SEQ ID NO: 366250 - RNA, 19 nt, Homo sapiens
  misc_RNA (1)...(19): siRNA sense strand
caaauuugccacagaauau

SEQ ID NO: 366251 - RNA, 19 nt, Homo sapiens
  misc_RNA (1)...(19): siRNA sense strand
gcaauugaacuggcuuaua

SEQ ID NO: 366252 - RNA, 19 nt, Homo sapiens
  misc_RNA (1)...(19): siRNA sense strand
gaugaaauucgacaagaaa

SEQ ID NO: 366253 - RNA, 19 nt, Homo sapiens
  misc_RNA (1)...(19): siRNA sense strand
acaaggagccagucaaauu

SEQ ID NO: 366254 - RNA, 19 nt, Homo sapiens
  misc_RNA (1)...(19): siRNA sense strand
caggcuagccagagaauua

SEQ ID NO: 366255 - RNA, 19 nt, Homo sapiens
  misc_RNA (1)...(19): siRNA sense strand
cacccaacguugucaauuu

SEQ ID NO: 366256 - RNA, 19 nt, Homo sapiens
  misc_RNA (1)...(19): siRNA sense strand
gaacuggcuuauaucaaca

SEQ ID NO: 366257 - RNA, 19 nt, Homo sapiens
  misc_RNA (1)...(19): siRNA sense strand
ugaaggaacugcaaaauau

SEQ ID NO: 366258 - RNA, 19 nt, Homo sapiens
  misc_RNA (1)...(19): siRNA sense strand
gaaccaauucaucuuaaga

SEQ ID NO: 366259 - RNA, 19 nt, Homo sapiens
  misc_RNA (1)...(19): siRNA sense strand
gcuaaaggcauuacaagga

SEQ ID NO: 366260 - RNA, 19 nt, Homo sapiens
  misc_RNA (1)...(19): siRNA sense strand
gggcuaaugaacaauaaua

SEQ ID NO: 366261 - RNA, 19 nt, Homo sapiens
  misc_RNA (1)...(19): siRNA sense strand
uggcuuauaucaacacaaa

SEQ ID NO: 366262 - RNA, 19 nt, Homo sapiens
  misc_RNA (1)...(19): siRNA sense strand
caguaucagucucuucuaa

SEQ ID NO: 366263 - RNA, 19 nt, Homo sapiens
  misc_RNA (1)...(19): siRNA sense strand
guuauugaacgacucauua

SEQ ID NO: 366264 - RNA, 19 nt, Homo sapiens
  misc_RNA (1)...(19): siRNA sense strand
ccaaauuugccacagaaua

SEQ ID NO: 366265 - RNA, 19 nt, Homo sapiens
  misc_RNA (1)...(19): siRNA sense strand
ucacuaaacuugaucucau

SEQ ID NO: 366266 - RNA, 19 nt, Homo sapiens
  misc_RNA (1)...(19): siRNA sense strand
gcacagcgcaggaaagaag

SEQ ID NO: 366267 - RNA, 19 nt, Homo sapiens
  misc_RNA (1)...(19): siRNA sense strand
gcuaauuccugucauaaac

SEQ ID NO: 366268 - RNA, 19 nt, Homo sapiens
  misc_RNA (1)...(19): siRNA sense strand
uaaacuucaugaugccaua

SEQ ID NO: 366269 - RNA, 19 nt, Homo sapiens
  misc_RNA (1)...(19): siRNA sense strand
ucacaucagagauuguuua

SEQ ID NO: 366270 - RNA, 19 nt, Homo sapiens
  misc_RNA (1)...(19): siRNA sense strand
uggaauaauuggaguaguu

SEQ ID NO: 366271 - RNA, 19 nt, Homo sapiens
  misc_RNA (1)...(19): siRNA sense strand
caacaucagaggcacuuaa

SEQ ID NO: 366272 - RNA, 19 nt, Homo sapiens
  misc_RNA (1)...(19): siRNA sense strand
gugaacccguggaugauaa

SEQ ID NO: 366273 - RNA, 19 nt, Homo sapiens
  misc_RNA (1)...(19): siRNA sense strand
guaucagucucuucuaaau

SEQ ID NO: 366274 - RNA, 19 nt, Homo sapiens
  misc_RNA (1)...(19): siRNA sense strand
gaaaacaacaggagaagaa

SEQ ID NO: 366275 - RNA, 19 nt, Homo sapiens
  misc_RNA (1)...(19): siRNA sense strand
gaacgacucauuaaaucau

SEQ ID NO: 366276 - RNA, 19 nt, Homo sapiens
  misc_RNA (1)...(19): siRNA sense strand
gaaauggaacaaaguaucu

SEQ ID NO: 366277 - RNA, 19 nt, Homo sapiens
  misc_RNA (1)...(19): siRNA sense strand
caagaagaguguaacugau

SEQ ID NO: 366278 - RNA, 19 nt, Homo sapiens
  misc_RNA (1)...(19): siRNA sense strand
cuaaggauauugagcuuca

SEQ ID NO: 366279 - RNA, 19 nt, Homo sapiens
  misc_RNA (1)...(19): siRNA sense strand
aguaagcccugaaccaauu

SEQ ID NO: 366280 - RNA, 19 nt, Homo sapiens
  misc_RNA (1)...(19): siRNA sense strand
ggaaauaauaagggaguaa

SEQ ID NO: 366281 - RNA, 19 nt, Homo sapiens
  misc_RNA (1)...(19): siRNA sense strand
ggugcuagaauuuguuaua

SEQ ID NO: 366282 - RNA, 19 nt, Homo sapiens
  misc_RNA (1)...(19): siRNA sense strand
gcuguaaucacuaaacuug

SEQ ID NO: 366283 - RNA, 19 nt, Homo sapiens
  misc_RNA (1)...(19): siRNA sense strand
ggaguaagcccugaaccaa

SEQ ID NO: 366284 - RNA, 19 nt, Homo sapiens
  misc_RNA (1)...(19): siRNA sense strand
gcuaugcgguggugcuaga

SEQ ID NO: 366285 - RNA, 19 nt, Homo sapiens
  misc_RNA (1)...(19): siRNA sense strand
ugccugagguuucauuuga

SEQ ID NO: 366286 - RNA, 19 nt, Homo sapiens
  misc_RNA (1)...(19): siRNA sense strand
auacagauauggcaacauc

SEQ ID NO: 366287 - RNA, 19 nt, Homo sapiens
  misc_RNA (1)...(19): siRNA sense strand
gggaacagcgagauuguga

SEQ ID NO: 366288 - RNA, 19 nt, Homo sapiens
  misc_RNA (1)...(19): siRNA sense strand
ucaaaacccauuccaauua

SEQ ID NO: 366289 - RNA, 19 nt, Homo sapiens
  misc_RNA (1)...(19): siRNA sense strand
gaagaguuauuagcagaag

SEQ ID NO: 366290 - RNA, 19 nt, Homo sapiens
  misc_RNA (1)...(19): siRNA sense strand
uaacuuaguggcaauugaa

SEQ ID NO: 366291 - RNA, 19 nt, Homo sapiens
  misc_RNA (1)...(19): siRNA sense strand
gaagauaaacggaaaacaa

SEQ ID NO: 366292 - RNA, 19 nt, Homo sapiens
  misc_RNA (1)...(19): siRNA sense strand
cuacuuuacuccaacuuau

SEQ ID NO: 366293 - RNA, 19 nt, Homo sapiens
  misc_RNA (1)...(19): siRNA sense strand
acaagaagaguguaacuga

SEQ ID NO: 366294 - RNA, 19 nt, Homo sapiens
  misc_RNA (1)...(19): siRNA sense strand
gaaggguuauuccagucaa

SEQ ID NO: 366295 - RNA, 19 nt, Homo sapiens
  misc_RNA (1)...(19): siRNA sense strand
ugaugaaauucgacaagaa

SEQ ID NO: 366296 - RNA, 19 nt, Homo sapiens
  misc_RNA (1)...(19): siRNA sense strand
ugaacuggcuuauaucaac

SEQ ID NO: 366297 - RNA, 19 nt, Homo sapiens
  misc_RNA (1)...(19): siRNA sense strand
gagauuguuuaccagaguu

SEQ ID NO: 366298 - RNA, 19 nt, Homo sapiens
  misc_RNA (1)...(19): siRNA sense strand
guacugaugccauggaugu

SEQ ID NO: 366299 - RNA, 19 nt, Homo sapiens
  misc_RNA (1)...(19): siRNA sense strand
ggugaucaaccuaaggaua

SEQ ID NO: 366300 - RNA, 19 nt, Homo sapiens
  misc_RNA (1)...(19): siRNA sense strand
caaggugccuguaggugau

SEQ ID NO: 366301 - RNA, 19 nt, Homo sapiens
  misc_RNA (1)...(19): siRNA sense strand
gguuggagaugguguucaa

SEQ ID NO: 366302 - RNA, 19 nt, Homo sapiens
  misc_RNA (1)...(19): siRNA sense strand
gaauuaccuucagcuguau

SEQ ID NO: 366303 - RNA, 19 nt, Homo sapiens
  misc_RNA (1)...(19): siRNA sense strand
acacaggaauuguuacgau

SEQ ID NO: 366304 - RNA, 19 nt, Homo sapiens
  misc_RNA (1)...(19): siRNA sense strand
aaucaaacgucuagaagag

SEQ ID NO: 366305 - RNA, 19 nt, Homo sapiens
  misc_RNA (1)...(19): siRNA sense strand
guauugaugggaaggguua

SEQ ID NO: 366306 - RNA, 19 nt, Homo sapiens
  misc_RNA (1)...(19): siRNA sense strand
gagauugugagguuauuga

SEQ ID NO: 366307 - RNA, 19 nt, Homo sapiens
  misc_RNA (1)...(19): siRNA sense strand
cuaaauagcuacggugaac

SEQ ID NO: 366308 - RNA, 19 nt, Homo sapiens
  misc_RNA (1)...(19): siRNA sense strand
aaagguugccuguuacaaa

SEQ ID NO: 366309 - RNA, 19 nt, Homo sapiens
  misc_RNA (1)...(19): siRNA sense strand
auucagcacuguagcaauu

SEQ ID NO: 366310 - RNA, 19 nt, Homo sapiens
  misc_RNA (1)...(19): siRNA sense strand
ugagguuucauuugaguua

SEQ ID NO: 366311 - RNA, 19 nt, Homo sapiens
  misc_RNA (1)...(19): siRNA sense strand
uaccaaauuugccacagaa

SEQ ID NO: 366312 - RNA, 19 nt, Homo sapiens
  misc_RNA (1)...(19): siRNA sense strand
ccuuaacacuauugacauu

SEQ ID NO: 366313 - RNA, 19 nt, Homo sapiens
  misc_RNA (1)...(19): siRNA sense strand
acagcgagauugugagguu

SEQ ID NO: 366314 - RNA, 19 nt, Homo sapiens
  misc_RNA (1)...(19): siRNA sense strand
acaggcaacuggagaggaa

SEQ ID NO: 366315 - RNA, 19 nt, Homo sapiens
  misc_RNA (1)...(19): siRNA sense strand
agacuuugcugaugcuugu

SEQ ID NO: 366316 - RNA, 19 nt, Homo sapiens
  misc_RNA (1)...(19): siRNA sense strand
gaggaaaugcaaaggauca

SEQ ID NO: 366317 - RNA, 19 nt, Homo sapiens
  misc_RNA (1)...(19): siRNA sense strand
gugaucaaccuaaggauau

SEQ ID NO: 366318 - RNA, 19 nt, Homo sapiens
  misc_RNA (1)...(19): siRNA sense strand
uaggccagcuguauaaauc

SEQ ID NO: 366319 - RNA, 19 nt, Homo sapiens
  misc_RNA (1)...(19): siRNA sense strand
caaaacccauuccaauuau

SEQ ID NO: 366320 - RNA, 19 nt, Homo sapiens
  misc_RNA (1)...(19): siRNA sense strand
cacaaaacauccagacuuu

SEQ ID NO: 366321 - RNA, 19 nt, Homo sapiens
  misc_RNA (1)...(19): siRNA sense strand
gaauuguuacgauuuccua

SEQ ID NO: 366322 - RNA, 19 nt, Homo sapiens
  misc_RNA (1)...(19): siRNA sense strand
cacaggaauuguuacgauu

SEQ ID NO: 366323 - RNA, 19 nt, Homo sapiens
  misc_RNA (1)...(19): siRNA sense strand
caauuacaguacacaggaa

SEQ ID NO: 366324 - RNA, 19 nt, Homo sapiens
  misc_RNA (1)...(19): siRNA sense strand
gggcgaaccuuagaaucug

SEQ ID NO: 366325 - RNA, 19 nt, Homo sapiens
  misc_RNA (1)...(19): siRNA sense strand
ggcgcuaauuccugucaua

SEQ ID NO: 366326 - RNA, 19 nt, Homo sapiens
  misc_RNA (1)...(19): siRNA sense strand
uaaacuugaucucauggau

SEQ ID NO: 366327 - RNA, 19 nt, Homo sapiens
  misc_RNA (1)...(19): siRNA sense strand
gaacgcagagcagcggaaa

SEQ ID NO: 366328 - RNA, 19 nt, Homo sapiens
  misc_RNA (1)...(19): siRNA sense strand
gaggaaugcugaaaacuuc

SEQ ID NO: 366329 - RNA, 19 nt, Homo sapiens
  misc_RNA (1)...(19): siRNA sense strand
gguugccuguuacaaauga

SEQ ID NO: 366330 - RNA, 19 nt, Homo sapiens
  misc_RNA (1)...(19): siRNA sense strand
gcuacuuuacuccaacuua

SEQ ID NO: 366331 - RNA, 19 nt, Homo sapiens
  misc_RNA (1)...(19): siRNA sense strand
cagcgagauugugagguua

SEQ ID NO: 366332 - RNA, 19 nt, Homo sapiens
  misc_RNA (1)...(19): siRNA sense strand
caauugaacuggcuuauau

SEQ ID NO: 366333 - RNA, 19 nt, Homo sapiens
  misc_RNA (1)...(19): siRNA sense strand
gaaagaagcagcugauaug

SEQ ID NO: 366334 - RNA, 19 nt, Homo sapiens
  misc_RNA (1)...(19): siRNA sense strand
ggagccagcuagauauuaa

SEQ ID NO: 366335 - RNA, 19 nt, Homo sapiens
  misc_RNA (1)...(19): siRNA sense strand
gaaacaggcuagccagaga

SEQ ID NO: 366336 - RNA, 19 nt, Homo sapiens
  misc_RNA (1)...(19): siRNA sense strand
ugacuugucuucuucguaa

SEQ ID NO: 366337 - RNA, 19 nt, Homo sapiens
  misc_RNA (1)...(19): siRNA sense strand
agaauuaccuucagcugua

SEQ ID NO: 366338 - RNA, 19 nt, Homo sapiens
  misc_RNA (1)...(19): siRNA sense strand
caaaggcaguaaugcauuu

SEQ ID NO: 366339 - RNA, 19 nt, Homo sapiens
  misc_RNA (1)...(19): siRNA sense strand
caaggagccagucaaauua

SEQ ID NO: 366340 - RNA, 19 nt, Homo sapiens
  misc_RNA (1)...(19): siRNA sense strand
ggaacaaaguaucuugcua

SEQ ID NO: 366341 - RNA, 19 nt, Homo sapiens
  misc_RNA (1)...(19): siRNA sense strand
guaaauuucuucacaccaa

SEQ ID NO: 366342 - RNA, 19 nt, Homo sapiens
  misc_RNA (1)...(19): siRNA sense strand
ggaaagaagcagcugauau

SEQ ID NO: 366343 - RNA, 19 nt, Homo sapiens
  misc_RNA (1)...(19): siRNA sense strand
ggaauaauuggaguaguua

SEQ ID NO: 366344 - RNA, 19 nt, Homo sapiens
  misc_RNA (1)...(19): siRNA sense strand
gcaaaucaaacgucuagaa

SEQ ID NO: 366345 - RNA, 19 nt, Homo sapiens
  misc_RNA (1)...(19): siRNA sense strand
caucagagauuguuuacca

SEQ ID NO: 366346 - RNA, 19 nt, Homo sapiens
  misc_RNA (1)...(19): siRNA sense strand
caauagaaauggaacaaag

SEQ ID NO: 366347 - RNA, 19 nt, Homo sapiens
  misc_RNA (1)...(19): siRNA sense strand
acaagaagauaaacggaaa

SEQ ID NO: 366348 - RNA, 19 nt, Homo sapiens
  misc_RNA (1)...(19): siRNA sense strand
cguaaaagguugccuguua

SEQ ID NO: 366349 - RNA, 19 nt, Homo sapiens
  misc_RNA (1)...(19): siRNA sense strand
gcagaacccuagcuguaau

SEQ ID NO: 366350 - RNA, 19 nt, Homo sapiens
  misc_RNA (1)...(19): siRNA sense strand
caaauuugccacagaauau

SEQ ID NO: 366351 - RNA, 19 nt, Homo sapiens
  misc_RNA (1)...(19): siRNA sense strand
gcaauugaacuggcuuaua

SEQ ID NO: 366352 - RNA, 19 nt, Homo sapiens
  misc_RNA (1)...(19): siRNA sense strand
gaugaaauucgacaagaaa

SEQ ID NO: 366353 - RNA, 19 nt, Homo sapiens
  misc_RNA (1)...(19): siRNA sense strand
acaaggagccagucaaauu

SEQ ID NO: 366354 - RNA, 19 nt, Homo sapiens
  misc_RNA (1)...(19): siRNA sense strand
caggcuagccagagaauua

SEQ ID NO: 366355 - RNA, 19 nt, Homo sapiens
  misc_RNA (1)...(19): siRNA sense strand
cacccaacguugucaauuu

SEQ ID NO: 366356 - RNA, 19 nt, Homo sapiens
  misc_RNA (1)...(19): siRNA sense strand
gaacuggcuuauaucaaca

SEQ ID NO: 366357 - RNA, 19 nt, Homo sapiens
  misc_RNA (1)...(19): siRNA sense strand
ugaaggaacugcaaaauau

SEQ ID NO: 366358 - RNA, 19 nt, Homo sapiens
  misc_RNA (1)...(19): siRNA sense strand
gaaccaauucaucuuaaga

SEQ ID NO: 366359 - RNA, 19 nt, Homo sapiens
  misc_RNA (1)...(19): siRNA sense strand
gcuaaaggcauuacaagga

SEQ ID NO: 366360 - RNA, 19 nt, Homo sapiens
  misc_RNA (1)...(19): siRNA sense strand
gggcuaaugaacaauaaua

SEQ ID NO: 366361 - RNA, 19 nt, Homo sapiens
  misc_RNA (1)...(19): siRNA sense strand
uggcuuauaucaacacaaa

SEQ ID NO: 366362 - RNA, 19 nt, Homo sapiens
  misc_RNA (1)...(19): siRNA sense strand
caguaucagucucuucuaa

SEQ ID NO: 366363 - RNA, 19 nt, Homo sapiens
  misc_RNA (1)...(19): siRNA sense strand
guuauugaacgacucauua

SEQ ID NO: 366364 - RNA, 19 nt, Homo sapiens
  misc_RNA (1)...(19): siRNA sense strand
ccaaauuugccacagaaua

SEQ ID NO: 366365 - RNA, 19 nt, Homo sapiens
  misc_RNA (1)...(19): siRNA sense strand
ucacuaaacuugaucucau

SEQ ID NO: 366366 - RNA, 19 nt, Homo sapiens
  misc_RNA (1)...(19): siRNA sense strand
gcacagcgcaggaaagaag

SEQ ID NO: 366367 - RNA, 19 nt, Homo sapiens
  misc_RNA (1)...(19): siRNA sense strand
gcuaauuccugucauaaac

SEQ ID NO: 366368 - RNA, 19 nt, Homo sapiens
  misc_RNA (1)...(19): siRNA sense strand
uaaacuucaugaugccaua

SEQ ID NO: 366369 - RNA, 19 nt, Homo sapiens
  misc_RNA (1)...(19): siRNA sense strand
ucacaucagagauuguuua

SEQ ID NO: 366370 - RNA, 19 nt, Homo sapiens
  misc_RNA (1)...(19): siRNA sense strand
uggaauaauuggaguaguu

SEQ ID NO: 366371 - RNA, 19 nt, Homo sapiens
  misc_RNA (1)...(19): siRNA sense strand
caacaucagaggcacuuaa

SEQ ID NO: 366372 - RNA, 19 nt, Homo sapiens
  misc_RNA (1)...(19): siRNA sense strand
gugaacccguggaugauaa

SEQ ID NO: 366373 - RNA, 19 nt, Homo sapiens
  misc_RNA (1)...(19): siRNA sense strand
guaucagucucuucuaaau

SEQ ID NO: 366374 - RNA, 19 nt, Homo sapiens
  misc_RNA (1)...(19): siRNA sense strand
gaaaacaacaggagaagaa

SEQ ID NO: 366375 - RNA, 19 nt, Homo sapiens
  misc_RNA (1)...(19): siRNA sense strand
gaacgacucauuaaaucau

SEQ ID NO: 366376 - RNA, 19 nt, Homo sapiens
  misc_RNA (1)...(19): siRNA sense strand
gaaauggaacaaaguaucu

SEQ ID NO: 366377 - RNA, 19 nt, Homo sapiens
  misc_RNA (1)...(19): siRNA sense strand
caagaagaguguaacugau

SEQ ID NO: 366378 - RNA, 19 nt, Homo sapiens
  misc_RNA (1)...(19): siRNA sense strand
cuaaggauauugagcuuca

SEQ ID NO: 366379 - RNA, 19 nt, Homo sapiens
  misc_RNA (1)...(19): siRNA sense strand
aguaagcccugaaccaauu

SEQ ID NO: 366380 - RNA, 19 nt, Homo sapiens
  misc_RNA (1)...(19): siRNA sense strand
ggaaauaauaagggaguaa

SEQ ID NO: 366381 - RNA, 19 nt, Homo sapiens
  misc_RNA (1)...(19): siRNA sense strand
ggugcuagaauuuguuaua

SEQ ID NO: 366382 - RNA, 19 nt, Homo sapiens
  misc_RNA (1)...(19): siRNA sense strand
gcuguaaucacuaaacuug

SEQ ID NO: 366383 - RNA, 19 nt, Homo sapiens
  misc_RNA (1)...(19): siRNA sense strand
ggaguaagcccugaaccaa

SEQ ID NO: 366384 - RNA, 19 nt, Homo sapiens
  misc_RNA (1)...(19): siRNA sense strand
gcuaugcgguggugcuaga

SEQ ID NO: 366385 - RNA, 19 nt, Homo sapiens
  misc_RNA (1)...(19): siRNA sense strand
ugccugagguuucauuuga

SEQ ID NO: 366386 - RNA, 19 nt, Homo sapiens
  misc_RNA (1)...(19): siRNA sense strand
auacagauauggcaacauc

SEQ ID NO: 366387 - RNA, 19 nt, Homo sapiens
  misc_RNA (1)...(19): siRNA sense strand
gggaacagcgagauuguga

SEQ ID NO: 366388 - RNA, 19 nt, Homo sapiens
  misc_RNA (1)...(19): siRNA sense strand
ucaaaacccauuccaauua

SEQ ID NO: 366389 - RNA, 19 nt, Homo sapiens
  misc_RNA (1)...(19): siRNA sense strand
gaagaguuauuagcagaag

SEQ ID NO: 366390 - RNA, 19 nt, Homo sapiens
  misc_RNA (1)...(19): siRNA sense strand
uaacuuaguggcaauugaa

SEQ ID NO: 366391 - RNA, 19 nt, Homo sapiens
  misc_RNA (1)...(19): siRNA sense strand
gaagauaaacggaaaacaa

SEQ ID NO: 366392 - RNA, 19 nt, Homo sapiens
  misc_RNA (1)...(19): siRNA sense strand
cuacuuuacuccaacuuau

SEQ ID NO: 366393 - RNA, 19 nt, Homo sapiens
  misc_RNA (1)...(19): siRNA sense strand
acaagaagaguguaacuga

SEQ ID NO: 366394 - RNA, 19 nt, Homo sapiens
  misc_RNA (1)...(19): siRNA sense strand
gaaggguuauuccagucaa

SEQ ID NO: 366395 - RNA, 19 nt, Homo sapiens
  misc_RNA (1)...(19): siRNA sense strand
ugaugaaauucgacaagaa

SEQ ID NO: 366396 - RNA, 19 nt, Homo sapiens
  misc_RNA (1)...(19): siRNA sense strand
ugaacuggcuuauaucaac

SEQ ID NO: 366397 - RNA, 19 nt, Homo sapiens
  misc_RNA (1)...(19): siRNA sense strand
gagauuguuuaccagaguu

SEQ ID NO: 366398 - RNA, 19 nt, Homo sapiens
  misc_RNA (1)...(19): siRNA sense strand
guacugaugccauggaugu

SEQ ID NO: 366399 - RNA, 19 nt, Homo sapiens
  misc_RNA (1)...(19): siRNA sense strand
ggugaucaaccuaaggaua

SEQ ID NO: 366400 - RNA, 19 nt, Homo sapiens
  misc_RNA (1)...(19): siRNA sense strand
caaggugccuguaggugau

SEQ ID NO: 366401 - RNA, 19 nt, Homo sapiens
  misc_RNA (1)...(19): siRNA sense strand
gguuggagaugguguucaa

SEQ ID NO: 366402 - RNA, 19 nt, Homo sapiens
  misc_RNA (1)...(19): siRNA sense strand
gaauuaccuucagcuguau

SEQ ID NO: 366403 - RNA, 19 nt, Homo sapiens
  misc_RNA (1)...(19): siRNA sense strand
acacaggaauuguuacgau

SEQ ID NO: 366404 - RNA, 19 nt, Homo sapiens
  misc_RNA (1)...(19): siRNA sense strand
aaucaaacgucuagaagag

SEQ ID NO: 366405 - RNA, 19 nt, Homo sapiens
  misc_RNA (1)...(19): siRNA sense strand
guauugaugggaaggguua

SEQ ID NO: 366406 - RNA, 19 nt, Homo sapiens
  misc_RNA (1)...(19): siRNA sense strand
gagauugugagguuauuga

SEQ ID NO: 366407 - RNA, 19 nt, Homo sapiens
  misc_RNA (1)...(19): siRNA sense strand
cuaaauagcuacggugaac

SEQ ID NO: 366408 - RNA, 19 nt, Homo sapiens
  misc_RNA (1)...(19): siRNA sense strand
aaagguugccuguuacaaa

SEQ ID NO: 366409 - RNA, 19 nt, Homo sapiens
  misc_RNA (1)...(19): siRNA sense strand
auucagcacuguagcaauu

SEQ ID NO: 366410 - RNA, 19 nt, Homo sapiens
  misc_RNA (1)...(19): siRNA sense strand
ugagguuucauuugaguua

SEQ ID NO: 366411 - RNA, 19 nt, Homo sapiens
  misc_RNA (1)...(19): siRNA sense strand
uaccaaauuugccacagaa

SEQ ID NO: 366412 - RNA, 19 nt, Homo sapiens
  misc_RNA (1)...(19): siRNA sense strand
ccuuaacacuauugacauu

SEQ ID NO: 366413 - RNA, 19 nt, Homo sapiens
  misc_RNA (1)...(19): siRNA sense strand
acagcgagauugugagguu

SEQ ID NO: 366414 - RNA, 19 nt, Homo sapiens
  misc_RNA (1)...(19): siRNA sense strand
acaggcaacuggagaggaa

SEQ ID NO: 366415 - RNA, 19 nt, Homo sapiens
  misc_RNA (1)...(19): siRNA sense strand
agacuuugcugaugcuugu

SEQ ID NO: 366416 - RNA, 19 nt, Homo sapiens
  misc_RNA (1)...(19): siRNA sense strand
gaggaaaugcaaaggauca

SEQ ID NO: 366417 - RNA, 19 nt, Homo sapiens
  misc_RNA (1)...(19): siRNA sense strand
gugaucaaccuaaggauau

SEQ ID NO: 366418 - RNA, 19 nt, Homo sapiens
  misc_RNA (1)...(19): siRNA sense strand
uaggccagcuguauaaauc

SEQ ID NO: 366419 - RNA, 19 nt, Homo sapiens
  misc_RNA (1)...(19): siRNA sense strand
caaaacccauuccaauuau

SEQ ID NO: 366420 - RNA, 19 nt, Homo sapiens
  misc_RNA (1)...(19): siRNA sense strand
cacaaaacauccagacuuu

SEQ ID NO: 366421 - RNA, 19 nt, Homo sapiens
  misc_RNA (1)...(19): siRNA sense strand
gaauuguuacgauuuccua

SEQ ID NO: 366422 - RNA, 19 nt, Homo sapiens
  misc_RNA (1)...(19): siRNA sense strand
cacaggaauuguuacgauu

SEQ ID NO: 366423 - RNA, 19 nt, Homo sapiens
  misc_RNA (1)...(19): siRNA sense strand
caauuacaguacacaggaa

SEQ ID NO: 366424 - RNA, 19 nt, Homo sapiens
  misc_RNA (1)...(19): siRNA sense strand
gggcgaaccuuagaaucug

SEQ ID NO: 366425 - RNA, 19 nt, Homo sapiens
  misc_RNA (1)...(19): siRNA sense strand
ggcgcuaauuccugucaua

SEQ ID NO: 366426 - RNA, 19 nt, Homo sapiens
  misc_RNA (1)...(19): siRNA sense strand
uaaacuugaucucauggau

SEQ ID NO: 366427 - RNA, 19 nt, Homo sapiens
  misc_RNA (1)...(19): siRNA sense strand
gaacgcagagcagcggaaa

SEQ ID NO: 366428 - RNA, 19 nt, Homo sapiens
  misc_RNA (1)...(19): siRNA sense strand
gaggaaugcugaaaacuuc

SEQ ID NO: 366429 - RNA, 19 nt, Homo sapiens
  misc_RNA (1)...(19): siRNA sense strand
gguugccuguuacaaauga

SEQ ID NO: 366430 - RNA, 19 nt, Homo sapiens
  misc_RNA (1)...(19): siRNA sense strand
gcuacuuuacuccaacuua

SEQ ID NO: 366431 - RNA, 19 nt, Homo sapiens
  misc_RNA (1)...(19): siRNA sense strand
cagcgagauugugagguua

SEQ ID NO: 366432 - RNA, 19 nt, Homo sapiens
  misc_RNA (1)...(19): siRNA sense strand
caauugaacuggcuuauau

SEQ ID NO: 366433 - RNA, 19 nt, Homo sapiens
  misc_RNA (1)...(19): siRNA sense strand
gaaagaagcagcugauaug

SEQ ID NO: 366434 - RNA, 19 nt, Homo sapiens
  misc_RNA (1)...(19): siRNA sense strand
ggagccagcuagauauuaa

SEQ ID NO: 366435 - RNA, 19 nt, Homo sapiens
  misc_RNA (1)...(19): siRNA sense strand
gaaacaggcuagccagaga

SEQ ID NO: 366436 - RNA, 19 nt, Homo sapiens
  misc_RNA (1)...(19): siRNA sense strand
ugacuugucuucuucguaa

SEQ ID NO: 366437 - RNA, 19 nt, Homo sapiens
  misc_RNA (1)...(19): siRNA sense strand
agaauuaccuucagcugua

SEQ ID NO: 366438 - RNA, 19 nt, Homo sapiens
  misc_RNA (1)...(19): siRNA sense strand
caaaggcaguaaugcauuu

SEQ ID NO: 366439 - RNA, 19 nt, Homo sapiens
  misc_RNA (1)...(19): siRNA sense strand
caaggagccagucaaauua

SEQ ID NO: 366440 - RNA, 19 nt, Homo sapiens
  misc_RNA (1)...(19): siRNA sense strand
ggaacaaaguaucuugcua

SEQ ID NO: 366441 - RNA, 19 nt, Homo sapiens
  misc_RNA (1)...(19): siRNA sense strand
guaaauuucuucacaccaa

SEQ ID NO: 366442 - RNA, 19 nt, Homo sapiens
  misc_RNA (1)...(19): siRNA sense strand
ggaaagaagcagcugauau

SEQ ID NO: 366443 - RNA, 19 nt, Homo sapiens
  misc_RNA (1)...(19): siRNA sense strand
ggaauaauuggaguaguua

SEQ ID NO: 366444 - RNA, 19 nt, Homo sapiens
  misc_RNA (1)...(19): siRNA sense strand
gcaaaucaaacgucuagaa

SEQ ID NO: 366445 - RNA, 19 nt, Homo sapiens
  misc_RNA (1)...(19): siRNA sense strand
caucagagauuguuuacca

SEQ ID NO: 366446 - RNA, 19 nt, Homo sapiens
  misc_RNA (1)...(19): siRNA sense strand
caauagaaauggaacaaag

SEQ ID NO: 366447 - RNA, 19 nt, Homo sapiens
  misc_RNA (1)...(19): siRNA sense strand
acaagaagauaaacggaaa

SEQ ID NO: 366448 - RNA, 19 nt, Homo sapiens
  misc_RNA (1)...(19): siRNA sense strand
cguaaaagguugccuguua

SEQ ID NO: 366449 - RNA, 19 nt, Homo sapiens
  misc_RNA (1)...(19): siRNA sense strand
gcagaacccuagcuguaau

SEQ ID NO: 366450 - RNA, 19 nt, Homo sapiens
  misc_RNA (1)...(19): siRNA sense strand
caaauuugccacagaauau

SEQ ID NO: 366451 - RNA, 19 nt, Homo sapiens
  misc_RNA (1)...(19): siRNA sense strand
gcaauugaacuggcuuaua

SEQ ID NO: 366452 - RNA, 19 nt, Homo sapiens
  misc_RNA (1)...(19): siRNA sense strand
gaugaaauucgacaagaaa

SEQ ID NO: 366453 - RNA, 19 nt, Homo sapiens
  misc_RNA (1)...(19): siRNA sense strand
acaaggagccagucaaauu

SEQ ID NO: 366454 - RNA, 19 nt, Homo sapiens
  misc_RNA (1)...(19): siRNA sense strand
caggcuagccagagaauua

SEQ ID NO: 366455 - RNA, 19 nt, Homo sapiens
  misc_RNA (1)...(19): siRNA sense strand
cacccaacguugucaauuu

SEQ ID NO: 366456 - RNA, 19 nt, Homo sapiens
  misc_RNA (1)...(19): siRNA sense strand
gaacuggcuuauaucaaca

SEQ ID NO: 366457 - RNA, 19 nt, Homo sapiens
  misc_RNA (1)...(19): siRNA sense strand
ugaaggaacugcaaaauau

SEQ ID NO: 366458 - RNA, 19 nt, Homo sapiens
  misc_RNA (1)...(19): siRNA sense strand
gaaccaauucaucuuaaga

SEQ ID NO: 366459 - RNA, 19 nt, Homo sapiens
  misc_RNA (1)...(19): siRNA sense strand
gcuaaaggcauuacaagga

SEQ ID NO: 366460 - RNA, 19 nt, Homo sapiens
  misc_RNA (1)...(19): siRNA sense strand
gggcuaaugaacaauaaua

SEQ ID NO: 366461 - RNA, 19 nt, Homo sapiens
  misc_RNA (1)...(19): siRNA sense strand
uggcuuauaucaacacaaa

SEQ ID NO: 366462 - RNA, 19 nt, Homo sapiens
  misc_RNA (1)...(19): siRNA sense strand
caguaucagucucuucuaa

SEQ ID NO: 366463 - RNA, 19 nt, Homo sapiens
  misc_RNA (1)...(19): siRNA sense strand
guuauugaacgacucauua

SEQ ID NO: 366464 - RNA, 19 nt, Homo sapiens
  misc_RNA (1)...(19): siRNA sense strand
ccaaauuugccacagaaua

SEQ ID NO: 366465 - RNA, 19 nt, Homo sapiens
  misc_RNA (1)...(19): siRNA sense strand
ucacuaaacuugaucucau

SEQ ID NO: 366466 - RNA, 19 nt, Homo sapiens
  misc_RNA (1)...(19): siRNA sense strand
gcacagcgcaggaaagaag

SEQ ID NO: 366467 - RNA, 19 nt, Homo sapiens
  misc_RNA (1)...(19): siRNA sense strand
gcuaauuccugucauaaac

SEQ ID NO: 366468 - RNA, 19 nt, Homo sapiens
  misc_RNA (1)...(19): siRNA sense strand
uaaacuucaugaugccaua

SEQ ID NO: 366469 - RNA, 19 nt, Homo sapiens
  misc_RNA (1)...(19): siRNA sense strand
ucacaucagagauuguuua

SEQ ID NO: 366470 - RNA, 19 nt, Homo sapiens
  misc_RNA (1)...(19): siRNA sense strand
uggaauaauuggaguaguu

SEQ ID NO: 366471 - RNA, 19 nt, Homo sapiens
  misc_RNA (1)...(19): siRNA sense strand
caacaucagaggcacuuaa

SEQ ID NO: 366472 - RNA, 19 nt, Homo sapiens
  misc_RNA (1)...(19): siRNA sense strand
gugaacccguggaugauaa

SEQ ID NO: 366473 - RNA, 19 nt, Homo sapiens
  misc_RNA (1)...(19): siRNA sense strand
guaucagucucuucuaaau

SEQ ID NO: 366474 - RNA, 19 nt, Homo sapiens
  misc_RNA (1)...(19): siRNA sense strand
gaaaacaacaggagaagaa

SEQ ID NO: 366475 - RNA, 19 nt, Homo sapiens
  misc_RNA (1)...(19): siRNA sense strand
gaacgacucauuaaaucau

SEQ ID NO: 366476 - RNA, 19 nt, Homo sapiens
  misc_RNA (1)...(19): siRNA sense strand
gaaauggaacaaaguaucu

SEQ ID NO: 366477 - RNA, 19 nt, Homo sapiens
  misc_RNA (1)...(19): siRNA sense strand
caagaagaguguaacugau

SEQ ID NO: 366478 - RNA, 19 nt, Homo sapiens
  misc_RNA (1)...(19): siRNA sense strand
cuaaggauauugagcuuca

SEQ ID NO: 366479 - RNA, 19 nt, Homo sapiens
  misc_RNA (1)...(19): siRNA sense strand
aguaagcccugaaccaauu

SEQ ID NO: 366480 - RNA, 19 nt, Homo sapiens
  misc_RNA (1)...(19): siRNA sense strand
ggaaauaauaagggaguaa

SEQ ID NO: 366481 - RNA, 19 nt, Homo sapiens
  misc_RNA (1)...(19): siRNA sense strand
ggugcuagaauuuguuaua

SEQ ID NO: 366482 - RNA, 19 nt, Homo sapiens
  misc_RNA (1)...(19): siRNA sense strand
gcuguaaucacuaaacuug

SEQ ID NO: 366483 - RNA, 19 nt, Homo sapiens
  misc_RNA (1)...(19): siRNA sense strand
ggaguaagcccugaaccaa

SEQ ID NO: 366484 - RNA, 19 nt, Homo sapiens
  misc_RNA (1)...(19): siRNA sense strand
gcuaugcgguggugcuaga

SEQ ID NO: 366485 - RNA, 19 nt, Homo sapiens
  misc_RNA (1)...(19): siRNA sense strand
ugccugagguuucauuuga

SEQ ID NO: 366486 - RNA, 19 nt, Homo sapiens
  misc_RNA (1)...(19): siRNA sense strand
auacagauauggcaacauc

SEQ ID NO: 366487 - RNA, 19 nt, Homo sapiens
  misc_RNA (1)...(19): siRNA sense strand
gggaacagcgagauuguga

SEQ ID NO: 366488 - RNA, 19 nt, Homo sapiens
  misc_RNA (1)...(19): siRNA sense strand
ucaaaacccauuccaauua

SEQ ID NO: 366489 - RNA, 19 nt, Homo sapiens
  misc_RNA (1)...(19): siRNA sense strand
gaagaguuauuagcagaag

SEQ ID NO: 366490 - RNA, 19 nt, Homo sapiens
  misc_RNA (1)...(19): siRNA sense strand
uaacuuaguggcaauugaa

SEQ ID NO: 366491 - RNA, 19 nt, Homo sapiens
  misc_RNA (1)...(19): siRNA sense strand
gaagauaaacggaaaacaa

SEQ ID NO: 366492 - RNA, 19 nt, Homo sapiens
  misc_RNA (1)...(19): siRNA sense strand
cuacuuuacuccaacuuau

SEQ ID NO: 366493 - RNA, 19 nt, Homo sapiens
  misc_RNA (1)...(19): siRNA sense strand
acaagaagaguguaacuga

SEQ ID NO: 366494 - RNA, 19 nt, Homo sapiens
  misc_RNA (1)...(19): siRNA sense strand
gaaggguuauuccagucaa

SEQ ID NO: 366495 - RNA, 19 nt, Homo sapiens
  misc_RNA (1)...(19): siRNA sense strand
ugaugaaauucgacaagaa

SEQ ID NO: 366496 - RNA, 19 nt, Homo sapiens
  misc_RNA (1)...(19): siRNA sense strand
ugaacuggcuuauaucaac

SEQ ID NO: 366497 - RNA, 19 nt, Homo sapiens
  misc_RNA (1)...(19): siRNA sense strand
gagauuguuuaccagaguu

SEQ ID NO: 366498 - RNA, 19 nt, Homo sapiens
  misc_RNA (1)...(19): siRNA sense strand
guacugaugccauggaugu

SEQ ID NO: 366499 - RNA, 19 nt, Homo sapiens
  misc_RNA (1)...(19): siRNA sense strand
ggugaucaaccuaaggaua

SEQ ID NO: 366500 - RNA, 19 nt, Homo sapiens
  misc_RNA (1)...(19): siRNA sense strand
caaggugccuguaggugau

SEQ ID NO: 366501 - RNA, 19 nt, Homo sapiens
  misc_RNA (1)...(19): siRNA sense strand
gguuggagaugguguucaa

SEQ ID NO: 366502 - RNA, 19 nt, Homo sapiens
  misc_RNA (1)...(19): siRNA sense strand
gaauuaccuucagcuguau

SEQ ID NO: 366503 - RNA, 19 nt, Homo sapiens
  misc_RNA (1)...(19): siRNA sense strand
acacaggaauuguuacgau

SEQ ID NO: 366504 - RNA, 19 nt, Homo sapiens
  misc_RNA (1)...(19): siRNA sense strand
aaucaaacgucuagaagag

SEQ ID NO: 366505 - RNA, 19 nt, Homo sapiens
  misc_RNA (1)...(19): siRNA sense strand
guauugaugggaaggguua

SEQ ID NO: 366506 - RNA, 19 nt, Homo sapiens
  misc_RNA (1)...(19): siRNA sense strand
gagauugugagguuauuga

SEQ ID NO: 366507 - RNA, 19 nt, Homo sapiens
  misc_RNA (1)...(19): siRNA sense strand
cuaaauagcuacggugaac

SEQ ID NO: 366508 - RNA, 19 nt, Homo sapiens
  misc_RNA (1)...(19): siRNA sense strand
aaagguugccuguuacaaa

SEQ ID NO: 366509 - RNA, 19 nt, Homo sapiens
  misc_RNA (1)...(19): siRNA sense strand
auucagcacuguagcaauu

SEQ ID NO: 366510 - RNA, 19 nt, Homo sapiens
  misc_RNA (1)...(19): siRNA sense strand
ugagguuucauuugaguua

SEQ ID NO: 366511 - RNA, 19 nt, Homo sapiens
  misc_RNA (1)...(19): siRNA sense strand
uaccaaauuugccacagaa

SEQ ID NO: 366512 - RNA, 19 nt, Homo sapiens
  misc_RNA (1)...(19): siRNA sense strand
ccuuaacacuauugacauu

SEQ ID NO: 366513 - RNA, 19 nt, Homo sapiens
  misc_RNA (1)...(19): siRNA sense strand
acagcgagauugugagguu

SEQ ID NO: 366514 - RNA, 19 nt, Homo sapiens
  misc_RNA (1)...(19): siRNA sense strand
acaggcaacuggagaggaa

SEQ ID NO: 366515 - RNA, 19 nt, Homo sapiens
  misc_RNA (1)...(19): siRNA sense strand
agacuuugcugaugcuugu

SEQ ID NO: 366516 - RNA, 19 nt, Homo sapiens
  misc_RNA (1)...(19): siRNA sense strand
gaggaaaugcaaaggauca

SEQ ID NO: 366517 - RNA, 19 nt, Homo sapiens
  misc_RNA (1)...(19): siRNA sense strand
gugaucaaccuaaggauau

SEQ ID NO: 366518 - RNA, 19 nt, Homo sapiens
  misc_RNA (1)...(19): siRNA sense strand
uaggccagcuguauaaauc

SEQ ID NO: 366519 - RNA, 19 nt, Homo sapiens
  misc_RNA (1)...(19): siRNA sense strand
caaaacccauuccaauuau

SEQ ID NO: 366520 - RNA, 19 nt, Homo sapiens
  misc_RNA (1)...(19): siRNA sense strand
cacaaaacauccagacuuu

SEQ ID NO: 366521 - RNA, 19 nt, Homo sapiens
  misc_RNA (1)...(19): siRNA sense strand
gaauuguuacgauuuccua

SEQ ID NO: 366522 - RNA, 19 nt, Homo sapiens
  misc_RNA (1)...(19): siRNA sense strand
cacaggaauuguuacgauu

SEQ ID NO: 366523 - RNA, 19 nt, Homo sapiens
  misc_RNA (1)...(19): siRNA sense strand
caauuacaguacacaggaa

SEQ ID NO: 366524 - RNA, 19 nt, Homo sapiens
  misc_RNA (1)...(19): siRNA sense strand
gggcgaaccuuagaaucug

SEQ ID NO: 366525 - RNA, 19 nt, Homo sapiens
  misc_RNA (1)...(19): siRNA sense strand
ggcgcuaauuccugucaua

SEQ ID NO: 366526 - RNA, 19 nt, Homo sapiens
  misc_RNA (1)...(19): siRNA sense strand
uaaacuugaucucauggau

SEQ ID NO: 366527 - RNA, 19 nt, Homo sapiens
  misc_RNA (1)...(19): siRNA sense strand
gaacgcagagcagcggaaa

SEQ ID NO: 366528 - RNA, 19 nt, Homo sapiens
  misc_RNA (1)...(19): siRNA sense strand
gaggaaugcugaaaacuuc

SEQ ID NO: 366529 - RNA, 19 nt, Homo sapiens
  misc_RNA (1)...(19): siRNA sense strand
gguugccuguuacaaauga

SEQ ID NO: 366530 - RNA, 19 nt, Homo sapiens
  misc_RNA (1)...(19): siRNA sense strand
gcuacuuuacuccaacuua

SEQ ID NO: 366531 - RNA, 19 nt, Homo sapiens
  misc_RNA (1)...(19): siRNA sense strand
cagcgagauugugagguua

SEQ ID NO: 366532 - RNA, 19 nt, Homo sapiens
  misc_RNA (1)...(19): siRNA sense strand
caauugaacuggcuuauau

SEQ ID NO: 366533 - RNA, 19 nt, Homo sapiens
  misc_RNA (1)...(19): siRNA sense strand
gaaagaagcagcugauaug

SEQ ID NO: 366534 - RNA, 19 nt, Homo sapiens
  misc_RNA (1)...(19): siRNA sense strand
ggagccagcuagauauuaa

SEQ ID NO: 366535 - RNA, 19 nt, Homo sapiens
  misc_RNA (1)...(19): siRNA sense strand
gaaacaggcuagccagaga

SEQ ID NO: 366536 - RNA, 19 nt, Homo sapiens
  misc_RNA (1)...(19): siRNA sense strand
ugacuugucuucuucguaa

SEQ ID NO: 366537 - RNA, 19 nt, Homo sapiens
  misc_RNA (1)...(19): siRNA sense strand
agaauuaccuucagcugua

SEQ ID NO: 366538 - RNA, 19 nt, Homo sapiens
  misc_RNA (1)...(19): siRNA sense strand
caaaggcaguaaugcauuu

SEQ ID NO: 366539 - RNA, 19 nt, Homo sapiens
  misc_RNA (1)...(19): siRNA sense strand
caaggagccagucaaauua

SEQ ID NO: 366540 - RNA, 19 nt, Homo sapiens
  misc_RNA (1)...(19): siRNA sense strand
ggaacaaaguaucuugcua

SEQ ID NO: 366541 - RNA, 19 nt, Homo sapiens
  misc_RNA (1)...(19): siRNA sense strand
guaaauuucuucacaccaa

SEQ ID NO: 366542 - RNA, 19 nt, Homo sapiens
  misc_RNA (1)...(19): siRNA sense strand
ggaaagaagcagcugauau

SEQ ID NO: 366543 - RNA, 19 nt, Homo sapiens
  misc_RNA (1)...(19): siRNA sense strand
ggaauaauuggaguaguua

SEQ ID NO: 366544 - RNA, 19 nt, Homo sapiens
  misc_RNA (1)...(19): siRNA sense strand
gcaaaucaaacgucuagaa

SEQ ID NO: 366545 - RNA, 19 nt, Homo sapiens
  misc_RNA (1)...(19): siRNA sense strand
caucagagauuguuuacca

SEQ ID NO: 366546 - RNA, 19 nt, Homo sapiens
  misc_RNA (1)...(19): siRNA sense strand
caauagaaauggaacaaag

SEQ ID NO: 366547 - RNA, 19 nt, Homo sapiens
  misc_RNA (1)...(19): siRNA sense strand
acaagaagauaaacggaaa

SEQ ID NO: 366548 - RNA, 19 nt, Homo sapiens
  misc_RNA (1)...(19): siRNA sense strand
cguaaaagguugccuguua

SEQ ID NO: 366549 - RNA, 19 nt, Homo sapiens
  misc_RNA (1)...(19): siRNA sense strand
gcagaacccuagcuguaau

SEQ ID NO: 366550 - RNA, 19 nt, Homo sapiens
  misc_RNA (1)...(19): siRNA sense strand
caaauuugccacagaauau

SEQ ID NO: 366551 - RNA, 19 nt, Homo sapiens
  misc_RNA (1)...(19): siRNA sense strand
gcaauugaacuggcuuaua

SEQ ID NO: 366552 - RNA, 19 nt, Homo sapiens
  misc_RNA (1)...(19): siRNA sense strand
gaugaaauucgacaagaaa

SEQ ID NO: 366553 - RNA, 19 nt, Homo sapiens
  misc_RNA (1)...(19): siRNA sense strand
acaaggagccagucaaauu

SEQ ID NO: 366554 - RNA, 19 nt, Homo sapiens
  misc_RNA (1)...(19): siRNA sense strand
caggcuagccagagaauua

SEQ ID NO: 366555 - RNA, 19 nt, Homo sapiens
  misc_RNA (1)...(19): siRNA sense strand
cacccaacguugucaauuu

SEQ ID NO: 366556 - RNA, 19 nt, Homo sapiens
  misc_RNA (1)...(19): siRNA sense strand
gaacuggcuuauaucaaca

SEQ ID NO: 366557 - RNA, 19 nt, Homo sapiens
  misc_RNA (1)...(19): siRNA sense strand
ugaaggaacugcaaaauau

SEQ ID NO: 366558 - RNA, 19 nt, Homo sapiens
  misc_RNA (1)...(19): siRNA sense strand
gaaccaauucaucuuaaga

SEQ ID NO: 366559 - RNA, 19 nt, Homo sapiens
  misc_RNA (1)...(19): siRNA sense strand
gcuaaaggcauuacaagga

SEQ ID NO: 366560 - RNA, 19 nt, Homo sapiens
  misc_RNA (1)...(19): siRNA sense strand
gggcuaaugaacaauaaua

SEQ ID NO: 366561 - RNA, 19 nt, Homo sapiens
  misc_RNA (1)...(19): siRNA sense strand
uggcuuauaucaacacaaa

SEQ ID NO: 366562 - RNA, 19 nt, Homo sapiens
  misc_RNA (1)...(19): siRNA sense strand
caguaucagucucuucuaa

SEQ ID NO: 366563 - RNA, 19 nt, Homo sapiens
  misc_RNA (1)...(19): siRNA sense strand
guuauugaacgacucauua

SEQ ID NO: 366564 - RNA, 19 nt, Homo sapiens
  misc_RNA (1)...(19): siRNA sense strand
ccaaauuugccacagaaua

SEQ ID NO: 366565 - RNA, 19 nt, Homo sapiens
  misc_RNA (1)...(19): siRNA sense strand
ucacuaaacuugaucucau

SEQ ID NO: 366566 - RNA, 19 nt, Homo sapiens
  misc_RNA (1)...(19): siRNA sense strand
gcacagcgcaggaaagaag

SEQ ID NO: 366567 - RNA, 19 nt, Homo sapiens
  misc_RNA (1)...(19): siRNA sense strand
gcuaauuccugucauaaac

SEQ ID NO: 366568 - RNA, 19 nt, Homo sapiens
  misc_RNA (1)...(19): siRNA sense strand
uaaacuucaugaugccaua

SEQ ID NO: 366569 - RNA, 19 nt, Homo sapiens
  misc_RNA (1)...(19): siRNA sense strand
ucacaucagagauuguuua

SEQ ID NO: 366570 - RNA, 19 nt, Homo sapiens
  misc_RNA (1)...(19): siRNA sense strand
uggaauaauuggaguaguu

SEQ ID NO: 366571 - RNA, 19 nt, Homo sapiens
  misc_RNA (1)...(19): siRNA sense strand
caacaucagaggcacuuaa

SEQ ID NO: 366572 - RNA, 19 nt, Homo sapiens
  misc_RNA (1)...(19): siRNA sense strand
gugaacccguggaugauaa

SEQ ID NO: 366573 - RNA, 19 nt, Homo sapiens
  misc_RNA (1)...(19): siRNA sense strand
guaucagucucuucuaaau

SEQ ID NO: 366574 - RNA, 19 nt, Homo sapiens
  misc_RNA (1)...(19): siRNA sense strand
gaaaacaacaggagaagaa

SEQ ID NO: 366575 - RNA, 19 nt, Homo sapiens
  misc_RNA (1)...(19): siRNA sense strand
gaacgacucauuaaaucau

SEQ ID NO: 366576 - RNA, 19 nt, Homo sapiens
  misc_RNA (1)...(19): siRNA sense strand
gaaauggaacaaaguaucu

SEQ ID NO: 366577 - RNA, 19 nt, Homo sapiens
  misc_RNA (1)...(19): siRNA sense strand
caagaagaguguaacugau

SEQ ID NO: 366578 - RNA, 19 nt, Homo sapiens
  misc_RNA (1)...(19): siRNA sense strand
cuaaggauauugagcuuca

SEQ ID NO: 366579 - RNA, 19 nt, Homo sapiens
  misc_RNA (1)...(19): siRNA sense strand
aguaagcccugaaccaauu

SEQ ID NO: 366580 - RNA, 19 nt, Homo sapiens
  misc_RNA (1)...(19): siRNA sense strand
ggaaauaauaagggaguaa

SEQ ID NO: 366581 - RNA, 19 nt, Homo sapiens
  misc_RNA (1)...(19): siRNA sense strand
ggugcuagaauuuguuaua

SEQ ID NO: 366582 - RNA, 19 nt, Homo sapiens
  misc_RNA (1)...(19): siRNA sense strand
gcuguaaucacuaaacuug

SEQ ID NO: 366583 - RNA, 19 nt, Homo sapiens
  misc_RNA (1)...(19): siRNA sense strand
ggaguaagcccugaaccaa

SEQ ID NO: 366584 - RNA, 19 nt, Homo sapiens
  misc_RNA (1)...(19): siRNA sense strand
gcuaugcgguggugcuaga

SEQ ID NO: 366585 - RNA, 19 nt, Homo sapiens
  misc_RNA (1)...(19): siRNA sense strand
ugccugagguuucauuuga

SEQ ID NO: 366586 - RNA, 19 nt, Homo sapiens
  misc_RNA (1)...(19): siRNA sense strand
auacagauauggcaacauc

SEQ ID NO: 366587 - RNA, 19 nt, Homo sapiens
  misc_RNA (1)...(19): siRNA sense strand
gggaacagcgagauuguga

SEQ ID NO: 366588 - RNA, 19 nt, Homo sapiens
  misc_RNA (1)...(19): siRNA sense strand
ucaaaacccauuccaauua

SEQ ID NO: 366589 - RNA, 19 nt, Homo sapiens
  misc_RNA (1)...(19): siRNA sense strand
gaagaguuauuagcagaag

SEQ ID NO: 366590 - RNA, 19 nt, Homo sapiens
  misc_RNA (1)...(19): siRNA sense strand
uaacuuaguggcaauugaa

SEQ ID NO: 366591 - RNA, 19 nt, Homo sapiens
  misc_RNA (1)...(19): siRNA sense strand
gaagauaaacggaaaacaa

SEQ ID NO: 366592 - RNA, 19 nt, Homo sapiens
  misc_RNA (1)...(19): siRNA sense strand
cuacuuuacuccaacuuau

SEQ ID NO: 366593 - RNA, 19 nt, Homo sapiens
  misc_RNA (1)...(19): siRNA sense strand
acaagaagaguguaacuga

SEQ ID NO: 366594 - RNA, 19 nt, Homo sapiens
  misc_RNA (1)...(19): siRNA sense strand
gaaggguuauuccagucaa

SEQ ID NO: 366595 - RNA, 19 nt, Homo sapiens
  misc_RNA (1)...(19): siRNA sense strand
ugaugaaauucgacaagaa

SEQ ID NO: 366596 - RNA, 19 nt, Homo sapiens
  misc_RNA (1)...(19): siRNA sense strand
ugaacuggcuuauaucaac

SEQ ID NO: 366597 - RNA, 19 nt, Homo sapiens
  misc_RNA (1)...(19): siRNA sense strand
gagauuguuuaccagaguu

SEQ ID NO: 366598 - RNA, 19 nt, Homo sapiens
  misc_RNA (1)...(19): siRNA sense strand
guacugaugccauggaugu

SEQ ID NO: 366599 - RNA, 19 nt, Homo sapiens
  misc_RNA (1)...(19): siRNA sense strand
ggugaucaaccuaaggaua

SEQ ID NO: 366600 - RNA, 19 nt, Homo sapiens
  misc_RNA (1)...(19): siRNA sense strand
caaggugccuguaggugau

SEQ ID NO: 366601 - RNA, 19 nt, Homo sapiens
  misc_RNA (1)...(19): siRNA sense strand
gguuggagaugguguucaa

SEQ ID NO: 366602 - RNA, 19 nt, Homo sapiens
  misc_RNA (1)...(19): siRNA sense strand
gaauuaccuucagcuguau

SEQ ID NO: 366603 - RNA, 19 nt, Homo sapiens
  misc_RNA (1)...(19): siRNA sense strand
acacaggaauuguuacgau

SEQ ID NO: 366604 - RNA, 19 nt, Homo sapiens
  misc_RNA (1)...(19): siRNA sense strand
aaucaaacgucuagaagag

SEQ ID NO: 366605 - RNA, 19 nt, Homo sapiens
  misc_RNA (1)...(19): siRNA sense strand
guauugaugggaaggguua

SEQ ID NO: 366606 - RNA, 19 nt, Homo sapiens
  misc_RNA (1)...(19): siRNA sense strand
gagauugugagguuauuga

SEQ ID NO: 366607 - RNA, 19 nt, Homo sapiens
  misc_RNA (1)...(19): siRNA sense strand
cuaaauagcuacggugaac

SEQ ID NO: 366608 - RNA, 19 nt, Homo sapiens
  misc_RNA (1)...(19): siRNA sense strand
aaagguugccuguuacaaa

SEQ ID NO: 366609 - RNA, 19 nt, Homo sapiens
  misc_RNA (1)...(19): siRNA sense strand
auucagcacuguagcaauu

SEQ ID NO: 366610 - RNA, 19 nt, Homo sapiens
  misc_RNA (1)...(19): siRNA sense strand
ugagguuucauuugaguua

SEQ ID NO: 366611 - RNA, 19 nt, Homo sapiens
  misc_RNA (1)...(19): siRNA sense strand
uaccaaauuugccacagaa

SEQ ID NO: 366612 - RNA, 19 nt, Homo sapiens
  misc_RNA (1)...(19): siRNA sense strand
ccuuaacacuauugacauu

SEQ ID NO: 366613 - RNA, 19 nt, Homo sapiens
  misc_RNA (1)...(19): siRNA sense strand
acagcgagauugugagguu

SEQ ID NO: 366614 - RNA, 19 nt, Homo sapiens
  misc_RNA (1)...(19): siRNA sense strand
acaggcaacuggagaggaa

SEQ ID NO: 366615 - RNA, 19 nt, Homo sapiens
  misc_RNA (1)...(19): siRNA sense strand
agacuuugcugaugcuugu

SEQ ID NO: 366616 - RNA, 19 nt, Homo sapiens
  misc_RNA (1)...(19): siRNA sense strand
gaggaaaugcaaaggauca

SEQ ID NO: 366617 - RNA, 19 nt, Homo sapiens
  misc_RNA (1)...(19): siRNA sense strand
gugaucaaccuaaggauau

SEQ ID NO: 366618 - RNA, 19 nt, Homo sapiens
  misc_RNA (1)...(19): siRNA sense strand
uaggccagcuguauaaauc

SEQ ID NO: 366619 - RNA, 19 nt, Homo sapiens
  misc_RNA (1)...(19): siRNA sense strand
caaaacccauuccaauuau

SEQ ID NO: 366620 - RNA, 19 nt, Homo sapiens
  misc_RNA (1)...(19): siRNA sense strand
cacaaaacauccagacuuu

SEQ ID NO: 366621 - RNA, 19 nt, Homo sapiens
  misc_RNA (1)...(19): siRNA sense strand
gaauuguuacgauuuccua

SEQ ID NO: 366622 - RNA, 19 nt, Homo sapiens
  misc_RNA (1)...(19): siRNA sense strand
cacaggaauuguuacgauu

SEQ ID NO: 366623 - RNA, 19 nt, Homo sapiens
  misc_RNA (1)...(19): siRNA sense strand
caauuacaguacacaggaa

SEQ ID NO: 366624 - RNA, 19 nt, Homo sapiens
  misc_RNA (1)...(19): siRNA sense strand
gggcgaaccuuagaaucug

SEQ ID NO: 366625 - RNA, 19 nt, Homo sapiens
  misc_RNA (1)...(19): siRNA sense strand
ggcgcuaauuccugucaua

SEQ ID NO: 366626 - RNA, 19 nt, Homo sapiens
  misc_RNA (1)...(19): siRNA sense strand
uaaacuugaucucauggau

SEQ ID NO: 366627 - RNA, 19 nt, Homo sapiens
  misc_RNA (1)...(19): siRNA sense strand
gaacgcagagcagcggaaa

SEQ ID NO: 366628 - RNA, 19 nt, Homo sapiens
  misc_RNA (1)...(19): siRNA sense strand
gaggaaugcugaaaacuuc

SEQ ID NO: 366629 - RNA, 19 nt, Homo sapiens
  misc_RNA (1)...(19): siRNA sense strand
gguugccuguuacaaauga

SEQ ID NO: 366630 - RNA, 19 nt, Homo sapiens
  misc_RNA (1)...(19): siRNA sense strand
gcuacuuuacuccaacuua

SEQ ID NO: 366631 - RNA, 19 nt, Homo sapiens
  misc_RNA (1)...(19): siRNA sense strand
cagcgagauugugagguua

SEQ ID NO: 366632 - RNA, 19 nt, Homo sapiens
  misc_RNA (1)...(19): siRNA sense strand
caauugaacuggcuuauau

SEQ ID NO: 366633 - RNA, 19 nt, Homo sapiens
  misc_RNA (1)...(19): siRNA sense strand
gaaagaagcagcugauaug

SEQ ID NO: 366634 - RNA, 19 nt, Homo sapiens
  misc_RNA (1)...(19): siRNA sense strand
ggagccagcuagauauuaa

SEQ ID NO: 366635 - RNA, 19 nt, Homo sapiens
  misc_RNA (1)...(19): siRNA sense strand
gaaacaggcuagccagaga

SEQ ID NO: 366636 - RNA, 19 nt, Homo sapiens
  misc_RNA (1)...(19): siRNA sense strand
ugacuugucuucuucguaa

SEQ ID NO: 366637 - RNA, 19 nt, Homo sapiens
  misc_RNA (1)...(19): siRNA sense strand
agaauuaccuucagcugua

SEQ ID NO: 366638 - RNA, 19 nt, Homo sapiens
  misc_RNA (1)...(19): siRNA sense strand
caaaggcaguaaugcauuu

SEQ ID NO: 366639 - RNA, 19 nt, Homo sapiens
  misc_RNA (1)...(19): siRNA sense strand
caaggagccagucaaauua

SEQ ID NO: 366640 - RNA, 19 nt, Homo sapiens
  misc_RNA (1)...(19): siRNA sense strand
ggaacaaaguaucuugcua

SEQ ID NO: 366641 - RNA, 19 nt, Homo sapiens
  misc_RNA (1)...(19): siRNA sense strand
guaaauuucuucacaccaa

SEQ ID NO: 366642 - RNA, 19 nt, Homo sapiens
  misc_RNA (1)...(19): siRNA sense strand
ggaaagaagcagcugauau

SEQ ID NO: 366643 - RNA, 19 nt, Homo sapiens
  misc_RNA (1)...(19): siRNA sense strand
ggaauaauuggaguaguua

SEQ ID NO: 366644 - RNA, 19 nt, Homo sapiens
  misc_RNA (1)...(19): siRNA sense strand
gcaaaucaaacgucuagaa

SEQ ID NO: 366645 - RNA, 19 nt, Homo sapiens
  misc_RNA (1)...(19): siRNA sense strand
caucagagauuguuuacca

SEQ ID NO: 366646 - RNA, 19 nt, Homo sapiens
  misc_RNA (1)...(19): siRNA sense strand
caauagaaauggaacaaag

SEQ ID NO: 366647 - RNA, 19 nt, Homo sapiens
  misc_RNA (1)...(19): siRNA sense strand
acaagaagauaaacggaaa

SEQ ID NO: 366648 - RNA, 19 nt, Homo sapiens
  misc_RNA (1)...(19): siRNA sense strand
cguaaaagguugccuguua

SEQ ID NO: 366649 - RNA, 19 nt, Homo sapiens
  misc_RNA (1)...(19): siRNA sense strand
gcagaacccuagcuguaau

SEQ ID NO: 366650 - RNA, 19 nt, Homo sapiens
  misc_RNA (1)...(19): siRNA sense strand
caaauuugccacagaauau

SEQ ID NO: 366651 - RNA, 19 nt, Homo sapiens
  misc_RNA (1)...(19): siRNA sense strand
gcaauugaacuggcuuaua

SEQ ID NO: 366652 - RNA, 19 nt, Homo sapiens
  misc_RNA (1)...(19): siRNA sense strand
gaugaaauucgacaagaaa

SEQ ID NO: 366653 - RNA, 19 nt, Homo sapiens
  misc_RNA (1)...(19): siRNA sense strand
acaaggagccagucaaauu

SEQ ID NO: 366654 - RNA, 19 nt, Homo sapiens
  misc_RNA (1)...(19): siRNA sense strand
caggcuagccagagaauua

SEQ ID NO: 366655 - RNA, 19 nt, Homo sapiens
  misc_RNA (1)...(19): siRNA sense strand
cacccaacguugucaauuu

SEQ ID NO: 366656 - RNA, 19 nt, Homo sapiens
  misc_RNA (1)...(19): siRNA sense strand
gaacuggcuuauaucaaca

SEQ ID NO: 366657 - RNA, 19 nt, Homo sapiens
  misc_RNA (1)...(19): siRNA sense strand
ugaaggaacugcaaaauau

SEQ ID NO: 366658 - RNA, 19 nt, Homo sapiens
  misc_RNA (1)...(19): siRNA sense strand
gaaccaauucaucuuaaga

SEQ ID NO: 366659 - RNA, 19 nt, Homo sapiens
  misc_RNA (1)...(19): siRNA sense strand
gcuaaaggcauuacaagga

SEQ ID NO: 366660 - RNA, 19 nt, Homo sapiens
  misc_RNA (1)...(19): siRNA sense strand
gggcuaaugaacaauaaua

SEQ ID NO: 366661 - RNA, 19 nt, Homo sapiens
  misc_RNA (1)...(19): siRNA sense strand
uggcuuauaucaacacaaa

SEQ ID NO: 366662 - RNA, 19 nt, Homo sapiens
  misc_RNA (1)...(19): siRNA sense strand
caguaucagucucuucuaa

SEQ ID NO: 366663 - RNA, 19 nt, Homo sapiens
  misc_RNA (1)...(19): siRNA sense strand
guuauugaacgacucauua

SEQ ID NO: 366664 - RNA, 19 nt, Homo sapiens
  misc_RNA (1)...(19): siRNA sense strand
ccaaauuugccacagaaua

SEQ ID NO: 366665 - RNA, 19 nt, Homo sapiens
  misc_RNA (1)...(19): siRNA sense strand
ucacuaaacuugaucucau

SEQ ID NO: 366666 - RNA, 19 nt, Homo sapiens
  misc_RNA (1)...(19): siRNA sense strand
gcacagcgcaggaaagaag

SEQ ID NO: 366667 - RNA, 19 nt, Homo sapiens
  misc_RNA (1)...(19): siRNA sense strand
gcuaauuccugucauaaac

SEQ ID NO: 366668 - RNA, 19 nt, Homo sapiens
  misc_RNA (1)...(19): siRNA sense strand
uaaacuucaugaugccaua

SEQ ID NO: 366669 - RNA, 19 nt, Homo sapiens
  misc_RNA (1)...(19): siRNA sense strand
ucacaucagagauuguuua

SEQ ID NO: 366670 - RNA, 19 nt, Homo sapiens
  misc_RNA (1)...(19): siRNA sense strand
uggaauaauuggaguaguu

SEQ ID NO: 366671 - RNA, 19 nt, Homo sapiens
  misc_RNA (1)...(19): siRNA sense strand
caacaucagaggcacuuaa

SEQ ID NO: 366672 - RNA, 19 nt, Homo sapiens
  misc_RNA (1)...(19): siRNA sense strand
gugaacccguggaugauaa

SEQ ID NO: 366673 - RNA, 19 nt, Homo sapiens
  misc_RNA (1)...(19): siRNA sense strand
guaucagucucuucuaaau

SEQ ID NO: 366674 - RNA, 19 nt, Homo sapiens
  misc_RNA (1)...(19): siRNA sense strand
gaaaacaacaggagaagaa

SEQ ID NO: 366675 - RNA, 19 nt, Homo sapiens
  misc_RNA (1)...(19): siRNA sense strand
gaacgacucauuaaaucau

SEQ ID NO: 366676 - RNA, 19 nt, Homo sapiens
  misc_RNA (1)...(19): siRNA sense strand
gaaauggaacaaaguaucu

SEQ ID NO: 366677 - RNA, 19 nt, Homo sapiens
  misc_RNA (1)...(19): siRNA sense strand
caagaagaguguaacugau

SEQ ID NO: 366678 - RNA, 19 nt, Homo sapiens
  misc_RNA (1)...(19): siRNA sense strand
cuaaggauauugagcuuca

SEQ ID NO: 366679 - RNA, 19 nt, Homo sapiens
  misc_RNA (1)...(19): siRNA sense strand
aguaagcccugaaccaauu

SEQ ID NO: 366680 - RNA, 19 nt, Homo sapiens
  misc_RNA (1)...(19): siRNA sense strand
ggaaauaauaagggaguaa

SEQ ID NO: 366681 - RNA, 19 nt, Homo sapiens
  misc_RNA (1)...(19): siRNA sense strand
ggugcuagaauuuguuaua

SEQ ID NO: 366682 - RNA, 19 nt, Homo sapiens
  misc_RNA (1)...(19): siRNA sense strand
gcuguaaucacuaaacuug

SEQ ID NO: 366683 - RNA, 19 nt, Homo sapiens
  misc_RNA (1)...(19): siRNA sense strand
ggaguaagcccugaaccaa

SEQ ID NO: 366684 - RNA, 19 nt, Homo sapiens
  misc_RNA (1)...(19): siRNA sense strand
gcuaugcgguggugcuaga

SEQ ID NO: 366685 - RNA, 19 nt, Homo sapiens
  misc_RNA (1)...(19): siRNA sense strand
ugccugagguuucauuuga

SEQ ID NO: 366686 - RNA, 19 nt, Homo sapiens
  misc_RNA (1)...(19): siRNA sense strand
auacagauauggcaacauc

SEQ ID NO: 366687 - RNA, 19 nt, Homo sapiens
  misc_RNA (1)...(19): siRNA sense strand
gggaacagcgagauuguga

SEQ ID NO: 366688 - RNA, 19 nt, Homo sapiens
  misc_RNA (1)...(19): siRNA sense strand
ucaaaacccauuccaauua

SEQ ID NO: 366689 - RNA, 19 nt, Homo sapiens
  misc_RNA (1)...(19): siRNA sense strand
gaagaguuauuagcagaag

SEQ ID NO: 366690 - RNA, 19 nt, Homo sapiens
  misc_RNA (1)...(19): siRNA sense strand
uaacuuaguggcaauugaa

SEQ ID NO: 366691 - RNA, 19 nt, Homo sapiens
  misc_RNA (1)...(19): siRNA sense strand
gaagauaaacggaaaacaa

SEQ ID NO: 366692 - RNA, 19 nt, Homo sapiens
  misc_RNA (1)...(19): siRNA sense strand
cuacuuuacuccaacuuau

SEQ ID NO: 366693 - RNA, 19 nt, Homo sapiens
  misc_RNA (1)...(19): siRNA sense strand
acaagaagaguguaacuga

SEQ ID NO: 366694 - RNA, 19 nt, Homo sapiens
  misc_RNA (1)...(19): siRNA sense strand
gaaggguuauuccagucaa

SEQ ID NO: 366695 - RNA, 19 nt, Homo sapiens
  misc_RNA (1)...(19): siRNA sense strand
ugaugaaauucgacaagaa

SEQ ID NO: 366696 - RNA, 19 nt, Homo sapiens
  misc_RNA (1)...(19): siRNA sense strand
ugaacuggcuuauaucaac

SEQ ID NO: 366697 - RNA, 19 nt, Homo sapiens
  misc_RNA (1)...(19): siRNA sense strand
gagauuguuuaccagaguu

SEQ ID NO: 366698 - RNA, 19 nt, Homo sapiens
  misc_RNA (1)...(19): siRNA sense strand
guacugaugccauggaugu

SEQ ID NO: 366699 - RNA, 19 nt, Homo sapiens
  misc_RNA (1)...(19): siRNA sense strand
ggugaucaaccuaaggaua

SEQ ID NO: 366700 - RNA, 19 nt, Homo sapiens
  misc_RNA (1)...(19): siRNA sense strand
caaggugccuguaggugau

SEQ ID NO: 366701 - RNA, 19 nt, Homo sapiens
  misc_RNA (1)...(19): siRNA sense strand
gguuggagaugguguucaa

SEQ ID NO: 366702 - RNA, 19 nt, Homo sapiens
  misc_RNA (1)...(19): siRNA sense strand
gaauuaccuucagcuguau

SEQ ID NO: 366703 - RNA, 19 nt, Homo sapiens
  misc_RNA (1)...(19): siRNA sense strand
acacaggaauuguuacgau

SEQ ID NO: 366704 - RNA, 19 nt, Homo sapiens
  misc_RNA (1)...(19): siRNA sense strand
aaucaaacgucuagaagag

SEQ ID NO: 366705 - RNA, 19 nt, Homo sapiens
  misc_RNA (1)...(19): siRNA sense strand
guauugaugggaaggguua

SEQ ID NO: 366706 - RNA, 19 nt, Homo sapiens
  misc_RNA (1)...(19): siRNA sense strand
gagauugugagguuauuga

SEQ ID NO: 366707 - RNA, 19 nt, Homo sapiens
  misc_RNA (1)...(19): siRNA sense strand
cuaaauagcuacggugaac

SEQ ID NO: 366708 - RNA, 19 nt, Homo sapiens
  misc_RNA (1)...(19): siRNA sense strand
aaagguugccuguuacaaa

SEQ ID NO: 366709 - RNA, 19 nt, Homo sapiens
  misc_RNA (1)...(19): siRNA sense strand
auucagcacuguagcaauu

SEQ ID NO: 366710 - RNA, 19 nt, Homo sapiens
  misc_RNA (1)...(19): siRNA sense strand
ugagguuucauuugaguua

SEQ ID NO: 366711 - RNA, 19 nt, Homo sapiens
  misc_RNA (1)...(19): siRNA sense strand
uaccaaauuugccacagaa

SEQ ID NO: 366712 - RNA, 19 nt, Homo sapiens
  misc_RNA (1)...(19): siRNA sense strand
ccuuaacacuauugacauu

SEQ ID NO: 366713 - RNA, 19 nt, Homo sapiens
  misc_RNA (1)...(19): siRNA sense strand
acagcgagauugugagguu

SEQ ID NO: 366714 - RNA, 19 nt, Homo sapiens
  misc_RNA (1)...(19): siRNA sense strand
acaggcaacuggagaggaa

SEQ ID NO: 366715 - RNA, 19 nt, Homo sapiens
  misc_RNA (1)...(19): siRNA sense strand
agacuuugcugaugcuugu

SEQ ID NO: 366716 - RNA, 19 nt, Homo sapiens
  misc_RNA (1)...(19): siRNA sense strand
gaggaaaugcaaaggauca

SEQ ID NO: 366717 - RNA, 19 nt, Homo sapiens
  misc_RNA (1)...(19): siRNA sense strand
gugaucaaccuaaggauau

SEQ ID NO: 366718 - RNA, 19 nt, Homo sapiens
  misc_RNA (1)...(19): siRNA sense strand
uaggccagcuguauaaauc

SEQ ID NO: 366719 - RNA, 19 nt, Homo sapiens
  misc_RNA (1)...(19): siRNA sense strand
caaaacccauuccaauuau

SEQ ID NO: 366720 - RNA, 19 nt, Homo sapiens
  misc_RNA (1)...(19): siRNA sense strand
cacaaaacauccagacuuu

SEQ ID NO: 366721 - RNA, 19 nt, Homo sapiens
  misc_RNA (1)...(19): siRNA sense strand
gaauuguuacgauuuccua

SEQ ID NO: 366722 - RNA, 19 nt, Homo sapiens
  misc_RNA (1)...(19): siRNA sense strand
cacaggaauuguuacgauu

SEQ ID NO: 366723 - RNA, 19 nt, Homo sapiens
  misc_RNA (1)...(19): siRNA sense strand
caauuacaguacacaggaa

SEQ ID NO: 366724 - RNA, 19 nt, Homo sapiens
  misc_RNA (1)...(19): siRNA sense strand
gggcgaaccuuagaaucug

SEQ ID NO: 366725 - RNA, 19 nt, Homo sapiens
  misc_RNA (1)...(19): siRNA sense strand
ggcgcuaauuccugucaua

SEQ ID NO: 366726 - RNA, 19 nt, Homo sapiens
  misc_RNA (1)...(19): siRNA sense strand
uaaacuugaucucauggau

SEQ ID NO: 366727 - RNA, 19 nt, Homo sapiens
  misc_RNA (1)...(19): siRNA sense strand
gaacgcagagcagcggaaa

SEQ ID NO: 366728 - RNA, 19 nt, Homo sapiens
  misc_RNA (1)...(19): siRNA sense strand
gaggaaugcugaaaacuuc

SEQ ID NO: 366729 - RNA, 19 nt, Homo sapiens
  misc_RNA (1)...(19): siRNA sense strand
gguugccuguuacaaauga

SEQ ID NO: 366730 - RNA, 19 nt, Homo sapiens
  misc_RNA (1)...(19): siRNA sense strand
gcuacuuuacuccaacuua

SEQ ID NO: 366731 - RNA, 19 nt, Homo sapiens
  misc_RNA (1)...(19): siRNA sense strand
cagcgagauugugagguua

SEQ ID NO: 366732 - RNA, 19 nt, Homo sapiens
  misc_RNA (1)...(19): siRNA sense strand
gaaacuggcuuggaaauaa

SEQ ID NO: 366733 - RNA, 19 nt, Homo sapiens
  misc_RNA (1)...(19): siRNA sense strand
gaacaaauuugaugaagga

SEQ ID NO: 366734 - RNA, 19 nt, Homo sapiens
  misc_RNA (1)...(19): siRNA sense strand
gaaauucaauccuaacuga

SEQ ID NO: 366735 - RNA, 19 nt, Homo sapiens
  misc_RNA (1)...(19): siRNA sense strand
gaacauuuccuucucaaua

SEQ ID NO: 366736 - RNA, 19 nt, Homo sapiens
  misc_RNA (1)...(19): siRNA sense strand
ggagaaugaugaugaagua

SEQ ID NO: 366737 - RNA, 19 nt, Homo sapiens
  misc_RNA (1)...(19): siRNA sense strand
caagaaauauggaaaguug

SEQ ID NO: 366738 - RNA, 19 nt, Homo sapiens
  misc_RNA (1)...(19): siRNA sense strand
ccaacaaccugaacaaauu

SEQ ID NO: 366739 - RNA, 19 nt, Homo sapiens
  misc_RNA (1)...(19): siRNA sense strand
ucaaagaucucacagcaaa

SEQ ID NO: 366740 - RNA, 19 nt, Homo sapiens
  misc_RNA (1)...(19): siRNA sense strand
gaaggaagaguugguauua

SEQ ID NO: 366741 - RNA, 19 nt, Homo sapiens
  misc_RNA (1)...(19): siRNA sense strand
ucaaacaacuggaaucuga

SEQ ID NO: 366742 - RNA, 19 nt, Homo sapiens
  misc_RNA (1)...(19): siRNA sense strand
gaaaugccauauuagagaa

SEQ ID NO: 366743 - RNA, 19 nt, Homo sapiens
  misc_RNA (1)...(19): siRNA sense strand
gaagaucagugaaagacuu

SEQ ID NO: 366744 - RNA, 19 nt, Homo sapiens
  misc_RNA (1)...(19): siRNA sense strand
gcucagaucugugauagaa

SEQ ID NO: 366745 - RNA, 19 nt, Homo sapiens
  misc_RNA (1)...(19): siRNA sense strand
gaagaguacuuuguuauca

SEQ ID NO: 366746 - RNA, 19 nt, Homo sapiens
  misc_RNA (1)...(19): siRNA sense strand
gaacacauaccuucgauau

SEQ ID NO: 366747 - RNA, 19 nt, Homo sapiens
  misc_RNA (1)...(19): siRNA sense strand
ccaguaacauaccaaauaa

SEQ ID NO: 366748 - RNA, 19 nt, Homo sapiens
  misc_RNA (1)...(19): siRNA sense strand
acacauaccuucgauauau

SEQ ID NO: 366749 - RNA, 19 nt, Homo sapiens
  misc_RNA (1)...(19): siRNA sense strand
ccaaucaacucuauacgaa

SEQ ID NO: 366750 - RNA, 19 nt, Homo sapiens
  misc_RNA (1)...(19): siRNA sense strand
gagaauagcuauguuuagu

SEQ ID NO: 366751 - RNA, 19 nt, Homo sapiens
  misc_RNA (1)...(19): siRNA sense strand
gcaagaauauaagacauug

SEQ ID NO: 366752 - RNA, 19 nt, Homo sapiens
  misc_RNA (1)...(19): siRNA sense strand
auagagagcuggcuucaaa

SEQ ID NO: 366753 - RNA, 19 nt, Homo sapiens
  misc_RNA (1)...(19): siRNA sense strand
gaagaagaggugcaagaua

SEQ ID NO: 366754 - RNA, 19 nt, Homo sapiens
  misc_RNA (1)...(19): siRNA sense strand
gaggacaucuccaaguuug

SEQ ID NO: 366755 - RNA, 19 nt, Homo sapiens
  misc_RNA (1)...(19): siRNA sense strand
gaaggcaggaguccaauuu

SEQ ID NO: 366756 - RNA, 19 nt, Homo sapiens
  misc_RNA (1)...(19): siRNA sense strand
gugaagaaauuaacgaaga

SEQ ID NO: 366757 - RNA, 19 nt, Homo sapiens
  misc_RNA (1)...(19): siRNA sense strand
gcaggugggauucuuaaua

SEQ ID NO: 366758 - RNA, 19 nt, Homo sapiens
  misc_RNA (1)...(19): siRNA sense strand
gugauuaccucagaaauga

SEQ ID NO: 366759 - RNA, 19 nt, Homo sapiens
  misc_RNA (1)...(19): siRNA sense strand
ggaaaugccauauuagaga

SEQ ID NO: 366760 - RNA, 19 nt, Homo sapiens
  misc_RNA (1)...(19): siRNA sense strand
caucaaagcaugccaacua

SEQ ID NO: 366761 - RNA, 19 nt, Homo sapiens
  misc_RNA (1)...(19): siRNA sense strand
ggcaagacuucacuucuaa

SEQ ID NO: 366762 - RNA, 19 nt, Homo sapiens
  misc_RNA (1)...(19): siRNA sense strand
ggacuugguuuccugauag

SEQ ID NO: 366763 - RNA, 19 nt, Homo sapiens
  misc_RNA (1)...(19): siRNA sense strand
guggagugaucaagaaaua

SEQ ID NO: 366764 - RNA, 19 nt, Homo sapiens
  misc_RNA (1)...(19): siRNA sense strand
caagagcaguauacaaaga

SEQ ID NO: 366765 - RNA, 19 nt, Homo sapiens
  misc_RNA (1)...(19): siRNA sense strand
gcauagauguggauagcuu

SEQ ID NO: 366766 - RNA, 19 nt, Homo sapiens
  misc_RNA (1)...(19): siRNA sense strand
gaaagcaggugggauucuu

SEQ ID NO: 366767 - RNA, 19 nt, Homo sapiens
  misc_RNA (1)...(19): siRNA sense strand
gauuggagcuauagcaguu

SEQ ID NO: 366768 - RNA, 19 nt, Homo sapiens
  misc_RNA (1)...(19): siRNA sense strand
guacaaacaugguaugacu

SEQ ID NO: 366769 - RNA, 19 nt, Homo sapiens
  misc_RNA (1)...(19): siRNA sense strand
cuagaucuguucucaguaa

SEQ ID NO: 366770 - RNA, 19 nt, Homo sapiens
  misc_RNA (1)...(19): siRNA sense strand
ggucaacgagcaagaauuu

SEQ ID NO: 366771 - RNA, 19 nt, Homo sapiens
  misc_RNA (1)...(19): siRNA sense strand
ggaagucaccaaagcagua

SEQ ID NO: 366772 - RNA, 19 nt, Homo sapiens
  misc_RNA (1)...(19): siRNA sense strand
ucaagaagguuaucucaag

SEQ ID NO: 366773 - RNA, 19 nt, Homo sapiens
  misc_RNA (1)...(19): siRNA sense strand
uaaccaaggucagaacauu

SEQ ID NO: 366774 - RNA, 19 nt, Homo sapiens
  misc_RNA (1)...(19): siRNA sense strand
gcagaaagaagaaauucaa

SEQ ID NO: 366775 - RNA, 19 nt, Homo sapiens
  misc_RNA (1)...(19): siRNA sense strand
caaauuugaugaaggacuu

SEQ ID NO: 366776 - RNA, 19 nt, Homo sapiens
  misc_RNA (1)...(19): siRNA sense strand
gcaaaagacucccuuacaa

SEQ ID NO: 366777 - RNA, 19 nt, Homo sapiens
  misc_RNA (1)...(19): siRNA sense strand
ugaaagcugugucuguaaa

SEQ ID NO: 366778 - RNA, 19 nt, Homo sapiens
  misc_RNA (1)...(19): siRNA sense strand
gacagccucuucuucagua

SEQ ID NO: 366779 - RNA, 19 nt, Homo sapiens
  misc_RNA (1)...(19): siRNA sense strand
ggacuugcauuggcacauu

SEQ ID NO: 366780 - RNA, 19 nt, Homo sapiens
  misc_RNA (1)...(19): siRNA sense strand
gcuuaugccuucucuuuau

SEQ ID NO: 366781 - RNA, 19 nt, Homo sapiens
  misc_RNA (1)...(19): siRNA sense strand
gaaaguugcagaugagguu

SEQ ID NO: 366782 - RNA, 19 nt, Homo sapiens
  misc_RNA (1)...(19): siRNA sense strand
gaaacucuguuccacaaag

SEQ ID NO: 366783 - RNA, 19 nt, Homo sapiens
  misc_RNA (1)...(19): siRNA sense strand
ggagauuuauguucuaugg

SEQ ID NO: 366784 - RNA, 19 nt, Homo sapiens
  misc_RNA (1)...(19): siRNA sense strand
guaaacugauggcuaacaa

SEQ ID NO: 366785 - RNA, 19 nt, Homo sapiens
  misc_RNA (1)...(19): siRNA sense strand
gaaagaggagacagaagaa

SEQ ID NO: 366786 - RNA, 19 nt, Homo sapiens
  misc_RNA (1)...(19): siRNA sense strand
caagaagguuaucucaaga

SEQ ID NO: 366787 - RNA, 19 nt, Homo sapiens
  misc_RNA (1)...(19): siRNA sense strand
caagacaaagggaauagua

SEQ ID NO: 366788 - RNA, 19 nt, Homo sapiens
  misc_RNA (1)...(19): siRNA sense strand
ggaauuauuugagaaagca

SEQ ID NO: 366789 - RNA, 19 nt, Homo sapiens
  misc_RNA (1)...(19): siRNA sense strand
ggaaagagaaugggauaga

SEQ ID NO: 366790 - RNA, 19 nt, Homo sapiens
  misc_RNA (1)...(19): siRNA sense strand
caaccaaaccauacaagaa

SEQ ID NO: 366791 - RNA, 19 nt, Homo sapiens
  misc_RNA (1)...(19): siRNA sense strand
gaaagagaaugggauagag

SEQ ID NO: 366792 - RNA, 19 nt, Homo sapiens
  misc_RNA (1)...(19): siRNA sense strand
gagagcauauuuccuccaa

SEQ ID NO: 366793 - RNA, 19 nt, Homo sapiens
  misc_RNA (1)...(19): siRNA sense strand
aaacuugacugaacuggau

SEQ ID NO: 366794 - RNA, 19 nt, Homo sapiens
  misc_RNA (1)...(19): siRNA sense strand
acaaaugaauggcaucgaa

SEQ ID NO: 366795 - RNA, 19 nt, Homo sapiens
  misc_RNA (1)...(19): siRNA sense strand
ucuguaaacugauggcuaa

SEQ ID NO: 366796 - RNA, 19 nt, Homo sapiens
  misc_RNA (1)...(19): siRNA sense strand
guacuccuguccugaaaga

SEQ ID NO: 366797 - RNA, 19 nt, Homo sapiens
  misc_RNA (1)...(19): siRNA sense strand
gguauuauccugacuuuag

SEQ ID NO: 366798 - RNA, 19 nt, Homo sapiens
  misc_RNA (1)...(19): siRNA sense strand
gaugagaauagcuauguuu

SEQ ID NO: 366799 - RNA, 19 nt, Homo sapiens
  misc_RNA (1)...(19): siRNA sense strand
gagcauauuuccuccaaac

SEQ ID NO: 366800 - RNA, 19 nt, Homo sapiens
  misc_RNA (1)...(19): siRNA sense strand
gugaaagacuugugauuac

SEQ ID NO: 366801 - RNA, 19 nt, Homo sapiens
  misc_RNA (1)...(19): siRNA sense strand
ucagagagcugggaagauc

SEQ ID NO: 366802 - RNA, 19 nt, Homo sapiens
  misc_RNA (1)...(19): siRNA sense strand
uauggaaaguugcagauga

SEQ ID NO: 366803 - RNA, 19 nt, Homo sapiens
  misc_RNA (1)...(19): siRNA sense strand
agagcuggcuucaaagaaa

SEQ ID NO: 366804 - RNA, 19 nt, Homo sapiens
  misc_RNA (1)...(19): siRNA sense strand
caaagcaugccaacuagaa

SEQ ID NO: 366805 - RNA, 19 nt, Homo sapiens
  misc_RNA (1)...(19): siRNA sense strand
caacaaccugaacaaauuu

SEQ ID NO: 366806 - RNA, 19 nt, Homo sapiens
  misc_RNA (1)...(19): siRNA sense strand
guacuuuguuaucagcuuu

SEQ ID NO: 366807 - RNA, 19 nt, Homo sapiens
  misc_RNA (1)...(19): siRNA sense strand
aagacucccuuacaaauga

SEQ ID NO: 366808 - RNA, 19 nt, Homo sapiens
  misc_RNA (1)...(19): siRNA sense strand
aauccuaacugagaccuua

SEQ ID NO: 366809 - RNA, 19 nt, Homo sapiens
  misc_RNA (1)...(19): siRNA sense strand
gaugacagccucuucuuca

SEQ ID NO: 366810 - RNA, 19 nt, Homo sapiens
  misc_RNA (1)...(19): siRNA sense strand
gauagaaagaggacaguug

SEQ ID NO: 366811 - RNA, 19 nt, Homo sapiens
  misc_RNA (1)...(19): siRNA sense strand
aagaagaggugcaagauac

SEQ ID NO: 366812 - RNA, 19 nt, Homo sapiens
  misc_RNA (1)...(19): siRNA sense strand
gauggugugucuugggauu

SEQ ID NO: 366813 - RNA, 19 nt, Homo sapiens
  misc_RNA (1)...(19): siRNA sense strand
agguggaaaugccauauua

SEQ ID NO: 366814 - RNA, 19 nt, Homo sapiens
  misc_RNA (1)...(19): siRNA sense strand
uuacaacccuacaucuuug

SEQ ID NO: 366815 - RNA, 19 nt, Homo sapiens
  misc_RNA (1)...(19): siRNA sense strand
cuuaauagauucuccaaag

SEQ ID NO: 366816 - RNA, 19 nt, Homo sapiens
  misc_RNA (1)...(19): siRNA sense strand
caggugggauucuuaauag

SEQ ID NO: 366817 - RNA, 19 nt, Homo sapiens
  misc_RNA (1)...(19): siRNA sense strand
uaacgaagaagacuuaaag

SEQ ID NO: 366818 - RNA, 19 nt, Homo sapiens
  misc_RNA (1)...(19): siRNA sense strand
gcagagaaagacaauauag

SEQ ID NO: 366819 - RNA, 19 nt, Homo sapiens
  misc_RNA (1)...(19): siRNA sense strand
gaagaggacaucuccaagu

SEQ ID NO: 366820 - RNA, 19 nt, Homo sapiens
  misc_RNA (1)...(19): siRNA sense strand
ugaaagaggagacagaaga

SEQ ID NO: 366821 - RNA, 19 nt, Homo sapiens
  misc_RNA (1)...(19): siRNA sense strand
gaucagggaagaguacuuu

SEQ ID NO: 366822 - RNA, 19 nt, Homo sapiens
  misc_RNA (1)...(19): siRNA sense strand
agagguggcugcuucuuug

SEQ ID NO: 366823 - RNA, 19 nt, Homo sapiens
  misc_RNA (1)...(19): siRNA sense strand
aagaggacaucuccaaguu

SEQ ID NO: 366824 - RNA, 19 nt, Homo sapiens
  misc_RNA (1)...(19): siRNA sense strand
uaagcacaguggaagaauu

SEQ ID NO: 366825 - RNA, 19 nt, Homo sapiens
  misc_RNA (1)...(19): siRNA sense strand
ggucauagaagagaacaaa

SEQ ID NO: 366826 - RNA, 19 nt, Homo sapiens
  misc_RNA (1)...(19): siRNA sense strand
gaacacaggauagaagcaa

SEQ ID NO: 366827 - RNA, 19 nt, Homo sapiens
  misc_RNA (1)...(19): siRNA sense strand
ggagugaucaagaaauaug

SEQ ID NO: 366828 - RNA, 19 nt, Homo sapiens
  misc_RNA (1)...(19): siRNA sense strand
ccaagucaaccaaaccaua

SEQ ID NO: 366829 - RNA, 19 nt, Homo sapiens
  misc_RNA (1)...(19): siRNA sense strand
gaaggagaaggaagaguug

SEQ ID NO: 366830 - RNA, 19 nt, Homo sapiens
  misc_RNA (1)...(19): siRNA sense strand
gaacauucaccgaaagaca

SEQ ID NO: 366831 - RNA, 19 nt, Homo sapiens
  misc_RNA (1)...(19): siRNA sense strand
gagaaagacaauauaguuc

SEQ ID NO: 366832 - RNA, 19 nt, Homo sapiens
  misc_RNA (1)...(19): siRNA sense strand
ugaagaagaugguggauaa

SEQ ID NO: 366833 - RNA, 19 nt, Homo sapiens
  misc_RNA (1)...(19): siRNA sense strand
gaaauuucaugaggaggua

SEQ ID NO: 366834 - RNA, 19 nt, Homo sapiens
  misc_RNA (1)...(19): siRNA sense strand
ccagagaaguguuuccaau

SEQ ID NO: 366835 - RNA, 19 nt, Homo sapiens
  misc_RNA (1)...(19): siRNA sense strand
ggaccugucugacgauagu

SEQ ID NO: 366836 - RNA, 19 nt, Homo sapiens
  misc_RNA (1)...(19): siRNA sense strand
gauaagcccacccagagaa

SEQ ID NO: 366837 - RNA, 19 nt, Homo sapiens
  misc_RNA (1)...(19): siRNA sense strand
ggagguaucagucuagagu

SEQ ID NO: 366838 - RNA, 19 nt, Homo sapiens
  misc_RNA (1)...(19): siRNA sense strand
agguaucagucuagaguua

SEQ ID NO: 366839 - RNA, 19 nt, Homo sapiens
  misc_RNA (1)...(19): siRNA sense strand
gaggagguaucagucuaga

SEQ ID NO: 366840 - RNA, 19 nt, Homo sapiens
  misc_RNA (1)...(19): siRNA sense strand
ggauaagcccacccagaga

SEQ ID NO: 366841 - RNA, 19 nt, Homo sapiens
  misc_RNA (1)...(19): siRNA sense strand
cgcgacgucugcagaaauu

SEQ ID NO: 366842 - RNA, 19 nt, Homo sapiens
  misc_RNA (1)...(19): siRNA sense strand
agagaaguguuuccaaugc

SEQ ID NO: 366843 - RNA, 19 nt, Homo sapiens
  misc_RNA (1)...(19): siRNA sense strand
gagaaguguuuccaaugcu

SEQ ID NO: 366844 - RNA, 19 nt, Homo sapiens
  misc_RNA (1)...(19): siRNA sense strand
cagagaaguguuuccaaug

SEQ ID NO: 366845 - RNA, 19 nt, Homo sapiens
  misc_RNA (1)...(19): siRNA sense strand
agggugaccuguugaccaa

SEQ ID NO: 366846 - RNA, 19 nt, Homo sapiens
  misc_RNA (1)...(19): siRNA sense strand
cgacgucugcagaaauuuc

SEQ ID NO: 366847 - RNA, 19 nt, Homo sapiens
  misc_RNA (1)...(19): siRNA sense strand
gagcugggccgugacuaca

SEQ ID NO: 366848 - RNA, 19 nt, Homo sapiens
  misc_RNA (1)...(19): siRNA sense strand
gcgcgacgucugcagaaau

SEQ ID NO: 366849 - RNA, 19 nt, Homo sapiens
  misc_RNA (1)...(19): siRNA sense strand
augaggagguaucagucua

SEQ ID NO: 366850 - RNA, 19 nt, Homo sapiens
  misc_RNA (1)...(19): siRNA sense strand
gaagaagaugguggauaag

SEQ ID NO: 366851 - RNA, 19 nt, Homo sapiens
  misc_RNA (1)...(19): siRNA sense strand
ggugaccuguugaccaaaa

SEQ ID NO: 366852 - RNA, 19 nt, Homo sapiens
  misc_RNA (1)...(19): siRNA sense strand
ugaagaagaugguggauaa

SEQ ID NO: 366853 - RNA, 19 nt, Homo sapiens
  misc_RNA (1)...(19): siRNA sense strand
gaaauuucaugaggaggua

SEQ ID NO: 366854 - RNA, 19 nt, Homo sapiens
  misc_RNA (1)...(19): siRNA sense strand
ccagagaaguguuuccaau

SEQ ID NO: 366855 - RNA, 19 nt, Homo sapiens
  misc_RNA (1)...(19): siRNA sense strand
ggaccugucugacgauagu

SEQ ID NO: 366856 - RNA, 19 nt, Homo sapiens
  misc_RNA (1)...(19): siRNA sense strand
gauaagcccacccagagaa

SEQ ID NO: 366857 - RNA, 19 nt, Homo sapiens
  misc_RNA (1)...(19): siRNA sense strand
ggagguaucagucuagagu

SEQ ID NO: 366858 - RNA, 19 nt, Homo sapiens
  misc_RNA (1)...(19): siRNA sense strand
agguaucagucuagaguua

SEQ ID NO: 366859 - RNA, 19 nt, Homo sapiens
  misc_RNA (1)...(19): siRNA sense strand
gaggagguaucagucuaga

SEQ ID NO: 366860 - RNA, 19 nt, Homo sapiens
  misc_RNA (1)...(19): siRNA sense strand
ggauaagcccacccagaga

SEQ ID NO: 366861 - RNA, 19 nt, Homo sapiens
  misc_RNA (1)...(19): siRNA sense strand
cgcgacgucugcagaaauu

SEQ ID NO: 366862 - RNA, 19 nt, Homo sapiens
  misc_RNA (1)...(19): siRNA sense strand
agagaaguguuuccaaugc

SEQ ID NO: 366863 - RNA, 19 nt, Homo sapiens
  misc_RNA (1)...(19): siRNA sense strand
gagaaguguuuccaaugcu

SEQ ID NO: 366864 - RNA, 19 nt, Homo sapiens
  misc_RNA (1)...(19): siRNA sense strand
cagagaaguguuuccaaug

SEQ ID NO: 366865 - RNA, 19 nt, Homo sapiens
  misc_RNA (1)...(19): siRNA sense strand
agggugaccuguugaccaa

SEQ ID NO: 366866 - RNA, 19 nt, Homo sapiens
  misc_RNA (1)...(19): siRNA sense strand
cgacgucugcagaaauuuc

SEQ ID NO: 366867 - RNA, 19 nt, Homo sapiens
  misc_RNA (1)...(19): siRNA sense strand
gagcugggccgugacuaca

SEQ ID NO: 366868 - RNA, 19 nt, Homo sapiens
  misc_RNA (1)...(19): siRNA sense strand
gcgcgacgucugcagaaau

SEQ ID NO: 366869 - RNA, 19 nt, Homo sapiens
  misc_RNA (1)...(19): siRNA sense strand
augaggagguaucagucua

SEQ ID NO: 366870 - RNA, 19 nt, Homo sapiens
  misc_RNA (1)...(19): siRNA sense strand
gaagaagaugguggauaag

SEQ ID NO: 366871 - RNA, 19 nt, Homo sapiens
  misc_RNA (1)...(19): siRNA sense strand
ggugaccuguugaccaaaa

SEQ ID NO: 366872 - RNA, 19 nt, Homo sapiens
  misc_RNA (1)...(19): siRNA sense strand
gaacugaauuuccuguuga

SEQ ID NO: 366873 - RNA, 19 nt, Homo sapiens
  misc_RNA (1)...(19): siRNA sense strand
ugaauuuccuguugagaua

SEQ ID NO: 366874 - RNA, 19 nt, Homo sapiens
  misc_RNA (1)...(19): siRNA sense strand
guaacaauguggagaaaga

SEQ ID NO: 366875 - RNA, 19 nt, Homo sapiens
  misc_RNA (1)...(19): siRNA sense strand
gagaggaaguggauuuguu

SEQ ID NO: 366876 - RNA, 19 nt, Homo sapiens
  misc_RNA (1)...(19): siRNA sense strand
gaacaaggccaaccaugga

SEQ ID NO: 366877 - RNA, 19 nt, Homo sapiens
  misc_RNA (1)...(19): siRNA sense strand
ggacaagacaguuuccuau

SEQ ID NO: 366878 - RNA, 19 nt, Homo sapiens
  misc_RNA (1)...(19): siRNA sense strand
cagguugucugcauucaaa

SEQ ID NO: 366879 - RNA, 19 nt, Homo sapiens
  misc_RNA (1)...(19): siRNA sense strand
ugacaaaggugccaguagu

SEQ ID NO: 366880 - RNA, 19 nt, Homo sapiens
  misc_RNA (1)...(19): siRNA sense strand
gauaaaugguacugaaugg

SEQ ID NO: 366881 - RNA, 19 nt, Homo sapiens
  misc_RNA (1)...(19): siRNA sense strand
uggaaugguugcugcuuua

SEQ ID NO: 366882 - RNA, 19 nt, Homo sapiens
  misc_RNA (1)...(19): siRNA sense strand
caaaucagauauacauguc

SEQ ID NO: 366883 - RNA, 19 nt, Homo sapiens
  misc_RNA (1)...(19): siRNA sense strand
gauauaaaggcccaucuga

SEQ ID NO: 366884 - RNA, 19 nt, Homo sapiens
  misc_RNA (1)...(19): siRNA sense strand
ggauugggcugagcagaga

SEQ ID NO: 366885 - RNA, 19 nt, Homo sapiens
  misc_RNA (1)...(19): siRNA sense strand
gaaagacauuacaccaucu

SEQ ID NO: 366886 - RNA, 19 nt, Homo sapiens
  misc_RNA (1)...(19): siRNA sense strand
ggacaucaagucagagguu

SEQ ID NO: 366887 - RNA, 19 nt, Homo sapiens
  misc_RNA (1)...(19): siRNA sense strand
caagcugcaugcccagaaa

SEQ ID NO: 366888 - RNA, 19 nt, Homo sapiens
  misc_RNA (1)...(19): siRNA sense strand
ggauaaaugguacugaaug

SEQ ID NO: 366889 - RNA, 19 nt, Homo sapiens
  misc_RNA (1)...(19): siRNA sense strand
cauaguguguggaaugguu

SEQ ID NO: 366890 - RNA, 19 nt, Homo sapiens
  misc_RNA (1)...(19): siRNA sense strand
caggagagugugccuauuu

SEQ ID NO: 366891 - RNA, 19 nt, Homo sapiens
  misc_RNA (1)...(19): siRNA sense strand
gacaucaagucagagguuu

SEQ ID NO: 366892 - RNA, 19 nt, Homo sapiens
  misc_RNA (1)...(19): siRNA sense strand
gagugugccuauuugaaug

SEQ ID NO: 366893 - RNA, 19 nt, Homo sapiens
  misc_RNA (1)...(19): siRNA sense strand
guggaaugguugcugcuuu

SEQ ID NO: 366894 - RNA, 19 nt, Homo sapiens
  misc_RNA (1)...(19): siRNA sense strand
gcaggagagugugccuauu

SEQ ID NO: 366895 - RNA, 19 nt, Homo sapiens
  misc_RNA (1)...(19): siRNA sense strand
gagagugugccuauuugaa

SEQ ID NO: 366896 - RNA, 19 nt, Homo sapiens
  misc_RNA (1)...(19): siRNA sense strand
gacauuacaccaucugaau

SEQ ID NO: 366897 - RNA, 19 nt, Homo sapiens
  misc_RNA (1)...(19): siRNA sense strand
uauaaaggcccaucugauc

SEQ ID NO: 366898 - RNA, 19 nt, Homo sapiens
  misc_RNA (1)...(19): siRNA sense strand
ccaaaucagauauacaugu

SEQ ID NO: 366899 - RNA, 19 nt, Homo sapiens
  misc_RNA (1)...(19): siRNA sense strand
gagaaagacauuacaccau

SEQ ID NO: 366900 - RNA, 19 nt, Homo sapiens
  misc_RNA (1)...(19): siRNA sense strand
ugaauggacaagacaguuu

SEQ ID NO: 366901 - RNA, 19 nt, Homo sapiens
  misc_RNA (1)...(19): siRNA sense strand
caucaagagccaucaguau

SEQ ID NO: 366902 - RNA, 19 nt, Homo sapiens
  misc_RNA (1)...(19): siRNA sense strand
uaccuuaauuuggcgcuua

SEQ ID NO: 366903 - RNA, 19 nt, Homo sapiens
  misc_RNA (1)...(19): siRNA sense strand
acagagaggaaguggauuu

SEQ ID NO: 366904 - RNA, 19 nt, Homo sapiens
  misc_RNA (1)...(19): siRNA sense strand
accaagaacuggacaucaa

SEQ ID NO: 366905 - RNA, 19 nt, Homo sapiens
  misc_RNA (1)...(19): siRNA sense strand
gcaugacaguaacaaugug

SEQ ID NO: 366906 - RNA, 19 nt, Homo sapiens
  misc_RNA (1)...(19): siRNA sense strand
gccaggcacuacacagaga

SEQ ID NO: 366907 - RNA, 19 nt, Homo sapiens
  misc_RNA (1)...(19): siRNA sense strand
ggagagugugccuauuuga

SEQ ID NO: 366908 - RNA, 19 nt, Homo sapiens
  misc_RNA (1)...(19): siRNA sense strand
gaauggacaagacaguuuc

SEQ ID NO: 366909 - RNA, 19 nt, Homo sapiens
  misc_RNA (1)...(19): siRNA sense strand
ucaagagccaucaguaugu

SEQ ID NO: 366910 - RNA, 19 nt, Homo sapiens
  misc_RNA (1)...(19): siRNA sense strand
cauuacaccaucugaauug

SEQ ID NO: 366911 - RNA, 19 nt, Homo sapiens
  misc_RNA (1)...(19): siRNA sense strand
ggaaugguugcugcuuuaa

SEQ ID NO: 366912 - RNA, 19 nt, Homo sapiens
  misc_RNA (1)...(19): siRNA sense strand
agagcuaacugccaucaag

SEQ ID NO: 366913 - RNA, 19 nt, Homo sapiens
  misc_RNA (1)...(19): siRNA sense strand
caagagccaucaguauguc

SEQ ID NO: 366914 - RNA, 19 nt, Homo sapiens
  misc_RNA (1)...(19): siRNA sense strand
gagcuaacugccaucaaga

SEQ ID NO: 366915 - RNA, 19 nt, Homo sapiens
  misc_RNA (1)...(19): siRNA sense strand
caguaacaauguggagaaa

SEQ ID NO: 366916 - RNA, 19 nt, Homo sapiens
  misc_RNA (1)...(19): siRNA sense strand
caagacaguuuccuauccu

SEQ ID NO: 366917 - RNA, 19 nt, Homo sapiens
  misc_RNA (1)...(19): siRNA sense strand
gugccuauuugaaugacaa

SEQ ID NO: 366918 - RNA, 19 nt, Homo sapiens
  misc_RNA (1)...(19): siRNA sense strand
acacagagaggaaguggau

SEQ ID NO: 366919 - RNA, 19 nt, Homo sapiens
  misc_RNA (1)...(19): siRNA sense strand
gagcauucuauuaaagcua

SEQ ID NO: 366920 - RNA, 19 nt, Homo sapiens
  misc_RNA (1)...(19): siRNA sense strand
ccaucaagagccaucagua

SEQ ID NO: 366921 - RNA, 19 nt, Homo sapiens
  misc_RNA (1)...(19): siRNA sense strand
aggagagugugccuauuug

SEQ ID NO: 366922 - RNA, 19 nt, Homo sapiens
  misc_RNA (1)...(19): siRNA sense strand
gacaagacaguuuccuauc

SEQ ID NO: 366923 - RNA, 19 nt, Homo sapiens
  misc_RNA (1)...(19): siRNA sense strand
aaucauaguguguggaaug

SEQ ID NO: 366924 - RNA, 19 nt, Homo sapiens
  misc_RNA (1)...(19): siRNA sense strand
uaagcgcaauaagagcuaa

SEQ ID NO: 366925 - RNA, 19 nt, Homo sapiens
  misc_RNA (1)...(19): siRNA sense strand
gacaaaggugccaguagug

SEQ ID NO: 366926 - RNA, 19 nt, Homo sapiens
  misc_RNA (1)...(19): siRNA sense strand
guacugaauggacaagaca

SEQ ID NO: 366927 - RNA, 19 nt, Homo sapiens
  misc_RNA (1)...(19): siRNA sense strand
cagaaagcuggauugguuu

SEQ ID NO: 366928 - RNA, 19 nt, Homo sapiens
  misc_RNA (1)...(19): siRNA sense strand
uggaaauggauaaauggua

SEQ ID NO: 366929 - RNA, 19 nt, Homo sapiens
  misc_RNA (1)...(19): siRNA sense strand
auggauaaaugguacugaa

SEQ ID NO: 366930 - RNA, 19 nt, Homo sapiens
  misc_RNA (1)...(19): siRNA sense strand
acaagacaguuuccuaucc

SEQ ID NO: 366931 - RNA, 19 nt, Homo sapiens
  misc_RNA (1)...(19): siRNA sense strand
gguacugaauggacaagac

SEQ ID NO: 366932 - RNA, 19 nt, Homo sapiens
  misc_RNA (1)...(19): siRNA sense strand
agagugugccuauuugaau

SEQ ID NO: 366933 - RNA, 19 nt, Homo sapiens
  misc_RNA (1)...(19): siRNA sense strand
uaaagcuaccuuaauuugg

SEQ ID NO: 366934 - RNA, 19 nt, Homo sapiens
  misc_RNA (1)...(19): siRNA sense strand
uugcucagguugaaagcuu

SEQ ID NO: 366935 - RNA, 19 nt, Homo sapiens
  misc_RNA (1)...(19): siRNA sense strand
gggcugagcagagaacaag

SEQ ID NO: 366936 - RNA, 19 nt, Homo sapiens
  misc_RNA (1)...(19): siRNA sense strand
acaguaacaauguggagaa

SEQ ID NO: 366937 - RNA, 19 nt, Homo sapiens
  misc_RNA (1)...(19): siRNA sense strand
cuuaauuuggcgcuuauuu

SEQ ID NO: 366938 - RNA, 19 nt, Homo sapiens
  misc_RNA (1)...(19): siRNA sense strand
auaaaggcccaucugauca

SEQ ID NO: 366939 - RNA, 19 nt, Homo sapiens
  misc_RNA (1)...(19): siRNA sense strand
acaaucauaguguguggaa

SEQ ID NO: 366940 - RNA, 19 nt, Homo sapiens
  misc_RNA (1)...(19): siRNA sense strand
caaggccaaccauggaaau

SEQ ID NO: 366941 - RNA, 19 nt, Homo sapiens
  misc_RNA (1)...(19): siRNA sense strand
gaauuuccuguugagauau

SEQ ID NO: 366942 - RNA, 19 nt, Homo sapiens
  misc_RNA (1)...(19): siRNA sense strand
agacauuacaccaucugaa

SEQ ID NO: 366943 - RNA, 19 nt, Homo sapiens
  misc_RNA (1)...(19): siRNA sense strand
gaaugguugcugcuuuaag

SEQ ID NO: 366944 - RNA, 19 nt, Homo sapiens
  misc_RNA (1)...(19): siRNA sense strand
acauuacaccaucugaauu

SEQ ID NO: 366945 - RNA, 19 nt, Homo sapiens
  misc_RNA (1)...(19): siRNA sense strand
ccaucaguaugucuucaag

SEQ ID NO: 366946 - RNA, 19 nt, Homo sapiens
  misc_RNA (1)...(19): siRNA sense strand
agaggaaguggauuuguuc

SEQ ID NO: 366947 - RNA, 19 nt, Homo sapiens
  misc_RNA (1)...(19): siRNA sense strand
ucauguuucugacaaucau

SEQ ID NO: 366948 - RNA, 19 nt, Homo sapiens
  misc_RNA (1)...(19): siRNA sense strand
ccaagaacuggacaucaag

SEQ ID NO: 366949 - RNA, 19 nt, Homo sapiens
  misc_RNA (1)...(19): siRNA sense strand
aaucauguuucugacaauc

SEQ ID NO: 366950 - RNA, 19 nt, Homo sapiens
  misc_RNA (1)...(19): siRNA sense strand
caagaacuggacaucaagu

SEQ ID NO: 366951 - RNA, 19 nt, Homo sapiens
  misc_RNA (1)...(19): siRNA sense strand
gcaaagaggcggaaauuaa

SEQ ID NO: 366952 - RNA, 19 nt, Homo sapiens
  misc_RNA (1)...(19): siRNA sense strand
gcauguaucucuucuaugg

SEQ ID NO: 366953 - RNA, 19 nt, Homo sapiens
  misc_RNA (1)...(19): siRNA sense strand
ccaagaaggugcagcauuc

SEQ ID NO: 366954 - RNA, 19 nt, Homo sapiens
  misc_RNA (1)...(19): siRNA sense strand
ccgaugaguugcugaauaa

SEQ ID NO: 366955 - RNA, 19 nt, Homo sapiens
  misc_RNA (1)...(19): siRNA sense strand
gcaagaagaacccagauga

SEQ ID NO: 366956 - RNA, 19 nt, Homo sapiens
  misc_RNA (1)...(19): siRNA sense strand
gaacccagaugacuucaag

SEQ ID NO: 366957 - RNA, 19 nt, Homo sapiens
  misc_RNA (1)...(19): siRNA sense strand
ggacuacaccuacuacuuc

SEQ ID NO: 366958 - RNA, 19 nt, Homo sapiens
  misc_RNA (1)...(19): siRNA sense strand
cagagaagcaaauagguua

SEQ ID NO: 366959 - RNA, 19 nt, Homo sapiens
  misc_RNA (1)...(19): siRNA sense strand
ccaccgaccuccaggacua

SEQ ID NO: 366960 - RNA, 19 nt, Homo sapiens
  misc_RNA (1)...(19): siRNA sense strand
caacaacgccaucaagaau

SEQ ID NO: 366961 - RNA, 19 nt, Homo sapiens
  misc_RNA (1)...(19): siRNA sense strand
ggacaucggcccucccauu

SEQ ID NO: 366962 - RNA, 19 nt, Homo sapiens
  misc_RNA (1)...(19): siRNA sense strand
gccgaugaguugcugaaua

SEQ ID NO: 366963 - RNA, 19 nt, Homo sapiens
  misc_RNA (1)...(19): siRNA sense strand
gagcaaagaggcggaaauu

SEQ ID NO: 366964 - RNA, 19 nt, Homo sapiens
  misc_RNA (1)...(19): siRNA sense strand
gcuccgaguucucccauga

SEQ ID NO: 366965 - RNA, 19 nt, Homo sapiens
  misc_RNA (1)...(19): siRNA sense strand
acaaggaacuggccaacau

SEQ ID NO: 366966 - RNA, 19 nt, Homo sapiens
  misc_RNA (1)...(19): siRNA sense strand
ccgcauguaucucuucuau

SEQ ID NO: 366967 - RNA, 19 nt, Homo sapiens
  misc_RNA (1)...(19): siRNA sense strand
gcucugcucuccuggacaa

SEQ ID NO: 366968 - RNA, 19 nt, Homo sapiens
  misc_RNA (1)...(19): siRNA sense strand
caacauccgcuccaaguuc

SEQ ID NO: 366969 - RNA, 19 nt, Homo sapiens
  misc_RNA (1)...(19): siRNA sense strand
acaacgccaucaagaauga

SEQ ID NO: 366970 - RNA, 19 nt, Homo sapiens
  misc_RNA (1)...(19): siRNA sense strand
caaagaggcggaaauuaag

SEQ ID NO: 366971 - RNA, 19 nt, Homo sapiens
  misc_RNA (1)...(19): siRNA sense strand
uuaagagaaucaacaagga

SEQ ID NO: 366972 - RNA, 19 nt, Homo sapiens
  misc_RNA (1)...(19): siRNA sense strand
gcagaucggagucaaguca

SEQ ID NO: 366973 - RNA, 19 nt, Homo sapiens
  misc_RNA (1)...(19): siRNA sense strand
ugguacaccugcucaauga

SEQ ID NO: 366974 - RNA, 19 nt, Homo sapiens
  misc_RNA (1)...(19): siRNA sense strand
ggagaugggcgaggccuuu

SEQ ID NO: 366975 - RNA, 19 nt, Homo sapiens
  misc_RNA (1)...(19): siRNA sense strand
ccacggugcuggaggagau

SEQ ID NO: 366976 - RNA, 19 nt, Homo sapiens
  misc_RNA (1)...(19): siRNA sense strand
cugaauaaguuugugugua

SEQ ID NO: 366977 - RNA, 19 nt, Homo sapiens
  misc_RNA (1)...(19): siRNA sense strand
gccaugacauugacuuugg

SEQ ID NO: 366978 - RNA, 19 nt, Homo sapiens
  misc_RNA (1)...(19): siRNA sense strand
ucaccugucucugcaagaa

SEQ ID NO: 366979 - RNA, 19 nt, Homo sapiens
  misc_RNA (1)...(19): siRNA sense strand
gaaguacgccguggacuac

SEQ ID NO: 366980 - RNA, 19 nt, Homo sapiens
  misc_RNA (1)...(19): siRNA sense strand
caaguucaaaggagacaaa

SEQ ID NO: 366981 - RNA, 19 nt, Homo sapiens
  misc_RNA (1)...(19): siRNA sense strand
ccaccuacaucaaguucau

SEQ ID NO: 366982 - RNA, 19 nt, Homo sapiens
  misc_RNA (1)...(19): siRNA sense strand
uuggauggcuacaguaaga

SEQ ID NO: 366983 - RNA, 19 nt, Homo sapiens
  misc_RNA (1)...(19): siRNA sense strand
ugagugaggagguguggua

SEQ ID NO: 366984 - RNA, 19 nt, Homo sapiens
  misc_RNA (1)...(19): siRNA sense strand
ucaacaacgccaucaagaa

SEQ ID NO: 366985 - RNA, 19 nt, Homo sapiens
  misc_RNA (1)...(19): siRNA sense strand
uccaauaaauacacagaga

SEQ ID NO: 366986 - RNA, 19 nt, Homo sapiens
  misc_RNA (1)...(19): siRNA sense strand
cggugcaguuccagaauuu

SEQ ID NO: 366987 - RNA, 19 nt, Homo sapiens
  misc_RNA (1)...(19): siRNA sense strand
uaagagaaucaacaaggaa

SEQ ID NO: 366988 - RNA, 19 nt, Homo sapiens
  misc_RNA (1)...(19): siRNA sense strand
ccaauaaauacacagagaa

SEQ ID NO: 366989 - RNA, 19 nt, Homo sapiens
  misc_RNA (1)...(19): siRNA sense strand
ucuguugaguuccaauaaa

SEQ ID NO: 366990 - RNA, 19 nt, Homo sapiens
  misc_RNA (1)...(19): siRNA sense strand
gaauaaguuuguguguaag

SEQ ID NO: 366991 - RNA, 19 nt, Homo sapiens
  misc_RNA (1)...(19): siRNA sense strand
guaaacugcuuuucaucuu

SEQ ID NO: 366992 - RNA, 19 nt, Homo sapiens
  misc_RNA (1)...(19): siRNA sense strand
cagugaccaucaacaaguu

SEQ ID NO: 366993 - RNA, 19 nt, Homo sapiens
  misc_RNA (1)...(19): siRNA sense strand
augaguugcugaauaaguu

SEQ ID NO: 366994 - RNA, 19 nt, Homo sapiens
  misc_RNA (1)...(19): siRNA sense strand
aggcggaaauuaagagaau

SEQ ID NO: 366995 - RNA, 19 nt, Homo sapiens
  misc_RNA (1)...(19): siRNA sense strand
gaagguuggcggcuacauc

SEQ ID NO: 366996 - RNA, 19 nt, Homo sapiens
  misc_RNA (1)...(19): siRNA sense strand
agaaguacgccguggacua

SEQ ID NO: 366997 - RNA, 19 nt, Homo sapiens
  misc_RNA (1)...(19): siRNA sense strand
ggacgcagaaguuacuaag

SEQ ID NO: 366998 - RNA, 19 nt, Homo sapiens
  misc_RNA (1)...(19): siRNA sense strand
ggauggcuacaguaagaaa

SEQ ID NO: 366999 - RNA, 19 nt, Homo sapiens
  misc_RNA (1)...(19): siRNA sense strand
gggacagcauggacagugu

SEQ ID NO: 367000 - RNA, 19 nt, Homo sapiens
  misc_RNA (1)...(19): siRNA sense strand
caauaaauacacagagaag

SEQ ID NO: 367001 - RNA, 19 nt, Homo sapiens
  misc_RNA (1)...(19): siRNA sense strand
cugugaaucuguugaguuc

SEQ ID NO: 367002 - RNA, 19 nt, Homo sapiens
  misc_RNA (1)...(19): siRNA sense strand
gacaucggcccucccauuc

SEQ ID NO: 367003 - RNA, 19 nt, Homo sapiens
  misc_RNA (1)...(19): siRNA sense strand
cgucaucaaugcccucaag

SEQ ID NO: 367004 - RNA, 19 nt, Homo sapiens
  misc_RNA (1)...(19): siRNA sense strand
gaugaguugcugaauaagu

SEQ ID NO: 367005 - RNA, 19 nt, Homo sapiens
  misc_RNA (1)...(19): siRNA sense strand
gugaaucuguugaguucca

SEQ ID NO: 367006 - RNA, 19 nt, Homo sapiens
  misc_RNA (1)...(19): siRNA sense strand
ccagugaccaucaacaagu

SEQ ID NO: 367007 - RNA, 19 nt, Homo sapiens
  misc_RNA (1)...(19): siRNA sense strand
ggagcaaugccaagcagau

SEQ ID NO: 367008 - RNA, 19 nt, Homo sapiens
  misc_RNA (1)...(19): siRNA sense strand
uggagacugugcucaacaa

SEQ ID NO: 367009 - RNA, 19 nt, Homo sapiens
  misc_RNA (1)...(19): siRNA sense strand
agaagaacccagaugacuu

SEQ ID NO: 367010 - RNA, 19 nt, Homo sapiens
  misc_RNA (1)...(19): siRNA sense strand
gcugugaaucuguugaguu

SEQ ID NO: 367011 - RNA, 19 nt, Homo sapiens
  misc_RNA (1)...(19): siRNA sense strand
agucagaguuccgacagaa

SEQ ID NO: 367012 - RNA, 19 nt, Homo sapiens
  misc_RNA (1)...(19): siRNA sense strand
gaccaucagccucaucauc

SEQ ID NO: 367013 - RNA, 19 nt, Homo sapiens
  misc_RNA (1)...(19): siRNA sense strand
gagaccaucagccucauca

SEQ ID NO: 367014 - RNA, 19 nt, Homo sapiens
  misc_RNA (1)...(19): siRNA sense strand
acagagaagcaaauagguu

SEQ ID NO: 367015 - RNA, 19 nt, Homo sapiens
  misc_RNA (1)...(19): siRNA sense strand
auacacagagaagcaaaua

SEQ ID NO: 367016 - RNA, 19 nt, Homo sapiens
  misc_RNA (1)...(19): siRNA sense strand
cuguugaguuccaauaaau

SEQ ID NO: 367017 - RNA, 19 nt, Homo sapiens
  misc_RNA (1)...(19): siRNA sense strand
uaaauacacagagaagcaa

SEQ ID NO: 367018 - RNA, 19 nt, Homo sapiens
  misc_RNA (1)...(19): siRNA sense strand
ucggugcaguuccagaauu

SEQ ID NO: 367019 - RNA, 19 nt, Homo sapiens
  misc_RNA (1)...(19): siRNA sense strand
ggaacuguaagagcaaaga

SEQ ID NO: 367020 - RNA, 19 nt, Homo sapiens
  misc_RNA (1)...(19): siRNA sense strand
ucaaguucaucaaccucuu

SEQ ID NO: 367021 - RNA, 19 nt, Homo sapiens
  misc_RNA (1)...(19): siRNA sense strand
ggaguuugggaaccugauu

SEQ ID NO: 367022 - RNA, 19 nt, Homo sapiens
  misc_RNA (1)...(19): siRNA sense strand
acacagagaagcaaauagg

SEQ ID NO: 367023 - RNA, 19 nt, Homo sapiens
  misc_RNA (1)...(19): siRNA sense strand
ucauuucugugcuggugaa

SEQ ID NO: 367024 - RNA, 19 nt, Homo sapiens
  misc_RNA (1)...(19): siRNA sense strand
cauggaggcugugaaucug

SEQ ID NO: 367025 - RNA, 19 nt, Homo sapiens
  misc_RNA (1)...(19): siRNA sense strand
aaagaggcggaaauuaaga

SEQ ID NO: 367026 - RNA, 19 nt, Homo sapiens
  misc_RNA (1)...(19): siRNA sense strand
gcggaaauuaagagaauca

SEQ ID NO: 367027 - RNA, 19 nt, Homo sapiens
  misc_RNA (1)...(19): siRNA sense strand
gccaacauccgcuccaagu

SEQ ID NO: 367028 - RNA, 19 nt, Homo sapiens
  misc_RNA (1)...(19): siRNA sense strand
aacauccgcuccaaguuca

SEQ ID NO: 367029 - RNA, 19 nt, Homo sapiens
  misc_RNA (1)...(19): siRNA sense strand
uccggaagccgaugaguug

SEQ ID NO: 367030 - RNA, 19 nt, Homo sapiens
  misc_RNA (1)...(19): siRNA sense strand
acgagaacauggugaaggu

SEQ ID NO: 367031 - RNA, 19 nt, Homo sapiens
  misc_RNA (1)...(19): siRNA sense strand
cagaggaugcggcugugaa

SEQ ID NO: 367032 - RNA, 19 nt, Homo sapiens
  misc_RNA (1)...(19): siRNA sense strand
caucaacaacgccaucaag

SEQ ID NO: 367033 - RNA, 19 nt, Homo sapiens
  misc_RNA (1)...(19): siRNA sense strand
uggaggcugugaaucuguu

SEQ ID NO: 367034 - RNA, 19 nt, Homo sapiens
  misc_RNA (1)...(19): siRNA sense strand
ucucuucuauggcaacaag

SEQ ID NO: 367035 - RNA, 19 nt, Homo sapiens
  misc_RNA (1)...(19): siRNA sense strand
ggugugguaccgugugcua

SEQ ID NO: 367036 - RNA, 19 nt, Homo sapiens
  misc_RNA (1)...(19): siRNA sense strand
gcagaucgugucggagaug

SEQ ID NO: 367037 - RNA, 19 nt, Homo sapiens
  misc_RNA (1)...(19): siRNA sense strand
gagcaaugccaagcagauc

SEQ ID NO: 367038 - RNA, 19 nt, Homo sapiens
  misc_RNA (1)...(19): siRNA sense strand
gaguuccaauaaauacaca

SEQ ID NO: 367039 - RNA, 19 nt, Homo sapiens
  misc_RNA (1)...(19): siRNA sense strand
gugguacaccugcucaaug

SEQ ID NO: 367040 - RNA, 19 nt, Homo sapiens
  misc_RNA (1)...(19): siRNA sense strand
gaacuguaagagcaaagag

SEQ ID NO: 367041 - RNA, 19 nt, Homo sapiens
  misc_RNA (1)...(19): siRNA sense strand
auaaauacacagagaagca

SEQ ID NO: 367042 - RNA, 19 nt, Homo sapiens
  misc_RNA (1)...(19): siRNA sense strand
uuacuaaggccaagcuucu

SEQ ID NO: 367043 - RNA, 19 nt, Homo sapiens
  misc_RNA (1)...(19): siRNA sense strand
ggaaauuaagagaaucaac

SEQ ID NO: 367044 - RNA, 19 nt, Homo sapiens
  misc_RNA (1)...(19): siRNA sense strand
gagaaucaacaaggaacug

SEQ ID NO: 367045 - RNA, 19 nt, Homo sapiens
  misc_RNA (1)...(19): siRNA sense strand
gcucaaugaccagcacaug

SEQ ID NO: 367046 - RNA, 19 nt, Homo sapiens
  misc_RNA (1)...(19): siRNA sense strand
gguuaccuguucauuucug

SEQ ID NO: 367047 - RNA, 19 nt, Homo sapiens
  misc_RNA (1)...(19): siRNA sense strand
gagaugggcgaggccuuug

SEQ ID NO: 367048 - RNA, 19 nt, Homo sapiens
  misc_RNA (1)...(19): siRNA sense strand
caaguucaucaaccucuuc

SEQ ID NO: 367049 - RNA, 19 nt, Homo sapiens
  misc_RNA (1)...(19): siRNA sense strand
gaguuugggaaccugauug

SEQ ID NO: 367050 - RNA, 19 nt, Homo sapiens
  misc_RNA (1)...(19): siRNA sense strand
caagaagaacccagaugac

SEQ ID NO: 367051 - RNA, 19 nt, Homo sapiens
  misc_RNA (1)...(19): siRNA sense strand
gcaaagaggcggaaauuaa

SEQ ID NO: 367052 - RNA, 19 nt, Homo sapiens
  misc_RNA (1)...(19): siRNA sense strand
gcauguaucucuucuaugg

SEQ ID NO: 367053 - RNA, 19 nt, Homo sapiens
  misc_RNA (1)...(19): siRNA sense strand
ccaagaaggugcagcauuc

SEQ ID NO: 367054 - RNA, 19 nt, Homo sapiens
  misc_RNA (1)...(19): siRNA sense strand
ccgaugaguugcugaauaa

SEQ ID NO: 367055 - RNA, 19 nt, Homo sapiens
  misc_RNA (1)...(19): siRNA sense strand
gcaagaagaacccagauga

SEQ ID NO: 367056 - RNA, 19 nt, Homo sapiens
  misc_RNA (1)...(19): siRNA sense strand
gaacccagaugacuucaag

SEQ ID NO: 367057 - RNA, 19 nt, Homo sapiens
  misc_RNA (1)...(19): siRNA sense strand
ggacuacaccuacuacuuc

SEQ ID NO: 367058 - RNA, 19 nt, Homo sapiens
  misc_RNA (1)...(19): siRNA sense strand
cagagaagcaaauagguua

SEQ ID NO: 367059 - RNA, 19 nt, Homo sapiens
  misc_RNA (1)...(19): siRNA sense strand
ccaccgaccuccaggacua

SEQ ID NO: 367060 - RNA, 19 nt, Homo sapiens
  misc_RNA (1)...(19): siRNA sense strand
caacaacgccaucaagaau

SEQ ID NO: 367061 - RNA, 19 nt, Homo sapiens
  misc_RNA (1)...(19): siRNA sense strand
ggacaucggcccucccauu

SEQ ID NO: 367062 - RNA, 19 nt, Homo sapiens
  misc_RNA (1)...(19): siRNA sense strand
gccgaugaguugcugaaua

SEQ ID NO: 367063 - RNA, 19 nt, Homo sapiens
  misc_RNA (1)...(19): siRNA sense strand
gagcaaagaggcggaaauu

SEQ ID NO: 367064 - RNA, 19 nt, Homo sapiens
  misc_RNA (1)...(19): siRNA sense strand
gcuccgaguucucccauga

SEQ ID NO: 367065 - RNA, 19 nt, Homo sapiens
  misc_RNA (1)...(19): siRNA sense strand
acaaggaacuggccaacau

SEQ ID NO: 367066 - RNA, 19 nt, Homo sapiens
  misc_RNA (1)...(19): siRNA sense strand
ccgcauguaucucuucuau

SEQ ID NO: 367067 - RNA, 19 nt, Homo sapiens
  misc_RNA (1)...(19): siRNA sense strand
gcucugcucuccuggacaa

SEQ ID NO: 367068 - RNA, 19 nt, Homo sapiens
  misc_RNA (1)...(19): siRNA sense strand
caacauccgcuccaaguuc

SEQ ID NO: 367069 - RNA, 19 nt, Homo sapiens
  misc_RNA (1)...(19): siRNA sense strand
acaacgccaucaagaauga

SEQ ID NO: 367070 - RNA, 19 nt, Homo sapiens
  misc_RNA (1)...(19): siRNA sense strand
caaagaggcggaaauuaag

SEQ ID NO: 367071 - RNA, 19 nt, Homo sapiens
  misc_RNA (1)...(19): siRNA sense strand
uuaagagaaucaacaagga

SEQ ID NO: 367072 - RNA, 19 nt, Homo sapiens
  misc_RNA (1)...(19): siRNA sense strand
gcagaucggagucaaguca

SEQ ID NO: 367073 - RNA, 19 nt, Homo sapiens
  misc_RNA (1)...(19): siRNA sense strand
ugguacaccugcucaauga

SEQ ID NO: 367074 - RNA, 19 nt, Homo sapiens
  misc_RNA (1)...(19): siRNA sense strand
ggagaugggcgaggccuuu

SEQ ID NO: 367075 - RNA, 19 nt, Homo sapiens
  misc_RNA (1)...(19): siRNA sense strand
ccacggugcuggaggagau

SEQ ID NO: 367076 - RNA, 19 nt, Homo sapiens
  misc_RNA (1)...(19): siRNA sense strand
cugaauaaguuugugugua

SEQ ID NO: 367077 - RNA, 19 nt, Homo sapiens
  misc_RNA (1)...(19): siRNA sense strand
gccaugacauugacuuugg

SEQ ID NO: 367078 - RNA, 19 nt, Homo sapiens
  misc_RNA (1)...(19): siRNA sense strand
ucaccugucucugcaagaa

SEQ ID NO: 367079 - RNA, 19 nt, Homo sapiens
  misc_RNA (1)...(19): siRNA sense strand
gaaguacgccguggacuac

SEQ ID NO: 367080 - RNA, 19 nt, Homo sapiens
  misc_RNA (1)...(19): siRNA sense strand
caaguucaaaggagacaaa

SEQ ID NO: 367081 - RNA, 19 nt, Homo sapiens
  misc_RNA (1)...(19): siRNA sense strand
ccaccuacaucaaguucau

SEQ ID NO: 367082 - RNA, 19 nt, Homo sapiens
  misc_RNA (1)...(19): siRNA sense strand
uuggauggcuacaguaaga

SEQ ID NO: 367083 - RNA, 19 nt, Homo sapiens
  misc_RNA (1)...(19): siRNA sense strand
ugagugaggagguguggua

SEQ ID NO: 367084 - RNA, 19 nt, Homo sapiens
  misc_RNA (1)...(19): siRNA sense strand
ucaacaacgccaucaagaa

SEQ ID NO: 367085 - RNA, 19 nt, Homo sapiens
  misc_RNA (1)...(19): siRNA sense strand
uccaauaaauacacagaga

SEQ ID NO: 367086 - RNA, 19 nt, Homo sapiens
  misc_RNA (1)...(19): siRNA sense strand
cggugcaguuccagaauuu

SEQ ID NO: 367087 - RNA, 19 nt, Homo sapiens
  misc_RNA (1)...(19): siRNA sense strand
uaagagaaucaacaaggaa

SEQ ID NO: 367088 - RNA, 19 nt, Homo sapiens
  misc_RNA (1)...(19): siRNA sense strand
ccaauaaauacacagagaa

SEQ ID NO: 367089 - RNA, 19 nt, Homo sapiens
  misc_RNA (1)...(19): siRNA sense strand
ucuguugaguuccaauaaa

SEQ ID NO: 367090 - RNA, 19 nt, Homo sapiens
  misc_RNA (1)...(19): siRNA sense strand
gaauaaguuuguguguaag

SEQ ID NO: 367091 - RNA, 19 nt, Homo sapiens
  misc_RNA (1)...(19): siRNA sense strand
guaaacugcuuuucaucuu

SEQ ID NO: 367092 - RNA, 19 nt, Homo sapiens
  misc_RNA (1)...(19): siRNA sense strand
cagugaccaucaacaaguu

SEQ ID NO: 367093 - RNA, 19 nt, Homo sapiens
  misc_RNA (1)...(19): siRNA sense strand
augaguugcugaauaaguu

SEQ ID NO: 367094 - RNA, 19 nt, Homo sapiens
  misc_RNA (1)...(19): siRNA sense strand
aggcggaaauuaagagaau

SEQ ID NO: 367095 - RNA, 19 nt, Homo sapiens
  misc_RNA (1)...(19): siRNA sense strand
gaagguuggcggcuacauc

SEQ ID NO: 367096 - RNA, 19 nt, Homo sapiens
  misc_RNA (1)...(19): siRNA sense strand
agaaguacgccguggacua

SEQ ID NO: 367097 - RNA, 19 nt, Homo sapiens
  misc_RNA (1)...(19): siRNA sense strand
ggacgcagaaguuacuaag

SEQ ID NO: 367098 - RNA, 19 nt, Homo sapiens
  misc_RNA (1)...(19): siRNA sense strand
ggauggcuacaguaagaaa

SEQ ID NO: 367099 - RNA, 19 nt, Homo sapiens
  misc_RNA (1)...(19): siRNA sense strand
gggacagcauggacagugu

SEQ ID NO: 367100 - RNA, 19 nt, Homo sapiens
  misc_RNA (1)...(19): siRNA sense strand
caauaaauacacagagaag

SEQ ID NO: 367101 - RNA, 19 nt, Homo sapiens
  misc_RNA (1)...(19): siRNA sense strand
cugugaaucuguugaguuc

SEQ ID NO: 367102 - RNA, 19 nt, Homo sapiens
  misc_RNA (1)...(19): siRNA sense strand
gacaucggcccucccauuc

SEQ ID NO: 367103 - RNA, 19 nt, Homo sapiens
  misc_RNA (1)...(19): siRNA sense strand
cgucaucaaugcccucaag

SEQ ID NO: 367104 - RNA, 19 nt, Homo sapiens
  misc_RNA (1)...(19): siRNA sense strand
gaugaguugcugaauaagu

SEQ ID NO: 367105 - RNA, 19 nt, Homo sapiens
  misc_RNA (1)...(19): siRNA sense strand
gugaaucuguugaguucca

SEQ ID NO: 367106 - RNA, 19 nt, Homo sapiens
  misc_RNA (1)...(19): siRNA sense strand
ccagugaccaucaacaagu

SEQ ID NO: 367107 - RNA, 19 nt, Homo sapiens
  misc_RNA (1)...(19): siRNA sense strand
ggagcaaugccaagcagau

SEQ ID NO: 367108 - RNA, 19 nt, Homo sapiens
  misc_RNA (1)...(19): siRNA sense strand
uggagacugugcucaacaa

SEQ ID NO: 367109 - RNA, 19 nt, Homo sapiens
  misc_RNA (1)...(19): siRNA sense strand
agaagaacccagaugacuu

SEQ ID NO: 367110 - RNA, 19 nt, Homo sapiens
  misc_RNA (1)...(19): siRNA sense strand
gcugugaaucuguugaguu

SEQ ID NO: 367111 - RNA, 19 nt, Homo sapiens
  misc_RNA (1)...(19): siRNA sense strand
agucagaguuccgacagaa

SEQ ID NO: 367112 - RNA, 19 nt, Homo sapiens
  misc_RNA (1)...(19): siRNA sense strand
gaccaucagccucaucauc

SEQ ID NO: 367113 - RNA, 19 nt, Homo sapiens
  misc_RNA (1)...(19): siRNA sense strand
gagaccaucagccucauca

SEQ ID NO: 367114 - RNA, 19 nt, Homo sapiens
  misc_RNA (1)...(19): siRNA sense strand
acagagaagcaaauagguu

SEQ ID NO: 367115 - RNA, 19 nt, Homo sapiens
  misc_RNA (1)...(19): siRNA sense strand
auacacagagaagcaaaua

SEQ ID NO: 367116 - RNA, 19 nt, Homo sapiens
  misc_RNA (1)...(19): siRNA sense strand
cuguugaguuccaauaaau

SEQ ID NO: 367117 - RNA, 19 nt, Homo sapiens
  misc_RNA (1)...(19): siRNA sense strand
uaaauacacagagaagcaa

SEQ ID NO: 367118 - RNA, 19 nt, Homo sapiens
  misc_RNA (1)...(19): siRNA sense strand
ucggugcaguuccagaauu

SEQ ID NO: 367119 - RNA, 19 nt, Homo sapiens
  misc_RNA (1)...(19): siRNA sense strand
ggaacuguaagagcaaaga

SEQ ID NO: 367120 - RNA, 19 nt, Homo sapiens
  misc_RNA (1)...(19): siRNA sense strand
ucaaguucaucaaccucuu

SEQ ID NO: 367121 - RNA, 19 nt, Homo sapiens
  misc_RNA (1)...(19): siRNA sense strand
ggaguuugggaaccugauu

SEQ ID NO: 367122 - RNA, 19 nt, Homo sapiens
  misc_RNA (1)...(19): siRNA sense strand
acacagagaagcaaauagg

SEQ ID NO: 367123 - RNA, 19 nt, Homo sapiens
  misc_RNA (1)...(19): siRNA sense strand
ucauuucugugcuggugaa

SEQ ID NO: 367124 - RNA, 19 nt, Homo sapiens
  misc_RNA (1)...(19): siRNA sense strand
cauggaggcugugaaucug

SEQ ID NO: 367125 - RNA, 19 nt, Homo sapiens
  misc_RNA (1)...(19): siRNA sense strand
aaagaggcggaaauuaaga

SEQ ID NO: 367126 - RNA, 19 nt, Homo sapiens
  misc_RNA (1)...(19): siRNA sense strand
gcggaaauuaagagaauca

SEQ ID NO: 367127 - RNA, 19 nt, Homo sapiens
  misc_RNA (1)...(19): siRNA sense strand
gccaacauccgcuccaagu

SEQ ID NO: 367128 - RNA, 19 nt, Homo sapiens
  misc_RNA (1)...(19): siRNA sense strand
aacauccgcuccaaguuca

SEQ ID NO: 367129 - RNA, 19 nt, Homo sapiens
  misc_RNA (1)...(19): siRNA sense strand
uccggaagccgaugaguug

SEQ ID NO: 367130 - RNA, 19 nt, Homo sapiens
  misc_RNA (1)...(19): siRNA sense strand
acgagaacauggugaaggu

SEQ ID NO: 367131 - RNA, 19 nt, Homo sapiens
  misc_RNA (1)...(19): siRNA sense strand
cagaggaugcggcugugaa

SEQ ID NO: 367132 - RNA, 19 nt, Homo sapiens
  misc_RNA (1)...(19): siRNA sense strand
caucaacaacgccaucaag

SEQ ID NO: 367133 - RNA, 19 nt, Homo sapiens
  misc_RNA (1)...(19): siRNA sense strand
uggaggcugugaaucuguu

SEQ ID NO: 367134 - RNA, 19 nt, Homo sapiens
  misc_RNA (1)...(19): siRNA sense strand
ucucuucuauggcaacaag

SEQ ID NO: 367135 - RNA, 19 nt, Homo sapiens
  misc_RNA (1)...(19): siRNA sense strand
ggugugguaccgugugcua

SEQ ID NO: 367136 - RNA, 19 nt, Homo sapiens
  misc_RNA (1)...(19): siRNA sense strand
gcagaucgugucggagaug

SEQ ID NO: 367137 - RNA, 19 nt, Homo sapiens
  misc_RNA (1)...(19): siRNA sense strand
gagcaaugccaagcagauc

SEQ ID NO: 367138 - RNA, 19 nt, Homo sapiens
  misc_RNA (1)...(19): siRNA sense strand
gaguuccaauaaauacaca

SEQ ID NO: 367139 - RNA, 19 nt, Homo sapiens
  misc_RNA (1)...(19): siRNA sense strand
gugguacaccugcucaaug

SEQ ID NO: 367140 - RNA, 19 nt, Homo sapiens
  misc_RNA (1)...(19): siRNA sense strand
gaacuguaagagcaaagag

SEQ ID NO: 367141 - RNA, 19 nt, Homo sapiens
  misc_RNA (1)...(19): siRNA sense strand
auaaauacacagagaagca

SEQ ID NO: 367142 - RNA, 19 nt, Homo sapiens
  misc_RNA (1)...(19): siRNA sense strand
uuacuaaggccaagcuucu

SEQ ID NO: 367143 - RNA, 19 nt, Homo sapiens
  misc_RNA (1)...(19): siRNA sense strand
ggaaauuaagagaaucaac

SEQ ID NO: 367144 - RNA, 19 nt, Homo sapiens
  misc_RNA (1)...(19): siRNA sense strand
gagaaucaacaaggaacug

SEQ ID NO: 367145 - RNA, 19 nt, Homo sapiens
  misc_RNA (1)...(19): siRNA sense strand
gcucaaugaccagcacaug

SEQ ID NO: 367146 - RNA, 19 nt, Homo sapiens
  misc_RNA (1)...(19): siRNA sense strand
gguuaccuguucauuucug

SEQ ID NO: 367147 - RNA, 19 nt, Homo sapiens
  misc_RNA (1)...(19): siRNA sense strand
gagaugggcgaggccuuug

SEQ ID NO: 367148 - RNA, 19 nt, Homo sapiens
  misc_RNA (1)...(19): siRNA sense strand
caaguucaucaaccucuuc

SEQ ID NO: 367149 - RNA, 19 nt, Homo sapiens
  misc_RNA (1)...(19): siRNA sense strand
gaguuugggaaccugauug

SEQ ID NO: 367150 - RNA, 19 nt, Homo sapiens
  misc_RNA (1)...(19): siRNA sense strand
caagaagaacccagaugac

SEQ ID NO: 367151 - RNA, 19 nt, Homo sapiens
  misc_RNA (1)...(19): siRNA sense strand
gaaagaagaugaucaugau

SEQ ID NO: 367152 - RNA, 19 nt, Homo sapiens
  misc_RNA (1)...(19): siRNA sense strand
gcaaggagaugaucccaau

SEQ ID NO: 367153 - RNA, 19 nt, Homo sapiens
  misc_RNA (1)...(19): siRNA sense strand
gaggagaugcuucuuauaa

SEQ ID NO: 367154 - RNA, 19 nt, Homo sapiens
  misc_RNA (1)...(19): siRNA sense strand
gcacaucagacacuaauaa

SEQ ID NO: 367155 - RNA, 19 nt, Homo sapiens
  misc_RNA (1)...(19): siRNA sense strand
gaaauaacaccucagauca

SEQ ID NO: 367156 - RNA, 19 nt, Homo sapiens
  misc_RNA (1)...(19): siRNA sense strand
ggaaagaagaugaucauga

SEQ ID NO: 367157 - RNA, 19 nt, Homo sapiens
  misc_RNA (1)...(19): siRNA sense strand
ucaaguagcuggaagcaau

SEQ ID NO: 367158 - RNA, 19 nt, Homo sapiens
  misc_RNA (1)...(19): siRNA sense strand
ggacacagcaauacaggua

SEQ ID NO: 367159 - RNA, 19 nt, Homo sapiens
  misc_RNA (1)...(19): siRNA sense strand
ggagaauucugcugguauu

SEQ ID NO: 367160 - RNA, 19 nt, Homo sapiens
  misc_RNA (1)...(19): siRNA sense strand
gaucaaaugugucaguaca

SEQ ID NO: 367161 - RNA, 19 nt, Homo sapiens
  misc_RNA (1)...(19): siRNA sense strand
gcaaaccacuggagagaca

SEQ ID NO: 367162 - RNA, 19 nt, Homo sapiens
  misc_RNA (1)...(19): siRNA sense strand
ggaaugaucuugggcaaag

SEQ ID NO: 367163 - RNA, 19 nt, Homo sapiens
  misc_RNA (1)...(19): siRNA sense strand
gaagauggaccucaaguag

SEQ ID NO: 367164 - RNA, 19 nt, Homo sapiens
  misc_RNA (1)...(19): siRNA sense strand
caacgaagguaaagaggau

SEQ ID NO: 367165 - RNA, 19 nt, Homo sapiens
  misc_RNA (1)...(19): siRNA sense strand
gagccaagauaagggaaua

SEQ ID NO: 367166 - RNA, 19 nt, Homo sapiens
  misc_RNA (1)...(19): siRNA sense strand
uaaggaagcugagguaaca

SEQ ID NO: 367167 - RNA, 19 nt, Homo sapiens
  misc_RNA (1)...(19): siRNA sense strand
gcaaugaugaugcuaauuc

SEQ ID NO: 367168 - RNA, 19 nt, Homo sapiens
  misc_RNA (1)...(19): siRNA sense strand
ggaugucgcuguuguccaa

SEQ ID NO: 367169 - RNA, 19 nt, Homo sapiens
  misc_RNA (1)...(19): siRNA sense strand
gauagugacagcagugaua

SEQ ID NO: 367170 - RNA, 19 nt, Homo sapiens
  misc_RNA (1)...(19): siRNA sense strand
gauagugacagcagugaua

SEQ ID NO: 367171 - RNA, 19 nt, Homo sapiens
  misc_RNA (1)...(19): siRNA sense strand
ggaaaagacaguaguaaua

SEQ ID NO: 367172 - RNA, 19 nt, Homo sapiens
  misc_RNA (1)...(19): siRNA sense strand
caagauaagggaauagaaa

SEQ ID NO: 367173 - RNA, 19 nt, Homo sapiens
  misc_RNA (1)...(19): siRNA sense strand
gcagugauagugacaguaa

SEQ ID NO: 367174 - RNA, 19 nt, Homo sapiens
  misc_RNA (1)...(19): siRNA sense strand
gaaaggcaacgaagguaaa

SEQ ID NO: 367175 - RNA, 19 nt, Homo sapiens
  misc_RNA (1)...(19): siRNA sense strand
ccaagaagauggaccucaa

SEQ ID NO: 367176 - RNA, 19 nt, Homo sapiens
  misc_RNA (1)...(19): siRNA sense strand
gaagugacagugacaguga

SEQ ID NO: 367177 - RNA, 19 nt, Homo sapiens
  misc_RNA (1)...(19): siRNA sense strand
gauaguagcauaggucaaa

SEQ ID NO: 367178 - RNA, 19 nt, Homo sapiens
  misc_RNA (1)...(19): siRNA sense strand
ggacaaguaagcaucauug

SEQ ID NO: 367179 - RNA, 19 nt, Homo sapiens
  misc_RNA (1)...(19): siRNA sense strand
gaauagaggacacccagaa

SEQ ID NO: 367180 - RNA, 19 nt, Homo sapiens
  misc_RNA (1)...(19): siRNA sense strand
guacagacaaugaggauga

SEQ ID NO: 367181 - RNA, 19 nt, Homo sapiens
  misc_RNA (1)...(19): siRNA sense strand
gcaagagaauacccaagau

SEQ ID NO: 367182 - RNA, 19 nt, Homo sapiens
  misc_RNA (1)...(19): siRNA sense strand
gcagaaacauauggucaug

SEQ ID NO: 367183 - RNA, 19 nt, Homo sapiens
  misc_RNA (1)...(19): siRNA sense strand
gaagcaacacuaauggaaa

SEQ ID NO: 367184 - RNA, 19 nt, Homo sapiens
  misc_RNA (1)...(19): siRNA sense strand
ggauaugacaguuaugauu

SEQ ID NO: 367185 - RNA, 19 nt, Homo sapiens
  misc_RNA (1)...(19): siRNA sense strand
uaaagaggauaaaggacaa

SEQ ID NO: 367186 - RNA, 19 nt, Homo sapiens
  misc_RNA (1)...(19): siRNA sense strand
ggaaaggcaacgaagguaa

SEQ ID NO: 367187 - RNA, 19 nt, Homo sapiens
  misc_RNA (1)...(19): siRNA sense strand
gaggagaauucugcuggua

SEQ ID NO: 367188 - RNA, 19 nt, Homo sapiens
  misc_RNA (1)...(19): siRNA sense strand
caacagcagugauaguagu

SEQ ID NO: 367189 - RNA, 19 nt, Homo sapiens
  misc_RNA (1)...(19): siRNA sense strand
agaagugacaguaguaaua

SEQ ID NO: 367190 - RNA, 19 nt, Homo sapiens
  misc_RNA (1)...(19): siRNA sense strand
caucagacacuaauaauag

SEQ ID NO: 367191 - RNA, 19 nt, Homo sapiens
  misc_RNA (1)...(19): siRNA sense strand
caaguaagcaucauugaca

SEQ ID NO: 367192 - RNA, 19 nt, Homo sapiens
  misc_RNA (1)...(19): siRNA sense strand
gaagaugaugacagugaua

SEQ ID NO: 367193 - RNA, 19 nt, Homo sapiens
  misc_RNA (1)...(19): siRNA sense strand
gauaaaggacaacauggaa

SEQ ID NO: 367194 - RNA, 19 nt, Homo sapiens
  misc_RNA (1)...(19): siRNA sense strand
gaaagcaaacgcguagaaa

SEQ ID NO: 367195 - RNA, 19 nt, Homo sapiens
  misc_RNA (1)...(19): siRNA sense strand
gaauuugcaucuccuagca

SEQ ID NO: 367196 - RNA, 19 nt, Homo sapiens
  misc_RNA (1)...(19): siRNA sense strand
ggagaugcuucuuauaacu

SEQ ID NO: 367197 - RNA, 19 nt, Homo sapiens
  misc_RNA (1)...(19): siRNA sense strand
cagcacaucugacagcaau

SEQ ID NO: 367198 - RNA, 19 nt, Homo sapiens
  misc_RNA (1)...(19): siRNA sense strand
caacagcagugacaguagu

SEQ ID NO: 367199 - RNA, 19 nt, Homo sapiens
  misc_RNA (1)...(19): siRNA sense strand
gcaauaacaguacagacaa

SEQ ID NO: 367200 - RNA, 19 nt, Homo sapiens
  misc_RNA (1)...(19): siRNA sense strand
uaacagcagugauaguagu

SEQ ID NO: 367201 - RNA, 19 nt, Homo sapiens
  misc_RNA (1)...(19): siRNA sense strand
gauagcacaucagacacua

SEQ ID NO: 367202 - RNA, 19 nt, Homo sapiens
  misc_RNA (1)...(19): siRNA sense strand
caauagcagugaugaaucu

SEQ ID NO: 367203 - RNA, 19 nt, Homo sapiens
  misc_RNA (1)...(19): siRNA sense strand
caaagaagauccccauaau

SEQ ID NO: 367204 - RNA, 19 nt, Homo sapiens
  misc_RNA (1)...(19): siRNA sense strand
gaaacgaggguaauacaag

SEQ ID NO: 367205 - RNA, 19 nt, Homo sapiens
  misc_RNA (1)...(19): siRNA sense strand
gaaguaggagggaagaguu

SEQ ID NO: 367206 - RNA, 19 nt, Homo sapiens
  misc_RNA (1)...(19): siRNA sense strand
agugauagcaguaauagua

SEQ ID NO: 367207 - RNA, 19 nt, Homo sapiens
  misc_RNA (1)...(19): siRNA sense strand
agugaaagcaguaauagua

SEQ ID NO: 367208 - RNA, 19 nt, Homo sapiens
  misc_RNA (1)...(19): siRNA sense strand
caauagaagugacaguagu

SEQ ID NO: 367209 - RNA, 19 nt, Homo sapiens
  misc_RNA (1)...(19): siRNA sense strand
ggaaugaugacaaugacaa

SEQ ID NO: 367210 - RNA, 19 nt, Homo sapiens
  misc_RNA (1)...(19): siRNA sense strand
ccgaggagaugcuucuuau

SEQ ID NO: 367211 - RNA, 19 nt, Homo sapiens
  misc_RNA (1)...(19): siRNA sense strand
gaaccaggaaauaaaguug

SEQ ID NO: 367212 - RNA, 19 nt, Homo sapiens
  misc_RNA (1)...(19): siRNA sense strand
gaagaugaucaugauagua

SEQ ID NO: 367213 - RNA, 19 nt, Homo sapiens
  misc_RNA (1)...(19): siRNA sense strand
gaagaagcagggaauggaa

SEQ ID NO: 367214 - RNA, 19 nt, Homo sapiens
  misc_RNA (1)...(19): siRNA sense strand
gaauggagcagaugaggau

SEQ ID NO: 367215 - RNA, 19 nt, Homo sapiens
  misc_RNA (1)...(19): siRNA sense strand
agacaaugaggaugaaaua

SEQ ID NO: 367216 - RNA, 19 nt, Homo sapiens
  misc_RNA (1)...(19): siRNA sense strand
gagaauuccuguagaaacg

SEQ ID NO: 367217 - RNA, 19 nt, Homo sapiens
  misc_RNA (1)...(19): siRNA sense strand
gcaagucugguaacgguaa

SEQ ID NO: 367218 - RNA, 19 nt, Homo sapiens
  misc_RNA (1)...(19): siRNA sense strand
cccagaagcucaaccauag

SEQ ID NO: 367219 - RNA, 19 nt, Homo sapiens
  misc_RNA (1)...(19): siRNA sense strand
gagcagaugaggaugaaga

SEQ ID NO: 367220 - RNA, 19 nt, Homo sapiens
  misc_RNA (1)...(19): siRNA sense strand
gcuggaagcaauaacagua

SEQ ID NO: 367221 - RNA, 19 nt, Homo sapiens
  misc_RNA (1)...(19): siRNA sense strand
gcacaucugacagcaauga

SEQ ID NO: 367222 - RNA, 19 nt, Homo sapiens
  misc_RNA (1)...(19): siRNA sense strand
gcagugacagcacaucuga

SEQ ID NO: 367223 - RNA, 19 nt, Homo sapiens
  misc_RNA (1)...(19): siRNA sense strand
cgacagcagugacagcaau

SEQ ID NO: 367224 - RNA, 19 nt, Homo sapiens
  misc_RNA (1)...(19): siRNA sense strand
gauagcgacagcagcaaua

SEQ ID NO: 367225 - RNA, 19 nt, Homo sapiens
  misc_RNA (1)...(19): siRNA sense strand
gauagcgacagcagcaaua

SEQ ID NO: 367226 - RNA, 19 nt, Homo sapiens
  misc_RNA (1)...(19): siRNA sense strand
gacagugacagcagugaua

SEQ ID NO: 367227 - RNA, 19 nt, Homo sapiens
  misc_RNA (1)...(19): siRNA sense strand
gacagugacagcagugaua

SEQ ID NO: 367228 - RNA, 19 nt, Homo sapiens
  misc_RNA (1)...(19): siRNA sense strand
gcaauggcagugacucaaa

SEQ ID NO: 367229 - RNA, 19 nt, Homo sapiens
  misc_RNA (1)...(19): siRNA sense strand
cagcaauagugauggauau

SEQ ID NO: 367230 - RNA, 19 nt, Homo sapiens
  misc_RNA (1)...(19): siRNA sense strand
gaagaugcuggccuggaua

SEQ ID NO: 367231 - RNA, 19 nt, Homo sapiens
  misc_RNA (1)...(19): siRNA sense strand
gagaagggaauggcucuaa

SEQ ID NO: 367232 - RNA, 19 nt, Homo sapiens
  misc_RNA (1)...(19): siRNA sense strand
ugacagcaaugaugagagu

SEQ ID NO: 367233 - RNA, 19 nt, Homo sapiens
  misc_RNA (1)...(19): siRNA sense strand
ugacagcagugauagcaau

SEQ ID NO: 367234 - RNA, 19 nt, Homo sapiens
  misc_RNA (1)...(19): siRNA sense strand
caaugaugaugcuaauuca

SEQ ID NO: 367235 - RNA, 19 nt, Homo sapiens
  misc_RNA (1)...(19): siRNA sense strand
gauaagggaauagaaauca

SEQ ID NO: 367236 - RNA, 19 nt, Homo sapiens
  misc_RNA (1)...(19): siRNA sense strand
cuagcaagaucaaaugugu

SEQ ID NO: 367237 - RNA, 19 nt, Homo sapiens
  misc_RNA (1)...(19): siRNA sense strand
gaagugacaguaguaauag

SEQ ID NO: 367238 - RNA, 19 nt, Homo sapiens
  misc_RNA (1)...(19): siRNA sense strand
gcaauagugauggauauga

SEQ ID NO: 367239 - RNA, 19 nt, Homo sapiens
  misc_RNA (1)...(19): siRNA sense strand
ggauaaaggacaacaugga

SEQ ID NO: 367240 - RNA, 19 nt, Homo sapiens
  misc_RNA (1)...(19): siRNA sense strand
ugaaauaacaccucagauc

SEQ ID NO: 367241 - RNA, 19 nt, Homo sapiens
  misc_RNA (1)...(19): siRNA sense strand
caauaacaguacagacaau

SEQ ID NO: 367242 - RNA, 19 nt, Homo sapiens
  misc_RNA (1)...(19): siRNA sense strand
gaauacaugggaaagaaga

SEQ ID NO: 367243 - RNA, 19 nt, Homo sapiens
  misc_RNA (1)...(19): siRNA sense strand
agaaacauauggucaugau

SEQ ID NO: 367244 - RNA, 19 nt, Homo sapiens
  misc_RNA (1)...(19): siRNA sense strand
ugaugaagaugaagaagca

SEQ ID NO: 367245 - RNA, 19 nt, Homo sapiens
  misc_RNA (1)...(19): siRNA sense strand
gauaguagugacagcagua

SEQ ID NO: 367246 - RNA, 19 nt, Homo sapiens
  misc_RNA (1)...(19): siRNA sense strand
gagagcgacagcagugaua

SEQ ID NO: 367247 - RNA, 19 nt, Homo sapiens
  misc_RNA (1)...(19): siRNA sense strand
caaaucagacaguggcaaa

SEQ ID NO: 367248 - RNA, 19 nt, Homo sapiens
  misc_RNA (1)...(19): siRNA sense strand
caaugggaaugaugacaau

SEQ ID NO: 367249 - RNA, 19 nt, Homo sapiens
  misc_RNA (1)...(19): siRNA sense strand
aaucagaaccaggaaauaa

SEQ ID NO: 367250 - RNA, 19 nt, Homo sapiens
  misc_RNA (1)...(19): siRNA sense strand
gcaaagaagauccccauaa

SEQ ID NO: 367251 - RNA, 19 nt, Homo sapiens
  misc_RNA (1)...(19): siRNA sense strand
gcaaguaucucuagcauuu

SEQ ID NO: 367252 - RNA, 19 nt, Homo sapiens
  misc_RNA (1)...(19): siRNA sense strand
ggaggaauguucuguauuu

SEQ ID NO: 367253 - RNA, 19 nt, Homo sapiens
  misc_RNA (1)...(19): siRNA sense strand
gcaggauuguugauuauuu

SEQ ID NO: 367254 - RNA, 19 nt, Homo sapiens
  misc_RNA (1)...(19): siRNA sense strand
acauggaucugucuaaaua

SEQ ID NO: 367255 - RNA, 19 nt, Homo sapiens
  misc_RNA (1)...(19): siRNA sense strand
guagaagaagucaguauua

SEQ ID NO: 367256 - RNA, 19 nt, Homo sapiens
  misc_RNA (1)...(19): siRNA sense strand
uaacauggaucugucuaaa

SEQ ID NO: 367257 - RNA, 19 nt, Homo sapiens
  misc_RNA (1)...(19): siRNA sense strand
ccaguaauguugaucacua

SEQ ID NO: 367258 - RNA, 19 nt, Homo sapiens
  misc_RNA (1)...(19): siRNA sense strand
gaacuacagccuccacuug

SEQ ID NO: 367259 - RNA, 19 nt, Homo sapiens
  misc_RNA (1)...(19): siRNA sense strand
ggacuacacagccaccaua

SEQ ID NO: 367260 - RNA, 19 nt, Homo sapiens
  misc_RNA (1)...(19): siRNA sense strand
gaaaugauguggaguucac

SEQ ID NO: 367261 - RNA, 19 nt, Homo sapiens
  misc_RNA (1)...(19): siRNA sense strand
ggaauguucuguauuucau

SEQ ID NO: 367262 - RNA, 19 nt, Homo sapiens
  misc_RNA (1)...(19): siRNA sense strand
gacaggaaauuacacuaga

SEQ ID NO: 367263 - RNA, 19 nt, Homo sapiens
  misc_RNA (1)...(19): siRNA sense strand
caacaaaggaaguagaaga

SEQ ID NO: 367264 - RNA, 19 nt, Homo sapiens
  misc_RNA (1)...(19): siRNA sense strand
uacagugacuugacaauga

SEQ ID NO: 367265 - RNA, 19 nt, Homo sapiens
  misc_RNA (1)...(19): siRNA sense strand
gaucagcuuugccagcauu

SEQ ID NO: 367266 - RNA, 19 nt, Homo sapiens
  misc_RNA (1)...(19): siRNA sense strand
caaaggaaguagaagaagu

SEQ ID NO: 367267 - RNA, 19 nt, Homo sapiens
  misc_RNA (1)...(19): siRNA sense strand
gggcaggauuguugauuau

SEQ ID NO: 367268 - RNA, 19 nt, Homo sapiens
  misc_RNA (1)...(19): siRNA sense strand
gaaccucacagcaggauau

SEQ ID NO: 367269 - RNA, 19 nt, Homo sapiens
  misc_RNA (1)...(19): siRNA sense strand
ggaaguagaagaagucagu

SEQ ID NO: 367270 - RNA, 19 nt, Homo sapiens
  misc_RNA (1)...(19): siRNA sense strand
gcacuucucuucccaacac

SEQ ID NO: 367271 - RNA, 19 nt, Homo sapiens
  misc_RNA (1)...(19): siRNA sense strand
cgacaacguugacuacagu

SEQ ID NO: 367272 - RNA, 19 nt, Homo sapiens
  misc_RNA (1)...(19): siRNA sense strand
ucaaugaccacacugauga

SEQ ID NO: 367273 - RNA, 19 nt, Homo sapiens
  misc_RNA (1)...(19): siRNA sense strand
ucaaggccaucgaugugua

SEQ ID NO: 367274 - RNA, 19 nt, Homo sapiens
  misc_RNA (1)...(19): siRNA sense strand
gggaucugcuuuagcuuug

SEQ ID NO: 367275 - RNA, 19 nt, Homo sapiens
  misc_RNA (1)...(19): siRNA sense strand
uggagaacccguacagaua

SEQ ID NO: 367276 - RNA, 19 nt, Homo sapiens
  misc_RNA (1)...(19): siRNA sense strand
uaugcuagccaauguauuu

SEQ ID NO: 367277 - RNA, 19 nt, Homo sapiens
  misc_RNA (1)...(19): siRNA sense strand
ggagaacccguacagauag

SEQ ID NO: 367278 - RNA, 19 nt, Homo sapiens
  misc_RNA (1)...(19): siRNA sense strand
ugggcaggauuguugauua

SEQ ID NO: 367279 - RNA, 19 nt, Homo sapiens
  misc_RNA (1)...(19): siRNA sense strand
gaaauuacacuagauuggu

SEQ ID NO: 367280 - RNA, 19 nt, Homo sapiens
  misc_RNA (1)...(19): siRNA sense strand
ccacuuggccuucgugugu

SEQ ID NO: 367281 - RNA, 19 nt, Homo sapiens
  misc_RNA (1)...(19): siRNA sense strand
ggacaacaaaggaaguaga

SEQ ID NO: 367282 - RNA, 19 nt, Homo sapiens
  misc_RNA (1)...(19): siRNA sense strand
ugacgaccguguuaucaau

SEQ ID NO: 367283 - RNA, 19 nt, Homo sapiens
  misc_RNA (1)...(19): siRNA sense strand
cuagauuggucuuacaguu

SEQ ID NO: 367284 - RNA, 19 nt, Homo sapiens
  misc_RNA (1)...(19): siRNA sense strand
gaaaagaugggcaggauug

SEQ ID NO: 367285 - RNA, 19 nt, Homo sapiens
  misc_RNA (1)...(19): siRNA sense strand
agagcgguauuucaccuua

SEQ ID NO: 367286 - RNA, 19 nt, Homo sapiens
  misc_RNA (1)...(19): siRNA sense strand
cggcagaagugacaagcuu

SEQ ID NO: 367287 - RNA, 19 nt, Homo sapiens
  misc_RNA (1)...(19): siRNA sense strand
ggaaauuacacuagauugg

SEQ ID NO: 367288 - RNA, 19 nt, Homo sapiens
  misc_RNA (1)...(19): siRNA sense strand
gacaacaaaggaaguagaa

SEQ ID NO: 367289 - RNA, 19 nt, Homo sapiens
  misc_RNA (1)...(19): siRNA sense strand
ggaucucucucgauucagu

SEQ ID NO: 367290 - RNA, 19 nt, Homo sapiens
  misc_RNA (1)...(19): siRNA sense strand
ugacuacagugacuugaca

SEQ ID NO: 367291 - RNA, 19 nt, Homo sapiens
  misc_RNA (1)...(19): siRNA sense strand
ggugccagauacuuacauu

SEQ ID NO: 367292 - RNA, 19 nt, Homo sapiens
  misc_RNA (1)...(19): siRNA sense strand
aauaugcaguugcucacua

SEQ ID NO: 367293 - RNA, 19 nt, Homo sapiens
  misc_RNA (1)...(19): siRNA sense strand
gggcuaugauggaaaugau

SEQ ID NO: 367294 - RNA, 19 nt, Homo sapiens
  misc_RNA (1)...(19): siRNA sense strand
caggauuguugauuauuuc

SEQ ID NO: 367295 - RNA, 19 nt, Homo sapiens
  misc_RNA (1)...(19): siRNA sense strand
acagugacuugacaaugaa

SEQ ID NO: 367296 - RNA, 19 nt, Homo sapiens
  misc_RNA (1)...(19): siRNA sense strand
agauuggucuuacaguuug

SEQ ID NO: 367297 - RNA, 19 nt, Homo sapiens
  misc_RNA (1)...(19): siRNA sense strand
uagauuggucuuacaguuu

SEQ ID NO: 367298 - RNA, 19 nt, Homo sapiens
  misc_RNA (1)...(19): siRNA sense strand
uagaagaagucaguauuac

SEQ ID NO: 367299 - RNA, 19 nt, Homo sapiens
  misc_RNA (1)...(19): siRNA sense strand
ggacauugcaaguaucucu

SEQ ID NO: 367300 - RNA, 19 nt, Homo sapiens
  misc_RNA (1)...(19): siRNA sense strand
ugaucacuauuccaaacua

SEQ ID NO: 367301 - RNA, 19 nt, Homo sapiens
  misc_RNA (1)...(19): siRNA sense strand
gcuagaauaugcaguugcu

SEQ ID NO: 367302 - RNA, 19 nt, Homo sapiens
  misc_RNA (1)...(19): siRNA sense strand
gaggaauguucuguauuuc

SEQ ID NO: 367303 - RNA, 19 nt, Homo sapiens
  misc_RNA (1)...(19): siRNA sense strand
cuacacagccaccauauac

SEQ ID NO: 367304 - RNA, 19 nt, Homo sapiens
  misc_RNA (1)...(19): siRNA sense strand
guaacauggaucugucuaa

SEQ ID NO: 367305 - RNA, 19 nt, Homo sapiens
  misc_RNA (1)...(19): siRNA sense strand
aaguuugucuuccgagaaa

SEQ ID NO: 367306 - RNA, 19 nt, Homo sapiens
  misc_RNA (1)...(19): siRNA sense strand
gagcuucggaggaauguuc

SEQ ID NO: 367307 - RNA, 19 nt, Homo sapiens
  misc_RNA (1)...(19): siRNA sense strand
gccagauacuuacauugug

SEQ ID NO: 367308 - RNA, 19 nt, Homo sapiens
  misc_RNA (1)...(19): siRNA sense strand
gaucugcuuuagcuuugug

SEQ ID NO: 367309 - RNA, 19 nt, Homo sapiens
  misc_RNA (1)...(19): siRNA sense strand
cagcaggauauaacaaauu

SEQ ID NO: 367310 - RNA, 19 nt, Homo sapiens
  misc_RNA (1)...(19): siRNA sense strand
gguccuguaugcccucaga

SEQ ID NO: 367311 - RNA, 19 nt, Homo sapiens
  misc_RNA (1)...(19): siRNA sense strand
ucggaggaauguucuguau

SEQ ID NO: 367312 - RNA, 19 nt, Homo sapiens
  misc_RNA (1)...(19): siRNA sense strand
gaaguagaagaagucagua

SEQ ID NO: 367313 - RNA, 19 nt, Homo sapiens
  misc_RNA (1)...(19): siRNA sense strand
cuacguuccuuccacuuuc

SEQ ID NO: 367314 - RNA, 19 nt, Homo sapiens
  misc_RNA (1)...(19): siRNA sense strand
ggaguucaccuggcugaga

SEQ ID NO: 367315 - RNA, 19 nt, Homo sapiens
  misc_RNA (1)...(19): siRNA sense strand
caguaauguugaucacuau

SEQ ID NO: 367316 - RNA, 19 nt, Homo sapiens
  misc_RNA (1)...(19): siRNA sense strand
aaacggaagaucagcuuug

SEQ ID NO: 367317 - RNA, 19 nt, Homo sapiens
  misc_RNA (1)...(19): siRNA sense strand
caacaccaacugcuucauc

SEQ ID NO: 367318 - RNA, 19 nt, Homo sapiens
  misc_RNA (1)...(19): siRNA sense strand
gcagaagugacaagcuuuc

SEQ ID NO: 367319 - RNA, 19 nt, Homo sapiens
  misc_RNA (1)...(19): siRNA sense strand
ccaauggcacgguccugua

SEQ ID NO: 367320 - RNA, 19 nt, Homo sapiens
  misc_RNA (1)...(19): siRNA sense strand
guaauguugaucacuauuc

SEQ ID NO: 367321 - RNA, 19 nt, Homo sapiens
  misc_RNA (1)...(19): siRNA sense strand
ucacuacaguuccuuacag

SEQ ID NO: 367322 - RNA, 19 nt, Homo sapiens
  misc_RNA (1)...(19): siRNA sense strand
gcaggagacaggaaauuac

SEQ ID NO: 367323 - RNA, 19 nt, Homo sapiens
  misc_RNA (1)...(19): siRNA sense strand
caggaaauuacacuagauu

SEQ ID NO: 367324 - RNA, 19 nt, Homo sapiens
  misc_RNA (1)...(19): siRNA sense strand
gaucacuauuccaaacuac

SEQ ID NO: 367325 - RNA, 19 nt, Homo sapiens
  misc_RNA (1)...(19): siRNA sense strand
gagaaaagaugggcaggau

SEQ ID NO: 367326 - RNA, 19 nt, Homo sapiens
  misc_RNA (1)...(19): siRNA sense strand
gucugagucucuucacuga

SEQ ID NO: 367327 - RNA, 19 nt, Homo sapiens
  misc_RNA (1)...(19): siRNA sense strand
uuacugggcauacuacaug

SEQ ID NO: 367328 - RNA, 19 nt, Homo sapiens
  misc_RNA (1)...(19): siRNA sense strand
gcgacaacguugacuacag

SEQ ID NO: 367329 - RNA, 19 nt, Homo sapiens
  misc_RNA (1)...(19): siRNA sense strand
gagacaggaaauuacacua

SEQ ID NO: 367330 - RNA, 19 nt, Homo sapiens
  misc_RNA (1)...(19): siRNA sense strand
guugaucacuauuccaaac

SEQ ID NO: 367331 - RNA, 19 nt, Homo sapiens
  misc_RNA (1)...(19): siRNA sense strand
aagaugggcaggauuguug

SEQ ID NO: 367332 - RNA, 19 nt, Homo sapiens
  misc_RNA (1)...(19): siRNA sense strand
uuggaucucucucgauuca

SEQ ID NO: 367333 - RNA, 19 nt, Homo sapiens
  misc_RNA (1)...(19): siRNA sense strand
ggucuuacaguuugagcuu

SEQ ID NO: 367334 - RNA, 19 nt, Homo sapiens
  misc_RNA (1)...(19): siRNA sense strand
aaguaucucuagcauuuca

SEQ ID NO: 367335 - RNA, 19 nt, Homo sapiens
  misc_RNA (1)...(19): siRNA sense strand
guggagaacccguacagau

SEQ ID NO: 367336 - RNA, 19 nt, Homo sapiens
  misc_RNA (1)...(19): siRNA sense strand
acacuagauuggucuuaca

SEQ ID NO: 367337 - RNA, 19 nt, Homo sapiens
  misc_RNA (1)...(19): siRNA sense strand
acaggaaauuacacuagau

SEQ ID NO: 367338 - RNA, 19 nt, Homo sapiens
  misc_RNA (1)...(19): siRNA sense strand
caauggcacgguccuguau

SEQ ID NO: 367339 - RNA, 19 nt, Homo sapiens
  misc_RNA (1)...(19): siRNA sense strand
cacagcaggauauaacaaa

SEQ ID NO: 367340 - RNA, 19 nt, Homo sapiens
  misc_RNA (1)...(19): siRNA sense strand
gagcgguauuucaccuuag

SEQ ID NO: 367341 - RNA, 19 nt, Homo sapiens
  misc_RNA (1)...(19): siRNA sense strand
ugaagucacugugggaaac

SEQ ID NO: 367342 - RNA, 19 nt, Homo sapiens
  misc_RNA (1)...(19): siRNA sense strand
acagcaggauauaacaaau

SEQ ID NO: 367343 - RNA, 19 nt, Homo sapiens
  misc_RNA (1)...(19): siRNA sense strand
gcuaugauggaaaugaugu

SEQ ID NO: 367344 - RNA, 19 nt, Homo sapiens
  misc_RNA (1)...(19): siRNA sense strand
gagaguaacauggacuaca

SEQ ID NO: 367345 - RNA, 19 nt, Homo sapiens
  misc_RNA (1)...(19): siRNA sense strand
aacaaaggaaguagaagaa

SEQ ID NO: 367346 - RNA, 19 nt, Homo sapiens
  misc_RNA (1)...(19): siRNA sense strand
gggccuugcuagaauaugc

SEQ ID NO: 367347 - RNA, 19 nt, Homo sapiens
  misc_RNA (1)...(19): siRNA sense strand
cuacuguuuccuuugauuu

SEQ ID NO: 367348 - RNA, 19 nt, Homo sapiens
  misc_RNA (1)...(19): siRNA sense strand
gugguguuguccuggguuu

SEQ ID NO: 367349 - RNA, 19 nt, Homo sapiens
  misc_RNA (1)...(19): siRNA sense strand
aacaccaacugcuucauca

SEQ ID NO: 367350 - RNA, 19 nt, Homo sapiens
  misc_RNA (1)...(19): siRNA sense strand
uggagugacgaccguguua

SEQ ID NO: 367351 - RNA, 19 nt, Homo sapiens
  misc_RNA (1)...(19): siRNA sense strand
gaauuccucuucaacaugu

SEQ ID NO: 367352 - RNA, 19 nt, Homo sapiens
  misc_RNA (1)...(19): siRNA sense strand
ccaaauaccagacgcuuga

SEQ ID NO: 367353 - RNA, 19 nt, Homo sapiens
  misc_RNA (1)...(19): siRNA sense strand
gaguucgccucguguaguu

SEQ ID NO: 367354 - RNA, 19 nt, Homo sapiens
  misc_RNA (1)...(19): siRNA sense strand
cgcuugagcuggagaaaga

SEQ ID NO: 367355 - RNA, 19 nt, Homo sapiens
  misc_RNA (1)...(19): siRNA sense strand
gcuacgagguggccaggau

SEQ ID NO: 367356 - RNA, 19 nt, Homo sapiens
  misc_RNA (1)...(19): siRNA sense strand
ggccaggauucucaaccua

SEQ ID NO: 367357 - RNA, 19 nt, Homo sapiens
  misc_RNA (1)...(19): siRNA sense strand
uuucagaaccguaggauga

SEQ ID NO: 367358 - RNA, 19 nt, Homo sapiens
  misc_RNA (1)...(19): siRNA sense strand
cuacguggacucgcuuaua

SEQ ID NO: 367359 - RNA, 19 nt, Homo sapiens
  misc_RNA (1)...(19): siRNA sense strand
uaacagagagacaggucaa

SEQ ID NO: 367360 - RNA, 19 nt, Homo sapiens
  misc_RNA (1)...(19): siRNA sense strand
uacguggacucgcuuauag

SEQ ID NO: 367361 - RNA, 19 nt, Homo sapiens
  misc_RNA (1)...(19): siRNA sense strand
ucagaaccguaggaugaaa

SEQ ID NO: 367362 - RNA, 19 nt, Homo sapiens
  misc_RNA (1)...(19): siRNA sense strand
gcagcaacuugacccaaac

SEQ ID NO: 367363 - RNA, 19 nt, Homo sapiens
  misc_RNA (1)...(19): siRNA sense strand
gccaggauucucaaccuaa

SEQ ID NO: 367364 - RNA, 19 nt, Homo sapiens
  misc_RNA (1)...(19): siRNA sense strand
ggagaaaugccccaaagga

SEQ ID NO: 367365 - RNA, 19 nt, Homo sapiens
  misc_RNA (1)...(19): siRNA sense strand
ugaaggaggaggagaagca

SEQ ID NO: 367366 - RNA, 19 nt, Homo sapiens
  misc_RNA (1)...(19): siRNA sense strand
gagguggccaggauucuca

SEQ ID NO: 367367 - RNA, 19 nt, Homo sapiens
  misc_RNA (1)...(19): siRNA sense strand
gcgcugucccuacaccaaa

SEQ ID NO: 367368 - RNA, 19 nt, Homo sapiens
  misc_RNA (1)...(19): siRNA sense strand
agcagcaacuugacccaaa

SEQ ID NO: 367369 - RNA, 19 nt, Homo sapiens
  misc_RNA (1)...(19): siRNA sense strand
guggcacccucagcaacua

SEQ ID NO: 367370 - RNA, 19 nt, Homo sapiens
  misc_RNA (1)...(19): siRNA sense strand
ccaggauucucaaccuaac

SEQ ID NO: 367371 - RNA, 19 nt, Homo sapiens
  misc_RNA (1)...(19): siRNA sense strand
gcaacuugacccaaacaac

SEQ ID NO: 367372 - RNA, 19 nt, Homo sapiens
  misc_RNA (1)...(19): siRNA sense strand
gcugucccuacaccaaaua

SEQ ID NO: 367373 - RNA, 19 nt, Homo sapiens
  misc_RNA (1)...(19): siRNA sense strand
aaagaugagcaaggagaaa

SEQ ID NO: 367374 - RNA, 19 nt, Homo sapiens
  misc_RNA (1)...(19): siRNA sense strand
agaauuccucuucaacaug

SEQ ID NO: 367375 - RNA, 19 nt, Homo sapiens
  misc_RNA (1)...(19): siRNA sense strand
gaggaggagaagcagcauu

SEQ ID NO: 367376 - RNA, 19 nt, Homo sapiens
  misc_RNA (1)...(19): siRNA sense strand
ccaaauggcuggugagauu

SEQ ID NO: 367377 - RNA, 19 nt, Homo sapiens
  misc_RNA (1)...(19): siRNA sense strand
caaggaagcuucugucaug

SEQ ID NO: 367378 - RNA, 19 nt, Homo sapiens
  misc_RNA (1)...(19): siRNA sense strand
ggacagcccucaucaagga

SEQ ID NO: 367379 - RNA, 19 nt, Homo sapiens
  misc_RNA (1)...(19): siRNA sense strand
gaacaaggcugagaucaac

SEQ ID NO: 367380 - RNA, 19 nt, Homo sapiens
  misc_RNA (1)...(19): siRNA sense strand
gagcagaucucgauaaucc

SEQ ID NO: 367381 - RNA, 19 nt, Homo sapiens
  misc_RNA (1)...(19): siRNA sense strand
ggaagcuucugucaugaaa

SEQ ID NO: 367382 - RNA, 19 nt, Homo sapiens
  misc_RNA (1)...(19): siRNA sense strand
ucaagaaccucaaacuaau

SEQ ID NO: 367383 - RNA, 19 nt, Homo sapiens
  misc_RNA (1)...(19): siRNA sense strand
cagagaggcugaugguauu

SEQ ID NO: 367384 - RNA, 19 nt, Homo sapiens
  misc_RNA (1)...(19): siRNA sense strand
uguaugagacagacuauua

SEQ ID NO: 367385 - RNA, 19 nt, Homo sapiens
  misc_RNA (1)...(19): siRNA sense strand
gcuggaaccugcuggaugu

SEQ ID NO: 367386 - RNA, 19 nt, Homo sapiens
  misc_RNA (1)...(19): siRNA sense strand
gggagcagaucucgauaau

SEQ ID NO: 367387 - RNA, 19 nt, Homo sapiens
  misc_RNA (1)...(19): siRNA sense strand
gcuaugcacuggucaucuu

SEQ ID NO: 367388 - RNA, 19 nt, Homo sapiens
  misc_RNA (1)...(19): siRNA sense strand
gcacuggucaucuuugaga

SEQ ID NO: 367389 - RNA, 19 nt, Homo sapiens
  misc_RNA (1)...(19): siRNA sense strand
cguaauagcagcagcauau

SEQ ID NO: 367390 - RNA, 19 nt, Homo sapiens
  misc_RNA (1)...(19): siRNA sense strand
gcaaugggaaccucaccua

SEQ ID NO: 367391 - RNA, 19 nt, Homo sapiens
  misc_RNA (1)...(19): siRNA sense strand
ggacuucaccgucaagauc

SEQ ID NO: 367392 - RNA, 19 nt, Homo sapiens
  misc_RNA (1)...(19): siRNA sense strand
gaugggaacuacacucucu

SEQ ID NO: 367393 - RNA, 19 nt, Homo sapiens
  misc_RNA (1)...(19): siRNA sense strand
cagcgccucugauauguau

SEQ ID NO: 367394 - RNA, 19 nt, Homo sapiens
  misc_RNA (1)...(19): siRNA sense strand
guaugucccugaugaaugg

SEQ ID NO: 367395 - RNA, 19 nt, Homo sapiens
  misc_RNA (1)...(19): siRNA sense strand
ucaaguacgaaaucaagua

SEQ ID NO: 367396 - RNA, 19 nt, Homo sapiens
  misc_RNA (1)...(19): siRNA sense strand
ucacccaggucaccgacua

SEQ ID NO: 367397 - RNA, 19 nt, Homo sapiens
  misc_RNA (1)...(19): siRNA sense strand
gcacguggguccagaugcu

SEQ ID NO: 367398 - RNA, 19 nt, Homo sapiens
  misc_RNA (1)...(19): siRNA sense strand
caacucuggucaucaugga

SEQ ID NO: 367399 - RNA, 19 nt, Homo sapiens
  misc_RNA (1)...(19): siRNA sense strand
gauuuggccuggauacagu

SEQ ID NO: 367400 - RNA, 19 nt, Homo sapiens
  misc_RNA (1)...(19): siRNA sense strand
uucaagaaccucaaacuaa

SEQ ID NO: 367401 - RNA, 19 nt, Homo sapiens
  misc_RNA (1)...(19): siRNA sense strand
ccacgggaaugcauugagu

SEQ ID NO: 367402 - RNA, 19 nt, Homo sapiens
  misc_RNA (1)...(19): siRNA sense strand
ccaucacgcuaaccacuga

SEQ ID NO: 367403 - RNA, 19 nt, Homo sapiens
  misc_RNA (1)...(19): siRNA sense strand
ggugagcccugugccaaga

SEQ ID NO: 367404 - RNA, 19 nt, Homo sapiens
  misc_RNA (1)...(19): siRNA sense strand
ggacaaccagaaccuacaa

SEQ ID NO: 367405 - RNA, 19 nt, Homo sapiens
  misc_RNA (1)...(19): siRNA sense strand
ccaacggacucauccucaa

SEQ ID NO: 367406 - RNA, 19 nt, Homo sapiens
  misc_RNA (1)...(19): siRNA sense strand
acagagaggcugaugguau

SEQ ID NO: 367407 - RNA, 19 nt, Homo sapiens
  misc_RNA (1)...(19): siRNA sense strand
ggaaggugacguccaucaa

SEQ ID NO: 367408 - RNA, 19 nt, Homo sapiens
  misc_RNA (1)...(19): siRNA sense strand
ucggaugucugguccuuug

SEQ ID NO: 367409 - RNA, 19 nt, Homo sapiens
  misc_RNA (1)...(19): siRNA sense strand
gcaagaagagaaacagaac

SEQ ID NO: 367410 - RNA, 19 nt, Homo sapiens
  misc_RNA (1)...(19): siRNA sense strand
cagacaguguugccuucua

SEQ ID NO: 367411 - RNA, 19 nt, Homo sapiens
  misc_RNA (1)...(19): siRNA sense strand
ugacguccaucaacaagag

SEQ ID NO: 367412 - RNA, 19 nt, Homo sapiens
  misc_RNA (1)...(19): siRNA sense strand
auauguaugucccugauga

SEQ ID NO: 367413 - RNA, 19 nt, Homo sapiens
  misc_RNA (1)...(19): siRNA sense strand
agagccaucuucgaucuuu

SEQ ID NO: 367414 - RNA, 19 nt, Homo sapiens
  misc_RNA (1)...(19): siRNA sense strand
augggaaccucaccuacua

SEQ ID NO: 367415 - RNA, 19 nt, Homo sapiens
  misc_RNA (1)...(19): siRNA sense strand
ccuguaugcuucugugaau

SEQ ID NO: 367416 - RNA, 19 nt, Homo sapiens
  misc_RNA (1)...(19): siRNA sense strand
ggcaagaagagaaacagaa

SEQ ID NO: 367417 - RNA, 19 nt, Homo sapiens
  misc_RNA (1)...(19): siRNA sense strand
ccaggcaccuaccaguaug

SEQ ID NO: 367418 - RNA, 19 nt, Homo sapiens
  misc_RNA (1)...(19): siRNA sense strand
ccaagaccaucgacuccau

SEQ ID NO: 367419 - RNA, 19 nt, Homo sapiens
  misc_RNA (1)...(19): siRNA sense strand
ggaacuacacucucuacgu

SEQ ID NO: 367420 - RNA, 19 nt, Homo sapiens
  misc_RNA (1)...(19): siRNA sense strand
gugguacucugggagauug

SEQ ID NO: 367421 - RNA, 19 nt, Homo sapiens
  misc_RNA (1)...(19): siRNA sense strand
ggaugacucgggacgugua

SEQ ID NO: 367422 - RNA, 19 nt, Homo sapiens
  misc_RNA (1)...(19): siRNA sense strand
gaaggugacguccaucaac

SEQ ID NO: 367423 - RNA, 19 nt, Homo sapiens
  misc_RNA (1)...(19): siRNA sense strand
gcagaacaaggcugagauc

SEQ ID NO: 367424 - RNA, 19 nt, Homo sapiens
  misc_RNA (1)...(19): siRNA sense strand
gacccuagccucccucaag

SEQ ID NO: 367425 - RNA, 19 nt, Homo sapiens
  misc_RNA (1)...(19): siRNA sense strand
ccacagagaggcugauggu

SEQ ID NO: 367426 - RNA, 19 nt, Homo sapiens
  misc_RNA (1)...(19): siRNA sense strand
gccaggcaccuaccaguau

SEQ ID NO: 367427 - RNA, 19 nt, Homo sapiens
  misc_RNA (1)...(19): siRNA sense strand
ggcaacagcucggauuucg

SEQ ID NO: 367428 - RNA, 19 nt, Homo sapiens
  misc_RNA (1)...(19): siRNA sense strand
ucagcuucaucguguacua

SEQ ID NO: 367429 - RNA, 19 nt, Homo sapiens
  misc_RNA (1)...(19): siRNA sense strand
ugccaccucuccaccauug

SEQ ID NO: 367430 - RNA, 19 nt, Homo sapiens
  misc_RNA (1)...(19): siRNA sense strand
ugacucgggacguguauga

SEQ ID NO: 367431 - RNA, 19 nt, Homo sapiens
  misc_RNA (1)...(19): siRNA sense strand
caagaaccucaaacuaauc

SEQ ID NO: 367432 - RNA, 19 nt, Homo sapiens
  misc_RNA (1)...(19): siRNA sense strand
gcauacaccagggcaguug

SEQ ID NO: 367433 - RNA, 19 nt, Homo sapiens
  misc_RNA (1)...(19): siRNA sense strand
gagccaucuucgaucuuug

SEQ ID NO: 367434 - RNA, 19 nt, Homo sapiens
  misc_RNA (1)...(19): siRNA sense strand
ccgacuaccugcugcucuu

SEQ ID NO: 367435 - RNA, 19 nt, Homo sapiens
  misc_RNA (1)...(19): siRNA sense strand
agacaguguugccuucuac

SEQ ID NO: 367436 - RNA, 19 nt, Homo sapiens
  misc_RNA (1)...(19): siRNA sense strand
agaacaaggcugagaucaa

SEQ ID NO: 367437 - RNA, 19 nt, Homo sapiens
  misc_RNA (1)...(19): siRNA sense strand
caaaaucaagcacuccuuu

SEQ ID NO: 367438 - RNA, 19 nt, Homo sapiens
  misc_RNA (1)...(19): siRNA sense strand
cuucaagugucaccaugug

SEQ ID NO: 367439 - RNA, 19 nt, Homo sapiens
  misc_RNA (1)...(19): siRNA sense strand
ugauauguaugucccugau

SEQ ID NO: 367440 - RNA, 19 nt, Homo sapiens
  misc_RNA (1)...(19): siRNA sense strand
ggcgaccucuaccucaaug

SEQ ID NO: 367441 - RNA, 19 nt, Homo sapiens
  misc_RNA (1)...(19): siRNA sense strand
uuucaagaaccucaaacua

SEQ ID NO: 367442 - RNA, 19 nt, Homo sapiens
  misc_RNA (1)...(19): siRNA sense strand
aaggugacguccaucaaca

SEQ ID NO: 367443 - RNA, 19 nt, Homo sapiens
  misc_RNA (1)...(19): siRNA sense strand
gcucuuggacagacagugu

SEQ ID NO: 367444 - RNA, 19 nt, Homo sapiens
  misc_RNA (1)...(19): siRNA sense strand
gcaauggcucuuggacaga

SEQ ID NO: 367445 - RNA, 19 nt, Homo sapiens
  misc_RNA (1)...(19): siRNA sense strand
cgggcacacugacuacaga

SEQ ID NO: 367446 - RNA, 19 nt, Homo sapiens
  misc_RNA (1)...(19): siRNA sense strand
cagcauauucugccacaag

SEQ ID NO: 367447 - RNA, 19 nt, Homo sapiens
  misc_RNA (1)...(19): siRNA sense strand
gggcugugcguguggagaa

SEQ ID NO: 367448 - RNA, 19 nt, Homo sapiens
  misc_RNA (1)...(19): siRNA sense strand
ucacgcugcucaucguucu

SEQ ID NO: 367449 - RNA, 19 nt, Homo sapiens
  misc_RNA (1)...(19): siRNA sense strand
gcccaucuuucacacacau

SEQ ID NO: 367450 - RNA, 19 nt, Homo sapiens
  misc_RNA (1)...(19): siRNA sense strand
ggaauaccggaucgacauc

SEQ ID NO: 367451 - RNA, 19 nt, Homo sapiens
  misc_RNA (1)...(19): siRNA sense strand
cuucuggcuucacccguaa

SEQ ID NO: 367452 - RNA, 19 nt, Homo sapiens
  misc_RNA (1)...(19): siRNA sense strand
caacggacucauccucaag

SEQ ID NO: 367453 - RNA, 19 nt, Homo sapiens
  misc_RNA (1)...(19): siRNA sense strand
gagcacguggguccagaug

SEQ ID NO: 367454 - RNA, 19 nt, Homo sapiens
  misc_RNA (1)...(19): siRNA sense strand
ccagaaccuacaacagcua

SEQ ID NO: 367455 - RNA, 19 nt, Homo sapiens
  misc_RNA (1)...(19): siRNA sense strand
ccucgugccuguguagcuu

SEQ ID NO: 367456 - RNA, 19 nt, Homo sapiens
  misc_RNA (1)...(19): siRNA sense strand
cccuaaagagugcaaggua

SEQ ID NO: 367457 - RNA, 19 nt, Homo sapiens
  misc_RNA (1)...(19): siRNA sense strand
caaauggcuggugagauug

SEQ ID NO: 367458 - RNA, 19 nt, Homo sapiens
  misc_RNA (1)...(19): siRNA sense strand
aaggaagcuucugucauga

SEQ ID NO: 367459 - RNA, 19 nt, Homo sapiens
  misc_RNA (1)...(19): siRNA sense strand
cccugaagacggugaauga

SEQ ID NO: 367460 - RNA, 19 nt, Homo sapiens
  misc_RNA (1)...(19): siRNA sense strand
cgggagcagaucucgauaa

SEQ ID NO: 367461 - RNA, 19 nt, Homo sapiens
  misc_RNA (1)...(19): siRNA sense strand
gggcaacagcucggauuuc

SEQ ID NO: 367462 - RNA, 19 nt, Homo sapiens
  misc_RNA (1)...(19): siRNA sense strand
agggaagccucauccucaa

SEQ ID NO: 367463 - RNA, 19 nt, Homo sapiens
  misc_RNA (1)...(19): siRNA sense strand
guaugagacagacuauuac

SEQ ID NO: 367464 - RNA, 19 nt, Homo sapiens
  misc_RNA (1)...(19): siRNA sense strand
ggucaucauggaguuaaug

SEQ ID NO: 367465 - RNA, 19 nt, Homo sapiens
  misc_RNA (1)...(19): siRNA sense strand
ggauuuggccuggauacag

SEQ ID NO: 367466 - RNA, 19 nt, Homo sapiens
  misc_RNA (1)...(19): siRNA sense strand
ccucaaguacgaaaucaag

SEQ ID NO: 367467 - RNA, 19 nt, Homo sapiens
  misc_RNA (1)...(19): siRNA sense strand
acggacucauccucaagua

SEQ ID NO: 367468 - RNA, 19 nt, Homo sapiens
  misc_RNA (1)...(19): siRNA sense strand
cugcugcucuuccgugucu

SEQ ID NO: 367469 - RNA, 19 nt, Homo sapiens
  misc_RNA (1)...(19): siRNA sense strand
cggaauaccggaucgacau

SEQ ID NO: 367470 - RNA, 19 nt, Homo sapiens
  misc_RNA (1)...(19): siRNA sense strand
caugguggaugggaacuac

SEQ ID NO: 367471 - RNA, 19 nt, Homo sapiens
  misc_RNA (1)...(19): siRNA sense strand
ggaaacaccuccaaucaaa

SEQ ID NO: 367472 - RNA, 19 nt, Homo sapiens
  misc_RNA (1)...(19): siRNA sense strand
gcaaauaguggcagcaaua

SEQ ID NO: 367473 - RNA, 19 nt, Homo sapiens
  misc_RNA (1)...(19): siRNA sense strand
gagaguaucuaucugaaug

SEQ ID NO: 367474 - RNA, 19 nt, Homo sapiens
  misc_RNA (1)...(19): siRNA sense strand
caacauuccugugucaauu

SEQ ID NO: 367475 - RNA, 19 nt, Homo sapiens
  misc_RNA (1)...(19): siRNA sense strand
guaucuaucugaaugguuu

SEQ ID NO: 367476 - RNA, 19 nt, Homo sapiens
  misc_RNA (1)...(19): siRNA sense strand
gagagugacacgaccauua

SEQ ID NO: 367477 - RNA, 19 nt, Homo sapiens
  misc_RNA (1)...(19): siRNA sense strand
gcagguggauccgauauug

SEQ ID NO: 367478 - RNA, 19 nt, Homo sapiens
  misc_RNA (1)...(19): siRNA sense strand
ggagcagccucaugagauu

SEQ ID NO: 367479 - RNA, 19 nt, Homo sapiens
  misc_RNA (1)...(19): siRNA sense strand
ggagauuuaugacaaguuc

SEQ ID NO: 367480 - RNA, 19 nt, Homo sapiens
  misc_RNA (1)...(19): siRNA sense strand
gacacgaccauuaauguua

SEQ ID NO: 367481 - RNA, 19 nt, Homo sapiens
  misc_RNA (1)...(19): siRNA sense strand
cggcagaacuggcuggaaa

SEQ ID NO: 367482 - RNA, 19 nt, Homo sapiens
  misc_RNA (1)...(19): siRNA sense strand
ggaggacccugucagugaa

SEQ ID NO: 367483 - RNA, 19 nt, Homo sapiens
  misc_RNA (1)...(19): siRNA sense strand
cgacggagcuggaugaacu

SEQ ID NO: 367484 - RNA, 19 nt, Homo sapiens
  misc_RNA (1)...(19): siRNA sense strand
uugaauaucuggacuucua

SEQ ID NO: 367485 - RNA, 19 nt, Homo sapiens
  misc_RNA (1)...(19): siRNA sense strand
gcaauaaaugcagggauua

SEQ ID NO: 367486 - RNA, 19 nt, Homo sapiens
  misc_RNA (1)...(19): siRNA sense strand
gaaaaggaauugccaaagu

SEQ ID NO: 367487 - RNA, 19 nt, Homo sapiens
  misc_RNA (1)...(19): siRNA sense strand
gacugaguguggagauuua

SEQ ID NO: 367488 - RNA, 19 nt, Homo sapiens
  misc_RNA (1)...(19): siRNA sense strand
caaaguggaagauacguuu

SEQ ID NO: 367489 - RNA, 19 nt, Homo sapiens
  misc_RNA (1)...(19): siRNA sense strand
gugaagagauugcugugau

SEQ ID NO: 367490 - RNA, 19 nt, Homo sapiens
  misc_RNA (1)...(19): siRNA sense strand
cgucacagccgaauucaaa

SEQ ID NO: 367491 - RNA, 19 nt, Homo sapiens
  misc_RNA (1)...(19): siRNA sense strand
caucaucucaacaaucaua

SEQ ID NO: 367492 - RNA, 19 nt, Homo sapiens
  misc_RNA (1)...(19): siRNA sense strand
ucacagaggaccaccauug

SEQ ID NO: 367493 - RNA, 19 nt, Homo sapiens
  misc_RNA (1)...(19): siRNA sense strand
ugaagagauugcugugauu

SEQ ID NO: 367494 - RNA, 19 nt, Homo sapiens
  misc_RNA (1)...(19): siRNA sense strand
gaaaccaggaggcgacuga

SEQ ID NO: 367495 - RNA, 19 nt, Homo sapiens
  misc_RNA (1)...(19): siRNA sense strand
gcgaucauauucaaacaca

SEQ ID NO: 367496 - RNA, 19 nt, Homo sapiens
  misc_RNA (1)...(19): siRNA sense strand
gaauaucuggacuucuaua

SEQ ID NO: 367497 - RNA, 19 nt, Homo sapiens
  misc_RNA (1)...(19): siRNA sense strand
gaacucauucagcaaauag

SEQ ID NO: 367498 - RNA, 19 nt, Homo sapiens
  misc_RNA (1)...(19): siRNA sense strand
caacgucacagccgaauuc

SEQ ID NO: 367499 - RNA, 19 nt, Homo sapiens
  misc_RNA (1)...(19): siRNA sense strand
gagcaugauuggagauugg

SEQ ID NO: 367500 - RNA, 19 nt, Homo sapiens
  misc_RNA (1)...(19): siRNA sense strand
uaacaacuauuggauuugg

SEQ ID NO: 367501 - RNA, 19 nt, Homo sapiens
  misc_RNA (1)...(19): siRNA sense strand
caaauaguggcagcaauaa

SEQ ID NO: 367502 - RNA, 19 nt, Homo sapiens
  misc_RNA (1)...(19): siRNA sense strand
gaagagauugcugugauug

SEQ ID NO: 367503 - RNA, 19 nt, Homo sapiens
  misc_RNA (1)...(19): siRNA sense strand
gggauuauaccguuaggaa

SEQ ID NO: 367504 - RNA, 19 nt, Homo sapiens
  misc_RNA (1)...(19): siRNA sense strand
acacgaccauuaauguuau

SEQ ID NO: 367505 - RNA, 19 nt, Homo sapiens
  misc_RNA (1)...(19): siRNA sense strand
gcacuguuauuacaaccau

SEQ ID NO: 367506 - RNA, 19 nt, Homo sapiens
  misc_RNA (1)...(19): siRNA sense strand
cgcaucaucucaacaauca

SEQ ID NO: 367507 - RNA, 19 nt, Homo sapiens
  misc_RNA (1)...(19): siRNA sense strand
gagauuggcuccgagugau

SEQ ID NO: 367508 - RNA, 19 nt, Homo sapiens
  misc_RNA (1)...(19): siRNA sense strand
cauaggauuuggaaacauc

SEQ ID NO: 367509 - RNA, 19 nt, Homo sapiens
  misc_RNA (1)...(19): siRNA sense strand
aagaagaggugggagaguu

SEQ ID NO: 367510 - RNA, 19 nt, Homo sapiens
  misc_RNA (1)...(19): siRNA sense strand
uaucaucuaugccuuacug

SEQ ID NO: 367511 - RNA, 19 nt, Homo sapiens
  misc_RNA (1)...(19): siRNA sense strand
ggcaaaauauucuguauca

SEQ ID NO: 367512 - RNA, 19 nt, Homo sapiens
  misc_RNA (1)...(19): siRNA sense strand
gaucagcuaggcaccauau

SEQ ID NO: 367513 - RNA, 19 nt, Homo sapiens
  misc_RNA (1)...(19): siRNA sense strand
cagaggaccaccauuguga

SEQ ID NO: 367514 - RNA, 19 nt, Homo sapiens
  misc_RNA (1)...(19): siRNA sense strand
guggaagauacguuuauua

SEQ ID NO: 367515 - RNA, 19 nt, Homo sapiens
  misc_RNA (1)...(19): siRNA sense strand
cagcuaggcaccauauuug

SEQ ID NO: 367516 - RNA, 19 nt, Homo sapiens
  misc_RNA (1)...(19): siRNA sense strand
gaaacaccuccaaucaaau

SEQ ID NO: 367517 - RNA, 19 nt, Homo sapiens
  misc_RNA (1)...(19): siRNA sense strand
guguggagauuuaugacaa

SEQ ID NO: 367518 - RNA, 19 nt, Homo sapiens
  misc_RNA (1)...(19): siRNA sense strand
uauacuauuuggcugugua

SEQ ID NO: 367519 - RNA, 19 nt, Homo sapiens
  misc_RNA (1)...(19): siRNA sense strand
gaccaagauucgcaucauc

SEQ ID NO: 367520 - RNA, 19 nt, Homo sapiens
  misc_RNA (1)...(19): siRNA sense strand
ucagcuaggcaccauauuu

SEQ ID NO: 367521 - RNA, 19 nt, Homo sapiens
  misc_RNA (1)...(19): siRNA sense strand
gaauuccccucuuugguuu

SEQ ID NO: 367522 - RNA, 19 nt, Homo sapiens
  misc_RNA (1)...(19): siRNA sense strand
agagugacacgaccauuaa

SEQ ID NO: 367523 - RNA, 19 nt, Homo sapiens
  misc_RNA (1)...(19): siRNA sense strand
ucucuuggcuggaguugga

SEQ ID NO: 367524 - RNA, 19 nt, Homo sapiens
  misc_RNA (1)...(19): siRNA sense strand
ccagaagcaaacauucaua

SEQ ID NO: 367525 - RNA, 19 nt, Homo sapiens
  misc_RNA (1)...(19): siRNA sense strand
ggaagauacguuuauuaag

SEQ ID NO: 367526 - RNA, 19 nt, Homo sapiens
  misc_RNA (1)...(19): siRNA sense strand
gaagcaaacauucauaucc

SEQ ID NO: 367527 - RNA, 19 nt, Homo sapiens
  misc_RNA (1)...(19): siRNA sense strand
acauucauaucccaacauu

SEQ ID NO: 367528 - RNA, 19 nt, Homo sapiens
  misc_RNA (1)...(19): siRNA sense strand
ggauuauaccguuaggaaa

SEQ ID NO: 367529 - RNA, 19 nt, Homo sapiens
  misc_RNA (1)...(19): siRNA sense strand
agcaauaaaugcagggauu

SEQ ID NO: 367530 - RNA, 19 nt, Homo sapiens
  misc_RNA (1)...(19): siRNA sense strand
uaucuggacuucuauaagc

SEQ ID NO: 367531 - RNA, 19 nt, Homo sapiens
  misc_RNA (1)...(19): siRNA sense strand
cagaagcaaacauucauau

SEQ ID NO: 367532 - RNA, 19 nt, Homo sapiens
  misc_RNA (1)...(19): siRNA sense strand
acacugugcuggugaagag

SEQ ID NO: 367533 - RNA, 19 nt, Homo sapiens
  misc_RNA (1)...(19): siRNA sense strand
gaagacugagaguaucuau

SEQ ID NO: 367534 - RNA, 19 nt, Homo sapiens
  misc_RNA (1)...(19): siRNA sense strand
cgacugaguguggagauuu

SEQ ID NO: 367535 - RNA, 19 nt, Homo sapiens
  misc_RNA (1)...(19): siRNA sense strand
uguagggcuugcuuacuuu

SEQ ID NO: 367536 - RNA, 19 nt, Homo sapiens
  misc_RNA (1)...(19): siRNA sense strand
caucggagccaccguguuc

SEQ ID NO: 367537 - RNA, 19 nt, Homo sapiens
  misc_RNA (1)...(19): siRNA sense strand
uaggaaacaccuccaauca

SEQ ID NO: 367538 - RNA, 19 nt, Homo sapiens
  misc_RNA (1)...(19): siRNA sense strand
aaacauucauaucccaaca

SEQ ID NO: 367539 - RNA, 19 nt, Homo sapiens
  misc_RNA (1)...(19): siRNA sense strand
gagaucagcuaggcaccau

SEQ ID NO: 367540 - RNA, 19 nt, Homo sapiens
  misc_RNA (1)...(19): siRNA sense strand
ggaccaccauugugaucca

SEQ ID NO: 367541 - RNA, 19 nt, Homo sapiens
  misc_RNA (1)...(19): siRNA sense strand
aaacaccuccaaucaaauc

SEQ ID NO: 367542 - RNA, 19 nt, Homo sapiens
  misc_RNA (1)...(19): siRNA sense strand
aauaguggcagcaauaaau

SEQ ID NO: 367543 - RNA, 19 nt, Homo sapiens
  misc_RNA (1)...(19): siRNA sense strand
ccaccauugugauccagaa

SEQ ID NO: 367544 - RNA, 19 nt, Homo sapiens
  misc_RNA (1)...(19): siRNA sense strand
agacugagaguaucuaucu

SEQ ID NO: 367545 - RNA, 19 nt, Homo sapiens
  misc_RNA (1)...(19): siRNA sense strand
cgauauuccuggugguugu

SEQ ID NO: 367546 - RNA, 19 nt, Homo sapiens
  misc_RNA (1)...(19): siRNA sense strand
cauuggagcagccucauga

SEQ ID NO: 367547 - RNA, 19 nt, Homo sapiens
  misc_RNA (1)...(19): siRNA sense strand
gugguuguccucuaucuga

SEQ ID NO: 367548 - RNA, 19 nt, Homo sapiens
  misc_RNA (1)...(19): siRNA sense strand
ugacacgaccauuaauguu

SEQ ID NO: 367549 - RNA, 19 nt, Homo sapiens
  misc_RNA (1)...(19): siRNA sense strand
ucacugggauuugggaagu

SEQ ID NO: 367550 - RNA, 19 nt, Homo sapiens
  misc_RNA (1)...(19): siRNA sense strand
gauuauaccguuaggaaac

SEQ ID NO: 367551 - RNA, 19 nt, Homo sapiens
  misc_RNA (1)...(19): siRNA sense strand
ccaccguguucaaagcauu

SEQ ID NO: 367552 - RNA, 19 nt, Homo sapiens
  misc_RNA (1)...(19): siRNA sense strand
ggaauuccccucuuugguu

SEQ ID NO: 367553 - RNA, 19 nt, Homo sapiens
  misc_RNA (1)...(19): siRNA sense strand
cugacuugcuggauccuaa

SEQ ID NO: 367554 - RNA, 19 nt, Homo sapiens
  misc_RNA (1)...(19): siRNA sense strand
aaaguggaagauacguuua

SEQ ID NO: 367555 - RNA, 19 nt, Homo sapiens
  misc_RNA (1)...(19): siRNA sense strand
agauugcugugauugagaa

SEQ ID NO: 367556 - RNA, 19 nt, Homo sapiens
  misc_RNA (1)...(19): siRNA sense strand
ugucuugccucccuuacug

SEQ ID NO: 367557 - RNA, 19 nt, Homo sapiens
  misc_RNA (1)...(19): siRNA sense strand
ggaugucuugccucccuua

SEQ ID NO: 367558 - RNA, 19 nt, Homo sapiens
  misc_RNA (1)...(19): siRNA sense strand
gaagcucucggcagaacug

SEQ ID NO: 367559 - RNA, 19 nt, Homo sapiens
  misc_RNA (1)...(19): siRNA sense strand
gcgacugaguguggagauu

SEQ ID NO: 367560 - RNA, 19 nt, Homo sapiens
  misc_RNA (1)...(19): siRNA sense strand
uuguagggcuugcuuacuu

SEQ ID NO: 367561 - RNA, 19 nt, Homo sapiens
  misc_RNA (1)...(19): siRNA sense strand
uggauuuggugacuacguu

SEQ ID NO: 367562 - RNA, 19 nt, Homo sapiens
  misc_RNA (1)...(19): siRNA sense strand
gagcagccucaugagauuu

SEQ ID NO: 367563 - RNA, 19 nt, Homo sapiens
  misc_RNA (1)...(19): siRNA sense strand
ugaguguggagauuuauga

SEQ ID NO: 367564 - RNA, 19 nt, Homo sapiens
  misc_RNA (1)...(19): siRNA sense strand
ccuggugguuguccucuau

SEQ ID NO: 367565 - RNA, 19 nt, Homo sapiens
  misc_RNA (1)...(19): siRNA sense strand
gcuaggcaccauauuugga

SEQ ID NO: 367566 - RNA, 19 nt, Homo sapiens
  misc_RNA (1)...(19): siRNA sense strand
gagauugcugugauugaga

SEQ ID NO: 367567 - RNA, 19 nt, Homo sapiens
  misc_RNA (1)...(19): siRNA sense strand
aggaggacccugucaguga

SEQ ID NO: 367568 - RNA, 19 nt, Homo sapiens
  misc_RNA (1)...(19): siRNA sense strand
ucacagccgaauucaaaga

SEQ ID NO: 367569 - RNA, 19 nt, Homo sapiens
  misc_RNA (1)...(19): siRNA sense strand
gcccuggacgccauuuauu

SEQ ID NO: 367570 - RNA, 19 nt, Homo sapiens
  misc_RNA (1)...(19): siRNA sense strand
ggaauguuagucagaccaa

SEQ ID NO: 367571 - RNA, 19 nt, Homo sapiens
  misc_RNA (1)...(19): siRNA sense strand
gaauucaucuugugucuua

SEQ ID NO: 367572 - RNA, 19 nt, Homo sapiens
  misc_RNA (1)...(19): siRNA sense strand
ggaccacuaugucuugauu

SEQ ID NO: 367573 - RNA, 19 nt, Homo sapiens
  misc_RNA (1)...(19): siRNA sense strand
gaugugcgaugcuuucuuc

SEQ ID NO: 367574 - RNA, 19 nt, Homo sapiens
  misc_RNA (1)...(19): siRNA sense strand
gaugcuuucuucuguauug

SEQ ID NO: 367575 - RNA, 19 nt, Homo sapiens
  misc_RNA (1)...(19): siRNA sense strand
uguauuggcugcucucauu

SEQ ID NO: 367576 - RNA, 19 nt, Homo sapiens
  misc_RNA (1)...(19): siRNA sense strand
gaaggaccacuaugucuug

SEQ ID NO: 367577 - RNA, 19 nt, Homo sapiens
  misc_RNA (1)...(19): siRNA sense strand
gcacugaacccaagcacau

SEQ ID NO: 367578 - RNA, 19 nt, Homo sapiens
  misc_RNA (1)...(19): siRNA sense strand
gcgaugcuuucuucuguau

SEQ ID NO: 367579 - RNA, 19 nt, Homo sapiens
  misc_RNA (1)...(19): siRNA sense strand
ggaucuggcuacuguguca

SEQ ID NO: 367580 - RNA, 19 nt, Homo sapiens
  misc_RNA (1)...(19): siRNA sense strand
gugcaucgcggcuaauauu

SEQ ID NO: 367581 - RNA, 19 nt, Homo sapiens
  misc_RNA (1)...(19): siRNA sense strand
caucuugugucuuauucaa

SEQ ID NO: 367582 - RNA, 19 nt, Homo sapiens
  misc_RNA (1)...(19): siRNA sense strand
gugcgaugcuuucuucugu

SEQ ID NO: 367583 - RNA, 19 nt, Homo sapiens
  misc_RNA (1)...(19): siRNA sense strand
aguaauaaauggagugcuu

SEQ ID NO: 367584 - RNA, 19 nt, Homo sapiens
  misc_RNA (1)...(19): siRNA sense strand
cggcuaauauuuugcuuua

SEQ ID NO: 367585 - RNA, 19 nt, Homo sapiens
  misc_RNA (1)...(19): siRNA sense strand
gcagaaggaccacuauguc

SEQ ID NO: 367586 - RNA, 19 nt, Homo sapiens
  misc_RNA (1)...(19): siRNA sense strand
gccagcauuugucuucauu

SEQ ID NO: 367587 - RNA, 19 nt, Homo sapiens
  misc_RNA (1)...(19): siRNA sense strand
gcucucaccaacagcaaua

SEQ ID NO: 367588 - RNA, 19 nt, Homo sapiens
  misc_RNA (1)...(19): siRNA sense strand
caaacgaugugcgaugcuu

SEQ ID NO: 367589 - RNA, 19 nt, Homo sapiens
  misc_RNA (1)...(19): siRNA sense strand
caguggaacuacaccuuug

SEQ ID NO: 367590 - RNA, 19 nt, Homo sapiens
  misc_RNA (1)...(19): siRNA sense strand
gaauggaauguaucucugu

SEQ ID NO: 367591 - RNA, 19 nt, Homo sapiens
  misc_RNA (1)...(19): siRNA sense strand
ugcaggaucuggcuacugu

SEQ ID NO: 367592 - RNA, 19 nt, Homo sapiens
  misc_RNA (1)...(19): siRNA sense strand
ccaguggaacuacaccuuu

SEQ ID NO: 367593 - RNA, 19 nt, Homo sapiens
  misc_RNA (1)...(19): siRNA sense strand
caaaguaugccuccgaaaa

SEQ ID NO: 367594 - RNA, 19 nt, Homo sapiens
  misc_RNA (1)...(19): siRNA sense strand
cagcauuugucuucauugg

SEQ ID NO: 367595 - RNA, 19 nt, Homo sapiens
  misc_RNA (1)...(19): siRNA sense strand
gaauguaucucuguuuucu

SEQ ID NO: 367596 - RNA, 19 nt, Homo sapiens
  misc_RNA (1)...(19): siRNA sense strand
gcccuuggcuuagcagaag

SEQ ID NO: 367597 - RNA, 19 nt, Homo sapiens
  misc_RNA (1)...(19): siRNA sense strand
uggcugcucucauuggaau

SEQ ID NO: 367598 - RNA, 19 nt, Homo sapiens
  misc_RNA (1)...(19): siRNA sense strand
uggagugcuuggaggcaua

SEQ ID NO: 367599 - RNA, 19 nt, Homo sapiens
  misc_RNA (1)...(19): siRNA sense strand
gagguggccugcugaugcu

SEQ ID NO: 367600 - RNA, 19 nt, Homo sapiens
  misc_RNA (1)...(19): siRNA sense strand
aauggaauguaucucuguu

SEQ ID NO: 367601 - RNA, 19 nt, Homo sapiens
  misc_RNA (1)...(19): siRNA sense strand
guucuuuucuggcaucgua

SEQ ID NO: 367602 - RNA, 19 nt, Homo sapiens
  misc_RNA (1)...(19): siRNA sense strand
ggaggcauauguggcuuuu

SEQ ID NO: 367603 - RNA, 19 nt, Homo sapiens
  misc_RNA (1)...(19): siRNA sense strand
caucgcggcuaauauuuug

SEQ ID NO: 367604 - RNA, 19 nt, Homo sapiens
  misc_RNA (1)...(19): siRNA sense strand
gcucuugguggaauugaau

SEQ ID NO: 367605 - RNA, 19 nt, Homo sapiens
  misc_RNA (1)...(19): siRNA sense strand
ucuauccucuuggcucuug

SEQ ID NO: 367606 - RNA, 19 nt, Homo sapiens
  misc_RNA (1)...(19): siRNA sense strand
agaaggaccacuaugucuu

SEQ ID NO: 367607 - RNA, 19 nt, Homo sapiens
  misc_RNA (1)...(19): siRNA sense strand
uugcuuuacuuucccaaug

SEQ ID NO: 367608 - RNA, 19 nt, Homo sapiens
  misc_RNA (1)...(19): siRNA sense strand
ugaaaacuguggcaaacga

SEQ ID NO: 367609 - RNA, 19 nt, Homo sapiens
  misc_RNA (1)...(19): siRNA sense strand
uggaauguaucucuguuuu

SEQ ID NO: 367610 - RNA, 19 nt, Homo sapiens
  misc_RNA (1)...(19): siRNA sense strand
cagaaggaccacuaugucu

SEQ ID NO: 367611 - RNA, 19 nt, Homo sapiens
  misc_RNA (1)...(19): siRNA sense strand
uggcuacugugucauugug

SEQ ID NO: 367612 - RNA, 19 nt, Homo sapiens
  misc_RNA (1)...(19): siRNA sense strand
aaacgaugugcgaugcuuu

SEQ ID NO: 367613 - RNA, 19 nt, Homo sapiens
  misc_RNA (1)...(19): siRNA sense strand
cauuggaauugcaggaucu

SEQ ID NO: 367614 - RNA, 19 nt, Homo sapiens
  misc_RNA (1)...(19): siRNA sense strand
gaaaguagaugaggugaaa

SEQ ID NO: 367615 - RNA, 19 nt, Homo sapiens
  misc_RNA (1)...(19): siRNA sense strand
gaaaacagaucgaccuuua

SEQ ID NO: 367616 - RNA, 19 nt, Homo sapiens
  misc_RNA (1)...(19): siRNA sense strand
gcaaacagcaggcaaaguu

SEQ ID NO: 367617 - RNA, 19 nt, Homo sapiens
  misc_RNA (1)...(19): siRNA sense strand
ggacuugcauugauuauac

SEQ ID NO: 367618 - RNA, 19 nt, Homo sapiens
  misc_RNA (1)...(19): siRNA sense strand
uagaggagcugaaaguaga

SEQ ID NO: 367619 - RNA, 19 nt, Homo sapiens
  misc_RNA (1)...(19): siRNA sense strand
gcaaacuggucaacaagug

SEQ ID NO: 367620 - RNA, 19 nt, Homo sapiens
  misc_RNA (1)...(19): siRNA sense strand
gagaaucccuaucacucaa

SEQ ID NO: 367621 - RNA, 19 nt, Homo sapiens
  misc_RNA (1)...(19): siRNA sense strand
ggacuucuuuaggcagaua

SEQ ID NO: 367622 - RNA, 19 nt, Homo sapiens
  misc_RNA (1)...(19): siRNA sense strand
ugucaaaggucaccaaagu

SEQ ID NO: 367623 - RNA, 19 nt, Homo sapiens
  misc_RNA (1)...(19): siRNA sense strand
gugauaagcccaacaagga

SEQ ID NO: 367624 - RNA, 19 nt, Homo sapiens
  misc_RNA (1)...(19): siRNA sense strand
gaauauuggacuugcauug

SEQ ID NO: 367625 - RNA, 19 nt, Homo sapiens
  misc_RNA (1)...(19): siRNA sense strand
ggagaaucccuaucacuca

SEQ ID NO: 367626 - RNA, 19 nt, Homo sapiens
  misc_RNA (1)...(19): siRNA sense strand
gaaucccuaucacucaaga

SEQ ID NO: 367627 - RNA, 19 nt, Homo sapiens
  misc_RNA (1)...(19): siRNA sense strand
cuauggagcucaaugugau

SEQ ID NO: 367628 - RNA, 19 nt, Homo sapiens
  misc_RNA (1)...(19): siRNA sense strand
guagaugaggugaaaauua

SEQ ID NO: 367629 - RNA, 19 nt, Homo sapiens
  misc_RNA (1)...(19): siRNA sense strand
ugggagaacugucaaaggu

SEQ ID NO: 367630 - RNA, 19 nt, Homo sapiens
  misc_RNA (1)...(19): siRNA sense strand
gauccgaggcgguguuuag

SEQ ID NO: 367631 - RNA, 19 nt, Homo sapiens
  misc_RNA (1)...(19): siRNA sense strand
gaggcgguguuuagaggaa

SEQ ID NO: 367632 - RNA, 19 nt, Homo sapiens
  misc_RNA (1)...(19): siRNA sense strand
aaggcaaacuggucaacaa

SEQ ID NO: 367633 - RNA, 19 nt, Homo sapiens
  misc_RNA (1)...(19): siRNA sense strand
uauuggacuugcauugauu

SEQ ID NO: 367634 - RNA, 19 nt, Homo sapiens
  misc_RNA (1)...(19): siRNA sense strand
ggucaacaagugugcuuug

SEQ ID NO: 367635 - RNA, 19 nt, Homo sapiens
  misc_RNA (1)...(19): siRNA sense strand
uagaugaggugaaaauuag

SEQ ID NO: 367636 - RNA, 19 nt, Homo sapiens
  misc_RNA (1)...(19): siRNA sense strand
gugcagagccuuuuacaga

SEQ ID NO: 367637 - RNA, 19 nt, Homo sapiens
  misc_RNA (1)...(19): siRNA sense strand
gcagagccuuuuacagaau

SEQ ID NO: 367638 - RNA, 19 nt, Homo sapiens
  misc_RNA (1)...(19): siRNA sense strand
gaaggcaaacuggucaaca

SEQ ID NO: 367639 - RNA, 19 nt, Homo sapiens
  misc_RNA (1)...(19): siRNA sense strand
cagcaguuauuucgucacu

SEQ ID NO: 367640 - RNA, 19 nt, Homo sapiens
  misc_RNA (1)...(19): siRNA sense strand
caaacuggucaacaagugu

SEQ ID NO: 367641 - RNA, 19 nt, Homo sapiens
  misc_RNA (1)...(19): siRNA sense strand
uaccggagaaucccuauca

SEQ ID NO: 367642 - RNA, 19 nt, Homo sapiens
  misc_RNA (1)...(19): siRNA sense strand
aauauuggacuugcauuga

SEQ ID NO: 367643 - RNA, 19 nt, Homo sapiens
  misc_RNA (1)...(19): siRNA sense strand
ucacuauggagcucaaugu

SEQ ID NO: 367644 - RNA, 19 nt, Homo sapiens
  misc_RNA (1)...(19): siRNA sense strand
uuaguucugcugugcuuaa

SEQ ID NO: 367645 - RNA, 19 nt, Homo sapiens
  misc_RNA (1)...(19): siRNA sense strand
cuagaggagcugaaaguag

SEQ ID NO: 367646 - RNA, 19 nt, Homo sapiens
  misc_RNA (1)...(19): siRNA sense strand
cccuaucacucaagaccaa

SEQ ID NO: 367647 - RNA, 19 nt, Homo sapiens
  misc_RNA (1)...(19): siRNA sense strand
auauuggacuugcauugau

SEQ ID NO: 367648 - RNA, 19 nt, Homo sapiens
  misc_RNA (1)...(19): siRNA sense strand
gcagauaaaacgucacugu

SEQ ID NO: 367649 - RNA, 19 nt, Homo sapiens
  misc_RNA (1)...(19): siRNA sense strand
ggagcucaaugugauaagc

SEQ ID NO: 367650 - RNA, 19 nt, Homo sapiens
  misc_RNA (1)...(19): siRNA sense strand
ggccugaccugggagaacu

SEQ ID NO: 367651 - RNA, 19 nt, Homo sapiens
  misc_RNA (1)...(19): siRNA sense strand
uuacagaauauuggacuug

SEQ ID NO: 367652 - RNA, 19 nt, Homo sapiens
  misc_RNA (1)...(19): siRNA sense strand
aauuaguucugcugugcuu

SEQ ID NO: 367653 - RNA, 19 nt, Homo sapiens
  misc_RNA (1)...(19): siRNA sense strand
guguuuagaggaaggcaaa

SEQ ID NO: 367654 - RNA, 19 nt, Homo sapiens
  misc_RNA (1)...(19): siRNA sense strand
cagagccuuuuacagaaua

SEQ ID NO: 367655 - RNA, 19 nt, Homo sapiens
  misc_RNA (1)...(19): siRNA sense strand
gaaggaggauuugguggua

SEQ ID NO: 367656 - RNA, 19 nt, Homo sapiens
  misc_RNA (1)...(19): siRNA sense strand
ggacagauccagacacuug

SEQ ID NO: 367657 - RNA, 19 nt, Homo sapiens
  misc_RNA (1)...(19): siRNA sense strand
gaaacuggaugaagaugug

SEQ ID NO: 367658 - RNA, 19 nt, Homo sapiens
  misc_RNA (1)...(19): siRNA sense strand
ggaugaagaugugaagaug

SEQ ID NO: 367659 - RNA, 19 nt, Homo sapiens
  misc_RNA (1)...(19): siRNA sense strand
caccaaugcucaacagauu

SEQ ID NO: 367660 - RNA, 19 nt, Homo sapiens
  misc_RNA (1)...(19): siRNA sense strand
uccaagagaugaacugaaa

SEQ ID NO: 367661 - RNA, 19 nt, Homo sapiens
  misc_RNA (1)...(19): siRNA sense strand
gagccuggauucacacaga

SEQ ID NO: 367662 - RNA, 19 nt, Homo sapiens
  misc_RNA (1)...(19): siRNA sense strand
gacagcagcucuaccagau

SEQ ID NO: 367663 - RNA, 19 nt, Homo sapiens
  misc_RNA (1)...(19): siRNA sense strand
agaagcgccuguacucuuu

SEQ ID NO: 367664 - RNA, 19 nt, Homo sapiens
  misc_RNA (1)...(19): siRNA sense strand
gauaucgccauggcaauua

SEQ ID NO: 367665 - RNA, 19 nt, Homo sapiens
  misc_RNA (1)...(19): siRNA sense strand
gaacugaaaccuccaaagc

SEQ ID NO: 367666 - RNA, 19 nt, Homo sapiens
  misc_RNA (1)...(19): siRNA sense strand
gaggugcgccagucuguaa

SEQ ID NO: 367667 - RNA, 19 nt, Homo sapiens
  misc_RNA (1)...(19): siRNA sense strand
caggagagauccagcagau

SEQ ID NO: 367668 - RNA, 19 nt, Homo sapiens
  misc_RNA (1)...(19): siRNA sense strand
uuaugaaacuggaugaaga

SEQ ID NO: 367669 - RNA, 19 nt, Homo sapiens
  misc_RNA (1)...(19): siRNA sense strand
gcucguauuaagaagauua

SEQ ID NO: 367670 - RNA, 19 nt, Homo sapiens
  misc_RNA (1)...(19): siRNA sense strand
cagcagaucaucacuaaca

SEQ ID NO: 367671 - RNA, 19 nt, Homo sapiens
  misc_RNA (1)...(19): siRNA sense strand
ugcagcagaucaucacuaa

SEQ ID NO: 367672 - RNA, 19 nt, Homo sapiens
  misc_RNA (1)...(19): siRNA sense strand
ggaauuuaacagugaaaga

SEQ ID NO: 367673 - RNA, 19 nt, Homo sapiens
  misc_RNA (1)...(19): siRNA sense strand
gaagaugugaagaugauca

SEQ ID NO: 367674 - RNA, 19 nt, Homo sapiens
  misc_RNA (1)...(19): siRNA sense strand
gaagaugaucagugcagaa

SEQ ID NO: 367675 - RNA, 19 nt, Homo sapiens
  misc_RNA (1)...(19): siRNA sense strand
ggauucacacagaagauaa

SEQ ID NO: 367676 - RNA, 19 nt, Homo sapiens
  misc_RNA (1)...(19): siRNA sense strand
ccggccagcugcaguauau

SEQ ID NO: 367677 - RNA, 19 nt, Homo sapiens
  misc_RNA (1)...(19): siRNA sense strand
gcugcaguauauccgcuua

SEQ ID NO: 367678 - RNA, 19 nt, Homo sapiens
  misc_RNA (1)...(19): siRNA sense strand
gguacuagcagcagugaug

SEQ ID NO: 367679 - RNA, 19 nt, Homo sapiens
  misc_RNA (1)...(19): siRNA sense strand
gaacucccacuggcucgua

SEQ ID NO: 367680 - RNA, 19 nt, Homo sapiens
  misc_RNA (1)...(19): siRNA sense strand
gaugaagaugugaagauga

SEQ ID NO: 367681 - RNA, 19 nt, Homo sapiens
  misc_RNA (1)...(19): siRNA sense strand
cagcagugaugcccagcaa

SEQ ID NO: 367682 - RNA, 19 nt, Homo sapiens
  misc_RNA (1)...(19): siRNA sense strand
gauauuguuccaagagaug

SEQ ID NO: 367683 - RNA, 19 nt, Homo sapiens
  misc_RNA (1)...(19): siRNA sense strand
gcagugaugcccagcaaag

SEQ ID NO: 367684 - RNA, 19 nt, Homo sapiens
  misc_RNA (1)...(19): siRNA sense strand
cagaagcgccuguacucuu

SEQ ID NO: 367685 - RNA, 19 nt, Homo sapiens
  misc_RNA (1)...(19): siRNA sense strand
ccacuggcucguauuaaga

SEQ ID NO: 367686 - RNA, 19 nt, Homo sapiens
  misc_RNA (1)...(19): siRNA sense strand
ggucagcaggugcagauug

SEQ ID NO: 367687 - RNA, 19 nt, Homo sapiens
  misc_RNA (1)...(19): siRNA sense strand
ucacacagaagauaacaag

SEQ ID NO: 367688 - RNA, 19 nt, Homo sapiens
  misc_RNA (1)...(19): siRNA sense strand
gcaaggacagcagcaguuc

SEQ ID NO: 367689 - RNA, 19 nt, Homo sapiens
  misc_RNA (1)...(19): siRNA sense strand
ccagacacuugccaccaau

SEQ ID NO: 367690 - RNA, 19 nt, Homo sapiens
  misc_RNA (1)...(19): siRNA sense strand
gucagcaggugcagauugu

SEQ ID NO: 367691 - RNA, 19 nt, Homo sapiens
  misc_RNA (1)...(19): siRNA sense strand
guccacagaaggaggauuu

SEQ ID NO: 367692 - RNA, 19 nt, Homo sapiens
  misc_RNA (1)...(19): siRNA sense strand
ggccucgggucauggaaga

SEQ ID NO: 367693 - RNA, 19 nt, Homo sapiens
  misc_RNA (1)...(19): siRNA sense strand
gacaaugcagguuggagaa

SEQ ID NO: 367694 - RNA, 19 nt, Homo sapiens
  misc_RNA (1)...(19): siRNA sense strand
gcacuggacagaccaugca

SEQ ID NO: 367695 - RNA, 19 nt, Homo sapiens
  misc_RNA (1)...(19): siRNA sense strand
caucgauauuguuccaaga

SEQ ID NO: 367696 - RNA, 19 nt, Homo sapiens
  misc_RNA (1)...(19): siRNA sense strand
gaauuuaacagugaaagac

SEQ ID NO: 367697 - RNA, 19 nt, Homo sapiens
  misc_RNA (1)...(19): siRNA sense strand
gagccaguccaguacuauu

SEQ ID NO: 367698 - RNA, 19 nt, Homo sapiens
  misc_RNA (1)...(19): siRNA sense strand
ccgagccaguccaguacua

SEQ ID NO: 367699 - RNA, 19 nt, Homo sapiens
  misc_RNA (1)...(19): siRNA sense strand
gccaaggcagcccagauuu

SEQ ID NO: 367700 - RNA, 19 nt, Homo sapiens
  misc_RNA (1)...(19): siRNA sense strand
guaucaggcacucaaguug

SEQ ID NO: 367701 - RNA, 19 nt, Homo sapiens
  misc_RNA (1)...(19): siRNA sense strand
gacagaccaugcaggugau

SEQ ID NO: 367702 - RNA, 19 nt, Homo sapiens
  misc_RNA (1)...(19): siRNA sense strand
augaagaugugaagaugau

SEQ ID NO: 367703 - RNA, 19 nt, Homo sapiens
  misc_RNA (1)...(19): siRNA sense strand
ccgcuuagcccagccugua

SEQ ID NO: 367704 - RNA, 19 nt, Homo sapiens
  misc_RNA (1)...(19): siRNA sense strand
guucuggccucgggucaug

SEQ ID NO: 367705 - RNA, 19 nt, Homo sapiens
  misc_RNA (1)...(19): siRNA sense strand
cgauauuguuccaagagau

SEQ ID NO: 367706 - RNA, 19 nt, Homo sapiens
  misc_RNA (1)...(19): siRNA sense strand
ccaguccaguacuauuuca

SEQ ID NO: 367707 - RNA, 19 nt, Homo sapiens
  misc_RNA (1)...(19): siRNA sense strand
gcaacccaccgcuguccaa

SEQ ID NO: 367708 - RNA, 19 nt, Homo sapiens
  misc_RNA (1)...(19): siRNA sense strand
uaccagauccagcaaguca

SEQ ID NO: 367709 - RNA, 19 nt, Homo sapiens
  misc_RNA (1)...(19): siRNA sense strand
gcagaucaucacuaacaca

SEQ ID NO: 367710 - RNA, 19 nt, Homo sapiens
  misc_RNA (1)...(19): siRNA sense strand
cuucgagccuggauucaca

SEQ ID NO: 367711 - RNA, 19 nt, Homo sapiens
  misc_RNA (1)...(19): siRNA sense strand
ccaccaaugcucaacagau

SEQ ID NO: 367712 - RNA, 19 nt, Homo sapiens
  misc_RNA (1)...(19): siRNA sense strand
ucgauauuguuccaagaga

SEQ ID NO: 367713 - RNA, 19 nt, Homo sapiens
  misc_RNA (1)...(19): siRNA sense strand
ugauaucgccauggcaauu

SEQ ID NO: 367714 - RNA, 19 nt, Homo sapiens
  misc_RNA (1)...(19): siRNA sense strand
ggaggugcgccagucugua

SEQ ID NO: 367715 - RNA, 19 nt, Homo sapiens
  misc_RNA (1)...(19): siRNA sense strand
agcaaagccuacagucguu

SEQ ID NO: 367716 - RNA, 19 nt, Homo sapiens
  misc_RNA (1)...(19): siRNA sense strand
cccacuggcucguauuaag

SEQ ID NO: 367717 - RNA, 19 nt, Homo sapiens
  misc_RNA (1)...(19): siRNA sense strand
uggauucacacagaagaua

SEQ ID NO: 367718 - RNA, 19 nt, Homo sapiens
  misc_RNA (1)...(19): siRNA sense strand
cagauggacagcagcucua

SEQ ID NO: 367719 - RNA, 19 nt, Homo sapiens
  misc_RNA (1)...(19): siRNA sense strand
uccagacacuugccaccaa

SEQ ID NO: 367720 - RNA, 19 nt, Homo sapiens
  misc_RNA (1)...(19): siRNA sense strand
uggcucguauuaagaagau

SEQ ID NO: 367721 - RNA, 19 nt, Homo sapiens
  misc_RNA (1)...(19): siRNA sense strand
gaagcgccuguacucuuug

SEQ ID NO: 367722 - RNA, 19 nt, Homo sapiens
  misc_RNA (1)...(19): siRNA sense strand
gcagggacagauccagaca

SEQ ID NO: 367723 - RNA, 19 nt, Homo sapiens
  misc_RNA (1)...(19): siRNA sense strand
ucucaucgauauuguucca

SEQ ID NO: 367724 - RNA, 19 nt, Homo sapiens
  misc_RNA (1)...(19): siRNA sense strand
uaucaggcacucaaguugu

SEQ ID NO: 367725 - RNA, 19 nt, Homo sapiens
  misc_RNA (1)...(19): siRNA sense strand
gcagaagcgccuguacucu

SEQ ID NO: 367726 - RNA, 19 nt, Homo sapiens
  misc_RNA (1)...(19): siRNA sense strand
ucuaccagauccagcaagu

SEQ ID NO: 367727 - RNA, 19 nt, Homo sapiens
  misc_RNA (1)...(19): siRNA sense strand
uguaucaggcacucaaguu

SEQ ID NO: 367728 - RNA, 19 nt, Homo sapiens
  misc_RNA (1)...(19): siRNA sense strand
gaagauuaugaaacuggau

SEQ ID NO: 367729 - RNA, 19 nt, Homo sapiens
  misc_RNA (1)...(19): siRNA sense strand
cugccgagccaguccagua

SEQ ID NO: 367730 - RNA, 19 nt, Homo sapiens
  misc_RNA (1)...(19): siRNA sense strand
gaugaacugaaaccuccaa

SEQ ID NO: 367731 - RNA, 19 nt, Homo sapiens
  misc_RNA (1)...(19): siRNA sense strand
gaccaucgcuggaggagaa

SEQ ID NO: 367732 - RNA, 19 nt, Homo sapiens
  misc_RNA (1)...(19): siRNA sense strand
ggaagggcauccaguucua

SEQ ID NO: 367733 - RNA, 19 nt, Homo sapiens
  misc_RNA (1)...(19): siRNA sense strand
cagaugaguucccauacua

SEQ ID NO: 367734 - RNA, 19 nt, Homo sapiens
  misc_RNA (1)...(19): siRNA sense strand
gaacaucuauagagacacu

SEQ ID NO: 367735 - RNA, 19 nt, Homo sapiens
  misc_RNA (1)...(19): siRNA sense strand
aaucagcccucucuucaaa

SEQ ID NO: 367736 - RNA, 19 nt, Homo sapiens
  misc_RNA (1)...(19): siRNA sense strand
cgggcaaggugguguauuu

SEQ ID NO: 367737 - RNA, 19 nt, Homo sapiens
  misc_RNA (1)...(19): siRNA sense strand
gaggaggagucgaugaugu

SEQ ID NO: 367738 - RNA, 19 nt, Homo sapiens
  misc_RNA (1)...(19): siRNA sense strand
uguauagcaucgucaagua

SEQ ID NO: 367739 - RNA, 19 nt, Homo sapiens
  misc_RNA (1)...(19): siRNA sense strand
cagaacaucuauagagaca

SEQ ID NO: 367740 - RNA, 19 nt, Homo sapiens
  misc_RNA (1)...(19): siRNA sense strand
ugacagaugaguucccaua

SEQ ID NO: 367741 - RNA, 19 nt, Homo sapiens
  misc_RNA (1)...(19): siRNA sense strand
cgaccuggauguggacuuu

SEQ ID NO: 367742 - RNA, 19 nt, Homo sapiens
  misc_RNA (1)...(19): siRNA sense strand
gaaccggacgggcauguau

SEQ ID NO: 367743 - RNA, 19 nt, Homo sapiens
  misc_RNA (1)...(19): siRNA sense strand
cggccuagauagccaguuu

SEQ ID NO: 367744 - RNA, 19 nt, Homo sapiens
  misc_RNA (1)...(19): siRNA sense strand
cuagauagccaguuugcuu

SEQ ID NO: 367745 - RNA, 19 nt, Homo sapiens
  misc_RNA (1)...(19): siRNA sense strand
aagcugcucuucagaucuu

SEQ ID NO: 367746 - RNA, 19 nt, Homo sapiens
  misc_RNA (1)...(19): siRNA sense strand
gccgagacauccacaugau

SEQ ID NO: 367747 - RNA, 19 nt, Homo sapiens
  misc_RNA (1)...(19): siRNA sense strand
gaaaaucagcccucucuuc

SEQ ID NO: 367748 - RNA, 19 nt, Homo sapiens
  misc_RNA (1)...(19): siRNA sense strand
cgagguggaccgugagauu

SEQ ID NO: 367749 - RNA, 19 nt, Homo sapiens
  misc_RNA (1)...(19): siRNA sense strand
ggacaggcaagcuggacuu

SEQ ID NO: 367750 - RNA, 19 nt, Homo sapiens
  misc_RNA (1)...(19): siRNA sense strand
gcaacgccaucaccagcau

SEQ ID NO: 367751 - RNA, 19 nt, Homo sapiens
  misc_RNA (1)...(19): siRNA sense strand
gcaaggugguguauuucac

SEQ ID NO: 367752 - RNA, 19 nt, Homo sapiens
  misc_RNA (1)...(19): siRNA sense strand
gguccuuucucuucuucuu

SEQ ID NO: 367753 - RNA, 19 nt, Homo sapiens
  misc_RNA (1)...(19): siRNA sense strand
acaacacguuucaccagaa

SEQ ID NO: 367754 - RNA, 19 nt, Homo sapiens
  misc_RNA (1)...(19): siRNA sense strand
caacacguuucaccagaac

SEQ ID NO: 367755 - RNA, 19 nt, Homo sapiens
  misc_RNA (1)...(19): siRNA sense strand
uagauagccaguuugcuuu

SEQ ID NO: 367756 - RNA, 19 nt, Homo sapiens
  misc_RNA (1)...(19): siRNA sense strand
gggcugaugguggugguua

SEQ ID NO: 367757 - RNA, 19 nt, Homo sapiens
  misc_RNA (1)...(19): siRNA sense strand
uguauggcauucagagguu

SEQ ID NO: 367758 - RNA, 19 nt, Homo sapiens
  misc_RNA (1)...(19): siRNA sense strand
gccaucuacuacaacauga

SEQ ID NO: 367759 - RNA, 19 nt, Homo sapiens
  misc_RNA (1)...(19): siRNA sense strand
ccaguuccaccacuuguug

SEQ ID NO: 367760 - RNA, 19 nt, Homo sapiens
  misc_RNA (1)...(19): siRNA sense strand
ggccaucuacuacaacaug

SEQ ID NO: 367761 - RNA, 19 nt, Homo sapiens
  misc_RNA (1)...(19): siRNA sense strand
gagguggaccgugagauug

SEQ ID NO: 367762 - RNA, 19 nt, Homo sapiens
  misc_RNA (1)...(19): siRNA sense strand
ggaccaaguagccaaagca

SEQ ID NO: 367763 - RNA, 19 nt, Homo sapiens
  misc_RNA (1)...(19): siRNA sense strand
accagaacaucuauagaga

SEQ ID NO: 367764 - RNA, 19 nt, Homo sapiens
  misc_RNA (1)...(19): siRNA sense strand
ggcauccaguucuaucuca

SEQ ID NO: 367765 - RNA, 19 nt, Homo sapiens
  misc_RNA (1)...(19): siRNA sense strand
gaagggcauccaguucuau

SEQ ID NO: 367766 - RNA, 19 nt, Homo sapiens
  misc_RNA (1)...(19): siRNA sense strand
gcaacugguggaacacaga

SEQ ID NO: 367767 - RNA, 19 nt, Homo sapiens
  misc_RNA (1)...(19): siRNA sense strand
ucgccuacgugcucuucua

SEQ ID NO: 367768 - RNA, 19 nt, Homo sapiens
  misc_RNA (1)...(19): siRNA sense strand
gcucuucagaucuucuauu

SEQ ID NO: 367769 - RNA, 19 nt, Homo sapiens
  misc_RNA (1)...(19): siRNA sense strand
caccagaacaucuauagag

SEQ ID NO: 367770 - RNA, 19 nt, Homo sapiens
  misc_RNA (1)...(19): siRNA sense strand
uaucgagcguacaccaaug

SEQ ID NO: 367771 - RNA, 19 nt, Homo sapiens
  misc_RNA (1)...(19): siRNA sense strand
gcugguggcugugcuucga

SEQ ID NO: 367772 - RNA, 19 nt, Homo sapiens
  misc_RNA (1)...(19): siRNA sense strand
caacugguggaacacagaa

SEQ ID NO: 367773 - RNA, 19 nt, Homo sapiens
  misc_RNA (1)...(19): siRNA sense strand
ggaggagucgaugauguga

SEQ ID NO: 367774 - RNA, 19 nt, Homo sapiens
  misc_RNA (1)...(19): siRNA sense strand
cugcuguccugccucauga

SEQ ID NO: 367775 - RNA, 19 nt, Homo sapiens
  misc_RNA (1)...(19): siRNA sense strand
ucaucugcguggccaugua

SEQ ID NO: 367776 - RNA, 19 nt, Homo sapiens
  misc_RNA (1)...(19): siRNA sense strand
ggucaucguguuccucugu

SEQ ID NO: 367777 - RNA, 19 nt, Homo sapiens
  misc_RNA (1)...(19): siRNA sense strand
ccucggaguauggcaguua

SEQ ID NO: 367778 - RNA, 19 nt, Homo sapiens
  misc_RNA (1)...(19): siRNA sense strand
gucaucguguuccucugua

SEQ ID NO: 367779 - RNA, 19 nt, Homo sapiens
  misc_RNA (1)...(19): siRNA sense strand
gaggaggaggagucgauga

SEQ ID NO: 367780 - RNA, 19 nt, Homo sapiens
  misc_RNA (1)...(19): siRNA sense strand
ggcugguccuucuggauga

SEQ ID NO: 367781 - RNA, 19 nt, Homo sapiens
  misc_RNA (1)...(19): siRNA sense strand
ggcugauccucaccacuga

SEQ ID NO: 367782 - RNA, 19 nt, Homo sapiens
  misc_RNA (1)...(19): siRNA sense strand
acagaugaguucccauacu

SEQ ID NO: 367783 - RNA, 19 nt, Homo sapiens
  misc_RNA (1)...(19): siRNA sense strand
ccucaagggugugaagucu

SEQ ID NO: 367784 - RNA, 19 nt, Homo sapiens
  misc_RNA (1)...(19): siRNA sense strand
guaccagcccucggaguau

SEQ ID NO: 367785 - RNA, 19 nt, Homo sapiens
  misc_RNA (1)...(19): siRNA sense strand
ggaggaggagucgaugaug

SEQ ID NO: 367786 - RNA, 19 nt, Homo sapiens
  misc_RNA (1)...(19): siRNA sense strand
cuauagagacacuuucauc

SEQ ID NO: 367787 - RNA, 19 nt, Homo sapiens
  misc_RNA (1)...(19): siRNA sense strand
uguggcaacugguggaaca

SEQ ID NO: 367788 - RNA, 19 nt, Homo sapiens
  misc_RNA (1)...(19): siRNA sense strand
ggcaaggugguguauuuca

SEQ ID NO: 367789 - RNA, 19 nt, Homo sapiens
  misc_RNA (1)...(19): siRNA sense strand
ucuuggcccuccuggugua

SEQ ID NO: 367790 - RNA, 19 nt, Homo sapiens
  misc_RNA (1)...(19): siRNA sense strand
acacuuucaucgucacucu

SEQ ID NO: 367791 - RNA, 19 nt, Homo sapiens
  misc_RNA (1)...(19): siRNA sense strand
gagguucugccgagacauc

SEQ ID NO: 367792 - RNA, 19 nt, Homo sapiens
  misc_RNA (1)...(19): siRNA sense strand
cagaggaggaggagucgau

SEQ ID NO: 367793 - RNA, 19 nt, Homo sapiens
  misc_RNA (1)...(19): siRNA sense strand
uaccagcccucggaguaug

SEQ ID NO: 367794 - RNA, 19 nt, Homo sapiens
  misc_RNA (1)...(19): siRNA sense strand
aguaccagcccucggagua

SEQ ID NO: 367795 - RNA, 19 nt, Homo sapiens
  misc_RNA (1)...(19): siRNA sense strand
gcuugguggccaucuacua

SEQ ID NO: 367796 - RNA, 19 nt, Homo sapiens
  misc_RNA (1)...(19): siRNA sense strand
cucuucagaucuucuauuc

SEQ ID NO: 367797 - RNA, 19 nt, Homo sapiens
  misc_RNA (1)...(19): siRNA sense strand
gcaggagcaucacaauuug

SEQ ID NO: 367798 - RNA, 19 nt, Homo sapiens
  misc_RNA (1)...(19): siRNA sense strand
ggcaggagcaucacaauuu

SEQ ID NO: 367799 - RNA, 19 nt, Homo sapiens
  misc_RNA (1)...(19): siRNA sense strand
uaacaugaccaguaacaga

SEQ ID NO: 367800 - RNA, 19 nt, Homo sapiens
  misc_RNA (1)...(19): siRNA sense strand
gaggaaguauugguggaaa

SEQ ID NO: 367801 - RNA, 19 nt, Homo sapiens
  misc_RNA (1)...(19): siRNA sense strand
ggaggugguggacaucaua

SEQ ID NO: 367802 - RNA, 19 nt, Homo sapiens
  misc_RNA (1)...(19): siRNA sense strand
cuccuaacaugaccaguaa

SEQ ID NO: 367803 - RNA, 19 nt, Homo sapiens
  misc_RNA (1)...(19): siRNA sense strand
uaacagacgacuacagcaa

SEQ ID NO: 367804 - RNA, 19 nt, Homo sapiens
  misc_RNA (1)...(19): siRNA sense strand
ggagccaucugugccauca

SEQ ID NO: 367805 - RNA, 19 nt, Homo sapiens
  misc_RNA (1)...(19): siRNA sense strand
caucaucgugguaguuauu

SEQ ID NO: 367806 - RNA, 19 nt, Homo sapiens
  misc_RNA (1)...(19): siRNA sense strand
gccaucaucgugguaguua

SEQ ID NO: 367807 - RNA, 19 nt, Homo sapiens
  misc_RNA (1)...(19): siRNA sense strand
gcaaacccaggcacaagug

SEQ ID NO: 367808 - RNA, 19 nt, Homo sapiens
  misc_RNA (1)...(19): siRNA sense strand
caucgugguaguuauugua

SEQ ID NO: 367809 - RNA, 19 nt, Homo sapiens
  misc_RNA (1)...(19): siRNA sense strand
guggacaucauacguguga

SEQ ID NO: 367810 - RNA, 19 nt, Homo sapiens
  misc_RNA (1)...(19): siRNA sense strand
gcaggcaggagcaucacaa

SEQ ID NO: 367811 - RNA, 19 nt, Homo sapiens
  misc_RNA (1)...(19): siRNA sense strand
ccuccuaacaugaccagua

SEQ ID NO: 367812 - RNA, 19 nt, Homo sapiens
  misc_RNA (1)...(19): siRNA sense strand
uggaggaggugguggacau

SEQ ID NO: 367813 - RNA, 19 nt, Homo sapiens
  misc_RNA (1)...(19): siRNA sense strand
ggacaucauacgugugaac

SEQ ID NO: 367814 - RNA, 19 nt, Homo sapiens
  misc_RNA (1)...(19): siRNA sense strand
aagcuaaagaggaaguauu

SEQ ID NO: 367815 - RNA, 19 nt, Homo sapiens
  misc_RNA (1)...(19): siRNA sense strand
cuaaagaggaaguauuggu

SEQ ID NO: 367816 - RNA, 19 nt, Homo sapiens
  misc_RNA (1)...(19): siRNA sense strand
gaccaguaacagacgacua

SEQ ID NO: 367817 - RNA, 19 nt, Homo sapiens
  misc_RNA (1)...(19): siRNA sense strand
gugugaacguggacaaggu

SEQ ID NO: 367818 - RNA, 19 nt, Homo sapiens
  misc_RNA (1)...(19): siRNA sense strand
gcaggagcaucacaauuug

SEQ ID NO: 367819 - RNA, 19 nt, Homo sapiens
  misc_RNA (1)...(19): siRNA sense strand
ggcaggagcaucacaauuu

SEQ ID NO: 367820 - RNA, 19 nt, Homo sapiens
  misc_RNA (1)...(19): siRNA sense strand
uaacaugaccaguaacaga

SEQ ID NO: 367821 - RNA, 19 nt, Homo sapiens
  misc_RNA (1)...(19): siRNA sense strand
gaggaaguauugguggaaa

SEQ ID NO: 367822 - RNA, 19 nt, Homo sapiens
  misc_RNA (1)...(19): siRNA sense strand
ggaggugguggacaucaua

SEQ ID NO: 367823 - RNA, 19 nt, Homo sapiens
  misc_RNA (1)...(19): siRNA sense strand
cuccuaacaugaccaguaa

SEQ ID NO: 367824 - RNA, 19 nt, Homo sapiens
  misc_RNA (1)...(19): siRNA sense strand
uaacagacgacuacagcaa

SEQ ID NO: 367825 - RNA, 19 nt, Homo sapiens
  misc_RNA (1)...(19): siRNA sense strand
ggagccaucugugccauca

SEQ ID NO: 367826 - RNA, 19 nt, Homo sapiens
  misc_RNA (1)...(19): siRNA sense strand
caucaucgugguaguuauu

SEQ ID NO: 367827 - RNA, 19 nt, Homo sapiens
  misc_RNA (1)...(19): siRNA sense strand
gccaucaucgugguaguua

SEQ ID NO: 367828 - RNA, 19 nt, Homo sapiens
  misc_RNA (1)...(19): siRNA sense strand
gcaaacccaggcacaagug

SEQ ID NO: 367829 - RNA, 19 nt, Homo sapiens
  misc_RNA (1)...(19): siRNA sense strand
caucgugguaguuauugua

SEQ ID NO: 367830 - RNA, 19 nt, Homo sapiens
  misc_RNA (1)...(19): siRNA sense strand
guggacaucauacguguga

SEQ ID NO: 367831 - RNA, 19 nt, Homo sapiens
  misc_RNA (1)...(19): siRNA sense strand
gcaggcaggagcaucacaa

SEQ ID NO: 367832 - RNA, 19 nt, Homo sapiens
  misc_RNA (1)...(19): siRNA sense strand
ccuccuaacaugaccagua

SEQ ID NO: 367833 - RNA, 19 nt, Homo sapiens
  misc_RNA (1)...(19): siRNA sense strand
uggaggaggugguggacau

SEQ ID NO: 367834 - RNA, 19 nt, Homo sapiens
  misc_RNA (1)...(19): siRNA sense strand
ggacaucauacgugugaac

SEQ ID NO: 367835 - RNA, 19 nt, Homo sapiens
  misc_RNA (1)...(19): siRNA sense strand
aagcuaaagaggaaguauu

SEQ ID NO: 367836 - RNA, 19 nt, Homo sapiens
  misc_RNA (1)...(19): siRNA sense strand
cuaaagaggaaguauuggu

SEQ ID NO: 367837 - RNA, 19 nt, Homo sapiens
  misc_RNA (1)...(19): siRNA sense strand
gaccaguaacagacgacua

SEQ ID NO: 367838 - RNA, 19 nt, Homo sapiens
  misc_RNA (1)...(19): siRNA sense strand
gugugaacguggacaaggu

SEQ ID NO: 367839 - RNA, 19 nt, Homo sapiens
  misc_RNA (1)...(19): siRNA sense strand
cuccaaaccucaccaguaa

SEQ ID NO: 367840 - RNA, 19 nt, Homo sapiens
  misc_RNA (1)...(19): siRNA sense strand
uaguuuacuucagcucuua

SEQ ID NO: 367841 - RNA, 19 nt, Homo sapiens
  misc_RNA (1)...(19): siRNA sense strand
gcgcaaauacugguggaaa

SEQ ID NO: 367842 - RNA, 19 nt, Homo sapiens
  misc_RNA (1)...(19): siRNA sense strand
ccuccaaaccucaccagua

SEQ ID NO: 367843 - RNA, 19 nt, Homo sapiens
  misc_RNA (1)...(19): siRNA sense strand
ccaaaccucaccaguaaca

SEQ ID NO: 367844 - RNA, 19 nt, Homo sapiens
  misc_RNA (1)...(19): siRNA sense strand
gccaucauccucaucauca

SEQ ID NO: 367845 - RNA, 19 nt, Homo sapiens
  misc_RNA (1)...(19): siRNA sense strand
uggaugaggugguggacau

SEQ ID NO: 367846 - RNA, 19 nt, Homo sapiens
  misc_RNA (1)...(19): siRNA sense strand
gggugaacguggacaaggu

SEQ ID NO: 367847 - RNA, 19 nt, Homo sapiens
  misc_RNA (1)...(19): siRNA sense strand
caucaucauaguuuacuuc

SEQ ID NO: 367848 - RNA, 19 nt, Homo sapiens
  misc_RNA (1)...(19): siRNA sense strand
augaucaucuugggaguga

SEQ ID NO: 367849 - RNA, 19 nt, Homo sapiens
  misc_RNA (1)...(19): siRNA sense strand
cucaucaucaucauaguuu

SEQ ID NO: 367850 - RNA, 19 nt, Homo sapiens
  misc_RNA (1)...(19): siRNA sense strand
cauccucaucaucaucaua

SEQ ID NO: 367851 - RNA, 19 nt, Homo sapiens
  misc_RNA (1)...(19): siRNA sense strand
gaggugguggacaucauga

SEQ ID NO: 367852 - RNA, 19 nt, Homo sapiens
  misc_RNA (1)...(19): siRNA sense strand
ccucaucaucaucauaguu

SEQ ID NO: 367853 - RNA, 19 nt, Homo sapiens
  misc_RNA (1)...(19): siRNA sense strand
ggaaagggauauguaauaa

SEQ ID NO: 367854 - RNA, 19 nt, Homo sapiens
  misc_RNA (1)...(19): siRNA sense strand
gaaugugacugugguaaua

SEQ ID NO: 367855 - RNA, 19 nt, Homo sapiens
  misc_RNA (1)...(19): siRNA sense strand
ggacauagaccuccagauu

SEQ ID NO: 367856 - RNA, 19 nt, Homo sapiens
  misc_RNA (1)...(19): siRNA sense strand
gaaacuggaucuuugcauu

SEQ ID NO: 367857 - RNA, 19 nt, Homo sapiens
  misc_RNA (1)...(19): siRNA sense strand
ggaugcugaugauauauua

SEQ ID NO: 367858 - RNA, 19 nt, Homo sapiens
  misc_RNA (1)...(19): siRNA sense strand
caaauugacuguuauacug

SEQ ID NO: 367859 - RNA, 19 nt, Homo sapiens
  misc_RNA (1)...(19): siRNA sense strand
ccagaaauguacuguguaa

SEQ ID NO: 367860 - RNA, 19 nt, Homo sapiens
  misc_RNA (1)...(19): siRNA sense strand
cgaagguucugaaggaaua

SEQ ID NO: 367861 - RNA, 19 nt, Homo sapiens
  misc_RNA (1)...(19): siRNA sense strand
gaacagacaaugccuaugu

SEQ ID NO: 367862 - RNA, 19 nt, Homo sapiens
  misc_RNA (1)...(19): siRNA sense strand
ggaacugccuauugcuaua

SEQ ID NO: 367863 - RNA, 19 nt, Homo sapiens
  misc_RNA (1)...(19): siRNA sense strand
gaauuguggucaaaugaaa

SEQ ID NO: 367864 - RNA, 19 nt, Homo sapiens
  misc_RNA (1)...(19): siRNA sense strand
ccacgaagguucugaagga

SEQ ID NO: 367865 - RNA, 19 nt, Homo sapiens
  misc_RNA (1)...(19): siRNA sense strand
gggaaagggauauguaaua

SEQ ID NO: 367866 - RNA, 19 nt, Homo sapiens
  misc_RNA (1)...(19): siRNA sense strand
ggaauccaaugaagaaugu

SEQ ID NO: 367867 - RNA, 19 nt, Homo sapiens
  misc_RNA (1)...(19): siRNA sense strand
gcgaugacgugggacauua

SEQ ID NO: 367868 - RNA, 19 nt, Homo sapiens
  misc_RNA (1)...(19): siRNA sense strand
uaaugaaacuggaucuuug

SEQ ID NO: 367869 - RNA, 19 nt, Homo sapiens
  misc_RNA (1)...(19): siRNA sense strand
gcaauggaaccucuaguaa

SEQ ID NO: 367870 - RNA, 19 nt, Homo sapiens
  misc_RNA (1)...(19): siRNA sense strand
gagagaaugcagaguauaa

SEQ ID NO: 367871 - RNA, 19 nt, Homo sapiens
  misc_RNA (1)...(19): siRNA sense strand
ugacauagcauacuuacuu

SEQ ID NO: 367872 - RNA, 19 nt, Homo sapiens
  misc_RNA (1)...(19): siRNA sense strand
ccauguauguguaucuaua

SEQ ID NO: 367873 - RNA, 19 nt, Homo sapiens
  misc_RNA (1)...(19): siRNA sense strand
uaaccagugugccaagaua

SEQ ID NO: 367874 - RNA, 19 nt, Homo sapiens
  misc_RNA (1)...(19): siRNA sense strand
aauggaaccucuaguaauu

SEQ ID NO: 367875 - RNA, 19 nt, Homo sapiens
  misc_RNA (1)...(19): siRNA sense strand
gagacuaaaugccuucaga

SEQ ID NO: 367876 - RNA, 19 nt, Homo sapiens
  misc_RNA (1)...(19): siRNA sense strand
ccuuuaaacucacagauaa

SEQ ID NO: 367877 - RNA, 19 nt, Homo sapiens
  misc_RNA (1)...(19): siRNA sense strand
gauuguaaauuccaguuug

SEQ ID NO: 367878 - RNA, 19 nt, Homo sapiens
  misc_RNA (1)...(19): siRNA sense strand
uggaacaacugguuuauuc

SEQ ID NO: 367879 - RNA, 19 nt, Homo sapiens
  misc_RNA (1)...(19): siRNA sense strand
uauuauagcucaacugcuu

SEQ ID NO: 367880 - RNA, 19 nt, Homo sapiens
  misc_RNA (1)...(19): siRNA sense strand
cacggaagauuaagucaaa

SEQ ID NO: 367881 - RNA, 19 nt, Homo sapiens
  misc_RNA (1)...(19): siRNA sense strand
aagaagugcugugauuaua

SEQ ID NO: 367882 - RNA, 19 nt, Homo sapiens
  misc_RNA (1)...(19): siRNA sense strand
gaaagaccagcccuacaaa

SEQ ID NO: 367883 - RNA, 19 nt, Homo sapiens
  misc_RNA (1)...(19): siRNA sense strand
ucaagaccauguaugugua

SEQ ID NO: 367884 - RNA, 19 nt, Homo sapiens
  misc_RNA (1)...(19): siRNA sense strand
gaagugcugugauuauaac

SEQ ID NO: 367885 - RNA, 19 nt, Homo sapiens
  misc_RNA (1)...(19): siRNA sense strand
uaugggaucugaaaugaug

SEQ ID NO: 367886 - RNA, 19 nt, Homo sapiens
  misc_RNA (1)...(19): siRNA sense strand
gaccagcccuacaaaguuc

SEQ ID NO: 367887 - RNA, 19 nt, Homo sapiens
  misc_RNA (1)...(19): siRNA sense strand
uauaugggaucugaaauga

SEQ ID NO: 367888 - RNA, 19 nt, Homo sapiens
  misc_RNA (1)...(19): siRNA sense strand
cagagaggaagaugauuua

SEQ ID NO: 367889 - RNA, 19 nt, Homo sapiens
  misc_RNA (1)...(19): siRNA sense strand
aggauaugcugccgaauuu

SEQ ID NO: 367890 - RNA, 19 nt, Homo sapiens
  misc_RNA (1)...(19): siRNA sense strand
ucagaagcuuucaaauuug

SEQ ID NO: 367891 - RNA, 19 nt, Homo sapiens
  misc_RNA (1)...(19): siRNA sense strand
gcauugccauuaccaagga

SEQ ID NO: 367892 - RNA, 19 nt, Homo sapiens
  misc_RNA (1)...(19): siRNA sense strand
gaccauguauguguaucua

SEQ ID NO: 367893 - RNA, 19 nt, Homo sapiens
  misc_RNA (1)...(19): siRNA sense strand
ugaaagaucugaaaacugu

SEQ ID NO: 367894 - RNA, 19 nt, Homo sapiens
  misc_RNA (1)...(19): siRNA sense strand
gaacugccuauugcuauaa

SEQ ID NO: 367895 - RNA, 19 nt, Homo sapiens
  misc_RNA (1)...(19): siRNA sense strand
uaacacauguaaacugaag

SEQ ID NO: 367896 - RNA, 19 nt, Homo sapiens
  misc_RNA (1)...(19): siRNA sense strand
ggaagauuaagucaaauga

SEQ ID NO: 367897 - RNA, 19 nt, Homo sapiens
  misc_RNA (1)...(19): siRNA sense strand
gacauagcauacuuacuug

SEQ ID NO: 367898 - RNA, 19 nt, Homo sapiens
  misc_RNA (1)...(19): siRNA sense strand
cagcaagauuugagcauau

SEQ ID NO: 367899 - RNA, 19 nt, Homo sapiens
  misc_RNA (1)...(19): siRNA sense strand
ucagcaagauuugagcaua

SEQ ID NO: 367900 - RNA, 19 nt, Homo sapiens
  misc_RNA (1)...(19): siRNA sense strand
acauagaccuccagauugu

SEQ ID NO: 367901 - RNA, 19 nt, Homo sapiens
  misc_RNA (1)...(19): siRNA sense strand
uuuaagaagugcugugauu

SEQ ID NO: 367902 - RNA, 19 nt, Homo sapiens
  misc_RNA (1)...(19): siRNA sense strand
aaugauggcuguaacacaa

SEQ ID NO: 367903 - RNA, 19 nt, Homo sapiens
  misc_RNA (1)...(19): siRNA sense strand
gaauugaaccaguagaauc

SEQ ID NO: 367904 - RNA, 19 nt, Homo sapiens
  misc_RNA (1)...(19): siRNA sense strand
cagagagaaugcagaguau

SEQ ID NO: 367905 - RNA, 19 nt, Homo sapiens
  misc_RNA (1)...(19): siRNA sense strand
gaacaacugguuuauucug

SEQ ID NO: 367906 - RNA, 19 nt, Homo sapiens
  misc_RNA (1)...(19): siRNA sense strand
gcacgacuauagauauuuu

SEQ ID NO: 367907 - RNA, 19 nt, Homo sapiens
  misc_RNA (1)...(19): siRNA sense strand
gaaacgggacuaucucauc

SEQ ID NO: 367908 - RNA, 19 nt, Homo sapiens
  misc_RNA (1)...(19): siRNA sense strand
agaggaagaugauuuacau

SEQ ID NO: 367909 - RNA, 19 nt, Homo sapiens
  misc_RNA (1)...(19): siRNA sense strand
gcagugagugccaguggua

SEQ ID NO: 367910 - RNA, 19 nt, Homo sapiens
  misc_RNA (1)...(19): siRNA sense strand
ggacaaccuuacacucuac

SEQ ID NO: 367911 - RNA, 19 nt, Homo sapiens
  misc_RNA (1)...(19): siRNA sense strand
gacauagaccuccagauug

SEQ ID NO: 367912 - RNA, 19 nt, Homo sapiens
  misc_RNA (1)...(19): siRNA sense strand
guccagaaauguacugugu

SEQ ID NO: 367913 - RNA, 19 nt, Homo sapiens
  misc_RNA (1)...(19): siRNA sense strand
ggaauuguggucaaaugaa

SEQ ID NO: 367914 - RNA, 19 nt, Homo sapiens
  misc_RNA (1)...(19): siRNA sense strand
gauuauaugggaucugaaa

SEQ ID NO: 367915 - RNA, 19 nt, Homo sapiens
  misc_RNA (1)...(19): siRNA sense strand
ucagagaggaagaugauuu

SEQ ID NO: 367916 - RNA, 19 nt, Homo sapiens
  misc_RNA (1)...(19): siRNA sense strand
gacgcucaaucuacaguuu

SEQ ID NO: 367917 - RNA, 19 nt, Homo sapiens
  misc_RNA (1)...(19): siRNA sense strand
uaagaagugcugugauuau

SEQ ID NO: 367918 - RNA, 19 nt, Homo sapiens
  misc_RNA (1)...(19): siRNA sense strand
ucaaaugacagugaaguuu

SEQ ID NO: 367919 - RNA, 19 nt, Homo sapiens
  misc_RNA (1)...(19): siRNA sense strand
acagagagaaugcagagua

SEQ ID NO: 367920 - RNA, 19 nt, Homo sapiens
  misc_RNA (1)...(19): siRNA sense strand
uuaauucucugcaugaaag

SEQ ID NO: 367921 - RNA, 19 nt, Homo sapiens
  misc_RNA (1)...(19): siRNA sense strand
gaguauugauccagagugu

SEQ ID NO: 367922 - RNA, 19 nt, Homo sapiens
  misc_RNA (1)...(19): siRNA sense strand
caauagguuuggagggauu

SEQ ID NO: 367923 - RNA, 19 nt, Homo sapiens
  misc_RNA (1)...(19): siRNA sense strand
gaaaucuggugacuuuuau

SEQ ID NO: 367924 - RNA, 19 nt, Homo sapiens
  misc_RNA (1)...(19): siRNA sense strand
acagaguacugcaauggaa

SEQ ID NO: 367925 - RNA, 19 nt, Homo sapiens
  misc_RNA (1)...(19): siRNA sense strand
auucugaguuucugcauuu

SEQ ID NO: 367926 - RNA, 19 nt, Homo sapiens
  misc_RNA (1)...(19): siRNA sense strand
ucacugagcuuggaagacu

SEQ ID NO: 367927 - RNA, 19 nt, Homo sapiens
  misc_RNA (1)...(19): siRNA sense strand
caaaugacagugaaguuuc

SEQ ID NO: 367928 - RNA, 19 nt, Homo sapiens
  misc_RNA (1)...(19): siRNA sense strand
gauaaccagugugccaaga

SEQ ID NO: 367929 - RNA, 19 nt, Homo sapiens
  misc_RNA (1)...(19): siRNA sense strand
ccaguagaaucuucagcaa

SEQ ID NO: 367930 - RNA, 19 nt, Homo sapiens
  misc_RNA (1)...(19): siRNA sense strand
uaauucauccguuguauca

SEQ ID NO: 367931 - RNA, 19 nt, Homo sapiens
  misc_RNA (1)...(19): siRNA sense strand
gaaccucuaguaauugugu

SEQ ID NO: 367932 - RNA, 19 nt, Homo sapiens
  misc_RNA (1)...(19): siRNA sense strand
guauugauccagaguguga

SEQ ID NO: 367933 - RNA, 19 nt, Homo sapiens
  misc_RNA (1)...(19): siRNA sense strand
gcaugcacgacuauagaua

SEQ ID NO: 367934 - RNA, 19 nt, Homo sapiens
  misc_RNA (1)...(19): siRNA sense strand
agaaagaccagcccuacaa

SEQ ID NO: 367935 - RNA, 19 nt, Homo sapiens
  misc_RNA (1)...(19): siRNA sense strand
caaugucaaacuacugaua

SEQ ID NO: 367936 - RNA, 19 nt, Homo sapiens
  misc_RNA (1)...(19): siRNA sense strand
gaagaaugugacuguggua

SEQ ID NO: 367937 - RNA, 19 nt, Homo sapiens
  misc_RNA (1)...(19): siRNA sense strand
uugcaaccauuacaucaaa

SEQ ID NO: 367938 - RNA, 19 nt, Homo sapiens
  misc_RNA (1)...(19): siRNA sense strand
caauugauggacaaccuua

SEQ ID NO: 367939 - RNA, 19 nt, Homo sapiens
  misc_RNA (1)...(19): siRNA sense strand
caauggaaccucuaguaau

SEQ ID NO: 367940 - RNA, 19 nt, Homo sapiens
  misc_RNA (1)...(19): siRNA sense strand
gcucaacugcuuggccuua

SEQ ID NO: 367941 - RNA, 19 nt, Homo sapiens
  misc_RNA (1)...(19): siRNA sense strand
gcaagauuugagcauauaa

SEQ ID NO: 367942 - RNA, 19 nt, Homo sapiens
  misc_RNA (1)...(19): siRNA sense strand
guaaaucauguaacagaga

SEQ ID NO: 367943 - RNA, 19 nt, Homo sapiens
  misc_RNA (1)...(19): siRNA sense strand
aaagggaaagggauaugua

SEQ ID NO: 367944 - RNA, 19 nt, Homo sapiens
  misc_RNA (1)...(19): siRNA sense strand
uggacaaccuuacacucua

SEQ ID NO: 367945 - RNA, 19 nt, Homo sapiens
  misc_RNA (1)...(19): siRNA sense strand
uuauggaauugaaccagua

SEQ ID NO: 367946 - RNA, 19 nt, Homo sapiens
  misc_RNA (1)...(19): siRNA sense strand
caacugguuuauucugagu

SEQ ID NO: 367947 - RNA, 19 nt, Homo sapiens
  misc_RNA (1)...(19): siRNA sense strand
caugugugguccagaaaug

SEQ ID NO: 367948 - RNA, 19 nt, Homo sapiens
  misc_RNA (1)...(19): siRNA sense strand
ggaaaacaaucauucuuac

SEQ ID NO: 367949 - RNA, 19 nt, Homo sapiens
  misc_RNA (1)...(19): siRNA sense strand
caaugaagaaugugacugu

SEQ ID NO: 367950 - RNA, 19 nt, Homo sapiens
  misc_RNA (1)...(19): siRNA sense strand
ugacacuuaugcauugaau

SEQ ID NO: 367951 - RNA, 19 nt, Homo sapiens
  misc_RNA (1)...(19): siRNA sense strand
ggcacuccauguagaaaga

SEQ ID NO: 367952 - RNA, 19 nt, Homo sapiens
  misc_RNA (1)...(19): siRNA sense strand
uuaagaagugcugugauua

SEQ ID NO: 367953 - RNA, 19 nt, Homo sapiens
  misc_RNA (1)...(19): siRNA sense strand
ggaaagagguaaacagaug

SEQ ID NO: 367954 - RNA, 19 nt, Homo sapiens
  misc_RNA (1)...(19): siRNA sense strand
cuaauaagguugaggauaa

SEQ ID NO: 367955 - RNA, 19 nt, Homo sapiens
  misc_RNA (1)...(19): siRNA sense strand
gcucuagccugacauauaa

SEQ ID NO: 367956 - RNA, 19 nt, Homo sapiens
  misc_RNA (1)...(19): siRNA sense strand
gcaagaaccucaaagaaag

SEQ ID NO: 367957 - RNA, 19 nt, Homo sapiens
  misc_RNA (1)...(19): siRNA sense strand
ggagugggauuauaacauu

SEQ ID NO: 367958 - RNA, 19 nt, Homo sapiens
  misc_RNA (1)...(19): siRNA sense strand
guaaacagauggaggaaga

SEQ ID NO: 367959 - RNA, 19 nt, Homo sapiens
  misc_RNA (1)...(19): siRNA sense strand
gcccaacacucaacuagua

SEQ ID NO: 367960 - RNA, 19 nt, Homo sapiens
  misc_RNA (1)...(19): siRNA sense strand
ugaaacaacuggugcauga

SEQ ID NO: 367961 - RNA, 19 nt, Homo sapiens
  misc_RNA (1)...(19): siRNA sense strand
gaaagugggcugugauaaa

SEQ ID NO: 367962 - RNA, 19 nt, Homo sapiens
  misc_RNA (1)...(19): siRNA sense strand
gaaauugguucuaauaagg

SEQ ID NO: 367963 - RNA, 19 nt, Homo sapiens
  misc_RNA (1)...(19): siRNA sense strand
gaauauaaccgaucccauu

SEQ ID NO: 367964 - RNA, 19 nt, Homo sapiens
  misc_RNA (1)...(19): siRNA sense strand
gaaacucccacuuugaaua

SEQ ID NO: 367965 - RNA, 19 nt, Homo sapiens
  misc_RNA (1)...(19): siRNA sense strand
ucacaccgauggaccuuua

SEQ ID NO: 367966 - RNA, 19 nt, Homo sapiens
  misc_RNA (1)...(19): siRNA sense strand
gacaagaucauccaccuua

SEQ ID NO: 367967 - RNA, 19 nt, Homo sapiens
  misc_RNA (1)...(19): siRNA sense strand
aaagaaagauggaaagauc

SEQ ID NO: 367968 - RNA, 19 nt, Homo sapiens
  misc_RNA (1)...(19): siRNA sense strand
gaagaaauggugcaaauag

SEQ ID NO: 367969 - RNA, 19 nt, Homo sapiens
  misc_RNA (1)...(19): siRNA sense strand
guaaacagcugugguguag

SEQ ID NO: 367970 - RNA, 19 nt, Homo sapiens
  misc_RNA (1)...(19): siRNA sense strand
cuacaucuuugguuccuua

SEQ ID NO: 367971 - RNA, 19 nt, Homo sapiens
  misc_RNA (1)...(19): siRNA sense strand
caagagaucagcuguagaa

SEQ ID NO: 367972 - RNA, 19 nt, Homo sapiens
  misc_RNA (1)...(19): siRNA sense strand
gauagcagccgcucuggua

SEQ ID NO: 367973 - RNA, 19 nt, Homo sapiens
  misc_RNA (1)...(19): siRNA sense strand
ugucauggcucccuuggua

SEQ ID NO: 367974 - RNA, 19 nt, Homo sapiens
  misc_RNA (1)...(19): siRNA sense strand
ccauagacauguccaaaga

SEQ ID NO: 367975 - RNA, 19 nt, Homo sapiens
  misc_RNA (1)...(19): siRNA sense strand
caacagacguccgacaaga

SEQ ID NO: 367976 - RNA, 19 nt, Homo sapiens
  misc_RNA (1)...(19): siRNA sense strand
caaggagacuggagauguu

SEQ ID NO: 367977 - RNA, 19 nt, Homo sapiens
  misc_RNA (1)...(19): siRNA sense strand
gaacacgccagugcaauaa

SEQ ID NO: 367978 - RNA, 19 nt, Homo sapiens
  misc_RNA (1)...(19): siRNA sense strand
gaaauggugcaaauagauu

SEQ ID NO: 367979 - RNA, 19 nt, Homo sapiens
  misc_RNA (1)...(19): siRNA sense strand
ggaaggccuugaugaucua

SEQ ID NO: 367980 - RNA, 19 nt, Homo sapiens
  misc_RNA (1)...(19): siRNA sense strand
cagcgaaacucccacuuug

SEQ ID NO: 367981 - RNA, 19 nt, Homo sapiens
  misc_RNA (1)...(19): siRNA sense strand
ggcaagaaccucaaagaaa

SEQ ID NO: 367982 - RNA, 19 nt, Homo sapiens
  misc_RNA (1)...(19): siRNA sense strand
ggagacaaguccauauucu

SEQ ID NO: 367983 - RNA, 19 nt, Homo sapiens
  misc_RNA (1)...(19): siRNA sense strand
gaaguuguacccugaauca

SEQ ID NO: 367984 - RNA, 19 nt, Homo sapiens
  misc_RNA (1)...(19): siRNA sense strand
gauaaucccuacuuuugua

SEQ ID NO: 367985 - RNA, 19 nt, Homo sapiens
  misc_RNA (1)...(19): siRNA sense strand
ggucagagccugucaacug

SEQ ID NO: 367986 - RNA, 19 nt, Homo sapiens
  misc_RNA (1)...(19): siRNA sense strand
gcuacaggccauuauauuu

SEQ ID NO: 367987 - RNA, 19 nt, Homo sapiens
  misc_RNA (1)...(19): siRNA sense strand
cagcacaaaucuagaagga

SEQ ID NO: 367988 - RNA, 19 nt, Homo sapiens
  misc_RNA (1)...(19): siRNA sense strand
ggauaaguguggugucugu

SEQ ID NO: 367989 - RNA, 19 nt, Homo sapiens
  misc_RNA (1)...(19): siRNA sense strand
gggcugugauaaagaaauu

SEQ ID NO: 367990 - RNA, 19 nt, Homo sapiens
  misc_RNA (1)...(19): siRNA sense strand
gcaaagagcacguccaaaa

SEQ ID NO: 367991 - RNA, 19 nt, Homo sapiens
  misc_RNA (1)...(19): siRNA sense strand
ccugagcaguuguucuuua

SEQ ID NO: 367992 - RNA, 19 nt, Homo sapiens
  misc_RNA (1)...(19): siRNA sense strand
gucaagaacugaaaagaua

SEQ ID NO: 367993 - RNA, 19 nt, Homo sapiens
  misc_RNA (1)...(19): siRNA sense strand
caguucagcuucacaaaug

SEQ ID NO: 367994 - RNA, 19 nt, Homo sapiens
  misc_RNA (1)...(19): siRNA sense strand
gcacgauacugcuccauac

SEQ ID NO: 367995 - RNA, 19 nt, Homo sapiens
  misc_RNA (1)...(19): siRNA sense strand
gcagcugaaugaaacaaug

SEQ ID NO: 367996 - RNA, 19 nt, Homo sapiens
  misc_RNA (1)...(19): siRNA sense strand
gaaagaucauugacaacag

SEQ ID NO: 367997 - RNA, 19 nt, Homo sapiens
  misc_RNA (1)...(19): siRNA sense strand
ggaaagaucauugacaaca

SEQ ID NO: 367998 - RNA, 19 nt, Homo sapiens
  misc_RNA (1)...(19): siRNA sense strand
cauauucugucaaauggaa

SEQ ID NO: 367999 - RNA, 19 nt, Homo sapiens
  misc_RNA (1)...(19): siRNA sense strand
cauugaagaugacauugaa

SEQ ID NO: 368000 - RNA, 19 nt, Homo sapiens
  misc_RNA (1)...(19): siRNA sense strand
guuguacccugaaucauga

SEQ ID NO: 368001 - RNA, 19 nt, Homo sapiens
  misc_RNA (1)...(19): siRNA sense strand
uaaccgaucccauuaacaa

SEQ ID NO: 368002 - RNA, 19 nt, Homo sapiens
  misc_RNA (1)...(19): siRNA sense strand
gaaguaagacugugagacu

SEQ ID NO: 368003 - RNA, 19 nt, Homo sapiens
  misc_RNA (1)...(19): siRNA sense strand
caaagauccauauagcaua

SEQ ID NO: 368004 - RNA, 19 nt, Homo sapiens
  misc_RNA (1)...(19): siRNA sense strand
gauauauccauuccuauga

SEQ ID NO: 368005 - RNA, 19 nt, Homo sapiens
  misc_RNA (1)...(19): siRNA sense strand
gaagugcuacguauagaau

SEQ ID NO: 368006 - RNA, 19 nt, Homo sapiens
  misc_RNA (1)...(19): siRNA sense strand
caucuuugguuccuuauca

SEQ ID NO: 368007 - RNA, 19 nt, Homo sapiens
  misc_RNA (1)...(19): siRNA sense strand
guaaugaugaaccauguuu

SEQ ID NO: 368008 - RNA, 19 nt, Homo sapiens
  misc_RNA (1)...(19): siRNA sense strand
aaauauggaugccguagga

SEQ ID NO: 368009 - RNA, 19 nt, Homo sapiens
  misc_RNA (1)...(19): siRNA sense strand
gcagcgaaacucccacuuu

SEQ ID NO: 368010 - RNA, 19 nt, Homo sapiens
  misc_RNA (1)...(19): siRNA sense strand
uggacaagcugguaaugaa

SEQ ID NO: 368011 - RNA, 19 nt, Homo sapiens
  misc_RNA (1)...(19): siRNA sense strand
uaacugugcuuauguuggu

SEQ ID NO: 368012 - RNA, 19 nt, Homo sapiens
  misc_RNA (1)...(19): siRNA sense strand
gaugaucuagguacuguuu

SEQ ID NO: 368013 - RNA, 19 nt, Homo sapiens
  misc_RNA (1)...(19): siRNA sense strand
gcuaucagcuucgcacugu

SEQ ID NO: 368014 - RNA, 19 nt, Homo sapiens
  misc_RNA (1)...(19): siRNA sense strand
ccucauauucuugcuauua

SEQ ID NO: 368015 - RNA, 19 nt, Homo sapiens
  misc_RNA (1)...(19): siRNA sense strand
gaugccaccuuuacuguca

SEQ ID NO: 368016 - RNA, 19 nt, Homo sapiens
  misc_RNA (1)...(19): siRNA sense strand
gcgaaacucccacuuugaa

SEQ ID NO: 368017 - RNA, 19 nt, Homo sapiens
  misc_RNA (1)...(19): siRNA sense strand
aaagggaccuccacuugau

SEQ ID NO: 368018 - RNA, 19 nt, Homo sapiens
  misc_RNA (1)...(19): siRNA sense strand
aagcagcauuccaucguua

SEQ ID NO: 368019 - RNA, 19 nt, Homo sapiens
  misc_RNA (1)...(19): siRNA sense strand
caacagguguggugaugag

SEQ ID NO: 368020 - RNA, 19 nt, Homo sapiens
  misc_RNA (1)...(19): siRNA sense strand
aaagaucauugacaacaga

SEQ ID NO: 368021 - RNA, 19 nt, Homo sapiens
  misc_RNA (1)...(19): siRNA sense strand
gaucaugauuggccuaaac

SEQ ID NO: 368022 - RNA, 19 nt, Homo sapiens
  misc_RNA (1)...(19): siRNA sense strand
gacuaaagcccaacacuca

SEQ ID NO: 368023 - RNA, 19 nt, Homo sapiens
  misc_RNA (1)...(19): siRNA sense strand
ucuagaagcugcugaaacu

SEQ ID NO: 368024 - RNA, 19 nt, Homo sapiens
  misc_RNA (1)...(19): siRNA sense strand
cgauggaccuuuacaugau

SEQ ID NO: 368025 - RNA, 19 nt, Homo sapiens
  misc_RNA (1)...(19): siRNA sense strand
ggagaaaacgauuacaaua

SEQ ID NO: 368026 - RNA, 19 nt, Homo sapiens
  misc_RNA (1)...(19): siRNA sense strand
aauauaaccgaucccauua

SEQ ID NO: 368027 - RNA, 19 nt, Homo sapiens
  misc_RNA (1)...(19): siRNA sense strand
caugaagacucuguaccua

SEQ ID NO: 368028 - RNA, 19 nt, Homo sapiens
  misc_RNA (1)...(19): siRNA sense strand
uuacaaagauccauauagc

SEQ ID NO: 368029 - RNA, 19 nt, Homo sapiens
  misc_RNA (1)...(19): siRNA sense strand
ggauuguccugguguuaau

SEQ ID NO: 368030 - RNA, 19 nt, Homo sapiens
  misc_RNA (1)...(19): siRNA sense strand
gcaaugucguuuugauuuu

SEQ ID NO: 368031 - RNA, 19 nt, Homo sapiens
  misc_RNA (1)...(19): siRNA sense strand
ccagaagcuuggagaaugu

SEQ ID NO: 368032 - RNA, 19 nt, Homo sapiens
  misc_RNA (1)...(19): siRNA sense strand
gcgaggagagugugugaaa

SEQ ID NO: 368033 - RNA, 19 nt, Homo sapiens
  misc_RNA (1)...(19): siRNA sense strand
ccaguacacuaaauaugga

SEQ ID NO: 368034 - RNA, 19 nt, Homo sapiens
  misc_RNA (1)...(19): siRNA sense strand
gaacaggcucccauagaca

SEQ ID NO: 368035 - RNA, 19 nt, Homo sapiens
  misc_RNA (1)...(19): siRNA sense strand
uugaagagcuggucucagu

SEQ ID NO: 368036 - RNA, 19 nt, Homo sapiens
  misc_RNA (1)...(19): siRNA sense strand
ugucauccaggaagaauua

SEQ ID NO: 368037 - RNA, 19 nt, Homo sapiens
  misc_RNA (1)...(19): siRNA sense strand
aaagugggcugugauaaag

SEQ ID NO: 368038 - RNA, 19 nt, Homo sapiens
  misc_RNA (1)...(19): siRNA sense strand
caaccacucugaacaccau

SEQ ID NO: 368039 - RNA, 19 nt, Homo sapiens
  misc_RNA (1)...(19): siRNA sense strand
ccaaagacuuccacuacag

SEQ ID NO: 368040 - RNA, 19 nt, Homo sapiens
  misc_RNA (1)...(19): siRNA sense strand
aaaggaaggauucauguug

SEQ ID NO: 368041 - RNA, 19 nt, Homo sapiens
  misc_RNA (1)...(19): siRNA sense strand
aagaaauggugcaaauaga

SEQ ID NO: 368042 - RNA, 19 nt, Homo sapiens
  misc_RNA (1)...(19): siRNA sense strand
gaagaugacauugaaaguc

SEQ ID NO: 368043 - RNA, 19 nt, Homo sapiens
  misc_RNA (1)...(19): siRNA sense strand
gguguggagugggauuaua

SEQ ID NO: 368044 - RNA, 19 nt, Homo sapiens
  misc_RNA (1)...(19): siRNA sense strand
gacuucagcugauggacaa

SEQ ID NO: 368045 - RNA, 19 nt, Homo sapiens
  misc_RNA (1)...(19): siRNA sense strand
ggaaacccauccagaagcu

SEQ ID NO: 368046 - RNA, 19 nt, Homo sapiens
  misc_RNA (1)...(19): siRNA sense strand
cgagggacgugucuuccaa

SEQ ID NO: 368047 - RNA, 19 nt, Homo sapiens
  misc_RNA (1)...(19): siRNA sense strand
gaagagcuggucucagugu

SEQ ID NO: 368048 - RNA, 19 nt, Homo sapiens
  misc_RNA (1)...(19): siRNA sense strand
uaacaucacggcauuugga

SEQ ID NO: 368049 - RNA, 19 nt, Homo sapiens
  misc_RNA (1)...(19): siRNA sense strand
cugagcaguuguucuuuaa

SEQ ID NO: 368050 - RNA, 19 nt, Homo sapiens
  misc_RNA (1)...(19): siRNA sense strand
gaaccuuugacccauguaa

SEQ ID NO: 368051 - RNA, 19 nt, Homo sapiens
  misc_RNA (1)...(19): siRNA sense strand
caagcagcauuccaucguu

SEQ ID NO: 368052 - RNA, 19 nt, Homo sapiens
  misc_RNA (1)...(19): siRNA sense strand
gagaaguuguacccugaau

SEQ ID NO: 368053 - RNA, 19 nt, Homo sapiens
  misc_RNA (1)...(19): siRNA sense strand
ggacugcacuacuccauga

SEQ ID NO: 368054 - RNA, 19 nt, Homo sapiens
  misc_RNA (1)...(19): siRNA sense strand
ucaaugaaaucuaccauga

SEQ ID NO: 368055 - RNA, 19 nt, Homo sapiens
  misc_RNA (1)...(19): siRNA sense strand
ggaaggagcacguacagaa

SEQ ID NO: 368056 - RNA, 19 nt, Homo sapiens
  misc_RNA (1)...(19): siRNA sense strand
gggccuaccuccagcagaa

SEQ ID NO: 368057 - RNA, 19 nt, Homo sapiens
  misc_RNA (1)...(19): siRNA sense strand
gaacgagcaaugccgcuuu

SEQ ID NO: 368058 - RNA, 19 nt, Homo sapiens
  misc_RNA (1)...(19): siRNA sense strand
gcaaugccgcuuugacuuc

SEQ ID NO: 368059 - RNA, 19 nt, Homo sapiens
  misc_RNA (1)...(19): siRNA sense strand
gcugcacccugaaccauga

SEQ ID NO: 368060 - RNA, 19 nt, Homo sapiens
  misc_RNA (1)...(19): siRNA sense strand
agaaguaccugcugacacu

SEQ ID NO: 368061 - RNA, 19 nt, Homo sapiens
  misc_RNA (1)...(19): siRNA sense strand
gcaaggccgugugcaugug

SEQ ID NO: 368062 - RNA, 19 nt, Homo sapiens
  misc_RNA (1)...(19): siRNA sense strand
gccgcuaccugcacuccua

SEQ ID NO: 368063 - RNA, 19 nt, Homo sapiens
  misc_RNA (1)...(19): siRNA sense strand
acacgggccacgaugaaua

SEQ ID NO: 368064 - RNA, 19 nt, Homo sapiens
  misc_RNA (1)...(19): siRNA sense strand
gaaggagcacguacagaag

SEQ ID NO: 368065 - RNA, 19 nt, Homo sapiens
  misc_RNA (1)...(19): siRNA sense strand
ggauggaggaggaggaguu

SEQ ID NO: 368066 - RNA, 19 nt, Homo sapiens
  misc_RNA (1)...(19): siRNA sense strand
ugacacucaugaacauugu

SEQ ID NO: 368067 - RNA, 19 nt, Homo sapiens
  misc_RNA (1)...(19): siRNA sense strand
ggaggaguucuucaucgaa

SEQ ID NO: 368068 - RNA, 19 nt, Homo sapiens
  misc_RNA (1)...(19): siRNA sense strand
gagcaaugccgcuuugacu

SEQ ID NO: 368069 - RNA, 19 nt, Homo sapiens
  misc_RNA (1)...(19): siRNA sense strand
ggaggaggaguucuucauc

SEQ ID NO: 368070 - RNA, 19 nt, Homo sapiens
  misc_RNA (1)...(19): siRNA sense strand
aggagcacguacagaagua

SEQ ID NO: 368071 - RNA, 19 nt, Homo sapiens
  misc_RNA (1)...(19): siRNA sense strand
cucagagccuggagaaugu

SEQ ID NO: 368072 - RNA, 19 nt, Homo sapiens
  misc_RNA (1)...(19): siRNA sense strand
gugcagccauccugacaac

SEQ ID NO: 368073 - RNA, 19 nt, Homo sapiens
  misc_RNA (1)...(19): siRNA sense strand
ggaggaggaggaguucuuc

SEQ ID NO: 368074 - RNA, 19 nt, Homo sapiens
  misc_RNA (1)...(19): siRNA sense strand
agacacgggccacgaugaa

SEQ ID NO: 368075 - RNA, 19 nt, Homo sapiens
  misc_RNA (1)...(19): siRNA sense strand
ucaucgaacccuuggagaa

SEQ ID NO: 368076 - RNA, 19 nt, Homo sapiens
  misc_RNA (1)...(19): siRNA sense strand
gcuaccugcacuccuauga

SEQ ID NO: 368077 - RNA, 19 nt, Homo sapiens
  misc_RNA (1)...(19): siRNA sense strand
gaucauccuccugagcuau

SEQ ID NO: 368078 - RNA, 19 nt, Homo sapiens
  misc_RNA (1)...(19): siRNA sense strand
ucacacggcaggacuuugg

SEQ ID NO: 368079 - RNA, 19 nt, Homo sapiens
  misc_RNA (1)...(19): siRNA sense strand
aggaggaguucuucaucga

SEQ ID NO: 368080 - RNA, 19 nt, Homo sapiens
  misc_RNA (1)...(19): siRNA sense strand
caucgaacccuuggagaag

SEQ ID NO: 368081 - RNA, 19 nt, Homo sapiens
  misc_RNA (1)...(19): siRNA sense strand
uaccugcacuccuaugacu

SEQ ID NO: 368082 - RNA, 19 nt, Homo sapiens
  misc_RNA (1)...(19): siRNA sense strand
ucuacaaugucacggucuu

SEQ ID NO: 368083 - RNA, 19 nt, Homo sapiens
  misc_RNA (1)...(19): siRNA sense strand
aacgagcaaugccgcuuug

SEQ ID NO: 368084 - RNA, 19 nt, Homo sapiens
  misc_RNA (1)...(19): siRNA sense strand
augacugccugcuggauga

SEQ ID NO: 368085 - RNA, 19 nt, Homo sapiens
  misc_RNA (1)...(19): siRNA sense strand
ggacugcacuacuccauga

SEQ ID NO: 368086 - RNA, 19 nt, Homo sapiens
  misc_RNA (1)...(19): siRNA sense strand
ucaaugaaaucuaccauga

SEQ ID NO: 368087 - RNA, 19 nt, Homo sapiens
  misc_RNA (1)...(19): siRNA sense strand
ggaaggagcacguacagaa

SEQ ID NO: 368088 - RNA, 19 nt, Homo sapiens
  misc_RNA (1)...(19): siRNA sense strand
gggccuaccuccagcagaa

SEQ ID NO: 368089 - RNA, 19 nt, Homo sapiens
  misc_RNA (1)...(19): siRNA sense strand
gaacgagcaaugccgcuuu

SEQ ID NO: 368090 - RNA, 19 nt, Homo sapiens
  misc_RNA (1)...(19): siRNA sense strand
gcaaugccgcuuugacuuc

SEQ ID NO: 368091 - RNA, 19 nt, Homo sapiens
  misc_RNA (1)...(19): siRNA sense strand
gcugcacccugaaccauga

SEQ ID NO: 368092 - RNA, 19 nt, Homo sapiens
  misc_RNA (1)...(19): siRNA sense strand
agaaguaccugcugacacu

SEQ ID NO: 368093 - RNA, 19 nt, Homo sapiens
  misc_RNA (1)...(19): siRNA sense strand
gcaaggccgugugcaugug

SEQ ID NO: 368094 - RNA, 19 nt, Homo sapiens
  misc_RNA (1)...(19): siRNA sense strand
gccgcuaccugcacuccua

SEQ ID NO: 368095 - RNA, 19 nt, Homo sapiens
  misc_RNA (1)...(19): siRNA sense strand
acacgggccacgaugaaua

SEQ ID NO: 368096 - RNA, 19 nt, Homo sapiens
  misc_RNA (1)...(19): siRNA sense strand
gaaggagcacguacagaag

SEQ ID NO: 368097 - RNA, 19 nt, Homo sapiens
  misc_RNA (1)...(19): siRNA sense strand
ggauggaggaggaggaguu

SEQ ID NO: 368098 - RNA, 19 nt, Homo sapiens
  misc_RNA (1)...(19): siRNA sense strand
ugacacucaugaacauugu

SEQ ID NO: 368099 - RNA, 19 nt, Homo sapiens
  misc_RNA (1)...(19): siRNA sense strand
ggaggaguucuucaucgaa

SEQ ID NO: 368100 - RNA, 19 nt, Homo sapiens
  misc_RNA (1)...(19): siRNA sense strand
gagcaaugccgcuuugacu

SEQ ID NO: 368101 - RNA, 19 nt, Homo sapiens
  misc_RNA (1)...(19): siRNA sense strand
ggaggaggaguucuucauc

SEQ ID NO: 368102 - RNA, 19 nt, Homo sapiens
  misc_RNA (1)...(19): siRNA sense strand
aggagcacguacagaagua

SEQ ID NO: 368103 - RNA, 19 nt, Homo sapiens
  misc_RNA (1)...(19): siRNA sense strand
cucagagccuggagaaugu

SEQ ID NO: 368104 - RNA, 19 nt, Homo sapiens
  misc_RNA (1)...(19): siRNA sense strand
gugcagccauccugacaac

SEQ ID NO: 368105 - RNA, 19 nt, Homo sapiens
  misc_RNA (1)...(19): siRNA sense strand
ggaggaggaggaguucuuc

SEQ ID NO: 368106 - RNA, 19 nt, Homo sapiens
  misc_RNA (1)...(19): siRNA sense strand
agacacgggccacgaugaa

SEQ ID NO: 368107 - RNA, 19 nt, Homo sapiens
  misc_RNA (1)...(19): siRNA sense strand
ucaucgaacccuuggagaa

SEQ ID NO: 368108 - RNA, 19 nt, Homo sapiens
  misc_RNA (1)...(19): siRNA sense strand
gcuaccugcacuccuauga

SEQ ID NO: 368109 - RNA, 19 nt, Homo sapiens
  misc_RNA (1)...(19): siRNA sense strand
gaucauccuccugagcuau

SEQ ID NO: 368110 - RNA, 19 nt, Homo sapiens
  misc_RNA (1)...(19): siRNA sense strand
ucacacggcaggacuuugg

SEQ ID NO: 368111 - RNA, 19 nt, Homo sapiens
  misc_RNA (1)...(19): siRNA sense strand
aggaggaguucuucaucga

SEQ ID NO: 368112 - RNA, 19 nt, Homo sapiens
  misc_RNA (1)...(19): siRNA sense strand
caucgaacccuuggagaag

SEQ ID NO: 368113 - RNA, 19 nt, Homo sapiens
  misc_RNA (1)...(19): siRNA sense strand
uaccugcacuccuaugacu

SEQ ID NO: 368114 - RNA, 19 nt, Homo sapiens
  misc_RNA (1)...(19): siRNA sense strand
caggcaugcugcagacgau

SEQ ID NO: 368115 - RNA, 19 nt, Homo sapiens
  misc_RNA (1)...(19): siRNA sense strand
aacgagcaaugccgcuuug

SEQ ID NO: 368116 - RNA, 19 nt, Homo sapiens
  misc_RNA (1)...(19): siRNA sense strand
augacugccugcuggauga

SEQ ID NO: 368117 - RNA, 19 nt, Homo sapiens
  misc_RNA (1)...(19): siRNA sense strand
ucuacaaugucacggucuu

SEQ ID NO: 368118 - RNA, 19 nt, Homo sapiens
  misc_RNA (1)...(19): siRNA sense strand
gaaaggacaucgggaacua

SEQ ID NO: 368119 - RNA, 19 nt, Homo sapiens
  misc_RNA (1)...(19): siRNA sense strand
caucggagcuguuauaauc

SEQ ID NO: 368120 - RNA, 19 nt, Homo sapiens
  misc_RNA (1)...(19): siRNA sense strand
ugauggagcuggacuauga

SEQ ID NO: 368121 - RNA, 19 nt, Homo sapiens
  misc_RNA (1)...(19): siRNA sense strand
ccagagcucuuuaacugua

SEQ ID NO: 368122 - RNA, 19 nt, Homo sapiens
  misc_RNA (1)...(19): siRNA sense strand
gagcagaucuaccugaauc

SEQ ID NO: 368123 - RNA, 19 nt, Homo sapiens
  misc_RNA (1)...(19): siRNA sense strand
gcaaagguuuccugccaaa

SEQ ID NO: 368124 - RNA, 19 nt, Homo sapiens
  misc_RNA (1)...(19): siRNA sense strand
ggacacggccuccaccuuu

SEQ ID NO: 368125 - RNA, 19 nt, Homo sapiens
  misc_RNA (1)...(19): siRNA sense strand
gcaaggagaauuacuacaa

SEQ ID NO: 368126 - RNA, 19 nt, Homo sapiens
  misc_RNA (1)...(19): siRNA sense strand
ucgaggauguccagaaaua

SEQ ID NO: 368127 - RNA, 19 nt, Homo sapiens
  misc_RNA (1)...(19): siRNA sense strand
ggacauggccggauucauc

SEQ ID NO: 368128 - RNA, 19 nt, Homo sapiens
  misc_RNA (1)...(19): siRNA sense strand
gaacuggagcuguuuguug

SEQ ID NO: 368129 - RNA, 19 nt, Homo sapiens
  misc_RNA (1)...(19): siRNA sense strand
gcgaggagguggagcacua

SEQ ID NO: 368130 - RNA, 19 nt, Homo sapiens
  misc_RNA (1)...(19): siRNA sense strand
ggagugaccugaacaucau

SEQ ID NO: 368131 - RNA, 19 nt, Homo sapiens
  misc_RNA (1)...(19): siRNA sense strand
gaucccgacuguaauaaga

SEQ ID NO: 368132 - RNA, 19 nt, Homo sapiens
  misc_RNA (1)...(19): siRNA sense strand
ccacggugcuggagaaugu

SEQ ID NO: 368133 - RNA, 19 nt, Homo sapiens
  misc_RNA (1)...(19): siRNA sense strand
gaggaaaggcaucuugaaa

SEQ ID NO: 368134 - RNA, 19 nt, Homo sapiens
  misc_RNA (1)...(19): siRNA sense strand
gcaacgagcugcgccuguu

SEQ ID NO: 368135 - RNA, 19 nt, Homo sapiens
  misc_RNA (1)...(19): siRNA sense strand
gggagaauguggccgugua

SEQ ID NO: 368136 - RNA, 19 nt, Homo sapiens
  misc_RNA (1)...(19): siRNA sense strand
agacagcgcuuccacuuca

SEQ ID NO: 368137 - RNA, 19 nt, Homo sapiens
  misc_RNA (1)...(19): siRNA sense strand
cgacaacgagccuaucuuu

SEQ ID NO: 368138 - RNA, 19 nt, Homo sapiens
  misc_RNA (1)...(19): siRNA sense strand
caaagaaagcaccauuauu

SEQ ID NO: 368139 - RNA, 19 nt, Homo sapiens
  misc_RNA (1)...(19): siRNA sense strand
caacgagccuaucuuugug

SEQ ID NO: 368140 - RNA, 19 nt, Homo sapiens
  misc_RNA (1)...(19): siRNA sense strand
cgacaucuuugacaaguuc

SEQ ID NO: 368141 - RNA, 19 nt, Homo sapiens
  misc_RNA (1)...(19): siRNA sense strand
gcugugaagugaucuacaa

SEQ ID NO: 368142 - RNA, 19 nt, Homo sapiens
  misc_RNA (1)...(19): siRNA sense strand
cuaccaggguuccaucuuu

SEQ ID NO: 368143 - RNA, 19 nt, Homo sapiens
  misc_RNA (1)...(19): siRNA sense strand
ugaucgagcugaagaaugu

SEQ ID NO: 368144 - RNA, 19 nt, Homo sapiens
  misc_RNA (1)...(19): siRNA sense strand
gugaccaucuuggacauua

SEQ ID NO: 368145 - RNA, 19 nt, Homo sapiens
  misc_RNA (1)...(19): siRNA sense strand
gccaaugcaaggagaauua

SEQ ID NO: 368146 - RNA, 19 nt, Homo sapiens
  misc_RNA (1)...(19): siRNA sense strand
uggcaaagauucgugcuaa

SEQ ID NO: 368147 - RNA, 19 nt, Homo sapiens
  misc_RNA (1)...(19): siRNA sense strand
ccaaagaaagcaccauuau

SEQ ID NO: 368148 - RNA, 19 nt, Homo sapiens
  misc_RNA (1)...(19): siRNA sense strand
gucaacagguggaauaugu

SEQ ID NO: 368149 - RNA, 19 nt, Homo sapiens
  misc_RNA (1)...(19): siRNA sense strand
gaucauguaucagauugug

SEQ ID NO: 368150 - RNA, 19 nt, Homo sapiens
  misc_RNA (1)...(19): siRNA sense strand
ccaacagugugauuaccua

SEQ ID NO: 368151 - RNA, 19 nt, Homo sapiens
  misc_RNA (1)...(19): siRNA sense strand
gcagagggagccugaaguu

SEQ ID NO: 368152 - RNA, 19 nt, Homo sapiens
  misc_RNA (1)...(19): siRNA sense strand
gggaggcggugucagaaug

SEQ ID NO: 368153 - RNA, 19 nt, Homo sapiens
  misc_RNA (1)...(19): siRNA sense strand
ccaacaaguccaacaguuu

SEQ ID NO: 368154 - RNA, 19 nt, Homo sapiens
  misc_RNA (1)...(19): siRNA sense strand
gaaauacucgcugagcauu

SEQ ID NO: 368155 - RNA, 19 nt, Homo sapiens
  misc_RNA (1)...(19): siRNA sense strand
caaggagaauuacuacaag

SEQ ID NO: 368156 - RNA, 19 nt, Homo sapiens
  misc_RNA (1)...(19): siRNA sense strand
gaacaugucccaggagaag

SEQ ID NO: 368157 - RNA, 19 nt, Homo sapiens
  misc_RNA (1)...(19): siRNA sense strand
uuucagagcucccauuaca

SEQ ID NO: 368158 - RNA, 19 nt, Homo sapiens
  misc_RNA (1)...(19): siRNA sense strand
gcuuugaucccgacuguaa

SEQ ID NO: 368159 - RNA, 19 nt, Homo sapiens
  misc_RNA (1)...(19): siRNA sense strand
caacaaguccaacaguuuc

SEQ ID NO: 368160 - RNA, 19 nt, Homo sapiens
  misc_RNA (1)...(19): siRNA sense strand
gccaaagaaagcaccauua

SEQ ID NO: 368161 - RNA, 19 nt, Homo sapiens
  misc_RNA (1)...(19): siRNA sense strand
caagacacccugauuugga

SEQ ID NO: 368162 - RNA, 19 nt, Homo sapiens
  misc_RNA (1)...(19): siRNA sense strand
uaagggauccguuggaaau

SEQ ID NO: 368163 - RNA, 19 nt, Homo sapiens
  misc_RNA (1)...(19): siRNA sense strand
ggaaaggaacggcuugcuu

SEQ ID NO: 368164 - RNA, 19 nt, Homo sapiens
  misc_RNA (1)...(19): siRNA sense strand
cagaucauguaucagauug

SEQ ID NO: 368165 - RNA, 19 nt, Homo sapiens
  misc_RNA (1)...(19): siRNA sense strand
acaacuaugucaccaacaa

SEQ ID NO: 368166 - RNA, 19 nt, Homo sapiens
  misc_RNA (1)...(19): siRNA sense strand
aauacucgcugagcauuaa

SEQ ID NO: 368167 - RNA, 19 nt, Homo sapiens
  misc_RNA (1)...(19): siRNA sense strand
gaaggacggcugugaugug

SEQ ID NO: 368168 - RNA, 19 nt, Homo sapiens
  misc_RNA (1)...(19): siRNA sense strand
gcacacugcgcauguccua

SEQ ID NO: 368169 - RNA, 19 nt, Homo sapiens
  misc_RNA (1)...(19): siRNA sense strand
ccaaugggcgucugcugua

SEQ ID NO: 368170 - RNA, 19 nt, Homo sapiens
  misc_RNA (1)...(19): siRNA sense strand
gcagaggaaaggcaucuug

SEQ ID NO: 368171 - RNA, 19 nt, Homo sapiens
  misc_RNA (1)...(19): siRNA sense strand
uacaauggcugucccaaag

SEQ ID NO: 368172 - RNA, 19 nt, Homo sapiens
  misc_RNA (1)...(19): siRNA sense strand
gugaagugaucuacaaugg

SEQ ID NO: 368173 - RNA, 19 nt, Homo sapiens
  misc_RNA (1)...(19): siRNA sense strand
ugguggagcuggacuuuga

SEQ ID NO: 368174 - RNA, 19 nt, Homo sapiens
  misc_RNA (1)...(19): siRNA sense strand
gaggagcgcgugagcuauu

SEQ ID NO: 368175 - RNA, 19 nt, Homo sapiens
  misc_RNA (1)...(19): siRNA sense strand
ggaacggcuugcuucucua

SEQ ID NO: 368176 - RNA, 19 nt, Homo sapiens
  misc_RNA (1)...(19): siRNA sense strand
ggaggcaccugugucaaca

SEQ ID NO: 368177 - RNA, 19 nt, Homo sapiens
  misc_RNA (1)...(19): siRNA sense strand
gcccagaucauguaucaga

SEQ ID NO: 368178 - RNA, 19 nt, Homo sapiens
  misc_RNA (1)...(19): siRNA sense strand
gcgaugcacugagcuuuca

SEQ ID NO: 368179 - RNA, 19 nt, Homo sapiens
  misc_RNA (1)...(19): siRNA sense strand
uguccuaucugcaaagguu

SEQ ID NO: 368180 - RNA, 19 nt, Homo sapiens
  misc_RNA (1)...(19): siRNA sense strand
gcccaucggagcuguuaua

SEQ ID NO: 368181 - RNA, 19 nt, Homo sapiens
  misc_RNA (1)...(19): siRNA sense strand
ugaugacgcuggccaguuc

SEQ ID NO: 368182 - RNA, 19 nt, Homo sapiens
  misc_RNA (1)...(19): siRNA sense strand
gaccagaacaaggcagaua

SEQ ID NO: 368183 - RNA, 19 nt, Homo sapiens
  misc_RNA (1)...(19): siRNA sense strand
ggaauauguaucuguguga

SEQ ID NO: 368184 - RNA, 19 nt, Homo sapiens
  misc_RNA (1)...(19): siRNA sense strand
gaugggaggcggugucaga

SEQ ID NO: 368185 - RNA, 19 nt, Homo sapiens
  misc_RNA (1)...(19): siRNA sense strand
caacagguggaauauguau

SEQ ID NO: 368186 - RNA, 19 nt, Homo sapiens
  misc_RNA (1)...(19): siRNA sense strand
ucgcucuggucaucauuua

SEQ ID NO: 368187 - RNA, 19 nt, Homo sapiens
  misc_RNA (1)...(19): siRNA sense strand
caccauccaugaagaguuc

SEQ ID NO: 368188 - RNA, 19 nt, Homo sapiens
  misc_RNA (1)...(19): siRNA sense strand
gugggcaccuccauugcua

SEQ ID NO: 368189 - RNA, 19 nt, Homo sapiens
  misc_RNA (1)...(19): siRNA sense strand
gguccugccucugaagauu

SEQ ID NO: 368190 - RNA, 19 nt, Homo sapiens
  misc_RNA (1)...(19): siRNA sense strand
ggacgcugcugaccaccau

SEQ ID NO: 368191 - RNA, 19 nt, Homo sapiens
  misc_RNA (1)...(19): siRNA sense strand
ucagggccaugaaugagaa

SEQ ID NO: 368192 - RNA, 19 nt, Homo sapiens
  misc_RNA (1)...(19): siRNA sense strand
ccaccuacaucacugucuu

SEQ ID NO: 368193 - RNA, 19 nt, Homo sapiens
  misc_RNA (1)...(19): siRNA sense strand
aagcugagccgcaaugaga

SEQ ID NO: 368194 - RNA, 19 nt, Homo sapiens
  misc_RNA (1)...(19): siRNA sense strand
ggacgaacuggagcuguuu

SEQ ID NO: 368195 - RNA, 19 nt, Homo sapiens
  misc_RNA (1)...(19): siRNA sense strand
agaaagcaccauuauuaug

SEQ ID NO: 368196 - RNA, 19 nt, Homo sapiens
  misc_RNA (1)...(19): siRNA sense strand
gagcuguuauaaucaucaa

SEQ ID NO: 368197 - RNA, 19 nt, Homo sapiens
  misc_RNA (1)...(19): siRNA sense strand
gcuccaaccugcacagcau

SEQ ID NO: 368198 - RNA, 19 nt, Homo sapiens
  misc_RNA (1)...(19): siRNA sense strand
aaccauggcugugcgcuuu

SEQ ID NO: 368199 - RNA, 19 nt, Homo sapiens
  misc_RNA (1)...(19): siRNA sense strand
cuaaugcccagaucaugua

SEQ ID NO: 368200 - RNA, 19 nt, Homo sapiens
  misc_RNA (1)...(19): siRNA sense strand
ggucggugguggcaaagau

SEQ ID NO: 368201 - RNA, 19 nt, Homo sapiens
  misc_RNA (1)...(19): siRNA sense strand
gcucggcugugaagugauc

SEQ ID NO: 368202 - RNA, 19 nt, Homo sapiens
  misc_RNA (1)...(19): siRNA sense strand
ccacugugccgucagcaaa

SEQ ID NO: 368203 - RNA, 19 nt, Homo sapiens
  misc_RNA (1)...(19): siRNA sense strand
caccaucucccucacguuu

SEQ ID NO: 368204 - RNA, 19 nt, Homo sapiens
  misc_RNA (1)...(19): siRNA sense strand
ggaggugucugugucugau

SEQ ID NO: 368205 - RNA, 19 nt, Homo sapiens
  misc_RNA (1)...(19): siRNA sense strand
aacuggagcuguuuguuga

SEQ ID NO: 368206 - RNA, 19 nt, Homo sapiens
  misc_RNA (1)...(19): siRNA sense strand
ugacggagcagacgcugaa

SEQ ID NO: 368207 - RNA, 19 nt, Homo sapiens
  misc_RNA (1)...(19): siRNA sense strand
gcacacgggcacgcucuuu

SEQ ID NO: 368208 - RNA, 19 nt, Homo sapiens
  misc_RNA (1)...(19): siRNA sense strand
ccuaagggauccguuggaa

SEQ ID NO: 368209 - RNA, 19 nt, Homo sapiens
  misc_RNA (1)...(19): siRNA sense strand
ggacgagaacgacaacuac

SEQ ID NO: 368210 - RNA, 19 nt, Homo sapiens
  misc_RNA (1)...(19): siRNA sense strand
gcuacgaggugcugaccau

SEQ ID NO: 368211 - RNA, 19 nt, Homo sapiens
  misc_RNA (1)...(19): siRNA sense strand
ggaggacagcguucugaug

SEQ ID NO: 368212 - RNA, 19 nt, Homo sapiens
  misc_RNA (1)...(19): siRNA sense strand
gcagucaccguggagagua

SEQ ID NO: 368213 - RNA, 19 nt, Homo sapiens
  misc_RNA (1)...(19): siRNA sense strand
ugacaguggaugauuguga

SEQ ID NO: 368214 - RNA, 19 nt, Homo sapiens
  misc_RNA (1)...(19): siRNA sense strand
ugaaagccguggacuacag

SEQ ID NO: 368215 - RNA, 19 nt, Homo sapiens
  misc_RNA (1)...(19): siRNA sense strand
gcacagugguugccauccu

SEQ ID NO: 368216 - RNA, 19 nt, Homo sapiens
  misc_RNA (1)...(19): siRNA sense strand
gcacgcucuuuggcaauga

SEQ ID NO: 368217 - RNA, 19 nt, Homo sapiens
  misc_RNA (1)...(19): siRNA sense strand
ggauucaucgccaacaaug

SEQ ID NO: 368218 - RNA, 19 nt, Homo sapiens
  misc_RNA (1)...(19): siRNA sense strand
gcaagaagcgcuuugaagu

SEQ ID NO: 368219 - RNA, 19 nt, Homo sapiens
  misc_RNA (1)...(19): siRNA sense strand
gaagcgcuuugaagugaaa

SEQ ID NO: 368220 - RNA, 19 nt, Homo sapiens
  misc_RNA (1)...(19): siRNA sense strand
gggauauugugguugauaa

SEQ ID NO: 368221 - RNA, 19 nt, Homo sapiens
  misc_RNA (1)...(19): siRNA sense strand
aagaagcgcuuugaaguga

SEQ ID NO: 368222 - RNA, 19 nt, Homo sapiens
  misc_RNA (1)...(19): siRNA sense strand
caacagagagugggaauuc

SEQ ID NO: 368223 - RNA, 19 nt, Homo sapiens
  misc_RNA (1)...(19): siRNA sense strand
ggaaccacauuauggaucu

SEQ ID NO: 368224 - RNA, 19 nt, Homo sapiens
  misc_RNA (1)...(19): siRNA sense strand
gcaggaaccacauuaugga

SEQ ID NO: 368225 - RNA, 19 nt, Homo sapiens
  misc_RNA (1)...(19): siRNA sense strand
gcauagaaugucaagcuaa

SEQ ID NO: 368226 - RNA, 19 nt, Homo sapiens
  misc_RNA (1)...(19): siRNA sense strand
caagaagcgcuuugaagug

SEQ ID NO: 368227 - RNA, 19 nt, Homo sapiens
  misc_RNA (1)...(19): siRNA sense strand
ccugggauauugugguuga

SEQ ID NO: 368228 - RNA, 19 nt, Homo sapiens
  misc_RNA (1)...(19): siRNA sense strand
guugauaacugugccaucu

SEQ ID NO: 368229 - RNA, 19 nt, Homo sapiens
  misc_RNA (1)...(19): siRNA sense strand
ggccugggauauugugguu

SEQ ID NO: 368230 - RNA, 19 nt, Homo sapiens
  misc_RNA (1)...(19): siRNA sense strand
cauagaaugucaagcuaac

SEQ ID NO: 368231 - RNA, 19 nt, Homo sapiens
  misc_RNA (1)...(19): siRNA sense strand
gaaccacauuauggaucuu

SEQ ID NO: 368232 - RNA, 19 nt, Homo sapiens
  misc_RNA (1)...(19): siRNA sense strand
ugcauagaaugucaagcua

SEQ ID NO: 368233 - RNA, 19 nt, Homo sapiens
  misc_RNA (1)...(19): siRNA sense strand
uaaccaugcuuuucacuuc

SEQ ID NO: 368234 - RNA, 19 nt, Homo sapiens
  misc_RNA (1)...(19): siRNA sense strand
gggcaagaagcgcuuugaa

SEQ ID NO: 368235 - RNA, 19 nt, Homo sapiens
  misc_RNA (1)...(19): siRNA sense strand
ggcguccgcuacuucagaa

SEQ ID NO: 368236 - RNA, 19 nt, Homo sapiens
  misc_RNA (1)...(19): siRNA sense strand
ggcaagaagcgcuuugaag

SEQ ID NO: 368237 - RNA, 19 nt, Homo sapiens
  misc_RNA (1)...(19): siRNA sense strand
uauugugguugauaacugu

SEQ ID NO: 368238 - RNA, 19 nt, Homo sapiens
  misc_RNA (1)...(19): siRNA sense strand
ccucugggccugggauauu

SEQ ID NO: 368239 - RNA, 19 nt, Homo sapiens
  misc_RNA (1)...(19): siRNA sense strand
agaagcgcuuugaagugaa

SEQ ID NO: 368240 - RNA, 19 nt, Homo sapiens
  misc_RNA (1)...(19): siRNA sense strand
gacaacagagagugggaau

SEQ ID NO: 368241 - RNA, 19 nt, Homo sapiens
  misc_RNA (1)...(19): siRNA sense strand
gcagcgauggauguggaua

SEQ ID NO: 368242 - RNA, 19 nt, Homo sapiens
  misc_RNA (1)...(19): siRNA sense strand
ucaaacugcuucaagauua

SEQ ID NO: 368243 - RNA, 19 nt, Homo sapiens
  misc_RNA (1)...(19): siRNA sense strand
gaucgaggcuugcaaagug

SEQ ID NO: 368244 - RNA, 19 nt, Homo sapiens
  misc_RNA (1)...(19): siRNA sense strand
gaacuuagaaagcauggua

SEQ ID NO: 368245 - RNA, 19 nt, Homo sapiens
  misc_RNA (1)...(19): siRNA sense strand
uaacaaagcagagaaguuu

SEQ ID NO: 368246 - RNA, 19 nt, Homo sapiens
  misc_RNA (1)...(19): siRNA sense strand
ugacuucucuggccaguuu

SEQ ID NO: 368247 - RNA, 19 nt, Homo sapiens
  misc_RNA (1)...(19): siRNA sense strand
caucgaaguuguuaaauuc

SEQ ID NO: 368248 - RNA, 19 nt, Homo sapiens
  misc_RNA (1)...(19): siRNA sense strand
gcaccaggaucaugauuca

SEQ ID NO: 368249 - RNA, 19 nt, Homo sapiens
  misc_RNA (1)...(19): siRNA sense strand
caagauggacuguaacaaa

SEQ ID NO: 368250 - RNA, 19 nt, Homo sapiens
  misc_RNA (1)...(19): siRNA sense strand
gaacaagacuguggucaac

SEQ ID NO: 368251 - RNA, 19 nt, Homo sapiens
  misc_RNA (1)...(19): siRNA sense strand
ggacacaucgaaguuguua

SEQ ID NO: 368252 - RNA, 19 nt, Homo sapiens
  misc_RNA (1)...(19): siRNA sense strand
cgagaucucuuccgaaagu

SEQ ID NO: 368253 - RNA, 19 nt, Homo sapiens
  misc_RNA (1)...(19): siRNA sense strand
ugaucaagauggacuguaa

SEQ ID NO: 368254 - RNA, 19 nt, Homo sapiens
  misc_RNA (1)...(19): siRNA sense strand
gcgcacagcucugcauguu

SEQ ID NO: 368255 - RNA, 19 nt, Homo sapiens
  misc_RNA (1)...(19): siRNA sense strand
gcuauuaucucaaggaaaa

SEQ ID NO: 368256 - RNA, 19 nt, Homo sapiens
  misc_RNA (1)...(19): siRNA sense strand
aaagagaacuuagaaagca

SEQ ID NO: 368257 - RNA, 19 nt, Homo sapiens
  misc_RNA (1)...(19): siRNA sense strand
ggaaugaauacauggguuu

SEQ ID NO: 368258 - RNA, 19 nt, Homo sapiens
  misc_RNA (1)...(19): siRNA sense strand
gcagaaauucggaacaaga

SEQ ID NO: 368259 - RNA, 19 nt, Homo sapiens
  misc_RNA (1)...(19): siRNA sense strand
gggcagaaauucggaacaa

SEQ ID NO: 368260 - RNA, 19 nt, Homo sapiens
  misc_RNA (1)...(19): siRNA sense strand
ccacuggacugcagacauc

SEQ ID NO: 368261 - RNA, 19 nt, Homo sapiens
  misc_RNA (1)...(19): siRNA sense strand
gaaguuugauuuuguguug

SEQ ID NO: 368262 - RNA, 19 nt, Homo sapiens
  misc_RNA (1)...(19): siRNA sense strand
aagcagagaaguuugauuu

SEQ ID NO: 368263 - RNA, 19 nt, Homo sapiens
  misc_RNA (1)...(19): siRNA sense strand
caugauggcugcccuugau

SEQ ID NO: 368264 - RNA, 19 nt, Homo sapiens
  misc_RNA (1)...(19): siRNA sense strand
gcauguugcugcagcugaa

SEQ ID NO: 368265 - RNA, 19 nt, Homo sapiens
  misc_RNA (1)...(19): siRNA sense strand
caaaauggcugggaaugaa

SEQ ID NO: 368266 - RNA, 19 nt, Homo sapiens
  misc_RNA (1)...(19): siRNA sense strand
ccaaagagaacuuagaaag

SEQ ID NO: 368267 - RNA, 19 nt, Homo sapiens
  misc_RNA (1)...(19): siRNA sense strand
gaaucccuauccacaaguu

SEQ ID NO: 368268 - RNA, 19 nt, Homo sapiens
  misc_RNA (1)...(19): siRNA sense strand
acaacaagcucucccucaa

SEQ ID NO: 368269 - RNA, 19 nt, Homo sapiens
  misc_RNA (1)...(19): siRNA sense strand
gcagagaaguuugauuuug

SEQ ID NO: 368270 - RNA, 19 nt, Homo sapiens
  misc_RNA (1)...(19): siRNA sense strand
uggugucucucuucaauuu

SEQ ID NO: 368271 - RNA, 19 nt, Homo sapiens
  misc_RNA (1)...(19): siRNA sense strand
ggaacaagacuguggucaa

SEQ ID NO: 368272 - RNA, 19 nt, Homo sapiens
  misc_RNA (1)...(19): siRNA sense strand
guucaccacugcacuaaag

SEQ ID NO: 368273 - RNA, 19 nt, Homo sapiens
  misc_RNA (1)...(19): siRNA sense strand
acacaucgaaguuguuaaa

SEQ ID NO: 368274 - RNA, 19 nt, Homo sapiens
  misc_RNA (1)...(19): siRNA sense strand
gaaggacacaucgaaguug

SEQ ID NO: 368275 - RNA, 19 nt, Homo sapiens
  misc_RNA (1)...(19): siRNA sense strand
gaacagaaagacuaugacu

SEQ ID NO: 368276 - RNA, 19 nt, Homo sapiens
  misc_RNA (1)...(19): siRNA sense strand
caaguggccugcgcuacaa

SEQ ID NO: 368277 - RNA, 19 nt, Homo sapiens
  misc_RNA (1)...(19): siRNA sense strand
auacauggguuucagcaau

SEQ ID NO: 368278 - RNA, 19 nt, Homo sapiens
  misc_RNA (1)...(19): siRNA sense strand
guuauuugcugccuauagu

SEQ ID NO: 368279 - RNA, 19 nt, Homo sapiens
  misc_RNA (1)...(19): siRNA sense strand
guuggugucucucuucaau

SEQ ID NO: 368280 - RNA, 19 nt, Homo sapiens
  misc_RNA (1)...(19): siRNA sense strand
ggaugaugcugugcaguuc

SEQ ID NO: 368281 - RNA, 19 nt, Homo sapiens
  misc_RNA (1)...(19): siRNA sense strand
guaacaaagcagagaaguu

SEQ ID NO: 368282 - RNA, 19 nt, Homo sapiens
  misc_RNA (1)...(19): siRNA sense strand
ucaauuuccacaacuauga

SEQ ID NO: 368283 - RNA, 19 nt, Homo sapiens
  misc_RNA (1)...(19): siRNA sense strand
caaguucaccacugcacua

SEQ ID NO: 368284 - RNA, 19 nt, Homo sapiens
  misc_RNA (1)...(19): siRNA sense strand
aagaagugcuuuccuaagg

SEQ ID NO: 368285 - RNA, 19 nt, Homo sapiens
  misc_RNA (1)...(19): siRNA sense strand
gccaucggcuauuaucuca

SEQ ID NO: 368286 - RNA, 19 nt, Homo sapiens
  misc_RNA (1)...(19): siRNA sense strand
aacaagcucucccucaaug

SEQ ID NO: 368287 - RNA, 19 nt, Homo sapiens
  misc_RNA (1)...(19): siRNA sense strand
caacaagcucucccucaau

SEQ ID NO: 368288 - RNA, 19 nt, Homo sapiens
  misc_RNA (1)...(19): siRNA sense strand
caaacugcuucaagauuac

SEQ ID NO: 368289 - RNA, 19 nt, Homo sapiens
  misc_RNA (1)...(19): siRNA sense strand
gaauuaugccaucggcuau

SEQ ID NO: 368290 - RNA, 19 nt, Homo sapiens
  misc_RNA (1)...(19): siRNA sense strand
aagauggacuguaacaaag

SEQ ID NO: 368291 - RNA, 19 nt, Homo sapiens
  misc_RNA (1)...(19): siRNA sense strand
caucggcuauuaucucaag

SEQ ID NO: 368292 - RNA, 19 nt, Homo sapiens
  misc_RNA (1)...(19): siRNA sense strand
cugaggcccuguccaaaga

SEQ ID NO: 368293 - RNA, 19 nt, Homo sapiens
  misc_RNA (1)...(19): siRNA sense strand
caugaaggcucugcagaag

SEQ ID NO: 368294 - RNA, 19 nt, Homo sapiens
  misc_RNA (1)...(19): siRNA sense strand
ugaaggacacaucgaaguu

SEQ ID NO: 368295 - RNA, 19 nt, Homo sapiens
  misc_RNA (1)...(19): siRNA sense strand
ugacuacgugcacaaguuu

SEQ ID NO: 368296 - RNA, 19 nt, Homo sapiens
  misc_RNA (1)...(19): siRNA sense strand
gccagaaguuggugucucu

SEQ ID NO: 368297 - RNA, 19 nt, Homo sapiens
  misc_RNA (1)...(19): siRNA sense strand
gauggacuguaacaaagca

SEQ ID NO: 368298 - RNA, 19 nt, Homo sapiens
  misc_RNA (1)...(19): siRNA sense strand
guccaagaguccaguagug

SEQ ID NO: 368299 - RNA, 19 nt, Homo sapiens
  misc_RNA (1)...(19): siRNA sense strand
gauuugcucuuuuacacua

SEQ ID NO: 368300 - RNA, 19 nt, Homo sapiens
  misc_RNA (1)...(19): siRNA sense strand
accgagaucucuuccgaaa

SEQ ID NO: 368301 - RNA, 19 nt, Homo sapiens
  misc_RNA (1)...(19): siRNA sense strand
ccacauuccagucagagaa

SEQ ID NO: 368302 - RNA, 19 nt, Homo sapiens
  misc_RNA (1)...(19): siRNA sense strand
ccaugaaggcucugcagaa

SEQ ID NO: 368303 - RNA, 19 nt, Homo sapiens
  misc_RNA (1)...(19): siRNA sense strand
uggcugcccuugaucucua

SEQ ID NO: 368304 - RNA, 19 nt, Homo sapiens
  misc_RNA (1)...(19): siRNA sense strand
auuaugccaucggcuauua

SEQ ID NO: 368305 - RNA, 19 nt, Homo sapiens
  misc_RNA (1)...(19): siRNA sense strand
guggucaaccuguuauuug

SEQ ID NO: 368306 - RNA, 19 nt, Homo sapiens
  misc_RNA (1)...(19): siRNA sense strand
guccaaagagaacuuagaa

SEQ ID NO: 368307 - RNA, 19 nt, Homo sapiens
  misc_RNA (1)...(19): siRNA sense strand
caguagugguggccucuug

SEQ ID NO: 368308 - RNA, 19 nt, Homo sapiens
  misc_RNA (1)...(19): siRNA sense strand
caaagagaacuuagaaagc

SEQ ID NO: 368309 - RNA, 19 nt, Homo sapiens
  misc_RNA (1)...(19): siRNA sense strand
ggucaaacugcuucaagau

SEQ ID NO: 368310 - RNA, 19 nt, Homo sapiens
  misc_RNA (1)...(19): siRNA sense strand
ggugguacccaaugucaug

SEQ ID NO: 368311 - RNA, 19 nt, Homo sapiens
  misc_RNA (1)...(19): siRNA sense strand
cggcauguaugacuucucu

SEQ ID NO: 368312 - RNA, 19 nt, Homo sapiens
  misc_RNA (1)...(19): siRNA sense strand
cugacuacgugcacaaguu

SEQ ID NO: 368313 - RNA, 19 nt, Homo sapiens
  misc_RNA (1)...(19): siRNA sense strand
gucaaacugcuucaagauu

SEQ ID NO: 368314 - RNA, 19 nt, Homo sapiens
  misc_RNA (1)...(19): siRNA sense strand
agacuguggucaaccuguu

SEQ ID NO: 368315 - RNA, 19 nt, Homo sapiens
  misc_RNA (1)...(19): siRNA sense strand
ggacugcagacaucagauc

SEQ ID NO: 368316 - RNA, 19 nt, Homo sapiens
  misc_RNA (1)...(19): siRNA sense strand
ccaaguggccugcgcuaca

SEQ ID NO: 368317 - RNA, 19 nt, Homo sapiens
  misc_RNA (1)...(19): siRNA sense strand
uacauggguuucagcaaug

SEQ ID NO: 368318 - RNA, 19 nt, Homo sapiens
  misc_RNA (1)...(19): siRNA sense strand
gacaggaacgaaucccuau

SEQ ID NO: 368319 - RNA, 19 nt, Homo sapiens
  misc_RNA (1)...(19): siRNA sense strand
uaagcacccuaggcacuga

SEQ ID NO: 368320 - RNA, 19 nt, Homo sapiens
  misc_RNA (1)...(19): siRNA sense strand
cagcugaggcccuguccaa

SEQ ID NO: 368321 - RNA, 19 nt, Homo sapiens
  misc_RNA (1)...(19): siRNA sense strand
ccuguuauuugcugccuau

SEQ ID NO: 368322 - RNA, 19 nt, Homo sapiens
  misc_RNA (1)...(19): siRNA sense strand
cagagaaguuugauuuugu

SEQ ID NO: 368323 - RNA, 19 nt, Homo sapiens
  misc_RNA (1)...(19): siRNA sense strand
cggcuauuaucucaaggaa

SEQ ID NO: 368324 - RNA, 19 nt, Homo sapiens
  misc_RNA (1)...(19): siRNA sense strand
uggaacagaaagacuauga

SEQ ID NO: 368325 - RNA, 19 nt, Homo sapiens
  misc_RNA (1)...(19): siRNA sense strand
aaauggcugggaaugaaua

SEQ ID NO: 368326 - RNA, 19 nt, Homo sapiens
  misc_RNA (1)...(19): siRNA sense strand
agaaguuggugucucucuu

SEQ ID NO: 368327 - RNA, 19 nt, Homo sapiens
  misc_RNA (1)...(19): siRNA sense strand
ugaaucaggcagugucaug

SEQ ID NO: 368328 - RNA, 19 nt, Homo sapiens
  misc_RNA (1)...(19): siRNA sense strand
aaacaggggaucggaauua

SEQ ID NO: 368329 - RNA, 19 nt, Homo sapiens
  misc_RNA (1)...(19): siRNA sense strand
gcaacacccucagccucau

SEQ ID NO: 368330 - RNA, 19 nt, Homo sapiens
  misc_RNA (1)...(19): siRNA sense strand
gaggcccuguccaaagaga

SEQ ID NO: 368331 - RNA, 19 nt, Homo sapiens
  misc_RNA (1)...(19): siRNA sense strand
uggucaaacugcuucaaga

SEQ ID NO: 368332 - RNA, 19 nt, Homo sapiens
  misc_RNA (1)...(19): siRNA sense strand
gacuguggucaaccuguua

SEQ ID NO: 368333 - RNA, 19 nt, Homo sapiens
  misc_RNA (1)...(19): siRNA sense strand
gaaugaauacauggguuuc

SEQ ID NO: 368334 - RNA, 19 nt, Homo sapiens
  misc_RNA (1)...(19): siRNA sense strand
acacaaagauccccuucug

SEQ ID NO: 368335 - RNA, 19 nt, Homo sapiens
  misc_RNA (1)...(19): siRNA sense strand
gcugaggcccuguccaaag

SEQ ID NO: 368336 - RNA, 19 nt, Homo sapiens
  misc_RNA (1)...(19): siRNA sense strand
aaggacacaucgaaguugu

SEQ ID NO: 368337 - RNA, 19 nt, Homo sapiens
  misc_RNA (1)...(19): siRNA sense strand
ccugggugauuugcucuuu

SEQ ID NO: 368338 - RNA, 19 nt, Homo sapiens
  misc_RNA (1)...(19): siRNA sense strand
ggcugggaaugaauacaug

SEQ ID NO: 368339 - RNA, 19 nt, Homo sapiens
  misc_RNA (1)...(19): siRNA sense strand
ugaaggacaggaacgaauc

SEQ ID NO: 368340 - RNA, 19 nt, Homo sapiens
  misc_RNA (1)...(19): siRNA sense strand
ucccucagcuggccaaguc

SEQ ID NO: 368341 - RNA, 19 nt, Homo sapiens
  misc_RNA (1)...(19): siRNA sense strand
gagacugcaugagcgagau

SEQ ID NO: 368342 - RNA, 19 nt, Homo sapiens
  misc_RNA (1)...(19): siRNA sense strand
gcaccaggaucaugauuca

SEQ ID NO: 368343 - RNA, 19 nt, Homo sapiens
  misc_RNA (1)...(19): siRNA sense strand
cgagaucucuuccgaaagu

SEQ ID NO: 368344 - RNA, 19 nt, Homo sapiens
  misc_RNA (1)...(19): siRNA sense strand
ccacuggacugcagacauc

SEQ ID NO: 368345 - RNA, 19 nt, Homo sapiens
  misc_RNA (1)...(19): siRNA sense strand
gaaucccuauccacaaguu

SEQ ID NO: 368346 - RNA, 19 nt, Homo sapiens
  misc_RNA (1)...(19): siRNA sense strand
guucaccacugcacuaaag

SEQ ID NO: 368347 - RNA, 19 nt, Homo sapiens
  misc_RNA (1)...(19): siRNA sense strand
caaguucaccacugcacua

SEQ ID NO: 368348 - RNA, 19 nt, Homo sapiens
  misc_RNA (1)...(19): siRNA sense strand
caugaaggcucugcagaag

SEQ ID NO: 368349 - RNA, 19 nt, Homo sapiens
  misc_RNA (1)...(19): siRNA sense strand
gauuugcucuuuuacacua

SEQ ID NO: 368350 - RNA, 19 nt, Homo sapiens
  misc_RNA (1)...(19): siRNA sense strand
accgagaucucuuccgaaa

SEQ ID NO: 368351 - RNA, 19 nt, Homo sapiens
  misc_RNA (1)...(19): siRNA sense strand
guccaagaguccaguagug

SEQ ID NO: 368352 - RNA, 19 nt, Homo sapiens
  misc_RNA (1)...(19): siRNA sense strand
ccaugaaggcucugcagaa

SEQ ID NO: 368353 - RNA, 19 nt, Homo sapiens
  misc_RNA (1)...(19): siRNA sense strand
caguagugguggccucuug

SEQ ID NO: 368354 - RNA, 19 nt, Homo sapiens
  misc_RNA (1)...(19): siRNA sense strand
ggacugcagacaucagauc

SEQ ID NO: 368355 - RNA, 19 nt, Homo sapiens
  misc_RNA (1)...(19): siRNA sense strand
gacaggaacgaaucccuau

SEQ ID NO: 368356 - RNA, 19 nt, Homo sapiens
  misc_RNA (1)...(19): siRNA sense strand
ccugggugauuugcucuuu

SEQ ID NO: 368357 - RNA, 19 nt, Homo sapiens
  misc_RNA (1)...(19): siRNA sense strand
acacaaagauccccuucug

SEQ ID NO: 368358 - RNA, 19 nt, Homo sapiens
  misc_RNA (1)...(19): siRNA sense strand
ugaaggacaggaacgaauc

SEQ ID NO: 368359 - RNA, 19 nt, Homo sapiens
  misc_RNA (1)...(19): siRNA sense strand
ucccucagcuggccaaguc

SEQ ID NO: 368360 - RNA, 19 nt, Homo sapiens
  misc_RNA (1)...(19): siRNA sense strand
acgaaucccuauccacaag

SEQ ID NO: 368361 - RNA, 19 nt, Homo sapiens
  misc_RNA (1)...(19): siRNA sense strand
gagacugcaugagcgagau

SEQ ID NO: 368362 - RNA, 19 nt, Homo sapiens
  misc_RNA (1)...(19): siRNA sense strand
ugggugauuugcucuuuua

SEQ ID NO: 368363 - RNA, 19 nt, Homo sapiens
  misc_RNA (1)...(19): siRNA sense strand
ugccugcaguccuguguga

SEQ ID NO: 368364 - RNA, 19 nt, Homo sapiens
  misc_RNA (1)...(19): siRNA sense strand
uuacacuauugcugaagga

SEQ ID NO: 368365 - RNA, 19 nt, Homo sapiens
  misc_RNA (1)...(19): siRNA sense strand
gaagcacuauggcaucuau

SEQ ID NO: 368366 - RNA, 19 nt, Homo sapiens
  misc_RNA (1)...(19): siRNA sense strand
ccaagaaccugccuguguu

SEQ ID NO: 368367 - RNA, 19 nt, Homo sapiens
  misc_RNA (1)...(19): siRNA sense strand
gaaggauccugagcacgua

SEQ ID NO: 368368 - RNA, 19 nt, Homo sapiens
  misc_RNA (1)...(19): siRNA sense strand
gaagaggcguggagugaac

SEQ ID NO: 368369 - RNA, 19 nt, Homo sapiens
  misc_RNA (1)...(19): siRNA sense strand
gccaagaaccugccugugu

SEQ ID NO: 368370 - RNA, 19 nt, Homo sapiens
  misc_RNA (1)...(19): siRNA sense strand
ccacggaguuugccugcau

SEQ ID NO: 368371 - RNA, 19 nt, Homo sapiens
  misc_RNA (1)...(19): siRNA sense strand
cuucauggccagccuuaua

SEQ ID NO: 368372 - RNA, 19 nt, Homo sapiens
  misc_RNA (1)...(19): siRNA sense strand
agaggaugcugaugagaau

SEQ ID NO: 368373 - RNA, 19 nt, Homo sapiens
  misc_RNA (1)...(19): siRNA sense strand
gcugaaaccugugcuaagc

SEQ ID NO: 368374 - RNA, 19 nt, Homo sapiens
  misc_RNA (1)...(19): siRNA sense strand
ggaguuugccugcaugaag

SEQ ID NO: 368375 - RNA, 19 nt, Homo sapiens
  misc_RNA (1)...(19): siRNA sense strand
cagaggaugcugaugagaa

SEQ ID NO: 368376 - RNA, 19 nt, Homo sapiens
  misc_RNA (1)...(19): siRNA sense strand
ggaagaggcguggagugaa

SEQ ID NO: 368377 - RNA, 19 nt, Homo sapiens
  misc_RNA (1)...(19): siRNA sense strand
ggaugcugaugagaauauu

SEQ ID NO: 368378 - RNA, 19 nt, Homo sapiens
  misc_RNA (1)...(19): siRNA sense strand
gggaagcacuauggcaucu

SEQ ID NO: 368379 - RNA, 19 nt, Homo sapiens
  misc_RNA (1)...(19): siRNA sense strand
cagcugaaaccugugcuaa

SEQ ID NO: 368380 - RNA, 19 nt, Homo sapiens
  misc_RNA (1)...(19): siRNA sense strand
ggcggaggcucaucuacag

SEQ ID NO: 368381 - RNA, 19 nt, Homo sapiens
  misc_RNA (1)...(19): siRNA sense strand
cagcaaugacccugaguuc

SEQ ID NO: 368382 - RNA, 19 nt, Homo sapiens
  misc_RNA (1)...(19): siRNA sense strand
gccagaggaugcugaugag

SEQ ID NO: 368383 - RNA, 19 nt, Homo sapiens
  misc_RNA (1)...(19): siRNA sense strand
gaugagaauauugauguca

SEQ ID NO: 368384 - RNA, 19 nt, Homo sapiens
  misc_RNA (1)...(19): siRNA sense strand
uggaagaggcguggaguga

SEQ ID NO: 368385 - RNA, 19 nt, Homo sapiens
  misc_RNA (1)...(19): siRNA sense strand
cugaugagaauauugaugu

SEQ ID NO: 368386 - RNA, 19 nt, Homo sapiens
  misc_RNA (1)...(19): siRNA sense strand
agaccaacagcucugauga

SEQ ID NO: 368387 - RNA, 19 nt, Homo sapiens
  misc_RNA (1)...(19): siRNA sense strand
auauugaugucaccagcaa

SEQ ID NO: 368388 - RNA, 19 nt, Homo sapiens
  misc_RNA (1)...(19): siRNA sense strand
ggaagcacuauggcaucua

SEQ ID NO: 368389 - RNA, 19 nt, Homo sapiens
  misc_RNA (1)...(19): siRNA sense strand
ugaaggccuugguccucuu

SEQ ID NO: 368390 - RNA, 19 nt, Homo sapiens
  misc_RNA (1)...(19): siRNA sense strand
gcagcgggaagcacuaugg

SEQ ID NO: 368391 - RNA, 19 nt, Homo sapiens
  misc_RNA (1)...(19): siRNA sense strand
gaggaugcugaugagaaua

SEQ ID NO: 368392 - RNA, 19 nt, Homo sapiens
  misc_RNA (1)...(19): siRNA sense strand
gcagcagcgggaagcacua

SEQ ID NO: 368393 - RNA, 19 nt, Homo sapiens
  misc_RNA (1)...(19): siRNA sense strand
gcugaugagaauauugaug

SEQ ID NO: 368394 - RNA, 19 nt, Homo sapiens
  misc_RNA (1)...(19): siRNA sense strand
ccugccggcugaagaagug

SEQ ID NO: 368395 - RNA, 19 nt, Homo sapiens
  misc_RNA (1)...(19): siRNA sense strand
guacggcggaggcucaucu

SEQ ID NO: 368396 - RNA, 19 nt, Homo sapiens
  misc_RNA (1)...(19): siRNA sense strand
gaccaacagcucugaugag

SEQ ID NO: 368397 - RNA, 19 nt, Homo sapiens
  misc_RNA (1)...(19): siRNA sense strand
gaagcacuauggcaucuau

SEQ ID NO: 368398 - RNA, 19 nt, Homo sapiens
  misc_RNA (1)...(19): siRNA sense strand
ccaagaaccugccuguguu

SEQ ID NO: 368399 - RNA, 19 nt, Homo sapiens
  misc_RNA (1)...(19): siRNA sense strand
gaaggauccugagcacgua

SEQ ID NO: 368400 - RNA, 19 nt, Homo sapiens
  misc_RNA (1)...(19): siRNA sense strand
gaagaggcguggagugaac

SEQ ID NO: 368401 - RNA, 19 nt, Homo sapiens
  misc_RNA (1)...(19): siRNA sense strand
gccaagaaccugccugugu

SEQ ID NO: 368402 - RNA, 19 nt, Homo sapiens
  misc_RNA (1)...(19): siRNA sense strand
ccacggaguuugccugcau

SEQ ID NO: 368403 - RNA, 19 nt, Homo sapiens
  misc_RNA (1)...(19): siRNA sense strand
cuucauggccagccuuaua

SEQ ID NO: 368404 - RNA, 19 nt, Homo sapiens
  misc_RNA (1)...(19): siRNA sense strand
agaggaugcugaugagaau

SEQ ID NO: 368405 - RNA, 19 nt, Homo sapiens
  misc_RNA (1)...(19): siRNA sense strand
gcugaaaccugugcuaagc

SEQ ID NO: 368406 - RNA, 19 nt, Homo sapiens
  misc_RNA (1)...(19): siRNA sense strand
ggaguuugccugcaugaag

SEQ ID NO: 368407 - RNA, 19 nt, Homo sapiens
  misc_RNA (1)...(19): siRNA sense strand
cagaggaugcugaugagaa

SEQ ID NO: 368408 - RNA, 19 nt, Homo sapiens
  misc_RNA (1)...(19): siRNA sense strand
ggaagaggcguggagugaa

SEQ ID NO: 368409 - RNA, 19 nt, Homo sapiens
  misc_RNA (1)...(19): siRNA sense strand
ggaugcugaugagaauauu

SEQ ID NO: 368410 - RNA, 19 nt, Homo sapiens
  misc_RNA (1)...(19): siRNA sense strand
gggaagcacuauggcaucu

SEQ ID NO: 368411 - RNA, 19 nt, Homo sapiens
  misc_RNA (1)...(19): siRNA sense strand
cagcugaaaccugugcuaa

SEQ ID NO: 368412 - RNA, 19 nt, Homo sapiens
  misc_RNA (1)...(19): siRNA sense strand
ggcggaggcucaucuacag

SEQ ID NO: 368413 - RNA, 19 nt, Homo sapiens
  misc_RNA (1)...(19): siRNA sense strand
cagcaaugacccugaguuc

SEQ ID NO: 368414 - RNA, 19 nt, Homo sapiens
  misc_RNA (1)...(19): siRNA sense strand
gccagaggaugcugaugag

SEQ ID NO: 368415 - RNA, 19 nt, Homo sapiens
  misc_RNA (1)...(19): siRNA sense strand
gaugagaauauugauguca

SEQ ID NO: 368416 - RNA, 19 nt, Homo sapiens
  misc_RNA (1)...(19): siRNA sense strand
uggaagaggcguggaguga

SEQ ID NO: 368417 - RNA, 19 nt, Homo sapiens
  misc_RNA (1)...(19): siRNA sense strand
cugaugagaauauugaugu

SEQ ID NO: 368418 - RNA, 19 nt, Homo sapiens
  misc_RNA (1)...(19): siRNA sense strand
agaccaacagcucugauga

SEQ ID NO: 368419 - RNA, 19 nt, Homo sapiens
  misc_RNA (1)...(19): siRNA sense strand
auauugaugucaccagcaa

SEQ ID NO: 368420 - RNA, 19 nt, Homo sapiens
  misc_RNA (1)...(19): siRNA sense strand
ggaagcacuauggcaucua

SEQ ID NO: 368421 - RNA, 19 nt, Homo sapiens
  misc_RNA (1)...(19): siRNA sense strand
ugaaggccuugguccucuu

SEQ ID NO: 368422 - RNA, 19 nt, Homo sapiens
  misc_RNA (1)...(19): siRNA sense strand
gcagcgggaagcacuaugg

SEQ ID NO: 368423 - RNA, 19 nt, Homo sapiens
  misc_RNA (1)...(19): siRNA sense strand
gaggaugcugaugagaaua

SEQ ID NO: 368424 - RNA, 19 nt, Homo sapiens
  misc_RNA (1)...(19): siRNA sense strand
gcagcagcgggaagcacua

SEQ ID NO: 368425 - RNA, 19 nt, Homo sapiens
  misc_RNA (1)...(19): siRNA sense strand
gcugaugagaauauugaug

SEQ ID NO: 368426 - RNA, 19 nt, Homo sapiens
  misc_RNA (1)...(19): siRNA sense strand
ccugccggcugaagaagug

SEQ ID NO: 368427 - RNA, 19 nt, Homo sapiens
  misc_RNA (1)...(19): siRNA sense strand
guacggcggaggcucaucu

SEQ ID NO: 368428 - RNA, 19 nt, Homo sapiens
  misc_RNA (1)...(19): siRNA sense strand
gaccaacagcucugaugag

SEQ ID NO: 368429 - RNA, 19 nt, Homo sapiens
  misc_RNA (1)...(19): siRNA sense strand
gcaaucagacacagaucua

SEQ ID NO: 368430 - RNA, 19 nt, Homo sapiens
  misc_RNA (1)...(19): siRNA sense strand
guaugugucuggagcuuga

SEQ ID NO: 368431 - RNA, 19 nt, Homo sapiens
  misc_RNA (1)...(19): siRNA sense strand
gugcaccgcuuccuaccuu

SEQ ID NO: 368432 - RNA, 19 nt, Homo sapiens
  misc_RNA (1)...(19): siRNA sense strand
ugccagagguggugacuca

SEQ ID NO: 368433 - RNA, 19 nt, Homo sapiens
  misc_RNA (1)...(19): siRNA sense strand
cuuccuaccuuaugagaug

SEQ ID NO: 368434 - RNA, 19 nt, Homo sapiens
  misc_RNA (1)...(19): siRNA sense strand
cagagguggugacucagaa

SEQ ID NO: 368435 - RNA, 19 nt, Homo sapiens
  misc_RNA (1)...(19): siRNA sense strand
gaugacgucuuugcacaca

SEQ ID NO: 368436 - RNA, 19 nt, Homo sapiens
  misc_RNA (1)...(19): siRNA sense strand
gaacuuccuccuguacaga

SEQ ID NO: 368437 - RNA, 19 nt, Homo sapiens
  misc_RNA (1)...(19): siRNA sense strand
gagcgguacccacccuauu

SEQ ID NO: 368438 - RNA, 19 nt, Homo sapiens
  misc_RNA (1)...(19): siRNA sense strand
ugacgucuuugcacacaca

SEQ ID NO: 368439 - RNA, 19 nt, Homo sapiens
  misc_RNA (1)...(19): siRNA sense strand
caaccucaccugcggcaau

SEQ ID NO: 368440 - RNA, 19 nt, Homo sapiens
  misc_RNA (1)...(19): siRNA sense strand
ccacgacuccuucuucaac

SEQ ID NO: 368441 - RNA, 19 nt, Homo sapiens
  misc_RNA (1)...(19): siRNA sense strand
gcaccgcuuccuaccuuau

SEQ ID NO: 368442 - RNA, 19 nt, Homo sapiens
  misc_RNA (1)...(19): siRNA sense strand
cagacacugccgccacuuu

SEQ ID NO: 368443 - RNA, 19 nt, Homo sapiens
  misc_RNA (1)...(19): siRNA sense strand
ccagagguggugacucaga

SEQ ID NO: 368444 - RNA, 19 nt, Homo sapiens
  misc_RNA (1)...(19): siRNA sense strand
gcacagacucacggagaca

SEQ ID NO: 368445 - RNA, 19 nt, Homo sapiens
  misc_RNA (1)...(19): siRNA sense strand
gagguggugacucagaaug

SEQ ID NO: 368446 - RNA, 19 nt, Homo sapiens
  misc_RNA (1)...(19): siRNA sense strand
ccucuucagucugcuagug

SEQ ID NO: 368447 - RNA, 19 nt, Homo sapiens
  misc_RNA (1)...(19): siRNA sense strand
gcuggugcaccgcuuccua

SEQ ID NO: 368448 - RNA, 19 nt, Homo sapiens
  misc_RNA (1)...(19): siRNA sense strand
gaucagauguugagaguuu

SEQ ID NO: 368449 - RNA, 19 nt, Homo sapiens
  misc_RNA (1)...(19): siRNA sense strand
caacaaagcuacaaucaug

SEQ ID NO: 368450 - RNA, 19 nt, Homo sapiens
  misc_RNA (1)...(19): siRNA sense strand
ggaggaagcuaaacaagaa

SEQ ID NO: 368451 - RNA, 19 nt, Homo sapiens
  misc_RNA (1)...(19): siRNA sense strand
gaagaaguguggaaauuga

SEQ ID NO: 368452 - RNA, 19 nt, Homo sapiens
  misc_RNA (1)...(19): siRNA sense strand
gcacaauccuucuuugaaa

SEQ ID NO: 368453 - RNA, 19 nt, Homo sapiens
  misc_RNA (1)...(19): siRNA sense strand
gaaauuauagcucgaggua

SEQ ID NO: 368454 - RNA, 19 nt, Homo sapiens
  misc_RNA (1)...(19): siRNA sense strand
guuaugaccuacagugaua

SEQ ID NO: 368455 - RNA, 19 nt, Homo sapiens
  misc_RNA (1)...(19): siRNA sense strand
gaaccaggcugcauuaaaa

SEQ ID NO: 368456 - RNA, 19 nt, Homo sapiens
  misc_RNA (1)...(19): siRNA sense strand
ucaccaagaugcauuuaaa

SEQ ID NO: 368457 - RNA, 19 nt, Homo sapiens
  misc_RNA (1)...(19): siRNA sense strand
gagcagaguuggagaaucu

SEQ ID NO: 368458 - RNA, 19 nt, Homo sapiens
  misc_RNA (1)...(19): siRNA sense strand
ggaaguuguugaauucuug

SEQ ID NO: 368459 - RNA, 19 nt, Homo sapiens
  misc_RNA (1)...(19): siRNA sense strand
gaaugcuccuuguguuaua

SEQ ID NO: 368460 - RNA, 19 nt, Homo sapiens
  misc_RNA (1)...(19): siRNA sense strand
gaccauaaaucaacuucuu

SEQ ID NO: 368461 - RNA, 19 nt, Homo sapiens
  misc_RNA (1)...(19): siRNA sense strand
ggacagaggaucagauguu

SEQ ID NO: 368462 - RNA, 19 nt, Homo sapiens
  misc_RNA (1)...(19): siRNA sense strand
cagaggagcuuauauuugg

SEQ ID NO: 368463 - RNA, 19 nt, Homo sapiens
  misc_RNA (1)...(19): siRNA sense strand
guucagaucuucaguacug

SEQ ID NO: 368464 - RNA, 19 nt, Homo sapiens
  misc_RNA (1)...(19): siRNA sense strand
gaaagaagaaguguggaaa

SEQ ID NO: 368465 - RNA, 19 nt, Homo sapiens
  misc_RNA (1)...(19): siRNA sense strand
acaaauggauguuaguaug

SEQ ID NO: 368466 - RNA, 19 nt, Homo sapiens
  misc_RNA (1)...(19): siRNA sense strand
cgaauuugaugagauguuu

SEQ ID NO: 368467 - RNA, 19 nt, Homo sapiens
  misc_RNA (1)...(19): siRNA sense strand
gcagaggagcuuauauuug

SEQ ID NO: 368468 - RNA, 19 nt, Homo sapiens
  misc_RNA (1)...(19): siRNA sense strand
gcacaaauggauguuagua

SEQ ID NO: 368469 - RNA, 19 nt, Homo sapiens
  misc_RNA (1)...(19): siRNA sense strand
ggaagcuaaacaagaauua

SEQ ID NO: 368470 - RNA, 19 nt, Homo sapiens
  misc_RNA (1)...(19): siRNA sense strand
aagaagaaguguggaaauu

SEQ ID NO: 368471 - RNA, 19 nt, Homo sapiens
  misc_RNA (1)...(19): siRNA sense strand
caacaggugcuuccaguga

SEQ ID NO: 368472 - RNA, 19 nt, Homo sapiens
  misc_RNA (1)...(19): siRNA sense strand
aaugacagauggaaugaaa

SEQ ID NO: 368473 - RNA, 19 nt, Homo sapiens
  misc_RNA (1)...(19): siRNA sense strand
acaggaaguuguugaauuc

SEQ ID NO: 368474 - RNA, 19 nt, Homo sapiens
  misc_RNA (1)...(19): siRNA sense strand
gcgaaugcuccuuguguua

SEQ ID NO: 368475 - RNA, 19 nt, Homo sapiens
  misc_RNA (1)...(19): siRNA sense strand
gaacccgucugauucucuu

SEQ ID NO: 368476 - RNA, 19 nt, Homo sapiens
  misc_RNA (1)...(19): siRNA sense strand
gaaacuaaguccagaaacc

SEQ ID NO: 368477 - RNA, 19 nt, Homo sapiens
  misc_RNA (1)...(19): siRNA sense strand
gagaaugacagauggaaug

SEQ ID NO: 368478 - RNA, 19 nt, Homo sapiens
  misc_RNA (1)...(19): siRNA sense strand
aaacauuucuucccauugg

SEQ ID NO: 368479 - RNA, 19 nt, Homo sapiens
  misc_RNA (1)...(19): siRNA sense strand
caaggcagaccauaaauca

SEQ ID NO: 368480 - RNA, 19 nt, Homo sapiens
  misc_RNA (1)...(19): siRNA sense strand
uacaggaaguuguugaauu

SEQ ID NO: 368481 - RNA, 19 nt, Homo sapiens
  misc_RNA (1)...(19): siRNA sense strand
gacagaggaucagauguug

SEQ ID NO: 368482 - RNA, 19 nt, Homo sapiens
  misc_RNA (1)...(19): siRNA sense strand
gaaguguggaaauugauaa

SEQ ID NO: 368483 - RNA, 19 nt, Homo sapiens
  misc_RNA (1)...(19): siRNA sense strand
caucacagcauaucaugaa

SEQ ID NO: 368484 - RNA, 19 nt, Homo sapiens
  misc_RNA (1)...(19): siRNA sense strand
gagaagcugauguuccuuu

SEQ ID NO: 368485 - RNA, 19 nt, Homo sapiens
  misc_RNA (1)...(19): siRNA sense strand
guacauuacguuccucuug

SEQ ID NO: 368486 - RNA, 19 nt, Homo sapiens
  misc_RNA (1)...(19): siRNA sense strand
guaucgacaucauucaaga

SEQ ID NO: 368487 - RNA, 19 nt, Homo sapiens
  misc_RNA (1)...(19): siRNA sense strand
gaacaagaaauaagaaucc

SEQ ID NO: 368488 - RNA, 19 nt, Homo sapiens
  misc_RNA (1)...(19): siRNA sense strand
ggagccagccguaucagaa

SEQ ID NO: 368489 - RNA, 19 nt, Homo sapiens
  misc_RNA (1)...(19): siRNA sense strand
gcucaagcacucacacaaa

SEQ ID NO: 368490 - RNA, 19 nt, Homo sapiens
  misc_RNA (1)...(19): siRNA sense strand
gauccgaauuugaugagau

SEQ ID NO: 368491 - RNA, 19 nt, Homo sapiens
  misc_RNA (1)...(19): siRNA sense strand
gaaccgaccauauuacaac

SEQ ID NO: 368492 - RNA, 19 nt, Homo sapiens
  misc_RNA (1)...(19): siRNA sense strand
ugaaggagcuggaguuuuc

SEQ ID NO: 368493 - RNA, 19 nt, Homo sapiens
  misc_RNA (1)...(19): siRNA sense strand
gggagaagcugauguuccu

SEQ ID NO: 368494 - RNA, 19 nt, Homo sapiens
  misc_RNA (1)...(19): siRNA sense strand
ggcagaggagcuuauauuu

SEQ ID NO: 368495 - RNA, 19 nt, Homo sapiens
  misc_RNA (1)...(19): siRNA sense strand
aaacuucccagaggcauua

SEQ ID NO: 368496 - RNA, 19 nt, Homo sapiens
  misc_RNA (1)...(19): siRNA sense strand
gaccuuggauuaucugaac

SEQ ID NO: 368497 - RNA, 19 nt, Homo sapiens
  misc_RNA (1)...(19): siRNA sense strand
cagauggaaugaaacuaga

SEQ ID NO: 368498 - RNA, 19 nt, Homo sapiens
  misc_RNA (1)...(19): siRNA sense strand
caacaacagggcuugauuc

SEQ ID NO: 368499 - RNA, 19 nt, Homo sapiens
  misc_RNA (1)...(19): siRNA sense strand
aagcagcuguugauggaaa

SEQ ID NO: 368500 - RNA, 19 nt, Homo sapiens
  misc_RNA (1)...(19): siRNA sense strand
cuacagugauacagggaaa

SEQ ID NO: 368501 - RNA, 19 nt, Homo sapiens
  misc_RNA (1)...(19): siRNA sense strand
caucgaacaagaaauaaga

SEQ ID NO: 368502 - RNA, 19 nt, Homo sapiens
  misc_RNA (1)...(19): siRNA sense strand
gcugaaacacagaauauag

SEQ ID NO: 368503 - RNA, 19 nt, Homo sapiens
  misc_RNA (1)...(19): siRNA sense strand
gggaaacuaaguccagaaa

SEQ ID NO: 368504 - RNA, 19 nt, Homo sapiens
  misc_RNA (1)...(19): siRNA sense strand
ugcaaugccuaucaacaaa

SEQ ID NO: 368505 - RNA, 19 nt, Homo sapiens
  misc_RNA (1)...(19): siRNA sense strand
guguggaaauugauaacaa

SEQ ID NO: 368506 - RNA, 19 nt, Homo sapiens
  misc_RNA (1)...(19): siRNA sense strand
uaaacccaaugaaggaguu

SEQ ID NO: 368507 - RNA, 19 nt, Homo sapiens
  misc_RNA (1)...(19): siRNA sense strand
uugcugaaauggaugguuu

SEQ ID NO: 368508 - RNA, 19 nt, Homo sapiens
  misc_RNA (1)...(19): siRNA sense strand
cuaagggacucauaugaac

SEQ ID NO: 368509 - RNA, 19 nt, Homo sapiens
  misc_RNA (1)...(19): siRNA sense strand
ggcgaaugcuccuuguguu

SEQ ID NO: 368510 - RNA, 19 nt, Homo sapiens
  misc_RNA (1)...(19): siRNA sense strand
gagcaaaacauaucuugaa

SEQ ID NO: 368511 - RNA, 19 nt, Homo sapiens
  misc_RNA (1)...(19): siRNA sense strand
cggcauuuauggacuucua

SEQ ID NO: 368512 - RNA, 19 nt, Homo sapiens
  misc_RNA (1)...(19): siRNA sense strand
uggagaaucuugugaacca

SEQ ID NO: 368513 - RNA, 19 nt, Homo sapiens
  misc_RNA (1)...(19): siRNA sense strand
acagauugaucagcuggua

SEQ ID NO: 368514 - RNA, 19 nt, Homo sapiens
  misc_RNA (1)...(19): siRNA sense strand
aaucuccaaugcauccaua

SEQ ID NO: 368515 - RNA, 19 nt, Homo sapiens
  misc_RNA (1)...(19): siRNA sense strand
gagccagccguaucagaaa

SEQ ID NO: 368516 - RNA, 19 nt, Homo sapiens
  misc_RNA (1)...(19): siRNA sense strand
ugccaucgaacaagaaaua

SEQ ID NO: 368517 - RNA, 19 nt, Homo sapiens
  misc_RNA (1)...(19): siRNA sense strand
ugaaucuggucaugccauu

SEQ ID NO: 368518 - RNA, 19 nt, Homo sapiens
  misc_RNA (1)...(19): siRNA sense strand
uagcugaaacacagaauau

SEQ ID NO: 368519 - RNA, 19 nt, Homo sapiens
  misc_RNA (1)...(19): siRNA sense strand
gugaaaagcuuggaguuau

SEQ ID NO: 368520 - RNA, 19 nt, Homo sapiens
  misc_RNA (1)...(19): siRNA sense strand
uggcagaggagcuuauauu

SEQ ID NO: 368521 - RNA, 19 nt, Homo sapiens
  misc_RNA (1)...(19): siRNA sense strand
acaaaaccaucacagcaua

SEQ ID NO: 368522 - RNA, 19 nt, Homo sapiens
  misc_RNA (1)...(19): siRNA sense strand
aaaagcagcuguugaugga

SEQ ID NO: 368523 - RNA, 19 nt, Homo sapiens
  misc_RNA (1)...(19): siRNA sense strand
ugaaccaggcugcauuaaa

SEQ ID NO: 368524 - RNA, 19 nt, Homo sapiens
  misc_RNA (1)...(19): siRNA sense strand
aaaggucgaacagaaauuu

SEQ ID NO: 368525 - RNA, 19 nt, Homo sapiens
  misc_RNA (1)...(19): siRNA sense strand
gagguaaacuuccaaaagg

SEQ ID NO: 368526 - RNA, 19 nt, Homo sapiens
  misc_RNA (1)...(19): siRNA sense strand
aaucugccaucgaacaaga

SEQ ID NO: 368527 - RNA, 19 nt, Homo sapiens
  misc_RNA (1)...(19): siRNA sense strand
ucgagguacuguuggcuuu

SEQ ID NO: 368528 - RNA, 19 nt, Homo sapiens
  misc_RNA (1)...(19): siRNA sense strand
aauaggagccacaaacuuc

SEQ ID NO: 368529 - RNA, 19 nt, Homo sapiens
  misc_RNA (1)...(19): siRNA sense strand
caucaaugccuuccauaca

SEQ ID NO: 368530 - RNA, 19 nt, Homo sapiens
  misc_RNA (1)...(19): siRNA sense strand
uccgagagauuagcugaaa

SEQ ID NO: 368531 - RNA, 19 nt, Homo sapiens
  misc_RNA (1)...(19): siRNA sense strand
ggaaccgaccauauuacaa

SEQ ID NO: 368532 - RNA, 19 nt, Homo sapiens
  misc_RNA (1)...(19): siRNA sense strand
cacagcauaucaugaaucu

SEQ ID NO: 368533 - RNA, 19 nt, Homo sapiens
  misc_RNA (1)...(19): siRNA sense strand
ugaaagaagaaguguggaa

SEQ ID NO: 368534 - RNA, 19 nt, Homo sapiens
  misc_RNA (1)...(19): siRNA sense strand
ucccagaggcauuagauaa

SEQ ID NO: 368535 - RNA, 19 nt, Homo sapiens
  misc_RNA (1)...(19): siRNA sense strand
gcuccuuguguuauauuua

SEQ ID NO: 368536 - RNA, 19 nt, Homo sapiens
  misc_RNA (1)...(19): siRNA sense strand
caagaugcauuuaaaacug

SEQ ID NO: 368537 - RNA, 19 nt, Homo sapiens
  misc_RNA (1)...(19): siRNA sense strand
gaaguuguugaauucuuga

SEQ ID NO: 368538 - RNA, 19 nt, Homo sapiens
  misc_RNA (1)...(19): siRNA sense strand
ucuaagggacucauaugaa

SEQ ID NO: 368539 - RNA, 19 nt, Homo sapiens
  misc_RNA (1)...(19): siRNA sense strand
aacccaaucugccaucgaa

SEQ ID NO: 368540 - RNA, 19 nt, Homo sapiens
  misc_RNA (1)...(19): siRNA sense strand
gaaucuggucaugccauua

SEQ ID NO: 368541 - RNA, 19 nt, Homo sapiens
  misc_RNA (1)...(19): siRNA sense strand
uguaaaaggucgaacagaa

SEQ ID NO: 368542 - RNA, 19 nt, Homo sapiens
  misc_RNA (1)...(19): siRNA sense strand
ugacaugcaaguuacaguu

SEQ ID NO: 368543 - RNA, 19 nt, Homo sapiens
  misc_RNA (1)...(19): siRNA sense strand
agaauuacaggaaguuguu

SEQ ID NO: 368544 - RNA, 19 nt, Homo sapiens
  misc_RNA (1)...(19): siRNA sense strand
gaaaaucuacuuccuggau

SEQ ID NO: 368545 - RNA, 19 nt, Homo sapiens
  misc_RNA (1)...(19): siRNA sense strand
gauaaugccacuaaaauag

SEQ ID NO: 368546 - RNA, 19 nt, Homo sapiens
  misc_RNA (1)...(19): siRNA sense strand
ucaguggagugucaguuuc

SEQ ID NO: 368547 - RNA, 19 nt, Homo sapiens
  misc_RNA (1)...(19): siRNA sense strand
aaagaugcaaugccuauca

SEQ ID NO: 368548 - RNA, 19 nt, Homo sapiens
  misc_RNA (1)...(19): siRNA sense strand
gaucagauguugagaguuu

SEQ ID NO: 368549 - RNA, 19 nt, Homo sapiens
  misc_RNA (1)...(19): siRNA sense strand
caacaaagcuacaaucaug

SEQ ID NO: 368550 - RNA, 19 nt, Homo sapiens
  misc_RNA (1)...(19): siRNA sense strand
ggaggaagcuaaacaagaa

SEQ ID NO: 368551 - RNA, 19 nt, Homo sapiens
  misc_RNA (1)...(19): siRNA sense strand
gaagaaguguggaaauuga

SEQ ID NO: 368552 - RNA, 19 nt, Homo sapiens
  misc_RNA (1)...(19): siRNA sense strand
gcacaauccuucuuugaaa

SEQ ID NO: 368553 - RNA, 19 nt, Homo sapiens
  misc_RNA (1)...(19): siRNA sense strand
gaaauuauagcucgaggua

SEQ ID NO: 368554 - RNA, 19 nt, Homo sapiens
  misc_RNA (1)...(19): siRNA sense strand
guuaugaccuacagugaua

SEQ ID NO: 368555 - RNA, 19 nt, Homo sapiens
  misc_RNA (1)...(19): siRNA sense strand
gaaccaggcugcauuaaaa

SEQ ID NO: 368556 - RNA, 19 nt, Homo sapiens
  misc_RNA (1)...(19): siRNA sense strand
ucaccaagaugcauuuaaa

SEQ ID NO: 368557 - RNA, 19 nt, Homo sapiens
  misc_RNA (1)...(19): siRNA sense strand
gagcagaguuggagaaucu

SEQ ID NO: 368558 - RNA, 19 nt, Homo sapiens
  misc_RNA (1)...(19): siRNA sense strand
ggaaguuguugaauucuug

SEQ ID NO: 368559 - RNA, 19 nt, Homo sapiens
  misc_RNA (1)...(19): siRNA sense strand
gaaugcuccuuguguuaua

SEQ ID NO: 368560 - RNA, 19 nt, Homo sapiens
  misc_RNA (1)...(19): siRNA sense strand
gaccauaaaucaacuucuu

SEQ ID NO: 368561 - RNA, 19 nt, Homo sapiens
  misc_RNA (1)...(19): siRNA sense strand
ggacagaggaucagauguu

SEQ ID NO: 368562 - RNA, 19 nt, Homo sapiens
  misc_RNA (1)...(19): siRNA sense strand
cagaggagcuuauauuugg

SEQ ID NO: 368563 - RNA, 19 nt, Homo sapiens
  misc_RNA (1)...(19): siRNA sense strand
guucagaucuucaguacug

SEQ ID NO: 368564 - RNA, 19 nt, Homo sapiens
  misc_RNA (1)...(19): siRNA sense strand
gaaagaagaaguguggaaa

SEQ ID NO: 368565 - RNA, 19 nt, Homo sapiens
  misc_RNA (1)...(19): siRNA sense strand
acaaauggauguuaguaug

SEQ ID NO: 368566 - RNA, 19 nt, Homo sapiens
  misc_RNA (1)...(19): siRNA sense strand
cgaauuugaugagauguuu

SEQ ID NO: 368567 - RNA, 19 nt, Homo sapiens
  misc_RNA (1)...(19): siRNA sense strand
gcagaggagcuuauauuug

SEQ ID NO: 368568 - RNA, 19 nt, Homo sapiens
  misc_RNA (1)...(19): siRNA sense strand
gcacaaauggauguuagua

SEQ ID NO: 368569 - RNA, 19 nt, Homo sapiens
  misc_RNA (1)...(19): siRNA sense strand
ggaagcuaaacaagaauua

SEQ ID NO: 368570 - RNA, 19 nt, Homo sapiens
  misc_RNA (1)...(19): siRNA sense strand
aagaagaaguguggaaauu

SEQ ID NO: 368571 - RNA, 19 nt, Homo sapiens
  misc_RNA (1)...(19): siRNA sense strand
caacaggugcuuccaguga

SEQ ID NO: 368572 - RNA, 19 nt, Homo sapiens
  misc_RNA (1)...(19): siRNA sense strand
aaugacagauggaaugaaa

SEQ ID NO: 368573 - RNA, 19 nt, Homo sapiens
  misc_RNA (1)...(19): siRNA sense strand
acaggaaguuguugaauuc

SEQ ID NO: 368574 - RNA, 19 nt, Homo sapiens
  misc_RNA (1)...(19): siRNA sense strand
gcgaaugcuccuuguguua

SEQ ID NO: 368575 - RNA, 19 nt, Homo sapiens
  misc_RNA (1)...(19): siRNA sense strand
gaacccgucugauucucuu

SEQ ID NO: 368576 - RNA, 19 nt, Homo sapiens
  misc_RNA (1)...(19): siRNA sense strand
gaaacuaaguccagaaacc

SEQ ID NO: 368577 - RNA, 19 nt, Homo sapiens
  misc_RNA (1)...(19): siRNA sense strand
gagaaugacagauggaaug

SEQ ID NO: 368578 - RNA, 19 nt, Homo sapiens
  misc_RNA (1)...(19): siRNA sense strand
aaacauuucuucccauugg

SEQ ID NO: 368579 - RNA, 19 nt, Homo sapiens
  misc_RNA (1)...(19): siRNA sense strand
caaggcagaccauaaauca

SEQ ID NO: 368580 - RNA, 19 nt, Homo sapiens
  misc_RNA (1)...(19): siRNA sense strand
uacaggaaguuguugaauu

SEQ ID NO: 368581 - RNA, 19 nt, Homo sapiens
  misc_RNA (1)...(19): siRNA sense strand
gacagaggaucagauguug

SEQ ID NO: 368582 - RNA, 19 nt, Homo sapiens
  misc_RNA (1)...(19): siRNA sense strand
gaaguguggaaauugauaa

SEQ ID NO: 368583 - RNA, 19 nt, Homo sapiens
  misc_RNA (1)...(19): siRNA sense strand
caucacagcauaucaugaa

SEQ ID NO: 368584 - RNA, 19 nt, Homo sapiens
  misc_RNA (1)...(19): siRNA sense strand
gagaagcugauguuccuuu

SEQ ID NO: 368585 - RNA, 19 nt, Homo sapiens
  misc_RNA (1)...(19): siRNA sense strand
guacauuacguuccucuug

SEQ ID NO: 368586 - RNA, 19 nt, Homo sapiens
  misc_RNA (1)...(19): siRNA sense strand
guaucgacaucauucaaga

SEQ ID NO: 368587 - RNA, 19 nt, Homo sapiens
  misc_RNA (1)...(19): siRNA sense strand
gaacaagaaauaagaaucc

SEQ ID NO: 368588 - RNA, 19 nt, Homo sapiens
  misc_RNA (1)...(19): siRNA sense strand
ggagccagccguaucagaa

SEQ ID NO: 368589 - RNA, 19 nt, Homo sapiens
  misc_RNA (1)...(19): siRNA sense strand
gcucaagcacucacacaaa

SEQ ID NO: 368590 - RNA, 19 nt, Homo sapiens
  misc_RNA (1)...(19): siRNA sense strand
gauccgaauuugaugagau

SEQ ID NO: 368591 - RNA, 19 nt, Homo sapiens
  misc_RNA (1)...(19): siRNA sense strand
gaaccgaccauauuacaac

SEQ ID NO: 368592 - RNA, 19 nt, Homo sapiens
  misc_RNA (1)...(19): siRNA sense strand
ugaaggagcuggaguuuuc

SEQ ID NO: 368593 - RNA, 19 nt, Homo sapiens
  misc_RNA (1)...(19): siRNA sense strand
gggagaagcugauguuccu

SEQ ID NO: 368594 - RNA, 19 nt, Homo sapiens
  misc_RNA (1)...(19): siRNA sense strand
ggcagaggagcuuauauuu

SEQ ID NO: 368595 - RNA, 19 nt, Homo sapiens
  misc_RNA (1)...(19): siRNA sense strand
aaacuucccagaggcauua

SEQ ID NO: 368596 - RNA, 19 nt, Homo sapiens
  misc_RNA (1)...(19): siRNA sense strand
gaccuuggauuaucugaac

SEQ ID NO: 368597 - RNA, 19 nt, Homo sapiens
  misc_RNA (1)...(19): siRNA sense strand
cagauggaaugaaacuaga

SEQ ID NO: 368598 - RNA, 19 nt, Homo sapiens
  misc_RNA (1)...(19): siRNA sense strand
caacaacagggcuugauuc

SEQ ID NO: 368599 - RNA, 19 nt, Homo sapiens
  misc_RNA (1)...(19): siRNA sense strand
aagcagcuguugauggaaa

SEQ ID NO: 368600 - RNA, 19 nt, Homo sapiens
  misc_RNA (1)...(19): siRNA sense strand
cuacagugauacagggaaa

SEQ ID NO: 368601 - RNA, 19 nt, Homo sapiens
  misc_RNA (1)...(19): siRNA sense strand
caucgaacaagaaauaaga

SEQ ID NO: 368602 - RNA, 19 nt, Homo sapiens
  misc_RNA (1)...(19): siRNA sense strand
gcugaaacacagaauauag

SEQ ID NO: 368603 - RNA, 19 nt, Homo sapiens
  misc_RNA (1)...(19): siRNA sense strand
gggaaacuaaguccagaaa

SEQ ID NO: 368604 - RNA, 19 nt, Homo sapiens
  misc_RNA (1)...(19): siRNA sense strand
ugcaaugccuaucaacaaa

SEQ ID NO: 368605 - RNA, 19 nt, Homo sapiens
  misc_RNA (1)...(19): siRNA sense strand
guguggaaauugauaacaa

SEQ ID NO: 368606 - RNA, 19 nt, Homo sapiens
  misc_RNA (1)...(19): siRNA sense strand
uaaacccaaugaaggaguu

SEQ ID NO: 368607 - RNA, 19 nt, Homo sapiens
  misc_RNA (1)...(19): siRNA sense strand
uugcugaaauggaugguuu

SEQ ID NO: 368608 - RNA, 19 nt, Homo sapiens
  misc_RNA (1)...(19): siRNA sense strand
cuaagggacucauaugaac

SEQ ID NO: 368609 - RNA, 19 nt, Homo sapiens
  misc_RNA (1)...(19): siRNA sense strand
ggcgaaugcuccuuguguu

SEQ ID NO: 368610 - RNA, 19 nt, Homo sapiens
  misc_RNA (1)...(19): siRNA sense strand
gagcaaaacauaucuugaa

SEQ ID NO: 368611 - RNA, 19 nt, Homo sapiens
  misc_RNA (1)...(19): siRNA sense strand
cggcauuuauggacuucua

SEQ ID NO: 368612 - RNA, 19 nt, Homo sapiens
  misc_RNA (1)...(19): siRNA sense strand
uggagaaucuugugaacca

SEQ ID NO: 368613 - RNA, 19 nt, Homo sapiens
  misc_RNA (1)...(19): siRNA sense strand
acagauugaucagcuggua

SEQ ID NO: 368614 - RNA, 19 nt, Homo sapiens
  misc_RNA (1)...(19): siRNA sense strand
aaucuccaaugcauccaua

SEQ ID NO: 368615 - RNA, 19 nt, Homo sapiens
  misc_RNA (1)...(19): siRNA sense strand
gagccagccguaucagaaa

SEQ ID NO: 368616 - RNA, 19 nt, Homo sapiens
  misc_RNA (1)...(19): siRNA sense strand
ugccaucgaacaagaaaua

SEQ ID NO: 368617 - RNA, 19 nt, Homo sapiens
  misc_RNA (1)...(19): siRNA sense strand
ugaaucuggucaugccauu

SEQ ID NO: 368618 - RNA, 19 nt, Homo sapiens
  misc_RNA (1)...(19): siRNA sense strand
uagcugaaacacagaauau

SEQ ID NO: 368619 - RNA, 19 nt, Homo sapiens
  misc_RNA (1)...(19): siRNA sense strand
gugaaaagcuuggaguuau

SEQ ID NO: 368620 - RNA, 19 nt, Homo sapiens
  misc_RNA (1)...(19): siRNA sense strand
uggcagaggagcuuauauu

SEQ ID NO: 368621 - RNA, 19 nt, Homo sapiens
  misc_RNA (1)...(19): siRNA sense strand
acaaaaccaucacagcaua

SEQ ID NO: 368622 - RNA, 19 nt, Homo sapiens
  misc_RNA (1)...(19): siRNA sense strand
aaaagcagcuguugaugga

SEQ ID NO: 368623 - RNA, 19 nt, Homo sapiens
  misc_RNA (1)...(19): siRNA sense strand
ugaaccaggcugcauuaaa

SEQ ID NO: 368624 - RNA, 19 nt, Homo sapiens
  misc_RNA (1)...(19): siRNA sense strand
aaaggucgaacagaaauuu

SEQ ID NO: 368625 - RNA, 19 nt, Homo sapiens
  misc_RNA (1)...(19): siRNA sense strand
gagguaaacuuccaaaagg

SEQ ID NO: 368626 - RNA, 19 nt, Homo sapiens
  misc_RNA (1)...(19): siRNA sense strand
aaucugccaucgaacaaga

SEQ ID NO: 368627 - RNA, 19 nt, Homo sapiens
  misc_RNA (1)...(19): siRNA sense strand
ucgagguacuguuggcuuu

SEQ ID NO: 368628 - RNA, 19 nt, Homo sapiens
  misc_RNA (1)...(19): siRNA sense strand
aauaggagccacaaacuuc

SEQ ID NO: 368629 - RNA, 19 nt, Homo sapiens
  misc_RNA (1)...(19): siRNA sense strand
caucaaugccuuccauaca

SEQ ID NO: 368630 - RNA, 19 nt, Homo sapiens
  misc_RNA (1)...(19): siRNA sense strand
uccgagagauuagcugaaa

SEQ ID NO: 368631 - RNA, 19 nt, Homo sapiens
  misc_RNA (1)...(19): siRNA sense strand
ggaaccgaccauauuacaa

SEQ ID NO: 368632 - RNA, 19 nt, Homo sapiens
  misc_RNA (1)...(19): siRNA sense strand
cacagcauaucaugaaucu

SEQ ID NO: 368633 - RNA, 19 nt, Homo sapiens
  misc_RNA (1)...(19): siRNA sense strand
ugaaagaagaaguguggaa

SEQ ID NO: 368634 - RNA, 19 nt, Homo sapiens
  misc_RNA (1)...(19): siRNA sense strand
ucccagaggcauuagauaa

SEQ ID NO: 368635 - RNA, 19 nt, Homo sapiens
  misc_RNA (1)...(19): siRNA sense strand
gcuccuuguguuauauuua

SEQ ID NO: 368636 - RNA, 19 nt, Homo sapiens
  misc_RNA (1)...(19): siRNA sense strand
caagaugcauuuaaaacug

SEQ ID NO: 368637 - RNA, 19 nt, Homo sapiens
  misc_RNA (1)...(19): siRNA sense strand
gaaguuguugaauucuuga

SEQ ID NO: 368638 - RNA, 19 nt, Homo sapiens
  misc_RNA (1)...(19): siRNA sense strand
ucuaagggacucauaugaa

SEQ ID NO: 368639 - RNA, 19 nt, Homo sapiens
  misc_RNA (1)...(19): siRNA sense strand
aacccaaucugccaucgaa

SEQ ID NO: 368640 - RNA, 19 nt, Homo sapiens
  misc_RNA (1)...(19): siRNA sense strand
gaaucuggucaugccauua

SEQ ID NO: 368641 - RNA, 19 nt, Homo sapiens
  misc_RNA (1)...(19): siRNA sense strand
uguaaaaggucgaacagaa

SEQ ID NO: 368642 - RNA, 19 nt, Homo sapiens
  misc_RNA (1)...(19): siRNA sense strand
ugacaugcaaguuacaguu

SEQ ID NO: 368643 - RNA, 19 nt, Homo sapiens
  misc_RNA (1)...(19): siRNA sense strand
agaauuacaggaaguuguu

SEQ ID NO: 368644 - RNA, 19 nt, Homo sapiens
  misc_RNA (1)...(19): siRNA sense strand
gaaaaucuacuuccuggau

SEQ ID NO: 368645 - RNA, 19 nt, Homo sapiens
  misc_RNA (1)...(19): siRNA sense strand
gauaaugccacuaaaauag

SEQ ID NO: 368646 - RNA, 19 nt, Homo sapiens
  misc_RNA (1)...(19): siRNA sense strand
ucaguggagugucaguuuc

SEQ ID NO: 368647 - RNA, 19 nt, Homo sapiens
  misc_RNA (1)...(19): siRNA sense strand
aaagaugcaaugccuauca

SEQ ID NO: 368648 - RNA, 19 nt, Homo sapiens
  misc_RNA (1)...(19): siRNA sense strand
gaucagauguugagaguuu

SEQ ID NO: 368649 - RNA, 19 nt, Homo sapiens
  misc_RNA (1)...(19): siRNA sense strand
caacaaagcuacaaucaug

SEQ ID NO: 368650 - RNA, 19 nt, Homo sapiens
  misc_RNA (1)...(19): siRNA sense strand
ggaggaagcuaaacaagaa

SEQ ID NO: 368651 - RNA, 19 nt, Homo sapiens
  misc_RNA (1)...(19): siRNA sense strand
gaagaaguguggaaauuga

SEQ ID NO: 368652 - RNA, 19 nt, Homo sapiens
  misc_RNA (1)...(19): siRNA sense strand
gcacaauccuucuuugaaa

SEQ ID NO: 368653 - RNA, 19 nt, Homo sapiens
  misc_RNA (1)...(19): siRNA sense strand
gaaauuauagcucgaggua

SEQ ID NO: 368654 - RNA, 19 nt, Homo sapiens
  misc_RNA (1)...(19): siRNA sense strand
guuaugaccuacagugaua

SEQ ID NO: 368655 - RNA, 19 nt, Homo sapiens
  misc_RNA (1)...(19): siRNA sense strand
gaaccaggcugcauuaaaa

SEQ ID NO: 368656 - RNA, 19 nt, Homo sapiens
  misc_RNA (1)...(19): siRNA sense strand
ucaccaagaugcauuuaaa

SEQ ID NO: 368657 - RNA, 19 nt, Homo sapiens
  misc_RNA (1)...(19): siRNA sense strand
gagcagaguuggagaaucu

SEQ ID NO: 368658 - RNA, 19 nt, Homo sapiens
  misc_RNA (1)...(19): siRNA sense strand
ggaaguuguugaauucuug

SEQ ID NO: 368659 - RNA, 19 nt, Homo sapiens
  misc_RNA (1)...(19): siRNA sense strand
gaaugcuccuuguguuaua

SEQ ID NO: 368660 - RNA, 19 nt, Homo sapiens
  misc_RNA (1)...(19): siRNA sense strand
gaccauaaaucaacuucuu

SEQ ID NO: 368661 - RNA, 19 nt, Homo sapiens
  misc_RNA (1)...(19): siRNA sense strand
ggacagaggaucagauguu

SEQ ID NO: 368662 - RNA, 19 nt, Homo sapiens
  misc_RNA (1)...(19): siRNA sense strand
cagaggagcuuauauuugg

SEQ ID NO: 368663 - RNA, 19 nt, Homo sapiens
  misc_RNA (1)...(19): siRNA sense strand
guucagaucuucaguacug

SEQ ID NO: 368664 - RNA, 19 nt, Homo sapiens
  misc_RNA (1)...(19): siRNA sense strand
gaaagaagaaguguggaaa

SEQ ID NO: 368665 - RNA, 19 nt, Homo sapiens
  misc_RNA (1)...(19): siRNA sense strand
acaaauggauguuaguaug

SEQ ID NO: 368666 - RNA, 19 nt, Homo sapiens
  misc_RNA (1)...(19): siRNA sense strand
cgaauuugaugagauguuu

SEQ ID NO: 368667 - RNA, 19 nt, Homo sapiens
  misc_RNA (1)...(19): siRNA sense strand
gcagaggagcuuauauuug

SEQ ID NO: 368668 - RNA, 19 nt, Homo sapiens
  misc_RNA (1)...(19): siRNA sense strand
gcacaaauggauguuagua

SEQ ID NO: 368669 - RNA, 19 nt, Homo sapiens
  misc_RNA (1)...(19): siRNA sense strand
ggaagcuaaacaagaauua

SEQ ID NO: 368670 - RNA, 19 nt, Homo sapiens
  misc_RNA (1)...(19): siRNA sense strand
aagaagaaguguggaaauu

SEQ ID NO: 368671 - RNA, 19 nt, Homo sapiens
  misc_RNA (1)...(19): siRNA sense strand
caacaggugcuuccaguga

SEQ ID NO: 368672 - RNA, 19 nt, Homo sapiens
  misc_RNA (1)...(19): siRNA sense strand
aaugacagauggaaugaaa

SEQ ID NO: 368673 - RNA, 19 nt, Homo sapiens
  misc_RNA (1)...(19): siRNA sense strand
acaggaaguuguugaauuc

SEQ ID NO: 368674 - RNA, 19 nt, Homo sapiens
  misc_RNA (1)...(19): siRNA sense strand
gcgaaugcuccuuguguua

SEQ ID NO: 368675 - RNA, 19 nt, Homo sapiens
  misc_RNA (1)...(19): siRNA sense strand
gaacccgucugauucucuu

SEQ ID NO: 368676 - RNA, 19 nt, Homo sapiens
  misc_RNA (1)...(19): siRNA sense strand
gaaacuaaguccagaaacc

SEQ ID NO: 368677 - RNA, 19 nt, Homo sapiens
  misc_RNA (1)...(19): siRNA sense strand
gagaaugacagauggaaug

SEQ ID NO: 368678 - RNA, 19 nt, Homo sapiens
  misc_RNA (1)...(19): siRNA sense strand
aaacauuucuucccauugg

SEQ ID NO: 368679 - RNA, 19 nt, Homo sapiens
  misc_RNA (1)...(19): siRNA sense strand
caaggcagaccauaaauca

SEQ ID NO: 368680 - RNA, 19 nt, Homo sapiens
  misc_RNA (1)...(19): siRNA sense strand
uacaggaaguuguugaauu

SEQ ID NO: 368681 - RNA, 19 nt, Homo sapiens
  misc_RNA (1)...(19): siRNA sense strand
gacagaggaucagauguug

SEQ ID NO: 368682 - RNA, 19 nt, Homo sapiens
  misc_RNA (1)...(19): siRNA sense strand
gaaguguggaaauugauaa

SEQ ID NO: 368683 - RNA, 19 nt, Homo sapiens
  misc_RNA (1)...(19): siRNA sense strand
caucacagcauaucaugaa

SEQ ID NO: 368684 - RNA, 19 nt, Homo sapiens
  misc_RNA (1)...(19): siRNA sense strand
gagaagcugauguuccuuu

SEQ ID NO: 368685 - RNA, 19 nt, Homo sapiens
  misc_RNA (1)...(19): siRNA sense strand
guacauuacguuccucuug

SEQ ID NO: 368686 - RNA, 19 nt, Homo sapiens
  misc_RNA (1)...(19): siRNA sense strand
guaucgacaucauucaaga

SEQ ID NO: 368687 - RNA, 19 nt, Homo sapiens
  misc_RNA (1)...(19): siRNA sense strand
gaacaagaaauaagaaucc

SEQ ID NO: 368688 - RNA, 19 nt, Homo sapiens
  misc_RNA (1)...(19): siRNA sense strand
ggagccagccguaucagaa

SEQ ID NO: 368689 - RNA, 19 nt, Homo sapiens
  misc_RNA (1)...(19): siRNA sense strand
gcucaagcacucacacaaa

SEQ ID NO: 368690 - RNA, 19 nt, Homo sapiens
  misc_RNA (1)...(19): siRNA sense strand
gauccgaauuugaugagau

SEQ ID NO: 368691 - RNA, 19 nt, Homo sapiens
  misc_RNA (1)...(19): siRNA sense strand
gaaccgaccauauuacaac

SEQ ID NO: 368692 - RNA, 19 nt, Homo sapiens
  misc_RNA (1)...(19): siRNA sense strand
ugaaggagcuggaguuuuc

SEQ ID NO: 368693 - RNA, 19 nt, Homo sapiens
  misc_RNA (1)...(19): siRNA sense strand
gggagaagcugauguuccu

SEQ ID NO: 368694 - RNA, 19 nt, Homo sapiens
  misc_RNA (1)...(19): siRNA sense strand
ggcagaggagcuuauauuu

SEQ ID NO: 368695 - RNA, 19 nt, Homo sapiens
  misc_RNA (1)...(19): siRNA sense strand
aaacuucccagaggcauua

SEQ ID NO: 368696 - RNA, 19 nt, Homo sapiens
  misc_RNA (1)...(19): siRNA sense strand
gaccuuggauuaucugaac

SEQ ID NO: 368697 - RNA, 19 nt, Homo sapiens
  misc_RNA (1)...(19): siRNA sense strand
cagauggaaugaaacuaga

SEQ ID NO: 368698 - RNA, 19 nt, Homo sapiens
  misc_RNA (1)...(19): siRNA sense strand
caacaacagggcuugauuc

SEQ ID NO: 368699 - RNA, 19 nt, Homo sapiens
  misc_RNA (1)...(19): siRNA sense strand
aagcagcuguugauggaaa

SEQ ID NO: 368700 - RNA, 19 nt, Homo sapiens
  misc_RNA (1)...(19): siRNA sense strand
cuacagugauacagggaaa

SEQ ID NO: 368701 - RNA, 19 nt, Homo sapiens
  misc_RNA (1)...(19): siRNA sense strand
caucgaacaagaaauaaga

SEQ ID NO: 368702 - RNA, 19 nt, Homo sapiens
  misc_RNA (1)...(19): siRNA sense strand
gcugaaacacagaauauag

SEQ ID NO: 368703 - RNA, 19 nt, Homo sapiens
  misc_RNA (1)...(19): siRNA sense strand
gggaaacuaaguccagaaa

SEQ ID NO: 368704 - RNA, 19 nt, Homo sapiens
  misc_RNA (1)...(19): siRNA sense strand
ugcaaugccuaucaacaaa

SEQ ID NO: 368705 - RNA, 19 nt, Homo sapiens
  misc_RNA (1)...(19): siRNA sense strand
guguggaaauugauaacaa

SEQ ID NO: 368706 - RNA, 19 nt, Homo sapiens
  misc_RNA (1)...(19): siRNA sense strand
uaaacccaaugaaggaguu

SEQ ID NO: 368707 - RNA, 19 nt, Homo sapiens
  misc_RNA (1)...(19): siRNA sense strand
uugcugaaauggaugguuu

SEQ ID NO: 368708 - RNA, 19 nt, Homo sapiens
  misc_RNA (1)...(19): siRNA sense strand
cuaagggacucauaugaac

SEQ ID NO: 368709 - RNA, 19 nt, Homo sapiens
  misc_RNA (1)...(19): siRNA sense strand
ggcgaaugcuccuuguguu

SEQ ID NO: 368710 - RNA, 19 nt, Homo sapiens
  misc_RNA (1)...(19): siRNA sense strand
gagcaaaacauaucuugaa

SEQ ID NO: 368711 - RNA, 19 nt, Homo sapiens
  misc_RNA (1)...(19): siRNA sense strand
cggcauuuauggacuucua

SEQ ID NO: 368712 - RNA, 19 nt, Homo sapiens
  misc_RNA (1)...(19): siRNA sense strand
uggagaaucuugugaacca

SEQ ID NO: 368713 - RNA, 19 nt, Homo sapiens
  misc_RNA (1)...(19): siRNA sense strand
acagauugaucagcuggua

SEQ ID NO: 368714 - RNA, 19 nt, Homo sapiens
  misc_RNA (1)...(19): siRNA sense strand
aaucuccaaugcauccaua

SEQ ID NO: 368715 - RNA, 19 nt, Homo sapiens
  misc_RNA (1)...(19): siRNA sense strand
gagccagccguaucagaaa

SEQ ID NO: 368716 - RNA, 19 nt, Homo sapiens
  misc_RNA (1)...(19): siRNA sense strand
ugccaucgaacaagaaaua

SEQ ID NO: 368717 - RNA, 19 nt, Homo sapiens
  misc_RNA (1)...(19): siRNA sense strand
ugaaucuggucaugccauu

SEQ ID NO: 368718 - RNA, 19 nt, Homo sapiens
  misc_RNA (1)...(19): siRNA sense strand
uagcugaaacacagaauau

SEQ ID NO: 368719 - RNA, 19 nt, Homo sapiens
  misc_RNA (1)...(19): siRNA sense strand
gugaaaagcuuggaguuau

SEQ ID NO: 368720 - RNA, 19 nt, Homo sapiens
  misc_RNA (1)...(19): siRNA sense strand
uggcagaggagcuuauauu

SEQ ID NO: 368721 - RNA, 19 nt, Homo sapiens
  misc_RNA (1)...(19): siRNA sense strand
acaaaaccaucacagcaua

SEQ ID NO: 368722 - RNA, 19 nt, Homo sapiens
  misc_RNA (1)...(19): siRNA sense strand
aaaagcagcuguugaugga

SEQ ID NO: 368723 - RNA, 19 nt, Homo sapiens
  misc_RNA (1)...(19): siRNA sense strand
ugaaccaggcugcauuaaa

SEQ ID NO: 368724 - RNA, 19 nt, Homo sapiens
  misc_RNA (1)...(19): siRNA sense strand
aaaggucgaacagaaauuu

SEQ ID NO: 368725 - RNA, 19 nt, Homo sapiens
  misc_RNA (1)...(19): siRNA sense strand
gagguaaacuuccaaaagg

SEQ ID NO: 368726 - RNA, 19 nt, Homo sapiens
  misc_RNA (1)...(19): siRNA sense strand
aaucugccaucgaacaaga

SEQ ID NO: 368727 - RNA, 19 nt, Homo sapiens
  misc_RNA (1)...(19): siRNA sense strand
ucgagguacuguuggcuuu

SEQ ID NO: 368728 - RNA, 19 nt, Homo sapiens
  misc_RNA (1)...(19): siRNA sense strand
aauaggagccacaaacuuc

SEQ ID NO: 368729 - RNA, 19 nt, Homo sapiens
  misc_RNA (1)...(19): siRNA sense strand
caucaaugccuuccauaca

SEQ ID NO: 368730 - RNA, 19 nt, Homo sapiens
  misc_RNA (1)...(19): siRNA sense strand
uccgagagauuagcugaaa

SEQ ID NO: 368731 - RNA, 19 nt, Homo sapiens
  misc_RNA (1)...(19): siRNA sense strand
ggaaccgaccauauuacaa

SEQ ID NO: 368732 - RNA, 19 nt, Homo sapiens
  misc_RNA (1)...(19): siRNA sense strand
cacagcauaucaugaaucu

SEQ ID NO: 368733 - RNA, 19 nt, Homo sapiens
  misc_RNA (1)...(19): siRNA sense strand
ugaaagaagaaguguggaa

SEQ ID NO: 368734 - RNA, 19 nt, Homo sapiens
  misc_RNA (1)...(19): siRNA sense strand
ucccagaggcauuagauaa

SEQ ID NO: 368735 - RNA, 19 nt, Homo sapiens
  misc_RNA (1)...(19): siRNA sense strand
gcuccuuguguuauauuua

SEQ ID NO: 368736 - RNA, 19 nt, Homo sapiens
  misc_RNA (1)...(19): siRNA sense strand
caagaugcauuuaaaacug

SEQ ID NO: 368737 - RNA, 19 nt, Homo sapiens
  misc_RNA (1)...(19): siRNA sense strand
gaaguuguugaauucuuga

SEQ ID NO: 368738 - RNA, 19 nt, Homo sapiens
  misc_RNA (1)...(19): siRNA sense strand
ucuaagggacucauaugaa

SEQ ID NO: 368739 - RNA, 19 nt, Homo sapiens
  misc_RNA (1)...(19): siRNA sense strand
aacccaaucugccaucgaa

SEQ ID NO: 368740 - RNA, 19 nt, Homo sapiens
  misc_RNA (1)...(19): siRNA sense strand
gaaucuggucaugccauua

SEQ ID NO: 368741 - RNA, 19 nt, Homo sapiens
  misc_RNA (1)...(19): siRNA sense strand
uguaaaaggucgaacagaa

SEQ ID NO: 368742 - RNA, 19 nt, Homo sapiens
  misc_RNA (1)...(19): siRNA sense strand
ugacaugcaaguuacaguu

SEQ ID NO: 368743 - RNA, 19 nt, Homo sapiens
  misc_RNA (1)...(19): siRNA sense strand
agaauuacaggaaguuguu

SEQ ID NO: 368744 - RNA, 19 nt, Homo sapiens
  misc_RNA (1)...(19): siRNA sense strand
gaaaaucuacuuccuggau

SEQ ID NO: 368745 - RNA, 19 nt, Homo sapiens
  misc_RNA (1)...(19): siRNA sense strand
gauaaugccacuaaaauag

SEQ ID NO: 368746 - RNA, 19 nt, Homo sapiens
  misc_RNA (1)...(19): siRNA sense strand
ucaguggagugucaguuuc

SEQ ID NO: 368747 - RNA, 19 nt, Homo sapiens
  misc_RNA (1)...(19): siRNA sense strand
aaagaugcaaugccuauca

SEQ ID NO: 368748 - RNA, 19 nt, Homo sapiens
  misc_RNA (1)...(19): siRNA sense strand
gcacugagcuucuauauac

SEQ ID NO: 368749 - RNA, 19 nt, Homo sapiens
  misc_RNA (1)...(19): siRNA sense strand
gaagaaagcgucaugauau

SEQ ID NO: 368750 - RNA, 19 nt, Homo sapiens
  misc_RNA (1)...(19): siRNA sense strand
gaaaggagaucaccacaag

SEQ ID NO: 368751 - RNA, 19 nt, Homo sapiens
  misc_RNA (1)...(19): siRNA sense strand
gaagaaguaugaagugguu

SEQ ID NO: 368752 - RNA, 19 nt, Homo sapiens
  misc_RNA (1)...(19): siRNA sense strand
gaugauagauuccaaguca

SEQ ID NO: 368753 - RNA, 19 nt, Homo sapiens
  misc_RNA (1)...(19): siRNA sense strand
caaguguccuucuacaaua

SEQ ID NO: 368754 - RNA, 19 nt, Homo sapiens
  misc_RNA (1)...(19): siRNA sense strand
gaaagaggguauuugagau

SEQ ID NO: 368755 - RNA, 19 nt, Homo sapiens
  misc_RNA (1)...(19): siRNA sense strand
ccacaacuuuggaauguuu

SEQ ID NO: 368756 - RNA, 19 nt, Homo sapiens
  misc_RNA (1)...(19): siRNA sense strand
caaauugccucuuuaaugc

SEQ ID NO: 368757 - RNA, 19 nt, Homo sapiens
  misc_RNA (1)...(19): siRNA sense strand
gcgauaaucuucuuagagu

SEQ ID NO: 368758 - RNA, 19 nt, Homo sapiens
  misc_RNA (1)...(19): siRNA sense strand
gaaaugggccacaacuuug

SEQ ID NO: 368759 - RNA, 19 nt, Homo sapiens
  misc_RNA (1)...(19): siRNA sense strand
ugaagugguuuauccuaua

SEQ ID NO: 368760 - RNA, 19 nt, Homo sapiens
  misc_RNA (1)...(19): siRNA sense strand
gcaccaggcuacacggaaa

SEQ ID NO: 368761 - RNA, 19 nt, Homo sapiens
  misc_RNA (1)...(19): siRNA sense strand
ggaacaauuugaaacugaa

SEQ ID NO: 368762 - RNA, 19 nt, Homo sapiens
  misc_RNA (1)...(19): siRNA sense strand
ccugaaauguguaauggua

SEQ ID NO: 368763 - RNA, 19 nt, Homo sapiens
  misc_RNA (1)...(19): siRNA sense strand
gaaucaagaugagaucaga

SEQ ID NO: 368764 - RNA, 19 nt, Homo sapiens
  misc_RNA (1)...(19): siRNA sense strand
ugaaaugggccacaacuuu

SEQ ID NO: 368765 - RNA, 19 nt, Homo sapiens
  misc_RNA (1)...(19): siRNA sense strand
gcccacaaauuauggauga

SEQ ID NO: 368766 - RNA, 19 nt, Homo sapiens
  misc_RNA (1)...(19): siRNA sense strand
gcaaguguccuucuacaau

SEQ ID NO: 368767 - RNA, 19 nt, Homo sapiens
  misc_RNA (1)...(19): siRNA sense strand
ucaaauugccucuuuaaug

SEQ ID NO: 368768 - RNA, 19 nt, Homo sapiens
  misc_RNA (1)...(19): siRNA sense strand
gacaauggcacaugaaaug

SEQ ID NO: 368769 - RNA, 19 nt, Homo sapiens
  misc_RNA (1)...(19): siRNA sense strand
guaccaauauuugcuguga

SEQ ID NO: 368770 - RNA, 19 nt, Homo sapiens
  misc_RNA (1)...(19): siRNA sense strand
caacaggaacaauuugaaa

SEQ ID NO: 368771 - RNA, 19 nt, Homo sapiens
  misc_RNA (1)...(19): siRNA sense strand
ggauaauggugaguuuaaa

SEQ ID NO: 368772 - RNA, 19 nt, Homo sapiens
  misc_RNA (1)...(19): siRNA sense strand
ccacagcgauaaucuucuu

SEQ ID NO: 368773 - RNA, 19 nt, Homo sapiens
  misc_RNA (1)...(19): siRNA sense strand
ggagaggacugugauugug

SEQ ID NO: 368774 - RNA, 19 nt, Homo sapiens
  misc_RNA (1)...(19): siRNA sense strand
ucucagcuaugacaaguuu

SEQ ID NO: 368775 - RNA, 19 nt, Homo sapiens
  misc_RNA (1)...(19): siRNA sense strand
agaagaaagcgucaugaua

SEQ ID NO: 368776 - RNA, 19 nt, Homo sapiens
  misc_RNA (1)...(19): siRNA sense strand
gauaaucuucuuagaguug

SEQ ID NO: 368777 - RNA, 19 nt, Homo sapiens
  misc_RNA (1)...(19): siRNA sense strand
ggucuugcauuuaugucua

SEQ ID NO: 368778 - RNA, 19 nt, Homo sapiens
  misc_RNA (1)...(19): siRNA sense strand
caugcacucuucaaguaua

SEQ ID NO: 368779 - RNA, 19 nt, Homo sapiens
  misc_RNA (1)...(19): siRNA sense strand
guaauuguccugaugauag

SEQ ID NO: 368780 - RNA, 19 nt, Homo sapiens
  misc_RNA (1)...(19): siRNA sense strand
gcuaagacauguaaaauca

SEQ ID NO: 368781 - RNA, 19 nt, Homo sapiens
  misc_RNA (1)...(19): siRNA sense strand
ugaggaauguaccaauauu

SEQ ID NO: 368782 - RNA, 19 nt, Homo sapiens
  misc_RNA (1)...(19): siRNA sense strand
cgacuauucuugcaagugu

SEQ ID NO: 368783 - RNA, 19 nt, Homo sapiens
  misc_RNA (1)...(19): siRNA sense strand
gacugugggucuugcauuu

SEQ ID NO: 368784 - RNA, 19 nt, Homo sapiens
  misc_RNA (1)...(19): siRNA sense strand
aagaaagcgucaugauauu

SEQ ID NO: 368785 - RNA, 19 nt, Homo sapiens
  misc_RNA (1)...(19): siRNA sense strand
gaacaugagaaauacauag

SEQ ID NO: 368786 - RNA, 19 nt, Homo sapiens
  misc_RNA (1)...(19): siRNA sense strand
ccaaagagccagagcaaca

SEQ ID NO: 368787 - RNA, 19 nt, Homo sapiens
  misc_RNA (1)...(19): siRNA sense strand
ucugaggaauguaccaaua

SEQ ID NO: 368788 - RNA, 19 nt, Homo sapiens
  misc_RNA (1)...(19): siRNA sense strand
uaucauauccacuccaauu

SEQ ID NO: 368789 - RNA, 19 nt, Homo sapiens
  misc_RNA (1)...(19): siRNA sense strand
caauaugugugauggacaa

SEQ ID NO: 368790 - RNA, 19 nt, Homo sapiens
  misc_RNA (1)...(19): siRNA sense strand
ggccuuaguugguauggaa

SEQ ID NO: 368791 - RNA, 19 nt, Homo sapiens
  misc_RNA (1)...(19): siRNA sense strand
ucagaaagaggguauuuga

SEQ ID NO: 368792 - RNA, 19 nt, Homo sapiens
  misc_RNA (1)...(19): siRNA sense strand
gaucagaaagaggguauuu

SEQ ID NO: 368793 - RNA, 19 nt, Homo sapiens
  misc_RNA (1)...(19): siRNA sense strand
ggacugacaaggauaagau

SEQ ID NO: 368794 - RNA, 19 nt, Homo sapiens
  misc_RNA (1)...(19): siRNA sense strand
ccacaagcccacaaauuau

SEQ ID NO: 368795 - RNA, 19 nt, Homo sapiens
  misc_RNA (1)...(19): siRNA sense strand
cgaccugccugaaaugugu

SEQ ID NO: 368796 - RNA, 19 nt, Homo sapiens
  misc_RNA (1)...(19): siRNA sense strand
ggccacaacuuuggaaugu

SEQ ID NO: 368797 - RNA, 19 nt, Homo sapiens
  misc_RNA (1)...(19): siRNA sense strand
ugagauggcuaauuauguc

SEQ ID NO: 368798 - RNA, 19 nt, Homo sapiens
  misc_RNA (1)...(19): siRNA sense strand
acaaugagaaucaagauga

SEQ ID NO: 368799 - RNA, 19 nt, Homo sapiens
  misc_RNA (1)...(19): siRNA sense strand
gcuacacggaaacauauua

SEQ ID NO: 368800 - RNA, 19 nt, Homo sapiens
  misc_RNA (1)...(19): siRNA sense strand
agaaagaggguauuugaga

SEQ ID NO: 368801 - RNA, 19 nt, Homo sapiens
  misc_RNA (1)...(19): siRNA sense strand
accacaagcccacaaauua

SEQ ID NO: 368802 - RNA, 19 nt, Homo sapiens
  misc_RNA (1)...(19): siRNA sense strand
gaggaauguaccaauauuu

SEQ ID NO: 368803 - RNA, 19 nt, Homo sapiens
  misc_RNA (1)...(19): siRNA sense strand
cauauccacuccaauuugu

SEQ ID NO: 368804 - RNA, 19 nt, Homo sapiens
  misc_RNA (1)...(19): siRNA sense strand
guauggaaaucuggacuga

SEQ ID NO: 368805 - RNA, 19 nt, Homo sapiens
  misc_RNA (1)...(19): siRNA sense strand
caagaugagaucagaaaga

SEQ ID NO: 368806 - RNA, 19 nt, Homo sapiens
  misc_RNA (1)...(19): siRNA sense strand
gcaacaggaacaauuugaa

SEQ ID NO: 368807 - RNA, 19 nt, Homo sapiens
  misc_RNA (1)...(19): siRNA sense strand
gcagccgucucagcuauga

SEQ ID NO: 368808 - RNA, 19 nt, Homo sapiens
  misc_RNA (1)...(19): siRNA sense strand
gucaugauauugcucaguu

SEQ ID NO: 368809 - RNA, 19 nt, Homo sapiens
  misc_RNA (1)...(19): siRNA sense strand
ccaccaaacuaguaaaauu

SEQ ID NO: 368810 - RNA, 19 nt, Homo sapiens
  misc_RNA (1)...(19): siRNA sense strand
cacaaauuauggaugauug

SEQ ID NO: 368811 - RNA, 19 nt, Homo sapiens
  misc_RNA (1)...(19): siRNA sense strand
ggaacaugagaaauacaua

SEQ ID NO: 368812 - RNA, 19 nt, Homo sapiens
  misc_RNA (1)...(19): siRNA sense strand
uaauuguccugaugauaga

SEQ ID NO: 368813 - RNA, 19 nt, Homo sapiens
  misc_RNA (1)...(19): siRNA sense strand
ugguaaaucugguaauugu

SEQ ID NO: 368814 - RNA, 19 nt, Homo sapiens
  misc_RNA (1)...(19): siRNA sense strand
ccuccucucuguugcagua

SEQ ID NO: 368815 - RNA, 19 nt, Homo sapiens
  misc_RNA (1)...(19): siRNA sense strand
ugacaaggauaagauaaag

SEQ ID NO: 368816 - RNA, 19 nt, Homo sapiens
  misc_RNA (1)...(19): siRNA sense strand
gcuagcaucagcacaugua

SEQ ID NO: 368817 - RNA, 19 nt, Homo sapiens
  misc_RNA (1)...(19): siRNA sense strand
gaagggccacugcuugaug

SEQ ID NO: 368818 - RNA, 19 nt, Homo sapiens
  misc_RNA (1)...(19): siRNA sense strand
uuaggagaauguugugaaa

SEQ ID NO: 368819 - RNA, 19 nt, Homo sapiens
  misc_RNA (1)...(19): siRNA sense strand
ggacaauggcacaugaaau

SEQ ID NO: 368820 - RNA, 19 nt, Homo sapiens
  misc_RNA (1)...(19): siRNA sense strand
cauguggccuuaguuggua

SEQ ID NO: 368821 - RNA, 19 nt, Homo sapiens
  misc_RNA (1)...(19): siRNA sense strand
agcaugcacucuucaagua

SEQ ID NO: 368822 - RNA, 19 nt, Homo sapiens
  misc_RNA (1)...(19): siRNA sense strand
uugcagugcuuuauuugaa

SEQ ID NO: 368823 - RNA, 19 nt, Homo sapiens
  misc_RNA (1)...(19): siRNA sense strand
acaauguguucuccuuauu

SEQ ID NO: 368824 - RNA, 19 nt, Homo sapiens
  misc_RNA (1)...(19): siRNA sense strand
ucaaguauaacccugauga

SEQ ID NO: 368825 - RNA, 19 nt, Homo sapiens
  misc_RNA (1)...(19): siRNA sense strand
ggaaaggagaucaccacaa

SEQ ID NO: 368826 - RNA, 19 nt, Homo sapiens
  misc_RNA (1)...(19): siRNA sense strand
ugggauggaugguguguug

SEQ ID NO: 368827 - RNA, 19 nt, Homo sapiens
  misc_RNA (1)...(19): siRNA sense strand
gggaagggccacugcuuga

SEQ ID NO: 368828 - RNA, 19 nt, Homo sapiens
  misc_RNA (1)...(19): siRNA sense strand
ucaugauauugcucaguua

SEQ ID NO: 368829 - RNA, 19 nt, Homo sapiens
  misc_RNA (1)...(19): siRNA sense strand
cagggacaauggcacauga

SEQ ID NO: 368830 - RNA, 19 nt, Homo sapiens
  misc_RNA (1)...(19): siRNA sense strand
uacaauguguucuccuuau

SEQ ID NO: 368831 - RNA, 19 nt, Homo sapiens
  misc_RNA (1)...(19): siRNA sense strand
gaauguuucaugacgacua

SEQ ID NO: 368832 - RNA, 19 nt, Homo sapiens
  misc_RNA (1)...(19): siRNA sense strand
gaccacagcgauaaucuuc

SEQ ID NO: 368833 - RNA, 19 nt, Homo sapiens
  misc_RNA (1)...(19): siRNA sense strand
gagcaacaggaacaauuug

SEQ ID NO: 368834 - RNA, 19 nt, Homo sapiens
  misc_RNA (1)...(19): siRNA sense strand
aggaacaauuugaaacuga

SEQ ID NO: 368835 - RNA, 19 nt, Homo sapiens
  misc_RNA (1)...(19): siRNA sense strand
agaaguaugaagugguuua

SEQ ID NO: 368836 - RNA, 19 nt, Homo sapiens
  misc_RNA (1)...(19): siRNA sense strand
caaggucuccugccaguca

SEQ ID NO: 368837 - RNA, 19 nt, Homo sapiens
  misc_RNA (1)...(19): siRNA sense strand
ugauauugcucaguuaauc

SEQ ID NO: 368838 - RNA, 19 nt, Homo sapiens
  misc_RNA (1)...(19): siRNA sense strand
gagcaugcacucuucaagu

SEQ ID NO: 368839 - RNA, 19 nt, Homo sapiens
  misc_RNA (1)...(19): siRNA sense strand
aauauuugcugugaugcua

SEQ ID NO: 368840 - RNA, 19 nt, Homo sapiens
  misc_RNA (1)...(19): siRNA sense strand
ggaaaugggagaggacugu

SEQ ID NO: 368841 - RNA, 19 nt, Homo sapiens
  misc_RNA (1)...(19): siRNA sense strand
cagcgauaaucuucuuaga

SEQ ID NO: 368842 - RNA, 19 nt, Homo sapiens
  misc_RNA (1)...(19): siRNA sense strand
guucaggaccacagcgaua

SEQ ID NO: 368843 - RNA, 19 nt, Homo sapiens
  misc_RNA (1)...(19): siRNA sense strand
guuaaucacagcaacagaa

SEQ ID NO: 368844 - RNA, 19 nt, Homo sapiens
  misc_RNA (1)...(19): siRNA sense strand
aaagguacaaugagaauca

SEQ ID NO: 368845 - RNA, 19 nt, Homo sapiens
  misc_RNA (1)...(19): siRNA sense strand
gguaauuguccugaugaua

SEQ ID NO: 368846 - RNA, 19 nt, Homo sapiens
  misc_RNA (1)...(19): siRNA sense strand
guaaugguaaaucugguaa

SEQ ID NO: 368847 - RNA, 19 nt, Homo sapiens
  misc_RNA (1)...(19): siRNA sense strand
caauacucauguggccuua

SEQ ID NO: 368848 - RNA, 19 nt, Homo sapiens
  misc_RNA (1)...(19): siRNA sense strand
gcacugagcuucuauauac

SEQ ID NO: 368849 - RNA, 19 nt, Homo sapiens
  misc_RNA (1)...(19): siRNA sense strand
gaagaaagcgucaugauau

SEQ ID NO: 368850 - RNA, 19 nt, Homo sapiens
  misc_RNA (1)...(19): siRNA sense strand
gaaaggagaucaccacaag

SEQ ID NO: 368851 - RNA, 19 nt, Homo sapiens
  misc_RNA (1)...(19): siRNA sense strand
gaagaaguaugaagugguu

SEQ ID NO: 368852 - RNA, 19 nt, Homo sapiens
  misc_RNA (1)...(19): siRNA sense strand
gaugauagauuccaaguca

SEQ ID NO: 368853 - RNA, 19 nt, Homo sapiens
  misc_RNA (1)...(19): siRNA sense strand
caaguguccuucuacaaua

SEQ ID NO: 368854 - RNA, 19 nt, Homo sapiens
  misc_RNA (1)...(19): siRNA sense strand
gaaagaggguauuugagau

SEQ ID NO: 368855 - RNA, 19 nt, Homo sapiens
  misc_RNA (1)...(19): siRNA sense strand
ccacaacuuuggaauguuu

SEQ ID NO: 368856 - RNA, 19 nt, Homo sapiens
  misc_RNA (1)...(19): siRNA sense strand
caaauugccucuuuaaugc

SEQ ID NO: 368857 - RNA, 19 nt, Homo sapiens
  misc_RNA (1)...(19): siRNA sense strand
gcgauaaucuucuuagagu

SEQ ID NO: 368858 - RNA, 19 nt, Homo sapiens
  misc_RNA (1)...(19): siRNA sense strand
gaaaugggccacaacuuug

SEQ ID NO: 368859 - RNA, 19 nt, Homo sapiens
  misc_RNA (1)...(19): siRNA sense strand
ugaagugguuuauccuaua

SEQ ID NO: 368860 - RNA, 19 nt, Homo sapiens
  misc_RNA (1)...(19): siRNA sense strand
gcaccaggcuacacggaaa

SEQ ID NO: 368861 - RNA, 19 nt, Homo sapiens
  misc_RNA (1)...(19): siRNA sense strand
ggaacaauuugaaacugaa

SEQ ID NO: 368862 - RNA, 19 nt, Homo sapiens
  misc_RNA (1)...(19): siRNA sense strand
ccugaaauguguaauggua

SEQ ID NO: 368863 - RNA, 19 nt, Homo sapiens
  misc_RNA (1)...(19): siRNA sense strand
gaaucaagaugagaucaga

SEQ ID NO: 368864 - RNA, 19 nt, Homo sapiens
  misc_RNA (1)...(19): siRNA sense strand
ugaaaugggccacaacuuu

SEQ ID NO: 368865 - RNA, 19 nt, Homo sapiens
  misc_RNA (1)...(19): siRNA sense strand
gcccacaaauuauggauga

SEQ ID NO: 368866 - RNA, 19 nt, Homo sapiens
  misc_RNA (1)...(19): siRNA sense strand
gcaaguguccuucuacaau

SEQ ID NO: 368867 - RNA, 19 nt, Homo sapiens
  misc_RNA (1)...(19): siRNA sense strand
ucaaauugccucuuuaaug

SEQ ID NO: 368868 - RNA, 19 nt, Homo sapiens
  misc_RNA (1)...(19): siRNA sense strand
gacaauggcacaugaaaug

SEQ ID NO: 368869 - RNA, 19 nt, Homo sapiens
  misc_RNA (1)...(19): siRNA sense strand
guaccaauauuugcuguga

SEQ ID NO: 368870 - RNA, 19 nt, Homo sapiens
  misc_RNA (1)...(19): siRNA sense strand
caacaggaacaauuugaaa

SEQ ID NO: 368871 - RNA, 19 nt, Homo sapiens
  misc_RNA (1)...(19): siRNA sense strand
ggauaauggugaguuuaaa

SEQ ID NO: 368872 - RNA, 19 nt, Homo sapiens
  misc_RNA (1)...(19): siRNA sense strand
ccacagcgauaaucuucuu

SEQ ID NO: 368873 - RNA, 19 nt, Homo sapiens
  misc_RNA (1)...(19): siRNA sense strand
ggagaggacugugauugug

SEQ ID NO: 368874 - RNA, 19 nt, Homo sapiens
  misc_RNA (1)...(19): siRNA sense strand
ucucagcuaugacaaguuu

SEQ ID NO: 368875 - RNA, 19 nt, Homo sapiens
  misc_RNA (1)...(19): siRNA sense strand
agaagaaagcgucaugaua

SEQ ID NO: 368876 - RNA, 19 nt, Homo sapiens
  misc_RNA (1)...(19): siRNA sense strand
gauaaucuucuuagaguug

SEQ ID NO: 368877 - RNA, 19 nt, Homo sapiens
  misc_RNA (1)...(19): siRNA sense strand
ggucuugcauuuaugucua

SEQ ID NO: 368878 - RNA, 19 nt, Homo sapiens
  misc_RNA (1)...(19): siRNA sense strand
caugcacucuucaaguaua

SEQ ID NO: 368879 - RNA, 19 nt, Homo sapiens
  misc_RNA (1)...(19): siRNA sense strand
guaauuguccugaugauag

SEQ ID NO: 368880 - RNA, 19 nt, Homo sapiens
  misc_RNA (1)...(19): siRNA sense strand
gcuaagacauguaaaauca

SEQ ID NO: 368881 - RNA, 19 nt, Homo sapiens
  misc_RNA (1)...(19): siRNA sense strand
ugaggaauguaccaauauu

SEQ ID NO: 368882 - RNA, 19 nt, Homo sapiens
  misc_RNA (1)...(19): siRNA sense strand
cgacuauucuugcaagugu

SEQ ID NO: 368883 - RNA, 19 nt, Homo sapiens
  misc_RNA (1)...(19): siRNA sense strand
gacugugggucuugcauuu

SEQ ID NO: 368884 - RNA, 19 nt, Homo sapiens
  misc_RNA (1)...(19): siRNA sense strand
aagaaagcgucaugauauu

SEQ ID NO: 368885 - RNA, 19 nt, Homo sapiens
  misc_RNA (1)...(19): siRNA sense strand
gaacaugagaaauacauag

SEQ ID NO: 368886 - RNA, 19 nt, Homo sapiens
  misc_RNA (1)...(19): siRNA sense strand
ccaaagagccagagcaaca

SEQ ID NO: 368887 - RNA, 19 nt, Homo sapiens
  misc_RNA (1)...(19): siRNA sense strand
ucugaggaauguaccaaua

SEQ ID NO: 368888 - RNA, 19 nt, Homo sapiens
  misc_RNA (1)...(19): siRNA sense strand
uaucauauccacuccaauu

SEQ ID NO: 368889 - RNA, 19 nt, Homo sapiens
  misc_RNA (1)...(19): siRNA sense strand
caauaugugugauggacaa

SEQ ID NO: 368890 - RNA, 19 nt, Homo sapiens
  misc_RNA (1)...(19): siRNA sense strand
ggccuuaguugguauggaa

SEQ ID NO: 368891 - RNA, 19 nt, Homo sapiens
  misc_RNA (1)...(19): siRNA sense strand
ucagaaagaggguauuuga

SEQ ID NO: 368892 - RNA, 19 nt, Homo sapiens
  misc_RNA (1)...(19): siRNA sense strand
gaucagaaagaggguauuu

SEQ ID NO: 368893 - RNA, 19 nt, Homo sapiens
  misc_RNA (1)...(19): siRNA sense strand
ggacugacaaggauaagau

SEQ ID NO: 368894 - RNA, 19 nt, Homo sapiens
  misc_RNA (1)...(19): siRNA sense strand
ccacaagcccacaaauuau

SEQ ID NO: 368895 - RNA, 19 nt, Homo sapiens
  misc_RNA (1)...(19): siRNA sense strand
cgaccugccugaaaugugu

SEQ ID NO: 368896 - RNA, 19 nt, Homo sapiens
  misc_RNA (1)...(19): siRNA sense strand
ggccacaacuuuggaaugu

SEQ ID NO: 368897 - RNA, 19 nt, Homo sapiens
  misc_RNA (1)...(19): siRNA sense strand
ugagauggcuaauuauguc

SEQ ID NO: 368898 - RNA, 19 nt, Homo sapiens
  misc_RNA (1)...(19): siRNA sense strand
acaaugagaaucaagauga

SEQ ID NO: 368899 - RNA, 19 nt, Homo sapiens
  misc_RNA (1)...(19): siRNA sense strand
gcuacacggaaacauauua

SEQ ID NO: 368900 - RNA, 19 nt, Homo sapiens
  misc_RNA (1)...(19): siRNA sense strand
agaaagaggguauuugaga

SEQ ID NO: 368901 - RNA, 19 nt, Homo sapiens
  misc_RNA (1)...(19): siRNA sense strand
accacaagcccacaaauua

SEQ ID NO: 368902 - RNA, 19 nt, Homo sapiens
  misc_RNA (1)...(19): siRNA sense strand
gaggaauguaccaauauuu

SEQ ID NO: 368903 - RNA, 19 nt, Homo sapiens
  misc_RNA (1)...(19): siRNA sense strand
cauauccacuccaauuugu

SEQ ID NO: 368904 - RNA, 19 nt, Homo sapiens
  misc_RNA (1)...(19): siRNA sense strand
guauggaaaucuggacuga

SEQ ID NO: 368905 - RNA, 19 nt, Homo sapiens
  misc_RNA (1)...(19): siRNA sense strand
caagaugagaucagaaaga

SEQ ID NO: 368906 - RNA, 19 nt, Homo sapiens
  misc_RNA (1)...(19): siRNA sense strand
gcaacaggaacaauuugaa

SEQ ID NO: 368907 - RNA, 19 nt, Homo sapiens
  misc_RNA (1)...(19): siRNA sense strand
gcagccgucucagcuauga

SEQ ID NO: 368908 - RNA, 19 nt, Homo sapiens
  misc_RNA (1)...(19): siRNA sense strand
gucaugauauugcucaguu

SEQ ID NO: 368909 - RNA, 19 nt, Homo sapiens
  misc_RNA (1)...(19): siRNA sense strand
ccaccaaacuaguaaaauu

SEQ ID NO: 368910 - RNA, 19 nt, Homo sapiens
  misc_RNA (1)...(19): siRNA sense strand
cacaaauuauggaugauug

SEQ ID NO: 368911 - RNA, 19 nt, Homo sapiens
  misc_RNA (1)...(19): siRNA sense strand
ggaacaugagaaauacaua

SEQ ID NO: 368912 - RNA, 19 nt, Homo sapiens
  misc_RNA (1)...(19): siRNA sense strand
uaauuguccugaugauaga

SEQ ID NO: 368913 - RNA, 19 nt, Homo sapiens
  misc_RNA (1)...(19): siRNA sense strand
ugguaaaucugguaauugu

SEQ ID NO: 368914 - RNA, 19 nt, Homo sapiens
  misc_RNA (1)...(19): siRNA sense strand
ccuccucucuguugcagua

SEQ ID NO: 368915 - RNA, 19 nt, Homo sapiens
  misc_RNA (1)...(19): siRNA sense strand
ugacaaggauaagauaaag

SEQ ID NO: 368916 - RNA, 19 nt, Homo sapiens
  misc_RNA (1)...(19): siRNA sense strand
gcuagcaucagcacaugua

SEQ ID NO: 368917 - RNA, 19 nt, Homo sapiens
  misc_RNA (1)...(19): siRNA sense strand
gaagggccacugcuugaug

SEQ ID NO: 368918 - RNA, 19 nt, Homo sapiens
  misc_RNA (1)...(19): siRNA sense strand
uuaggagaauguugugaaa

SEQ ID NO: 368919 - RNA, 19 nt, Homo sapiens
  misc_RNA (1)...(19): siRNA sense strand
ggacaauggcacaugaaau

SEQ ID NO: 368920 - RNA, 19 nt, Homo sapiens
  misc_RNA (1)...(19): siRNA sense strand
cauguggccuuaguuggua

SEQ ID NO: 368921 - RNA, 19 nt, Homo sapiens
  misc_RNA (1)...(19): siRNA sense strand
agcaugcacucuucaagua

SEQ ID NO: 368922 - RNA, 19 nt, Homo sapiens
  misc_RNA (1)...(19): siRNA sense strand
uugcagugcuuuauuugaa

SEQ ID NO: 368923 - RNA, 19 nt, Homo sapiens
  misc_RNA (1)...(19): siRNA sense strand
acaauguguucuccuuauu

SEQ ID NO: 368924 - RNA, 19 nt, Homo sapiens
  misc_RNA (1)...(19): siRNA sense strand
ucaaguauaacccugauga

SEQ ID NO: 368925 - RNA, 19 nt, Homo sapiens
  misc_RNA (1)...(19): siRNA sense strand
ggaaaggagaucaccacaa

SEQ ID NO: 368926 - RNA, 19 nt, Homo sapiens
  misc_RNA (1)...(19): siRNA sense strand
ugggauggaugguguguug

SEQ ID NO: 368927 - RNA, 19 nt, Homo sapiens
  misc_RNA (1)...(19): siRNA sense strand
gggaagggccacugcuuga

SEQ ID NO: 368928 - RNA, 19 nt, Homo sapiens
  misc_RNA (1)...(19): siRNA sense strand
ucaugauauugcucaguua

SEQ ID NO: 368929 - RNA, 19 nt, Homo sapiens
  misc_RNA (1)...(19): siRNA sense strand
cagggacaauggcacauga

SEQ ID NO: 368930 - RNA, 19 nt, Homo sapiens
  misc_RNA (1)...(19): siRNA sense strand
uacaauguguucuccuuau

SEQ ID NO: 368931 - RNA, 19 nt, Homo sapiens
  misc_RNA (1)...(19): siRNA sense strand
gaauguuucaugacgacua

SEQ ID NO: 368932 - RNA, 19 nt, Homo sapiens
  misc_RNA (1)...(19): siRNA sense strand
gaccacagcgauaaucuuc

SEQ ID NO: 368933 - RNA, 19 nt, Homo sapiens
  misc_RNA (1)...(19): siRNA sense strand
gagcaacaggaacaauuug

SEQ ID NO: 368934 - RNA, 19 nt, Homo sapiens
  misc_RNA (1)...(19): siRNA sense strand
aggaacaauuugaaacuga

SEQ ID NO: 368935 - RNA, 19 nt, Homo sapiens
  misc_RNA (1)...(19): siRNA sense strand
agaaguaugaagugguuua

SEQ ID NO: 368936 - RNA, 19 nt, Homo sapiens
  misc_RNA (1)...(19): siRNA sense strand
caaggucuccugccaguca

SEQ ID NO: 368937 - RNA, 19 nt, Homo sapiens
  misc_RNA (1)...(19): siRNA sense strand
ugauauugcucaguuaauc

SEQ ID NO: 368938 - RNA, 19 nt, Homo sapiens
  misc_RNA (1)...(19): siRNA sense strand
gagcaugcacucuucaagu

SEQ ID NO: 368939 - RNA, 19 nt, Homo sapiens
  misc_RNA (1)...(19): siRNA sense strand
aauauuugcugugaugcua

SEQ ID NO: 368940 - RNA, 19 nt, Homo sapiens
  misc_RNA (1)...(19): siRNA sense strand
ggaaaugggagaggacugu

SEQ ID NO: 368941 - RNA, 19 nt, Homo sapiens
  misc_RNA (1)...(19): siRNA sense strand
cagcgauaaucuucuuaga

SEQ ID NO: 368942 - RNA, 19 nt, Homo sapiens
  misc_RNA (1)...(19): siRNA sense strand
guucaggaccacagcgaua

SEQ ID NO: 368943 - RNA, 19 nt, Homo sapiens
  misc_RNA (1)...(19): siRNA sense strand
guuaaucacagcaacagaa

SEQ ID NO: 368944 - RNA, 19 nt, Homo sapiens
  misc_RNA (1)...(19): siRNA sense strand
aaagguacaaugagaauca

SEQ ID NO: 368945 - RNA, 19 nt, Homo sapiens
  misc_RNA (1)...(19): siRNA sense strand
gguaauuguccugaugaua

SEQ ID NO: 368946 - RNA, 19 nt, Homo sapiens
  misc_RNA (1)...(19): siRNA sense strand
guaaugguaaaucugguaa

SEQ ID NO: 368947 - RNA, 19 nt, Homo sapiens
  misc_RNA (1)...(19): siRNA sense strand
caauacucauguggccuua

SEQ ID NO: 368948 - RNA, 19 nt, Homo sapiens
  misc_RNA (1)...(19): siRNA sense strand
gcacugagcuucuauauac

SEQ ID NO: 368949 - RNA, 19 nt, Homo sapiens
  misc_RNA (1)...(19): siRNA sense strand
gaagaaagcgucaugauau

SEQ ID NO: 368950 - RNA, 19 nt, Homo sapiens
  misc_RNA (1)...(19): siRNA sense strand
gaaaggagaucaccacaag

SEQ ID NO: 368951 - RNA, 19 nt, Homo sapiens
  misc_RNA (1)...(19): siRNA sense strand
gaagaaguaugaagugguu

SEQ ID NO: 368952 - RNA, 19 nt, Homo sapiens
  misc_RNA (1)...(19): siRNA sense strand
gaugauagauuccaaguca

SEQ ID NO: 368953 - RNA, 19 nt, Homo sapiens
  misc_RNA (1)...(19): siRNA sense strand
caaguguccuucuacaaua

SEQ ID NO: 368954 - RNA, 19 nt, Homo sapiens
  misc_RNA (1)...(19): siRNA sense strand
gaaagaggguauuugagau

SEQ ID NO: 368955 - RNA, 19 nt, Homo sapiens
  misc_RNA (1)...(19): siRNA sense strand
ccacaacuuuggaauguuu

SEQ ID NO: 368956 - RNA, 19 nt, Homo sapiens
  misc_RNA (1)...(19): siRNA sense strand
caaauugccucuuuaaugc

SEQ ID NO: 368957 - RNA, 19 nt, Homo sapiens
  misc_RNA (1)...(19): siRNA sense strand
gcgauaaucuucuuagagu

SEQ ID NO: 368958 - RNA, 19 nt, Homo sapiens
  misc_RNA (1)...(19): siRNA sense strand
gaaaugggccacaacuuug

SEQ ID NO: 368959 - RNA, 19 nt, Homo sapiens
  misc_RNA (1)...(19): siRNA sense strand
ugaagugguuuauccuaua

SEQ ID NO: 368960 - RNA, 19 nt, Homo sapiens
  misc_RNA (1)...(19): siRNA sense strand
gcaccaggcuacacggaaa

SEQ ID NO: 368961 - RNA, 19 nt, Homo sapiens
  misc_RNA (1)...(19): siRNA sense strand
ggaacaauuugaaacugaa

SEQ ID NO: 368962 - RNA, 19 nt, Homo sapiens
  misc_RNA (1)...(19): siRNA sense strand
ccugaaauguguaauggua

SEQ ID NO: 368963 - RNA, 19 nt, Homo sapiens
  misc_RNA (1)...(19): siRNA sense strand
gaaucaagaugagaucaga

SEQ ID NO: 368964 - RNA, 19 nt, Homo sapiens
  misc_RNA (1)...(19): siRNA sense strand
ugaaaugggccacaacuuu

SEQ ID NO: 368965 - RNA, 19 nt, Homo sapiens
  misc_RNA (1)...(19): siRNA sense strand
gcccacaaauuauggauga

SEQ ID NO: 368966 - RNA, 19 nt, Homo sapiens
  misc_RNA (1)...(19): siRNA sense strand
gcaaguguccuucuacaau

SEQ ID NO: 368967 - RNA, 19 nt, Homo sapiens
  misc_RNA (1)...(19): siRNA sense strand
ucaaauugccucuuuaaug

SEQ ID NO: 368968 - RNA, 19 nt, Homo sapiens
  misc_RNA (1)...(19): siRNA sense strand
gacaauggcacaugaaaug

SEQ ID NO: 368969 - RNA, 19 nt, Homo sapiens
  misc_RNA (1)...(19): siRNA sense strand
guaccaauauuugcuguga

SEQ ID NO: 368970 - RNA, 19 nt, Homo sapiens
  misc_RNA (1)...(19): siRNA sense strand
caacaggaacaauuugaaa

SEQ ID NO: 368971 - RNA, 19 nt, Homo sapiens
  misc_RNA (1)...(19): siRNA sense strand
ggauaauggugaguuuaaa

SEQ ID NO: 368972 - RNA, 19 nt, Homo sapiens
  misc_RNA (1)...(19): siRNA sense strand
ccacagcgauaaucuucuu

SEQ ID NO: 368973 - RNA, 19 nt, Homo sapiens
  misc_RNA (1)...(19): siRNA sense strand
ggagaggacugugauugug

SEQ ID NO: 368974 - RNA, 19 nt, Homo sapiens
  misc_RNA (1)...(19): siRNA sense strand
ucucagcuaugacaaguuu

SEQ ID NO: 368975 - RNA, 19 nt, Homo sapiens
  misc_RNA (1)...(19): siRNA sense strand
agaagaaagcgucaugaua

SEQ ID NO: 368976 - RNA, 19 nt, Homo sapiens
  misc_RNA (1)...(19): siRNA sense strand
gauaaucuucuuagaguug

SEQ ID NO: 368977 - RNA, 19 nt, Homo sapiens
  misc_RNA (1)...(19): siRNA sense strand
ggucuugcauuuaugucua

SEQ ID NO: 368978 - RNA, 19 nt, Homo sapiens
  misc_RNA (1)...(19): siRNA sense strand
caugcacucuucaaguaua

SEQ ID NO: 368979 - RNA, 19 nt, Homo sapiens
  misc_RNA (1)...(19): siRNA sense strand
guaauuguccugaugauag

SEQ ID NO: 368980 - RNA, 19 nt, Homo sapiens
  misc_RNA (1)...(19): siRNA sense strand
gcuaagacauguaaaauca

SEQ ID NO: 368981 - RNA, 19 nt, Homo sapiens
  misc_RNA (1)...(19): siRNA sense strand
ugaggaauguaccaauauu

SEQ ID NO: 368982 - RNA, 19 nt, Homo sapiens
  misc_RNA (1)...(19): siRNA sense strand
cgacuauucuugcaagugu

SEQ ID NO: 368983 - RNA, 19 nt, Homo sapiens
  misc_RNA (1)...(19): siRNA sense strand
gacugugggucuugcauuu

SEQ ID NO: 368984 - RNA, 19 nt, Homo sapiens
  misc_RNA (1)...(19): siRNA sense strand
aagaaagcgucaugauauu

SEQ ID NO: 368985 - RNA, 19 nt, Homo sapiens
  misc_RNA (1)...(19): siRNA sense strand
gaacaugagaaauacauag

SEQ ID NO: 368986 - RNA, 19 nt, Homo sapiens
  misc_RNA (1)...(19): siRNA sense strand
ccaaagagccagagcaaca

SEQ ID NO: 368987 - RNA, 19 nt, Homo sapiens
  misc_RNA (1)...(19): siRNA sense strand
ucugaggaauguaccaaua

SEQ ID NO: 368988 - RNA, 19 nt, Homo sapiens
  misc_RNA (1)...(19): siRNA sense strand
uaucauauccacuccaauu

SEQ ID NO: 368989 - RNA, 19 nt, Homo sapiens
  misc_RNA (1)...(19): siRNA sense strand
caauaugugugauggacaa

SEQ ID NO: 368990 - RNA, 19 nt, Homo sapiens
  misc_RNA (1)...(19): siRNA sense strand
ggccuuaguugguauggaa

SEQ ID NO: 368991 - RNA, 19 nt, Homo sapiens
  misc_RNA (1)...(19): siRNA sense strand
ucagaaagaggguauuuga

SEQ ID NO: 368992 - RNA, 19 nt, Homo sapiens
  misc_RNA (1)...(19): siRNA sense strand
gaucagaaagaggguauuu

SEQ ID NO: 368993 - RNA, 19 nt, Homo sapiens
  misc_RNA (1)...(19): siRNA sense strand
ggacugacaaggauaagau

SEQ ID NO: 368994 - RNA, 19 nt, Homo sapiens
  misc_RNA (1)...(19): siRNA sense strand
ccacaagcccacaaauuau

SEQ ID NO: 368995 - RNA, 19 nt, Homo sapiens
  misc_RNA (1)...(19): siRNA sense strand
cgaccugccugaaaugugu

SEQ ID NO: 368996 - RNA, 19 nt, Homo sapiens
  misc_RNA (1)...(19): siRNA sense strand
ggccacaacuuuggaaugu

SEQ ID NO: 368997 - RNA, 19 nt, Homo sapiens
  misc_RNA (1)...(19): siRNA sense strand
ugagauggcuaauuauguc

SEQ ID NO: 368998 - RNA, 19 nt, Homo sapiens
  misc_RNA (1)...(19): siRNA sense strand
acaaugagaaucaagauga

SEQ ID NO: 368999 - RNA, 19 nt, Homo sapiens
  misc_RNA (1)...(19): siRNA sense strand
gcuacacggaaacauauua

SEQ ID NO: 369000 - RNA, 19 nt, Homo sapiens
  misc_RNA (1)...(19): siRNA sense strand
agaaagaggguauuugaga

SEQ ID NO: 369001 - RNA, 19 nt, Homo sapiens
  misc_RNA (1)...(19): siRNA sense strand
accacaagcccacaaauua

SEQ ID NO: 369002 - RNA, 19 nt, Homo sapiens
  misc_RNA (1)...(19): siRNA sense strand
gaggaauguaccaauauuu

SEQ ID NO: 369003 - RNA, 19 nt, Homo sapiens
  misc_RNA (1)...(19): siRNA sense strand
cauauccacuccaauuugu

SEQ ID NO: 369004 - RNA, 19 nt, Homo sapiens
  misc_RNA (1)...(19): siRNA sense strand
guauggaaaucuggacuga

SEQ ID NO: 369005 - RNA, 19 nt, Homo sapiens
  misc_RNA (1)...(19): siRNA sense strand
caagaugagaucagaaaga

SEQ ID NO: 369006 - RNA, 19 nt, Homo sapiens
  misc_RNA (1)...(19): siRNA sense strand
gcaacaggaacaauuugaa

SEQ ID NO: 369007 - RNA, 19 nt, Homo sapiens
  misc_RNA (1)...(19): siRNA sense strand
gcagccgucucagcuauga

SEQ ID NO: 369008 - RNA, 19 nt, Homo sapiens
  misc_RNA (1)...(19): siRNA sense strand
gucaugauauugcucaguu

SEQ ID NO: 369009 - RNA, 19 nt, Homo sapiens
  misc_RNA (1)...(19): siRNA sense strand
ccaccaaacuaguaaaauu

SEQ ID NO: 369010 - RNA, 19 nt, Homo sapiens
  misc_RNA (1)...(19): siRNA sense strand
cacaaauuauggaugauug

SEQ ID NO: 369011 - RNA, 19 nt, Homo sapiens
  misc_RNA (1)...(19): siRNA sense strand
ggaacaugagaaauacaua

SEQ ID NO: 369012 - RNA, 19 nt, Homo sapiens
  misc_RNA (1)...(19): siRNA sense strand
uaauuguccugaugauaga

SEQ ID NO: 369013 - RNA, 19 nt, Homo sapiens
  misc_RNA (1)...(19): siRNA sense strand
ugguaaaucugguaauugu

SEQ ID NO: 369014 - RNA, 19 nt, Homo sapiens
  misc_RNA (1)...(19): siRNA sense strand
ccuccucucuguugcagua

SEQ ID NO: 369015 - RNA, 19 nt, Homo sapiens
  misc_RNA (1)...(19): siRNA sense strand
ugacaaggauaagauaaag

SEQ ID NO: 369016 - RNA, 19 nt, Homo sapiens
  misc_RNA (1)...(19): siRNA sense strand
gcuagcaucagcacaugua

SEQ ID NO: 369017 - RNA, 19 nt, Homo sapiens
  misc_RNA (1)...(19): siRNA sense strand
gaagggccacugcuugaug

SEQ ID NO: 369018 - RNA, 19 nt, Homo sapiens
  misc_RNA (1)...(19): siRNA sense strand
uuaggagaauguugugaaa

SEQ ID NO: 369019 - RNA, 19 nt, Homo sapiens
  misc_RNA (1)...(19): siRNA sense strand
ggacaauggcacaugaaau

SEQ ID NO: 369020 - RNA, 19 nt, Homo sapiens
  misc_RNA (1)...(19): siRNA sense strand
cauguggccuuaguuggua

SEQ ID NO: 369021 - RNA, 19 nt, Homo sapiens
  misc_RNA (1)...(19): siRNA sense strand
agcaugcacucuucaagua

SEQ ID NO: 369022 - RNA, 19 nt, Homo sapiens
  misc_RNA (1)...(19): siRNA sense strand
uugcagugcuuuauuugaa

SEQ ID NO: 369023 - RNA, 19 nt, Homo sapiens
  misc_RNA (1)...(19): siRNA sense strand
acaauguguucuccuuauu

SEQ ID NO: 369024 - RNA, 19 nt, Homo sapiens
  misc_RNA (1)...(19): siRNA sense strand
ucaaguauaacccugauga

SEQ ID NO: 369025 - RNA, 19 nt, Homo sapiens
  misc_RNA (1)...(19): siRNA sense strand
ggaaaggagaucaccacaa

SEQ ID NO: 369026 - RNA, 19 nt, Homo sapiens
  misc_RNA (1)...(19): siRNA sense strand
ugggauggaugguguguug

SEQ ID NO: 369027 - RNA, 19 nt, Homo sapiens
  misc_RNA (1)...(19): siRNA sense strand
gggaagggccacugcuuga

SEQ ID NO: 369028 - RNA, 19 nt, Homo sapiens
  misc_RNA (1)...(19): siRNA sense strand
ucaugauauugcucaguua

SEQ ID NO: 369029 - RNA, 19 nt, Homo sapiens
  misc_RNA (1)...(19): siRNA sense strand
cagggacaauggcacauga

SEQ ID NO: 369030 - RNA, 19 nt, Homo sapiens
  misc_RNA (1)...(19): siRNA sense strand
uacaauguguucuccuuau

SEQ ID NO: 369031 - RNA, 19 nt, Homo sapiens
  misc_RNA (1)...(19): siRNA sense strand
gaauguuucaugacgacua

SEQ ID NO: 369032 - RNA, 19 nt, Homo sapiens
  misc_RNA (1)...(19): siRNA sense strand
gaccacagcgauaaucuuc

SEQ ID NO: 369033 - RNA, 19 nt, Homo sapiens
  misc_RNA (1)...(19): siRNA sense strand
gagcaacaggaacaauuug

SEQ ID NO: 369034 - RNA, 19 nt, Homo sapiens
  misc_RNA (1)...(19): siRNA sense strand
aggaacaauuugaaacuga

SEQ ID NO: 369035 - RNA, 19 nt, Homo sapiens
  misc_RNA (1)...(19): siRNA sense strand
agaaguaugaagugguuua

SEQ ID NO: 369036 - RNA, 19 nt, Homo sapiens
  misc_RNA (1)...(19): siRNA sense strand
caaggucuccugccaguca

SEQ ID NO: 369037 - RNA, 19 nt, Homo sapiens
  misc_RNA (1)...(19): siRNA sense strand
ugauauugcucaguuaauc

SEQ ID NO: 369038 - RNA, 19 nt, Homo sapiens
  misc_RNA (1)...(19): siRNA sense strand
gagcaugcacucuucaagu

SEQ ID NO: 369039 - RNA, 19 nt, Homo sapiens
  misc_RNA (1)...(19): siRNA sense strand
aauauuugcugugaugcua

SEQ ID NO: 369040 - RNA, 19 nt, Homo sapiens
  misc_RNA (1)...(19): siRNA sense strand
ggaaaugggagaggacugu

SEQ ID NO: 369041 - RNA, 19 nt, Homo sapiens
  misc_RNA (1)...(19): siRNA sense strand
cagcgauaaucuucuuaga

SEQ ID NO: 369042 - RNA, 19 nt, Homo sapiens
  misc_RNA (1)...(19): siRNA sense strand
guucaggaccacagcgaua

SEQ ID NO: 369043 - RNA, 19 nt, Homo sapiens
  misc_RNA (1)...(19): siRNA sense strand
guuaaucacagcaacagaa

SEQ ID NO: 369044 - RNA, 19 nt, Homo sapiens
  misc_RNA (1)...(19): siRNA sense strand
aaagguacaaugagaauca

SEQ ID NO: 369045 - RNA, 19 nt, Homo sapiens
  misc_RNA (1)...(19): siRNA sense strand
gguaauuguccugaugaua

SEQ ID NO: 369046 - RNA, 19 nt, Homo sapiens
  misc_RNA (1)...(19): siRNA sense strand
guaaugguaaaucugguaa

SEQ ID NO: 369047 - RNA, 19 nt, Homo sapiens
  misc_RNA (1)...(19): siRNA sense strand
caauacucauguggccuua

SEQ ID NO: 369048 - RNA, 19 nt, Homo sapiens
  misc_RNA (1)...(19): siRNA sense strand
gaagauagaugaagagaau

SEQ ID NO: 369049 - RNA, 19 nt, Homo sapiens
  misc_RNA (1)...(19): siRNA sense strand
ucaaauaucugaccacaaa

SEQ ID NO: 369050 - RNA, 19 nt, Homo sapiens
  misc_RNA (1)...(19): siRNA sense strand
gaacaauucuccaaacuac

SEQ ID NO: 369051 - RNA, 19 nt, Homo sapiens
  misc_RNA (1)...(19): siRNA sense strand
caaugagccuucaaacaua

SEQ ID NO: 369052 - RNA, 19 nt, Homo sapiens
  misc_RNA (1)...(19): siRNA sense strand
gaaauucucccuuguaugu

SEQ ID NO: 369053 - RNA, 19 nt, Homo sapiens
  misc_RNA (1)...(19): siRNA sense strand
gagaauucauggagcaaua

SEQ ID NO: 369054 - RNA, 19 nt, Homo sapiens
  misc_RNA (1)...(19): siRNA sense strand
gaagagcgccgugugauuu

SEQ ID NO: 369055 - RNA, 19 nt, Homo sapiens
  misc_RNA (1)...(19): siRNA sense strand
aaagaugucuccucugauu

SEQ ID NO: 369056 - RNA, 19 nt, Homo sapiens
  misc_RNA (1)...(19): siRNA sense strand
ggcaauaacuccaccaaga

SEQ ID NO: 369057 - RNA, 19 nt, Homo sapiens
  misc_RNA (1)...(19): siRNA sense strand
gcaauaaagcgaagaguau

SEQ ID NO: 369058 - RNA, 19 nt, Homo sapiens
  misc_RNA (1)...(19): siRNA sense strand
ggacagugauuucaguaau

SEQ ID NO: 369059 - RNA, 19 nt, Homo sapiens
  misc_RNA (1)...(19): siRNA sense strand
ccaagacucuagacaacua

SEQ ID NO: 369060 - RNA, 19 nt, Homo sapiens
  misc_RNA (1)...(19): siRNA sense strand
acacucagcuaaguuauaa

SEQ ID NO: 369061 - RNA, 19 nt, Homo sapiens
  misc_RNA (1)...(19): siRNA sense strand
gagccgagcugaacaagca

SEQ ID NO: 369062 - RNA, 19 nt, Homo sapiens
  misc_RNA (1)...(19): siRNA sense strand
ggagacagcuaugguuuca

SEQ ID NO: 369063 - RNA, 19 nt, Homo sapiens
  misc_RNA (1)...(19): siRNA sense strand
ggauugcccucauuugaug

SEQ ID NO: 369064 - RNA, 19 nt, Homo sapiens
  misc_RNA (1)...(19): siRNA sense strand
auaaagaugucuccucuga

SEQ ID NO: 369065 - RNA, 19 nt, Homo sapiens
  misc_RNA (1)...(19): siRNA sense strand
gcaauaacuccaccaagaa

SEQ ID NO: 369066 - RNA, 19 nt, Homo sapiens
  misc_RNA (1)...(19): siRNA sense strand
agacagcuaugguuucauu

SEQ ID NO: 369067 - RNA, 19 nt, Homo sapiens
  misc_RNA (1)...(19): siRNA sense strand
aaacugacuuugagcugua

SEQ ID NO: 369068 - RNA, 19 nt, Homo sapiens
  misc_RNA (1)...(19): siRNA sense strand
aaacgaaacugacuuugag

SEQ ID NO: 369069 - RNA, 19 nt, Homo sapiens
  misc_RNA (1)...(19): siRNA sense strand
agaccuagauucaaacuca

SEQ ID NO: 369070 - RNA, 19 nt, Homo sapiens
  misc_RNA (1)...(19): siRNA sense strand
ccaacacucagcuaaguua

SEQ ID NO: 369071 - RNA, 19 nt, Homo sapiens
  misc_RNA (1)...(19): siRNA sense strand
caucaaagaagcccaggua

SEQ ID NO: 369072 - RNA, 19 nt, Homo sapiens
  misc_RNA (1)...(19): siRNA sense strand
ggcaguagauccucuucaa

SEQ ID NO: 369073 - RNA, 19 nt, Homo sapiens
  misc_RNA (1)...(19): siRNA sense strand
gacagugauuucaguaaug

SEQ ID NO: 369074 - RNA, 19 nt, Homo sapiens
  misc_RNA (1)...(19): siRNA sense strand
gcuaugguuucauuaccua

SEQ ID NO: 369075 - RNA, 19 nt, Homo sapiens
  misc_RNA (1)...(19): siRNA sense strand
ccaacaacuuuaucucuuc

SEQ ID NO: 369076 - RNA, 19 nt, Homo sapiens
  misc_RNA (1)...(19): siRNA sense strand
caaaggaugcgcucucguu

SEQ ID NO: 369077 - RNA, 19 nt, Homo sapiens
  misc_RNA (1)...(19): siRNA sense strand
ccaccaagagcaaguauga

SEQ ID NO: 369078 - RNA, 19 nt, Homo sapiens
  misc_RNA (1)...(19): siRNA sense strand
gaugugaacgacuuggaua

SEQ ID NO: 369079 - RNA, 19 nt, Homo sapiens
  misc_RNA (1)...(19): siRNA sense strand
caguaaaucugcgggauga

SEQ ID NO: 369080 - RNA, 19 nt, Homo sapiens
  misc_RNA (1)...(19): siRNA sense strand
ccgaaauucucccuuguau

SEQ ID NO: 369081 - RNA, 19 nt, Homo sapiens
  misc_RNA (1)...(19): siRNA sense strand
gaugaaagugauaaacuga

SEQ ID NO: 369082 - RNA, 19 nt, Homo sapiens
  misc_RNA (1)...(19): siRNA sense strand
cagcgaagaugaaagugau

SEQ ID NO: 369083 - RNA, 19 nt, Homo sapiens
  misc_RNA (1)...(19): siRNA sense strand
gaagacggauugcccucau

SEQ ID NO: 369084 - RNA, 19 nt, Homo sapiens
  misc_RNA (1)...(19): siRNA sense strand
gcccagaucuuccugaacu

SEQ ID NO: 369085 - RNA, 19 nt, Homo sapiens
  misc_RNA (1)...(19): siRNA sense strand
caaugugucuccuucuugu

SEQ ID NO: 369086 - RNA, 19 nt, Homo sapiens
  misc_RNA (1)...(19): siRNA sense strand
uggauggccuguuugauga

SEQ ID NO: 369087 - RNA, 19 nt, Homo sapiens
  misc_RNA (1)...(19): siRNA sense strand
cgagugugcugcucugguu

SEQ ID NO: 369088 - RNA, 19 nt, Homo sapiens
  misc_RNA (1)...(19): siRNA sense strand
cauaaagccaaccaagaua

SEQ ID NO: 369089 - RNA, 19 nt, Homo sapiens
  misc_RNA (1)...(19): siRNA sense strand
guacaacaaugagccuuca

SEQ ID NO: 369090 - RNA, 19 nt, Homo sapiens
  misc_RNA (1)...(19): siRNA sense strand
caauaacuccaccaagaaa

SEQ ID NO: 369091 - RNA, 19 nt, Homo sapiens
  misc_RNA (1)...(19): siRNA sense strand
ccaccacuccuccucauaa

SEQ ID NO: 369092 - RNA, 19 nt, Homo sapiens
  misc_RNA (1)...(19): siRNA sense strand
acaaugagccuucaaacau

SEQ ID NO: 369093 - RNA, 19 nt, Homo sapiens
  misc_RNA (1)...(19): siRNA sense strand
ccaaucaguacaacaauga

SEQ ID NO: 369094 - RNA, 19 nt, Homo sapiens
  misc_RNA (1)...(19): siRNA sense strand
gagcuucucaaauaucuga

SEQ ID NO: 369095 - RNA, 19 nt, Homo sapiens
  misc_RNA (1)...(19): siRNA sense strand
gaagaguauuugucaacag

SEQ ID NO: 369096 - RNA, 19 nt, Homo sapiens
  misc_RNA (1)...(19): siRNA sense strand
guaaugaacaauucuccaa

SEQ ID NO: 369097 - RNA, 19 nt, Homo sapiens
  misc_RNA (1)...(19): siRNA sense strand
augcagaccuagauucaaa

SEQ ID NO: 369098 - RNA, 19 nt, Homo sapiens
  misc_RNA (1)...(19): siRNA sense strand
uucauuaccuaccguuaua

SEQ ID NO: 369099 - RNA, 19 nt, Homo sapiens
  misc_RNA (1)...(19): siRNA sense strand
gcagugaccaaucagaaau

SEQ ID NO: 369100 - RNA, 19 nt, Homo sapiens
  misc_RNA (1)...(19): siRNA sense strand
gaaaauggauacacuuugc

SEQ ID NO: 369101 - RNA, 19 nt, Homo sapiens
  misc_RNA (1)...(19): siRNA sense strand
acagugauuucaguaauga

SEQ ID NO: 369102 - RNA, 19 nt, Homo sapiens
  misc_RNA (1)...(19): siRNA sense strand
caaccaagauaacccuuuu

SEQ ID NO: 369103 - RNA, 19 nt, Homo sapiens
  misc_RNA (1)...(19): siRNA sense strand
gaaugcaguggucucagua

SEQ ID NO: 369104 - RNA, 19 nt, Homo sapiens
  misc_RNA (1)...(19): siRNA sense strand
ugaacgacuuggauacaga

SEQ ID NO: 369105 - RNA, 19 nt, Homo sapiens
  misc_RNA (1)...(19): siRNA sense strand
caagauccugcuauuacua

SEQ ID NO: 369106 - RNA, 19 nt, Homo sapiens
  misc_RNA (1)...(19): siRNA sense strand
gaacaagcacuucggucau

SEQ ID NO: 369107 - RNA, 19 nt, Homo sapiens
  misc_RNA (1)...(19): siRNA sense strand
ggagcaauccgaguuguau

SEQ ID NO: 369108 - RNA, 19 nt, Homo sapiens
  misc_RNA (1)...(19): siRNA sense strand
cagaacaaacccugcaauu

SEQ ID NO: 369109 - RNA, 19 nt, Homo sapiens
  misc_RNA (1)...(19): siRNA sense strand
uacagugagucuucuggua

SEQ ID NO: 369110 - RNA, 19 nt, Homo sapiens
  misc_RNA (1)...(19): siRNA sense strand
gcaggucaaacgaaacuga

SEQ ID NO: 369111 - RNA, 19 nt, Homo sapiens
  misc_RNA (1)...(19): siRNA sense strand
gcagaaggcaauugaagag

SEQ ID NO: 369112 - RNA, 19 nt, Homo sapiens
  misc_RNA (1)...(19): siRNA sense strand
gaauaucgcagagaguaug

SEQ ID NO: 369113 - RNA, 19 nt, Homo sapiens
  misc_RNA (1)...(19): siRNA sense strand
gagggacagugauuucagu

SEQ ID NO: 369114 - RNA, 19 nt, Homo sapiens
  misc_RNA (1)...(19): siRNA sense strand
gccagucaauuaauuccaa

SEQ ID NO: 369115 - RNA, 19 nt, Homo sapiens
  misc_RNA (1)...(19): siRNA sense strand
ucauaaagccaaccaagau

SEQ ID NO: 369116 - RNA, 19 nt, Homo sapiens
  misc_RNA (1)...(19): siRNA sense strand
aaacucagaugacuuugac

SEQ ID NO: 369117 - RNA, 19 nt, Homo sapiens
  misc_RNA (1)...(19): siRNA sense strand
gaaccaugcaaaucacaau

SEQ ID NO: 369118 - RNA, 19 nt, Homo sapiens
  misc_RNA (1)...(19): siRNA sense strand
ugaaagaagcucagagaag

SEQ ID NO: 369119 - RNA, 19 nt, Homo sapiens
  misc_RNA (1)...(19): siRNA sense strand
caaagaagcccagguacag

SEQ ID NO: 369120 - RNA, 19 nt, Homo sapiens
  misc_RNA (1)...(19): siRNA sense strand
cgaagaguauuugucaaca

SEQ ID NO: 369121 - RNA, 19 nt, Homo sapiens
  misc_RNA (1)...(19): siRNA sense strand
aaguaugacucucuggauu

SEQ ID NO: 369122 - RNA, 19 nt, Homo sapiens
  misc_RNA (1)...(19): siRNA sense strand
gaacuugaucuuucugaac

SEQ ID NO: 369123 - RNA, 19 nt, Homo sapiens
  misc_RNA (1)...(19): siRNA sense strand
gaugacagcgaagaugaaa

SEQ ID NO: 369124 - RNA, 19 nt, Homo sapiens
  misc_RNA (1)...(19): siRNA sense strand
ugaacaauucuccaaacua

SEQ ID NO: 369125 - RNA, 19 nt, Homo sapiens
  misc_RNA (1)...(19): siRNA sense strand
gggcagauuuguucuucca

SEQ ID NO: 369126 - RNA, 19 nt, Homo sapiens
  misc_RNA (1)...(19): siRNA sense strand
aaacagcagcagagacaaa

SEQ ID NO: 369127 - RNA, 19 nt, Homo sapiens
  misc_RNA (1)...(19): siRNA sense strand
uugagaagauagaugaaga

SEQ ID NO: 369128 - RNA, 19 nt, Homo sapiens
  misc_RNA (1)...(19): siRNA sense strand
uaacuaugcagaccuagau

SEQ ID NO: 369129 - RNA, 19 nt, Homo sapiens
  misc_RNA (1)...(19): siRNA sense strand
gagaagcgagagucugaga

SEQ ID NO: 369130 - RNA, 19 nt, Homo sapiens
  misc_RNA (1)...(19): siRNA sense strand
gcgaagaugaaagugauaa

SEQ ID NO: 369131 - RNA, 19 nt, Homo sapiens
  misc_RNA (1)...(19): siRNA sense strand
ugaacuugaucuuucugaa

SEQ ID NO: 369132 - RNA, 19 nt, Homo sapiens
  misc_RNA (1)...(19): siRNA sense strand
ccagucaauuaauuccaaa

SEQ ID NO: 369133 - RNA, 19 nt, Homo sapiens
  misc_RNA (1)...(19): siRNA sense strand
caccacuccuccucauaaa

SEQ ID NO: 369134 - RNA, 19 nt, Homo sapiens
  misc_RNA (1)...(19): siRNA sense strand
gaguauuugucaacagcaa

SEQ ID NO: 369135 - RNA, 19 nt, Homo sapiens
  misc_RNA (1)...(19): siRNA sense strand
gaauucauggagcaauaaa

SEQ ID NO: 369136 - RNA, 19 nt, Homo sapiens
  misc_RNA (1)...(19): siRNA sense strand
ugaaugcaguggucucagu

SEQ ID NO: 369137 - RNA, 19 nt, Homo sapiens
  misc_RNA (1)...(19): siRNA sense strand
gcuaaguuauaaugaaugc

SEQ ID NO: 369138 - RNA, 19 nt, Homo sapiens
  misc_RNA (1)...(19): siRNA sense strand
gagaagcuugcgcagguaa

SEQ ID NO: 369139 - RNA, 19 nt, Homo sapiens
  misc_RNA (1)...(19): siRNA sense strand
aagaauaucgcagagagua

SEQ ID NO: 369140 - RNA, 19 nt, Homo sapiens
  misc_RNA (1)...(19): siRNA sense strand
gcugaagagggaagaauau

SEQ ID NO: 369141 - RNA, 19 nt, Homo sapiens
  misc_RNA (1)...(19): siRNA sense strand
gauuuguucuuccacagau

SEQ ID NO: 369142 - RNA, 19 nt, Homo sapiens
  misc_RNA (1)...(19): siRNA sense strand
gcagucacaacacuuacaa

SEQ ID NO: 369143 - RNA, 19 nt, Homo sapiens
  misc_RNA (1)...(19): siRNA sense strand
cugcaauuguuaagacuga

SEQ ID NO: 369144 - RNA, 19 nt, Homo sapiens
  misc_RNA (1)...(19): siRNA sense strand
agaugaaagugauaaacug

SEQ ID NO: 369145 - RNA, 19 nt, Homo sapiens
  misc_RNA (1)...(19): siRNA sense strand
ugacagcgaagaugaaagu

SEQ ID NO: 369146 - RNA, 19 nt, Homo sapiens
  misc_RNA (1)...(19): siRNA sense strand
ucuccaaacuaccuauguu

SEQ ID NO: 369147 - RNA, 19 nt, Homo sapiens
  misc_RNA (1)...(19): siRNA sense strand
gcuccaagacucuagacaa

SEQ ID NO: 369148 - RNA, 19 nt, Homo sapiens
  misc_RNA (1)...(19): siRNA sense strand
aagcaaagcuggaacauga

SEQ ID NO: 369149 - RNA, 19 nt, Homo sapiens
  misc_RNA (1)...(19): siRNA sense strand
gaacagguacauucauuaa

SEQ ID NO: 369150 - RNA, 19 nt, Homo sapiens
  misc_RNA (1)...(19): siRNA sense strand
gaauggcggucaaugugua

SEQ ID NO: 369151 - RNA, 19 nt, Homo sapiens
  misc_RNA (1)...(19): siRNA sense strand
gaacguugauaagguaauu

SEQ ID NO: 369152 - RNA, 19 nt, Homo sapiens
  misc_RNA (1)...(19): siRNA sense strand
gcuggaacaugaauauauu

SEQ ID NO: 369153 - RNA, 19 nt, Homo sapiens
  misc_RNA (1)...(19): siRNA sense strand
gaaugaacguugauaaggu

SEQ ID NO: 369154 - RNA, 19 nt, Homo sapiens
  misc_RNA (1)...(19): siRNA sense strand
gauaauaacgggaccauca

SEQ ID NO: 369155 - RNA, 19 nt, Homo sapiens
  misc_RNA (1)...(19): siRNA sense strand
gaacaacaacgacaucauc

SEQ ID NO: 369156 - RNA, 19 nt, Homo sapiens
  misc_RNA (1)...(19): siRNA sense strand
gaaauucuaugaugcuaac

SEQ ID NO: 369157 - RNA, 19 nt, Homo sapiens
  misc_RNA (1)...(19): siRNA sense strand
gcucuucccuggcugcauu

SEQ ID NO: 369158 - RNA, 19 nt, Homo sapiens
  misc_RNA (1)...(19): siRNA sense strand
aaugaacguugauaaggua

SEQ ID NO: 369159 - RNA, 19 nt, Homo sapiens
  misc_RNA (1)...(19): siRNA sense strand
gagcuacucugccaagaac

SEQ ID NO: 369160 - RNA, 19 nt, Homo sapiens
  misc_RNA (1)...(19): siRNA sense strand
ggaguaugauccuguagag

SEQ ID NO: 369161 - RNA, 19 nt, Homo sapiens
  misc_RNA (1)...(19): siRNA sense strand
gcauuaguuugaagaaagu

SEQ ID NO: 369162 - RNA, 19 nt, Homo sapiens
  misc_RNA (1)...(19): siRNA sense strand
caagaacacgggcaggaaa

SEQ ID NO: 369163 - RNA, 19 nt, Homo sapiens
  misc_RNA (1)...(19): siRNA sense strand
aaaccaggauccacaccuu

SEQ ID NO: 369164 - RNA, 19 nt, Homo sapiens
  misc_RNA (1)...(19): siRNA sense strand
cacagcaggugcagcuaaa

SEQ ID NO: 369165 - RNA, 19 nt, Homo sapiens
  misc_RNA (1)...(19): siRNA sense strand
uaauggacauccuguaugc

SEQ ID NO: 369166 - RNA, 19 nt, Homo sapiens
  misc_RNA (1)...(19): siRNA sense strand
ugagagagaucgagcuacu

SEQ ID NO: 369167 - RNA, 19 nt, Homo sapiens
  misc_RNA (1)...(19): siRNA sense strand
gggaauggcggucaaugug

SEQ ID NO: 369168 - RNA, 19 nt, Homo sapiens
  misc_RNA (1)...(19): siRNA sense strand
uggagaagcuagugaaagg

SEQ ID NO: 369169 - RNA, 19 nt, Homo sapiens
  misc_RNA (1)...(19): siRNA sense strand
gcaaagcuggaacaugaau

SEQ ID NO: 369170 - RNA, 19 nt, Homo sapiens
  misc_RNA (1)...(19): siRNA sense strand
cauccuguaugcuucagaa

SEQ ID NO: 369171 - RNA, 19 nt, Homo sapiens
  misc_RNA (1)...(19): siRNA sense strand
ccaaauggcgagaacaaca

SEQ ID NO: 369172 - RNA, 19 nt, Homo sapiens
  misc_RNA (1)...(19): siRNA sense strand
ccacagcaggugcagcuaa

SEQ ID NO: 369173 - RNA, 19 nt, Homo sapiens
  misc_RNA (1)...(19): siRNA sense strand
caaauggcgagaacaacaa

SEQ ID NO: 369174 - RNA, 19 nt, Homo sapiens
  misc_RNA (1)...(19): siRNA sense strand
ggaauggcggucaaugugu

SEQ ID NO: 369175 - RNA, 19 nt, Homo sapiens
  misc_RNA (1)...(19): siRNA sense strand
ggagcaagcccacgaacag

SEQ ID NO: 369176 - RNA, 19 nt, Homo sapiens
  misc_RNA (1)...(19): siRNA sense strand
gcacgacaagggcaagaug

SEQ ID NO: 369177 - RNA, 19 nt, Homo sapiens
  misc_RNA (1)...(19): siRNA sense strand
guucaggagcggccuauug

SEQ ID NO: 369178 - RNA, 19 nt, Homo sapiens
  misc_RNA (1)...(19): siRNA sense strand
gacaucauugcauggguua

SEQ ID NO: 369179 - RNA, 19 nt, Homo sapiens
  misc_RNA (1)...(19): siRNA sense strand
caaagcuggaacaugaaua

SEQ ID NO: 369180 - RNA, 19 nt, Homo sapiens
  misc_RNA (1)...(19): siRNA sense strand
cuaccucgauaacccaaga

SEQ ID NO: 369181 - RNA, 19 nt, Homo sapiens
  misc_RNA (1)...(19): siRNA sense strand
ggacauccuguaugcuuca

SEQ ID NO: 369182 - RNA, 19 nt, Homo sapiens
  misc_RNA (1)...(19): siRNA sense strand
caaccuggauuuuauucaa

SEQ ID NO: 369183 - RNA, 19 nt, Homo sapiens
  misc_RNA (1)...(19): siRNA sense strand
uuaagcgaaugaacguuga

SEQ ID NO: 369184 - RNA, 19 nt, Homo sapiens
  misc_RNA (1)...(19): siRNA sense strand
ugcauggguuaaugacaua

SEQ ID NO: 369185 - RNA, 19 nt, Homo sapiens
  misc_RNA (1)...(19): siRNA sense strand
cauuaaaacuugcccuuga

SEQ ID NO: 369186 - RNA, 19 nt, Homo sapiens
  misc_RNA (1)...(19): siRNA sense strand
acgcaggucauacagcuua

SEQ ID NO: 369187 - RNA, 19 nt, Homo sapiens
  misc_RNA (1)...(19): siRNA sense strand
aaucaaguccagcagcuaa

SEQ ID NO: 369188 - RNA, 19 nt, Homo sapiens
  misc_RNA (1)...(19): siRNA sense strand
gcgaaugaacguugauaag

SEQ ID NO: 369189 - RNA, 19 nt, Homo sapiens
  misc_RNA (1)...(19): siRNA sense strand
gagacuaugagcagacaug

SEQ ID NO: 369190 - RNA, 19 nt, Homo sapiens
  misc_RNA (1)...(19): siRNA sense strand
uagaaacgcaggucauaca

SEQ ID NO: 369191 - RNA, 19 nt, Homo sapiens
  misc_RNA (1)...(19): siRNA sense strand
cagcauccaaauccgauaa

SEQ ID NO: 369192 - RNA, 19 nt, Homo sapiens
  misc_RNA (1)...(19): siRNA sense strand
aaagcuggaacaugaauau

SEQ ID NO: 369193 - RNA, 19 nt, Homo sapiens
  misc_RNA (1)...(19): siRNA sense strand
aagcaucauuuaagcgaau

SEQ ID NO: 369194 - RNA, 19 nt, Homo sapiens
  misc_RNA (1)...(19): siRNA sense strand
uaauaacgggaccaucauu

SEQ ID NO: 369195 - RNA, 19 nt, Homo sapiens
  misc_RNA (1)...(19): siRNA sense strand
cauccaaauccgauaaaga

SEQ ID NO: 369196 - RNA, 19 nt, Homo sapiens
  misc_RNA (1)...(19): siRNA sense strand
gacaagggcaagaugcaau

SEQ ID NO: 369197 - RNA, 19 nt, Homo sapiens
  misc_RNA (1)...(19): siRNA sense strand
ugcauuaguuugaagaaag

SEQ ID NO: 369198 - RNA, 19 nt, Homo sapiens
  misc_RNA (1)...(19): siRNA sense strand
acagcuuaaugaacaggua

SEQ ID NO: 369199 - RNA, 19 nt, Homo sapiens
  misc_RNA (1)...(19): siRNA sense strand
gagaacaacaacgacauca

SEQ ID NO: 369200 - RNA, 19 nt, Homo sapiens
  misc_RNA (1)...(19): siRNA sense strand
uguguauucuaccucgaua

SEQ ID NO: 369201 - RNA, 19 nt, Homo sapiens
  misc_RNA (1)...(19): siRNA sense strand
gcaggugcagcuaaaucaa

SEQ ID NO: 369202 - RNA, 19 nt, Homo sapiens
  misc_RNA (1)...(19): siRNA sense strand
cgaaugaacguugauaagg

SEQ ID NO: 369203 - RNA, 19 nt, Homo sapiens
  misc_RNA (1)...(19): siRNA sense strand
cuucugcaagcaucauuua

SEQ ID NO: 369204 - RNA, 19 nt, Homo sapiens
  misc_RNA (1)...(19): siRNA sense strand
gcauccaaauccgauaaag

SEQ ID NO: 369205 - RNA, 19 nt, Homo sapiens
  misc_RNA (1)...(19): siRNA sense strand
acacgagggccacacagaa

SEQ ID NO: 369206 - RNA, 19 nt, Homo sapiens
  misc_RNA (1)...(19): siRNA sense strand
ccaagaacacgggcaggaa

SEQ ID NO: 369207 - RNA, 19 nt, Homo sapiens
  misc_RNA (1)...(19): siRNA sense strand
guugagagagaucgagcua

SEQ ID NO: 369208 - RNA, 19 nt, Homo sapiens
  misc_RNA (1)...(19): siRNA sense strand
uugcauggguuaaugacau

SEQ ID NO: 369209 - RNA, 19 nt, Homo sapiens
  misc_RNA (1)...(19): siRNA sense strand
uuugggaaguugagagaga

SEQ ID NO: 369210 - RNA, 19 nt, Homo sapiens
  misc_RNA (1)...(19): siRNA sense strand
uucccuggcugcauuaguu

SEQ ID NO: 369211 - RNA, 19 nt, Homo sapiens
  misc_RNA (1)...(19): siRNA sense strand
cugcauuaguuugaagaaa

SEQ ID NO: 369212 - RNA, 19 nt, Homo sapiens
  misc_RNA (1)...(19): siRNA sense strand
gcagcaggaagaguacuga

SEQ ID NO: 369213 - RNA, 19 nt, Homo sapiens
  misc_RNA (1)...(19): siRNA sense strand
cgauaacccaagagacuau

SEQ ID NO: 369214 - RNA, 19 nt, Homo sapiens
  misc_RNA (1)...(19): siRNA sense strand
ggacaaccuggauuuuauu

SEQ ID NO: 369215 - RNA, 19 nt, Homo sapiens
  misc_RNA (1)...(19): siRNA sense strand
cuaauggacauccuguaug

SEQ ID NO: 369216 - RNA, 19 nt, Homo sapiens
  misc_RNA (1)...(19): siRNA sense strand
cgagcuacucugccaagaa

SEQ ID NO: 369217 - RNA, 19 nt, Homo sapiens
  misc_RNA (1)...(19): siRNA sense strand
acaagggcaagaugcaauu

SEQ ID NO: 369218 - RNA, 19 nt, Homo sapiens
  misc_RNA (1)...(19): siRNA sense strand
acgggaccaucauuccuuu

SEQ ID NO: 369219 - RNA, 19 nt, Homo sapiens
  misc_RNA (1)...(19): siRNA sense strand
caagcaaagcuggaacaug

SEQ ID NO: 369220 - RNA, 19 nt, Homo sapiens
  misc_RNA (1)...(19): siRNA sense strand
gaccucgugcagagacuaa

SEQ ID NO: 369221 - RNA, 19 nt, Homo sapiens
  misc_RNA (1)...(19): siRNA sense strand
uuuagaaacgcaggucaua

SEQ ID NO: 369222 - RNA, 19 nt, Homo sapiens
  misc_RNA (1)...(19): siRNA sense strand
ucuaugaugcuaacuacga

SEQ ID NO: 369223 - RNA, 19 nt, Homo sapiens
  misc_RNA (1)...(19): siRNA sense strand
acuaauggacauccuguau

SEQ ID NO: 369224 - RNA, 19 nt, Homo sapiens
  misc_RNA (1)...(19): siRNA sense strand
acuaugagcagacaugaca

SEQ ID NO: 369225 - RNA, 19 nt, Homo sapiens
  misc_RNA (1)...(19): siRNA sense strand
cugcaagcaucauuuaagc

SEQ ID NO: 369226 - RNA, 19 nt, Homo sapiens
  misc_RNA (1)...(19): siRNA sense strand
cagcaggugcagcuaaauc

SEQ ID NO: 369227 - RNA, 19 nt, Homo sapiens
  misc_RNA (1)...(19): siRNA sense strand
cgacaagggcaagaugcaa

SEQ ID NO: 369228 - RNA, 19 nt, Homo sapiens
  misc_RNA (1)...(19): siRNA sense strand
caucauugcauggguuaau

SEQ ID NO: 369229 - RNA, 19 nt, Homo sapiens
  misc_RNA (1)...(19): siRNA sense strand
cuaugaugcuaacuacgau

SEQ ID NO: 369230 - RNA, 19 nt, Homo sapiens
  misc_RNA (1)...(19): siRNA sense strand
ggagaagcuagugaaagga

SEQ ID NO: 369231 - RNA, 19 nt, Homo sapiens
  misc_RNA (1)...(19): siRNA sense strand
auggguuaaugacauagua

SEQ ID NO: 369232 - RNA, 19 nt, Homo sapiens
  misc_RNA (1)...(19): siRNA sense strand
cgagaacaacaacgacauc

SEQ ID NO: 369233 - RNA, 19 nt, Homo sapiens
  misc_RNA (1)...(19): siRNA sense strand
acgaugggaaggaguauga

SEQ ID NO: 369234 - RNA, 19 nt, Homo sapiens
  misc_RNA (1)...(19): siRNA sense strand
gagaagaacuacugaauua

SEQ ID NO: 369235 - RNA, 19 nt, Homo sapiens
  misc_RNA (1)...(19): siRNA sense strand
gaacugagaggaauuauga

SEQ ID NO: 369236 - RNA, 19 nt, Homo sapiens
  misc_RNA (1)...(19): siRNA sense strand
gaaaccagacuucgaaaua

SEQ ID NO: 369237 - RNA, 19 nt, Homo sapiens
  misc_RNA (1)...(19): siRNA sense strand
gaaaguaaacugacaauuc

SEQ ID NO: 369238 - RNA, 19 nt, Homo sapiens
  misc_RNA (1)...(19): siRNA sense strand
gaaggugacuugggaaauu

SEQ ID NO: 369239 - RNA, 19 nt, Homo sapiens
  misc_RNA (1)...(19): siRNA sense strand
ggaaauuacuccuguuaug

SEQ ID NO: 369240 - RNA, 19 nt, Homo sapiens
  misc_RNA (1)...(19): siRNA sense strand
cuacaaguguuacaagaua

SEQ ID NO: 369241 - RNA, 19 nt, Homo sapiens
  misc_RNA (1)...(19): siRNA sense strand
gaaagugacauuagaauuc

SEQ ID NO: 369242 - RNA, 19 nt, Homo sapiens
  misc_RNA (1)...(19): siRNA sense strand
gcaagcggcugauuauugu

SEQ ID NO: 369243 - RNA, 19 nt, Homo sapiens
  misc_RNA (1)...(19): siRNA sense strand
gaagaagacuccauuuggu

SEQ ID NO: 369244 - RNA, 19 nt, Homo sapiens
  misc_RNA (1)...(19): siRNA sense strand
aaucaaaugugcacucuuu

SEQ ID NO: 369245 - RNA, 19 nt, Homo sapiens
  misc_RNA (1)...(19): siRNA sense strand
gaaguagaaugagcaaaga

SEQ ID NO: 369246 - RNA, 19 nt, Homo sapiens
  misc_RNA (1)...(19): siRNA sense strand
ggaaacguuuacaguauga

SEQ ID NO: 369247 - RNA, 19 nt, Homo sapiens
  misc_RNA (1)...(19): siRNA sense strand
ggagaugucaguccuuuaa

SEQ ID NO: 369248 - RNA, 19 nt, Homo sapiens
  misc_RNA (1)...(19): siRNA sense strand
gaagaugacauuggaaauu

SEQ ID NO: 369249 - RNA, 19 nt, Homo sapiens
  misc_RNA (1)...(19): siRNA sense strand
caaagcaagcggcugauua

SEQ ID NO: 369250 - RNA, 19 nt, Homo sapiens
  misc_RNA (1)...(19): siRNA sense strand
ugagaggaauuaugaacua

SEQ ID NO: 369251 - RNA, 19 nt, Homo sapiens
  misc_RNA (1)...(19): siRNA sense strand
gagauacucugcuuauaag

SEQ ID NO: 369252 - RNA, 19 nt, Homo sapiens
  misc_RNA (1)...(19): siRNA sense strand
cagcauaccuacuguaaca

SEQ ID NO: 369253 - RNA, 19 nt, Homo sapiens
  misc_RNA (1)...(19): siRNA sense strand
gaaguuuccaucucauuaa

SEQ ID NO: 369254 - RNA, 19 nt, Homo sapiens
  misc_RNA (1)...(19): siRNA sense strand
acacuggacucugcuauaa

SEQ ID NO: 369255 - RNA, 19 nt, Homo sapiens
  misc_RNA (1)...(19): siRNA sense strand
caaauuacguaguuagaag

SEQ ID NO: 369256 - RNA, 19 nt, Homo sapiens
  misc_RNA (1)...(19): siRNA sense strand
cagagaaccugaaauccuu

SEQ ID NO: 369257 - RNA, 19 nt, Homo sapiens
  misc_RNA (1)...(19): siRNA sense strand
gaaauuucaugccgugaca

SEQ ID NO: 369258 - RNA, 19 nt, Homo sapiens
  misc_RNA (1)...(19): siRNA sense strand
ggaaagugacauuagaauu

SEQ ID NO: 369259 - RNA, 19 nt, Homo sapiens
  misc_RNA (1)...(19): siRNA sense strand
gaugucaguccuuuaauuu

SEQ ID NO: 369260 - RNA, 19 nt, Homo sapiens
  misc_RNA (1)...(19): siRNA sense strand
cagagaagaugacauugga

SEQ ID NO: 369261 - RNA, 19 nt, Homo sapiens
  misc_RNA (1)...(19): siRNA sense strand
caaagaagaagacuccauu

SEQ ID NO: 369262 - RNA, 19 nt, Homo sapiens
  misc_RNA (1)...(19): siRNA sense strand
gcuugugacuggagaaauu

SEQ ID NO: 369263 - RNA, 19 nt, Homo sapiens
  misc_RNA (1)...(19): siRNA sense strand
uaagagaagucagagaaga

SEQ ID NO: 369264 - RNA, 19 nt, Homo sapiens
  misc_RNA (1)...(19): siRNA sense strand
ccaaagugcuggacucagu

SEQ ID NO: 369265 - RNA, 19 nt, Homo sapiens
  misc_RNA (1)...(19): siRNA sense strand
gaaauuacuccuguuaugu

SEQ ID NO: 369266 - RNA, 19 nt, Homo sapiens
  misc_RNA (1)...(19): siRNA sense strand
gaaacuccacuuacuguau

SEQ ID NO: 369267 - RNA, 19 nt, Homo sapiens
  misc_RNA (1)...(19): siRNA sense strand
gagaagaugacauuggaaa

SEQ ID NO: 369268 - RNA, 19 nt, Homo sapiens
  misc_RNA (1)...(19): siRNA sense strand
ggauagaacccauuacaca

SEQ ID NO: 369269 - RNA, 19 nt, Homo sapiens
  misc_RNA (1)...(19): siRNA sense strand
ggcaagauguguagaucaa

SEQ ID NO: 369270 - RNA, 19 nt, Homo sapiens
  misc_RNA (1)...(19): siRNA sense strand
aaaccagacuucgaaauau

SEQ ID NO: 369271 - RNA, 19 nt, Homo sapiens
  misc_RNA (1)...(19): siRNA sense strand
gcaaucagcauaccuacug

SEQ ID NO: 369272 - RNA, 19 nt, Homo sapiens
  misc_RNA (1)...(19): siRNA sense strand
ggaaguagaaugagcaaag

SEQ ID NO: 369273 - RNA, 19 nt, Homo sapiens
  misc_RNA (1)...(19): siRNA sense strand
gcggagaugucaguccuuu

SEQ ID NO: 369274 - RNA, 19 nt, Homo sapiens
  misc_RNA (1)...(19): siRNA sense strand
cuugaaauccuaccugaua

SEQ ID NO: 369275 - RNA, 19 nt, Homo sapiens
  misc_RNA (1)...(19): siRNA sense strand
gggagagccuguucgaauc

SEQ ID NO: 369276 - RNA, 19 nt, Homo sapiens
  misc_RNA (1)...(19): siRNA sense strand
uagaacccauuacacauga

SEQ ID NO: 369277 - RNA, 19 nt, Homo sapiens
  misc_RNA (1)...(19): siRNA sense strand
gaaaucaugcucuucuaca

SEQ ID NO: 369278 - RNA, 19 nt, Homo sapiens
  misc_RNA (1)...(19): siRNA sense strand
ccagcguucuccuucauaa

SEQ ID NO: 369279 - RNA, 19 nt, Homo sapiens
  misc_RNA (1)...(19): siRNA sense strand
gaagaacuacugaauuaac

SEQ ID NO: 369280 - RNA, 19 nt, Homo sapiens
  misc_RNA (1)...(19): siRNA sense strand
aaacuccacuuacuguaug

SEQ ID NO: 369281 - RNA, 19 nt, Homo sapiens
  misc_RNA (1)...(19): siRNA sense strand
aaccugaaauccuuuggua

SEQ ID NO: 369282 - RNA, 19 nt, Homo sapiens
  misc_RNA (1)...(19): siRNA sense strand
cagaugaggcccacacaaa

SEQ ID NO: 369283 - RNA, 19 nt, Homo sapiens
  misc_RNA (1)...(19): siRNA sense strand
caagauguguagaucaaag

SEQ ID NO: 369284 - RNA, 19 nt, Homo sapiens
  misc_RNA (1)...(19): siRNA sense strand
aaucuaaccugcagagcuu

SEQ ID NO: 369285 - RNA, 19 nt, Homo sapiens
  misc_RNA (1)...(19): siRNA sense strand
ggccaaguauuguauucaa

SEQ ID NO: 369286 - RNA, 19 nt, Homo sapiens
  misc_RNA (1)...(19): siRNA sense strand
gggugacucugcuaaucua

SEQ ID NO: 369287 - RNA, 19 nt, Homo sapiens
  misc_RNA (1)...(19): siRNA sense strand
cacacuugauucucuuaua

SEQ ID NO: 369288 - RNA, 19 nt, Homo sapiens
  misc_RNA (1)...(19): siRNA sense strand
caacuggaacauacauuga

SEQ ID NO: 369289 - RNA, 19 nt, Homo sapiens
  misc_RNA (1)...(19): siRNA sense strand
aaggugacuugggaaauua

SEQ ID NO: 369290 - RNA, 19 nt, Homo sapiens
  misc_RNA (1)...(19): siRNA sense strand
uauggaggcuuuguuguga

SEQ ID NO: 369291 - RNA, 19 nt, Homo sapiens
  misc_RNA (1)...(19): siRNA sense strand
uauaagagaagucagagaa

SEQ ID NO: 369292 - RNA, 19 nt, Homo sapiens
  misc_RNA (1)...(19): siRNA sense strand
gccgugacauagaggauuu

SEQ ID NO: 369293 - RNA, 19 nt, Homo sapiens
  misc_RNA (1)...(19): siRNA sense strand
aaacauggaggccaaguau

SEQ ID NO: 369294 - RNA, 19 nt, Homo sapiens
  misc_RNA (1)...(19): siRNA sense strand
gagcaucuuugagcuggaa

SEQ ID NO: 369295 - RNA, 19 nt, Homo sapiens
  misc_RNA (1)...(19): siRNA sense strand
guuuccaucucauuaauug

SEQ ID NO: 369296 - RNA, 19 nt, Homo sapiens
  misc_RNA (1)...(19): siRNA sense strand
gaacuacugaauuaacugu

SEQ ID NO: 369297 - RNA, 19 nt, Homo sapiens
  misc_RNA (1)...(19): siRNA sense strand
acuggacucugcuauaauu

SEQ ID NO: 369298 - RNA, 19 nt, Homo sapiens
  misc_RNA (1)...(19): siRNA sense strand
gaggauagaacccauuaca

SEQ ID NO: 369299 - RNA, 19 nt, Homo sapiens
  misc_RNA (1)...(19): siRNA sense strand
cuggaaacguuuacaguau

SEQ ID NO: 369300 - RNA, 19 nt, Homo sapiens
  misc_RNA (1)...(19): siRNA sense strand
gaaaaucgaguuugggaaa

SEQ ID NO: 369301 - RNA, 19 nt, Homo sapiens
  misc_RNA (1)...(19): siRNA sense strand
agaugucaguccuuuaauu

SEQ ID NO: 369302 - RNA, 19 nt, Homo sapiens
  misc_RNA (1)...(19): siRNA sense strand
gccaaguauuguauucaaa

SEQ ID NO: 369303 - RNA, 19 nt, Homo sapiens
  misc_RNA (1)...(19): siRNA sense strand
ugacuggucuaucgauauc

SEQ ID NO: 369304 - RNA, 19 nt, Homo sapiens
  misc_RNA (1)...(19): siRNA sense strand
gagcaggcuuuagauguca

SEQ ID NO: 369305 - RNA, 19 nt, Homo sapiens
  misc_RNA (1)...(19): siRNA sense strand
gaagauguggcaagaugug

SEQ ID NO: 369306 - RNA, 19 nt, Homo sapiens
  misc_RNA (1)...(19): siRNA sense strand
ugagaagaacuacugaauu

SEQ ID NO: 369307 - RNA, 19 nt, Homo sapiens
  misc_RNA (1)...(19): siRNA sense strand
gcuauaauuccaagaugaa

SEQ ID NO: 369308 - RNA, 19 nt, Homo sapiens
  misc_RNA (1)...(19): siRNA sense strand
gaucuccguucuaccuuuc

SEQ ID NO: 369309 - RNA, 19 nt, Homo sapiens
  misc_RNA (1)...(19): siRNA sense strand
uguauccuauggaaaguaa

SEQ ID NO: 369310 - RNA, 19 nt, Homo sapiens
  misc_RNA (1)...(19): siRNA sense strand
aauccuaccugauaugcuu

SEQ ID NO: 369311 - RNA, 19 nt, Homo sapiens
  misc_RNA (1)...(19): siRNA sense strand
gaggccaaguauuguauuc

SEQ ID NO: 369312 - RNA, 19 nt, Homo sapiens
  misc_RNA (1)...(19): siRNA sense strand
ucacaacacguaccauuca

SEQ ID NO: 369313 - RNA, 19 nt, Homo sapiens
  misc_RNA (1)...(19): siRNA sense strand
gauagaacccauuacacau

SEQ ID NO: 369314 - RNA, 19 nt, Homo sapiens
  misc_RNA (1)...(19): siRNA sense strand
caaguucuggaaacguuua

SEQ ID NO: 369315 - RNA, 19 nt, Homo sapiens
  misc_RNA (1)...(19): siRNA sense strand
gaugcauacuuaucauaca

SEQ ID NO: 369316 - RNA, 19 nt, Homo sapiens
  misc_RNA (1)...(19): siRNA sense strand
gacacuggacucugcuaua

SEQ ID NO: 369317 - RNA, 19 nt, Homo sapiens
  misc_RNA (1)...(19): siRNA sense strand
aaagcaagcggcugauuau

SEQ ID NO: 369318 - RNA, 19 nt, Homo sapiens
  misc_RNA (1)...(19): siRNA sense strand
uugaagauguggcaagaug

SEQ ID NO: 369319 - RNA, 19 nt, Homo sapiens
  misc_RNA (1)...(19): siRNA sense strand
gauggagacaauaaagauu

SEQ ID NO: 369320 - RNA, 19 nt, Homo sapiens
  misc_RNA (1)...(19): siRNA sense strand
gacauuagaauucuuaagg

SEQ ID NO: 369321 - RNA, 19 nt, Homo sapiens
  misc_RNA (1)...(19): siRNA sense strand
ggacucugcuauaauucca

SEQ ID NO: 369322 - RNA, 19 nt, Homo sapiens
  misc_RNA (1)...(19): siRNA sense strand
caacacguaccauucacaa

SEQ ID NO: 369323 - RNA, 19 nt, Homo sapiens
  misc_RNA (1)...(19): siRNA sense strand
uaaauggcauggaccaaaa

SEQ ID NO: 369324 - RNA, 19 nt, Homo sapiens
  misc_RNA (1)...(19): siRNA sense strand
gaggaauuaugaacuacca

SEQ ID NO: 369325 - RNA, 19 nt, Homo sapiens
  misc_RNA (1)...(19): siRNA sense strand
ggaaaccagacuucgaaau

SEQ ID NO: 369326 - RNA, 19 nt, Homo sapiens
  misc_RNA (1)...(19): siRNA sense strand
ggaaaguaaacugacaauu

SEQ ID NO: 369327 - RNA, 19 nt, Homo sapiens
  misc_RNA (1)...(19): siRNA sense strand
guuugaagguugugaccaa

SEQ ID NO: 369328 - RNA, 19 nt, Homo sapiens
  misc_RNA (1)...(19): siRNA sense strand
acacuugauucucuuauac

SEQ ID NO: 369329 - RNA, 19 nt, Homo sapiens
  misc_RNA (1)...(19): siRNA sense strand
gggagcagaauccagauga

SEQ ID NO: 369330 - RNA, 19 nt, Homo sapiens
  misc_RNA (1)...(19): siRNA sense strand
uggaaacguuuacaguaug

SEQ ID NO: 369331 - RNA, 19 nt, Homo sapiens
  misc_RNA (1)...(19): siRNA sense strand
gaugaggcccacacaaaca

SEQ ID NO: 369332 - RNA, 19 nt, Homo sapiens
  misc_RNA (1)...(19): siRNA sense strand
acacguaccauucacaaau

SEQ ID NO: 369333 - RNA, 19 nt, Homo sapiens
  misc_RNA (1)...(19): siRNA sense strand
cacaugagcaggcuuuaga

SEQ ID NO: 369334 - RNA, 19 nt, Homo sapiens
  misc_RNA (1)...(19): siRNA sense strand
ggaagacagugaccagugu

SEQ ID NO: 369335 - RNA, 19 nt, Homo sapiens
  misc_RNA (1)...(19): siRNA sense strand
ucaggcaacuggaguaagu

SEQ ID NO: 369336 - RNA, 19 nt, Homo sapiens
  misc_RNA (1)...(19): siRNA sense strand
ggaagacagugaccagugu

SEQ ID NO: 369337 - RNA, 19 nt, Homo sapiens
  misc_RNA (1)...(19): siRNA sense strand
ucaggcaacuggaguaagu

SEQ ID NO: 369338 - RNA, 19 nt, Homo sapiens
  misc_RNA (1)...(19): siRNA sense strand
ggaagacagugaccagugu

SEQ ID NO: 369339 - RNA, 19 nt, Homo sapiens
  misc_RNA (1)...(19): siRNA sense strand
ucaggcaacuggaguaagu

SEQ ID NO: 369340 - RNA, 19 nt, Homo sapiens
  misc_RNA (1)...(19): siRNA sense strand
gaaaggagcugcagcauua

SEQ ID NO: 369341 - RNA, 19 nt, Homo sapiens
  misc_RNA (1)...(19): siRNA sense strand
gcaaagacauugaacauua

SEQ ID NO: 369342 - RNA, 19 nt, Homo sapiens
  misc_RNA (1)...(19): siRNA sense strand
gaagauagaugucgagucu

SEQ ID NO: 369343 - RNA, 19 nt, Homo sapiens
  misc_RNA (1)...(19): siRNA sense strand
gaaguuggcuuuacaugga

SEQ ID NO: 369344 - RNA, 19 nt, Homo sapiens
  misc_RNA (1)...(19): siRNA sense strand
gauaaacacucaaggagaa

SEQ ID NO: 369345 - RNA, 19 nt, Homo sapiens
  misc_RNA (1)...(19): siRNA sense strand
gaaacagugugcagacuuu

SEQ ID NO: 369346 - RNA, 19 nt, Homo sapiens
  misc_RNA (1)...(19): siRNA sense strand
ugacuuaucuugaacacua

SEQ ID NO: 369347 - RNA, 19 nt, Homo sapiens
  misc_RNA (1)...(19): siRNA sense strand
gguaaaaccuugugcauua

SEQ ID NO: 369348 - RNA, 19 nt, Homo sapiens
  misc_RNA (1)...(19): siRNA sense strand
ggaauuagguauaaguuca

SEQ ID NO: 369349 - RNA, 19 nt, Homo sapiens
  misc_RNA (1)...(19): siRNA sense strand
ugaaggagaugauuacuau

SEQ ID NO: 369350 - RNA, 19 nt, Homo sapiens
  misc_RNA (1)...(19): siRNA sense strand
ggcaagcacuuucaucuaa

SEQ ID NO: 369351 - RNA, 19 nt, Homo sapiens
  misc_RNA (1)...(19): siRNA sense strand
gcagacaagucccucgaua

SEQ ID NO: 369352 - RNA, 19 nt, Homo sapiens
  misc_RNA (1)...(19): siRNA sense strand
gcacuuucaucuaaacuug

SEQ ID NO: 369353 - RNA, 19 nt, Homo sapiens
  misc_RNA (1)...(19): siRNA sense strand
ggaaacguugugaauauua

SEQ ID NO: 369354 - RNA, 19 nt, Homo sapiens
  misc_RNA (1)...(19): siRNA sense strand
caucuaaacuugacucuca

SEQ ID NO: 369355 - RNA, 19 nt, Homo sapiens
  misc_RNA (1)...(19): siRNA sense strand
ggcaguaucuaaguuauuu

SEQ ID NO: 369356 - RNA, 19 nt, Homo sapiens
  misc_RNA (1)...(19): siRNA sense strand
gcaagcacuuucaucuaaa

SEQ ID NO: 369357 - RNA, 19 nt, Homo sapiens
  misc_RNA (1)...(19): siRNA sense strand
uaggaaacguugugaauau

SEQ ID NO: 369358 - RNA, 19 nt, Homo sapiens
  misc_RNA (1)...(19): siRNA sense strand
gugcagacuuugacaauau

SEQ ID NO: 369359 - RNA, 19 nt, Homo sapiens
  misc_RNA (1)...(19): siRNA sense strand
gagguaagaugcccacuag

SEQ ID NO: 369360 - RNA, 19 nt, Homo sapiens
  misc_RNA (1)...(19): siRNA sense strand
gcacguaggcugugauaau

SEQ ID NO: 369361 - RNA, 19 nt, Homo sapiens
  misc_RNA (1)...(19): siRNA sense strand
ccaauuaacaacacacaua

SEQ ID NO: 369362 - RNA, 19 nt, Homo sapiens
  misc_RNA (1)...(19): siRNA sense strand
gaauauuguugccaaacuu

SEQ ID NO: 369363 - RNA, 19 nt, Homo sapiens
  misc_RNA (1)...(19): siRNA sense strand
gaaguugccaugucaaaga

SEQ ID NO: 369364 - RNA, 19 nt, Homo sapiens
  misc_RNA (1)...(19): siRNA sense strand
gcaggcaguaucuaaguua

SEQ ID NO: 369365 - RNA, 19 nt, Homo sapiens
  misc_RNA (1)...(19): siRNA sense strand
gacgaaaggucaugaagca

SEQ ID NO: 369366 - RNA, 19 nt, Homo sapiens
  misc_RNA (1)...(19): siRNA sense strand
acacauccacuguuucuua

SEQ ID NO: 369367 - RNA, 19 nt, Homo sapiens
  misc_RNA (1)...(19): siRNA sense strand
gaagagaucagugagcauu

SEQ ID NO: 369368 - RNA, 19 nt, Homo sapiens
  misc_RNA (1)...(19): siRNA sense strand
caucggaauuucauaguga

SEQ ID NO: 369369 - RNA, 19 nt, Homo sapiens
  misc_RNA (1)...(19): siRNA sense strand
gaacacuaccagcuaacua

SEQ ID NO: 369370 - RNA, 19 nt, Homo sapiens
  misc_RNA (1)...(19): siRNA sense strand
cacguaggcugugauaaua

SEQ ID NO: 369371 - RNA, 19 nt, Homo sapiens
  misc_RNA (1)...(19): siRNA sense strand
uacagaagaugaagaguau

SEQ ID NO: 369372 - RNA, 19 nt, Homo sapiens
  misc_RNA (1)...(19): siRNA sense strand
gcacaugugaugccauuga

SEQ ID NO: 369373 - RNA, 19 nt, Homo sapiens
  misc_RNA (1)...(19): siRNA sense strand
gagcuaugcuuuguguuug

SEQ ID NO: 369374 - RNA, 19 nt, Homo sapiens
  misc_RNA (1)...(19): siRNA sense strand
ggaagacguugaccuggau

SEQ ID NO: 369375 - RNA, 19 nt, Homo sapiens
  misc_RNA (1)...(19): siRNA sense strand
ugacuggccuaggaaauuu

SEQ ID NO: 369376 - RNA, 19 nt, Homo sapiens
  misc_RNA (1)...(19): siRNA sense strand
cucgauagcuucuguaaau

SEQ ID NO: 369377 - RNA, 19 nt, Homo sapiens
  misc_RNA (1)...(19): siRNA sense strand
uuucucagcuuuacuguga

SEQ ID NO: 369378 - RNA, 19 nt, Homo sapiens
  misc_RNA (1)...(19): siRNA sense strand
gauaaugaaguuggcuuua

SEQ ID NO: 369379 - RNA, 19 nt, Homo sapiens
  misc_RNA (1)...(19): siRNA sense strand
gagacuacaucaccagcuu

SEQ ID NO: 369380 - RNA, 19 nt, Homo sapiens
  misc_RNA (1)...(19): siRNA sense strand
cagaagaugaagaguauuu

SEQ ID NO: 369381 - RNA, 19 nt, Homo sapiens
  misc_RNA (1)...(19): siRNA sense strand
caaagacauugaacauuac

SEQ ID NO: 369382 - RNA, 19 nt, Homo sapiens
  misc_RNA (1)...(19): siRNA sense strand
caggauauuugcaagauca

SEQ ID NO: 369383 - RNA, 19 nt, Homo sapiens
  misc_RNA (1)...(19): siRNA sense strand
caaaacacauucugagcua

SEQ ID NO: 369384 - RNA, 19 nt, Homo sapiens
  misc_RNA (1)...(19): siRNA sense strand
gaaacaccauuccagaaaa

SEQ ID NO: 369385 - RNA, 19 nt, Homo sapiens
  misc_RNA (1)...(19): siRNA sense strand
aaugacacauccacuguuu

SEQ ID NO: 369386 - RNA, 19 nt, Homo sapiens
  misc_RNA (1)...(19): siRNA sense strand
cuacagaagaugaagagua

SEQ ID NO: 369387 - RNA, 19 nt, Homo sapiens
  misc_RNA (1)...(19): siRNA sense strand
ucaaggagaagacggagua

SEQ ID NO: 369388 - RNA, 19 nt, Homo sapiens
  misc_RNA (1)...(19): siRNA sense strand
uagagaaguugccauguca

SEQ ID NO: 369389 - RNA, 19 nt, Homo sapiens
  misc_RNA (1)...(19): siRNA sense strand
cuggauaucugcaucaaug

SEQ ID NO: 369390 - RNA, 19 nt, Homo sapiens
  misc_RNA (1)...(19): siRNA sense strand
gcucuggugucucagcaaa

SEQ ID NO: 369391 - RNA, 19 nt, Homo sapiens
  misc_RNA (1)...(19): siRNA sense strand
caagaucaacguaguacaa

SEQ ID NO: 369392 - RNA, 19 nt, Homo sapiens
  misc_RNA (1)...(19): siRNA sense strand
gaugaauauuguugccaaa

SEQ ID NO: 369393 - RNA, 19 nt, Homo sapiens
  misc_RNA (1)...(19): siRNA sense strand
caagagaccaacugaugaa

SEQ ID NO: 369394 - RNA, 19 nt, Homo sapiens
  misc_RNA (1)...(19): siRNA sense strand
gaggcucuguucacauuga

SEQ ID NO: 369395 - RNA, 19 nt, Homo sapiens
  misc_RNA (1)...(19): siRNA sense strand
caauaaggguugaucaaaa

SEQ ID NO: 369396 - RNA, 19 nt, Homo sapiens
  misc_RNA (1)...(19): siRNA sense strand
uaaugaaguuggcuuuaca

SEQ ID NO: 369397 - RNA, 19 nt, Homo sapiens
  misc_RNA (1)...(19): siRNA sense strand
caguggagauaaugaaguu

SEQ ID NO: 369398 - RNA, 19 nt, Homo sapiens
  misc_RNA (1)...(19): siRNA sense strand
aauggugccuggacuauug

SEQ ID NO: 369399 - RNA, 19 nt, Homo sapiens
  misc_RNA (1)...(19): siRNA sense strand
cguaggcugugauaauauu

SEQ ID NO: 369400 - RNA, 19 nt, Homo sapiens
  misc_RNA (1)...(19): siRNA sense strand
gcaagcacguaggcuguga

SEQ ID NO: 369401 - RNA, 19 nt, Homo sapiens
  misc_RNA (1)...(19): siRNA sense strand
ggcugaagguuauaauuuc

SEQ ID NO: 369402 - RNA, 19 nt, Homo sapiens
  misc_RNA (1)...(19): siRNA sense strand
cagaagaucagccaaacuu

SEQ ID NO: 369403 - RNA, 19 nt, Homo sapiens
  misc_RNA (1)...(19): siRNA sense strand
caacaacgacaucuguaug

SEQ ID NO: 369404 - RNA, 19 nt, Homo sapiens
  misc_RNA (1)...(19): siRNA sense strand
gagaaguugccaugucaaa

SEQ ID NO: 369405 - RNA, 19 nt, Homo sapiens
  misc_RNA (1)...(19): siRNA sense strand
ggaaauucuuguggacgaa

SEQ ID NO: 369406 - RNA, 19 nt, Homo sapiens
  misc_RNA (1)...(19): siRNA sense strand
cauccacuguuucuuauuc

SEQ ID NO: 369407 - RNA, 19 nt, Homo sapiens
  misc_RNA (1)...(19): siRNA sense strand
ccaauaaggguugaucaaa

SEQ ID NO: 369408 - RNA, 19 nt, Homo sapiens
  misc_RNA (1)...(19): siRNA sense strand
gagaccaacugaugaacca

SEQ ID NO: 369409 - RNA, 19 nt, Homo sapiens
  misc_RNA (1)...(19): siRNA sense strand
ccuaggaaauuugauguug

SEQ ID NO: 369410 - RNA, 19 nt, Homo sapiens
  misc_RNA (1)...(19): siRNA sense strand
ggauugcccaccacgauaa

SEQ ID NO: 369411 - RNA, 19 nt, Homo sapiens
  misc_RNA (1)...(19): siRNA sense strand
acaagucccucgauagcuu

SEQ ID NO: 369412 - RNA, 19 nt, Homo sapiens
  misc_RNA (1)...(19): siRNA sense strand
ggagauaaaccaccaugca

SEQ ID NO: 369413 - RNA, 19 nt, Homo sapiens
  misc_RNA (1)...(19): siRNA sense strand
gagcauuucucagcuuuac

SEQ ID NO: 369414 - RNA, 19 nt, Homo sapiens
  misc_RNA (1)...(19): siRNA sense strand
ggagguaagaugcccacua

SEQ ID NO: 369415 - RNA, 19 nt, Homo sapiens
  misc_RNA (1)...(19): siRNA sense strand
ggacagcuuuucauuacaa

SEQ ID NO: 369416 - RNA, 19 nt, Homo sapiens
  misc_RNA (1)...(19): siRNA sense strand
auacaguucucaagaggaa

SEQ ID NO: 369417 - RNA, 19 nt, Homo sapiens
  misc_RNA (1)...(19): siRNA sense strand
ccacaggcuuucauacagu

SEQ ID NO: 369418 - RNA, 19 nt, Homo sapiens
  misc_RNA (1)...(19): siRNA sense strand
ucagaaugcucagcuacuu

SEQ ID NO: 369419 - RNA, 19 nt, Homo sapiens
  misc_RNA (1)...(19): siRNA sense strand
gaggaaaguauuauaacug

SEQ ID NO: 369420 - RNA, 19 nt, Homo sapiens
  misc_RNA (1)...(19): siRNA sense strand
ccaccacgauaaugcaguu

SEQ ID NO: 369421 - RNA, 19 nt, Homo sapiens
  misc_RNA (1)...(19): siRNA sense strand
gggcuaccauggccgcaaa

SEQ ID NO: 369422 - RNA, 19 nt, Homo sapiens
  misc_RNA (1)...(19): siRNA sense strand
gaaaauggccacccucaug

SEQ ID NO: 369423 - RNA, 19 nt, Homo sapiens
  misc_RNA (1)...(19): siRNA sense strand
ccacagaggauuccaagca

SEQ ID NO: 369424 - RNA, 19 nt, Homo sapiens
  misc_RNA (1)...(19): siRNA sense strand
gaaggagaugauuacuaua

SEQ ID NO: 369425 - RNA, 19 nt, Homo sapiens
  misc_RNA (1)...(19): siRNA sense strand
aagcacaugugaugccauu

SEQ ID NO: 369426 - RNA, 19 nt, Homo sapiens
  misc_RNA (1)...(19): siRNA sense strand
cgaggaaaguauuauaacu

SEQ ID NO: 369427 - RNA, 19 nt, Homo sapiens
  misc_RNA (1)...(19): siRNA sense strand
agacagaagagaucaguga

SEQ ID NO: 369428 - RNA, 19 nt, Homo sapiens
  misc_RNA (1)...(19): siRNA sense strand
cagaggauuccaagcauuu

SEQ ID NO: 369429 - RNA, 19 nt, Homo sapiens
  misc_RNA (1)...(19): siRNA sense strand
ugagugugaugaauauugu

SEQ ID NO: 369430 - RNA, 19 nt, Homo sapiens
  misc_RNA (1)...(19): siRNA sense strand
cauugaaguuagagaaguu

SEQ ID NO: 369431 - RNA, 19 nt, Homo sapiens
  misc_RNA (1)...(19): siRNA sense strand
agauagaugucgagucugu

SEQ ID NO: 369432 - RNA, 19 nt, Homo sapiens
  misc_RNA (1)...(19): siRNA sense strand
cugcuuggcugaagguuau

SEQ ID NO: 369433 - RNA, 19 nt, Homo sapiens
  misc_RNA (1)...(19): siRNA sense strand
cgguaucgcuccuguaaca

SEQ ID NO: 369434 - RNA, 19 nt, Homo sapiens
  misc_RNA (1)...(19): siRNA sense strand
ucacagaagaucagccaaa

SEQ ID NO: 369435 - RNA, 19 nt, Homo sapiens
  misc_RNA (1)...(19): siRNA sense strand
ucaugaagcagcaaaauua

SEQ ID NO: 369436 - RNA, 19 nt, Homo sapiens
  misc_RNA (1)...(19): siRNA sense strand
gacggaagcacaugugaug

SEQ ID NO: 369437 - RNA, 19 nt, Homo sapiens
  misc_RNA (1)...(19): siRNA sense strand
uggcugaagguuauaauuu

SEQ ID NO: 369438 - RNA, 19 nt, Homo sapiens
  misc_RNA (1)...(19): siRNA sense strand
caucagccuuggucagaau

SEQ ID NO: 369439 - RNA, 19 nt, Homo sapiens
  misc_RNA (1)...(19): siRNA sense strand
ugagcuaugcuuuguguuu

SEQ ID NO: 369440 - RNA, 19 nt, Homo sapiens
  misc_RNA (1)...(19): siRNA sense strand
gcacgagccugaagacaua

SEQ ID NO: 369441 - RNA, 19 nt, Homo sapiens
  misc_RNA (1)...(19): siRNA sense strand
cagcugggcuucauuggua

SEQ ID NO: 369442 - RNA, 19 nt, Homo sapiens
  misc_RNA (1)...(19): siRNA sense strand
ccaaacagaaccucgauua

SEQ ID NO: 369443 - RNA, 19 nt, Homo sapiens
  misc_RNA (1)...(19): siRNA sense strand
gauuacugcuuccucauga

SEQ ID NO: 369444 - RNA, 19 nt, Homo sapiens
  misc_RNA (1)...(19): siRNA sense strand
gaccugagccugauuguag

SEQ ID NO: 369445 - RNA, 19 nt, Homo sapiens
  misc_RNA (1)...(19): siRNA sense strand
gcacuucacccuggagaaa

SEQ ID NO: 369446 - RNA, 19 nt, Homo sapiens
  misc_RNA (1)...(19): siRNA sense strand
ggcaagauccagaaacuga

SEQ ID NO: 369447 - RNA, 19 nt, Homo sapiens
  misc_RNA (1)...(19): siRNA sense strand
ccaaaggcaucuacuacgu

SEQ ID NO: 369448 - RNA, 19 nt, Homo sapiens
  misc_RNA (1)...(19): siRNA sense strand
caagagggccgugucagaa

SEQ ID NO: 369449 - RNA, 19 nt, Homo sapiens
  misc_RNA (1)...(19): siRNA sense strand
gggcuucauugguaagaug

SEQ ID NO: 369450 - RNA, 19 nt, Homo sapiens
  misc_RNA (1)...(19): siRNA sense strand
ugagcgagaucuuccugaa

SEQ ID NO: 369451 - RNA, 19 nt, Homo sapiens
  misc_RNA (1)...(19): siRNA sense strand
gagccugauuguagaguuc

SEQ ID NO: 369452 - RNA, 19 nt, Homo sapiens
  misc_RNA (1)...(19): siRNA sense strand
aacagaaccucgauuacug

SEQ ID NO: 369453 - RNA, 19 nt, Homo sapiens
  misc_RNA (1)...(19): siRNA sense strand
gagcgagaucuuccugaaa

SEQ ID NO: 369454 - RNA, 19 nt, Homo sapiens
  misc_RNA (1)...(19): siRNA sense strand
gaucggcuccuucuacaag

SEQ ID NO: 369455 - RNA, 19 nt, Homo sapiens
  misc_RNA (1)...(19): siRNA sense strand
gcaagauccagaaacugaa

SEQ ID NO: 369456 - RNA, 19 nt, Homo sapiens
  misc_RNA (1)...(19): siRNA sense strand
uccagaaacugaaggacaa

SEQ ID NO: 369457 - RNA, 19 nt, Homo sapiens
  misc_RNA (1)...(19): siRNA sense strand
cagaucggcuccuucuaca

SEQ ID NO: 369458 - RNA, 19 nt, Homo sapiens
  misc_RNA (1)...(19): siRNA sense strand
gcacugugaccggcagaaa

SEQ ID NO: 369459 - RNA, 19 nt, Homo sapiens
  misc_RNA (1)...(19): siRNA sense strand
gcagugacagagaacauca

SEQ ID NO: 369460 - RNA, 19 nt, Homo sapiens
  misc_RNA (1)...(19): siRNA sense strand
uagaguucauucucauguu

SEQ ID NO: 369461 - RNA, 19 nt, Homo sapiens
  misc_RNA (1)...(19): siRNA sense strand
gaucaagagggccguguca

SEQ ID NO: 369462 - RNA, 19 nt, Homo sapiens
  misc_RNA (1)...(19): siRNA sense strand
ggaccugagccugauugua

SEQ ID NO: 369463 - RNA, 19 nt, Homo sapiens
  misc_RNA (1)...(19): siRNA sense strand
gaaggaggacucggucauc

SEQ ID NO: 369464 - RNA, 19 nt, Homo sapiens
  misc_RNA (1)...(19): siRNA sense strand
ucaagagggccgugucaga

SEQ ID NO: 369465 - RNA, 19 nt, Homo sapiens
  misc_RNA (1)...(19): siRNA sense strand
gaggacaagcucuucaaca

SEQ ID NO: 369466 - RNA, 19 nt, Homo sapiens
  misc_RNA (1)...(19): siRNA sense strand
guagaguucauucucaugu

SEQ ID NO: 369467 - RNA, 19 nt, Homo sapiens
  misc_RNA (1)...(19): siRNA sense strand
ccacuucuacccugacuuc

SEQ ID NO: 369468 - RNA, 19 nt, Homo sapiens
  misc_RNA (1)...(19): siRNA sense strand
gguggaggaccaaacagaa

SEQ ID NO: 369469 - RNA, 19 nt, Homo sapiens
  misc_RNA (1)...(19): siRNA sense strand
ccaacuaccugagcaccau

SEQ ID NO: 369470 - RNA, 19 nt, Homo sapiens
  misc_RNA (1)...(19): siRNA sense strand
aaacagaaccucgauuacu

SEQ ID NO: 369471 - RNA, 19 nt, Homo sapiens
  misc_RNA (1)...(19): siRNA sense strand
uaccugagcaccaugaaga

SEQ ID NO: 369472 - RNA, 19 nt, Homo sapiens
  misc_RNA (1)...(19): siRNA sense strand
agaguucauucucauguuc

SEQ ID NO: 369473 - RNA, 19 nt, Homo sapiens
  misc_RNA (1)...(19): siRNA sense strand
gauguacgcgcaguccaaa

SEQ ID NO: 369474 - RNA, 19 nt, Homo sapiens
  misc_RNA (1)...(19): siRNA sense strand
ccagaucggcuccuucuac

SEQ ID NO: 369475 - RNA, 19 nt, Homo sapiens
  misc_RNA (1)...(19): siRNA sense strand
uugguaagauguucaaguc

SEQ ID NO: 369476 - RNA, 19 nt, Homo sapiens
  misc_RNA (1)...(19): siRNA sense strand
acgugcagcuggaggauga

SEQ ID NO: 369477 - RNA, 19 nt, Homo sapiens
  misc_RNA (1)...(19): siRNA sense strand
gaaacugaaggacaaagac

SEQ ID NO: 369478 - RNA, 19 nt, Homo sapiens
  misc_RNA (1)...(19): siRNA sense strand
caaacagaaccucgauuac

SEQ ID NO: 369479 - RNA, 19 nt, Homo sapiens
  misc_RNA (1)...(19): siRNA sense strand
cuucaaaccgucccucuuc

SEQ ID NO: 369480 - RNA, 19 nt, Homo sapiens
  misc_RNA (1)...(19): siRNA sense strand
cuucggcagugacagagaa

SEQ ID NO: 369481 - RNA, 19 nt, Homo sapiens
  misc_RNA (1)...(19): siRNA sense strand
gacuggagcgguucuucuu

SEQ ID NO: 369482 - RNA, 19 nt, Homo sapiens
  misc_RNA (1)...(19): siRNA sense strand
cauauucugugggugaaag

SEQ ID NO: 369483 - RNA, 19 nt, Homo sapiens
  misc_RNA (1)...(19): siRNA sense strand
agaaacugaaggacaaaga

SEQ ID NO: 369484 - RNA, 19 nt, Homo sapiens
  misc_RNA (1)...(19): siRNA sense strand
gaccaaacagaaccucgau

SEQ ID NO: 369485 - RNA, 19 nt, Homo sapiens
  misc_RNA (1)...(19): siRNA sense strand
gaaggaugcgaagcacugu

SEQ ID NO: 369486 - RNA, 19 nt, Homo sapiens
  misc_RNA (1)...(19): siRNA sense strand
aagagggccgugucagaaa

SEQ ID NO: 369487 - RNA, 19 nt, Homo sapiens
  misc_RNA (1)...(19): siRNA sense strand
cgacggcuaccuccagauc

SEQ ID NO: 369488 - RNA, 19 nt, Homo sapiens
  misc_RNA (1)...(19): siRNA sense strand
ucgacaacccucagucaga

SEQ ID NO: 369489 - RNA, 19 nt, Homo sapiens
  misc_RNA (1)...(19): siRNA sense strand
aggacaagcucuucaacac

SEQ ID NO: 369490 - RNA, 19 nt, Homo sapiens
  misc_RNA (1)...(19): siRNA sense strand
acucugcacucgcucaucu

SEQ ID NO: 369491 - RNA, 19 nt, Homo sapiens
  misc_RNA (1)...(19): siRNA sense strand
ugagccugauuguagaguu

SEQ ID NO: 369492 - RNA, 19 nt, Homo sapiens
  misc_RNA (1)...(19): siRNA sense strand
guccaaaggcaucuacuac

SEQ ID NO: 369493 - RNA, 19 nt, Homo sapiens
  misc_RNA (1)...(19): siRNA sense strand
caagauccagaaacugaag

SEQ ID NO: 369494 - RNA, 19 nt, Homo sapiens
  misc_RNA (1)...(19): siRNA sense strand
gauuguagaguucauucuc

SEQ ID NO: 369495 - RNA, 19 nt, Homo sapiens
  misc_RNA (1)...(19): siRNA sense strand
gcacgagccugaagacaua

SEQ ID NO: 369496 - RNA, 19 nt, Homo sapiens
  misc_RNA (1)...(19): siRNA sense strand
cagcugggcuucauuggua

SEQ ID NO: 369497 - RNA, 19 nt, Homo sapiens
  misc_RNA (1)...(19): siRNA sense strand
ccaaacagaaccucgauua

SEQ ID NO: 369498 - RNA, 19 nt, Homo sapiens
  misc_RNA (1)...(19): siRNA sense strand
gauuacugcuuccucauga

SEQ ID NO: 369499 - RNA, 19 nt, Homo sapiens
  misc_RNA (1)...(19): siRNA sense strand
gaccugagccugauuguag

SEQ ID NO: 369500 - RNA, 19 nt, Homo sapiens
  misc_RNA (1)...(19): siRNA sense strand
gcacuucacccuggagaaa

SEQ ID NO: 369501 - RNA, 19 nt, Homo sapiens
  misc_RNA (1)...(19): siRNA sense strand
ggcaagauccagaaacuga

SEQ ID NO: 369502 - RNA, 19 nt, Homo sapiens
  misc_RNA (1)...(19): siRNA sense strand
ccaaaggcaucuacuacgu

SEQ ID NO: 369503 - RNA, 19 nt, Homo sapiens
  misc_RNA (1)...(19): siRNA sense strand
caagagggccgugucagaa

SEQ ID NO: 369504 - RNA, 19 nt, Homo sapiens
  misc_RNA (1)...(19): siRNA sense strand
gggcuucauugguaagaug

SEQ ID NO: 369505 - RNA, 19 nt, Homo sapiens
  misc_RNA (1)...(19): siRNA sense strand
ugagcgagaucuuccugaa

SEQ ID NO: 369506 - RNA, 19 nt, Homo sapiens
  misc_RNA (1)...(19): siRNA sense strand
gagccugauuguagaguuc

SEQ ID NO: 369507 - RNA, 19 nt, Homo sapiens
  misc_RNA (1)...(19): siRNA sense strand
aacagaaccucgauuacug

SEQ ID NO: 369508 - RNA, 19 nt, Homo sapiens
  misc_RNA (1)...(19): siRNA sense strand
gagcgagaucuuccugaaa

SEQ ID NO: 369509 - RNA, 19 nt, Homo sapiens
  misc_RNA (1)...(19): siRNA sense strand
gaucggcuccuucuacaag

SEQ ID NO: 369510 - RNA, 19 nt, Homo sapiens
  misc_RNA (1)...(19): siRNA sense strand
gcaagauccagaaacugaa

SEQ ID NO: 369511 - RNA, 19 nt, Homo sapiens
  misc_RNA (1)...(19): siRNA sense strand
uccagaaacugaaggacaa

SEQ ID NO: 369512 - RNA, 19 nt, Homo sapiens
  misc_RNA (1)...(19): siRNA sense strand
cagaucggcuccuucuaca

SEQ ID NO: 369513 - RNA, 19 nt, Homo sapiens
  misc_RNA (1)...(19): siRNA sense strand
gcacugugaccggcagaaa

SEQ ID NO: 369514 - RNA, 19 nt, Homo sapiens
  misc_RNA (1)...(19): siRNA sense strand
gcagugacagagaacauca

SEQ ID NO: 369515 - RNA, 19 nt, Homo sapiens
  misc_RNA (1)...(19): siRNA sense strand
uagaguucauucucauguu

SEQ ID NO: 369516 - RNA, 19 nt, Homo sapiens
  misc_RNA (1)...(19): siRNA sense strand
gaucaagagggccguguca

SEQ ID NO: 369517 - RNA, 19 nt, Homo sapiens
  misc_RNA (1)...(19): siRNA sense strand
ggaccugagccugauugua

SEQ ID NO: 369518 - RNA, 19 nt, Homo sapiens
  misc_RNA (1)...(19): siRNA sense strand
gaaggaggacucggucauc

SEQ ID NO: 369519 - RNA, 19 nt, Homo sapiens
  misc_RNA (1)...(19): siRNA sense strand
ucaagagggccgugucaga

SEQ ID NO: 369520 - RNA, 19 nt, Homo sapiens
  misc_RNA (1)...(19): siRNA sense strand
gaggacaagcucuucaaca

SEQ ID NO: 369521 - RNA, 19 nt, Homo sapiens
  misc_RNA (1)...(19): siRNA sense strand
guagaguucauucucaugu

SEQ ID NO: 369522 - RNA, 19 nt, Homo sapiens
  misc_RNA (1)...(19): siRNA sense strand
ccacuucuacccugacuuc

SEQ ID NO: 369523 - RNA, 19 nt, Homo sapiens
  misc_RNA (1)...(19): siRNA sense strand
gguggaggaccaaacagaa

SEQ ID NO: 369524 - RNA, 19 nt, Homo sapiens
  misc_RNA (1)...(19): siRNA sense strand
ccaacuaccugagcaccau

SEQ ID NO: 369525 - RNA, 19 nt, Homo sapiens
  misc_RNA (1)...(19): siRNA sense strand
aaacagaaccucgauuacu

SEQ ID NO: 369526 - RNA, 19 nt, Homo sapiens
  misc_RNA (1)...(19): siRNA sense strand
uaccugagcaccaugaaga

SEQ ID NO: 369527 - RNA, 19 nt, Homo sapiens
  misc_RNA (1)...(19): siRNA sense strand
agaguucauucucauguuc

SEQ ID NO: 369528 - RNA, 19 nt, Homo sapiens
  misc_RNA (1)...(19): siRNA sense strand
gauguacgcgcaguccaaa

SEQ ID NO: 369529 - RNA, 19 nt, Homo sapiens
  misc_RNA (1)...(19): siRNA sense strand
ccagaucggcuccuucuac

SEQ ID NO: 369530 - RNA, 19 nt, Homo sapiens
  misc_RNA (1)...(19): siRNA sense strand
uugguaagauguucaaguc

SEQ ID NO: 369531 - RNA, 19 nt, Homo sapiens
  misc_RNA (1)...(19): siRNA sense strand
acgugcagcuggaggauga

SEQ ID NO: 369532 - RNA, 19 nt, Homo sapiens
  misc_RNA (1)...(19): siRNA sense strand
gaaacugaaggacaaagac

SEQ ID NO: 369533 - RNA, 19 nt, Homo sapiens
  misc_RNA (1)...(19): siRNA sense strand
caaacagaaccucgauuac

SEQ ID NO: 369534 - RNA, 19 nt, Homo sapiens
  misc_RNA (1)...(19): siRNA sense strand
cuucaaaccgucccucuuc

SEQ ID NO: 369535 - RNA, 19 nt, Homo sapiens
  misc_RNA (1)...(19): siRNA sense strand
cuucggcagugacagagaa

SEQ ID NO: 369536 - RNA, 19 nt, Homo sapiens
  misc_RNA (1)...(19): siRNA sense strand
gacuggagcgguucuucuu

SEQ ID NO: 369537 - RNA, 19 nt, Homo sapiens
  misc_RNA (1)...(19): siRNA sense strand
cauauucugugggugaaag

SEQ ID NO: 369538 - RNA, 19 nt, Homo sapiens
  misc_RNA (1)...(19): siRNA sense strand
agaaacugaaggacaaaga

SEQ ID NO: 369539 - RNA, 19 nt, Homo sapiens
  misc_RNA (1)...(19): siRNA sense strand
gaccaaacagaaccucgau

SEQ ID NO: 369540 - RNA, 19 nt, Homo sapiens
  misc_RNA (1)...(19): siRNA sense strand
gaaggaugcgaagcacugu

SEQ ID NO: 369541 - RNA, 19 nt, Homo sapiens
  misc_RNA (1)...(19): siRNA sense strand
aagagggccgugucagaaa

SEQ ID NO: 369542 - RNA, 19 nt, Homo sapiens
  misc_RNA (1)...(19): siRNA sense strand
cgacggcuaccuccagauc

SEQ ID NO: 369543 - RNA, 19 nt, Homo sapiens
  misc_RNA (1)...(19): siRNA sense strand
ucgacaacccucagucaga

SEQ ID NO: 369544 - RNA, 19 nt, Homo sapiens
  misc_RNA (1)...(19): siRNA sense strand
aggacaagcucuucaacac

SEQ ID NO: 369545 - RNA, 19 nt, Homo sapiens
  misc_RNA (1)...(19): siRNA sense strand
acucugcacucgcucaucu

SEQ ID NO: 369546 - RNA, 19 nt, Homo sapiens
  misc_RNA (1)...(19): siRNA sense strand
ugagccugauuguagaguu

SEQ ID NO: 369547 - RNA, 19 nt, Homo sapiens
  misc_RNA (1)...(19): siRNA sense strand
guccaaaggcaucuacuac

SEQ ID NO: 369548 - RNA, 19 nt, Homo sapiens
  misc_RNA (1)...(19): siRNA sense strand
caagauccagaaacugaag

SEQ ID NO: 369549 - RNA, 19 nt, Homo sapiens
  misc_RNA (1)...(19): siRNA sense strand
gauuguagaguucauucuc

SEQ ID NO: 369550 - RNA, 19 nt, Homo sapiens
  misc_RNA (1)...(19): siRNA sense strand
gaacagggcucugcuuaac

SEQ ID NO: 369551 - RNA, 19 nt, Homo sapiens
  misc_RNA (1)...(19): siRNA sense strand
cagagaagguggugcaauu

SEQ ID NO: 369552 - RNA, 19 nt, Homo sapiens
  misc_RNA (1)...(19): siRNA sense strand
gcucaaaggucucccucuu

SEQ ID NO: 369553 - RNA, 19 nt, Homo sapiens
  misc_RNA (1)...(19): siRNA sense strand
ucaaaggucucccucuuca

SEQ ID NO: 369554 - RNA, 19 nt, Homo sapiens
  misc_RNA (1)...(19): siRNA sense strand
aaacaccgaucugugcaua

SEQ ID NO: 369555 - RNA, 19 nt, Homo sapiens
  misc_RNA (1)...(19): siRNA sense strand
gagcacaccaccauucuga

SEQ ID NO: 369556 - RNA, 19 nt, Homo sapiens
  misc_RNA (1)...(19): siRNA sense strand
gcgaacagggcucugcuua

SEQ ID NO: 369557 - RNA, 19 nt, Homo sapiens
  misc_RNA (1)...(19): siRNA sense strand
gaucauccguaaaguagca

SEQ ID NO: 369558 - RNA, 19 nt, Homo sapiens
  misc_RNA (1)...(19): siRNA sense strand
gaauucggcugcgccaaga

SEQ ID NO: 369559 - RNA, 19 nt, Homo sapiens
  misc_RNA (1)...(19): siRNA sense strand
gagcauccaucaggaguuc

SEQ ID NO: 369560 - RNA, 19 nt, Homo sapiens
  misc_RNA (1)...(19): siRNA sense strand
caagugugcauuccaguuu

SEQ ID NO: 369561 - RNA, 19 nt, Homo sapiens
  misc_RNA (1)...(19): siRNA sense strand
ccagaaaucauacggaaau

SEQ ID NO: 369562 - RNA, 19 nt, Homo sapiens
  misc_RNA (1)...(19): siRNA sense strand
agacgcagaagcugaauuu

SEQ ID NO: 369563 - RNA, 19 nt, Homo sapiens
  misc_RNA (1)...(19): siRNA sense strand
caagguggcccagaaauca

SEQ ID NO: 369564 - RNA, 19 nt, Homo sapiens
  misc_RNA (1)...(19): siRNA sense strand
gcaccaacuuccaccucuu

SEQ ID NO: 369565 - RNA, 19 nt, Homo sapiens
  misc_RNA (1)...(19): siRNA sense strand
gaagaagcagucgcugaaa

SEQ ID NO: 369566 - RNA, 19 nt, Homo sapiens
  misc_RNA (1)...(19): siRNA sense strand
ucgaagcccucgcagaaga

SEQ ID NO: 369567 - RNA, 19 nt, Homo sapiens
  misc_RNA (1)...(19): siRNA sense strand
cgcagaagcugaauuucga

SEQ ID NO: 369568 - RNA, 19 nt, Homo sapiens
  misc_RNA (1)...(19): siRNA sense strand
ccaagacccuguacaucuc

SEQ ID NO: 369569 - RNA, 19 nt, Homo sapiens
  misc_RNA (1)...(19): siRNA sense strand
gcaacagugugaacagacu

SEQ ID NO: 369570 - RNA, 19 nt, Homo sapiens
  misc_RNA (1)...(19): siRNA sense strand
cagcaacagugugaacaga

SEQ ID NO: 369571 - RNA, 19 nt, Homo sapiens
  misc_RNA (1)...(19): siRNA sense strand
agaagguggugcaauuuca

SEQ ID NO: 369572 - RNA, 19 nt, Homo sapiens
  misc_RNA (1)...(19): siRNA sense strand
gagaagguggugcaauuuc

SEQ ID NO: 369573 - RNA, 19 nt, Homo sapiens
  misc_RNA (1)...(19): siRNA sense strand
caugaucauccguaaagua

SEQ ID NO: 369574 - RNA, 19 nt, Homo sapiens
  misc_RNA (1)...(19): siRNA sense strand
cgaacagggcucugcuuaa

SEQ ID NO: 369575 - RNA, 19 nt, Homo sapiens
  misc_RNA (1)...(19): siRNA sense strand
agaagaagcagucgcugaa

SEQ ID NO: 369576 - RNA, 19 nt, Homo sapiens
  misc_RNA (1)...(19): siRNA sense strand
gccaagacccuguacaucu

SEQ ID NO: 369577 - RNA, 19 nt, Homo sapiens
  misc_RNA (1)...(19): siRNA sense strand
caacuuccaccucuucauc

SEQ ID NO: 369578 - RNA, 19 nt, Homo sapiens
  misc_RNA (1)...(19): siRNA sense strand
ccuagugccuucuccuuca

SEQ ID NO: 369579 - RNA, 19 nt, Homo sapiens
  misc_RNA (1)...(19): siRNA sense strand
ucucgaagcccucgcagaa

SEQ ID NO: 369580 - RNA, 19 nt, Homo sapiens
  misc_RNA (1)...(19): siRNA sense strand
acagggcucugcuuaacga

SEQ ID NO: 369581 - RNA, 19 nt, Homo sapiens
  misc_RNA (1)...(19): siRNA sense strand
cacacuaccucccaugauc

SEQ ID NO: 369582 - RNA, 19 nt, Homo sapiens
  misc_RNA (1)...(19): siRNA sense strand
uuaucaaggucaucucgaa

SEQ ID NO: 369583 - RNA, 19 nt, Homo sapiens
  misc_RNA (1)...(19): siRNA sense strand
ucucccagcugcacaagug

SEQ ID NO: 369584 - RNA, 19 nt, Homo sapiens
  misc_RNA (1)...(19): siRNA sense strand
gacaagaggaagcacuuuc

SEQ ID NO: 369585 - RNA, 19 nt, Homo sapiens
  misc_RNA (1)...(19): siRNA sense strand
ccagagcacaccaccauuc

SEQ ID NO: 369586 - RNA, 19 nt, Homo sapiens
  misc_RNA (1)...(19): siRNA sense strand
gcaggacagaucagagaug

SEQ ID NO: 369587 - RNA, 19 nt, Homo sapiens
  misc_RNA (1)...(19): siRNA sense strand
acaccgaucugugcauauc

SEQ ID NO: 369588 - RNA, 19 nt, Homo sapiens
  misc_RNA (1)...(19): siRNA sense strand
ccacugagacgcagaagcu

SEQ ID NO: 369589 - RNA, 19 nt, Homo sapiens
  misc_RNA (1)...(19): siRNA sense strand
agugugcgcuccuugaugu

SEQ ID NO: 369590 - RNA, 19 nt, Homo sapiens
  misc_RNA (1)...(19): siRNA sense strand
cagaaaucauacggaaaug

SEQ ID NO: 369591 - RNA, 19 nt, Homo sapiens
  misc_RNA (1)...(19): siRNA sense strand
ccacagccgccuuaucaag

SEQ ID NO: 369592 - RNA, 19 nt, Homo sapiens
  misc_RNA (1)...(19): siRNA sense strand
ggucaccggcaucacacua

SEQ ID NO: 369593 - RNA, 19 nt, Homo sapiens
  misc_RNA (1)...(19): siRNA sense strand
cagccggacuccagggaau

SEQ ID NO: 369594 - RNA, 19 nt, Homo sapiens
  misc_RNA (1)...(19): siRNA sense strand
ccaagguggcccagaaauc

SEQ ID NO: 369595 - RNA, 19 nt, Homo sapiens
  misc_RNA (1)...(19): siRNA sense strand
acuuaugccuugccacaga

SEQ ID NO: 369596 - RNA, 19 nt, Homo sapiens
  misc_RNA (1)...(19): siRNA sense strand
gcgccaagacccuguacau

SEQ ID NO: 369597 - RNA, 19 nt, Homo sapiens
  misc_RNA (1)...(19): siRNA sense strand
gggcucuucuacccuagug

SEQ ID NO: 369598 - RNA, 19 nt, Homo sapiens
  misc_RNA (1)...(19): siRNA sense strand
uaaaguagcaaaacagugu

SEQ ID NO: 369599 - RNA, 19 nt, Homo sapiens
  misc_RNA (1)...(19): siRNA sense strand
agagaagguggugcaauuu

SEQ ID NO: 369600 - RNA, 19 nt, Homo sapiens
  misc_RNA (1)...(19): siRNA sense strand
gcauauccuccggcucaaa

SEQ ID NO: 369601 - RNA, 19 nt, Homo sapiens
  misc_RNA (1)...(19): siRNA sense strand
cagacaagaggaagcacuu

SEQ ID NO: 369602 - RNA, 19 nt, Homo sapiens
  misc_RNA (1)...(19): siRNA sense strand
ggaggcagaaaccauguac

SEQ ID NO: 369603 - RNA, 19 nt, Homo sapiens
  misc_RNA (1)...(19): siRNA sense strand
aagaagcagucgcugaaaa

SEQ ID NO: 369604 - RNA, 19 nt, Homo sapiens
  misc_RNA (1)...(19): siRNA sense strand
uuccacagccgccuuauca

SEQ ID NO: 369605 - RNA, 19 nt, Homo sapiens
  misc_RNA (1)...(19): siRNA sense strand
gaagguggugcaauuucag

SEQ ID NO: 369606 - RNA, 19 nt, Homo sapiens
  misc_RNA (1)...(19): siRNA sense strand
gggcucaaggugugguuug

SEQ ID NO: 369607 - RNA, 19 nt, Homo sapiens
  misc_RNA (1)...(19): siRNA sense strand
gaugggcacugaacucacu

SEQ ID NO: 369608 - RNA, 19 nt, Homo sapiens
  misc_RNA (1)...(19): siRNA sense strand
gaugggcacugaacucacu

SEQ ID NO: 369609 - RNA, 19 nt, Homo sapiens
  misc_RNA (1)...(19): siRNA sense strand
gaugggcacugaacucacu

SEQ ID NO: 369610 - RNA, 19 nt, Homo sapiens
  misc_RNA (1)...(19): siRNA sense strand
ggaggaggaugcagaaauc

SEQ ID NO: 369611 - RNA, 19 nt, Homo sapiens
  misc_RNA (1)...(19): siRNA sense strand
gggcagacccagcaacaua

SEQ ID NO: 369612 - RNA, 19 nt, Homo sapiens
  misc_RNA (1)...(19): siRNA sense strand
gaucacagcucaggaagca

SEQ ID NO: 369613 - RNA, 19 nt, Homo sapiens
  misc_RNA (1)...(19): siRNA sense strand
ggaagaagaggagcuguuu

SEQ ID NO: 369614 - RNA, 19 nt, Homo sapiens
  misc_RNA (1)...(19): siRNA sense strand
gcaggagucuacagugaug

SEQ ID NO: 369615 - RNA, 19 nt, Homo sapiens
  misc_RNA (1)...(19): siRNA sense strand
caagaucuuuguggaguuu

SEQ ID NO: 369616 - RNA, 19 nt, Homo sapiens
  misc_RNA (1)...(19): siRNA sense strand
gcacagacuccaucaagau

SEQ ID NO: 369617 - RNA, 19 nt, Homo sapiens
  misc_RNA (1)...(19): siRNA sense strand
gcagaaaucauugucaaga

SEQ ID NO: 369618 - RNA, 19 nt, Homo sapiens
  misc_RNA (1)...(19): siRNA sense strand
ggaggaugcagaaaucauu

SEQ ID NO: 369619 - RNA, 19 nt, Homo sapiens
  misc_RNA (1)...(19): siRNA sense strand
gcaaggugguggcugaagu

SEQ ID NO: 369620 - RNA, 19 nt, Homo sapiens
  misc_RNA (1)...(19): siRNA sense strand
gaugcugugucuuccauga

SEQ ID NO: 369621 - RNA, 19 nt, Homo sapiens
  misc_RNA (1)...(19): siRNA sense strand
aagcaggagucuacaguga

SEQ ID NO: 369622 - RNA, 19 nt, Homo sapiens
  misc_RNA (1)...(19): siRNA sense strand
ggugguggcugaaguguac

SEQ ID NO: 369623 - RNA, 19 nt, Homo sapiens
  misc_RNA (1)...(19): siRNA sense strand
caagaucacagcucaggaa

SEQ ID NO: 369624 - RNA, 19 nt, Homo sapiens
  misc_RNA (1)...(19): siRNA sense strand
caucaucuaccaagagaaa

SEQ ID NO: 369625 - RNA, 19 nt, Homo sapiens
  misc_RNA (1)...(19): siRNA sense strand
ccaagaaggagaaggaaga

SEQ ID NO: 369626 - RNA, 19 nt, Homo sapiens
  misc_RNA (1)...(19): siRNA sense strand
cagaaaucauugucaagau

SEQ ID NO: 369627 - RNA, 19 nt, Homo sapiens
  misc_RNA (1)...(19): siRNA sense strand
gcuacggcuucauugagua

SEQ ID NO: 369628 - RNA, 19 nt, Homo sapiens
  misc_RNA (1)...(19): siRNA sense strand
gcaucuacguggccucugu

SEQ ID NO: 369629 - RNA, 19 nt, Homo sapiens
  misc_RNA (1)...(19): siRNA sense strand
agaaaucauugucaagauc

SEQ ID NO: 369630 - RNA, 19 nt, Homo sapiens
  misc_RNA (1)...(19): siRNA sense strand
ucaagagugugcuggugaa

SEQ ID NO: 369631 - RNA, 19 nt, Homo sapiens
  misc_RNA (1)...(19): siRNA sense strand
ggcacagacuccaucaaga

SEQ ID NO: 369632 - RNA, 19 nt, Homo sapiens
  misc_RNA (1)...(19): siRNA sense strand
gagcguguuugaggccuuu

SEQ ID NO: 369633 - RNA, 19 nt, Homo sapiens
  misc_RNA (1)...(19): siRNA sense strand
ccauagcucuccaggucaa

SEQ ID NO: 369634 - RNA, 19 nt, Homo sapiens
  misc_RNA (1)...(19): siRNA sense strand
cugcacagcuggccuugga

SEQ ID NO: 369635 - RNA, 19 nt, Homo sapiens
  misc_RNA (1)...(19): siRNA sense strand
gaaaucauugucaagaucu

SEQ ID NO: 369636 - RNA, 19 nt, Homo sapiens
  misc_RNA (1)...(19): siRNA sense strand
caagggcuacggcuucauu

SEQ ID NO: 369637 - RNA, 19 nt, Homo sapiens
  misc_RNA (1)...(19): siRNA sense strand
gacacauggugaugcagaa

SEQ ID NO: 369638 - RNA, 19 nt, Homo sapiens
  misc_RNA (1)...(19): siRNA sense strand
gcaagcaggagucuacagu

SEQ ID NO: 369639 - RNA, 19 nt, Homo sapiens
  misc_RNA (1)...(19): siRNA sense strand
agaaggagaaggaagaaga

SEQ ID NO: 369640 - RNA, 19 nt, Homo sapiens
  misc_RNA (1)...(19): siRNA sense strand
gggacuccgucaccaugaa

SEQ ID NO: 369641 - RNA, 19 nt, Homo sapiens
  misc_RNA (1)...(19): siRNA sense strand
gucaucaucuaccaagaga

SEQ ID NO: 369642 - RNA, 19 nt, Homo sapiens
  misc_RNA (1)...(19): siRNA sense strand
ggagcuguuucccgaguca

SEQ ID NO: 369643 - RNA, 19 nt, Homo sapiens
  misc_RNA (1)...(19): siRNA sense strand
ugacaucaagagcguguuu

SEQ ID NO: 369644 - RNA, 19 nt, Homo sapiens
  misc_RNA (1)...(19): siRNA sense strand
gguggcagcgggagacaaa

SEQ ID NO: 369645 - RNA, 19 nt, Homo sapiens
  misc_RNA (1)...(19): siRNA sense strand
ccaggucaauggccagcaa

SEQ ID NO: 369646 - RNA, 19 nt, Homo sapiens
  misc_RNA (1)...(19): siRNA sense strand
ucaagagcaucgacauguc

SEQ ID NO: 369647 - RNA, 19 nt, Homo sapiens
  misc_RNA (1)...(19): siRNA sense strand
gggcacagacuccaucaag

SEQ ID NO: 369648 - RNA, 19 nt, Homo sapiens
  misc_RNA (1)...(19): siRNA sense strand
gaagaagaggagcuguuuc

SEQ ID NO: 369649 - RNA, 19 nt, Homo sapiens
  misc_RNA (1)...(19): siRNA sense strand
gcagaugaacucggugaug

SEQ ID NO: 369650 - RNA, 19 nt, Homo sapiens
  misc_RNA (1)...(19): siRNA sense strand
cgugggcucuaucuacuau

SEQ ID NO: 369651 - RNA, 19 nt, Homo sapiens
  misc_RNA (1)...(19): siRNA sense strand
ucaagaucuuuguggaguu

SEQ ID NO: 369652 - RNA, 19 nt, Homo sapiens
  misc_RNA (1)...(19): siRNA sense strand
gaggaugcagaaaucauug

SEQ ID NO: 369653 - RNA, 19 nt, Homo sapiens
  misc_RNA (1)...(19): siRNA sense strand
gaaggagaaggaagaagag

SEQ ID NO: 369654 - RNA, 19 nt, Homo sapiens
  misc_RNA (1)...(19): siRNA sense strand
gcaggcccagcccaucaua

SEQ ID NO: 369655 - RNA, 19 nt, Homo sapiens
  misc_RNA (1)...(19): siRNA sense strand
gcuuugccuucguggagua

SEQ ID NO: 369656 - RNA, 19 nt, Homo sapiens
  misc_RNA (1)...(19): siRNA sense strand
caagaaggagaaggaagaa

SEQ ID NO: 369657 - RNA, 19 nt, Homo sapiens
  misc_RNA (1)...(19): siRNA sense strand
ugaaccgcgucaucaucua

SEQ ID NO: 369658 - RNA, 19 nt, Homo sapiens
  misc_RNA (1)...(19): siRNA sense strand
agaggaguguggcaaguuc

SEQ ID NO: 369659 - RNA, 19 nt, Homo sapiens
  misc_RNA (1)...(19): siRNA sense strand
ugggcucuaucuacuauga

SEQ ID NO: 369660 - RNA, 19 nt, Homo sapiens
  misc_RNA (1)...(19): siRNA sense strand
ugauaacagugaccucucu

SEQ ID NO: 369661 - RNA, 19 nt, Homo sapiens
  misc_RNA (1)...(19): siRNA sense strand
uucagaaggccaagaagua

SEQ ID NO: 369662 - RNA, 19 nt, Homo sapiens
  misc_RNA (1)...(19): siRNA sense strand
gcccagucgucccaagaug

SEQ ID NO: 369663 - RNA, 19 nt, Homo sapiens
  misc_RNA (1)...(19): siRNA sense strand
ggcuacggcuucauugagu

SEQ ID NO: 369664 - RNA, 19 nt, Homo sapiens
  misc_RNA (1)...(19): siRNA sense strand
ccaagaaguacgccaugga

SEQ ID NO: 369665 - RNA, 19 nt, Homo sapiens
  misc_RNA (1)...(19): siRNA sense strand
ccacaacuggcaagcacaa

SEQ ID NO: 369666 - RNA, 19 nt, Homo sapiens
  misc_RNA (1)...(19): siRNA sense strand
augcagaaaucauugucaa

SEQ ID NO: 369667 - RNA, 19 nt, Homo sapiens
  misc_RNA (1)...(19): siRNA sense strand
gaaccgcgucaucaucuac

SEQ ID NO: 369668 - RNA, 19 nt, Homo sapiens
  misc_RNA (1)...(19): siRNA sense strand
gaccaggagcguuuugaua

SEQ ID NO: 369669 - RNA, 19 nt, Homo sapiens
  misc_RNA (1)...(19): siRNA sense strand
cacaagggcuacggcuuca

SEQ ID NO: 369670 - RNA, 19 nt, Homo sapiens
  misc_RNA (1)...(19): siRNA sense strand
gucccaagaugcugugucu

SEQ ID NO: 369671 - RNA, 19 nt, Homo sapiens
  misc_RNA (1)...(19): siRNA sense strand
caucaagagcaucgacaug

SEQ ID NO: 369672 - RNA, 19 nt, Homo sapiens
  misc_RNA (1)...(19): siRNA sense strand
ccucaauggccgcugguuu

SEQ ID NO: 369673 - RNA, 19 nt, Homo sapiens
  misc_RNA (1)...(19): siRNA sense strand
cgaggaggaggaugcagaa

SEQ ID NO: 369674 - RNA, 19 nt, Homo sapiens
  misc_RNA (1)...(19): siRNA sense strand
ggaggugacagaggagugu

SEQ ID NO: 369675 - RNA, 19 nt, Homo sapiens
  misc_RNA (1)...(19): siRNA sense strand
caaggugguggcugaagug

SEQ ID NO: 369676 - RNA, 19 nt, Homo sapiens
  misc_RNA (1)...(19): siRNA sense strand
cuacgugggcucuaucuac

SEQ ID NO: 369677 - RNA, 19 nt, Homo sapiens
  misc_RNA (1)...(19): siRNA sense strand
gggcuacggcuucauugag

SEQ ID NO: 369678 - RNA, 19 nt, Homo sapiens
  misc_RNA (1)...(19): siRNA sense strand
cucaauggccgcugguuug

SEQ ID NO: 369679 - RNA, 19 nt, Homo sapiens
  misc_RNA (1)...(19): siRNA sense strand
ggucaauggccagcaagga

SEQ ID NO: 369680 - RNA, 19 nt, Homo sapiens
  misc_RNA (1)...(19): siRNA sense strand
gaugcagaaaucauuguca

SEQ ID NO: 369681 - RNA, 19 nt, Homo sapiens
  misc_RNA (1)...(19): siRNA sense strand
agucagagcggccagagau

SEQ ID NO: 369682 - RNA, 19 nt, Homo sapiens
  misc_RNA (1)...(19): siRNA sense strand
ugucuuccaugaaccucuu

SEQ ID NO: 369683 - RNA, 19 nt, Homo sapiens
  misc_RNA (1)...(19): siRNA sense strand
ggaggaggaugcagaaauc

SEQ ID NO: 369684 - RNA, 19 nt, Homo sapiens
  misc_RNA (1)...(19): siRNA sense strand
gggcagacccagcaacaua

SEQ ID NO: 369685 - RNA, 19 nt, Homo sapiens
  misc_RNA (1)...(19): siRNA sense strand
gaucacagcucaggaagca

SEQ ID NO: 369686 - RNA, 19 nt, Homo sapiens
  misc_RNA (1)...(19): siRNA sense strand
ggaagaagaggagcuguuu

SEQ ID NO: 369687 - RNA, 19 nt, Homo sapiens
  misc_RNA (1)...(19): siRNA sense strand
gcaggagucuacagugaug

SEQ ID NO: 369688 - RNA, 19 nt, Homo sapiens
  misc_RNA (1)...(19): siRNA sense strand
caagaucuuuguggaguuu

SEQ ID NO: 369689 - RNA, 19 nt, Homo sapiens
  misc_RNA (1)...(19): siRNA sense strand
gcacagacuccaucaagau

SEQ ID NO: 369690 - RNA, 19 nt, Homo sapiens
  misc_RNA (1)...(19): siRNA sense strand
gcagaaaucauugucaaga

SEQ ID NO: 369691 - RNA, 19 nt, Homo sapiens
  misc_RNA (1)...(19): siRNA sense strand
ggaggaugcagaaaucauu

SEQ ID NO: 369692 - RNA, 19 nt, Homo sapiens
  misc_RNA (1)...(19): siRNA sense strand
gcaaggugguggcugaagu

SEQ ID NO: 369693 - RNA, 19 nt, Homo sapiens
  misc_RNA (1)...(19): siRNA sense strand
gaugcugugucuuccauga

SEQ ID NO: 369694 - RNA, 19 nt, Homo sapiens
  misc_RNA (1)...(19): siRNA sense strand
aagcaggagucuacaguga

SEQ ID NO: 369695 - RNA, 19 nt, Homo sapiens
  misc_RNA (1)...(19): siRNA sense strand
ggugguggcugaaguguac

SEQ ID NO: 369696 - RNA, 19 nt, Homo sapiens
  misc_RNA (1)...(19): siRNA sense strand
caagaucacagcucaggaa

SEQ ID NO: 369697 - RNA, 19 nt, Homo sapiens
  misc_RNA (1)...(19): siRNA sense strand
caucaucuaccaagagaaa

SEQ ID NO: 369698 - RNA, 19 nt, Homo sapiens
  misc_RNA (1)...(19): siRNA sense strand
ccaagaaggagaaggaaga

SEQ ID NO: 369699 - RNA, 19 nt, Homo sapiens
  misc_RNA (1)...(19): siRNA sense strand
cagaaaucauugucaagau

SEQ ID NO: 369700 - RNA, 19 nt, Homo sapiens
  misc_RNA (1)...(19): siRNA sense strand
gcuacggcuucauugagua

SEQ ID NO: 369701 - RNA, 19 nt, Homo sapiens
  misc_RNA (1)...(19): siRNA sense strand
gcaucuacguggccucugu

SEQ ID NO: 369702 - RNA, 19 nt, Homo sapiens
  misc_RNA (1)...(19): siRNA sense strand
agaaaucauugucaagauc

SEQ ID NO: 369703 - RNA, 19 nt, Homo sapiens
  misc_RNA (1)...(19): siRNA sense strand
ucaagagugugcuggugaa

SEQ ID NO: 369704 - RNA, 19 nt, Homo sapiens
  misc_RNA (1)...(19): siRNA sense strand
ggcacagacuccaucaaga

SEQ ID NO: 369705 - RNA, 19 nt, Homo sapiens
  misc_RNA (1)...(19): siRNA sense strand
gagcguguuugaggccuuu

SEQ ID NO: 369706 - RNA, 19 nt, Homo sapiens
  misc_RNA (1)...(19): siRNA sense strand
ccauagcucuccaggucaa

SEQ ID NO: 369707 - RNA, 19 nt, Homo sapiens
  misc_RNA (1)...(19): siRNA sense strand
cugcacagcuggccuugga

SEQ ID NO: 369708 - RNA, 19 nt, Homo sapiens
  misc_RNA (1)...(19): siRNA sense strand
gaaaucauugucaagaucu

SEQ ID NO: 369709 - RNA, 19 nt, Homo sapiens
  misc_RNA (1)...(19): siRNA sense strand
caagggcuacggcuucauu

SEQ ID NO: 369710 - RNA, 19 nt, Homo sapiens
  misc_RNA (1)...(19): siRNA sense strand
gacacauggugaugcagaa

SEQ ID NO: 369711 - RNA, 19 nt, Homo sapiens
  misc_RNA (1)...(19): siRNA sense strand
gcaagcaggagucuacagu

SEQ ID NO: 369712 - RNA, 19 nt, Homo sapiens
  misc_RNA (1)...(19): siRNA sense strand
agaaggagaaggaagaaga

SEQ ID NO: 369713 - RNA, 19 nt, Homo sapiens
  misc_RNA (1)...(19): siRNA sense strand
gggacuccgucaccaugaa

SEQ ID NO: 369714 - RNA, 19 nt, Homo sapiens
  misc_RNA (1)...(19): siRNA sense strand
gucaucaucuaccaagaga

SEQ ID NO: 369715 - RNA, 19 nt, Homo sapiens
  misc_RNA (1)...(19): siRNA sense strand
ggagcuguuucccgaguca

SEQ ID NO: 369716 - RNA, 19 nt, Homo sapiens
  misc_RNA (1)...(19): siRNA sense strand
ugacaucaagagcguguuu

SEQ ID NO: 369717 - RNA, 19 nt, Homo sapiens
  misc_RNA (1)...(19): siRNA sense strand
gguggcagcgggagacaaa

SEQ ID NO: 369718 - RNA, 19 nt, Homo sapiens
  misc_RNA (1)...(19): siRNA sense strand
ccaggucaauggccagcaa

SEQ ID NO: 369719 - RNA, 19 nt, Homo sapiens
  misc_RNA (1)...(19): siRNA sense strand
ucaagagcaucgacauguc

SEQ ID NO: 369720 - RNA, 19 nt, Homo sapiens
  misc_RNA (1)...(19): siRNA sense strand
gggcacagacuccaucaag

SEQ ID NO: 369721 - RNA, 19 nt, Homo sapiens
  misc_RNA (1)...(19): siRNA sense strand
gaagaagaggagcuguuuc

SEQ ID NO: 369722 - RNA, 19 nt, Homo sapiens
  misc_RNA (1)...(19): siRNA sense strand
gcagaugaacucggugaug

SEQ ID NO: 369723 - RNA, 19 nt, Homo sapiens
  misc_RNA (1)...(19): siRNA sense strand
cgugggcucuaucuacuau

SEQ ID NO: 369724 - RNA, 19 nt, Homo sapiens
  misc_RNA (1)...(19): siRNA sense strand
ucaagaucuuuguggaguu

SEQ ID NO: 369725 - RNA, 19 nt, Homo sapiens
  misc_RNA (1)...(19): siRNA sense strand
gaggaugcagaaaucauug

SEQ ID NO: 369726 - RNA, 19 nt, Homo sapiens
  misc_RNA (1)...(19): siRNA sense strand
gaaggagaaggaagaagag

SEQ ID NO: 369727 - RNA, 19 nt, Homo sapiens
  misc_RNA (1)...(19): siRNA sense strand
gcaggcccagcccaucaua

SEQ ID NO: 369728 - RNA, 19 nt, Homo sapiens
  misc_RNA (1)...(19): siRNA sense strand
gcuuugccuucguggagua

SEQ ID NO: 369729 - RNA, 19 nt, Homo sapiens
  misc_RNA (1)...(19): siRNA sense strand
caagaaggagaaggaagaa

SEQ ID NO: 369730 - RNA, 19 nt, Homo sapiens
  misc_RNA (1)...(19): siRNA sense strand
ugaaccgcgucaucaucua

SEQ ID NO: 369731 - RNA, 19 nt, Homo sapiens
  misc_RNA (1)...(19): siRNA sense strand
agaggaguguggcaaguuc

SEQ ID NO: 369732 - RNA, 19 nt, Homo sapiens
  misc_RNA (1)...(19): siRNA sense strand
ugggcucuaucuacuauga

SEQ ID NO: 369733 - RNA, 19 nt, Homo sapiens
  misc_RNA (1)...(19): siRNA sense strand
ugauaacagugaccucucu

SEQ ID NO: 369734 - RNA, 19 nt, Homo sapiens
  misc_RNA (1)...(19): siRNA sense strand
uucagaaggccaagaagua

SEQ ID NO: 369735 - RNA, 19 nt, Homo sapiens
  misc_RNA (1)...(19): siRNA sense strand
gcccagucgucccaagaug

SEQ ID NO: 369736 - RNA, 19 nt, Homo sapiens
  misc_RNA (1)...(19): siRNA sense strand
ggcuacggcuucauugagu

SEQ ID NO: 369737 - RNA, 19 nt, Homo sapiens
  misc_RNA (1)...(19): siRNA sense strand
ccaagaaguacgccaugga

SEQ ID NO: 369738 - RNA, 19 nt, Homo sapiens
  misc_RNA (1)...(19): siRNA sense strand
ccacaacuggcaagcacaa

SEQ ID NO: 369739 - RNA, 19 nt, Homo sapiens
  misc_RNA (1)...(19): siRNA sense strand
augcagaaaucauugucaa

SEQ ID NO: 369740 - RNA, 19 nt, Homo sapiens
  misc_RNA (1)...(19): siRNA sense strand
gaaccgcgucaucaucuac

SEQ ID NO: 369741 - RNA, 19 nt, Homo sapiens
  misc_RNA (1)...(19): siRNA sense strand
gaccaggagcguuuugaua

SEQ ID NO: 369742 - RNA, 19 nt, Homo sapiens
  misc_RNA (1)...(19): siRNA sense strand
cacaagggcuacggcuuca

SEQ ID NO: 369743 - RNA, 19 nt, Homo sapiens
  misc_RNA (1)...(19): siRNA sense strand
gucccaagaugcugugucu

SEQ ID NO: 369744 - RNA, 19 nt, Homo sapiens
  misc_RNA (1)...(19): siRNA sense strand
caucaagagcaucgacaug

SEQ ID NO: 369745 - RNA, 19 nt, Homo sapiens
  misc_RNA (1)...(19): siRNA sense strand
ccucaauggccgcugguuu

SEQ ID NO: 369746 - RNA, 19 nt, Homo sapiens
  misc_RNA (1)...(19): siRNA sense strand
cgaggaggaggaugcagaa

SEQ ID NO: 369747 - RNA, 19 nt, Homo sapiens
  misc_RNA (1)...(19): siRNA sense strand
ggaggugacagaggagugu

SEQ ID NO: 369748 - RNA, 19 nt, Homo sapiens
  misc_RNA (1)...(19): siRNA sense strand
caaggugguggcugaagug

SEQ ID NO: 369749 - RNA, 19 nt, Homo sapiens
  misc_RNA (1)...(19): siRNA sense strand
cuacgugggcucuaucuac

SEQ ID NO: 369750 - RNA, 19 nt, Homo sapiens
  misc_RNA (1)...(19): siRNA sense strand
gggcuacggcuucauugag

SEQ ID NO: 369751 - RNA, 19 nt, Homo sapiens
  misc_RNA (1)...(19): siRNA sense strand
cucaauggccgcugguuug

SEQ ID NO: 369752 - RNA, 19 nt, Homo sapiens
  misc_RNA (1)...(19): siRNA sense strand
ggucaauggccagcaagga

SEQ ID NO: 369753 - RNA, 19 nt, Homo sapiens
  misc_RNA (1)...(19): siRNA sense strand
gaugcagaaaucauuguca

SEQ ID NO: 369754 - RNA, 19 nt, Homo sapiens
  misc_RNA (1)...(19): siRNA sense strand
agucagagcggccagagau

SEQ ID NO: 369755 - RNA, 19 nt, Homo sapiens
  misc_RNA (1)...(19): siRNA sense strand
ugucuuccaugaaccucuu

SEQ ID NO: 369756 - RNA, 19 nt, Homo sapiens
  misc_RNA (1)...(19): siRNA sense strand
gcacaaggauccuacauug

SEQ ID NO: 369757 - RNA, 19 nt, Homo sapiens
  misc_RNA (1)...(19): siRNA sense strand
gagcagggcugacguugaa

SEQ ID NO: 369758 - RNA, 19 nt, Homo sapiens
  misc_RNA (1)...(19): siRNA sense strand
ggucagauaucaaucauuc

SEQ ID NO: 369759 - RNA, 19 nt, Homo sapiens
  misc_RNA (1)...(19): siRNA sense strand
gaaagucucuugcuugaac

SEQ ID NO: 369760 - RNA, 19 nt, Homo sapiens
  misc_RNA (1)...(19): siRNA sense strand
gaaaugggcgugagaaugu

SEQ ID NO: 369761 - RNA, 19 nt, Homo sapiens
  misc_RNA (1)...(19): siRNA sense strand
ccuaguaucuuuacauuga

SEQ ID NO: 369762 - RNA, 19 nt, Homo sapiens
  misc_RNA (1)...(19): siRNA sense strand
gggaaagucucuugcuuga

SEQ ID NO: 369763 - RNA, 19 nt, Homo sapiens
  misc_RNA (1)...(19): siRNA sense strand
ggagacagaugcucaugga

SEQ ID NO: 369764 - RNA, 19 nt, Homo sapiens
  misc_RNA (1)...(19): siRNA sense strand
gagcaccucuacuuugaaa

SEQ ID NO: 369765 - RNA, 19 nt, Homo sapiens
  misc_RNA (1)...(19): siRNA sense strand
ggagaugguagaugaguua

SEQ ID NO: 369766 - RNA, 19 nt, Homo sapiens
  misc_RNA (1)...(19): siRNA sense strand
gggagaggauuaccuuuga

SEQ ID NO: 369767 - RNA, 19 nt, Homo sapiens
  misc_RNA (1)...(19): siRNA sense strand
ggcguaagcuuugagauaa

SEQ ID NO: 369768 - RNA, 19 nt, Homo sapiens
  misc_RNA (1)...(19): siRNA sense strand
cagaacgacugcagcauuu

SEQ ID NO: 369769 - RNA, 19 nt, Homo sapiens
  misc_RNA (1)...(19): siRNA sense strand
ggaauaaugacaucgauga

SEQ ID NO: 369770 - RNA, 19 nt, Homo sapiens
  misc_RNA (1)...(19): siRNA sense strand
gagcaagcguucuauaucu

SEQ ID NO: 369771 - RNA, 19 nt, Homo sapiens
  misc_RNA (1)...(19): siRNA sense strand
ugacaaaggugccuacagu

SEQ ID NO: 369772 - RNA, 19 nt, Homo sapiens
  misc_RNA (1)...(19): siRNA sense strand
gaacggacccgaaggagau

SEQ ID NO: 369773 - RNA, 19 nt, Homo sapiens
  misc_RNA (1)...(19): siRNA sense strand
gaugguagaugaguuacaa

SEQ ID NO: 369774 - RNA, 19 nt, Homo sapiens
  misc_RNA (1)...(19): siRNA sense strand
cgaggaagcugccugaaca

SEQ ID NO: 369775 - RNA, 19 nt, Homo sapiens
  misc_RNA (1)...(19): siRNA sense strand
agauaaagcuguacaccaa

SEQ ID NO: 369776 - RNA, 19 nt, Homo sapiens
  misc_RNA (1)...(19): siRNA sense strand
gcaguagucacccugaaua

SEQ ID NO: 369777 - RNA, 19 nt, Homo sapiens
  misc_RNA (1)...(19): siRNA sense strand
ugauugagguugggaauaa

SEQ ID NO: 369778 - RNA, 19 nt, Homo sapiens
  misc_RNA (1)...(19): siRNA sense strand
aaacacaccaccuugauuu

SEQ ID NO: 369779 - RNA, 19 nt, Homo sapiens
  misc_RNA (1)...(19): siRNA sense strand
ucaaaggagucaaccgauu

SEQ ID NO: 369780 - RNA, 19 nt, Homo sapiens
  misc_RNA (1)...(19): siRNA sense strand
gcagugggcuaccauaaac

SEQ ID NO: 369781 - RNA, 19 nt, Homo sapiens
  misc_RNA (1)...(19): siRNA sense strand
acgagagucugguguauuu

SEQ ID NO: 369782 - RNA, 19 nt, Homo sapiens
  misc_RNA (1)...(19): siRNA sense strand
gagaagacaccgugacaga

SEQ ID NO: 369783 - RNA, 19 nt, Homo sapiens
  misc_RNA (1)...(19): siRNA sense strand
gacagaugcucauggauca

SEQ ID NO: 369784 - RNA, 19 nt, Homo sapiens
  misc_RNA (1)...(19): siRNA sense strand
gagauugucaucagugaaa

SEQ ID NO: 369785 - RNA, 19 nt, Homo sapiens
  misc_RNA (1)...(19): siRNA sense strand
gcacagugucuuccuuaaa

SEQ ID NO: 369786 - RNA, 19 nt, Homo sapiens
  misc_RNA (1)...(19): siRNA sense strand
gaggauuggugcuggaaga

SEQ ID NO: 369787 - RNA, 19 nt, Homo sapiens
  misc_RNA (1)...(19): siRNA sense strand
gcaaagagacaagccaaga

SEQ ID NO: 369788 - RNA, 19 nt, Homo sapiens
  misc_RNA (1)...(19): siRNA sense strand
gcaacaggguucagugucu

SEQ ID NO: 369789 - RNA, 19 nt, Homo sapiens
  misc_RNA (1)...(19): siRNA sense strand
guggaaaugugaucacuuc

SEQ ID NO: 369790 - RNA, 19 nt, Homo sapiens
  misc_RNA (1)...(19): siRNA sense strand
cagggaagcugaucgagau

SEQ ID NO: 369791 - RNA, 19 nt, Homo sapiens
  misc_RNA (1)...(19): siRNA sense strand
cgccaugacuuucaccuuu

SEQ ID NO: 369792 - RNA, 19 nt, Homo sapiens
  misc_RNA (1)...(19): siRNA sense strand
gaugacaugucugcaguug

SEQ ID NO: 369793 - RNA, 19 nt, Homo sapiens
  misc_RNA (1)...(19): siRNA sense strand
cauaguugcuggcuacaau

SEQ ID NO: 369794 - RNA, 19 nt, Homo sapiens
  misc_RNA (1)...(19): siRNA sense strand
ggagagaaaaucacuguua

SEQ ID NO: 369795 - RNA, 19 nt, Homo sapiens
  misc_RNA (1)...(19): siRNA sense strand
uggaagugcuggaggauga

SEQ ID NO: 369796 - RNA, 19 nt, Homo sapiens
  misc_RNA (1)...(19): siRNA sense strand
cgagaacuauguugugcuu

SEQ ID NO: 369797 - RNA, 19 nt, Homo sapiens
  misc_RNA (1)...(19): siRNA sense strand
ugaaggaguuccgguuuga

SEQ ID NO: 369798 - RNA, 19 nt, Homo sapiens
  misc_RNA (1)...(19): siRNA sense strand
ggaaggcgaagaaagaaug

SEQ ID NO: 369799 - RNA, 19 nt, Homo sapiens
  misc_RNA (1)...(19): siRNA sense strand
ggaaaugggcgugagaaug

SEQ ID NO: 369800 - RNA, 19 nt, Homo sapiens
  misc_RNA (1)...(19): siRNA sense strand
cgccaucacucuggaauuu

SEQ ID NO: 369801 - RNA, 19 nt, Homo sapiens
  misc_RNA (1)...(19): siRNA sense strand
caccauccaugcucagaaa

SEQ ID NO: 369802 - RNA, 19 nt, Homo sapiens
  misc_RNA (1)...(19): siRNA sense strand
gaagagggcaaguucagau

SEQ ID NO: 369803 - RNA, 19 nt, Homo sapiens
  misc_RNA (1)...(19): siRNA sense strand
ucaaacccaugaugaagga

SEQ ID NO: 369804 - RNA, 19 nt, Homo sapiens
  misc_RNA (1)...(19): siRNA sense strand
ccugagcgguggccuguuu

SEQ ID NO: 369805 - RNA, 19 nt, Homo sapiens
  misc_RNA (1)...(19): siRNA sense strand
aaaggugccuacaguguug

SEQ ID NO: 369806 - RNA, 19 nt, Homo sapiens
  misc_RNA (1)...(19): siRNA sense strand
caccuaguaucuuuacauu

SEQ ID NO: 369807 - RNA, 19 nt, Homo sapiens
  misc_RNA (1)...(19): siRNA sense strand
ugacaugucugcaguugag

SEQ ID NO: 369808 - RNA, 19 nt, Homo sapiens
  misc_RNA (1)...(19): siRNA sense strand
aagauccaguccacaguua

SEQ ID NO: 369809 - RNA, 19 nt, Homo sapiens
  misc_RNA (1)...(19): siRNA sense strand
gaugaaggaguuccgguuu

SEQ ID NO: 369810 - RNA, 19 nt, Homo sapiens
  misc_RNA (1)...(19): siRNA sense strand
cgaaggagaugguguucca

SEQ ID NO: 369811 - RNA, 19 nt, Homo sapiens
  misc_RNA (1)...(19): siRNA sense strand
gcaugggacuuugaaauac

SEQ ID NO: 369812 - RNA, 19 nt, Homo sapiens
  misc_RNA (1)...(19): siRNA sense strand
gaaggcaacgaccacauug

SEQ ID NO: 369813 - RNA, 19 nt, Homo sapiens
  misc_RNA (1)...(19): siRNA sense strand
ggccagaaccugaagauca

SEQ ID NO: 369814 - RNA, 19 nt, Homo sapiens
  misc_RNA (1)...(19): siRNA sense strand
caugaaaggcgugaaguuu

SEQ ID NO: 369815 - RNA, 19 nt, Homo sapiens
  misc_RNA (1)...(19): siRNA sense strand
cccagaagaugcaaagaga

SEQ ID NO: 369816 - RNA, 19 nt, Homo sapiens
  misc_RNA (1)...(19): siRNA sense strand
ggacaacggcauucugaca

SEQ ID NO: 369817 - RNA, 19 nt, Homo sapiens
  misc_RNA (1)...(19): siRNA sense strand
ugcaggagaugguagauga

SEQ ID NO: 369818 - RNA, 19 nt, Homo sapiens
  misc_RNA (1)...(19): siRNA sense strand
ugaggaaggcgaagaaaga

SEQ ID NO: 369819 - RNA, 19 nt, Homo sapiens
  misc_RNA (1)...(19): siRNA sense strand
gcugagauguucccugucu

SEQ ID NO: 369820 - RNA, 19 nt, Homo sapiens
  misc_RNA (1)...(19): siRNA sense strand
caugauggauguggccuuu

SEQ ID NO: 369821 - RNA, 19 nt, Homo sapiens
  misc_RNA (1)...(19): siRNA sense strand
gaggcaagcaccacaguga

SEQ ID NO: 369822 - RNA, 19 nt, Homo sapiens
  misc_RNA (1)...(19): siRNA sense strand
caaagagacaagccaagaa

SEQ ID NO: 369823 - RNA, 19 nt, Homo sapiens
  misc_RNA (1)...(19): siRNA sense strand
guucaccgcugaucacagu

SEQ ID NO: 369824 - RNA, 19 nt, Homo sapiens
  misc_RNA (1)...(19): siRNA sense strand
ucagugacaucugcacaaa

SEQ ID NO: 369825 - RNA, 19 nt, Homo sapiens
  misc_RNA (1)...(19): siRNA sense strand
gaaauccucgcaacucauc

SEQ ID NO: 369826 - RNA, 19 nt, Homo sapiens
  misc_RNA (1)...(19): siRNA sense strand
aaagagacaagccaagaaa

SEQ ID NO: 369827 - RNA, 19 nt, Homo sapiens
  misc_RNA (1)...(19): siRNA sense strand
gcguaagcuuugagauaaa

SEQ ID NO: 369828 - RNA, 19 nt, Homo sapiens
  misc_RNA (1)...(19): siRNA sense strand
caaaggugccuacaguguu

SEQ ID NO: 369829 - RNA, 19 nt, Homo sapiens
  misc_RNA (1)...(19): siRNA sense strand
ucucguaugauuucucuua

SEQ ID NO: 369830 - RNA, 19 nt, Homo sapiens
  misc_RNA (1)...(19): siRNA sense strand
uaugacacgucuucaccua

SEQ ID NO: 369831 - RNA, 19 nt, Homo sapiens
  misc_RNA (1)...(19): siRNA sense strand
gaucaacuacucucucauc

SEQ ID NO: 369832 - RNA, 19 nt, Homo sapiens
  misc_RNA (1)...(19): siRNA sense strand
acacugugauuccguucua

SEQ ID NO: 369833 - RNA, 19 nt, Homo sapiens
  misc_RNA (1)...(19): siRNA sense strand
gcucauggaucauuuuguu

SEQ ID NO: 369834 - RNA, 19 nt, Homo sapiens
  misc_RNA (1)...(19): siRNA sense strand
caaaggagucaaccgauuc

SEQ ID NO: 369835 - RNA, 19 nt, Homo sapiens
  misc_RNA (1)...(19): siRNA sense strand
ggagaggauuaccuuugau

SEQ ID NO: 369836 - RNA, 19 nt, Homo sapiens
  misc_RNA (1)...(19): siRNA sense strand
gaaggagggcuauguucug

SEQ ID NO: 369837 - RNA, 19 nt, Homo sapiens
  misc_RNA (1)...(19): siRNA sense strand
gaaggagucgagauuguca

SEQ ID NO: 369838 - RNA, 19 nt, Homo sapiens
  misc_RNA (1)...(19): siRNA sense strand
gccaugacuuucaccuuug

SEQ ID NO: 369839 - RNA, 19 nt, Homo sapiens
  misc_RNA (1)...(19): siRNA sense strand
gauuggugcuggaagaaca

SEQ ID NO: 369840 - RNA, 19 nt, Homo sapiens
  misc_RNA (1)...(19): siRNA sense strand
gaacaggacaucgcacaag

SEQ ID NO: 369841 - RNA, 19 nt, Homo sapiens
  misc_RNA (1)...(19): siRNA sense strand
ccagaucccaguaugacua

SEQ ID NO: 369842 - RNA, 19 nt, Homo sapiens
  misc_RNA (1)...(19): siRNA sense strand
ccagaacgacugcagcauu

SEQ ID NO: 369843 - RNA, 19 nt, Homo sapiens
  misc_RNA (1)...(19): siRNA sense strand
ccugagcccuggccaguau

SEQ ID NO: 369844 - RNA, 19 nt, Homo sapiens
  misc_RNA (1)...(19): siRNA sense strand
gcaagcguucuauaucuau

SEQ ID NO: 369845 - RNA, 19 nt, Homo sapiens
  misc_RNA (1)...(19): siRNA sense strand
ccaagaaacagaagacaag

SEQ ID NO: 369846 - RNA, 19 nt, Homo sapiens
  misc_RNA (1)...(19): siRNA sense strand
gaacuauguugugcuucug

SEQ ID NO: 369847 - RNA, 19 nt, Homo sapiens
  misc_RNA (1)...(19): siRNA sense strand
gagggcaaguucagauuac

SEQ ID NO: 369848 - RNA, 19 nt, Homo sapiens
  misc_RNA (1)...(19): siRNA sense strand
acaacggcauucugacauu

SEQ ID NO: 369849 - RNA, 19 nt, Homo sapiens
  misc_RNA (1)...(19): siRNA sense strand
gaacuaucaccaccgacaa

SEQ ID NO: 369850 - RNA, 19 nt, Homo sapiens
  misc_RNA (1)...(19): siRNA sense strand
ugacacgucuucaccuagu

SEQ ID NO: 369851 - RNA, 19 nt, Homo sapiens
  misc_RNA (1)...(19): siRNA sense strand
uaaacacaccaccuugauu

SEQ ID NO: 369852 - RNA, 19 nt, Homo sapiens
  misc_RNA (1)...(19): siRNA sense strand
cauaaacacaccaccuuga

SEQ ID NO: 369853 - RNA, 19 nt, Homo sapiens
  misc_RNA (1)...(19): siRNA sense strand
caacggcauucugacauuc

SEQ ID NO: 369854 - RNA, 19 nt, Homo sapiens
  misc_RNA (1)...(19): siRNA sense strand
ggagggcuauguucugacu

SEQ ID NO: 369855 - RNA, 19 nt, Homo sapiens
  misc_RNA (1)...(19): siRNA sense strand
gaaggcgaagaaagaauga

SEQ ID NO: 369856 - RNA, 19 nt, Homo sapiens
  misc_RNA (1)...(19): siRNA sense strand
ggacauggccgaccuagaa

SEQ ID NO: 369857 - RNA, 19 nt, Homo sapiens
  misc_RNA (1)...(19): siRNA sense strand
acaagaaucuagaagcaaa

SEQ ID NO: 369858 - RNA, 19 nt, Homo sapiens
  misc_RNA (1)...(19): siRNA sense strand
ggccauaccucuucuccaa

SEQ ID NO: 369859 - RNA, 19 nt, Homo sapiens
  misc_RNA (1)...(19): siRNA sense strand
ccacaagaaucuagaagca

SEQ ID NO: 369860 - RNA, 19 nt, Homo sapiens
  misc_RNA (1)...(19): siRNA sense strand
acccagagguuccguagua

SEQ ID NO: 369861 - RNA, 19 nt, Homo sapiens
  misc_RNA (1)...(19): siRNA sense strand
gcauagcgaggaagacauu

SEQ ID NO: 369862 - RNA, 19 nt, Homo sapiens
  misc_RNA (1)...(19): siRNA sense strand
gaaccaugccuccaucauc

SEQ ID NO: 369863 - RNA, 19 nt, Homo sapiens
  misc_RNA (1)...(19): siRNA sense strand
gcugcuggcuucacuaucu

SEQ ID NO: 369864 - RNA, 19 nt, Homo sapiens
  misc_RNA (1)...(19): siRNA sense strand
uaacuucugugccaacaac

SEQ ID NO: 369865 - RNA, 19 nt, Homo sapiens
  misc_RNA (1)...(19): siRNA sense strand
gagguuccguaguaagaug

SEQ ID NO: 369866 - RNA, 19 nt, Homo sapiens
  misc_RNA (1)...(19): siRNA sense strand
gaacccagagcauccacaa

SEQ ID NO: 369867 - RNA, 19 nt, Homo sapiens
  misc_RNA (1)...(19): siRNA sense strand
ggagcuggcacuuggaaga

SEQ ID NO: 369868 - RNA, 19 nt, Homo sapiens
  misc_RNA (1)...(19): siRNA sense strand
ccauaccucuucuccaaca

SEQ ID NO: 369869 - RNA, 19 nt, Homo sapiens
  misc_RNA (1)...(19): siRNA sense strand
uaacaccauuguccagucu

SEQ ID NO: 369870 - RNA, 19 nt, Homo sapiens
  misc_RNA (1)...(19): siRNA sense strand
gugcaaggcccacaaguac

SEQ ID NO: 369871 - RNA, 19 nt, Homo sapiens
  misc_RNA (1)...(19): siRNA sense strand
cggaugacaugcugaagag

SEQ ID NO: 369872 - RNA, 19 nt, Homo sapiens
  misc_RNA (1)...(19): siRNA sense strand
gcggaugacaugcugaaga

SEQ ID NO: 369873 - RNA, 19 nt, Homo sapiens
  misc_RNA (1)...(19): siRNA sense strand
cagagguuccguaguaaga

SEQ ID NO: 369874 - RNA, 19 nt, Homo sapiens
  misc_RNA (1)...(19): siRNA sense strand
cccagagcauccacaagaa

SEQ ID NO: 369875 - RNA, 19 nt, Homo sapiens
  misc_RNA (1)...(19): siRNA sense strand
ggcccuagaucugcugaug

SEQ ID NO: 369876 - RNA, 19 nt, Homo sapiens
  misc_RNA (1)...(19): siRNA sense strand
gagcauccacaagaaucua

SEQ ID NO: 369877 - RNA, 19 nt, Homo sapiens
  misc_RNA (1)...(19): siRNA sense strand
gaugagcugcuggguguga

SEQ ID NO: 369878 - RNA, 19 nt, Homo sapiens
  misc_RNA (1)...(19): siRNA sense strand
ccucagcucgguccgcuuu

SEQ ID NO: 369879 - RNA, 19 nt, Homo sapiens
  misc_RNA (1)...(19): siRNA sense strand
acaccauuguccagucuau

SEQ ID NO: 369880 - RNA, 19 nt, Homo sapiens
  misc_RNA (1)...(19): siRNA sense strand
ccucucgcauggcggauga

SEQ ID NO: 369881 - RNA, 19 nt, Homo sapiens
  misc_RNA (1)...(19): siRNA sense strand
ugcaggcucuggaggaguu

SEQ ID NO: 369882 - RNA, 19 nt, Homo sapiens
  misc_RNA (1)...(19): siRNA sense strand
gagaggcaucuuugucauc

SEQ ID NO: 369883 - RNA, 19 nt, Homo sapiens
  misc_RNA (1)...(19): siRNA sense strand
gauauggugcccuggucuu

SEQ ID NO: 369884 - RNA, 19 nt, Homo sapiens
  misc_RNA (1)...(19): siRNA sense strand
ucagcucgguccgcuuuau

SEQ ID NO: 369885 - RNA, 19 nt, Homo sapiens
  misc_RNA (1)...(19): siRNA sense strand
cccagagguuccguaguaa

SEQ ID NO: 369886 - RNA, 19 nt, Homo sapiens
  misc_RNA (1)...(19): siRNA sense strand
ccagagcauccacaagaau

SEQ ID NO: 369887 - RNA, 19 nt, Homo sapiens
  misc_RNA (1)...(19): siRNA sense strand
gcaggaggcccagaagcau

SEQ ID NO: 369888 - RNA, 19 nt, Homo sapiens
  misc_RNA (1)...(19): siRNA sense strand
acccagagcauccacaaga

SEQ ID NO: 369889 - RNA, 19 nt, Homo sapiens
  misc_RNA (1)...(19): siRNA sense strand
cguggaggccuucguggaa

SEQ ID NO: 369890 - RNA, 19 nt, Homo sapiens
  misc_RNA (1)...(19): siRNA sense strand
gaagagugagcgggucauc

SEQ ID NO: 369891 - RNA, 19 nt, Homo sapiens
  misc_RNA (1)...(19): siRNA sense strand
agagaggcaucuuugucau

SEQ ID NO: 369892 - RNA, 19 nt, Homo sapiens
  misc_RNA (1)...(19): siRNA sense strand
cagagcauccacaagaauc

SEQ ID NO: 369893 - RNA, 19 nt, Homo sapiens
  misc_RNA (1)...(19): siRNA sense strand
gcccacaaguaccgcuauc

SEQ ID NO: 369894 - RNA, 19 nt, Homo sapiens
  misc_RNA (1)...(19): siRNA sense strand
ccagaugccuucaagauca

SEQ ID NO: 369895 - RNA, 19 nt, Homo sapiens
  misc_RNA (1)...(19): siRNA sense strand
caacgagauuguacugcua

SEQ ID NO: 369896 - RNA, 19 nt, Homo sapiens
  misc_RNA (1)...(19): siRNA sense strand
ccauggagcugcugaucaa

SEQ ID NO: 369897 - RNA, 19 nt, Homo sapiens
  misc_RNA (1)...(19): siRNA sense strand
ggacucgccugcgcucauu

SEQ ID NO: 369898 - RNA, 19 nt, Homo sapiens
  misc_RNA (1)...(19): siRNA sense strand
cacaagggauggccuaugg

SEQ ID NO: 369899 - RNA, 19 nt, Homo sapiens
  misc_RNA (1)...(19): siRNA sense strand
gcagaggcaggaaguggaa

SEQ ID NO: 369900 - RNA, 19 nt, Homo sapiens
  misc_RNA (1)...(19): siRNA sense strand
ugcccgagcucuacgcauu

SEQ ID NO: 369901 - RNA, 19 nt, Homo sapiens
  misc_RNA (1)...(19): siRNA sense strand
ggugacauugcccaguuua

SEQ ID NO: 369902 - RNA, 19 nt, Homo sapiens
  misc_RNA (1)...(19): siRNA sense strand
gagcuuccagcccguguga

SEQ ID NO: 369903 - RNA, 19 nt, Homo sapiens
  misc_RNA (1)...(19): siRNA sense strand
ccaccggccuacacuccaa

SEQ ID NO: 369904 - RNA, 19 nt, Homo sapiens
  misc_RNA (1)...(19): siRNA sense strand
ucggugacauugcccaguu

SEQ ID NO: 369905 - RNA, 19 nt, Homo sapiens
  misc_RNA (1)...(19): siRNA sense strand
gcauucaccgccugcaugu

SEQ ID NO: 369906 - RNA, 19 nt, Homo sapiens
  misc_RNA (1)...(19): siRNA sense strand
gcaggccaacgagauugua

SEQ ID NO: 369907 - RNA, 19 nt, Homo sapiens
  misc_RNA (1)...(19): siRNA sense strand
guuccucggugccgucauc

SEQ ID NO: 369908 - RNA, 19 nt, Homo sapiens
  misc_RNA (1)...(19): siRNA sense strand
ggcaggaaguggaaaagga

SEQ ID NO: 369909 - RNA, 19 nt, Homo sapiens
  misc_RNA (1)...(19): siRNA sense strand
cggugacauugcccaguuu

SEQ ID NO: 369910 - RNA, 19 nt, Homo sapiens
  misc_RNA (1)...(19): siRNA sense strand
cucaugggauccuuaucuu

SEQ ID NO: 369911 - RNA, 19 nt, Homo sapiens
  misc_RNA (1)...(19): siRNA sense strand
ccucaugggauccuuaucu

SEQ ID NO: 369912 - RNA, 19 nt, Homo sapiens
  misc_RNA (1)...(19): siRNA sense strand
uggagcugcugaucaacga

SEQ ID NO: 369913 - RNA, 19 nt, Homo sapiens
  misc_RNA (1)...(19): siRNA sense strand
ccagaugccuucaagauca

SEQ ID NO: 369914 - RNA, 19 nt, Homo sapiens
  misc_RNA (1)...(19): siRNA sense strand
caacgagauuguacugcua

SEQ ID NO: 369915 - RNA, 19 nt, Homo sapiens
  misc_RNA (1)...(19): siRNA sense strand
ccauggagcugcugaucaa

SEQ ID NO: 369916 - RNA, 19 nt, Homo sapiens
  misc_RNA (1)...(19): siRNA sense strand
ggacucgccugcgcucauu

SEQ ID NO: 369917 - RNA, 19 nt, Homo sapiens
  misc_RNA (1)...(19): siRNA sense strand
cacaagggauggccuaugg

SEQ ID NO: 369918 - RNA, 19 nt, Homo sapiens
  misc_RNA (1)...(19): siRNA sense strand
gcagaggcaggaaguggaa

SEQ ID NO: 369919 - RNA, 19 nt, Homo sapiens
  misc_RNA (1)...(19): siRNA sense strand
ugcccgagcucuacgcauu

SEQ ID NO: 369920 - RNA, 19 nt, Homo sapiens
  misc_RNA (1)...(19): siRNA sense strand
ggugacauugcccaguuua

SEQ ID NO: 369921 - RNA, 19 nt, Homo sapiens
  misc_RNA (1)...(19): siRNA sense strand
gagcuuccagcccguguga

SEQ ID NO: 369922 - RNA, 19 nt, Homo sapiens
  misc_RNA (1)...(19): siRNA sense strand
ccaccggccuacacuccaa

SEQ ID NO: 369923 - RNA, 19 nt, Homo sapiens
  misc_RNA (1)...(19): siRNA sense strand
ucggugacauugcccaguu

SEQ ID NO: 369924 - RNA, 19 nt, Homo sapiens
  misc_RNA (1)...(19): siRNA sense strand
gcauucaccgccugcaugu

SEQ ID NO: 369925 - RNA, 19 nt, Homo sapiens
  misc_RNA (1)...(19): siRNA sense strand
gcaggccaacgagauugua

SEQ ID NO: 369926 - RNA, 19 nt, Homo sapiens
  misc_RNA (1)...(19): siRNA sense strand
guuccucggugccgucauc

SEQ ID NO: 369927 - RNA, 19 nt, Homo sapiens
  misc_RNA (1)...(19): siRNA sense strand
ggcaggaaguggaaaagga

SEQ ID NO: 369928 - RNA, 19 nt, Homo sapiens
  misc_RNA (1)...(19): siRNA sense strand
cggugacauugcccaguuu

SEQ ID NO: 369929 - RNA, 19 nt, Homo sapiens
  misc_RNA (1)...(19): siRNA sense strand
cucaugggauccuuaucuu

SEQ ID NO: 369930 - RNA, 19 nt, Homo sapiens
  misc_RNA (1)...(19): siRNA sense strand
ccucaugggauccuuaucu

SEQ ID NO: 369931 - RNA, 19 nt, Homo sapiens
  misc_RNA (1)...(19): siRNA sense strand
uggagcugcugaucaacga

SEQ ID NO: 369932 - RNA, 19 nt, Homo sapiens
  misc_RNA (1)...(19): siRNA sense strand
caagaaaggugauaauuga

SEQ ID NO: 369933 - RNA, 19 nt, Homo sapiens
  misc_RNA (1)...(19): siRNA sense strand
gauaauugaugaccaguua

SEQ ID NO: 369934 - RNA, 19 nt, Homo sapiens
  misc_RNA (1)...(19): siRNA sense strand
gcacaagccuuaauuuaug

SEQ ID NO: 369935 - RNA, 19 nt, Homo sapiens
  misc_RNA (1)...(19): siRNA sense strand
uaacagcccucauuauuug

SEQ ID NO: 369936 - RNA, 19 nt, Homo sapiens
  misc_RNA (1)...(19): siRNA sense strand
gaauugcucuguucuuauu

SEQ ID NO: 369937 - RNA, 19 nt, Homo sapiens
  misc_RNA (1)...(19): siRNA sense strand
ugaaagaccucagucauuu

SEQ ID NO: 369938 - RNA, 19 nt, Homo sapiens
  misc_RNA (1)...(19): siRNA sense strand
gaaaggugauaauugauga

SEQ ID NO: 369939 - RNA, 19 nt, Homo sapiens
  misc_RNA (1)...(19): siRNA sense strand
gcuaaucccuuccuugaaa

SEQ ID NO: 369940 - RNA, 19 nt, Homo sapiens
  misc_RNA (1)...(19): siRNA sense strand
gaaguuaauuaccggcaua

SEQ ID NO: 369941 - RNA, 19 nt, Homo sapiens
  misc_RNA (1)...(19): siRNA sense strand
cagaagaccucaccaacaa

SEQ ID NO: 369942 - RNA, 19 nt, Homo sapiens
  misc_RNA (1)...(19): siRNA sense strand
gaugaucucugccaguauu

SEQ ID NO: 369943 - RNA, 19 nt, Homo sapiens
  misc_RNA (1)...(19): siRNA sense strand
gaauuaacagcccucauua

SEQ ID NO: 369944 - RNA, 19 nt, Homo sapiens
  misc_RNA (1)...(19): siRNA sense strand
gcaaggaccugugaaagau

SEQ ID NO: 369945 - RNA, 19 nt, Homo sapiens
  misc_RNA (1)...(19): siRNA sense strand
gaaaauagacaacggaaua

SEQ ID NO: 369946 - RNA, 19 nt, Homo sapiens
  misc_RNA (1)...(19): siRNA sense strand
gaaagaccucagucauuua

SEQ ID NO: 369947 - RNA, 19 nt, Homo sapiens
  misc_RNA (1)...(19): siRNA sense strand
ggauccaacuccaauauug

SEQ ID NO: 369948 - RNA, 19 nt, Homo sapiens
  misc_RNA (1)...(19): siRNA sense strand
ugaagaugcuauagaauug

SEQ ID NO: 369949 - RNA, 19 nt, Homo sapiens
  misc_RNA (1)...(19): siRNA sense strand
uaacagacaaggaugauuu

SEQ ID NO: 369950 - RNA, 19 nt, Homo sapiens
  misc_RNA (1)...(19): siRNA sense strand
caacuggaaugaugacaga

SEQ ID NO: 369951 - RNA, 19 nt, Homo sapiens
  misc_RNA (1)...(19): siRNA sense strand
caacauguauucacaguac

SEQ ID NO: 369952 - RNA, 19 nt, Homo sapiens
  misc_RNA (1)...(19): siRNA sense strand
gggaugaucucugccagua

SEQ ID NO: 369953 - RNA, 19 nt, Homo sapiens
  misc_RNA (1)...(19): siRNA sense strand
aaaggaagauacagugaaa

SEQ ID NO: 369954 - RNA, 19 nt, Homo sapiens
  misc_RNA (1)...(19): siRNA sense strand
ccaaugccuuucugugaua

SEQ ID NO: 369955 - RNA, 19 nt, Homo sapiens
  misc_RNA (1)...(19): siRNA sense strand
auacacagcagaagaaaua

SEQ ID NO: 369956 - RNA, 19 nt, Homo sapiens
  misc_RNA (1)...(19): siRNA sense strand
gauaaaguccugcaaaaua

SEQ ID NO: 369957 - RNA, 19 nt, Homo sapiens
  misc_RNA (1)...(19): siRNA sense strand
gagcagaagcgcugaguga

SEQ ID NO: 369958 - RNA, 19 nt, Homo sapiens
  misc_RNA (1)...(19): siRNA sense strand
gaaagaauugcuaugcauu

SEQ ID NO: 369959 - RNA, 19 nt, Homo sapiens
  misc_RNA (1)...(19): siRNA sense strand
agaccucagucauuuauaa

SEQ ID NO: 369960 - RNA, 19 nt, Homo sapiens
  misc_RNA (1)...(19): siRNA sense strand
gaaaggaagauacagugaa

SEQ ID NO: 369961 - RNA, 19 nt, Homo sapiens
  misc_RNA (1)...(19): siRNA sense strand
caaagauuccuucaccaua

SEQ ID NO: 369962 - RNA, 19 nt, Homo sapiens
  misc_RNA (1)...(19): siRNA sense strand
aaacagaacacaauccauu

SEQ ID NO: 369963 - RNA, 19 nt, Homo sapiens
  misc_RNA (1)...(19): siRNA sense strand
gcgaauaaucgagaauuua

SEQ ID NO: 369964 - RNA, 19 nt, Homo sapiens
  misc_RNA (1)...(19): siRNA sense strand
ucaauggugucccaagaaa

SEQ ID NO: 369965 - RNA, 19 nt, Homo sapiens
  misc_RNA (1)...(19): siRNA sense strand
gcaauauagcguuggauuu

SEQ ID NO: 369966 - RNA, 19 nt, Homo sapiens
  misc_RNA (1)...(19): siRNA sense strand
cauuagugguuucucaaua

SEQ ID NO: 369967 - RNA, 19 nt, Homo sapiens
  misc_RNA (1)...(19): siRNA sense strand
gaauauguuccuuucauga

SEQ ID NO: 369968 - RNA, 19 nt, Homo sapiens
  misc_RNA (1)...(19): siRNA sense strand
gauuugagguuguaacagu

SEQ ID NO: 369969 - RNA, 19 nt, Homo sapiens
  misc_RNA (1)...(19): siRNA sense strand
cgaauuaacagcccucauu

SEQ ID NO: 369970 - RNA, 19 nt, Homo sapiens
  misc_RNA (1)...(19): siRNA sense strand
auacaagacugaugggaaa

SEQ ID NO: 369971 - RNA, 19 nt, Homo sapiens
  misc_RNA (1)...(19): siRNA sense strand
caacaaaagugaauuaugg

SEQ ID NO: 369972 - RNA, 19 nt, Homo sapiens
  misc_RNA (1)...(19): siRNA sense strand
gaugaccaguuaccuguug

SEQ ID NO: 369973 - RNA, 19 nt, Homo sapiens
  misc_RNA (1)...(19): siRNA sense strand
ccaagaaaggugauaauug

SEQ ID NO: 369974 - RNA, 19 nt, Homo sapiens
  misc_RNA (1)...(19): siRNA sense strand
cagugcagcuuaugaaaga

SEQ ID NO: 369975 - RNA, 19 nt, Homo sapiens
  misc_RNA (1)...(19): siRNA sense strand
gcauaaagcagacaauagu

SEQ ID NO: 369976 - RNA, 19 nt, Homo sapiens
  misc_RNA (1)...(19): siRNA sense strand
gaucaagccuagaaaauau

SEQ ID NO: 369977 - RNA, 19 nt, Homo sapiens
  misc_RNA (1)...(19): siRNA sense strand
ggaagcugcacaagccuua

SEQ ID NO: 369978 - RNA, 19 nt, Homo sapiens
  misc_RNA (1)...(19): siRNA sense strand
ugacccaccuccauacauu

SEQ ID NO: 369979 - RNA, 19 nt, Homo sapiens
  misc_RNA (1)...(19): siRNA sense strand
gaagauacagugaaaauga

SEQ ID NO: 369980 - RNA, 19 nt, Homo sapiens
  misc_RNA (1)...(19): siRNA sense strand
ucugggaucuucaauauca

SEQ ID NO: 369981 - RNA, 19 nt, Homo sapiens
  misc_RNA (1)...(19): siRNA sense strand
caauauagcguuggauuug

SEQ ID NO: 369982 - RNA, 19 nt, Homo sapiens
  misc_RNA (1)...(19): siRNA sense strand
ugaaacugcugauaaaguc

SEQ ID NO: 369983 - RNA, 19 nt, Homo sapiens
  misc_RNA (1)...(19): siRNA sense strand
ucagauagccaaacuuuca

SEQ ID NO: 369984 - RNA, 19 nt, Homo sapiens
  misc_RNA (1)...(19): siRNA sense strand
gagauacacagcagaagaa

SEQ ID NO: 369985 - RNA, 19 nt, Homo sapiens
  misc_RNA (1)...(19): siRNA sense strand
gcgcuaaucccuuccuuga

SEQ ID NO: 369986 - RNA, 19 nt, Homo sapiens
  misc_RNA (1)...(19): siRNA sense strand
ggaaaggaagauacaguga

SEQ ID NO: 369987 - RNA, 19 nt, Homo sapiens
  misc_RNA (1)...(19): siRNA sense strand
gcuggaggauguggaaauu

SEQ ID NO: 369988 - RNA, 19 nt, Homo sapiens
  misc_RNA (1)...(19): siRNA sense strand
uaucauuccuaguaccuuu

SEQ ID NO: 369989 - RNA, 19 nt, Homo sapiens
  misc_RNA (1)...(19): siRNA sense strand
ccaguauuaugaugugauu

SEQ ID NO: 369990 - RNA, 19 nt, Homo sapiens
  misc_RNA (1)...(19): siRNA sense strand
cuucugggaucuucaauau

SEQ ID NO: 369991 - RNA, 19 nt, Homo sapiens
  misc_RNA (1)...(19): siRNA sense strand
ucagagugcuggaggaugu

SEQ ID NO: 369992 - RNA, 19 nt, Homo sapiens
  misc_RNA (1)...(19): siRNA sense strand
caaaacggauuaauggaaa

SEQ ID NO: 369993 - RNA, 19 nt, Homo sapiens
  misc_RNA (1)...(19): siRNA sense strand
gcacccauaccuuuacauu

SEQ ID NO: 369994 - RNA, 19 nt, Homo sapiens
  misc_RNA (1)...(19): siRNA sense strand
gcacaaggacagagauaca

SEQ ID NO: 369995 - RNA, 19 nt, Homo sapiens
  misc_RNA (1)...(19): siRNA sense strand
guagacacauaacagacaa

SEQ ID NO: 369996 - RNA, 19 nt, Homo sapiens
  misc_RNA (1)...(19): siRNA sense strand
gaauguugaagaugcuaua

SEQ ID NO: 369997 - RNA, 19 nt, Homo sapiens
  misc_RNA (1)...(19): siRNA sense strand
gagaauuuaucacaauggu

SEQ ID NO: 369998 - RNA, 19 nt, Homo sapiens
  misc_RNA (1)...(19): siRNA sense strand
gaaagucaugggaggauau

SEQ ID NO: 369999 - RNA, 19 nt, Homo sapiens
  misc_RNA (1)...(19): siRNA sense strand
uguugaagaugcuauagaa

SEQ ID NO: 370000 - RNA, 19 nt, Homo sapiens
  misc_RNA (1)...(19): siRNA sense strand
caccauacaccuuaucaaa

SEQ ID NO: 370001 - RNA, 19 nt, Homo sapiens
  misc_RNA (1)...(19): siRNA sense strand
uuaacagcccucauuauuu

SEQ ID NO: 370002 - RNA, 19 nt, Homo sapiens
  misc_RNA (1)...(19): siRNA sense strand
ccgaacagcucagaaaaua

SEQ ID NO: 370003 - RNA, 19 nt, Homo sapiens
  misc_RNA (1)...(19): siRNA sense strand
gaaccagaauacaauccau

SEQ ID NO: 370004 - RNA, 19 nt, Homo sapiens
  misc_RNA (1)...(19): siRNA sense strand
ccaaagccaccuccaguga

SEQ ID NO: 370005 - RNA, 19 nt, Homo sapiens
  misc_RNA (1)...(19): siRNA sense strand
ggaaguauaugguaaaacu

SEQ ID NO: 370006 - RNA, 19 nt, Homo sapiens
  misc_RNA (1)...(19): siRNA sense strand
ggcauaauuuacccucaaa

SEQ ID NO: 370007 - RNA, 19 nt, Homo sapiens
  misc_RNA (1)...(19): siRNA sense strand
ccgaggcgguguuuuauua

SEQ ID NO: 370008 - RNA, 19 nt, Homo sapiens
  misc_RNA (1)...(19): siRNA sense strand
cuauagaauuguacacaga

SEQ ID NO: 370009 - RNA, 19 nt, Homo sapiens
  misc_RNA (1)...(19): siRNA sense strand
aaagauuccuucaccauac

SEQ ID NO: 370010 - RNA, 19 nt, Homo sapiens
  misc_RNA (1)...(19): siRNA sense strand
acccauaccuuuacauuag

SEQ ID NO: 370011 - RNA, 19 nt, Homo sapiens
  misc_RNA (1)...(19): siRNA sense strand
ccuauagccuggccaacaa

SEQ ID NO: 370012 - RNA, 19 nt, Homo sapiens
  misc_RNA (1)...(19): siRNA sense strand
gaacagcucagaaaauaga

SEQ ID NO: 370013 - RNA, 19 nt, Homo sapiens
  misc_RNA (1)...(19): siRNA sense strand
gauccaacuccaauauuga

SEQ ID NO: 370014 - RNA, 19 nt, Homo sapiens
  misc_RNA (1)...(19): siRNA sense strand
gaaguacucaggacaacau

SEQ ID NO: 370015 - RNA, 19 nt, Homo sapiens
  misc_RNA (1)...(19): siRNA sense strand
gaagaaauagaaguacuca

SEQ ID NO: 370016 - RNA, 19 nt, Homo sapiens
  misc_RNA (1)...(19): siRNA sense strand
ugagugagccuuugaccaa

SEQ ID NO: 370017 - RNA, 19 nt, Homo sapiens
  misc_RNA (1)...(19): siRNA sense strand
cugcacaagccuuaauuua

SEQ ID NO: 370018 - RNA, 19 nt, Homo sapiens
  misc_RNA (1)...(19): siRNA sense strand
uguaacaguuucuacucua

SEQ ID NO: 370019 - RNA, 19 nt, Homo sapiens
  misc_RNA (1)...(19): siRNA sense strand
gaaauuuccaagagacuca

SEQ ID NO: 370020 - RNA, 19 nt, Homo sapiens
  misc_RNA (1)...(19): siRNA sense strand
caaacuuucaguaaggaua

SEQ ID NO: 370021 - RNA, 19 nt, Homo sapiens
  misc_RNA (1)...(19): siRNA sense strand
cagaaagaauugcuaugca

SEQ ID NO: 370022 - RNA, 19 nt, Homo sapiens
  misc_RNA (1)...(19): siRNA sense strand
caauauugaucuucaugca

SEQ ID NO: 370023 - RNA, 19 nt, Homo sapiens
  misc_RNA (1)...(19): siRNA sense strand
caacuccaauauugaucuu

SEQ ID NO: 370024 - RNA, 19 nt, Homo sapiens
  misc_RNA (1)...(19): siRNA sense strand
ugaaagucaugggaggaua

SEQ ID NO: 370025 - RNA, 19 nt, Homo sapiens
  misc_RNA (1)...(19): siRNA sense strand
gaagaccucaccaacaauc

SEQ ID NO: 370026 - RNA, 19 nt, Homo sapiens
  misc_RNA (1)...(19): siRNA sense strand
ggccaucagugcagcuuau

SEQ ID NO: 370027 - RNA, 19 nt, Homo sapiens
  misc_RNA (1)...(19): siRNA sense strand
guaacaguuucuacucuag

SEQ ID NO: 370028 - RNA, 19 nt, Homo sapiens
  misc_RNA (1)...(19): siRNA sense strand
agaaagaauugcuaugcau

SEQ ID NO: 370029 - RNA, 19 nt, Homo sapiens
  misc_RNA (1)...(19): siRNA sense strand
cagcaugcagcuuuacuuu

SEQ ID NO: 370030 - RNA, 19 nt, Homo sapiens
  misc_RNA (1)...(19): siRNA sense strand
caucuaccaauuccauaua

SEQ ID NO: 370031 - RNA, 19 nt, Homo sapiens
  misc_RNA (1)...(19): siRNA sense strand
uggaggauguggaaauuuc

SEQ ID NO: 370032 - RNA, 19 nt, Homo sapiens
  misc_RNA (1)...(19): siRNA sense strand
gaaaagaucuucacacuuc

SEQ ID NO: 370033 - RNA, 19 nt, Homo sapiens
  misc_RNA (1)...(19): siRNA sense strand
gcagauagacuuugcuguu

SEQ ID NO: 370034 - RNA, 19 nt, Homo sapiens
  misc_RNA (1)...(19): siRNA sense strand
gaucuacccugcucacgau

SEQ ID NO: 370035 - RNA, 19 nt, Homo sapiens
  misc_RNA (1)...(19): siRNA sense strand
gccuaaaccucagcagaua

SEQ ID NO: 370036 - RNA, 19 nt, Homo sapiens
  misc_RNA (1)...(19): siRNA sense strand
ucugucaucucccgccuua

SEQ ID NO: 370037 - RNA, 19 nt, Homo sapiens
  misc_RNA (1)...(19): siRNA sense strand
caggcugacuuacacauug

SEQ ID NO: 370038 - RNA, 19 nt, Homo sapiens
  misc_RNA (1)...(19): siRNA sense strand
cagauagacuuugcuguuc

SEQ ID NO: 370039 - RNA, 19 nt, Homo sapiens
  misc_RNA (1)...(19): siRNA sense strand
ccugugagcugcaccuuca

SEQ ID NO: 370040 - RNA, 19 nt, Homo sapiens
  misc_RNA (1)...(19): siRNA sense strand
uaccauggguucacagugu

SEQ ID NO: 370041 - RNA, 19 nt, Homo sapiens
  misc_RNA (1)...(19): siRNA sense strand
ucaccuucguccugaauga

SEQ ID NO: 370042 - RNA, 19 nt, Homo sapiens
  misc_RNA (1)...(19): siRNA sense strand
cacuggagaugcccuguug

SEQ ID NO: 370043 - RNA, 19 nt, Homo sapiens
  misc_RNA (1)...(19): siRNA sense strand
aaccugaacuugccuaaac

SEQ ID NO: 370044 - RNA, 19 nt, Homo sapiens
  misc_RNA (1)...(19): siRNA sense strand
gauagacuuugcuguucca

SEQ ID NO: 370045 - RNA, 19 nt, Homo sapiens
  misc_RNA (1)...(19): siRNA sense strand
gcugcucuaugcugugaau

SEQ ID NO: 370046 - RNA, 19 nt, Homo sapiens
  misc_RNA (1)...(19): siRNA sense strand
gggaggccguucugaucga

SEQ ID NO: 370047 - RNA, 19 nt, Homo sapiens
  misc_RNA (1)...(19): siRNA sense strand
guaccacucgguccaugaa

SEQ ID NO: 370048 - RNA, 19 nt, Homo sapiens
  misc_RNA (1)...(19): siRNA sense strand
gcggacagacuuccagcaa

SEQ ID NO: 370049 - RNA, 19 nt, Homo sapiens
  misc_RNA (1)...(19): siRNA sense strand
cuaaaccucagcagauaga

SEQ ID NO: 370050 - RNA, 19 nt, Homo sapiens
  misc_RNA (1)...(19): siRNA sense strand
cggcugcucuaugcuguga

SEQ ID NO: 370051 - RNA, 19 nt, Homo sapiens
  misc_RNA (1)...(19): siRNA sense strand
aggcugacuuacacauuga

SEQ ID NO: 370052 - RNA, 19 nt, Homo sapiens
  misc_RNA (1)...(19): siRNA sense strand
ugacuuacacauugaggau

SEQ ID NO: 370053 - RNA, 19 nt, Homo sapiens
  misc_RNA (1)...(19): siRNA sense strand
caaccugaacuugccuaaa

SEQ ID NO: 370054 - RNA, 19 nt, Homo sapiens
  misc_RNA (1)...(19): siRNA sense strand
gggaugcccagcugaucaa

SEQ ID NO: 370055 - RNA, 19 nt, Homo sapiens
  misc_RNA (1)...(19): siRNA sense strand
gcugugaggaguuugucaa

SEQ ID NO: 370056 - RNA, 19 nt, Homo sapiens
  misc_RNA (1)...(19): siRNA sense strand
gaccacagcauggccuuca

SEQ ID NO: 370057 - RNA, 19 nt, Homo sapiens
  misc_RNA (1)...(19): siRNA sense strand
ccaggcugacuuacacauu

SEQ ID NO: 370058 - RNA, 19 nt, Homo sapiens
  misc_RNA (1)...(19): siRNA sense strand
augcccagcugaucaagga

SEQ ID NO: 370059 - RNA, 19 nt, Homo sapiens
  misc_RNA (1)...(19): siRNA sense strand
ggugugggcggacagacuu

SEQ ID NO: 370060 - RNA, 19 nt, Homo sapiens
  misc_RNA (1)...(19): siRNA sense strand
ccacgcggaccacauuaca

SEQ ID NO: 370061 - RNA, 19 nt, Homo sapiens
  misc_RNA (1)...(19): siRNA sense strand
ggcccaggcugacuuacac

SEQ ID NO: 370062 - RNA, 19 nt, Homo sapiens
  misc_RNA (1)...(19): siRNA sense strand
ugagcugcaccuucacgua

SEQ ID NO: 370063 - RNA, 19 nt, Homo sapiens
  misc_RNA (1)...(19): siRNA sense strand
caacucaacugccaagucu

SEQ ID NO: 370064 - RNA, 19 nt, Homo sapiens
  misc_RNA (1)...(19): siRNA sense strand
uuucuucgaugccauauuu

SEQ ID NO: 370065 - RNA, 19 nt, Homo sapiens
  misc_RNA (1)...(19): siRNA sense strand
ugggagggcuggugauguu

SEQ ID NO: 370066 - RNA, 19 nt, Homo sapiens
  misc_RNA (1)...(19): siRNA sense strand
cuggugauguugaaggaua

SEQ ID NO: 370067 - RNA, 19 nt, Homo sapiens
  misc_RNA (1)...(19): siRNA sense strand
gagggcuggugauguugaa

SEQ ID NO: 370068 - RNA, 19 nt, Homo sapiens
  misc_RNA (1)...(19): siRNA sense strand
ggucccagcccuugauuuc

SEQ ID NO: 370069 - RNA, 19 nt, Homo sapiens
  misc_RNA (1)...(19): siRNA sense strand
guugaaggauaaccaugug

SEQ ID NO: 370070 - RNA, 19 nt, Homo sapiens
  misc_RNA (1)...(19): siRNA sense strand
gaacggguggcccucaaca

SEQ ID NO: 370071 - RNA, 19 nt, Homo sapiens
  misc_RNA (1)...(19): siRNA sense strand
ggagggcuggugauguuga

SEQ ID NO: 370072 - RNA, 19 nt, Homo sapiens
  misc_RNA (1)...(19): siRNA sense strand
gcggcugacuucgcucuga

SEQ ID NO: 370073 - RNA, 19 nt, Homo sapiens
  misc_RNA (1)...(19): siRNA sense strand
ccagacaggcggcugacuu

SEQ ID NO: 370074 - RNA, 19 nt, Homo sapiens
  misc_RNA (1)...(19): siRNA sense strand
acauagacgucaucuccau

SEQ ID NO: 370075 - RNA, 19 nt, Homo sapiens
  misc_RNA (1)...(19): siRNA sense strand
gcuuccggcugguggagaa

SEQ ID NO: 370076 - RNA, 19 nt, Homo sapiens
  misc_RNA (1)...(19): siRNA sense strand
cggcugacuucgcucugaa

SEQ ID NO: 370077 - RNA, 19 nt, Homo sapiens
  misc_RNA (1)...(19): siRNA sense strand
gaagguggaaguggaaugc

SEQ ID NO: 370078 - RNA, 19 nt, Homo sapiens
  misc_RNA (1)...(19): siRNA sense strand
gcaucacccuggacaaccu

SEQ ID NO: 370079 - RNA, 19 nt, Homo sapiens
  misc_RNA (1)...(19): siRNA sense strand
uggugauguugaaggauaa

SEQ ID NO: 370080 - RNA, 19 nt, Homo sapiens
  misc_RNA (1)...(19): siRNA sense strand
cagggcagccuuucuucga

SEQ ID NO: 370081 - RNA, 19 nt, Homo sapiens
  misc_RNA (1)...(19): siRNA sense strand
cagacaggcggcugacuuc

SEQ ID NO: 370082 - RNA, 19 nt, Homo sapiens
  misc_RNA (1)...(19): siRNA sense strand
ggcuggugauguugaagga

SEQ ID NO: 370083 - RNA, 19 nt, Homo sapiens
  misc_RNA (1)...(19): siRNA sense strand
gaaccucccugauuacuau

SEQ ID NO: 370084 - RNA, 19 nt, Homo sapiens
  misc_RNA (1)...(19): siRNA sense strand
gaaaugcgcuuugccaaga

SEQ ID NO: 370085 - RNA, 19 nt, Homo sapiens
  misc_RNA (1)...(19): siRNA sense strand
uaaaugagcuacccacaga

SEQ ID NO: 370086 - RNA, 19 nt, Homo sapiens
  misc_RNA (1)...(19): siRNA sense strand
gaaaagcucuucuugcaaa

SEQ ID NO: 370087 - RNA, 19 nt, Homo sapiens
  misc_RNA (1)...(19): siRNA sense strand
gcaagccuauguccuauga

SEQ ID NO: 370088 - RNA, 19 nt, Homo sapiens
  misc_RNA (1)...(19): siRNA sense strand
gaagaaaccgagaucauga

SEQ ID NO: 370089 - RNA, 19 nt, Homo sapiens
  misc_RNA (1)...(19): siRNA sense strand
ugagaaaguugaugugauu

SEQ ID NO: 370090 - RNA, 19 nt, Homo sapiens
  misc_RNA (1)...(19): siRNA sense strand
ugagaaaucugccaguaau

SEQ ID NO: 370091 - RNA, 19 nt, Homo sapiens
  misc_RNA (1)...(19): siRNA sense strand
gagaugacauagucuuaau

SEQ ID NO: 370092 - RNA, 19 nt, Homo sapiens
  misc_RNA (1)...(19): siRNA sense strand
ggaaugcucaggaauguau

SEQ ID NO: 370093 - RNA, 19 nt, Homo sapiens
  misc_RNA (1)...(19): siRNA sense strand
guacaacccuccugaccau

SEQ ID NO: 370094 - RNA, 19 nt, Homo sapiens
  misc_RNA (1)...(19): siRNA sense strand
acuagaaacuucccaaaug

SEQ ID NO: 370095 - RNA, 19 nt, Homo sapiens
  misc_RNA (1)...(19): siRNA sense strand
gauaugggaacaauaaaga

SEQ ID NO: 370096 - RNA, 19 nt, Homo sapiens
  misc_RNA (1)...(19): siRNA sense strand
caacaagccuggagaugac

SEQ ID NO: 370097 - RNA, 19 nt, Homo sapiens
  misc_RNA (1)...(19): siRNA sense strand
gcagaacaaaccaaagaaa

SEQ ID NO: 370098 - RNA, 19 nt, Homo sapiens
  misc_RNA (1)...(19): siRNA sense strand
ggacgugggaggaaagaaa

SEQ ID NO: 370099 - RNA, 19 nt, Homo sapiens
  misc_RNA (1)...(19): siRNA sense strand
cuagaaacuucccaaaugu

SEQ ID NO: 370100 - RNA, 19 nt, Homo sapiens
  misc_RNA (1)...(19): siRNA sense strand
aaaccgagaucaugauagu

SEQ ID NO: 370101 - RNA, 19 nt, Homo sapiens
  misc_RNA (1)...(19): siRNA sense strand
gggauggacuagaaacuuc

SEQ ID NO: 370102 - RNA, 19 nt, Homo sapiens
  misc_RNA (1)...(19): siRNA sense strand
ggagaugacauagucuuaa

SEQ ID NO: 370103 - RNA, 19 nt, Homo sapiens
  misc_RNA (1)...(19): siRNA sense strand
ggagauguuugccaagaag

SEQ ID NO: 370104 - RNA, 19 nt, Homo sapiens
  misc_RNA (1)...(19): siRNA sense strand
ugagcacaaucaagucuaa

SEQ ID NO: 370105 - RNA, 19 nt, Homo sapiens
  misc_RNA (1)...(19): siRNA sense strand
ggaaguggaagagaauaaa

SEQ ID NO: 370106 - RNA, 19 nt, Homo sapiens
  misc_RNA (1)...(19): siRNA sense strand
cgacuacugugacaucauc

SEQ ID NO: 370107 - RNA, 19 nt, Homo sapiens
  misc_RNA (1)...(19): siRNA sense strand
gcucaagacacuauggaaa

SEQ ID NO: 370108 - RNA, 19 nt, Homo sapiens
  misc_RNA (1)...(19): siRNA sense strand
cagcagaacaaaccaaaga

SEQ ID NO: 370109 - RNA, 19 nt, Homo sapiens
  misc_RNA (1)...(19): siRNA sense strand
aagaggaaguggaagagaa

SEQ ID NO: 370110 - RNA, 19 nt, Homo sapiens
  misc_RNA (1)...(19): siRNA sense strand
ggacuagaaacuucccaaa

SEQ ID NO: 370111 - RNA, 19 nt, Homo sapiens
  misc_RNA (1)...(19): siRNA sense strand
gacaugagcacaaucaagu

SEQ ID NO: 370112 - RNA, 19 nt, Homo sapiens
  misc_RNA (1)...(19): siRNA sense strand
ugugaaaccuccaaagaag

SEQ ID NO: 370113 - RNA, 19 nt, Homo sapiens
  misc_RNA (1)...(19): siRNA sense strand
gaagaggacgugggaggaa

SEQ ID NO: 370114 - RNA, 19 nt, Homo sapiens
  misc_RNA (1)...(19): siRNA sense strand
agaagggagugaagaggaa

SEQ ID NO: 370115 - RNA, 19 nt, Homo sapiens
  misc_RNA (1)...(19): siRNA sense strand
uaaagaagcgcuuggaaaa

SEQ ID NO: 370116 - RNA, 19 nt, Homo sapiens
  misc_RNA (1)...(19): siRNA sense strand
agcugaaccucccugauua

SEQ ID NO: 370117 - RNA, 19 nt, Homo sapiens
  misc_RNA (1)...(19): siRNA sense strand
gcaaugugagcaagaagga

SEQ ID NO: 370118 - RNA, 19 nt, Homo sapiens
  misc_RNA (1)...(19): siRNA sense strand
gaaaagaggaaguggaaga

SEQ ID NO: 370119 - RNA, 19 nt, Homo sapiens
  misc_RNA (1)...(19): siRNA sense strand
gaaacuucccaaaugucua

SEQ ID NO: 370120 - RNA, 19 nt, Homo sapiens
  misc_RNA (1)...(19): siRNA sense strand
uuacuggaaugcucaggaa

SEQ ID NO: 370121 - RNA, 19 nt, Homo sapiens
  misc_RNA (1)...(19): siRNA sense strand
aagcugaaccucccugauu

SEQ ID NO: 370122 - RNA, 19 nt, Homo sapiens
  misc_RNA (1)...(19): siRNA sense strand
cagcgaagacuccgaaaca

SEQ ID NO: 370123 - RNA, 19 nt, Homo sapiens
  misc_RNA (1)...(19): siRNA sense strand
ugcaauaccugcucagagu

SEQ ID NO: 370124 - RNA, 19 nt, Homo sapiens
  misc_RNA (1)...(19): siRNA sense strand
ggacaugagcacaaucaag

SEQ ID NO: 370125 - RNA, 19 nt, Homo sapiens
  misc_RNA (1)...(19): siRNA sense strand
ucaagacacuauggaaaca

SEQ ID NO: 370126 - RNA, 19 nt, Homo sapiens
  misc_RNA (1)...(19): siRNA sense strand
gaguccagcuccucugaca

SEQ ID NO: 370127 - RNA, 19 nt, Homo sapiens
  misc_RNA (1)...(19): siRNA sense strand
auaaagaagcgcuuggaaa

SEQ ID NO: 370128 - RNA, 19 nt, Homo sapiens
  misc_RNA (1)...(19): siRNA sense strand
acaacaagccuggagauga

SEQ ID NO: 370129 - RNA, 19 nt, Homo sapiens
  misc_RNA (1)...(19): siRNA sense strand
gaugacauagucuuaaugg

SEQ ID NO: 370130 - RNA, 19 nt, Homo sapiens
  misc_RNA (1)...(19): siRNA sense strand
gagcuacccacagaagaaa

SEQ ID NO: 370131 - RNA, 19 nt, Homo sapiens
  misc_RNA (1)...(19): siRNA sense strand
agaccaaccaacugcaaua

SEQ ID NO: 370132 - RNA, 19 nt, Homo sapiens
  misc_RNA (1)...(19): siRNA sense strand
gcuccaggauguguucgaa

SEQ ID NO: 370133 - RNA, 19 nt, Homo sapiens
  misc_RNA (1)...(19): siRNA sense strand
cuacacgacuacugugaca

SEQ ID NO: 370134 - RNA, 19 nt, Homo sapiens
  misc_RNA (1)...(19): siRNA sense strand
caaagaagggagugaagag

SEQ ID NO: 370135 - RNA, 19 nt, Homo sapiens
  misc_RNA (1)...(19): siRNA sense strand
guaccaaacacaacucaag

SEQ ID NO: 370136 - RNA, 19 nt, Homo sapiens
  misc_RNA (1)...(19): siRNA sense strand
agaaaccgagaucaugaua

SEQ ID NO: 370137 - RNA, 19 nt, Homo sapiens
  misc_RNA (1)...(19): siRNA sense strand
gauguucuccaacugcuau

SEQ ID NO: 370138 - RNA, 19 nt, Homo sapiens
  misc_RNA (1)...(19): siRNA sense strand
gcuaugucaccuccuguuu

SEQ ID NO: 370139 - RNA, 19 nt, Homo sapiens
  misc_RNA (1)...(19): siRNA sense strand
gagcuggagcgcuauguca

SEQ ID NO: 370140 - RNA, 19 nt, Homo sapiens
  misc_RNA (1)...(19): siRNA sense strand
gaaaagcacaaaagaaaag

SEQ ID NO: 370141 - RNA, 19 nt, Homo sapiens
  misc_RNA (1)...(19): siRNA sense strand
ggauaugggaacaauaaag

SEQ ID NO: 370142 - RNA, 19 nt, Homo sapiens
  misc_RNA (1)...(19): siRNA sense strand
gugcaagccuauguccuau

SEQ ID NO: 370143 - RNA, 19 nt, Homo sapiens
  misc_RNA (1)...(19): siRNA sense strand
gcacccagcaccagagaag

SEQ ID NO: 370144 - RNA, 19 nt, Homo sapiens
  misc_RNA (1)...(19): siRNA sense strand
gacuagaaacuucccaaau

SEQ ID NO: 370145 - RNA, 19 nt, Homo sapiens
  misc_RNA (1)...(19): siRNA sense strand
agaagaaaccgagaucaug

SEQ ID NO: 370146 - RNA, 19 nt, Homo sapiens
  misc_RNA (1)...(19): siRNA sense strand
gccuggagaugacauaguc

SEQ ID NO: 370147 - RNA, 19 nt, Homo sapiens
  misc_RNA (1)...(19): siRNA sense strand
gaauguauccaggacuuca

SEQ ID NO: 370148 - RNA, 19 nt, Homo sapiens
  misc_RNA (1)...(19): siRNA sense strand
ugaaaccuccaaagaagga

SEQ ID NO: 370149 - RNA, 19 nt, Homo sapiens
  misc_RNA (1)...(19): siRNA sense strand
gcugagaaaguugauguga

SEQ ID NO: 370150 - RNA, 19 nt, Homo sapiens
  misc_RNA (1)...(19): siRNA sense strand
aaggagauguuugccaaga

SEQ ID NO: 370151 - RNA, 19 nt, Homo sapiens
  misc_RNA (1)...(19): siRNA sense strand
gcacaaucaagucuaaacu

SEQ ID NO: 370152 - RNA, 19 nt, Homo sapiens
  misc_RNA (1)...(19): siRNA sense strand
gacaagugcaagccuaugu

SEQ ID NO: 370153 - RNA, 19 nt, Homo sapiens
  misc_RNA (1)...(19): siRNA sense strand
cgauugauguucuccaacu

SEQ ID NO: 370154 - RNA, 19 nt, Homo sapiens
  misc_RNA (1)...(19): siRNA sense strand
ccaaccaacugcaauaccu

SEQ ID NO: 370155 - RNA, 19 nt, Homo sapiens
  misc_RNA (1)...(19): siRNA sense strand
acagcaaugugagcaagaa

SEQ ID NO: 370156 - RNA, 19 nt, Homo sapiens
  misc_RNA (1)...(19): siRNA sense strand
gaagggagugaagaggaaa

SEQ ID NO: 370157 - RNA, 19 nt, Homo sapiens
  misc_RNA (1)...(19): siRNA sense strand
aaagaaacagggacagcaa

SEQ ID NO: 370158 - RNA, 19 nt, Homo sapiens
  misc_RNA (1)...(19): siRNA sense strand
gaaaccgagaucaugauag

SEQ ID NO: 370159 - RNA, 19 nt, Homo sapiens
  misc_RNA (1)...(19): siRNA sense strand
gagaaaucugccaguaaug

SEQ ID NO: 370160 - RNA, 19 nt, Homo sapiens
  misc_RNA (1)...(19): siRNA sense strand
gaggaaguggaagagaaua

SEQ ID NO: 370161 - RNA, 19 nt, Homo sapiens
  misc_RNA (1)...(19): siRNA sense strand
uccaggauguguucgaaau

SEQ ID NO: 370162 - RNA, 19 nt, Homo sapiens
  misc_RNA (1)...(19): siRNA sense strand
cagaagaaaccgagaucau

SEQ ID NO: 370163 - RNA, 19 nt, Homo sapiens
  misc_RNA (1)...(19): siRNA sense strand
ugagcuacccacagaagaa

SEQ ID NO: 370164 - RNA, 19 nt, Homo sapiens
  misc_RNA (1)...(19): siRNA sense strand
auccaggacuucaacacua

SEQ ID NO: 370165 - RNA, 19 nt, Homo sapiens
  misc_RNA (1)...(19): siRNA sense strand
uuaaaacgccuauggauau

SEQ ID NO: 370166 - RNA, 19 nt, Homo sapiens
  misc_RNA (1)...(19): siRNA sense strand
caacugcuauaaguacaac

SEQ ID NO: 370167 - RNA, 19 nt, Homo sapiens
  misc_RNA (1)...(19): siRNA sense strand
gcugacguccgauugaugu

SEQ ID NO: 370168 - RNA, 19 nt, Homo sapiens
  misc_RNA (1)...(19): siRNA sense strand
uggagaugacauagucuua

SEQ ID NO: 370169 - RNA, 19 nt, Homo sapiens
  misc_RNA (1)...(19): siRNA sense strand
aggaauguauccaggacuu

SEQ ID NO: 370170 - RNA, 19 nt, Homo sapiens
  misc_RNA (1)...(19): siRNA sense strand
caauaaagaagcgcuugga

SEQ ID NO: 370171 - RNA, 19 nt, Homo sapiens
  misc_RNA (1)...(19): siRNA sense strand
gcacaaaagaaaagaggaa

SEQ ID NO: 370172 - RNA, 19 nt, Homo sapiens
  misc_RNA (1)...(19): siRNA sense strand
cccgcaagcuccaggaugu

SEQ ID NO: 370173 - RNA, 19 nt, Homo sapiens
  misc_RNA (1)...(19): siRNA sense strand
ccugugaaaccuccaaaga

SEQ ID NO: 370174 - RNA, 19 nt, Homo sapiens
  misc_RNA (1)...(19): siRNA sense strand
uccaggacuucaacacuau

SEQ ID NO: 370175 - RNA, 19 nt, Homo sapiens
  misc_RNA (1)...(19): siRNA sense strand
ccaagaggcagaccaacca

SEQ ID NO: 370176 - RNA, 19 nt, Homo sapiens
  misc_RNA (1)...(19): siRNA sense strand
cguaugagucggaggaaga

SEQ ID NO: 370177 - RNA, 19 nt, Homo sapiens
  misc_RNA (1)...(19): siRNA sense strand
gcaacagcaaugugagcaa

SEQ ID NO: 370178 - RNA, 19 nt, Homo sapiens
  misc_RNA (1)...(19): siRNA sense strand
gauugauguucuccaacug

SEQ ID NO: 370179 - RNA, 19 nt, Homo sapiens
  misc_RNA (1)...(19): siRNA sense strand
aagaggacgugggaggaaa

SEQ ID NO: 370180 - RNA, 19 nt, Homo sapiens
  misc_RNA (1)...(19): siRNA sense strand
auugagaaaucugccagua

SEQ ID NO: 370181 - RNA, 19 nt, Homo sapiens
  misc_RNA (1)...(19): siRNA sense strand
uggaaaagcucuucuugca

SEQ ID NO: 370182 - RNA, 19 nt, Homo sapiens
  misc_RNA (1)...(19): siRNA sense strand
cugagaaaguugaugugau

SEQ ID NO: 370183 - RNA, 19 nt, Homo sapiens
  misc_RNA (1)...(19): siRNA sense strand
gaaccucccugauuacuau

SEQ ID NO: 370184 - RNA, 19 nt, Homo sapiens
  misc_RNA (1)...(19): siRNA sense strand
gaaaugcgcuuugccaaga

SEQ ID NO: 370185 - RNA, 19 nt, Homo sapiens
  misc_RNA (1)...(19): siRNA sense strand
uaaaugagcuacccacaga

SEQ ID NO: 370186 - RNA, 19 nt, Homo sapiens
  misc_RNA (1)...(19): siRNA sense strand
gaaaagcucuucuugcaaa

SEQ ID NO: 370187 - RNA, 19 nt, Homo sapiens
  misc_RNA (1)...(19): siRNA sense strand
gcaagccuauguccuauga

SEQ ID NO: 370188 - RNA, 19 nt, Homo sapiens
  misc_RNA (1)...(19): siRNA sense strand
gaagaaaccgagaucauga

SEQ ID NO: 370189 - RNA, 19 nt, Homo sapiens
  misc_RNA (1)...(19): siRNA sense strand
ugagaaaguugaugugauu

SEQ ID NO: 370190 - RNA, 19 nt, Homo sapiens
  misc_RNA (1)...(19): siRNA sense strand
ugagaaaucugccaguaau

SEQ ID NO: 370191 - RNA, 19 nt, Homo sapiens
  misc_RNA (1)...(19): siRNA sense strand
gagaugacauagucuuaau

SEQ ID NO: 370192 - RNA, 19 nt, Homo sapiens
  misc_RNA (1)...(19): siRNA sense strand
ggaaugcucaggaauguau

SEQ ID NO: 370193 - RNA, 19 nt, Homo sapiens
  misc_RNA (1)...(19): siRNA sense strand
guacaacccuccugaccau

SEQ ID NO: 370194 - RNA, 19 nt, Homo sapiens
  misc_RNA (1)...(19): siRNA sense strand
acuagaaacuucccaaaug

SEQ ID NO: 370195 - RNA, 19 nt, Homo sapiens
  misc_RNA (1)...(19): siRNA sense strand
gauaugggaacaauaaaga

SEQ ID NO: 370196 - RNA, 19 nt, Homo sapiens
  misc_RNA (1)...(19): siRNA sense strand
caacaagccuggagaugac

SEQ ID NO: 370197 - RNA, 19 nt, Homo sapiens
  misc_RNA (1)...(19): siRNA sense strand
gcagaacaaaccaaagaaa

SEQ ID NO: 370198 - RNA, 19 nt, Homo sapiens
  misc_RNA (1)...(19): siRNA sense strand
ggacgugggaggaaagaaa

SEQ ID NO: 370199 - RNA, 19 nt, Homo sapiens
  misc_RNA (1)...(19): siRNA sense strand
cuagaaacuucccaaaugu

SEQ ID NO: 370200 - RNA, 19 nt, Homo sapiens
  misc_RNA (1)...(19): siRNA sense strand
aaaccgagaucaugauagu

SEQ ID NO: 370201 - RNA, 19 nt, Homo sapiens
  misc_RNA (1)...(19): siRNA sense strand
gggauggacuagaaacuuc

SEQ ID NO: 370202 - RNA, 19 nt, Homo sapiens
  misc_RNA (1)...(19): siRNA sense strand
ggagaugacauagucuuaa

SEQ ID NO: 370203 - RNA, 19 nt, Homo sapiens
  misc_RNA (1)...(19): siRNA sense strand
ggagauguuugccaagaag

SEQ ID NO: 370204 - RNA, 19 nt, Homo sapiens
  misc_RNA (1)...(19): siRNA sense strand
ugagcacaaucaagucuaa

SEQ ID NO: 370205 - RNA, 19 nt, Homo sapiens
  misc_RNA (1)...(19): siRNA sense strand
ggaaguggaagagaauaaa

SEQ ID NO: 370206 - RNA, 19 nt, Homo sapiens
  misc_RNA (1)...(19): siRNA sense strand
cgacuacugugacaucauc

SEQ ID NO: 370207 - RNA, 19 nt, Homo sapiens
  misc_RNA (1)...(19): siRNA sense strand
gcucaagacacuauggaaa

SEQ ID NO: 370208 - RNA, 19 nt, Homo sapiens
  misc_RNA (1)...(19): siRNA sense strand
cagcagaacaaaccaaaga

SEQ ID NO: 370209 - RNA, 19 nt, Homo sapiens
  misc_RNA (1)...(19): siRNA sense strand
aagaggaaguggaagagaa

SEQ ID NO: 370210 - RNA, 19 nt, Homo sapiens
  misc_RNA (1)...(19): siRNA sense strand
ggacuagaaacuucccaaa

SEQ ID NO: 370211 - RNA, 19 nt, Homo sapiens
  misc_RNA (1)...(19): siRNA sense strand
gacaugagcacaaucaagu

SEQ ID NO: 370212 - RNA, 19 nt, Homo sapiens
  misc_RNA (1)...(19): siRNA sense strand
ugugaaaccuccaaagaag

SEQ ID NO: 370213 - RNA, 19 nt, Homo sapiens
  misc_RNA (1)...(19): siRNA sense strand
gaagaggacgugggaggaa

SEQ ID NO: 370214 - RNA, 19 nt, Homo sapiens
  misc_RNA (1)...(19): siRNA sense strand
agaagggagugaagaggaa

SEQ ID NO: 370215 - RNA, 19 nt, Homo sapiens
  misc_RNA (1)...(19): siRNA sense strand
uaaagaagcgcuuggaaaa

SEQ ID NO: 370216 - RNA, 19 nt, Homo sapiens
  misc_RNA (1)...(19): siRNA sense strand
agcugaaccucccugauua

SEQ ID NO: 370217 - RNA, 19 nt, Homo sapiens
  misc_RNA (1)...(19): siRNA sense strand
gcaaugugagcaagaagga

SEQ ID NO: 370218 - RNA, 19 nt, Homo sapiens
  misc_RNA (1)...(19): siRNA sense strand
gaaaagaggaaguggaaga

SEQ ID NO: 370219 - RNA, 19 nt, Homo sapiens
  misc_RNA (1)...(19): siRNA sense strand
gaaacuucccaaaugucua

SEQ ID NO: 370220 - RNA, 19 nt, Homo sapiens
  misc_RNA (1)...(19): siRNA sense strand
uuacuggaaugcucaggaa

SEQ ID NO: 370221 - RNA, 19 nt, Homo sapiens
  misc_RNA (1)...(19): siRNA sense strand
aagcugaaccucccugauu

SEQ ID NO: 370222 - RNA, 19 nt, Homo sapiens
  misc_RNA (1)...(19): siRNA sense strand
cagcgaagacuccgaaaca

SEQ ID NO: 370223 - RNA, 19 nt, Homo sapiens
  misc_RNA (1)...(19): siRNA sense strand
ugcaauaccugcucagagu

SEQ ID NO: 370224 - RNA, 19 nt, Homo sapiens
  misc_RNA (1)...(19): siRNA sense strand
ggacaugagcacaaucaag

SEQ ID NO: 370225 - RNA, 19 nt, Homo sapiens
  misc_RNA (1)...(19): siRNA sense strand
ucaagacacuauggaaaca

SEQ ID NO: 370226 - RNA, 19 nt, Homo sapiens
  misc_RNA (1)...(19): siRNA sense strand
gaguccagcuccucugaca

SEQ ID NO: 370227 - RNA, 19 nt, Homo sapiens
  misc_RNA (1)...(19): siRNA sense strand
auaaagaagcgcuuggaaa

SEQ ID NO: 370228 - RNA, 19 nt, Homo sapiens
  misc_RNA (1)...(19): siRNA sense strand
acaacaagccuggagauga

SEQ ID NO: 370229 - RNA, 19 nt, Homo sapiens
  misc_RNA (1)...(19): siRNA sense strand
gaugacauagucuuaaugg

SEQ ID NO: 370230 - RNA, 19 nt, Homo sapiens
  misc_RNA (1)...(19): siRNA sense strand
gagcuacccacagaagaaa

SEQ ID NO: 370231 - RNA, 19 nt, Homo sapiens
  misc_RNA (1)...(19): siRNA sense strand
agaccaaccaacugcaaua

SEQ ID NO: 370232 - RNA, 19 nt, Homo sapiens
  misc_RNA (1)...(19): siRNA sense strand
gcuccaggauguguucgaa

SEQ ID NO: 370233 - RNA, 19 nt, Homo sapiens
  misc_RNA (1)...(19): siRNA sense strand
cuacacgacuacugugaca

SEQ ID NO: 370234 - RNA, 19 nt, Homo sapiens
  misc_RNA (1)...(19): siRNA sense strand
caaagaagggagugaagag

SEQ ID NO: 370235 - RNA, 19 nt, Homo sapiens
  misc_RNA (1)...(19): siRNA sense strand
guaccaaacacaacucaag

SEQ ID NO: 370236 - RNA, 19 nt, Homo sapiens
  misc_RNA (1)...(19): siRNA sense strand
agaaaccgagaucaugaua

SEQ ID NO: 370237 - RNA, 19 nt, Homo sapiens
  misc_RNA (1)...(19): siRNA sense strand
gauguucuccaacugcuau

SEQ ID NO: 370238 - RNA, 19 nt, Homo sapiens
  misc_RNA (1)...(19): siRNA sense strand
gcuaugucaccuccuguuu

SEQ ID NO: 370239 - RNA, 19 nt, Homo sapiens
  misc_RNA (1)...(19): siRNA sense strand
gagcuggagcgcuauguca

SEQ ID NO: 370240 - RNA, 19 nt, Homo sapiens
  misc_RNA (1)...(19): siRNA sense strand
gaaaagcacaaaagaaaag

SEQ ID NO: 370241 - RNA, 19 nt, Homo sapiens
  misc_RNA (1)...(19): siRNA sense strand
ggauaugggaacaauaaag

SEQ ID NO: 370242 - RNA, 19 nt, Homo sapiens
  misc_RNA (1)...(19): siRNA sense strand
gugcaagccuauguccuau

SEQ ID NO: 370243 - RNA, 19 nt, Homo sapiens
  misc_RNA (1)...(19): siRNA sense strand
gcacccagcaccagagaag

SEQ ID NO: 370244 - RNA, 19 nt, Homo sapiens
  misc_RNA (1)...(19): siRNA sense strand
gacuagaaacuucccaaau

SEQ ID NO: 370245 - RNA, 19 nt, Homo sapiens
  misc_RNA (1)...(19): siRNA sense strand
agaagaaaccgagaucaug

SEQ ID NO: 370246 - RNA, 19 nt, Homo sapiens
  misc_RNA (1)...(19): siRNA sense strand
gccuggagaugacauaguc

SEQ ID NO: 370247 - RNA, 19 nt, Homo sapiens
  misc_RNA (1)...(19): siRNA sense strand
gaauguauccaggacuuca

SEQ ID NO: 370248 - RNA, 19 nt, Homo sapiens
  misc_RNA (1)...(19): siRNA sense strand
ugaaaccuccaaagaagga

SEQ ID NO: 370249 - RNA, 19 nt, Homo sapiens
  misc_RNA (1)...(19): siRNA sense strand
gcugagaaaguugauguga

SEQ ID NO: 370250 - RNA, 19 nt, Homo sapiens
  misc_RNA (1)...(19): siRNA sense strand
aaggagauguuugccaaga

SEQ ID NO: 370251 - RNA, 19 nt, Homo sapiens
  misc_RNA (1)...(19): siRNA sense strand
gcacaaucaagucuaaacu

SEQ ID NO: 370252 - RNA, 19 nt, Homo sapiens
  misc_RNA (1)...(19): siRNA sense strand
gacaagugcaagccuaugu

SEQ ID NO: 370253 - RNA, 19 nt, Homo sapiens
  misc_RNA (1)...(19): siRNA sense strand
cgauugauguucuccaacu

SEQ ID NO: 370254 - RNA, 19 nt, Homo sapiens
  misc_RNA (1)...(19): siRNA sense strand
ccaaccaacugcaauaccu

SEQ ID NO: 370255 - RNA, 19 nt, Homo sapiens
  misc_RNA (1)...(19): siRNA sense strand
acagcaaugugagcaagaa

SEQ ID NO: 370256 - RNA, 19 nt, Homo sapiens
  misc_RNA (1)...(19): siRNA sense strand
gaagggagugaagaggaaa

SEQ ID NO: 370257 - RNA, 19 nt, Homo sapiens
  misc_RNA (1)...(19): siRNA sense strand
aaagaaacagggacagcaa

SEQ ID NO: 370258 - RNA, 19 nt, Homo sapiens
  misc_RNA (1)...(19): siRNA sense strand
gaaaccgagaucaugauag

SEQ ID NO: 370259 - RNA, 19 nt, Homo sapiens
  misc_RNA (1)...(19): siRNA sense strand
gagaaaucugccaguaaug

SEQ ID NO: 370260 - RNA, 19 nt, Homo sapiens
  misc_RNA (1)...(19): siRNA sense strand
gaggaaguggaagagaaua

SEQ ID NO: 370261 - RNA, 19 nt, Homo sapiens
  misc_RNA (1)...(19): siRNA sense strand
uccaggauguguucgaaau

SEQ ID NO: 370262 - RNA, 19 nt, Homo sapiens
  misc_RNA (1)...(19): siRNA sense strand
cagaagaaaccgagaucau

SEQ ID NO: 370263 - RNA, 19 nt, Homo sapiens
  misc_RNA (1)...(19): siRNA sense strand
ugagcuacccacagaagaa

SEQ ID NO: 370264 - RNA, 19 nt, Homo sapiens
  misc_RNA (1)...(19): siRNA sense strand
auccaggacuucaacacua

SEQ ID NO: 370265 - RNA, 19 nt, Homo sapiens
  misc_RNA (1)...(19): siRNA sense strand
uuaaaacgccuauggauau

SEQ ID NO: 370266 - RNA, 19 nt, Homo sapiens
  misc_RNA (1)...(19): siRNA sense strand
caacugcuauaaguacaac

SEQ ID NO: 370267 - RNA, 19 nt, Homo sapiens
  misc_RNA (1)...(19): siRNA sense strand
gcugacguccgauugaugu

SEQ ID NO: 370268 - RNA, 19 nt, Homo sapiens
  misc_RNA (1)...(19): siRNA sense strand
uggagaugacauagucuua

SEQ ID NO: 370269 - RNA, 19 nt, Homo sapiens
  misc_RNA (1)...(19): siRNA sense strand
aggaauguauccaggacuu

SEQ ID NO: 370270 - RNA, 19 nt, Homo sapiens
  misc_RNA (1)...(19): siRNA sense strand
caauaaagaagcgcuugga

SEQ ID NO: 370271 - RNA, 19 nt, Homo sapiens
  misc_RNA (1)...(19): siRNA sense strand
gcacaaaagaaaagaggaa

SEQ ID NO: 370272 - RNA, 19 nt, Homo sapiens
  misc_RNA (1)...(19): siRNA sense strand
cccgcaagcuccaggaugu

SEQ ID NO: 370273 - RNA, 19 nt, Homo sapiens
  misc_RNA (1)...(19): siRNA sense strand
ccugugaaaccuccaaaga

SEQ ID NO: 370274 - RNA, 19 nt, Homo sapiens
  misc_RNA (1)...(19): siRNA sense strand
uccaggacuucaacacuau

SEQ ID NO: 370275 - RNA, 19 nt, Homo sapiens
  misc_RNA (1)...(19): siRNA sense strand
ccaagaggcagaccaacca

SEQ ID NO: 370276 - RNA, 19 nt, Homo sapiens
  misc_RNA (1)...(19): siRNA sense strand
cguaugagucggaggaaga

SEQ ID NO: 370277 - RNA, 19 nt, Homo sapiens
  misc_RNA (1)...(19): siRNA sense strand
gcaacagcaaugugagcaa

SEQ ID NO: 370278 - RNA, 19 nt, Homo sapiens
  misc_RNA (1)...(19): siRNA sense strand
gauugauguucuccaacug

SEQ ID NO: 370279 - RNA, 19 nt, Homo sapiens
  misc_RNA (1)...(19): siRNA sense strand
aagaggacgugggaggaaa

SEQ ID NO: 370280 - RNA, 19 nt, Homo sapiens
  misc_RNA (1)...(19): siRNA sense strand
auugagaaaucugccagua

SEQ ID NO: 370281 - RNA, 19 nt, Homo sapiens
  misc_RNA (1)...(19): siRNA sense strand
uggaaaagcucuucuugca

SEQ ID NO: 370282 - RNA, 19 nt, Homo sapiens
  misc_RNA (1)...(19): siRNA sense strand
cugagaaaguugaugugau

SEQ ID NO: 370283 - RNA, 19 nt, Homo sapiens
  misc_RNA (1)...(19): siRNA sense strand
gcacuaaaccugauagaaa

SEQ ID NO: 370284 - RNA, 19 nt, Homo sapiens
  misc_RNA (1)...(19): siRNA sense strand
gaaaagaauuccagaagau

SEQ ID NO: 370285 - RNA, 19 nt, Homo sapiens
  misc_RNA (1)...(19): siRNA sense strand
gggauucauuggcuucuuu

SEQ ID NO: 370286 - RNA, 19 nt, Homo sapiens
  misc_RNA (1)...(19): siRNA sense strand
ccaagucggcaguuuguaa

SEQ ID NO: 370287 - RNA, 19 nt, Homo sapiens
  misc_RNA (1)...(19): siRNA sense strand
ggcaacagcaauaggauuu

SEQ ID NO: 370288 - RNA, 19 nt, Homo sapiens
  misc_RNA (1)...(19): siRNA sense strand
gaucagguaaugcaguuug

SEQ ID NO: 370289 - RNA, 19 nt, Homo sapiens
  misc_RNA (1)...(19): siRNA sense strand
uucauuggcuucuuuguga

SEQ ID NO: 370290 - RNA, 19 nt, Homo sapiens
  misc_RNA (1)...(19): siRNA sense strand
gauuugcuauaaugggauu

SEQ ID NO: 370291 - RNA, 19 nt, Homo sapiens
  misc_RNA (1)...(19): siRNA sense strand
caagucggcaguuuguaaa

SEQ ID NO: 370292 - RNA, 19 nt, Homo sapiens
  misc_RNA (1)...(19): siRNA sense strand
guuaaaagaugcacuaaac

SEQ ID NO: 370293 - RNA, 19 nt, Homo sapiens
  misc_RNA (1)...(19): siRNA sense strand
ugaaauugauccauauucc

SEQ ID NO: 370294 - RNA, 19 nt, Homo sapiens
  misc_RNA (1)...(19): siRNA sense strand
aaagaauuccagaagauug

SEQ ID NO: 370295 - RNA, 19 nt, Homo sapiens
  misc_RNA (1)...(19): siRNA sense strand
gagccaagucggcaguuug

SEQ ID NO: 370296 - RNA, 19 nt, Homo sapiens
  misc_RNA (1)...(19): siRNA sense strand
cacuaaaccugauagaaaa

SEQ ID NO: 370297 - RNA, 19 nt, Homo sapiens
  misc_RNA (1)...(19): siRNA sense strand
ggacuccauucggcugguu

SEQ ID NO: 370298 - RNA, 19 nt, Homo sapiens
  misc_RNA (1)...(19): siRNA sense strand
agaaaagaauuccagaaga

SEQ ID NO: 370299 - RNA, 19 nt, Homo sapiens
  misc_RNA (1)...(19): siRNA sense strand
cagguaaugcaguuuguug

SEQ ID NO: 370300 - RNA, 19 nt, Homo sapiens
  misc_RNA (1)...(19): siRNA sense strand
gcaacagcaauaggauuug

SEQ ID NO: 370301 - RNA, 19 nt, Homo sapiens
  misc_RNA (1)...(19): siRNA sense strand
ugagccaagucggcaguuu

SEQ ID NO: 370302 - RNA, 19 nt, Homo sapiens
  misc_RNA (1)...(19): siRNA sense strand
gaaauugauccauauuccu

SEQ ID NO: 370303 - RNA, 19 nt, Homo sapiens
  misc_RNA (1)...(19): siRNA sense strand
uggcuucuuugugaaauug

SEQ ID NO: 370304 - RNA, 19 nt, Homo sapiens
  misc_RNA (1)...(19): siRNA sense strand
gcaguuuguugagccaagu

SEQ ID NO: 370305 - RNA, 19 nt, Homo sapiens
  misc_RNA (1)...(19): siRNA sense strand
gugaaauugauccauauuc

SEQ ID NO: 370306 - RNA, 19 nt, Homo sapiens
  misc_RNA (1)...(19): siRNA sense strand
gucggcaguuuguaaagga

SEQ ID NO: 370307 - RNA, 19 nt, Homo sapiens
  misc_RNA (1)...(19): siRNA sense strand
aagaugcacuaaaccugau

SEQ ID NO: 370308 - RNA, 19 nt, Homo sapiens
  misc_RNA (1)...(19): siRNA sense strand
cauggcaacagcaauagga

SEQ ID NO: 370309 - RNA, 19 nt, Homo sapiens
  misc_RNA (1)...(19): siRNA sense strand
ucauuggcuucuuugugaa

SEQ ID NO: 370310 - RNA, 19 nt, Homo sapiens
  misc_RNA (1)...(19): siRNA sense strand
gguaaugcaguuuguugag

SEQ ID NO: 370311 - RNA, 19 nt, Homo sapiens
  misc_RNA (1)...(19): siRNA sense strand
ggauucauuggcuucuuug

SEQ ID NO: 370312 - RNA, 19 nt, Homo sapiens
  misc_RNA (1)...(19): siRNA sense strand
gcugacagaucacccauau

SEQ ID NO: 370313 - RNA, 19 nt, Homo sapiens
  misc_RNA (1)...(19): siRNA sense strand
gcuccgaauuguggaaaua

SEQ ID NO: 370314 - RNA, 19 nt, Homo sapiens
  misc_RNA (1)...(19): siRNA sense strand
ggaaauaggagacgagaac

SEQ ID NO: 370315 - RNA, 19 nt, Homo sapiens
  misc_RNA (1)...(19): siRNA sense strand
gcacugacguucucuucac

SEQ ID NO: 370316 - RNA, 19 nt, Homo sapiens
  misc_RNA (1)...(19): siRNA sense strand
caauggcagugcugacaga

SEQ ID NO: 370317 - RNA, 19 nt, Homo sapiens
  misc_RNA (1)...(19): siRNA sense strand
uggcagugcugacagauca

SEQ ID NO: 370318 - RNA, 19 nt, Homo sapiens
  misc_RNA (1)...(19): siRNA sense strand
ugacagaucacccauaugc

SEQ ID NO: 370319 - RNA, 19 nt, Homo sapiens
  misc_RNA (1)...(19): siRNA sense strand
ggauggcacugacguucuc

SEQ ID NO: 370320 - RNA, 19 nt, Homo sapiens
  misc_RNA (1)...(19): siRNA sense strand
ucguaggccucuccaaaug

SEQ ID NO: 370321 - RNA, 19 nt, Homo sapiens
  misc_RNA (1)...(19): siRNA sense strand
gcugcugacugccucuuuc

SEQ ID NO: 370322 - RNA, 19 nt, Homo sapiens
  misc_RNA (1)...(19): siRNA sense strand
ggcuacagcugcuagaacu

SEQ ID NO: 370323 - RNA, 19 nt, Homo sapiens
  misc_RNA (1)...(19): siRNA sense strand
gugcugggagguaaacuga

SEQ ID NO: 370324 - RNA, 19 nt, Homo sapiens
  misc_RNA (1)...(19): siRNA sense strand
gcugacugccucuuucuuc

SEQ ID NO: 370325 - RNA, 19 nt, Homo sapiens
  misc_RNA (1)...(19): siRNA sense strand
gaucuggccaaagcucaaa

SEQ ID NO: 370326 - RNA, 19 nt, Homo sapiens
  misc_RNA (1)...(19): siRNA sense strand
gccaggaggcacugcagaa

SEQ ID NO: 370327 - RNA, 19 nt, Homo sapiens
  misc_RNA (1)...(19): siRNA sense strand
uuucguaggccucuccaaa

SEQ ID NO: 370328 - RNA, 19 nt, Homo sapiens
  misc_RNA (1)...(19): siRNA sense strand
cccugacccucccagauga

SEQ ID NO: 370329 - RNA, 19 nt, Homo sapiens
  misc_RNA (1)...(19): siRNA sense strand
gagguuauguugcuaaaga

SEQ ID NO: 370330 - RNA, 19 nt, Homo sapiens
  misc_RNA (1)...(19): siRNA sense strand
gcaucuauguggauucuuu

SEQ ID NO: 370331 - RNA, 19 nt, Homo sapiens
  misc_RNA (1)...(19): siRNA sense strand
ucaaacaggugcucgcauu

SEQ ID NO: 370332 - RNA, 19 nt, Homo sapiens
  misc_RNA (1)...(19): siRNA sense strand
uaucauagaugcagcuguu

SEQ ID NO: 370333 - RNA, 19 nt, Homo sapiens
  misc_RNA (1)...(19): siRNA sense strand
ccagaaugccuucaucuuu

SEQ ID NO: 370334 - RNA, 19 nt, Homo sapiens
  misc_RNA (1)...(19): siRNA sense strand
uuuacaggcugguggauua

SEQ ID NO: 370335 - RNA, 19 nt, Homo sapiens
  misc_RNA (1)...(19): siRNA sense strand
gaucucugauugcaucuau

SEQ ID NO: 370336 - RNA, 19 nt, Homo sapiens
  misc_RNA (1)...(19): siRNA sense strand
gcugguggauuaucauaga

SEQ ID NO: 370337 - RNA, 19 nt, Homo sapiens
  misc_RNA (1)...(19): siRNA sense strand
agaugcagcuguuauuuau

SEQ ID NO: 370338 - RNA, 19 nt, Homo sapiens
  misc_RNA (1)...(19): siRNA sense strand
uggccgcacugaagacuua

SEQ ID NO: 370339 - RNA, 19 nt, Homo sapiens
  misc_RNA (1)...(19): siRNA sense strand
uagaugcagcuguuauuua

SEQ ID NO: 370340 - RNA, 19 nt, Homo sapiens
  misc_RNA (1)...(19): siRNA sense strand
aaccauagccuuccuaaug

SEQ ID NO: 370341 - RNA, 19 nt, Homo sapiens
  misc_RNA (1)...(19): siRNA sense strand
cauaguauacccuggaauu

SEQ ID NO: 370342 - RNA, 19 nt, Homo sapiens
  misc_RNA (1)...(19): siRNA sense strand
gaggugauaguuacaguga

SEQ ID NO: 370343 - RNA, 19 nt, Homo sapiens
  misc_RNA (1)...(19): siRNA sense strand
cagaaugccuucaucuuuu

SEQ ID NO: 370344 - RNA, 19 nt, Homo sapiens
  misc_RNA (1)...(19): siRNA sense strand
ggugauaguuacagugaag

SEQ ID NO: 370345 - RNA, 19 nt, Homo sapiens
  misc_RNA (1)...(19): siRNA sense strand
gacauaguauacccuggaa

SEQ ID NO: 370346 - RNA, 19 nt, Homo sapiens
  misc_RNA (1)...(19): siRNA sense strand
ccaugccugugguguuaua

SEQ ID NO: 370347 - RNA, 19 nt, Homo sapiens
  misc_RNA (1)...(19): siRNA sense strand
accauagccuuccuaauga

SEQ ID NO: 370348 - RNA, 19 nt, Homo sapiens
  misc_RNA (1)...(19): siRNA sense strand
gcaaccauagccuuccuaa

SEQ ID NO: 370349 - RNA, 19 nt, Homo sapiens
  misc_RNA (1)...(19): siRNA sense strand
gccuuuggaucucugauug

SEQ ID NO: 370350 - RNA, 19 nt, Homo sapiens
  misc_RNA (1)...(19): siRNA sense strand
gggaaaagcgcaauacuau

SEQ ID NO: 370351 - RNA, 19 nt, Homo sapiens
  misc_RNA (1)...(19): siRNA sense strand
caaacaggugcucgcauuu

SEQ ID NO: 370352 - RNA, 19 nt, Homo sapiens
  misc_RNA (1)...(19): siRNA sense strand
cauagaugcagcuguuauu

SEQ ID NO: 370353 - RNA, 19 nt, Homo sapiens
  misc_RNA (1)...(19): siRNA sense strand
cauugcugcugguguacua

SEQ ID NO: 370354 - RNA, 19 nt, Homo sapiens
  misc_RNA (1)...(19): siRNA sense strand
gauugcaucuauguggauu

SEQ ID NO: 370355 - RNA, 19 nt, Homo sapiens
  misc_RNA (1)...(19): siRNA sense strand
cuagagggcuugagaugcu

SEQ ID NO: 370356 - RNA, 19 nt, Homo sapiens
  misc_RNA (1)...(19): siRNA sense strand
gaagguugucugggucaaa

SEQ ID NO: 370357 - RNA, 19 nt, Homo sapiens
  misc_RNA (1)...(19): siRNA sense strand
cccuggaauugcuguauuu

SEQ ID NO: 370358 - RNA, 19 nt, Homo sapiens
  misc_RNA (1)...(19): siRNA sense strand
aaacaggugcucgcauuug

SEQ ID NO: 370359 - RNA, 19 nt, Homo sapiens
  misc_RNA (1)...(19): siRNA sense strand
uuauuuaucccaccaugaa

SEQ ID NO: 370360 - RNA, 19 nt, Homo sapiens
  misc_RNA (1)...(19): siRNA sense strand
ggugcucgcauuuggcuuu

SEQ ID NO: 370361 - RNA, 19 nt, Homo sapiens
  misc_RNA (1)...(19): siRNA sense strand
uuaaugcaguaucgaaugg

SEQ ID NO: 370362 - RNA, 19 nt, Homo sapiens
  misc_RNA (1)...(19): siRNA sense strand
uuccauugcugcuggugua

SEQ ID NO: 370363 - RNA, 19 nt, Homo sapiens
  misc_RNA (1)...(19): siRNA sense strand
uuucguugguuucauguug

SEQ ID NO: 370364 - RNA, 19 nt, Homo sapiens
  misc_RNA (1)...(19): siRNA sense strand
gauuaaugcaguaucgaau

SEQ ID NO: 370365 - RNA, 19 nt, Homo sapiens
  misc_RNA (1)...(19): siRNA sense strand
ccauagccuuccuaaugau

SEQ ID NO: 370366 - RNA, 19 nt, Homo sapiens
  misc_RNA (1)...(19): siRNA sense strand
gguguuauagcaaccauag

SEQ ID NO: 370367 - RNA, 19 nt, Homo sapiens
  misc_RNA (1)...(19): siRNA sense strand
acaggcugguggauuauca

SEQ ID NO: 370368 - RNA, 19 nt, Homo sapiens
  misc_RNA (1)...(19): siRNA sense strand
cauguuggccuuuggaucu

SEQ ID NO: 370369 - RNA, 19 nt, Homo sapiens
  misc_RNA (1)...(19): siRNA sense strand
uggagguuauguugcuaaa

SEQ ID NO: 370370 - RNA, 19 nt, Homo sapiens
  misc_RNA (1)...(19): siRNA sense strand
uaucccaccaugaaagauu

SEQ ID NO: 370371 - RNA, 19 nt, Homo sapiens
  misc_RNA (1)...(19): siRNA sense strand
ggggaaaagcgcaauacua

SEQ ID NO: 370372 - RNA, 19 nt, Homo sapiens
  misc_RNA (1)...(19): siRNA sense strand
gauaguuacagugaagguu

SEQ ID NO: 370373 - RNA, 19 nt, Homo sapiens
  misc_RNA (1)...(19): siRNA sense strand
gguuauguugcuaaagaaa

SEQ ID NO: 370374 - RNA, 19 nt, Homo sapiens
  misc_RNA (1)...(19): siRNA sense strand
ugauuaaugcaguaucgaa

SEQ ID NO: 370375 - RNA, 19 nt, Homo sapiens
  misc_RNA (1)...(19): siRNA sense strand
ucauagaugcagcuguuau

SEQ ID NO: 370376 - RNA, 19 nt, Homo sapiens
  misc_RNA (1)...(19): siRNA sense strand
gguuucauguuggccuuug

SEQ ID NO: 370377 - RNA, 19 nt, Homo sapiens
  misc_RNA (1)...(19): siRNA sense strand
uaaguuuggccgcacugaa

SEQ ID NO: 370378 - RNA, 19 nt, Homo sapiens
  misc_RNA (1)...(19): siRNA sense strand
cauagccuuccuaaugauu

SEQ ID NO: 370379 - RNA, 19 nt, Homo sapiens
  misc_RNA (1)...(19): siRNA sense strand
caaguccgaggugauaguu

SEQ ID NO: 370380 - RNA, 19 nt, Homo sapiens
  misc_RNA (1)...(19): siRNA sense strand
gauggaaacuucugacaua

SEQ ID NO: 370381 - RNA, 19 nt, Homo sapiens
  misc_RNA (1)...(19): siRNA sense strand
cagaagaucuugaggauaa

SEQ ID NO: 370382 - RNA, 19 nt, Homo sapiens
  misc_RNA (1)...(19): siRNA sense strand
gaagagagcaggauuugua

SEQ ID NO: 370383 - RNA, 19 nt, Homo sapiens
  misc_RNA (1)...(19): siRNA sense strand
gcaaagccuuggcauguua

SEQ ID NO: 370384 - RNA, 19 nt, Homo sapiens
  misc_RNA (1)...(19): siRNA sense strand
gcacagaaguguauauugg

SEQ ID NO: 370385 - RNA, 19 nt, Homo sapiens
  misc_RNA (1)...(19): siRNA sense strand
agacauggguauagaguua

SEQ ID NO: 370386 - RNA, 19 nt, Homo sapiens
  misc_RNA (1)...(19): siRNA sense strand
gaugaagccuuggauuaua

SEQ ID NO: 370387 - RNA, 19 nt, Homo sapiens
  misc_RNA (1)...(19): siRNA sense strand
caaccgauaucauuucuga

SEQ ID NO: 370388 - RNA, 19 nt, Homo sapiens
  misc_RNA (1)...(19): siRNA sense strand
ugaaagaugcucuggauua

SEQ ID NO: 370389 - RNA, 19 nt, Homo sapiens
  misc_RNA (1)...(19): siRNA sense strand
gaaacuugcuuuggagaaa

SEQ ID NO: 370390 - RNA, 19 nt, Homo sapiens
  misc_RNA (1)...(19): siRNA sense strand
caucagagauagucaagaa

SEQ ID NO: 370391 - RNA, 19 nt, Homo sapiens
  misc_RNA (1)...(19): siRNA sense strand
aaacaacacccguacaaua

SEQ ID NO: 370392 - RNA, 19 nt, Homo sapiens
  misc_RNA (1)...(19): siRNA sense strand
cagcagaaauguccaaaug

SEQ ID NO: 370393 - RNA, 19 nt, Homo sapiens
  misc_RNA (1)...(19): siRNA sense strand
ucaggaaugugaagaaauu

SEQ ID NO: 370394 - RNA, 19 nt, Homo sapiens
  misc_RNA (1)...(19): siRNA sense strand
gcaaucuugucauccuuua

SEQ ID NO: 370395 - RNA, 19 nt, Homo sapiens
  misc_RNA (1)...(19): siRNA sense strand
gcaaagaccucgaaaacuu

SEQ ID NO: 370396 - RNA, 19 nt, Homo sapiens
  misc_RNA (1)...(19): siRNA sense strand
ccacaacacuaguaaacaa

SEQ ID NO: 370397 - RNA, 19 nt, Homo sapiens
  misc_RNA (1)...(19): siRNA sense strand
cuacagauuugcucuacua

SEQ ID NO: 370398 - RNA, 19 nt, Homo sapiens
  misc_RNA (1)...(19): siRNA sense strand
cgaaucagaucccagugua

SEQ ID NO: 370399 - RNA, 19 nt, Homo sapiens
  misc_RNA (1)...(19): siRNA sense strand
caacacccguacaauauga

SEQ ID NO: 370400 - RNA, 19 nt, Homo sapiens
  misc_RNA (1)...(19): siRNA sense strand
gaagcaguauuuagggaaa

SEQ ID NO: 370401 - RNA, 19 nt, Homo sapiens
  misc_RNA (1)...(19): siRNA sense strand
caagaagaguaccacuuaa

SEQ ID NO: 370402 - RNA, 19 nt, Homo sapiens
  misc_RNA (1)...(19): siRNA sense strand
gauggcaggugcagagaaa

SEQ ID NO: 370403 - RNA, 19 nt, Homo sapiens
  misc_RNA (1)...(19): siRNA sense strand
guacaagacauuugagauu

SEQ ID NO: 370404 - RNA, 19 nt, Homo sapiens
  misc_RNA (1)...(19): siRNA sense strand
ccaagaagauccagaaugc

SEQ ID NO: 370405 - RNA, 19 nt, Homo sapiens
  misc_RNA (1)...(19): siRNA sense strand
acaagaagaguaccacuua

SEQ ID NO: 370406 - RNA, 19 nt, Homo sapiens
  misc_RNA (1)...(19): siRNA sense strand
gaaagaugcucuggauuac

SEQ ID NO: 370407 - RNA, 19 nt, Homo sapiens
  misc_RNA (1)...(19): siRNA sense strand
cagaugaagccuuggauua

SEQ ID NO: 370408 - RNA, 19 nt, Homo sapiens
  misc_RNA (1)...(19): siRNA sense strand
aggaagaggugcaguauau

SEQ ID NO: 370409 - RNA, 19 nt, Homo sapiens
  misc_RNA (1)...(19): siRNA sense strand
gcaaagagaaucugcaaag

SEQ ID NO: 370410 - RNA, 19 nt, Homo sapiens
  misc_RNA (1)...(19): siRNA sense strand
caaagagaaucugcaaaga

SEQ ID NO: 370411 - RNA, 19 nt, Homo sapiens
  misc_RNA (1)...(19): siRNA sense strand
ccagaaugccagaaucuua

SEQ ID NO: 370412 - RNA, 19 nt, Homo sapiens
  misc_RNA (1)...(19): siRNA sense strand
ggaaugccuucucagauca

SEQ ID NO: 370413 - RNA, 19 nt, Homo sapiens
  misc_RNA (1)...(19): siRNA sense strand
gaugauauuugaugaaugc

SEQ ID NO: 370414 - RNA, 19 nt, Homo sapiens
  misc_RNA (1)...(19): siRNA sense strand
gcagagaaauugguggaau

SEQ ID NO: 370415 - RNA, 19 nt, Homo sapiens
  misc_RNA (1)...(19): siRNA sense strand
cggauuagcgacaaauuua

SEQ ID NO: 370416 - RNA, 19 nt, Homo sapiens
  misc_RNA (1)...(19): siRNA sense strand
uggagcaaguuguuuauaa

SEQ ID NO: 370417 - RNA, 19 nt, Homo sapiens
  misc_RNA (1)...(19): siRNA sense strand
gaagaggugcaguauauuc

SEQ ID NO: 370418 - RNA, 19 nt, Homo sapiens
  misc_RNA (1)...(19): siRNA sense strand
gagaagauaccauuugauc

SEQ ID NO: 370419 - RNA, 19 nt, Homo sapiens
  misc_RNA (1)...(19): siRNA sense strand
gggaaaagauucugcauau

SEQ ID NO: 370420 - RNA, 19 nt, Homo sapiens
  misc_RNA (1)...(19): siRNA sense strand
acagaaauaugaacaaugg

SEQ ID NO: 370421 - RNA, 19 nt, Homo sapiens
  misc_RNA (1)...(19): siRNA sense strand
gaacacagaaauaugaaca

SEQ ID NO: 370422 - RNA, 19 nt, Homo sapiens
  misc_RNA (1)...(19): siRNA sense strand
ugaaagacauggguauaga

SEQ ID NO: 370423 - RNA, 19 nt, Homo sapiens
  misc_RNA (1)...(19): siRNA sense strand
ugaucugucugaauguuua

SEQ ID NO: 370424 - RNA, 19 nt, Homo sapiens
  misc_RNA (1)...(19): siRNA sense strand
uaguaaugcugguguaauu

SEQ ID NO: 370425 - RNA, 19 nt, Homo sapiens
  misc_RNA (1)...(19): siRNA sense strand
ggagaucacaauauucuga

SEQ ID NO: 370426 - RNA, 19 nt, Homo sapiens
  misc_RNA (1)...(19): siRNA sense strand
caguggagaucacaauauu

SEQ ID NO: 370427 - RNA, 19 nt, Homo sapiens
  misc_RNA (1)...(19): siRNA sense strand
ggagcaaguuguuuauaag

SEQ ID NO: 370428 - RNA, 19 nt, Homo sapiens
  misc_RNA (1)...(19): siRNA sense strand
gaauccaugugaaguacaa

SEQ ID NO: 370429 - RNA, 19 nt, Homo sapiens
  misc_RNA (1)...(19): siRNA sense strand
gaauucauguccaccuuca

SEQ ID NO: 370430 - RNA, 19 nt, Homo sapiens
  misc_RNA (1)...(19): siRNA sense strand
gaagauaccauuugaucca

SEQ ID NO: 370431 - RNA, 19 nt, Homo sapiens
  misc_RNA (1)...(19): siRNA sense strand
caaagcaguuuucaaguuu

SEQ ID NO: 370432 - RNA, 19 nt, Homo sapiens
  misc_RNA (1)...(19): siRNA sense strand
ggacgaagcaguauuuagg

SEQ ID NO: 370433 - RNA, 19 nt, Homo sapiens
  misc_RNA (1)...(19): siRNA sense strand
guauagaguuacaggcauu

SEQ ID NO: 370434 - RNA, 19 nt, Homo sapiens
  misc_RNA (1)...(19): siRNA sense strand
gcaaugagaauccuaaacu

SEQ ID NO: 370435 - RNA, 19 nt, Homo sapiens
  misc_RNA (1)...(19): siRNA sense strand
ggaaggacuuucauuuuga

SEQ ID NO: 370436 - RNA, 19 nt, Homo sapiens
  misc_RNA (1)...(19): siRNA sense strand
ggaaacuucugacauacag

SEQ ID NO: 370437 - RNA, 19 nt, Homo sapiens
  misc_RNA (1)...(19): siRNA sense strand
caaugagaauccuaaacuu

SEQ ID NO: 370438 - RNA, 19 nt, Homo sapiens
  misc_RNA (1)...(19): siRNA sense strand
acucagagauuugaagaaa

SEQ ID NO: 370439 - RNA, 19 nt, Homo sapiens
  misc_RNA (1)...(19): siRNA sense strand
ucgaugagauugagcaaga

SEQ ID NO: 370440 - RNA, 19 nt, Homo sapiens
  misc_RNA (1)...(19): siRNA sense strand
guaaacaacacccguacaa

SEQ ID NO: 370441 - RNA, 19 nt, Homo sapiens
  misc_RNA (1)...(19): siRNA sense strand
gccagaaucuuagugagaa

SEQ ID NO: 370442 - RNA, 19 nt, Homo sapiens
  misc_RNA (1)...(19): siRNA sense strand
gagaauucauguccaccuu

SEQ ID NO: 370443 - RNA, 19 nt, Homo sapiens
  misc_RNA (1)...(19): siRNA sense strand
gagcaacagcugagaaugu

SEQ ID NO: 370444 - RNA, 19 nt, Homo sapiens
  misc_RNA (1)...(19): siRNA sense strand
gagcuugcuuugccugcua

SEQ ID NO: 370445 - RNA, 19 nt, Homo sapiens
  misc_RNA (1)...(19): siRNA sense strand
acaauaauaugugcuccua

SEQ ID NO: 370446 - RNA, 19 nt, Homo sapiens
  misc_RNA (1)...(19): siRNA sense strand
cauuugagauuccaguuau

SEQ ID NO: 370447 - RNA, 19 nt, Homo sapiens
  misc_RNA (1)...(19): siRNA sense strand
ccaauuagagcuugcuuug

SEQ ID NO: 370448 - RNA, 19 nt, Homo sapiens
  misc_RNA (1)...(19): siRNA sense strand
ggaaaagauucugcauaua

SEQ ID NO: 370449 - RNA, 19 nt, Homo sapiens
  misc_RNA (1)...(19): siRNA sense strand
gagcacuuguggacgcuuu

SEQ ID NO: 370450 - RNA, 19 nt, Homo sapiens
  misc_RNA (1)...(19): siRNA sense strand
ccaucacuauccaucuuua

SEQ ID NO: 370451 - RNA, 19 nt, Homo sapiens
  misc_RNA (1)...(19): siRNA sense strand
cagagaaauugguggaaug

SEQ ID NO: 370452 - RNA, 19 nt, Homo sapiens
  misc_RNA (1)...(19): siRNA sense strand
uaagagugauagaggaaug

SEQ ID NO: 370453 - RNA, 19 nt, Homo sapiens
  misc_RNA (1)...(19): siRNA sense strand
ccagagacaauaacaauuc

SEQ ID NO: 370454 - RNA, 19 nt, Homo sapiens
  misc_RNA (1)...(19): siRNA sense strand
aggauaagauggaaacuuc

SEQ ID NO: 370455 - RNA, 19 nt, Homo sapiens
  misc_RNA (1)...(19): siRNA sense strand
agaaagaaaggaacaaguu

SEQ ID NO: 370456 - RNA, 19 nt, Homo sapiens
  misc_RNA (1)...(19): siRNA sense strand
cuaccuacauccugagcua

SEQ ID NO: 370457 - RNA, 19 nt, Homo sapiens
  misc_RNA (1)...(19): siRNA sense strand
gaccacaucccaagccaaa

SEQ ID NO: 370458 - RNA, 19 nt, Homo sapiens
  misc_RNA (1)...(19): siRNA sense strand
gacaugggacgaagcagua

SEQ ID NO: 370459 - RNA, 19 nt, Homo sapiens
  misc_RNA (1)...(19): siRNA sense strand
gaugaaggcauugacauug

SEQ ID NO: 370460 - RNA, 19 nt, Homo sapiens
  misc_RNA (1)...(19): siRNA sense strand
ucuaaaaccuggcauauug

SEQ ID NO: 370461 - RNA, 19 nt, Homo sapiens
  misc_RNA (1)...(19): siRNA sense strand
aagaugcucuggauuacuu

SEQ ID NO: 370462 - RNA, 19 nt, Homo sapiens
  misc_RNA (1)...(19): siRNA sense strand
gaugaagagagcaggauuu

SEQ ID NO: 370463 - RNA, 19 nt, Homo sapiens
  misc_RNA (1)...(19): siRNA sense strand
cacuauccaucuuuacuuu

SEQ ID NO: 370464 - RNA, 19 nt, Homo sapiens
  misc_RNA (1)...(19): siRNA sense strand
aaugaaagaugcucuggau

SEQ ID NO: 370465 - RNA, 19 nt, Homo sapiens
  misc_RNA (1)...(19): siRNA sense strand
uuucugaucugucugaaug

SEQ ID NO: 370466 - RNA, 19 nt, Homo sapiens
  misc_RNA (1)...(19): siRNA sense strand
ugaaguacaagacauuuga

SEQ ID NO: 370467 - RNA, 19 nt, Homo sapiens
  misc_RNA (1)...(19): siRNA sense strand
ugagaauccuaaacuugaa

SEQ ID NO: 370468 - RNA, 19 nt, Homo sapiens
  misc_RNA (1)...(19): siRNA sense strand
ggauuagcgacaaauuuaa

SEQ ID NO: 370469 - RNA, 19 nt, Homo sapiens
  misc_RNA (1)...(19): siRNA sense strand
uagcaacagucaaacacaa

SEQ ID NO: 370470 - RNA, 19 nt, Homo sapiens
  misc_RNA (1)...(19): siRNA sense strand
gaugaaugccacaacacua

SEQ ID NO: 370471 - RNA, 19 nt, Homo sapiens
  misc_RNA (1)...(19): siRNA sense strand
cagauuugcucuacuaagg

SEQ ID NO: 370472 - RNA, 19 nt, Homo sapiens
  misc_RNA (1)...(19): siRNA sense strand
cguacaauaugaucauguu

SEQ ID NO: 370473 - RNA, 19 nt, Homo sapiens
  misc_RNA (1)...(19): siRNA sense strand
ccaaagcaguuuucaaguu

SEQ ID NO: 370474 - RNA, 19 nt, Homo sapiens
  misc_RNA (1)...(19): siRNA sense strand
guaaugcugguguaauuga

SEQ ID NO: 370475 - RNA, 19 nt, Homo sapiens
  misc_RNA (1)...(19): siRNA sense strand
guuggaggaguauagauua

SEQ ID NO: 370476 - RNA, 19 nt, Homo sapiens
  misc_RNA (1)...(19): siRNA sense strand
gcagcaggauucgaugaga

SEQ ID NO: 370477 - RNA, 19 nt, Homo sapiens
  misc_RNA (1)...(19): siRNA sense strand
uuuaaggaaugcuuuguga

SEQ ID NO: 370478 - RNA, 19 nt, Homo sapiens
  misc_RNA (1)...(19): siRNA sense strand
uugagaagauaccauuuga

SEQ ID NO: 370479 - RNA, 19 nt, Homo sapiens
  misc_RNA (1)...(19): siRNA sense strand
ggaaugcuuugugaguaga

SEQ ID NO: 370480 - RNA, 19 nt, Homo sapiens
  misc_RNA (1)...(19): siRNA sense strand
caacagaacuuaaggaaau

SEQ ID NO: 370481 - RNA, 19 nt, Homo sapiens
  misc_RNA (1)...(19): siRNA sense strand
gagaagacauucaagaaga

SEQ ID NO: 370482 - RNA, 19 nt, Homo sapiens
  misc_RNA (1)...(19): siRNA sense strand
agacagagcucgacaguau

SEQ ID NO: 370483 - RNA, 19 nt, Homo sapiens
  misc_RNA (1)...(19): siRNA sense strand
ggacuugacuugucucaga

SEQ ID NO: 370484 - RNA, 19 nt, Homo sapiens
  misc_RNA (1)...(19): siRNA sense strand
guacugccaugaagcaaua

SEQ ID NO: 370485 - RNA, 19 nt, Homo sapiens
  misc_RNA (1)...(19): siRNA sense strand
agaaagagaugcccucauu

SEQ ID NO: 370486 - RNA, 19 nt, Homo sapiens
  misc_RNA (1)...(19): siRNA sense strand
gaaaugauccacacugcua

SEQ ID NO: 370487 - RNA, 19 nt, Homo sapiens
  misc_RNA (1)...(19): siRNA sense strand
gaagaccgccagccugaua

SEQ ID NO: 370488 - RNA, 19 nt, Homo sapiens
  misc_RNA (1)...(19): siRNA sense strand
gcaauaagagagaucagua

SEQ ID NO: 370489 - RNA, 19 nt, Homo sapiens
  misc_RNA (1)...(19): siRNA sense strand
ggaaaucucugaguacuac

SEQ ID NO: 370490 - RNA, 19 nt, Homo sapiens
  misc_RNA (1)...(19): siRNA sense strand
uuaaggaaaucucugagua

SEQ ID NO: 370491 - RNA, 19 nt, Homo sapiens
  misc_RNA (1)...(19): siRNA sense strand
cauaacaacucccgacaug

SEQ ID NO: 370492 - RNA, 19 nt, Homo sapiens
  misc_RNA (1)...(19): siRNA sense strand
gaaaugaaugcuaugauca

SEQ ID NO: 370493 - RNA, 19 nt, Homo sapiens
  misc_RNA (1)...(19): siRNA sense strand
gaagggacuugacuugucu

SEQ ID NO: 370494 - RNA, 19 nt, Homo sapiens
  misc_RNA (1)...(19): siRNA sense strand
gcuggagauuuaauucuuu

SEQ ID NO: 370495 - RNA, 19 nt, Homo sapiens
  misc_RNA (1)...(19): siRNA sense strand
uaagagagaucaguaaacu

SEQ ID NO: 370496 - RNA, 19 nt, Homo sapiens
  misc_RNA (1)...(19): siRNA sense strand
gcagaagggacuugacuug

SEQ ID NO: 370497 - RNA, 19 nt, Homo sapiens
  misc_RNA (1)...(19): siRNA sense strand
ugucucagauacccuauuu

SEQ ID NO: 370498 - RNA, 19 nt, Homo sapiens
  misc_RNA (1)...(19): siRNA sense strand
agaaauacaccgauccuuu

SEQ ID NO: 370499 - RNA, 19 nt, Homo sapiens
  misc_RNA (1)...(19): siRNA sense strand
ugaaagauuugcacacuac

SEQ ID NO: 370500 - RNA, 19 nt, Homo sapiens
  misc_RNA (1)...(19): siRNA sense strand
agaaaugaaugcuaugauc

SEQ ID NO: 370501 - RNA, 19 nt, Homo sapiens
  misc_RNA (1)...(19): siRNA sense strand
auacaccgauccuuucaaa

SEQ ID NO: 370502 - RNA, 19 nt, Homo sapiens
  misc_RNA (1)...(19): siRNA sense strand
guaaagcagucucuguucu

SEQ ID NO: 370503 - RNA, 19 nt, Homo sapiens
  misc_RNA (1)...(19): siRNA sense strand
gcacgaauuggaaauacaa

SEQ ID NO: 370504 - RNA, 19 nt, Homo sapiens
  misc_RNA (1)...(19): siRNA sense strand
uaacaacucccgacaugug

SEQ ID NO: 370505 - RNA, 19 nt, Homo sapiens
  misc_RNA (1)...(19): siRNA sense strand
ccaaguuauugaagauuug

SEQ ID NO: 370506 - RNA, 19 nt, Homo sapiens
  misc_RNA (1)...(19): siRNA sense strand
ggaaaacacacaguuaaua

SEQ ID NO: 370507 - RNA, 19 nt, Homo sapiens
  misc_RNA (1)...(19): siRNA sense strand
ccacacugcuagucugguu

SEQ ID NO: 370508 - RNA, 19 nt, Homo sapiens
  misc_RNA (1)...(19): siRNA sense strand
caauaagagagaucaguaa

SEQ ID NO: 370509 - RNA, 19 nt, Homo sapiens
  misc_RNA (1)...(19): siRNA sense strand
caguuugccuggagaugua

SEQ ID NO: 370510 - RNA, 19 nt, Homo sapiens
  misc_RNA (1)...(19): siRNA sense strand
acaccugccuguccaaaug

SEQ ID NO: 370511 - RNA, 19 nt, Homo sapiens
  misc_RNA (1)...(19): siRNA sense strand
uaaagcagucucuguucua

SEQ ID NO: 370512 - RNA, 19 nt, Homo sapiens
  misc_RNA (1)...(19): siRNA sense strand
gcccgagcaugcaauauuc

SEQ ID NO: 370513 - RNA, 19 nt, Homo sapiens
  misc_RNA (1)...(19): siRNA sense strand
ugucagcaguucccagaaa

SEQ ID NO: 370514 - RNA, 19 nt, Homo sapiens
  misc_RNA (1)...(19): siRNA sense strand
cccaaguuauugaagauuu

SEQ ID NO: 370515 - RNA, 19 nt, Homo sapiens
  misc_RNA (1)...(19): siRNA sense strand
gagcaugcaauauucauca

SEQ ID NO: 370516 - RNA, 19 nt, Homo sapiens
  misc_RNA (1)...(19): siRNA sense strand
ugcaugagaucgccuauca

SEQ ID NO: 370517 - RNA, 19 nt, Homo sapiens
  misc_RNA (1)...(19): siRNA sense strand
gcaguucccagaaaugaau

SEQ ID NO: 370518 - RNA, 19 nt, Homo sapiens
  misc_RNA (1)...(19): siRNA sense strand
gaugauguauuggacuuca

SEQ ID NO: 370519 - RNA, 19 nt, Homo sapiens
  misc_RNA (1)...(19): siRNA sense strand
gaaaggaaccccucauauc

SEQ ID NO: 370520 - RNA, 19 nt, Homo sapiens
  misc_RNA (1)...(19): siRNA sense strand
aaagagaugcccucauuca

SEQ ID NO: 370521 - RNA, 19 nt, Homo sapiens
  misc_RNA (1)...(19): siRNA sense strand
gaaagagaugcccucauuc

SEQ ID NO: 370522 - RNA, 19 nt, Homo sapiens
  misc_RNA (1)...(19): siRNA sense strand
acacacaguuaauaagauc

SEQ ID NO: 370523 - RNA, 19 nt, Homo sapiens
  misc_RNA (1)...(19): siRNA sense strand
gaugcaaguucucgaagag

SEQ ID NO: 370524 - RNA, 19 nt, Homo sapiens
  misc_RNA (1)...(19): siRNA sense strand
gcaugcaauauucaucaua

SEQ ID NO: 370525 - RNA, 19 nt, Homo sapiens
  misc_RNA (1)...(19): siRNA sense strand
agagagaucaguaaacuuc

SEQ ID NO: 370526 - RNA, 19 nt, Homo sapiens
  misc_RNA (1)...(19): siRNA sense strand
gccuggagauguagacaga

SEQ ID NO: 370527 - RNA, 19 nt, Homo sapiens
  misc_RNA (1)...(19): siRNA sense strand
ucccagaaaugaaugcuau

SEQ ID NO: 370528 - RNA, 19 nt, Homo sapiens
  misc_RNA (1)...(19): siRNA sense strand
gguucacgaugacguuauu

SEQ ID NO: 370529 - RNA, 19 nt, Homo sapiens
  misc_RNA (1)...(19): siRNA sense strand
guauaucacaguuucauca

SEQ ID NO: 370530 - RNA, 19 nt, Homo sapiens
  misc_RNA (1)...(19): siRNA sense strand
uagaugauguauuggacuu

SEQ ID NO: 370531 - RNA, 19 nt, Homo sapiens
  misc_RNA (1)...(19): siRNA sense strand
gccuuuagaccgauuauug

SEQ ID NO: 370532 - RNA, 19 nt, Homo sapiens
  misc_RNA (1)...(19): siRNA sense strand
caacaacagaacuuaagga

SEQ ID NO: 370533 - RNA, 19 nt, Homo sapiens
  misc_RNA (1)...(19): siRNA sense strand
agaagggacuugacuuguc

SEQ ID NO: 370534 - RNA, 19 nt, Homo sapiens
  misc_RNA (1)...(19): siRNA sense strand
ugagaucgccuaucaguac

SEQ ID NO: 370535 - RNA, 19 nt, Homo sapiens
  misc_RNA (1)...(19): siRNA sense strand
uguucuugcuggagauuua

SEQ ID NO: 370536 - RNA, 19 nt, Homo sapiens
  misc_RNA (1)...(19): siRNA sense strand
uguaugaggguauuagaaa

SEQ ID NO: 370537 - RNA, 19 nt, Homo sapiens
  misc_RNA (1)...(19): siRNA sense strand
gaauuggaaauacaacugu

SEQ ID NO: 370538 - RNA, 19 nt, Homo sapiens
  misc_RNA (1)...(19): siRNA sense strand
cgaugcaaguucucgaaga

SEQ ID NO: 370539 - RNA, 19 nt, Homo sapiens
  misc_RNA (1)...(19): siRNA sense strand
guaugaggguauuagaaag

SEQ ID NO: 370540 - RNA, 19 nt, Homo sapiens
  misc_RNA (1)...(19): siRNA sense strand
gaggaaaacacacaguuaa

SEQ ID NO: 370541 - RNA, 19 nt, Homo sapiens
  misc_RNA (1)...(19): siRNA sense strand
ggcccgagcaugcaauauu

SEQ ID NO: 370542 - RNA, 19 nt, Homo sapiens
  misc_RNA (1)...(19): siRNA sense strand
ccucauaucaacaacagaa

SEQ ID NO: 370543 - RNA, 19 nt, Homo sapiens
  misc_RNA (1)...(19): siRNA sense strand
gcacacuaccuugagaaga

SEQ ID NO: 370544 - RNA, 19 nt, Homo sapiens
  misc_RNA (1)...(19): siRNA sense strand
cuauagcucuggcacgaau

SEQ ID NO: 370545 - RNA, 19 nt, Homo sapiens
  misc_RNA (1)...(19): siRNA sense strand
ccacugguccuguccuguu

SEQ ID NO: 370546 - RNA, 19 nt, Homo sapiens
  misc_RNA (1)...(19): siRNA sense strand
uuuggugcguggugaauuu

SEQ ID NO: 370547 - RNA, 19 nt, Homo sapiens
  misc_RNA (1)...(19): siRNA sense strand
gaagcaauaagagagauca

SEQ ID NO: 370548 - RNA, 19 nt, Homo sapiens
  misc_RNA (1)...(19): siRNA sense strand
acagagugauggugugcaa

SEQ ID NO: 370549 - RNA, 19 nt, Homo sapiens
  misc_RNA (1)...(19): siRNA sense strand
ccagaaaugaaugcuauga

SEQ ID NO: 370550 - RNA, 19 nt, Homo sapiens
  misc_RNA (1)...(19): siRNA sense strand
cagcaguucccagaaauga

SEQ ID NO: 370551 - RNA, 19 nt, Homo sapiens
  misc_RNA (1)...(19): siRNA sense strand
gaccagaugggcaaaccaa

SEQ ID NO: 370552 - RNA, 19 nt, Homo sapiens
  misc_RNA (1)...(19): siRNA sense strand
acacaguggugagaaauac

SEQ ID NO: 370553 - RNA, 19 nt, Homo sapiens
  misc_RNA (1)...(19): siRNA sense strand
cgccauagccuuaauugca

SEQ ID NO: 370554 - RNA, 19 nt, Homo sapiens
  misc_RNA (1)...(19): siRNA sense strand
gcucuggcacgaauuggaa

SEQ ID NO: 370555 - RNA, 19 nt, Homo sapiens
  misc_RNA (1)...(19): siRNA sense strand
ucucagauacccuauuuua

SEQ ID NO: 370556 - RNA, 19 nt, Homo sapiens
  misc_RNA (1)...(19): siRNA sense strand
gcaaguucucgaagaggaa

SEQ ID NO: 370557 - RNA, 19 nt, Homo sapiens
  misc_RNA (1)...(19): siRNA sense strand
cuagucugguucacgauga

SEQ ID NO: 370558 - RNA, 19 nt, Homo sapiens
  misc_RNA (1)...(19): siRNA sense strand
aauaagaucuggggugaaa

SEQ ID NO: 370559 - RNA, 19 nt, Homo sapiens
  misc_RNA (1)...(19): siRNA sense strand
gaucuggggugaaaagaag

SEQ ID NO: 370560 - RNA, 19 nt, Homo sapiens
  misc_RNA (1)...(19): siRNA sense strand
caugagaucgccuaucagu

SEQ ID NO: 370561 - RNA, 19 nt, Homo sapiens
  misc_RNA (1)...(19): siRNA sense strand
aaagcagucucuguucuag

SEQ ID NO: 370562 - RNA, 19 nt, Homo sapiens
  misc_RNA (1)...(19): siRNA sense strand
cacacuaccuugagaagac

SEQ ID NO: 370563 - RNA, 19 nt, Homo sapiens
  misc_RNA (1)...(19): siRNA sense strand
gauuugcacacuaccuuga

SEQ ID NO: 370564 - RNA, 19 nt, Homo sapiens
  misc_RNA (1)...(19): siRNA sense strand
guagacagagcucgacagu

SEQ ID NO: 370565 - RNA, 19 nt, Homo sapiens
  misc_RNA (1)...(19): siRNA sense strand
guacucacaagagauaaau

SEQ ID NO: 370566 - RNA, 19 nt, Homo sapiens
  misc_RNA (1)...(19): siRNA sense strand
agccuuaauugcagaaaug

SEQ ID NO: 370567 - RNA, 19 nt, Homo sapiens
  misc_RNA (1)...(19): siRNA sense strand
acucacaagagauaaauga

SEQ ID NO: 370568 - RNA, 19 nt, Homo sapiens
  misc_RNA (1)...(19): siRNA sense strand
gccaugaagcaauaagaga

SEQ ID NO: 370569 - RNA, 19 nt, Homo sapiens
  misc_RNA (1)...(19): siRNA sense strand
gucagcaguucccagaaau

SEQ ID NO: 370570 - RNA, 19 nt, Homo sapiens
  misc_RNA (1)...(19): siRNA sense strand
ugagaagacauucaagaag

SEQ ID NO: 370571 - RNA, 19 nt, Homo sapiens
  misc_RNA (1)...(19): siRNA sense strand
aaugaaagauuugcacacu

SEQ ID NO: 370572 - RNA, 19 nt, Homo sapiens
  misc_RNA (1)...(19): siRNA sense strand
ggcacgaauuggaaauaca

SEQ ID NO: 370573 - RNA, 19 nt, Homo sapiens
  misc_RNA (1)...(19): siRNA sense strand
uaaggaaaucucugaguac

SEQ ID NO: 370574 - RNA, 19 nt, Homo sapiens
  misc_RNA (1)...(19): siRNA sense strand
gacuugacuugucucagau

SEQ ID NO: 370575 - RNA, 19 nt, Homo sapiens
  misc_RNA (1)...(19): siRNA sense strand
gauggugugcaacaaacaa

SEQ ID NO: 370576 - RNA, 19 nt, Homo sapiens
  misc_RNA (1)...(19): siRNA sense strand
cacugguccuguccuguuu

SEQ ID NO: 370577 - RNA, 19 nt, Homo sapiens
  misc_RNA (1)...(19): siRNA sense strand
gacuucaccucguguucug

SEQ ID NO: 370578 - RNA, 19 nt, Homo sapiens
  misc_RNA (1)...(19): siRNA sense strand
ggacuucaccucguguucu

SEQ ID NO: 370579 - RNA, 19 nt, Homo sapiens
  misc_RNA (1)...(19): siRNA sense strand
agcagucucuguucuagga

SEQ ID NO: 370580 - RNA, 19 nt, Homo sapiens
  misc_RNA (1)...(19): siRNA sense strand
gaaugaagcagaaacgaaa

SEQ ID NO: 370581 - RNA, 19 nt, Homo sapiens
  misc_RNA (1)...(19): siRNA sense strand
ggaaugaagcagaaacgaa

SEQ ID NO: 370582 - RNA, 19 nt, Homo sapiens
  misc_RNA (1)...(19): siRNA sense strand
gccauggaaugaagcagaa

SEQ ID NO: 370583 - RNA, 19 nt, Homo sapiens
  misc_RNA (1)...(19): siRNA sense strand
gaaagccugccaguucuga

SEQ ID NO: 370584 - RNA, 19 nt, Homo sapiens
  misc_RNA (1)...(19): siRNA sense strand
aacgaaagccugccaguuc

SEQ ID NO: 370585 - RNA, 19 nt, Homo sapiens
  misc_RNA (1)...(19): siRNA sense strand
aaacgaaagccugccaguu

SEQ ID NO: 370586 - RNA, 19 nt, Homo sapiens
  misc_RNA (1)...(19): siRNA sense strand
acgaaagccugccaguucu

SEQ ID NO: 370587 - RNA, 19 nt, Homo sapiens
  misc_RNA (1)...(19): siRNA sense strand
ggcuugcucuggccaugga

SEQ ID NO: 370588 - RNA, 19 nt, Homo sapiens
  misc_RNA (1)...(19): siRNA sense strand
gaacauggcuucaaagaua

SEQ ID NO: 370589 - RNA, 19 nt, Homo sapiens
  misc_RNA (1)...(19): siRNA sense strand
ggacagggcuuauuuaauu

SEQ ID NO: 370590 - RNA, 19 nt, Homo sapiens
  misc_RNA (1)...(19): siRNA sense strand
gaaagaagauagugguuga

SEQ ID NO: 370591 - RNA, 19 nt, Homo sapiens
  misc_RNA (1)...(19): siRNA sense strand
uaucagagcugucuuaaau

SEQ ID NO: 370592 - RNA, 19 nt, Homo sapiens
  misc_RNA (1)...(19): siRNA sense strand
agaccuagcuguacaguuu

SEQ ID NO: 370593 - RNA, 19 nt, Homo sapiens
  misc_RNA (1)...(19): siRNA sense strand
cagagaaccuggagaugua

SEQ ID NO: 370594 - RNA, 19 nt, Homo sapiens
  misc_RNA (1)...(19): siRNA sense strand
uagaggagaugccacauaa

SEQ ID NO: 370595 - RNA, 19 nt, Homo sapiens
  misc_RNA (1)...(19): siRNA sense strand
guaaacaacuagagaagau

SEQ ID NO: 370596 - RNA, 19 nt, Homo sapiens
  misc_RNA (1)...(19): siRNA sense strand
gacagggcuuauuuaauua

SEQ ID NO: 370597 - RNA, 19 nt, Homo sapiens
  misc_RNA (1)...(19): siRNA sense strand
caaaggaaauggagaaggu

SEQ ID NO: 370598 - RNA, 19 nt, Homo sapiens
  misc_RNA (1)...(19): siRNA sense strand
ggccugaauucaaauauug

SEQ ID NO: 370599 - RNA, 19 nt, Homo sapiens
  misc_RNA (1)...(19): siRNA sense strand
gacacaggauuaugaagaa

SEQ ID NO: 370600 - RNA, 19 nt, Homo sapiens
  misc_RNA (1)...(19): siRNA sense strand
gcaagauucuaaagcugaa

SEQ ID NO: 370601 - RNA, 19 nt, Homo sapiens
  misc_RNA (1)...(19): siRNA sense strand
agagcugucuuaaaucuuu

SEQ ID NO: 370602 - RNA, 19 nt, Homo sapiens
  misc_RNA (1)...(19): siRNA sense strand
uaagagaccuagcuguaca

SEQ ID NO: 370603 - RNA, 19 nt, Homo sapiens
  misc_RNA (1)...(19): siRNA sense strand
gacagcaggucgacagaga

SEQ ID NO: 370604 - RNA, 19 nt, Homo sapiens
  misc_RNA (1)...(19): siRNA sense strand
gaaagcagaggaguacuug

SEQ ID NO: 370605 - RNA, 19 nt, Homo sapiens
  misc_RNA (1)...(19): siRNA sense strand
gaagaucugacacaggauu

SEQ ID NO: 370606 - RNA, 19 nt, Homo sapiens
  misc_RNA (1)...(19): siRNA sense strand
caguuuagcuguauagaag

SEQ ID NO: 370607 - RNA, 19 nt, Homo sapiens
  misc_RNA (1)...(19): siRNA sense strand
gggccugaauucaaauauu

SEQ ID NO: 370608 - RNA, 19 nt, Homo sapiens
  misc_RNA (1)...(19): siRNA sense strand
gaccagcagugcagucaug

SEQ ID NO: 370609 - RNA, 19 nt, Homo sapiens
  misc_RNA (1)...(19): siRNA sense strand
aauaagagaccuagcugua

SEQ ID NO: 370610 - RNA, 19 nt, Homo sapiens
  misc_RNA (1)...(19): siRNA sense strand
ggaaagcagaggaguacuu

SEQ ID NO: 370611 - RNA, 19 nt, Homo sapiens
  misc_RNA (1)...(19): siRNA sense strand
ucagagcugucuuaaaucu

SEQ ID NO: 370612 - RNA, 19 nt, Homo sapiens
  misc_RNA (1)...(19): siRNA sense strand
guagaggagaugccacaua

SEQ ID NO: 370613 - RNA, 19 nt, Homo sapiens
  misc_RNA (1)...(19): siRNA sense strand
ccacauaaaccacagaaag

SEQ ID NO: 370614 - RNA, 19 nt, Homo sapiens
  misc_RNA (1)...(19): siRNA sense strand
gaucgacuguguaaacaac

SEQ ID NO: 370615 - RNA, 19 nt, Homo sapiens
  misc_RNA (1)...(19): siRNA sense strand
ugacacaggauuaugaaga

SEQ ID NO: 370616 - RNA, 19 nt, Homo sapiens
  misc_RNA (1)...(19): siRNA sense strand
gaagagaaagaagauagug

SEQ ID NO: 370617 - RNA, 19 nt, Homo sapiens
  misc_RNA (1)...(19): siRNA sense strand
uauauuugaucgacugugu

SEQ ID NO: 370618 - RNA, 19 nt, Homo sapiens
  misc_RNA (1)...(19): siRNA sense strand
cgacagagaaccuggagau

SEQ ID NO: 370619 - RNA, 19 nt, Homo sapiens
  misc_RNA (1)...(19): siRNA sense strand
ugaacaaggagacauauca

SEQ ID NO: 370620 - RNA, 19 nt, Homo sapiens
  misc_RNA (1)...(19): siRNA sense strand
cacauaaaccacagaaaga

SEQ ID NO: 370621 - RNA, 19 nt, Homo sapiens
  misc_RNA (1)...(19): siRNA sense strand
gaggagaugccacauaaac

SEQ ID NO: 370622 - RNA, 19 nt, Homo sapiens
  misc_RNA (1)...(19): siRNA sense strand
guagccacauccgguguaa

SEQ ID NO: 370623 - RNA, 19 nt, Homo sapiens
  misc_RNA (1)...(19): siRNA sense strand
ggagaugccacauaaacca

SEQ ID NO: 370624 - RNA, 19 nt, Homo sapiens
  misc_RNA (1)...(19): siRNA sense strand
cagcaaaggaaauggagaa

SEQ ID NO: 370625 - RNA, 19 nt, Homo sapiens
  misc_RNA (1)...(19): siRNA sense strand
ccacggaagagaaagaaga

SEQ ID NO: 370626 - RNA, 19 nt, Homo sapiens
  misc_RNA (1)...(19): siRNA sense strand
gaacaaggagacauaucag

SEQ ID NO: 370627 - RNA, 19 nt, Homo sapiens
  misc_RNA (1)...(19): siRNA sense strand
gagaaagaagauagugguu

SEQ ID NO: 370628 - RNA, 19 nt, Homo sapiens
  misc_RNA (1)...(19): siRNA sense strand
ggaagagaaagaagauagu

SEQ ID NO: 370629 - RNA, 19 nt, Homo sapiens
  misc_RNA (1)...(19): siRNA sense strand
aaacaacuagagaagauug

SEQ ID NO: 370630 - RNA, 19 nt, Homo sapiens
  misc_RNA (1)...(19): siRNA sense strand
gcuuucagcaugcaagauu

SEQ ID NO: 370631 - RNA, 19 nt, Homo sapiens
  misc_RNA (1)...(19): siRNA sense strand
gaggaaagcagaggaguac

SEQ ID NO: 370632 - RNA, 19 nt, Homo sapiens
  misc_RNA (1)...(19): siRNA sense strand
uuacugggccugaauucaa

SEQ ID NO: 370633 - RNA, 19 nt, Homo sapiens
  misc_RNA (1)...(19): siRNA sense strand
acauaucagagcugucuua

SEQ ID NO: 370634 - RNA, 19 nt, Homo sapiens
  misc_RNA (1)...(19): siRNA sense strand
gaccuagcuguacaguuua

SEQ ID NO: 370635 - RNA, 19 nt, Homo sapiens
  misc_RNA (1)...(19): siRNA sense strand
caugcaagauucuaaagcu

SEQ ID NO: 370636 - RNA, 19 nt, Homo sapiens
  misc_RNA (1)...(19): siRNA sense strand
ugaggaaagcagaggagua

SEQ ID NO: 370637 - RNA, 19 nt, Homo sapiens
  misc_RNA (1)...(19): siRNA sense strand
uauagaagcagugaacaug

SEQ ID NO: 370638 - RNA, 19 nt, Homo sapiens
  misc_RNA (1)...(19): siRNA sense strand
uacugggccugaauucaaa

SEQ ID NO: 370639 - RNA, 19 nt, Homo sapiens
  misc_RNA (1)...(19): siRNA sense strand
ggauuaugaagaauggaaa

SEQ ID NO: 370640 - RNA, 19 nt, Homo sapiens
  misc_RNA (1)...(19): siRNA sense strand
cagcaugcaagauucuaaa

SEQ ID NO: 370641 - RNA, 19 nt, Homo sapiens
  misc_RNA (1)...(19): siRNA sense strand
gaaccuggagauguagcua

SEQ ID NO: 370642 - RNA, 19 nt, Homo sapiens
  misc_RNA (1)...(19): siRNA sense strand
cauaaaccacagaaagaug

SEQ ID NO: 370643 - RNA, 19 nt, Homo sapiens
  misc_RNA (1)...(19): siRNA sense strand
uggagaagguagaggagau

SEQ ID NO: 370644 - RNA, 19 nt, Homo sapiens
  misc_RNA (1)...(19): siRNA sense strand
gaucugacacaggauuaug

SEQ ID NO: 370645 - RNA, 19 nt, Homo sapiens
  misc_RNA (1)...(19): siRNA sense strand
auaaaccacagaaagauga

SEQ ID NO: 370646 - RNA, 19 nt, Homo sapiens
  misc_RNA (1)...(19): siRNA sense strand
uaaagcugaaaguggauaa

SEQ ID NO: 370647 - RNA, 19 nt, Homo sapiens
  misc_RNA (1)...(19): siRNA sense strand
guuugaacaaggagacaua

SEQ ID NO: 370648 - RNA, 19 nt, Homo sapiens
  misc_RNA (1)...(19): siRNA sense strand
uauuugaucgacuguguaa

SEQ ID NO: 370649 - RNA, 19 nt, Homo sapiens
  misc_RNA (1)...(19): siRNA sense strand
acagagaaccuggagaugu

SEQ ID NO: 370650 - RNA, 19 nt, Homo sapiens
  misc_RNA (1)...(19): siRNA sense strand
ucgacuguguaaacaacua

SEQ ID NO: 370651 - RNA, 19 nt, Homo sapiens
  misc_RNA (1)...(19): siRNA sense strand
ggaaauggagaagguagag

SEQ ID NO: 370652 - RNA, 19 nt, Homo sapiens
  misc_RNA (1)...(19): siRNA sense strand
cggaagagaaagaagauag

SEQ ID NO: 370653 - RNA, 19 nt, Homo sapiens
  misc_RNA (1)...(19): siRNA sense strand
cauaucagagcugucuuaa

SEQ ID NO: 370654 - RNA, 19 nt, Homo sapiens
  misc_RNA (1)...(19): siRNA sense strand
guauagaagcagugaacau

SEQ ID NO: 370655 - RNA, 19 nt, Homo sapiens
  misc_RNA (1)...(19): siRNA sense strand
acaggauuaugaagaaugg

SEQ ID NO: 370656 - RNA, 19 nt, Homo sapiens
  misc_RNA (1)...(19): siRNA sense strand
ggagaagguagaggagaug

SEQ ID NO: 370657 - RNA, 19 nt, Homo sapiens
  misc_RNA (1)...(19): siRNA sense strand
gguagccacauccggugua

SEQ ID NO: 370658 - RNA, 19 nt, Homo sapiens
  misc_RNA (1)...(19): siRNA sense strand
acacaggauuaugaagaau

SEQ ID NO: 370659 - RNA, 19 nt, Homo sapiens
  misc_RNA (1)...(19): siRNA sense strand
ccuuggacagggcuuauuu

SEQ ID NO: 370660 - RNA, 19 nt, Homo sapiens
  misc_RNA (1)...(19): siRNA sense strand
gagaccagcagugcaguca

SEQ ID NO: 370661 - RNA, 19 nt, Homo sapiens
  misc_RNA (1)...(19): siRNA sense strand
agacacagcaaguggaucu

SEQ ID NO: 370662 - RNA, 19 nt, Homo sapiens
  misc_RNA (1)...(19): siRNA sense strand
aagaucugacacaggauua

SEQ ID NO: 370663 - RNA, 19 nt, Homo sapiens
  misc_RNA (1)...(19): siRNA sense strand
uuggacagggcuuauuuaa

SEQ ID NO: 370664 - RNA, 19 nt, Homo sapiens
  misc_RNA (1)...(19): siRNA sense strand
ccaccacggaagagaaaga

SEQ ID NO: 370665 - RNA, 19 nt, Homo sapiens
  misc_RNA (1)...(19): siRNA sense strand
ucagcaugcaagauucuaa

SEQ ID NO: 370666 - RNA, 19 nt, Homo sapiens
  misc_RNA (1)...(19): siRNA sense strand
guuuagcuguauagaagca

SEQ ID NO: 370667 - RNA, 19 nt, Homo sapiens
  misc_RNA (1)...(19): siRNA sense strand
aaaggaaauggagaaggua

SEQ ID NO: 370668 - RNA, 19 nt, Homo sapiens
  misc_RNA (1)...(19): siRNA sense strand
gaggagagcucuucgauuu

SEQ ID NO: 370669 - RNA, 19 nt, Homo sapiens
  misc_RNA (1)...(19): siRNA sense strand
gaagauggaguugaauuua

SEQ ID NO: 370670 - RNA, 19 nt, Homo sapiens
  misc_RNA (1)...(19): siRNA sense strand
ggaagcuucugguuaaaga

SEQ ID NO: 370671 - RNA, 19 nt, Homo sapiens
  misc_RNA (1)...(19): siRNA sense strand
ggaaacggcucacaaucca

SEQ ID NO: 370672 - RNA, 19 nt, Homo sapiens
  misc_RNA (1)...(19): siRNA sense strand
gaacuaccuucacacaaag

SEQ ID NO: 370673 - RNA, 19 nt, Homo sapiens
  misc_RNA (1)...(19): siRNA sense strand
ggaauuuguugcuccagaa

SEQ ID NO: 370674 - RNA, 19 nt, Homo sapiens
  misc_RNA (1)...(19): siRNA sense strand
gaaaauugcucacuuugau

SEQ ID NO: 370675 - RNA, 19 nt, Homo sapiens
  misc_RNA (1)...(19): siRNA sense strand
cgaaauagaagauggaguu

SEQ ID NO: 370676 - RNA, 19 nt, Homo sapiens
  misc_RNA (1)...(19): siRNA sense strand
aauagaagauggaguugaa

SEQ ID NO: 370677 - RNA, 19 nt, Homo sapiens
  misc_RNA (1)...(19): siRNA sense strand
aggaaacacuggcaaauau

SEQ ID NO: 370678 - RNA, 19 nt, Homo sapiens
  misc_RNA (1)...(19): siRNA sense strand
cagccaaguucaucaagaa

SEQ ID NO: 370679 - RNA, 19 nt, Homo sapiens
  misc_RNA (1)...(19): siRNA sense strand
gcagccaaguucaucaaga

SEQ ID NO: 370680 - RNA, 19 nt, Homo sapiens
  misc_RNA (1)...(19): siRNA sense strand
gaaacacuggcaaauauca

SEQ ID NO: 370681 - RNA, 19 nt, Homo sapiens
  misc_RNA (1)...(19): siRNA sense strand
cuccagaaauugugaacua

SEQ ID NO: 370682 - RNA, 19 nt, Homo sapiens
  misc_RNA (1)...(19): siRNA sense strand
ggacaucgccaggaggaaa

SEQ ID NO: 370683 - RNA, 19 nt, Homo sapiens
  misc_RNA (1)...(19): siRNA sense strand
agacaagaauauucccauu

SEQ ID NO: 370684 - RNA, 19 nt, Homo sapiens
  misc_RNA (1)...(19): siRNA sense strand
caggaaacacuggcaaaua

SEQ ID NO: 370685 - RNA, 19 nt, Homo sapiens
  misc_RNA (1)...(19): siRNA sense strand
gcagugaguuacgacuuug

SEQ ID NO: 370686 - RNA, 19 nt, Homo sapiens
  misc_RNA (1)...(19): siRNA sense strand
cgacuuugaugaggaauuc

SEQ ID NO: 370687 - RNA, 19 nt, Homo sapiens
  misc_RNA (1)...(19): siRNA sense strand
gaggccaccagcuucauua

SEQ ID NO: 370688 - RNA, 19 nt, Homo sapiens
  misc_RNA (1)...(19): siRNA sense strand
gcugacauguggagcauag

SEQ ID NO: 370689 - RNA, 19 nt, Homo sapiens
  misc_RNA (1)...(19): siRNA sense strand
caaagaaaauugcucacuu

SEQ ID NO: 370690 - RNA, 19 nt, Homo sapiens
  misc_RNA (1)...(19): siRNA sense strand
uggucuggcucacgaaaua

SEQ ID NO: 370691 - RNA, 19 nt, Homo sapiens
  misc_RNA (1)...(19): siRNA sense strand
gggagucuguggucaaucu

SEQ ID NO: 370692 - RNA, 19 nt, Homo sapiens
  misc_RNA (1)...(19): siRNA sense strand
gcacggggcuugaguaugc

SEQ ID NO: 370693 - RNA, 19 nt, Homo sapiens
  misc_RNA (1)...(19): siRNA sense strand
uucggaagcuucugguuaa

SEQ ID NO: 370694 - RNA, 19 nt, Homo sapiens
  misc_RNA (1)...(19): siRNA sense strand
caucaccuacauccucuua

SEQ ID NO: 370695 - RNA, 19 nt, Homo sapiens
  misc_RNA (1)...(19): siRNA sense strand
cagaaauugugaacuacga

SEQ ID NO: 370696 - RNA, 19 nt, Homo sapiens
  misc_RNA (1)...(19): siRNA sense strand
ggaggagagcucuucgauu

SEQ ID NO: 370697 - RNA, 19 nt, Homo sapiens
  misc_RNA (1)...(19): siRNA sense strand
ucaccuacauccucuuaag

SEQ ID NO: 370698 - RNA, 19 nt, Homo sapiens
  misc_RNA (1)...(19): siRNA sense strand
gaaauagaagauggaguug

SEQ ID NO: 370699 - RNA, 19 nt, Homo sapiens
  misc_RNA (1)...(19): siRNA sense strand
ucaaugaggaguccaaaca

SEQ ID NO: 370700 - RNA, 19 nt, Homo sapiens
  misc_RNA (1)...(19): siRNA sense strand
gcagaagguggaggacuuu

SEQ ID NO: 370701 - RNA, 19 nt, Homo sapiens
  misc_RNA (1)...(19): siRNA sense strand
agaagauggaguugaauuu

SEQ ID NO: 370702 - RNA, 19 nt, Homo sapiens
  misc_RNA (1)...(19): siRNA sense strand
ggagagcucuucgauuucc

SEQ ID NO: 370703 - RNA, 19 nt, Homo sapiens
  misc_RNA (1)...(19): siRNA sense strand
gaauuuguugcuccagaaa

SEQ ID NO: 370704 - RNA, 19 nt, Homo sapiens
  misc_RNA (1)...(19): siRNA sense strand
ggaaacacuggcaaauauc

SEQ ID NO: 370705 - RNA, 19 nt, Homo sapiens
  misc_RNA (1)...(19): siRNA sense strand
gcaggaaacacuggcaaau

SEQ ID NO: 370706 - RNA, 19 nt, Homo sapiens
  misc_RNA (1)...(19): siRNA sense strand
ugaguuacgacuuugauga

SEQ ID NO: 370707 - RNA, 19 nt, Homo sapiens
  misc_RNA (1)...(19): siRNA sense strand
uuacgacuuugaugaggaa

SEQ ID NO: 370708 - RNA, 19 nt, Homo sapiens
  misc_RNA (1)...(19): siRNA sense strand
aaugaggaguccaaacaug

SEQ ID NO: 370709 - RNA, 19 nt, Homo sapiens
  misc_RNA (1)...(19): siRNA sense strand
ggaggccaccagcuucauu

SEQ ID NO: 370710 - RNA, 19 nt, Homo sapiens
  misc_RNA (1)...(19): siRNA sense strand
cgcaggcgguggaagcuuu

SEQ ID NO: 370711 - RNA, 19 nt, Homo sapiens
  misc_RNA (1)...(19): siRNA sense strand
gcagggagucuguggucaa

SEQ ID NO: 370712 - RNA, 19 nt, Homo sapiens
  misc_RNA (1)...(19): siRNA sense strand
uagaagauggaguugaauu

SEQ ID NO: 370713 - RNA, 19 nt, Homo sapiens
  misc_RNA (1)...(19): siRNA sense strand
gagcuggccaaggacuuua

SEQ ID NO: 370714 - RNA, 19 nt, Homo sapiens
  misc_RNA (1)...(19): siRNA sense strand
agauggaguugaauuuaag

SEQ ID NO: 370715 - RNA, 19 nt, Homo sapiens
  misc_RNA (1)...(19): siRNA sense strand
gcacgacgucuaugagaac

SEQ ID NO: 370716 - RNA, 19 nt, Homo sapiens
  misc_RNA (1)...(19): siRNA sense strand
ggacuuuauucggaagcuu

SEQ ID NO: 370717 - RNA, 19 nt, Homo sapiens
  misc_RNA (1)...(19): siRNA sense strand
ggagacacgaagcaggaaa

SEQ ID NO: 370718 - RNA, 19 nt, Homo sapiens
  misc_RNA (1)...(19): siRNA sense strand
gaugaggaccugaggaacu

SEQ ID NO: 370719 - RNA, 19 nt, Homo sapiens
  misc_RNA (1)...(19): siRNA sense strand
cccgcucgcugaugaagaa

SEQ ID NO: 370720 - RNA, 19 nt, Homo sapiens
  misc_RNA (1)...(19): siRNA sense strand
agcagugaguuacgacuuu

SEQ ID NO: 370721 - RNA, 19 nt, Homo sapiens
  misc_RNA (1)...(19): siRNA sense strand
gaagaagugccgggagaag

SEQ ID NO: 370722 - RNA, 19 nt, Homo sapiens
  misc_RNA (1)...(19): siRNA sense strand
gaccugaggaacugugaga

SEQ ID NO: 370723 - RNA, 19 nt, Homo sapiens
  misc_RNA (1)...(19): siRNA sense strand
ggaucacgccgguggacaa

SEQ ID NO: 370724 - RNA, 19 nt, Homo sapiens
  misc_RNA (1)...(19): siRNA sense strand
gaagguggaggacuuuuau

SEQ ID NO: 370725 - RNA, 19 nt, Homo sapiens
  misc_RNA (1)...(19): siRNA sense strand
cagggagucuguggucaau

SEQ ID NO: 370726 - RNA, 19 nt, Homo sapiens
  misc_RNA (1)...(19): siRNA sense strand
gaggaggccaccagcuuca

SEQ ID NO: 370727 - RNA, 19 nt, Homo sapiens
  misc_RNA (1)...(19): siRNA sense strand
gcucgcugaugaagaaggu

SEQ ID NO: 370728 - RNA, 19 nt, Homo sapiens
  misc_RNA (1)...(19): siRNA sense strand
gcccagaaggagucacuga

SEQ ID NO: 370729 - RNA, 19 nt, Homo sapiens
  misc_RNA (1)...(19): siRNA sense strand
uggucaaucuggagaacuu

SEQ ID NO: 370730 - RNA, 19 nt, Homo sapiens
  misc_RNA (1)...(19): siRNA sense strand
gguuaaagagacccggaaa

SEQ ID NO: 370731 - RNA, 19 nt, Homo sapiens
  misc_RNA (1)...(19): siRNA sense strand
auucggaagcuucugguua

SEQ ID NO: 370732 - RNA, 19 nt, Homo sapiens
  misc_RNA (1)...(19): siRNA sense strand
acacgaagcaggaaacacu

SEQ ID NO: 370733 - RNA, 19 nt, Homo sapiens
  misc_RNA (1)...(19): siRNA sense strand
ccagaaggagucacugagu

SEQ ID NO: 370734 - RNA, 19 nt, Homo sapiens
  misc_RNA (1)...(19): siRNA sense strand
gaaacggcucacaauccaa

SEQ ID NO: 370735 - RNA, 19 nt, Homo sapiens
  misc_RNA (1)...(19): siRNA sense strand
agcagaagguggaggacuu

SEQ ID NO: 370736 - RNA, 19 nt, Homo sapiens
  misc_RNA (1)...(19): siRNA sense strand
cggaugaggaccugaggaa

SEQ ID NO: 370737 - RNA, 19 nt, Homo sapiens
  misc_RNA (1)...(19): siRNA sense strand
ucacgccgguggacaacca

SEQ ID NO: 370738 - RNA, 19 nt, Homo sapiens
  misc_RNA (1)...(19): siRNA sense strand
caagcugauugacuuuggu

SEQ ID NO: 370739 - RNA, 19 nt, Homo sapiens
  misc_RNA (1)...(19): siRNA sense strand
ugaggaacugugagaguga

SEQ ID NO: 370740 - RNA, 19 nt, Homo sapiens
  misc_RNA (1)...(19): siRNA sense strand
gauggaguugaauuuaaga

SEQ ID NO: 370741 - RNA, 19 nt, Homo sapiens
  misc_RNA (1)...(19): siRNA sense strand
ucacgaaauagaagaugga

SEQ ID NO: 370742 - RNA, 19 nt, Homo sapiens
  misc_RNA (1)...(19): siRNA sense strand
cgagcuggccaaggacuuu

SEQ ID NO: 370743 - RNA, 19 nt, Homo sapiens
  misc_RNA (1)...(19): siRNA sense strand
ugcacgacgucuaugagaa

SEQ ID NO: 370744 - RNA, 19 nt, Homo sapiens
  misc_RNA (1)...(19): siRNA sense strand
ugaguaugcagccaaguuc

SEQ ID NO: 370745 - RNA, 19 nt, Homo sapiens
  misc_RNA (1)...(19): siRNA sense strand
caaugaggaguccaaacau

SEQ ID NO: 370746 - RNA, 19 nt, Homo sapiens
  misc_RNA (1)...(19): siRNA sense strand
ggaggacuuuuaugacauc

SEQ ID NO: 370747 - RNA, 19 nt, Homo sapiens
  misc_RNA (1)...(19): siRNA sense strand
ggagacaccucaaccagaa

SEQ ID NO: 370748 - RNA, 19 nt, Homo sapiens
  misc_RNA (1)...(19): siRNA sense strand
gcaaccaucuucuggcuuu

SEQ ID NO: 370749 - RNA, 19 nt, Homo sapiens
  misc_RNA (1)...(19): siRNA sense strand
gggcagaacuucccacaug

SEQ ID NO: 370750 - RNA, 19 nt, Homo sapiens
  misc_RNA (1)...(19): siRNA sense strand
ggagugcgcuguccaggaa

SEQ ID NO: 370751 - RNA, 19 nt, Homo sapiens
  misc_RNA (1)...(19): siRNA sense strand
gcaaugugcuggccacguu

SEQ ID NO: 370752 - RNA, 19 nt, Homo sapiens
  misc_RNA (1)...(19): siRNA sense strand
agccaaagcuggaacguaa

SEQ ID NO: 370753 - RNA, 19 nt, Homo sapiens
  misc_RNA (1)...(19): siRNA sense strand
ggaguggccuugggugauu

SEQ ID NO: 370754 - RNA, 19 nt, Homo sapiens
  misc_RNA (1)...(19): siRNA sense strand
ugaaauaucgcccagaguu

SEQ ID NO: 370755 - RNA, 19 nt, Homo sapiens
  misc_RNA (1)...(19): siRNA sense strand
ugaagaauccacuguguau

SEQ ID NO: 370756 - RNA, 19 nt, Homo sapiens
  misc_RNA (1)...(19): siRNA sense strand
ucaaccagaaggaaucuua

SEQ ID NO: 370757 - RNA, 19 nt, Homo sapiens
  misc_RNA (1)...(19): siRNA sense strand
cagaguuccugaaguccua

SEQ ID NO: 370758 - RNA, 19 nt, Homo sapiens
  misc_RNA (1)...(19): siRNA sense strand
gaaauaucgcccagaguuc

SEQ ID NO: 370759 - RNA, 19 nt, Homo sapiens
  misc_RNA (1)...(19): siRNA sense strand
gcccagaguuccugaaguc

SEQ ID NO: 370760 - RNA, 19 nt, Homo sapiens
  misc_RNA (1)...(19): siRNA sense strand
ggacagaugcaguucucaa

SEQ ID NO: 370761 - RNA, 19 nt, Homo sapiens
  misc_RNA (1)...(19): siRNA sense strand
gaggacagaugcaguucuc

SEQ ID NO: 370762 - RNA, 19 nt, Homo sapiens
  misc_RNA (1)...(19): siRNA sense strand
ggccaaggcugugaaugga

SEQ ID NO: 370763 - RNA, 19 nt, Homo sapiens
  misc_RNA (1)...(19): siRNA sense strand
gcgaauuccuggccucucu

SEQ ID NO: 370764 - RNA, 19 nt, Homo sapiens
  misc_RNA (1)...(19): siRNA sense strand
guugaagaauccacugugu

SEQ ID NO: 370765 - RNA, 19 nt, Homo sapiens
  misc_RNA (1)...(19): siRNA sense strand
cagccgaagucucaucuca

SEQ ID NO: 370766 - RNA, 19 nt, Homo sapiens
  misc_RNA (1)...(19): siRNA sense strand
gccgaagucucaucucagu

SEQ ID NO: 370767 - RNA, 19 nt, Homo sapiens
  misc_RNA (1)...(19): siRNA sense strand
gccgaggcauuguucagaa

SEQ ID NO: 370768 - RNA, 19 nt, Homo sapiens
  misc_RNA (1)...(19): siRNA sense strand
gaagaauccacuguguauu

SEQ ID NO: 370769 - RNA, 19 nt, Homo sapiens
  misc_RNA (1)...(19): siRNA sense strand
gagcaggaugugaguagaa

SEQ ID NO: 370770 - RNA, 19 nt, Homo sapiens
  misc_RNA (1)...(19): siRNA sense strand
gaaccugcacuccaugcuu

SEQ ID NO: 370771 - RNA, 19 nt, Homo sapiens
  misc_RNA (1)...(19): siRNA sense strand
ggagcaggaugugaguaga

SEQ ID NO: 370772 - RNA, 19 nt, Homo sapiens
  misc_RNA (1)...(19): siRNA sense strand
ggcagaacuucccacaugu

SEQ ID NO: 370773 - RNA, 19 nt, Homo sapiens
  misc_RNA (1)...(19): siRNA sense strand
cagaugcaguucucaacau

SEQ ID NO: 370774 - RNA, 19 nt, Homo sapiens
  misc_RNA (1)...(19): siRNA sense strand
gggcagcucuggucaugcu

SEQ ID NO: 370775 - RNA, 19 nt, Homo sapiens
  misc_RNA (1)...(19): siRNA sense strand
cgaagucucaucucagugu

SEQ ID NO: 370776 - RNA, 19 nt, Homo sapiens
  misc_RNA (1)...(19): siRNA sense strand
ccagaggacagaugcaguu

SEQ ID NO: 370777 - RNA, 19 nt, Homo sapiens
  misc_RNA (1)...(19): siRNA sense strand
gagccaaagcuggaacgua

SEQ ID NO: 370778 - RNA, 19 nt, Homo sapiens
  misc_RNA (1)...(19): siRNA sense strand
gccuggagguugaagaauc

SEQ ID NO: 370779 - RNA, 19 nt, Homo sapiens
  misc_RNA (1)...(19): siRNA sense strand
caggauggccgauguagca

SEQ ID NO: 370780 - RNA, 19 nt, Homo sapiens
  misc_RNA (1)...(19): siRNA sense strand
cuccaugccuucaggauuc

SEQ ID NO: 370781 - RNA, 19 nt, Homo sapiens
  misc_RNA (1)...(19): siRNA sense strand
gcagaacuucccacaugug

SEQ ID NO: 370782 - RNA, 19 nt, Homo sapiens
  misc_RNA (1)...(19): siRNA sense strand
ggccuugggugauuuacag

SEQ ID NO: 370783 - RNA, 19 nt, Homo sapiens
  misc_RNA (1)...(19): siRNA sense strand
gaccagcuggccucaguga

SEQ ID NO: 370784 - RNA, 19 nt, Homo sapiens
  misc_RNA (1)...(19): siRNA sense strand
ggacagagggagggauuac

SEQ ID NO: 370785 - RNA, 19 nt, Homo sapiens
  misc_RNA (1)...(19): siRNA sense strand
gaguggccuugggugauuu

SEQ ID NO: 370786 - RNA, 19 nt, Homo sapiens
  misc_RNA (1)...(19): siRNA sense strand
gauacccaccugaccauca

SEQ ID NO: 370787 - RNA, 19 nt, Homo sapiens
  misc_RNA (1)...(19): siRNA sense strand
ccgguaccauccacgacua

SEQ ID NO: 370788 - RNA, 19 nt, Homo sapiens
  misc_RNA (1)...(19): siRNA sense strand
gcuggaacguaaagacacu

SEQ ID NO: 370789 - RNA, 19 nt, Homo sapiens
  misc_RNA (1)...(19): siRNA sense strand
cgaucacccucggcauuga

SEQ ID NO: 370790 - RNA, 19 nt, Homo sapiens
  misc_RNA (1)...(19): siRNA sense strand
gaugcauggagucguguuu

SEQ ID NO: 370791 - RNA, 19 nt, Homo sapiens
  misc_RNA (1)...(19): siRNA sense strand
gggagcaggaugugaguag

SEQ ID NO: 370792 - RNA, 19 nt, Homo sapiens
  misc_RNA (1)...(19): siRNA sense strand
ucuucuggcuuuugaaaua

SEQ ID NO: 370793 - RNA, 19 nt, Homo sapiens
  misc_RNA (1)...(19): siRNA sense strand
guaccauccacgacuaugu

SEQ ID NO: 370794 - RNA, 19 nt, Homo sapiens
  misc_RNA (1)...(19): siRNA sense strand
gagauacccaccugaccau

SEQ ID NO: 370795 - RNA, 19 nt, Homo sapiens
  misc_RNA (1)...(19): siRNA sense strand
ccaaagcuggaacguaaag

SEQ ID NO: 370796 - RNA, 19 nt, Homo sapiens
  misc_RNA (1)...(19): siRNA sense strand
gcacuccaugcuuccgauu

SEQ ID NO: 370797 - RNA, 19 nt, Homo sapiens
  misc_RNA (1)...(19): siRNA sense strand
ucgccuacuucccauacuu

SEQ ID NO: 370798 - RNA, 19 nt, Homo sapiens
  misc_RNA (1)...(19): siRNA sense strand
guggcaggauggccgaugu

SEQ ID NO: 370799 - RNA, 19 nt, Homo sapiens
  misc_RNA (1)...(19): siRNA sense strand
ccaggaaugacgugcugaa

SEQ ID NO: 370800 - RNA, 19 nt, Homo sapiens
  misc_RNA (1)...(19): siRNA sense strand
acuccaugcuuccgauuca

SEQ ID NO: 370801 - RNA, 19 nt, Homo sapiens
  misc_RNA (1)...(19): siRNA sense strand
gaccugggcaccacaucug

SEQ ID NO: 370802 - RNA, 19 nt, Homo sapiens
  misc_RNA (1)...(19): siRNA sense strand
caaccagaaggaaucuuag

SEQ ID NO: 370803 - RNA, 19 nt, Homo sapiens
  misc_RNA (1)...(19): siRNA sense strand
uugaagaauccacugugua

SEQ ID NO: 370804 - RNA, 19 nt, Homo sapiens
  misc_RNA (1)...(19): siRNA sense strand
gaaaucggcucuucaagcu

SEQ ID NO: 370805 - RNA, 19 nt, Homo sapiens
  misc_RNA (1)...(19): siRNA sense strand
uaaggaaccugcagaccaa

SEQ ID NO: 370806 - RNA, 19 nt, Homo sapiens
  misc_RNA (1)...(19): siRNA sense strand
gccagugccugcugaagaa

SEQ ID NO: 370807 - RNA, 19 nt, Homo sapiens
  misc_RNA (1)...(19): siRNA sense strand
ucaauacucugauccucaa

SEQ ID NO: 370808 - RNA, 19 nt, Homo sapiens
  misc_RNA (1)...(19): siRNA sense strand
gaagaaggaggaguacuau

SEQ ID NO: 370809 - RNA, 19 nt, Homo sapiens
  misc_RNA (1)...(19): siRNA sense strand
ugaagaaggaggaguacua

SEQ ID NO: 370810 - RNA, 19 nt, Homo sapiens
  misc_RNA (1)...(19): siRNA sense strand
gccaucaucugccuaagga

SEQ ID NO: 370811 - RNA, 19 nt, Homo sapiens
  misc_RNA (1)...(19): siRNA sense strand
uggagaagaugaucaauac

SEQ ID NO: 370812 - RNA, 19 nt, Homo sapiens
  misc_RNA (1)...(19): siRNA sense strand
agaaggaggaguacuauga

SEQ ID NO: 370813 - RNA, 19 nt, Homo sapiens
  misc_RNA (1)...(19): siRNA sense strand
acgcagagguguggaauga

SEQ ID NO: 370814 - RNA, 19 nt, Homo sapiens
  misc_RNA (1)...(19): siRNA sense strand
ggaggccucuuccaaguac

SEQ ID NO: 370815 - RNA, 19 nt, Homo sapiens
  misc_RNA (1)...(19): siRNA sense strand
gcacaccagugauauucuc

SEQ ID NO: 370816 - RNA, 19 nt, Homo sapiens
  misc_RNA (1)...(19): siRNA sense strand
ggcugaagcuggagaagau

SEQ ID NO: 370817 - RNA, 19 nt, Homo sapiens
  misc_RNA (1)...(19): siRNA sense strand
cgagugaucuuucauuucc

SEQ ID NO: 370818 - RNA, 19 nt, Homo sapiens
  misc_RNA (1)...(19): siRNA sense strand
gagcaaucaugagaagaug

SEQ ID NO: 370819 - RNA, 19 nt, Homo sapiens
  misc_RNA (1)...(19): siRNA sense strand
uggacgagcugcagaagga

SEQ ID NO: 370820 - RNA, 19 nt, Homo sapiens
  misc_RNA (1)...(19): siRNA sense strand
gagcacaccagugauauuc

SEQ ID NO: 370821 - RNA, 19 nt, Homo sapiens
  misc_RNA (1)...(19): siRNA sense strand
gagaagaugaucaauacuc

SEQ ID NO: 370822 - RNA, 19 nt, Homo sapiens
  misc_RNA (1)...(19): siRNA sense strand
cccgagugaucuuucauuu

SEQ ID NO: 370823 - RNA, 19 nt, Homo sapiens
  misc_RNA (1)...(19): siRNA sense strand
cgggcgagcucccaaacuu

SEQ ID NO: 370824 - RNA, 19 nt, Homo sapiens
  misc_RNA (1)...(19): siRNA sense strand
ggagcacaccagugauauu

SEQ ID NO: 370825 - RNA, 19 nt, Homo sapiens
  misc_RNA (1)...(19): siRNA sense strand
ccuggaaccugagcaauca

SEQ ID NO: 370826 - RNA, 19 nt, Homo sapiens
  misc_RNA (1)...(19): siRNA sense strand
agaagaugaucaauacucu

SEQ ID NO: 370827 - RNA, 19 nt, Homo sapiens
  misc_RNA (1)...(19): siRNA sense strand
caaggcggaccuccagaaa

SEQ ID NO: 370828 - RNA, 19 nt, Homo sapiens
  misc_RNA (1)...(19): siRNA sense strand
gaaggaggaguacuaugag

SEQ ID NO: 370829 - RNA, 19 nt, Homo sapiens
  misc_RNA (1)...(19): siRNA sense strand
aggcggaccuccagaaagu

SEQ ID NO: 370830 - RNA, 19 nt, Homo sapiens
  misc_RNA (1)...(19): siRNA sense strand
gaugaggagcggacaguca

SEQ ID NO: 370831 - RNA, 19 nt, Homo sapiens
  misc_RNA (1)...(19): siRNA sense strand
auacucugauccucaacua

SEQ ID NO: 370832 - RNA, 19 nt, Homo sapiens
  misc_RNA (1)...(19): siRNA sense strand
aagaugaucaauacucuga

SEQ ID NO: 370833 - RNA, 19 nt, Homo sapiens
  misc_RNA (1)...(19): siRNA sense strand
cuggagaagaugaucaaua

SEQ ID NO: 370834 - RNA, 19 nt, Homo sapiens
  misc_RNA (1)...(19): siRNA sense strand
gaggagcggacagucauug

SEQ ID NO: 370835 - RNA, 19 nt, Homo sapiens
  misc_RNA (1)...(19): siRNA sense strand
ccaaggcggaccuccagaa

SEQ ID NO: 370836 - RNA, 19 nt, Homo sapiens
  misc_RNA (1)...(19): siRNA sense strand
ggaaccugagcaaucauga

SEQ ID NO: 370837 - RNA, 19 nt, Homo sapiens
  misc_RNA (1)...(19): siRNA sense strand
caucaucaucggaaacaug

SEQ ID NO: 370838 - RNA, 19 nt, Homo sapiens
  misc_RNA (1)...(19): siRNA sense strand
caucaucggaaacauguuc

SEQ ID NO: 370839 - RNA, 19 nt, Homo sapiens
  misc_RNA (1)...(19): siRNA sense strand
cugcagagccagccacaga

SEQ ID NO: 370840 - RNA, 19 nt, Homo sapiens
  misc_RNA (1)...(19): siRNA sense strand
ccugagcaaucaugagaag

SEQ ID NO: 370841 - RNA, 19 nt, Homo sapiens
  misc_RNA (1)...(19): siRNA sense strand
ugagcaaucaugagaagau

SEQ ID NO: 370842 - RNA, 19 nt, Homo sapiens
  misc_RNA (1)...(19): siRNA sense strand
ggaaccugcagaccaagga

SEQ ID NO: 370843 - RNA, 19 nt, Homo sapiens
  misc_RNA (1)...(19): siRNA sense strand
ucggaaacauguucaagcu

SEQ ID NO: 370844 - RNA, 19 nt, Homo sapiens
  misc_RNA (1)...(19): siRNA sense strand
ggccagcccaugcacauca

SEQ ID NO: 370845 - RNA, 19 nt, Homo sapiens
  misc_RNA (1)...(19): siRNA sense strand
gagggaaaucggcucuuca

SEQ ID NO: 370846 - RNA, 19 nt, Homo sapiens
  misc_RNA (1)...(19): siRNA sense strand
gcacaucaucaucggaaac

SEQ ID NO: 370847 - RNA, 19 nt, Homo sapiens
  misc_RNA (1)...(19): siRNA sense strand
gaaccugagcaaucaugag

SEQ ID NO: 370848 - RNA, 19 nt, Homo sapiens
  misc_RNA (1)...(19): siRNA sense strand
ucugggagauccugcuuac

SEQ ID NO: 370849 - RNA, 19 nt, Homo sapiens
  misc_RNA (1)...(19): siRNA sense strand
ugcacgagguggccgaguu

SEQ ID NO: 370850 - RNA, 19 nt, Homo sapiens
  misc_RNA (1)...(19): siRNA sense strand
ggcgagcucccaaacuuca

SEQ ID NO: 370851 - RNA, 19 nt, Homo sapiens
  misc_RNA (1)...(19): siRNA sense strand
caacaggucucaauucuuc

SEQ ID NO: 370852 - RNA, 19 nt, Homo sapiens
  misc_RNA (1)...(19): siRNA sense strand
gcaagaagcauuauuacga

SEQ ID NO: 370853 - RNA, 19 nt, Homo sapiens
  misc_RNA (1)...(19): siRNA sense strand
gcugaacgcugcccacuau

SEQ ID NO: 370854 - RNA, 19 nt, Homo sapiens
  misc_RNA (1)...(19): siRNA sense strand
ccaaacaggacccgucuua

SEQ ID NO: 370855 - RNA, 19 nt, Homo sapiens
  misc_RNA (1)...(19): siRNA sense strand
caagaagcauuauuacgau

SEQ ID NO: 370856 - RNA, 19 nt, Homo sapiens
  misc_RNA (1)...(19): siRNA sense strand
gaagacacagcucaaggua

SEQ ID NO: 370857 - RNA, 19 nt, Homo sapiens
  misc_RNA (1)...(19): siRNA sense strand
gaagccagaucucccacaa

SEQ ID NO: 370858 - RNA, 19 nt, Homo sapiens
  misc_RNA (1)...(19): siRNA sense strand
uuccauggcuuaagaagua

SEQ ID NO: 370859 - RNA, 19 nt, Homo sapiens
  misc_RNA (1)...(19): siRNA sense strand
gcaguggaacagcuaaaua

SEQ ID NO: 370860 - RNA, 19 nt, Homo sapiens
  misc_RNA (1)...(19): siRNA sense strand
gaggagauccgcauugaug

SEQ ID NO: 370861 - RNA, 19 nt, Homo sapiens
  misc_RNA (1)...(19): siRNA sense strand
ugacagccauggagaaugu

SEQ ID NO: 370862 - RNA, 19 nt, Homo sapiens
  misc_RNA (1)...(19): siRNA sense strand
caaugucucuaacuucuau

SEQ ID NO: 370863 - RNA, 19 nt, Homo sapiens
  misc_RNA (1)...(19): siRNA sense strand
ggaggccgaugcccagauu

SEQ ID NO: 370864 - RNA, 19 nt, Homo sapiens
  misc_RNA (1)...(19): siRNA sense strand
aaacaggacccgucuuauu

SEQ ID NO: 370865 - RNA, 19 nt, Homo sapiens
  misc_RNA (1)...(19): siRNA sense strand
aacaggacccgucuuauua

SEQ ID NO: 370866 - RNA, 19 nt, Homo sapiens
  misc_RNA (1)...(19): siRNA sense strand
gugccuaccuggacaagaa

SEQ ID NO: 370867 - RNA, 19 nt, Homo sapiens
  misc_RNA (1)...(19): siRNA sense strand
gcuaccaguuugugaagaa

SEQ ID NO: 370868 - RNA, 19 nt, Homo sapiens
  misc_RNA (1)...(19): siRNA sense strand
uggaacagcuaaauaucaa

SEQ ID NO: 370869 - RNA, 19 nt, Homo sapiens
  misc_RNA (1)...(19): siRNA sense strand
aauaauagacccagaugaa

SEQ ID NO: 370870 - RNA, 19 nt, Homo sapiens
  misc_RNA (1)...(19): siRNA sense strand
ggaggucccugaucaagcu

SEQ ID NO: 370871 - RNA, 19 nt, Homo sapiens
  misc_RNA (1)...(19): siRNA sense strand
uggagaauguggagaguga

SEQ ID NO: 370872 - RNA, 19 nt, Homo sapiens
  misc_RNA (1)...(19): siRNA sense strand
ugcaggagcucuacaagga

SEQ ID NO: 370873 - RNA, 19 nt, Homo sapiens
  misc_RNA (1)...(19): siRNA sense strand
ccagaucucccacaaacaa

SEQ ID NO: 370874 - RNA, 19 nt, Homo sapiens
  misc_RNA (1)...(19): siRNA sense strand
ggacccgucuuauuaucug

SEQ ID NO: 370875 - RNA, 19 nt, Homo sapiens
  misc_RNA (1)...(19): siRNA sense strand
uggcaucgucuuugacuua

SEQ ID NO: 370876 - RNA, 19 nt, Homo sapiens
  misc_RNA (1)...(19): siRNA sense strand
uaauagacccagaugaaga

SEQ ID NO: 370877 - RNA, 19 nt, Homo sapiens
  misc_RNA (1)...(19): siRNA sense strand
gugcugcgcuaccaguuug

SEQ ID NO: 370878 - RNA, 19 nt, Homo sapiens
  misc_RNA (1)...(19): siRNA sense strand
guacauuaccugugcugaa

SEQ ID NO: 370879 - RNA, 19 nt, Homo sapiens
  misc_RNA (1)...(19): siRNA sense strand
aaacugaccgcccuaagga

SEQ ID NO: 370880 - RNA, 19 nt, Homo sapiens
  misc_RNA (1)...(19): siRNA sense strand
ggaagacacagcucaaggu

SEQ ID NO: 370881 - RNA, 19 nt, Homo sapiens
  misc_RNA (1)...(19): siRNA sense strand
gaucucccacaaacaaauu

SEQ ID NO: 370882 - RNA, 19 nt, Homo sapiens
  misc_RNA (1)...(19): siRNA sense strand
caacaagggcgaccucaac

SEQ ID NO: 370883 - RNA, 19 nt, Homo sapiens
  misc_RNA (1)...(19): siRNA sense strand
caaguucaaugucucuaac

SEQ ID NO: 370884 - RNA, 19 nt, Homo sapiens
  misc_RNA (1)...(19): siRNA sense strand
uacauuaccugugcugaau

SEQ ID NO: 370885 - RNA, 19 nt, Homo sapiens
  misc_RNA (1)...(19): siRNA sense strand
ucucuaacuucuaucaugu

SEQ ID NO: 370886 - RNA, 19 nt, Homo sapiens
  misc_RNA (1)...(19): siRNA sense strand
agaagaaaguggacaagcu

SEQ ID NO: 370887 - RNA, 19 nt, Homo sapiens
  misc_RNA (1)...(19): siRNA sense strand
gcaacaggucucaauucuu

SEQ ID NO: 370888 - RNA, 19 nt, Homo sapiens
  misc_RNA (1)...(19): siRNA sense strand
ucaucaggcuuugcaagaa

SEQ ID NO: 370889 - RNA, 19 nt, Homo sapiens
  misc_RNA (1)...(19): siRNA sense strand
caguggaacagcuaaauau

SEQ ID NO: 370890 - RNA, 19 nt, Homo sapiens
  misc_RNA (1)...(19): siRNA sense strand
gggaagcgacagcaccaaa

SEQ ID NO: 370891 - RNA, 19 nt, Homo sapiens
  misc_RNA (1)...(19): siRNA sense strand
ucuaacuucuaucauguga

SEQ ID NO: 370892 - RNA, 19 nt, Homo sapiens
  misc_RNA (1)...(19): siRNA sense strand
caucaggcuuugcaagaag

SEQ ID NO: 370893 - RNA, 19 nt, Homo sapiens
  misc_RNA (1)...(19): siRNA sense strand
caaacaaauuuucgucguu

SEQ ID NO: 370894 - RNA, 19 nt, Homo sapiens
  misc_RNA (1)...(19): siRNA sense strand
aggaggagauccgcauuga

SEQ ID NO: 370895 - RNA, 19 nt, Homo sapiens
  misc_RNA (1)...(19): siRNA sense strand
guggaacagcuaaauauca

SEQ ID NO: 370896 - RNA, 19 nt, Homo sapiens
  misc_RNA (1)...(19): siRNA sense strand
caucgucuuugacuuacug

SEQ ID NO: 370897 - RNA, 19 nt, Homo sapiens
  misc_RNA (1)...(19): siRNA sense strand
cagcaacaggucucaauuc

SEQ ID NO: 370898 - RNA, 19 nt, Homo sapiens
  misc_RNA (1)...(19): siRNA sense strand
ggagaccacacaugaagca

SEQ ID NO: 370899 - RNA, 19 nt, Homo sapiens
  misc_RNA (1)...(19): siRNA sense strand
uaaauaucaaggccaagaa

SEQ ID NO: 370900 - RNA, 19 nt, Homo sapiens
  misc_RNA (1)...(19): siRNA sense strand
agacccagaugaagagaag

SEQ ID NO: 370901 - RNA, 19 nt, Homo sapiens
  misc_RNA (1)...(19): siRNA sense strand
aagcugaacuuuuccaaga

SEQ ID NO: 370902 - RNA, 19 nt, Homo sapiens
  misc_RNA (1)...(19): siRNA sense strand
gacaagaagcauaccaucu

SEQ ID NO: 370903 - RNA, 19 nt, Homo sapiens
  misc_RNA (1)...(19): siRNA sense strand
gaaaacuucaucaggcuuu

SEQ ID NO: 370904 - RNA, 19 nt, Homo sapiens
  misc_RNA (1)...(19): siRNA sense strand
gucucuaacuucuaucaug

SEQ ID NO: 370905 - RNA, 19 nt, Homo sapiens
  misc_RNA (1)...(19): siRNA sense strand
gaagaagaaaguggacaag

SEQ ID NO: 370906 - RNA, 19 nt, Homo sapiens
  misc_RNA (1)...(19): siRNA sense strand
cuaaauaucaaggccaaga

SEQ ID NO: 370907 - RNA, 19 nt, Homo sapiens
  misc_RNA (1)...(19): siRNA sense strand
gaaaauaauagacccagau

SEQ ID NO: 370908 - RNA, 19 nt, Homo sapiens
  misc_RNA (1)...(19): siRNA sense strand
caggacccgucuuauuauc

SEQ ID NO: 370909 - RNA, 19 nt, Homo sapiens
  misc_RNA (1)...(19): siRNA sense strand
gaagcauaccaucuuugga

SEQ ID NO: 370910 - RNA, 19 nt, Homo sapiens
  misc_RNA (1)...(19): siRNA sense strand
cugaauacacucacuuuua

SEQ ID NO: 370911 - RNA, 19 nt, Homo sapiens
  misc_RNA (1)...(19): siRNA sense strand
acagauccauccggaacuu

SEQ ID NO: 370912 - RNA, 19 nt, Homo sapiens
  misc_RNA (1)...(19): siRNA sense strand
gaaaguggacaagcugaac

SEQ ID NO: 370913 - RNA, 19 nt, Homo sapiens
  misc_RNA (1)...(19): siRNA sense strand
uaucaaggccaagaacuuc

SEQ ID NO: 370914 - RNA, 19 nt, Homo sapiens
  misc_RNA (1)...(19): siRNA sense strand
ucaauucuucaucacguuu

SEQ ID NO: 370915 - RNA, 19 nt, Homo sapiens
  misc_RNA (1)...(19): siRNA sense strand
ugaucaagcugaacuuuuc

SEQ ID NO: 370916 - RNA, 19 nt, Homo sapiens
  misc_RNA (1)...(19): siRNA sense strand
acugcgaccugacaccaaa

SEQ ID NO: 370917 - RNA, 19 nt, Homo sapiens
  misc_RNA (1)...(19): siRNA sense strand
gaacgcugcccacuauucc

SEQ ID NO: 370918 - RNA, 19 nt, Homo sapiens
  misc_RNA (1)...(19): siRNA sense strand
caaacaggacccgucuuau

SEQ ID NO: 370919 - RNA, 19 nt, Homo sapiens
  misc_RNA (1)...(19): siRNA sense strand
acaaguucaaugucucuaa

SEQ ID NO: 370920 - RNA, 19 nt, Homo sapiens
  misc_RNA (1)...(19): siRNA sense strand
caacgucuacgccuaugag

SEQ ID NO: 370921 - RNA, 19 nt, Homo sapiens
  misc_RNA (1)...(19): siRNA sense strand
cauuaccugugcugaauac

SEQ ID NO: 370922 - RNA, 19 nt, Homo sapiens
  misc_RNA (1)...(19): siRNA sense strand
guucaaugucucuaacuuc

SEQ ID NO: 370923 - RNA, 19 nt, Homo sapiens
  misc_RNA (1)...(19): siRNA sense strand
acaggacccgucuuauuau

SEQ ID NO: 370924 - RNA, 19 nt, Homo sapiens
  misc_RNA (1)...(19): siRNA sense strand
agccagaucucccacaaac

SEQ ID NO: 370925 - RNA, 19 nt, Homo sapiens
  misc_RNA (1)...(19): siRNA sense strand
agaagaagaaaguggacaa

SEQ ID NO: 370926 - RNA, 19 nt, Homo sapiens
  misc_RNA (1)...(19): siRNA sense strand
gcaacgucuacgccuauga

SEQ ID NO: 370927 - RNA, 19 nt, Homo sapiens
  misc_RNA (1)...(19): siRNA sense strand
ucccggagaccacacauga

SEQ ID NO: 370928 - RNA, 19 nt, Homo sapiens
  misc_RNA (1)...(19): siRNA sense strand
ugaacgcugcccacuauuc

SEQ ID NO: 370929 - RNA, 19 nt, Homo sapiens
  misc_RNA (1)...(19): siRNA sense strand
gcaccaaaaggacaaaaug

SEQ ID NO: 370930 - RNA, 19 nt, Homo sapiens
  misc_RNA (1)...(19): siRNA sense strand
gucuuugacuuacugaaca

SEQ ID NO: 370931 - RNA, 19 nt, Homo sapiens
  misc_RNA (1)...(19): siRNA sense strand
gcucuacaaggaguucaaa

SEQ ID NO: 370932 - RNA, 19 nt, Homo sapiens
  misc_RNA (1)...(19): siRNA sense strand
agcaacaggucucaauucu

SEQ ID NO: 370933 - RNA, 19 nt, Homo sapiens
  misc_RNA (1)...(19): siRNA sense strand
gcacggguggggagucaua

SEQ ID NO: 370934 - RNA, 19 nt, Homo sapiens
  misc_RNA (1)...(19): siRNA sense strand
uaccugugcugaauacacu

SEQ ID NO: 370935 - RNA, 19 nt, Homo sapiens
  misc_RNA (1)...(19): siRNA sense strand
ggaggagauccgcauugau

SEQ ID NO: 370936 - RNA, 19 nt, Homo sapiens
  misc_RNA (1)...(19): siRNA sense strand
uaaggaggagauccgcauu

SEQ ID NO: 370937 - RNA, 19 nt, Homo sapiens
  misc_RNA (1)...(19): siRNA sense strand
gacccgucuuauuaucuga

SEQ ID NO: 370938 - RNA, 19 nt, Homo sapiens
  misc_RNA (1)...(19): siRNA sense strand
ucaaugucucuaacuucua

SEQ ID NO: 370939 - RNA, 19 nt, Homo sapiens
  misc_RNA (1)...(19): siRNA sense strand
ggucccugaucaagcugaa

SEQ ID NO: 370940 - RNA, 19 nt, Homo sapiens
  misc_RNA (1)...(19): siRNA sense strand
gggcuuugacguacugaca

SEQ ID NO: 370941 - RNA, 19 nt, Homo sapiens
  misc_RNA (1)...(19): siRNA sense strand
caacaggucucaauucuuc

SEQ ID NO: 370942 - RNA, 19 nt, Homo sapiens
  misc_RNA (1)...(19): siRNA sense strand
gcaagaagcauuauuacga

SEQ ID NO: 370943 - RNA, 19 nt, Homo sapiens
  misc_RNA (1)...(19): siRNA sense strand
gcugaacgcugcccacuau

SEQ ID NO: 370944 - RNA, 19 nt, Homo sapiens
  misc_RNA (1)...(19): siRNA sense strand
ccaaacaggacccgucuua

SEQ ID NO: 370945 - RNA, 19 nt, Homo sapiens
  misc_RNA (1)...(19): siRNA sense strand
caagaagcauuauuacgau

SEQ ID NO: 370946 - RNA, 19 nt, Homo sapiens
  misc_RNA (1)...(19): siRNA sense strand
gaagacacagcucaaggua

SEQ ID NO: 370947 - RNA, 19 nt, Homo sapiens
  misc_RNA (1)...(19): siRNA sense strand
gaagccagaucucccacaa

SEQ ID NO: 370948 - RNA, 19 nt, Homo sapiens
  misc_RNA (1)...(19): siRNA sense strand
uuccauggcuuaagaagua

SEQ ID NO: 370949 - RNA, 19 nt, Homo sapiens
  misc_RNA (1)...(19): siRNA sense strand
gcaguggaacagcuaaaua

SEQ ID NO: 370950 - RNA, 19 nt, Homo sapiens
  misc_RNA (1)...(19): siRNA sense strand
gaggagauccgcauugaug

SEQ ID NO: 370951 - RNA, 19 nt, Homo sapiens
  misc_RNA (1)...(19): siRNA sense strand
ugacagccauggagaaugu

SEQ ID NO: 370952 - RNA, 19 nt, Homo sapiens
  misc_RNA (1)...(19): siRNA sense strand
caaugucucuaacuucuau

SEQ ID NO: 370953 - RNA, 19 nt, Homo sapiens
  misc_RNA (1)...(19): siRNA sense strand
ggaggccgaugcccagauu

SEQ ID NO: 370954 - RNA, 19 nt, Homo sapiens
  misc_RNA (1)...(19): siRNA sense strand
aaacaggacccgucuuauu

SEQ ID NO: 370955 - RNA, 19 nt, Homo sapiens
  misc_RNA (1)...(19): siRNA sense strand
aacaggacccgucuuauua

SEQ ID NO: 370956 - RNA, 19 nt, Homo sapiens
  misc_RNA (1)...(19): siRNA sense strand
gugccuaccuggacaagaa

SEQ ID NO: 370957 - RNA, 19 nt, Homo sapiens
  misc_RNA (1)...(19): siRNA sense strand
gcuaccaguuugugaagaa

SEQ ID NO: 370958 - RNA, 19 nt, Homo sapiens
  misc_RNA (1)...(19): siRNA sense strand
uggaacagcuaaauaucaa

SEQ ID NO: 370959 - RNA, 19 nt, Homo sapiens
  misc_RNA (1)...(19): siRNA sense strand
aauaauagacccagaugaa

SEQ ID NO: 370960 - RNA, 19 nt, Homo sapiens
  misc_RNA (1)...(19): siRNA sense strand
ggaggucccugaucaagcu

SEQ ID NO: 370961 - RNA, 19 nt, Homo sapiens
  misc_RNA (1)...(19): siRNA sense strand
uggagaauguggagaguga

SEQ ID NO: 370962 - RNA, 19 nt, Homo sapiens
  misc_RNA (1)...(19): siRNA sense strand
ugcaggagcucuacaagga

SEQ ID NO: 370963 - RNA, 19 nt, Homo sapiens
  misc_RNA (1)...(19): siRNA sense strand
ccagaucucccacaaacaa

SEQ ID NO: 370964 - RNA, 19 nt, Homo sapiens
  misc_RNA (1)...(19): siRNA sense strand
ggacccgucuuauuaucug

SEQ ID NO: 370965 - RNA, 19 nt, Homo sapiens
  misc_RNA (1)...(19): siRNA sense strand
uggcaucgucuuugacuua

SEQ ID NO: 370966 - RNA, 19 nt, Homo sapiens
  misc_RNA (1)...(19): siRNA sense strand
uaauagacccagaugaaga

SEQ ID NO: 370967 - RNA, 19 nt, Homo sapiens
  misc_RNA (1)...(19): siRNA sense strand
gugcugcgcuaccaguuug

SEQ ID NO: 370968 - RNA, 19 nt, Homo sapiens
  misc_RNA (1)...(19): siRNA sense strand
guacauuaccugugcugaa

SEQ ID NO: 370969 - RNA, 19 nt, Homo sapiens
  misc_RNA (1)...(19): siRNA sense strand
aaacugaccgcccuaagga

SEQ ID NO: 370970 - RNA, 19 nt, Homo sapiens
  misc_RNA (1)...(19): siRNA sense strand
ggaagacacagcucaaggu

SEQ ID NO: 370971 - RNA, 19 nt, Homo sapiens
  misc_RNA (1)...(19): siRNA sense strand
gaucucccacaaacaaauu

SEQ ID NO: 370972 - RNA, 19 nt, Homo sapiens
  misc_RNA (1)...(19): siRNA sense strand
caacaagggcgaccucaac

SEQ ID NO: 370973 - RNA, 19 nt, Homo sapiens
  misc_RNA (1)...(19): siRNA sense strand
caaguucaaugucucuaac

SEQ ID NO: 370974 - RNA, 19 nt, Homo sapiens
  misc_RNA (1)...(19): siRNA sense strand
uacauuaccugugcugaau

SEQ ID NO: 370975 - RNA, 19 nt, Homo sapiens
  misc_RNA (1)...(19): siRNA sense strand
ucucuaacuucuaucaugu

SEQ ID NO: 370976 - RNA, 19 nt, Homo sapiens
  misc_RNA (1)...(19): siRNA sense strand
agaagaaaguggacaagcu

SEQ ID NO: 370977 - RNA, 19 nt, Homo sapiens
  misc_RNA (1)...(19): siRNA sense strand
gcaacaggucucaauucuu

SEQ ID NO: 370978 - RNA, 19 nt, Homo sapiens
  misc_RNA (1)...(19): siRNA sense strand
ucaucaggcuuugcaagaa

SEQ ID NO: 370979 - RNA, 19 nt, Homo sapiens
  misc_RNA (1)...(19): siRNA sense strand
caguggaacagcuaaauau

SEQ ID NO: 370980 - RNA, 19 nt, Homo sapiens
  misc_RNA (1)...(19): siRNA sense strand
gggaagcgacagcaccaaa

SEQ ID NO: 370981 - RNA, 19 nt, Homo sapiens
  misc_RNA (1)...(19): siRNA sense strand
ucuaacuucuaucauguga

SEQ ID NO: 370982 - RNA, 19 nt, Homo sapiens
  misc_RNA (1)...(19): siRNA sense strand
caucaggcuuugcaagaag

SEQ ID NO: 370983 - RNA, 19 nt, Homo sapiens
  misc_RNA (1)...(19): siRNA sense strand
caaacaaauuuucgucguu

SEQ ID NO: 370984 - RNA, 19 nt, Homo sapiens
  misc_RNA (1)...(19): siRNA sense strand
aggaggagauccgcauuga

SEQ ID NO: 370985 - RNA, 19 nt, Homo sapiens
  misc_RNA (1)...(19): siRNA sense strand
guggaacagcuaaauauca

SEQ ID NO: 370986 - RNA, 19 nt, Homo sapiens
  misc_RNA (1)...(19): siRNA sense strand
caucgucuuugacuuacug

SEQ ID NO: 370987 - RNA, 19 nt, Homo sapiens
  misc_RNA (1)...(19): siRNA sense strand
cagcaacaggucucaauuc

SEQ ID NO: 370988 - RNA, 19 nt, Homo sapiens
  misc_RNA (1)...(19): siRNA sense strand
ggagaccacacaugaagca

SEQ ID NO: 370989 - RNA, 19 nt, Homo sapiens
  misc_RNA (1)...(19): siRNA sense strand
uaaauaucaaggccaagaa

SEQ ID NO: 370990 - RNA, 19 nt, Homo sapiens
  misc_RNA (1)...(19): siRNA sense strand
agacccagaugaagagaag

SEQ ID NO: 370991 - RNA, 19 nt, Homo sapiens
  misc_RNA (1)...(19): siRNA sense strand
aagcugaacuuuuccaaga

SEQ ID NO: 370992 - RNA, 19 nt, Homo sapiens
  misc_RNA (1)...(19): siRNA sense strand
gacaagaagcauaccaucu

SEQ ID NO: 370993 - RNA, 19 nt, Homo sapiens
  misc_RNA (1)...(19): siRNA sense strand
gaaaacuucaucaggcuuu

SEQ ID NO: 370994 - RNA, 19 nt, Homo sapiens
  misc_RNA (1)...(19): siRNA sense strand
gucucuaacuucuaucaug

SEQ ID NO: 370995 - RNA, 19 nt, Homo sapiens
  misc_RNA (1)...(19): siRNA sense strand
gaagaagaaaguggacaag

SEQ ID NO: 370996 - RNA, 19 nt, Homo sapiens
  misc_RNA (1)...(19): siRNA sense strand
cuaaauaucaaggccaaga

SEQ ID NO: 370997 - RNA, 19 nt, Homo sapiens
  misc_RNA (1)...(19): siRNA sense strand
gaaaauaauagacccagau

SEQ ID NO: 370998 - RNA, 19 nt, Homo sapiens
  misc_RNA (1)...(19): siRNA sense strand
caggacccgucuuauuauc

SEQ ID NO: 370999 - RNA, 19 nt, Homo sapiens
  misc_RNA (1)...(19): siRNA sense strand
gaagcauaccaucuuugga

SEQ ID NO: 371000 - RNA, 19 nt, Homo sapiens
  misc_RNA (1)...(19): siRNA sense strand
cugaauacacucacuuuua

SEQ ID NO: 371001 - RNA, 19 nt, Homo sapiens
  misc_RNA (1)...(19): siRNA sense strand
acagauccauccggaacuu

SEQ ID NO: 371002 - RNA, 19 nt, Homo sapiens
  misc_RNA (1)...(19): siRNA sense strand
gaaaguggacaagcugaac

SEQ ID NO: 371003 - RNA, 19 nt, Homo sapiens
  misc_RNA (1)...(19): siRNA sense strand
uaucaaggccaagaacuuc

SEQ ID NO: 371004 - RNA, 19 nt, Homo sapiens
  misc_RNA (1)...(19): siRNA sense strand
ucaauucuucaucacguuu

SEQ ID NO: 371005 - RNA, 19 nt, Homo sapiens
  misc_RNA (1)...(19): siRNA sense strand
ugaucaagcugaacuuuuc

SEQ ID NO: 371006 - RNA, 19 nt, Homo sapiens
  misc_RNA (1)...(19): siRNA sense strand
acugcgaccugacaccaaa

SEQ ID NO: 371007 - RNA, 19 nt, Homo sapiens
  misc_RNA (1)...(19): siRNA sense strand
gaacgcugcccacuauucc

SEQ ID NO: 371008 - RNA, 19 nt, Homo sapiens
  misc_RNA (1)...(19): siRNA sense strand
caaacaggacccgucuuau

SEQ ID NO: 371009 - RNA, 19 nt, Homo sapiens
  misc_RNA (1)...(19): siRNA sense strand
acaaguucaaugucucuaa

SEQ ID NO: 371010 - RNA, 19 nt, Homo sapiens
  misc_RNA (1)...(19): siRNA sense strand
caacgucuacgccuaugag

SEQ ID NO: 371011 - RNA, 19 nt, Homo sapiens
  misc_RNA (1)...(19): siRNA sense strand
cauuaccugugcugaauac

SEQ ID NO: 371012 - RNA, 19 nt, Homo sapiens
  misc_RNA (1)...(19): siRNA sense strand
guucaaugucucuaacuuc

SEQ ID NO: 371013 - RNA, 19 nt, Homo sapiens
  misc_RNA (1)...(19): siRNA sense strand
acaggacccgucuuauuau

SEQ ID NO: 371014 - RNA, 19 nt, Homo sapiens
  misc_RNA (1)...(19): siRNA sense strand
agccagaucucccacaaac

SEQ ID NO: 371015 - RNA, 19 nt, Homo sapiens
  misc_RNA (1)...(19): siRNA sense strand
agaagaagaaaguggacaa

SEQ ID NO: 371016 - RNA, 19 nt, Homo sapiens
  misc_RNA (1)...(19): siRNA sense strand
gcaacgucuacgccuauga

SEQ ID NO: 371017 - RNA, 19 nt, Homo sapiens
  misc_RNA (1)...(19): siRNA sense strand
ucccggagaccacacauga

SEQ ID NO: 371018 - RNA, 19 nt, Homo sapiens
  misc_RNA (1)...(19): siRNA sense strand
ugaacgcugcccacuauuc

SEQ ID NO: 371019 - RNA, 19 nt, Homo sapiens
  misc_RNA (1)...(19): siRNA sense strand
gcaccaaaaggacaaaaug

SEQ ID NO: 371020 - RNA, 19 nt, Homo sapiens
  misc_RNA (1)...(19): siRNA sense strand
gucuuugacuuacugaaca

SEQ ID NO: 371021 - RNA, 19 nt, Homo sapiens
  misc_RNA (1)...(19): siRNA sense strand
gcucuacaaggaguucaaa

SEQ ID NO: 371022 - RNA, 19 nt, Homo sapiens
  misc_RNA (1)...(19): siRNA sense strand
agcaacaggucucaauucu

SEQ ID NO: 371023 - RNA, 19 nt, Homo sapiens
  misc_RNA (1)...(19): siRNA sense strand
gcacggguggggagucaua

SEQ ID NO: 371024 - RNA, 19 nt, Homo sapiens
  misc_RNA (1)...(19): siRNA sense strand
uaccugugcugaauacacu

SEQ ID NO: 371025 - RNA, 19 nt, Homo sapiens
  misc_RNA (1)...(19): siRNA sense strand
ggaggagauccgcauugau

SEQ ID NO: 371026 - RNA, 19 nt, Homo sapiens
  misc_RNA (1)...(19): siRNA sense strand
uaaggaggagauccgcauu

SEQ ID NO: 371027 - RNA, 19 nt, Homo sapiens
  misc_RNA (1)...(19): siRNA sense strand
gacccgucuuauuaucuga

SEQ ID NO: 371028 - RNA, 19 nt, Homo sapiens
  misc_RNA (1)...(19): siRNA sense strand
ucaaugucucuaacuucua

SEQ ID NO: 371029 - RNA, 19 nt, Homo sapiens
  misc_RNA (1)...(19): siRNA sense strand
ggucccugaucaagcugaa

SEQ ID NO: 371030 - RNA, 19 nt, Homo sapiens
  misc_RNA (1)...(19): siRNA sense strand
gggcuuugacguacugaca

SEQ ID NO: 371031 - RNA, 19 nt, Homo sapiens
  misc_RNA (1)...(19): siRNA sense strand
caacaggucucaauucuuc

SEQ ID NO: 371032 - RNA, 19 nt, Homo sapiens
  misc_RNA (1)...(19): siRNA sense strand
gcaagaagcauuauuacga

SEQ ID NO: 371033 - RNA, 19 nt, Homo sapiens
  misc_RNA (1)...(19): siRNA sense strand
gcugaacgcugcccacuau

SEQ ID NO: 371034 - RNA, 19 nt, Homo sapiens
  misc_RNA (1)...(19): siRNA sense strand
ccaaacaggacccgucuua

SEQ ID NO: 371035 - RNA, 19 nt, Homo sapiens
  misc_RNA (1)...(19): siRNA sense strand
caagaagcauuauuacgau

SEQ ID NO: 371036 - RNA, 19 nt, Homo sapiens
  misc_RNA (1)...(19): siRNA sense strand
gaagacacagcucaaggua

SEQ ID NO: 371037 - RNA, 19 nt, Homo sapiens
  misc_RNA (1)...(19): siRNA sense strand
gaagccagaucucccacaa

SEQ ID NO: 371038 - RNA, 19 nt, Homo sapiens
  misc_RNA (1)...(19): siRNA sense strand
uuccauggcuuaagaagua

SEQ ID NO: 371039 - RNA, 19 nt, Homo sapiens
  misc_RNA (1)...(19): siRNA sense strand
gcaguggaacagcuaaaua

SEQ ID NO: 371040 - RNA, 19 nt, Homo sapiens
  misc_RNA (1)...(19): siRNA sense strand
gaggagauccgcauugaug

SEQ ID NO: 371041 - RNA, 19 nt, Homo sapiens
  misc_RNA (1)...(19): siRNA sense strand
ugacagccauggagaaugu

SEQ ID NO: 371042 - RNA, 19 nt, Homo sapiens
  misc_RNA (1)...(19): siRNA sense strand
caaugucucuaacuucuau

SEQ ID NO: 371043 - RNA, 19 nt, Homo sapiens
  misc_RNA (1)...(19): siRNA sense strand
ggaggccgaugcccagauu

SEQ ID NO: 371044 - RNA, 19 nt, Homo sapiens
  misc_RNA (1)...(19): siRNA sense strand
aaacaggacccgucuuauu

SEQ ID NO: 371045 - RNA, 19 nt, Homo sapiens
  misc_RNA (1)...(19): siRNA sense strand
aacaggacccgucuuauua

SEQ ID NO: 371046 - RNA, 19 nt, Homo sapiens
  misc_RNA (1)...(19): siRNA sense strand
gugccuaccuggacaagaa

SEQ ID NO: 371047 - RNA, 19 nt, Homo sapiens
  misc_RNA (1)...(19): siRNA sense strand
gcuaccaguuugugaagaa

SEQ ID NO: 371048 - RNA, 19 nt, Homo sapiens
  misc_RNA (1)...(19): siRNA sense strand
uggaacagcuaaauaucaa

SEQ ID NO: 371049 - RNA, 19 nt, Homo sapiens
  misc_RNA (1)...(19): siRNA sense strand
aauaauagacccagaugaa

SEQ ID NO: 371050 - RNA, 19 nt, Homo sapiens
  misc_RNA (1)...(19): siRNA sense strand
ggaggucccugaucaagcu

SEQ ID NO: 371051 - RNA, 19 nt, Homo sapiens
  misc_RNA (1)...(19): siRNA sense strand
uggagaauguggagaguga

SEQ ID NO: 371052 - RNA, 19 nt, Homo sapiens
  misc_RNA (1)...(19): siRNA sense strand
ugcaggagcucuacaagga

SEQ ID NO: 371053 - RNA, 19 nt, Homo sapiens
  misc_RNA (1)...(19): siRNA sense strand
ccagaucucccacaaacaa

SEQ ID NO: 371054 - RNA, 19 nt, Homo sapiens
  misc_RNA (1)...(19): siRNA sense strand
ggacccgucuuauuaucug

SEQ ID NO: 371055 - RNA, 19 nt, Homo sapiens
  misc_RNA (1)...(19): siRNA sense strand
uggcaucgucuuugacuua

SEQ ID NO: 371056 - RNA, 19 nt, Homo sapiens
  misc_RNA (1)...(19): siRNA sense strand
uaauagacccagaugaaga

SEQ ID NO: 371057 - RNA, 19 nt, Homo sapiens
  misc_RNA (1)...(19): siRNA sense strand
gugcugcgcuaccaguuug

SEQ ID NO: 371058 - RNA, 19 nt, Homo sapiens
  misc_RNA (1)...(19): siRNA sense strand
guacauuaccugugcugaa

SEQ ID NO: 371059 - RNA, 19 nt, Homo sapiens
  misc_RNA (1)...(19): siRNA sense strand
aaacugaccgcccuaagga

SEQ ID NO: 371060 - RNA, 19 nt, Homo sapiens
  misc_RNA (1)...(19): siRNA sense strand
ggaagacacagcucaaggu

SEQ ID NO: 371061 - RNA, 19 nt, Homo sapiens
  misc_RNA (1)...(19): siRNA sense strand
gaucucccacaaacaaauu

SEQ ID NO: 371062 - RNA, 19 nt, Homo sapiens
  misc_RNA (1)...(19): siRNA sense strand
caacaagggcgaccucaac

SEQ ID NO: 371063 - RNA, 19 nt, Homo sapiens
  misc_RNA (1)...(19): siRNA sense strand
caaguucaaugucucuaac

SEQ ID NO: 371064 - RNA, 19 nt, Homo sapiens
  misc_RNA (1)...(19): siRNA sense strand
uacauuaccugugcugaau

SEQ ID NO: 371065 - RNA, 19 nt, Homo sapiens
  misc_RNA (1)...(19): siRNA sense strand
ucucuaacuucuaucaugu

SEQ ID NO: 371066 - RNA, 19 nt, Homo sapiens
  misc_RNA (1)...(19): siRNA sense strand
agaagaaaguggacaagcu

SEQ ID NO: 371067 - RNA, 19 nt, Homo sapiens
  misc_RNA (1)...(19): siRNA sense strand
gcaacaggucucaauucuu

SEQ ID NO: 371068 - RNA, 19 nt, Homo sapiens
  misc_RNA (1)...(19): siRNA sense strand
ucaucaggcuuugcaagaa

SEQ ID NO: 371069 - RNA, 19 nt, Homo sapiens
  misc_RNA (1)...(19): siRNA sense strand
caguggaacagcuaaauau

SEQ ID NO: 371070 - RNA, 19 nt, Homo sapiens
  misc_RNA (1)...(19): siRNA sense strand
gggaagcgacagcaccaaa

SEQ ID NO: 371071 - RNA, 19 nt, Homo sapiens
  misc_RNA (1)...(19): siRNA sense strand
ucuaacuucuaucauguga

SEQ ID NO: 371072 - RNA, 19 nt, Homo sapiens
  misc_RNA (1)...(19): siRNA sense strand
caucaggcuuugcaagaag

SEQ ID NO: 371073 - RNA, 19 nt, Homo sapiens
  misc_RNA (1)...(19): siRNA sense strand
caaacaaauuuucgucguu

SEQ ID NO: 371074 - RNA, 19 nt, Homo sapiens
  misc_RNA (1)...(19): siRNA sense strand
aggaggagauccgcauuga

SEQ ID NO: 371075 - RNA, 19 nt, Homo sapiens
  misc_RNA (1)...(19): siRNA sense strand
guggaacagcuaaauauca

SEQ ID NO: 371076 - RNA, 19 nt, Homo sapiens
  misc_RNA (1)...(19): siRNA sense strand
caucgucuuugacuuacug

SEQ ID NO: 371077 - RNA, 19 nt, Homo sapiens
  misc_RNA (1)...(19): siRNA sense strand
cagcaacaggucucaauuc

SEQ ID NO: 371078 - RNA, 19 nt, Homo sapiens
  misc_RNA (1)...(19): siRNA sense strand
ggagaccacacaugaagca

SEQ ID NO: 371079 - RNA, 19 nt, Homo sapiens
  misc_RNA (1)...(19): siRNA sense strand
uaaauaucaaggccaagaa

SEQ ID NO: 371080 - RNA, 19 nt, Homo sapiens
  misc_RNA (1)...(19): siRNA sense strand
agacccagaugaagagaag

SEQ ID NO: 371081 - RNA, 19 nt, Homo sapiens
  misc_RNA (1)...(19): siRNA sense strand
aagcugaacuuuuccaaga

SEQ ID NO: 371082 - RNA, 19 nt, Homo sapiens
  misc_RNA (1)...(19): siRNA sense strand
gacaagaagcauaccaucu

SEQ ID NO: 371083 - RNA, 19 nt, Homo sapiens
  misc_RNA (1)...(19): siRNA sense strand
gaaaacuucaucaggcuuu

SEQ ID NO: 371084 - RNA, 19 nt, Homo sapiens
  misc_RNA (1)...(19): siRNA sense strand
gucucuaacuucuaucaug

SEQ ID NO: 371085 - RNA, 19 nt, Homo sapiens
  misc_RNA (1)...(19): siRNA sense strand
gaagaagaaaguggacaag

SEQ ID NO: 371086 - RNA, 19 nt, Homo sapiens
  misc_RNA (1)...(19): siRNA sense strand
cuaaauaucaaggccaaga

SEQ ID NO: 371087 - RNA, 19 nt, Homo sapiens
  misc_RNA (1)...(19): siRNA sense strand
gaaaauaauagacccagau

SEQ ID NO: 371088 - RNA, 19 nt, Homo sapiens
  misc_RNA (1)...(19): siRNA sense strand
caggacccgucuuauuauc

SEQ ID NO: 371089 - RNA, 19 nt, Homo sapiens
  misc_RNA (1)...(19): siRNA sense strand
gaagcauaccaucuuugga

SEQ ID NO: 371090 - RNA, 19 nt, Homo sapiens
  misc_RNA (1)...(19): siRNA sense strand
cugaauacacucacuuuua

SEQ ID NO: 371091 - RNA, 19 nt, Homo sapiens
  misc_RNA (1)...(19): siRNA sense strand
acagauccauccggaacuu

SEQ ID NO: 371092 - RNA, 19 nt, Homo sapiens
  misc_RNA (1)...(19): siRNA sense strand
gaaaguggacaagcugaac

SEQ ID NO: 371093 - RNA, 19 nt, Homo sapiens
  misc_RNA (1)...(19): siRNA sense strand
uaucaaggccaagaacuuc

SEQ ID NO: 371094 - RNA, 19 nt, Homo sapiens
  misc_RNA (1)...(19): siRNA sense strand
ucaauucuucaucacguuu

SEQ ID NO: 371095 - RNA, 19 nt, Homo sapiens
  misc_RNA (1)...(19): siRNA sense strand
ugaucaagcugaacuuuuc

SEQ ID NO: 371096 - RNA, 19 nt, Homo sapiens
  misc_RNA (1)...(19): siRNA sense strand
acugcgaccugacaccaaa

SEQ ID NO: 371097 - RNA, 19 nt, Homo sapiens
  misc_RNA (1)...(19): siRNA sense strand
gaacgcugcccacuauucc

SEQ ID NO: 371098 - RNA, 19 nt, Homo sapiens
  misc_RNA (1)...(19): siRNA sense strand
caaacaggacccgucuuau

SEQ ID NO: 371099 - RNA, 19 nt, Homo sapiens
  misc_RNA (1)...(19): siRNA sense strand
acaaguucaaugucucuaa

SEQ ID NO: 371100 - RNA, 19 nt, Homo sapiens
  misc_RNA (1)...(19): siRNA sense strand
caacgucuacgccuaugag

SEQ ID NO: 371101 - RNA, 19 nt, Homo sapiens
  misc_RNA (1)...(19): siRNA sense strand
cauuaccugugcugaauac

SEQ ID NO: 371102 - RNA, 19 nt, Homo sapiens
  misc_RNA (1)...(19): siRNA sense strand
guucaaugucucuaacuuc

SEQ ID NO: 371103 - RNA, 19 nt, Homo sapiens
  misc_RNA (1)...(19): siRNA sense strand
acaggacccgucuuauuau

SEQ ID NO: 371104 - RNA, 19 nt, Homo sapiens
  misc_RNA (1)...(19): siRNA sense strand
agccagaucucccacaaac

SEQ ID NO: 371105 - RNA, 19 nt, Homo sapiens
  misc_RNA (1)...(19): siRNA sense strand
agaagaagaaaguggacaa

SEQ ID NO: 371106 - RNA, 19 nt, Homo sapiens
  misc_RNA (1)...(19): siRNA sense strand
gcaacgucuacgccuauga

SEQ ID NO: 371107 - RNA, 19 nt, Homo sapiens
  misc_RNA (1)...(19): siRNA sense strand
ucccggagaccacacauga

SEQ ID NO: 371108 - RNA, 19 nt, Homo sapiens
  misc_RNA (1)...(19): siRNA sense strand
ugaacgcugcccacuauuc

SEQ ID NO: 371109 - RNA, 19 nt, Homo sapiens
  misc_RNA (1)...(19): siRNA sense strand
gcaccaaaaggacaaaaug

SEQ ID NO: 371110 - RNA, 19 nt, Homo sapiens
  misc_RNA (1)...(19): siRNA sense strand
gucuuugacuuacugaaca

SEQ ID NO: 371111 - RNA, 19 nt, Homo sapiens
  misc_RNA (1)...(19): siRNA sense strand
gcucuacaaggaguucaaa

SEQ ID NO: 371112 - RNA, 19 nt, Homo sapiens
  misc_RNA (1)...(19): siRNA sense strand
agcaacaggucucaauucu

SEQ ID NO: 371113 - RNA, 19 nt, Homo sapiens
  misc_RNA (1)...(19): siRNA sense strand
gcacggguggggagucaua

SEQ ID NO: 371114 - RNA, 19 nt, Homo sapiens
  misc_RNA (1)...(19): siRNA sense strand
uaccugugcugaauacacu

SEQ ID NO: 371115 - RNA, 19 nt, Homo sapiens
  misc_RNA (1)...(19): siRNA sense strand
ggaggagauccgcauugau

SEQ ID NO: 371116 - RNA, 19 nt, Homo sapiens
  misc_RNA (1)...(19): siRNA sense strand
uaaggaggagauccgcauu

SEQ ID NO: 371117 - RNA, 19 nt, Homo sapiens
  misc_RNA (1)...(19): siRNA sense strand
gacccgucuuauuaucuga

SEQ ID NO: 371118 - RNA, 19 nt, Homo sapiens
  misc_RNA (1)...(19): siRNA sense strand
ucaaugucucuaacuucua

SEQ ID NO: 371119 - RNA, 19 nt, Homo sapiens
  misc_RNA (1)...(19): siRNA sense strand
ggucccugaucaagcugaa

SEQ ID NO: 371120 - RNA, 19 nt, Homo sapiens
  misc_RNA (1)...(19): siRNA sense strand
gggcuuugacguacugaca

SEQ ID NO: 371121 - RNA, 19 nt, Homo sapiens
  misc_RNA (1)...(19): siRNA sense strand
gaacuacgcuuggaugaua

SEQ ID NO: 371122 - RNA, 19 nt, Homo sapiens
  misc_RNA (1)...(19): siRNA sense strand
gaaggaggaguuuguaaua

SEQ ID NO: 371123 - RNA, 19 nt, Homo sapiens
  misc_RNA (1)...(19): siRNA sense strand
ggacaacucuauccuggaa

SEQ ID NO: 371124 - RNA, 19 nt, Homo sapiens
  misc_RNA (1)...(19): siRNA sense strand
ucaaggaacugugcauaua

SEQ ID NO: 371125 - RNA, 19 nt, Homo sapiens
  misc_RNA (1)...(19): siRNA sense strand
ccaaacagccagauauuaa

SEQ ID NO: 371126 - RNA, 19 nt, Homo sapiens
  misc_RNA (1)...(19): siRNA sense strand
gcaaugaacccaucucgaa

SEQ ID NO: 371127 - RNA, 19 nt, Homo sapiens
  misc_RNA (1)...(19): siRNA sense strand
cuaccaaccucccaaagua

SEQ ID NO: 371128 - RNA, 19 nt, Homo sapiens
  misc_RNA (1)...(19): siRNA sense strand
gaaacuugcucuaccuaug

SEQ ID NO: 371129 - RNA, 19 nt, Homo sapiens
  misc_RNA (1)...(19): siRNA sense strand
gcagaacuguuugauugua

SEQ ID NO: 371130 - RNA, 19 nt, Homo sapiens
  misc_RNA (1)...(19): siRNA sense strand
gaacaaucaugguuuaggu

SEQ ID NO: 371131 - RNA, 19 nt, Homo sapiens
  misc_RNA (1)...(19): siRNA sense strand
ccacaacaguuuagaugaa

SEQ ID NO: 371132 - RNA, 19 nt, Homo sapiens
  misc_RNA (1)...(19): siRNA sense strand
guacgugacugguuacaau

SEQ ID NO: 371133 - RNA, 19 nt, Homo sapiens
  misc_RNA (1)...(19): siRNA sense strand
guugaacaaucaugguuua

SEQ ID NO: 371134 - RNA, 19 nt, Homo sapiens
  misc_RNA (1)...(19): siRNA sense strand
gaacugugcauauagcaaa

SEQ ID NO: 371135 - RNA, 19 nt, Homo sapiens
  misc_RNA (1)...(19): siRNA sense strand
gcacaaaccugaggaagcu

SEQ ID NO: 371136 - RNA, 19 nt, Homo sapiens
  misc_RNA (1)...(19): siRNA sense strand
ucagauaaccacugcaaua

SEQ ID NO: 371137 - RNA, 19 nt, Homo sapiens
  misc_RNA (1)...(19): siRNA sense strand
guaagcaccauucagauaa

SEQ ID NO: 371138 - RNA, 19 nt, Homo sapiens
  misc_RNA (1)...(19): siRNA sense strand
gaagaaaggaugacuaugc

SEQ ID NO: 371139 - RNA, 19 nt, Homo sapiens
  misc_RNA (1)...(19): siRNA sense strand
gcugaaaguagaaagaaua

SEQ ID NO: 371140 - RNA, 19 nt, Homo sapiens
  misc_RNA (1)...(19): siRNA sense strand
gagaagaaaggaugacuau

SEQ ID NO: 371141 - RNA, 19 nt, Homo sapiens
  misc_RNA (1)...(19): siRNA sense strand
aaucgcauauccacuauuu

SEQ ID NO: 371142 - RNA, 19 nt, Homo sapiens
  misc_RNA (1)...(19): siRNA sense strand
ucaaguagcaccucuauca

SEQ ID NO: 371143 - RNA, 19 nt, Homo sapiens
  misc_RNA (1)...(19): siRNA sense strand
gcccaggacuauagaagaa

SEQ ID NO: 371144 - RNA, 19 nt, Homo sapiens
  misc_RNA (1)...(19): siRNA sense strand
guaaucaccuuagcacaau

SEQ ID NO: 371145 - RNA, 19 nt, Homo sapiens
  misc_RNA (1)...(19): siRNA sense strand
cuacaacucucuaccuuca

SEQ ID NO: 371146 - RNA, 19 nt, Homo sapiens
  misc_RNA (1)...(19): siRNA sense strand
gcgaugcggguuucauuua

SEQ ID NO: 371147 - RNA, 19 nt, Homo sapiens
  misc_RNA (1)...(19): siRNA sense strand
cuaauggaaugaaucugua

SEQ ID NO: 371148 - RNA, 19 nt, Homo sapiens
  misc_RNA (1)...(19): siRNA sense strand
ccagcaaccucuaccuauu

SEQ ID NO: 371149 - RNA, 19 nt, Homo sapiens
  misc_RNA (1)...(19): siRNA sense strand
gacaauauaacacaacuga

SEQ ID NO: 371150 - RNA, 19 nt, Homo sapiens
  misc_RNA (1)...(19): siRNA sense strand
caggguaucuuugaugauu

SEQ ID NO: 371151 - RNA, 19 nt, Homo sapiens
  misc_RNA (1)...(19): siRNA sense strand
ugaagucugucaccucuga

SEQ ID NO: 371152 - RNA, 19 nt, Homo sapiens
  misc_RNA (1)...(19): siRNA sense strand
caaggucucacuagucuaa

SEQ ID NO: 371153 - RNA, 19 nt, Homo sapiens
  misc_RNA (1)...(19): siRNA sense strand
ccauugcccuucuugcuuu

SEQ ID NO: 371154 - RNA, 19 nt, Homo sapiens
  misc_RNA (1)...(19): siRNA sense strand
augcagaacuguuugauug

SEQ ID NO: 371155 - RNA, 19 nt, Homo sapiens
  misc_RNA (1)...(19): siRNA sense strand
caaccuaguuaauuugaca

SEQ ID NO: 371156 - RNA, 19 nt, Homo sapiens
  misc_RNA (1)...(19): siRNA sense strand
cagaacuguuugauuguaa

SEQ ID NO: 371157 - RNA, 19 nt, Homo sapiens
  misc_RNA (1)...(19): siRNA sense strand
caagauaaccacaucaauc

SEQ ID NO: 371158 - RNA, 19 nt, Homo sapiens
  misc_RNA (1)...(19): siRNA sense strand
gaauggaucgcucuucuca

SEQ ID NO: 371159 - RNA, 19 nt, Homo sapiens
  misc_RNA (1)...(19): siRNA sense strand
gcaaagggaggagaagaaa

SEQ ID NO: 371160 - RNA, 19 nt, Homo sapiens
  misc_RNA (1)...(19): siRNA sense strand
agacucagcuggcuuaaac

SEQ ID NO: 371161 - RNA, 19 nt, Homo sapiens
  misc_RNA (1)...(19): siRNA sense strand
ggaucgcucuucucaagga

SEQ ID NO: 371162 - RNA, 19 nt, Homo sapiens
  misc_RNA (1)...(19): siRNA sense strand
gagccugauucacccuaua

SEQ ID NO: 371163 - RNA, 19 nt, Homo sapiens
  misc_RNA (1)...(19): siRNA sense strand
gcauuuggaucuauaacag

SEQ ID NO: 371164 - RNA, 19 nt, Homo sapiens
  misc_RNA (1)...(19): siRNA sense strand
ggaacgcagugaguacuug

SEQ ID NO: 371165 - RNA, 19 nt, Homo sapiens
  misc_RNA (1)...(19): siRNA sense strand
gaguuacauuugcaagaaa

SEQ ID NO: 371166 - RNA, 19 nt, Homo sapiens
  misc_RNA (1)...(19): siRNA sense strand
ggagaagaaaggaugacua

SEQ ID NO: 371167 - RNA, 19 nt, Homo sapiens
  misc_RNA (1)...(19): siRNA sense strand
agagaaagaaccuuacaaa

SEQ ID NO: 371168 - RNA, 19 nt, Homo sapiens
  misc_RNA (1)...(19): siRNA sense strand
gaccaaacagccagauauu

SEQ ID NO: 371169 - RNA, 19 nt, Homo sapiens
  misc_RNA (1)...(19): siRNA sense strand
caauuacugugaagucugu

SEQ ID NO: 371170 - RNA, 19 nt, Homo sapiens
  misc_RNA (1)...(19): siRNA sense strand
gaaaucagggaaacuucuu

SEQ ID NO: 371171 - RNA, 19 nt, Homo sapiens
  misc_RNA (1)...(19): siRNA sense strand
ugauucacccuauaaagua

SEQ ID NO: 371172 - RNA, 19 nt, Homo sapiens
  misc_RNA (1)...(19): siRNA sense strand
aaauugggcuguuccuuca

SEQ ID NO: 371173 - RNA, 19 nt, Homo sapiens
  misc_RNA (1)...(19): siRNA sense strand
gcacuaagaaggacaacuc

SEQ ID NO: 371174 - RNA, 19 nt, Homo sapiens
  misc_RNA (1)...(19): siRNA sense strand
cagcaaccucuaccuauuu

SEQ ID NO: 371175 - RNA, 19 nt, Homo sapiens
  misc_RNA (1)...(19): siRNA sense strand
uaaggacagugggauugua

SEQ ID NO: 371176 - RNA, 19 nt, Homo sapiens
  misc_RNA (1)...(19): siRNA sense strand
cuucagaacaaccaaauaa

SEQ ID NO: 371177 - RNA, 19 nt, Homo sapiens
  misc_RNA (1)...(19): siRNA sense strand
agaguuacauuugcaagaa

SEQ ID NO: 371178 - RNA, 19 nt, Homo sapiens
  misc_RNA (1)...(19): siRNA sense strand
ggguaucuuugaugauuug

SEQ ID NO: 371179 - RNA, 19 nt, Homo sapiens
  misc_RNA (1)...(19): siRNA sense strand
gcuaaauccuguccaucug

SEQ ID NO: 371180 - RNA, 19 nt, Homo sapiens
  misc_RNA (1)...(19): siRNA sense strand
gauucacccuauaaaguau

SEQ ID NO: 371181 - RNA, 19 nt, Homo sapiens
  misc_RNA (1)...(19): siRNA sense strand
cauauccacuauuucauca

SEQ ID NO: 371182 - RNA, 19 nt, Homo sapiens
  misc_RNA (1)...(19): siRNA sense strand
cuacagagacagugguauu

SEQ ID NO: 371183 - RNA, 19 nt, Homo sapiens
  misc_RNA (1)...(19): siRNA sense strand
cauauuuccuccuaaugga

SEQ ID NO: 371184 - RNA, 19 nt, Homo sapiens
  misc_RNA (1)...(19): siRNA sense strand
cuaagaaggacaacucuau

SEQ ID NO: 371185 - RNA, 19 nt, Homo sapiens
  misc_RNA (1)...(19): siRNA sense strand
ccauucauaucucuuggaa

SEQ ID NO: 371186 - RNA, 19 nt, Homo sapiens
  misc_RNA (1)...(19): siRNA sense strand
ugguuuaggugacaaaguu

SEQ ID NO: 371187 - RNA, 19 nt, Homo sapiens
  misc_RNA (1)...(19): siRNA sense strand
ucauaucucuuggaaacuu

SEQ ID NO: 371188 - RNA, 19 nt, Homo sapiens
  misc_RNA (1)...(19): siRNA sense strand
uguaagcaccauucagaua

SEQ ID NO: 371189 - RNA, 19 nt, Homo sapiens
  misc_RNA (1)...(19): siRNA sense strand
ggauggcuauuaaggaucu

SEQ ID NO: 371190 - RNA, 19 nt, Homo sapiens
  misc_RNA (1)...(19): siRNA sense strand
gcaccucuaucaguuaugg

SEQ ID NO: 371191 - RNA, 19 nt, Homo sapiens
  misc_RNA (1)...(19): siRNA sense strand
uagaugaauuuccuaccaa

SEQ ID NO: 371192 - RNA, 19 nt, Homo sapiens
  misc_RNA (1)...(19): siRNA sense strand
uaucaguuauggcuaaauc

SEQ ID NO: 371193 - RNA, 19 nt, Homo sapiens
  misc_RNA (1)...(19): siRNA sense strand
aaacuugcucuaccuauga

SEQ ID NO: 371194 - RNA, 19 nt, Homo sapiens
  misc_RNA (1)...(19): siRNA sense strand
ugucaccucugauaccauu

SEQ ID NO: 371195 - RNA, 19 nt, Homo sapiens
  misc_RNA (1)...(19): siRNA sense strand
aaugaucgcuuucugacau

SEQ ID NO: 371196 - RNA, 19 nt, Homo sapiens
  misc_RNA (1)...(19): siRNA sense strand
acauuuagaugacaacucu

SEQ ID NO: 371197 - RNA, 19 nt, Homo sapiens
  misc_RNA (1)...(19): siRNA sense strand
uggaaugaaucuguacaaa

SEQ ID NO: 371198 - RNA, 19 nt, Homo sapiens
  misc_RNA (1)...(19): siRNA sense strand
aagaaaggaugacuaugca

SEQ ID NO: 371199 - RNA, 19 nt, Homo sapiens
  misc_RNA (1)...(19): siRNA sense strand
caacgugcgugggcucaug

SEQ ID NO: 371200 - RNA, 19 nt, Homo sapiens
  misc_RNA (1)...(19): siRNA sense strand
caacugauucuucgcaaca

SEQ ID NO: 371201 - RNA, 19 nt, Homo sapiens
  misc_RNA (1)...(19): siRNA sense strand
guagcaccucuaucaguua

SEQ ID NO: 371202 - RNA, 19 nt, Homo sapiens
  misc_RNA (1)...(19): siRNA sense strand
gcauauccacuauuucauc

SEQ ID NO: 371203 - RNA, 19 nt, Homo sapiens
  misc_RNA (1)...(19): siRNA sense strand
uagaagaacuacgcuugga

SEQ ID NO: 371204 - RNA, 19 nt, Homo sapiens
  misc_RNA (1)...(19): siRNA sense strand
gggauuccuucagauuuga

SEQ ID NO: 371205 - RNA, 19 nt, Homo sapiens
  misc_RNA (1)...(19): siRNA sense strand
caccauauuuccuccuaau

SEQ ID NO: 371206 - RNA, 19 nt, Homo sapiens
  misc_RNA (1)...(19): siRNA sense strand
uagcaccucuaucaguuau

SEQ ID NO: 371207 - RNA, 19 nt, Homo sapiens
  misc_RNA (1)...(19): siRNA sense strand
gcagcucuaucgacuggau

SEQ ID NO: 371208 - RNA, 19 nt, Homo sapiens
  misc_RNA (1)...(19): siRNA sense strand
gcaagaaaauaacauaagg

SEQ ID NO: 371209 - RNA, 19 nt, Homo sapiens
  misc_RNA (1)...(19): siRNA sense strand
ugggauuccuucagauuug

SEQ ID NO: 371210 - RNA, 19 nt, Homo sapiens
  misc_RNA (1)...(19): siRNA sense strand
ucagaucacucacacucau

SEQ ID NO: 371211 - RNA, 19 nt, Homo sapiens
  misc_RNA (1)...(19): siRNA sense strand
ggaaugaaucuguacaaaa

SEQ ID NO: 371212 - RNA, 19 nt, Homo sapiens
  misc_RNA (1)...(19): siRNA sense strand
cgaaggaggaguuuguaau

SEQ ID NO: 371213 - RNA, 19 nt, Homo sapiens
  misc_RNA (1)...(19): siRNA sense strand
gcagaagcuggcacuaaga

SEQ ID NO: 371214 - RNA, 19 nt, Homo sapiens
  misc_RNA (1)...(19): siRNA sense strand
aguagcaccucuaucaguu

SEQ ID NO: 371215 - RNA, 19 nt, Homo sapiens
  misc_RNA (1)...(19): siRNA sense strand
guucgugggauggcuauua

SEQ ID NO: 371216 - RNA, 19 nt, Homo sapiens
  misc_RNA (1)...(19): siRNA sense strand
gagggagcauuccgagaca

SEQ ID NO: 371217 - RNA, 19 nt, Homo sapiens
  misc_RNA (1)...(19): siRNA sense strand
ccucugauaccauucauau

SEQ ID NO: 371218 - RNA, 19 nt, Homo sapiens
  misc_RNA (1)...(19): siRNA sense strand
acaacucucuaccuucaga

SEQ ID NO: 371219 - RNA, 19 nt, Homo sapiens
  misc_RNA (1)...(19): siRNA sense strand
caaucgagagcaagagaaa

SEQ ID NO: 371220 - RNA, 19 nt, Homo sapiens
  misc_RNA (1)...(19): siRNA sense strand
ggaaacuugcucuaccuau

SEQ ID NO: 371221 - RNA, 19 nt, Homo sapiens
  misc_RNA (1)...(19): siRNA sense strand
gaacuacgcuuggaugaua

SEQ ID NO: 371222 - RNA, 19 nt, Homo sapiens
  misc_RNA (1)...(19): siRNA sense strand
gaaggaggaguuuguaaua

SEQ ID NO: 371223 - RNA, 19 nt, Homo sapiens
  misc_RNA (1)...(19): siRNA sense strand
ggacaacucuauccuggaa

SEQ ID NO: 371224 - RNA, 19 nt, Homo sapiens
  misc_RNA (1)...(19): siRNA sense strand
ucaaggaacugugcauaua

SEQ ID NO: 371225 - RNA, 19 nt, Homo sapiens
  misc_RNA (1)...(19): siRNA sense strand
ccaaacagccagauauuaa

SEQ ID NO: 371226 - RNA, 19 nt, Homo sapiens
  misc_RNA (1)...(19): siRNA sense strand
gcaaugaacccaucucgaa

SEQ ID NO: 371227 - RNA, 19 nt, Homo sapiens
  misc_RNA (1)...(19): siRNA sense strand
cuaccaaccucccaaagua

SEQ ID NO: 371228 - RNA, 19 nt, Homo sapiens
  misc_RNA (1)...(19): siRNA sense strand
gaaacuugcucuaccuaug

SEQ ID NO: 371229 - RNA, 19 nt, Homo sapiens
  misc_RNA (1)...(19): siRNA sense strand
gcagaacuguuugauugua

SEQ ID NO: 371230 - RNA, 19 nt, Homo sapiens
  misc_RNA (1)...(19): siRNA sense strand
gaacaaucaugguuuaggu

SEQ ID NO: 371231 - RNA, 19 nt, Homo sapiens
  misc_RNA (1)...(19): siRNA sense strand
ccacaacaguuuagaugaa

SEQ ID NO: 371232 - RNA, 19 nt, Homo sapiens
  misc_RNA (1)...(19): siRNA sense strand
guacgugacugguuacaau

SEQ ID NO: 371233 - RNA, 19 nt, Homo sapiens
  misc_RNA (1)...(19): siRNA sense strand
guugaacaaucaugguuua

SEQ ID NO: 371234 - RNA, 19 nt, Homo sapiens
  misc_RNA (1)...(19): siRNA sense strand
gaacugugcauauagcaaa

SEQ ID NO: 371235 - RNA, 19 nt, Homo sapiens
  misc_RNA (1)...(19): siRNA sense strand
gcacaaaccugaggaagcu

SEQ ID NO: 371236 - RNA, 19 nt, Homo sapiens
  misc_RNA (1)...(19): siRNA sense strand
ucagauaaccacugcaaua

SEQ ID NO: 371237 - RNA, 19 nt, Homo sapiens
  misc_RNA (1)...(19): siRNA sense strand
guaagcaccauucagauaa

SEQ ID NO: 371238 - RNA, 19 nt, Homo sapiens
  misc_RNA (1)...(19): siRNA sense strand
gaagaaaggaugacuaugc

SEQ ID NO: 371239 - RNA, 19 nt, Homo sapiens
  misc_RNA (1)...(19): siRNA sense strand
gcugaaaguagaaagaaua

SEQ ID NO: 371240 - RNA, 19 nt, Homo sapiens
  misc_RNA (1)...(19): siRNA sense strand
gagaagaaaggaugacuau

SEQ ID NO: 371241 - RNA, 19 nt, Homo sapiens
  misc_RNA (1)...(19): siRNA sense strand
aaucgcauauccacuauuu

SEQ ID NO: 371242 - RNA, 19 nt, Homo sapiens
  misc_RNA (1)...(19): siRNA sense strand
ucaaguagcaccucuauca

SEQ ID NO: 371243 - RNA, 19 nt, Homo sapiens
  misc_RNA (1)...(19): siRNA sense strand
gcccaggacuauagaagaa

SEQ ID NO: 371244 - RNA, 19 nt, Homo sapiens
  misc_RNA (1)...(19): siRNA sense strand
guaaucaccuuagcacaau

SEQ ID NO: 371245 - RNA, 19 nt, Homo sapiens
  misc_RNA (1)...(19): siRNA sense strand
cuacaacucucuaccuuca

SEQ ID NO: 371246 - RNA, 19 nt, Homo sapiens
  misc_RNA (1)...(19): siRNA sense strand
gcgaugcggguuucauuua

SEQ ID NO: 371247 - RNA, 19 nt, Homo sapiens
  misc_RNA (1)...(19): siRNA sense strand
cuaauggaaugaaucugua

SEQ ID NO: 371248 - RNA, 19 nt, Homo sapiens
  misc_RNA (1)...(19): siRNA sense strand
ccagcaaccucuaccuauu

SEQ ID NO: 371249 - RNA, 19 nt, Homo sapiens
  misc_RNA (1)...(19): siRNA sense strand
gacaauauaacacaacuga

SEQ ID NO: 371250 - RNA, 19 nt, Homo sapiens
  misc_RNA (1)...(19): siRNA sense strand
caggguaucuuugaugauu

SEQ ID NO: 371251 - RNA, 19 nt, Homo sapiens
  misc_RNA (1)...(19): siRNA sense strand
ugaagucugucaccucuga

SEQ ID NO: 371252 - RNA, 19 nt, Homo sapiens
  misc_RNA (1)...(19): siRNA sense strand
caaggucucacuagucuaa

SEQ ID NO: 371253 - RNA, 19 nt, Homo sapiens
  misc_RNA (1)...(19): siRNA sense strand
ccauugcccuucuugcuuu

SEQ ID NO: 371254 - RNA, 19 nt, Homo sapiens
  misc_RNA (1)...(19): siRNA sense strand
augcagaacuguuugauug

SEQ ID NO: 371255 - RNA, 19 nt, Homo sapiens
  misc_RNA (1)...(19): siRNA sense strand
caaccuaguuaauuugaca

SEQ ID NO: 371256 - RNA, 19 nt, Homo sapiens
  misc_RNA (1)...(19): siRNA sense strand
cagaacuguuugauuguaa

SEQ ID NO: 371257 - RNA, 19 nt, Homo sapiens
  misc_RNA (1)...(19): siRNA sense strand
caagauaaccacaucaauc

SEQ ID NO: 371258 - RNA, 19 nt, Homo sapiens
  misc_RNA (1)...(19): siRNA sense strand
gaauggaucgcucuucuca

SEQ ID NO: 371259 - RNA, 19 nt, Homo sapiens
  misc_RNA (1)...(19): siRNA sense strand
gcaaagggaggagaagaaa

SEQ ID NO: 371260 - RNA, 19 nt, Homo sapiens
  misc_RNA (1)...(19): siRNA sense strand
agacucagcuggcuuaaac

SEQ ID NO: 371261 - RNA, 19 nt, Homo sapiens
  misc_RNA (1)...(19): siRNA sense strand
ggaucgcucuucucaagga

SEQ ID NO: 371262 - RNA, 19 nt, Homo sapiens
  misc_RNA (1)...(19): siRNA sense strand
gagccugauucacccuaua

SEQ ID NO: 371263 - RNA, 19 nt, Homo sapiens
  misc_RNA (1)...(19): siRNA sense strand
gcauuuggaucuauaacag

SEQ ID NO: 371264 - RNA, 19 nt, Homo sapiens
  misc_RNA (1)...(19): siRNA sense strand
ggaacgcagugaguacuug

SEQ ID NO: 371265 - RNA, 19 nt, Homo sapiens
  misc_RNA (1)...(19): siRNA sense strand
gaguuacauuugcaagaaa

SEQ ID NO: 371266 - RNA, 19 nt, Homo sapiens
  misc_RNA (1)...(19): siRNA sense strand
ggagaagaaaggaugacua

SEQ ID NO: 371267 - RNA, 19 nt, Homo sapiens
  misc_RNA (1)...(19): siRNA sense strand
agagaaagaaccuuacaaa

SEQ ID NO: 371268 - RNA, 19 nt, Homo sapiens
  misc_RNA (1)...(19): siRNA sense strand
gaccaaacagccagauauu

SEQ ID NO: 371269 - RNA, 19 nt, Homo sapiens
  misc_RNA (1)...(19): siRNA sense strand
caauuacugugaagucugu

SEQ ID NO: 371270 - RNA, 19 nt, Homo sapiens
  misc_RNA (1)...(19): siRNA sense strand
gaaaucagggaaacuucuu

SEQ ID NO: 371271 - RNA, 19 nt, Homo sapiens
  misc_RNA (1)...(19): siRNA sense strand
ugauucacccuauaaagua

SEQ ID NO: 371272 - RNA, 19 nt, Homo sapiens
  misc_RNA (1)...(19): siRNA sense strand
aaauugggcuguuccuuca

SEQ ID NO: 371273 - RNA, 19 nt, Homo sapiens
  misc_RNA (1)...(19): siRNA sense strand
gcacuaagaaggacaacuc

SEQ ID NO: 371274 - RNA, 19 nt, Homo sapiens
  misc_RNA (1)...(19): siRNA sense strand
cagcaaccucuaccuauuu

SEQ ID NO: 371275 - RNA, 19 nt, Homo sapiens
  misc_RNA (1)...(19): siRNA sense strand
uaaggacagugggauugua

SEQ ID NO: 371276 - RNA, 19 nt, Homo sapiens
  misc_RNA (1)...(19): siRNA sense strand
cuucagaacaaccaaauaa

SEQ ID NO: 371277 - RNA, 19 nt, Homo sapiens
  misc_RNA (1)...(19): siRNA sense strand
agaguuacauuugcaagaa

SEQ ID NO: 371278 - RNA, 19 nt, Homo sapiens
  misc_RNA (1)...(19): siRNA sense strand
ggguaucuuugaugauuug

SEQ ID NO: 371279 - RNA, 19 nt, Homo sapiens
  misc_RNA (1)...(19): siRNA sense strand
gcuaaauccuguccaucug

SEQ ID NO: 371280 - RNA, 19 nt, Homo sapiens
  misc_RNA (1)...(19): siRNA sense strand
gauucacccuauaaaguau

SEQ ID NO: 371281 - RNA, 19 nt, Homo sapiens
  misc_RNA (1)...(19): siRNA sense strand
cauauccacuauuucauca

SEQ ID NO: 371282 - RNA, 19 nt, Homo sapiens
  misc_RNA (1)...(19): siRNA sense strand
cuacagagacagugguauu

SEQ ID NO: 371283 - RNA, 19 nt, Homo sapiens
  misc_RNA (1)...(19): siRNA sense strand
cauauuuccuccuaaugga

SEQ ID NO: 371284 - RNA, 19 nt, Homo sapiens
  misc_RNA (1)...(19): siRNA sense strand
cuaagaaggacaacucuau

SEQ ID NO: 371285 - RNA, 19 nt, Homo sapiens
  misc_RNA (1)...(19): siRNA sense strand
ccauucauaucucuuggaa

SEQ ID NO: 371286 - RNA, 19 nt, Homo sapiens
  misc_RNA (1)...(19): siRNA sense strand
ugguuuaggugacaaaguu

SEQ ID NO: 371287 - RNA, 19 nt, Homo sapiens
  misc_RNA (1)...(19): siRNA sense strand
ucauaucucuuggaaacuu

SEQ ID NO: 371288 - RNA, 19 nt, Homo sapiens
  misc_RNA (1)...(19): siRNA sense strand
uguaagcaccauucagaua

SEQ ID NO: 371289 - RNA, 19 nt, Homo sapiens
  misc_RNA (1)...(19): siRNA sense strand
ggauggcuauuaaggaucu

SEQ ID NO: 371290 - RNA, 19 nt, Homo sapiens
  misc_RNA (1)...(19): siRNA sense strand
gcaccucuaucaguuaugg

SEQ ID NO: 371291 - RNA, 19 nt, Homo sapiens
  misc_RNA (1)...(19): siRNA sense strand
uagaugaauuuccuaccaa

SEQ ID NO: 371292 - RNA, 19 nt, Homo sapiens
  misc_RNA (1)...(19): siRNA sense strand
uaucaguuauggcuaaauc

SEQ ID NO: 371293 - RNA, 19 nt, Homo sapiens
  misc_RNA (1)...(19): siRNA sense strand
aaacuugcucuaccuauga

SEQ ID NO: 371294 - RNA, 19 nt, Homo sapiens
  misc_RNA (1)...(19): siRNA sense strand
ugucaccucugauaccauu

SEQ ID NO: 371295 - RNA, 19 nt, Homo sapiens
  misc_RNA (1)...(19): siRNA sense strand
aaugaucgcuuucugacau

SEQ ID NO: 371296 - RNA, 19 nt, Homo sapiens
  misc_RNA (1)...(19): siRNA sense strand
acauuuagaugacaacucu

SEQ ID NO: 371297 - RNA, 19 nt, Homo sapiens
  misc_RNA (1)...(19): siRNA sense strand
uggaaugaaucuguacaaa

SEQ ID NO: 371298 - RNA, 19 nt, Homo sapiens
  misc_RNA (1)...(19): siRNA sense strand
aagaaaggaugacuaugca

SEQ ID NO: 371299 - RNA, 19 nt, Homo sapiens
  misc_RNA (1)...(19): siRNA sense strand
caacgugcgugggcucaug

SEQ ID NO: 371300 - RNA, 19 nt, Homo sapiens
  misc_RNA (1)...(19): siRNA sense strand
caacugauucuucgcaaca

SEQ ID NO: 371301 - RNA, 19 nt, Homo sapiens
  misc_RNA (1)...(19): siRNA sense strand
guagcaccucuaucaguua

SEQ ID NO: 371302 - RNA, 19 nt, Homo sapiens
  misc_RNA (1)...(19): siRNA sense strand
gcauauccacuauuucauc

SEQ ID NO: 371303 - RNA, 19 nt, Homo sapiens
  misc_RNA (1)...(19): siRNA sense strand
uagaagaacuacgcuugga

SEQ ID NO: 371304 - RNA, 19 nt, Homo sapiens
  misc_RNA (1)...(19): siRNA sense strand
gggauuccuucagauuuga

SEQ ID NO: 371305 - RNA, 19 nt, Homo sapiens
  misc_RNA (1)...(19): siRNA sense strand
caccauauuuccuccuaau

SEQ ID NO: 371306 - RNA, 19 nt, Homo sapiens
  misc_RNA (1)...(19): siRNA sense strand
uagcaccucuaucaguuau

SEQ ID NO: 371307 - RNA, 19 nt, Homo sapiens
  misc_RNA (1)...(19): siRNA sense strand
gcagcucuaucgacuggau

SEQ ID NO: 371308 - RNA, 19 nt, Homo sapiens
  misc_RNA (1)...(19): siRNA sense strand
gcaagaaaauaacauaagg

SEQ ID NO: 371309 - RNA, 19 nt, Homo sapiens
  misc_RNA (1)...(19): siRNA sense strand
ugggauuccuucagauuug

SEQ ID NO: 371310 - RNA, 19 nt, Homo sapiens
  misc_RNA (1)...(19): siRNA sense strand
ucagaucacucacacucau

SEQ ID NO: 371311 - RNA, 19 nt, Homo sapiens
  misc_RNA (1)...(19): siRNA sense strand
ggaaugaaucuguacaaaa

SEQ ID NO: 371312 - RNA, 19 nt, Homo sapiens
  misc_RNA (1)...(19): siRNA sense strand
cgaaggaggaguuuguaau

SEQ ID NO: 371313 - RNA, 19 nt, Homo sapiens
  misc_RNA (1)...(19): siRNA sense strand
gcagaagcuggcacuaaga

SEQ ID NO: 371314 - RNA, 19 nt, Homo sapiens
  misc_RNA (1)...(19): siRNA sense strand
aguagcaccucuaucaguu

SEQ ID NO: 371315 - RNA, 19 nt, Homo sapiens
  misc_RNA (1)...(19): siRNA sense strand
guucgugggauggcuauua

SEQ ID NO: 371316 - RNA, 19 nt, Homo sapiens
  misc_RNA (1)...(19): siRNA sense strand
gagggagcauuccgagaca

SEQ ID NO: 371317 - RNA, 19 nt, Homo sapiens
  misc_RNA (1)...(19): siRNA sense strand
ccucugauaccauucauau

SEQ ID NO: 371318 - RNA, 19 nt, Homo sapiens
  misc_RNA (1)...(19): siRNA sense strand
acaacucucuaccuucaga

SEQ ID NO: 371319 - RNA, 19 nt, Homo sapiens
  misc_RNA (1)...(19): siRNA sense strand
caaucgagagcaagagaaa

SEQ ID NO: 371320 - RNA, 19 nt, Homo sapiens
  misc_RNA (1)...(19): siRNA sense strand
ggaaacuugcucuaccuau

SEQ ID NO: 371321 - RNA, 19 nt, Homo sapiens
  misc_RNA (1)...(19): siRNA sense strand
cagaauggcucaaauauau

SEQ ID NO: 371322 - RNA, 19 nt, Homo sapiens
  misc_RNA (1)...(19): siRNA sense strand
gcaaccaacuggacgaauu

SEQ ID NO: 371323 - RNA, 19 nt, Homo sapiens
  misc_RNA (1)...(19): siRNA sense strand
ucaccaagcucaaggaauu

SEQ ID NO: 371324 - RNA, 19 nt, Homo sapiens
  misc_RNA (1)...(19): siRNA sense strand
cagaucgucuccuuaaaua

SEQ ID NO: 371325 - RNA, 19 nt, Homo sapiens
  misc_RNA (1)...(19): siRNA sense strand
ggaacuuugucuacuguaa

SEQ ID NO: 371326 - RNA, 19 nt, Homo sapiens
  misc_RNA (1)...(19): siRNA sense strand
ucaaauauaucccuucauc

SEQ ID NO: 371327 - RNA, 19 nt, Homo sapiens
  misc_RNA (1)...(19): siRNA sense strand
gaaaaugggccacaguuua

SEQ ID NO: 371328 - RNA, 19 nt, Homo sapiens
  misc_RNA (1)...(19): siRNA sense strand
ccaugaaccuucccaagaa

SEQ ID NO: 371329 - RNA, 19 nt, Homo sapiens
  misc_RNA (1)...(19): siRNA sense strand
gaacggauccagcucucua

SEQ ID NO: 371330 - RNA, 19 nt, Homo sapiens
  misc_RNA (1)...(19): siRNA sense strand
uuaaaugggucacagaaug

SEQ ID NO: 371331 - RNA, 19 nt, Homo sapiens
  misc_RNA (1)...(19): siRNA sense strand
ucacagaauggcucaaaua

SEQ ID NO: 371332 - RNA, 19 nt, Homo sapiens
  misc_RNA (1)...(19): siRNA sense strand
gcucaaauauaucccuuca

SEQ ID NO: 371333 - RNA, 19 nt, Homo sapiens
  misc_RNA (1)...(19): siRNA sense strand
ugucagaguucuccauuug

SEQ ID NO: 371334 - RNA, 19 nt, Homo sapiens
  misc_RNA (1)...(19): siRNA sense strand
gcggaaagaugauuauugc

SEQ ID NO: 371335 - RNA, 19 nt, Homo sapiens
  misc_RNA (1)...(19): siRNA sense strand
cgacauggccuuccagaau

SEQ ID NO: 371336 - RNA, 19 nt, Homo sapiens
  misc_RNA (1)...(19): siRNA sense strand
ugacugggauggcagagaa

SEQ ID NO: 371337 - RNA, 19 nt, Homo sapiens
  misc_RNA (1)...(19): siRNA sense strand
gaacaacggcagcaacaca

SEQ ID NO: 371338 - RNA, 19 nt, Homo sapiens
  misc_RNA (1)...(19): siRNA sense strand
ccaccuaucggauuuguuu

SEQ ID NO: 371339 - RNA, 19 nt, Homo sapiens
  misc_RNA (1)...(19): siRNA sense strand
gucagggaauuaaauauga

SEQ ID NO: 371340 - RNA, 19 nt, Homo sapiens
  misc_RNA (1)...(19): siRNA sense strand
gaugacaacuccauaucca

SEQ ID NO: 371341 - RNA, 19 nt, Homo sapiens
  misc_RNA (1)...(19): siRNA sense strand
gacauggccuuccagaauc

SEQ ID NO: 371342 - RNA, 19 nt, Homo sapiens
  misc_RNA (1)...(19): siRNA sense strand
aaauaacgaucaacuccuu

SEQ ID NO: 371343 - RNA, 19 nt, Homo sapiens
  misc_RNA (1)...(19): siRNA sense strand
gcacacggucuaccuguau

SEQ ID NO: 371344 - RNA, 19 nt, Homo sapiens
  misc_RNA (1)...(19): siRNA sense strand
agucuuggcuuaucauuuc

SEQ ID NO: 371345 - RNA, 19 nt, Homo sapiens
  misc_RNA (1)...(19): siRNA sense strand
aaaucgaauugcugucaua

SEQ ID NO: 371346 - RNA, 19 nt, Homo sapiens
  misc_RNA (1)...(19): siRNA sense strand
ccacaacaaccaaauuaau

SEQ ID NO: 371347 - RNA, 19 nt, Homo sapiens
  misc_RNA (1)...(19): siRNA sense strand
caacaccugagccugguua

SEQ ID NO: 371348 - RNA, 19 nt, Homo sapiens
  misc_RNA (1)...(19): siRNA sense strand
gagcuuggagcgucuuauu

SEQ ID NO: 371349 - RNA, 19 nt, Homo sapiens
  misc_RNA (1)...(19): siRNA sense strand
guagaagacaccauuuguu

SEQ ID NO: 371350 - RNA, 19 nt, Homo sapiens
  misc_RNA (1)...(19): siRNA sense strand
gugccaagguccugaacaa

SEQ ID NO: 371351 - RNA, 19 nt, Homo sapiens
  misc_RNA (1)...(19): siRNA sense strand
ggaaccuccugaccaacaa

SEQ ID NO: 371352 - RNA, 19 nt, Homo sapiens
  misc_RNA (1)...(19): siRNA sense strand
gaacuuugucuacuguaau

SEQ ID NO: 371353 - RNA, 19 nt, Homo sapiens
  misc_RNA (1)...(19): siRNA sense strand
acagaauggcucaaauaua

SEQ ID NO: 371354 - RNA, 19 nt, Homo sapiens
  misc_RNA (1)...(19): siRNA sense strand
gauaaaccacauuccuuug

SEQ ID NO: 371355 - RNA, 19 nt, Homo sapiens
  misc_RNA (1)...(19): siRNA sense strand
gagcugagaguggaugaaa

SEQ ID NO: 371356 - RNA, 19 nt, Homo sapiens
  misc_RNA (1)...(19): siRNA sense strand
cuauuagccucaaauuguu

SEQ ID NO: 371357 - RNA, 19 nt, Homo sapiens
  misc_RNA (1)...(19): siRNA sense strand
ugacagccuucucaaaucu

SEQ ID NO: 371358 - RNA, 19 nt, Homo sapiens
  misc_RNA (1)...(19): siRNA sense strand
ccaagguccugaacaaguc

SEQ ID NO: 371359 - RNA, 19 nt, Homo sapiens
  misc_RNA (1)...(19): siRNA sense strand
uagaagacaccauuuguuc

SEQ ID NO: 371360 - RNA, 19 nt, Homo sapiens
  misc_RNA (1)...(19): siRNA sense strand
agauaaaccacauuccuuu

SEQ ID NO: 371361 - RNA, 19 nt, Homo sapiens
  misc_RNA (1)...(19): siRNA sense strand
ucagacugcagcccauuua

SEQ ID NO: 371362 - RNA, 19 nt, Homo sapiens
  misc_RNA (1)...(19): siRNA sense strand
gguagaagacaccauuugu

SEQ ID NO: 371363 - RNA, 19 nt, Homo sapiens
  misc_RNA (1)...(19): siRNA sense strand
ugacugcaguauuaaaugg

SEQ ID NO: 371364 - RNA, 19 nt, Homo sapiens
  misc_RNA (1)...(19): siRNA sense strand
caucugaucaggcucuauu

SEQ ID NO: 371365 - RNA, 19 nt, Homo sapiens
  misc_RNA (1)...(19): siRNA sense strand
gaucgucuccuuaaauaac

SEQ ID NO: 371366 - RNA, 19 nt, Homo sapiens
  misc_RNA (1)...(19): siRNA sense strand
uuccugaagucuuggcuua

SEQ ID NO: 371367 - RNA, 19 nt, Homo sapiens
  misc_RNA (1)...(19): siRNA sense strand
gaagacaccauuuguucag

SEQ ID NO: 371368 - RNA, 19 nt, Homo sapiens
  misc_RNA (1)...(19): siRNA sense strand
uggaacggcuggauauauc

SEQ ID NO: 371369 - RNA, 19 nt, Homo sapiens
  misc_RNA (1)...(19): siRNA sense strand
gggcguaaccguacucuac

SEQ ID NO: 371370 - RNA, 19 nt, Homo sapiens
  misc_RNA (1)...(19): siRNA sense strand
acccaugccuccuaucuga

SEQ ID NO: 371371 - RNA, 19 nt, Homo sapiens
  misc_RNA (1)...(19): siRNA sense strand
ggauggccgucagggaauu

SEQ ID NO: 371372 - RNA, 19 nt, Homo sapiens
  misc_RNA (1)...(19): siRNA sense strand
ucagaucgucuccuuaaau

SEQ ID NO: 371373 - RNA, 19 nt, Homo sapiens
  misc_RNA (1)...(19): siRNA sense strand
agaaucaccugagcagugu

SEQ ID NO: 371374 - RNA, 19 nt, Homo sapiens
  misc_RNA (1)...(19): siRNA sense strand
gagaugacagaaaccaguu

SEQ ID NO: 371375 - RNA, 19 nt, Homo sapiens
  misc_RNA (1)...(19): siRNA sense strand
cagauaaaccacauuccuu

SEQ ID NO: 371376 - RNA, 19 nt, Homo sapiens
  misc_RNA (1)...(19): siRNA sense strand
caggaacuuugucuacugu

SEQ ID NO: 371377 - RNA, 19 nt, Homo sapiens
  misc_RNA (1)...(19): siRNA sense strand
caugaaccuucccaagaau

SEQ ID NO: 371378 - RNA, 19 nt, Homo sapiens
  misc_RNA (1)...(19): siRNA sense strand
caacuccuaccacaucgaa

SEQ ID NO: 371379 - RNA, 19 nt, Homo sapiens
  misc_RNA (1)...(19): siRNA sense strand
ucagaguucuccauuugca

SEQ ID NO: 371380 - RNA, 19 nt, Homo sapiens
  misc_RNA (1)...(19): siRNA sense strand
uccagaaucucacgagcuu

SEQ ID NO: 371381 - RNA, 19 nt, Homo sapiens
  misc_RNA (1)...(19): siRNA sense strand
ccaacaacaugcgauacug

SEQ ID NO: 371382 - RNA, 19 nt, Homo sapiens
  misc_RNA (1)...(19): siRNA sense strand
uuucagaucgucuccuuaa

SEQ ID NO: 371383 - RNA, 19 nt, Homo sapiens
  misc_RNA (1)...(19): siRNA sense strand
gcaccaagaaggacaacuc

SEQ ID NO: 371384 - RNA, 19 nt, Homo sapiens
  misc_RNA (1)...(19): siRNA sense strand
ggucacagaauggcucaaa

SEQ ID NO: 371385 - RNA, 19 nt, Homo sapiens
  misc_RNA (1)...(19): siRNA sense strand
caaccaacuggacgaauuc

SEQ ID NO: 371386 - RNA, 19 nt, Homo sapiens
  misc_RNA (1)...(19): siRNA sense strand
gugauggcauacaaacuca

SEQ ID NO: 371387 - RNA, 19 nt, Homo sapiens
  misc_RNA (1)...(19): siRNA sense strand
ucagcuggcucucucucuu

SEQ ID NO: 371388 - RNA, 19 nt, Homo sapiens
  misc_RNA (1)...(19): siRNA sense strand
gaagucuuggcuuaucauu

SEQ ID NO: 371389 - RNA, 19 nt, Homo sapiens
  misc_RNA (1)...(19): siRNA sense strand
cacagaauggcucaaauau

SEQ ID NO: 371390 - RNA, 19 nt, Homo sapiens
  misc_RNA (1)...(19): siRNA sense strand
gcuuggagcgucuuauugu

SEQ ID NO: 371391 - RNA, 19 nt, Homo sapiens
  misc_RNA (1)...(19): siRNA sense strand
cuccacaacaaccaaauua

SEQ ID NO: 371392 - RNA, 19 nt, Homo sapiens
  misc_RNA (1)...(19): siRNA sense strand
gccgucagggaauuaaaua

SEQ ID NO: 371393 - RNA, 19 nt, Homo sapiens
  misc_RNA (1)...(19): siRNA sense strand
ggcggaaagaugauuauug

SEQ ID NO: 371394 - RNA, 19 nt, Homo sapiens
  misc_RNA (1)...(19): siRNA sense strand
ucccagaaguggaaauaca

SEQ ID NO: 371395 - RNA, 19 nt, Homo sapiens
  misc_RNA (1)...(19): siRNA sense strand
gauggcagagaaagaguga

SEQ ID NO: 371396 - RNA, 19 nt, Homo sapiens
  misc_RNA (1)...(19): siRNA sense strand
ucccaagaaugucagaguu

SEQ ID NO: 371397 - RNA, 19 nt, Homo sapiens
  misc_RNA (1)...(19): siRNA sense strand
uaacgaucaacuccuuaaa

SEQ ID NO: 371398 - RNA, 19 nt, Homo sapiens
  misc_RNA (1)...(19): siRNA sense strand
cgucagggaauuaaauaug

SEQ ID NO: 371399 - RNA, 19 nt, Homo sapiens
  misc_RNA (1)...(19): siRNA sense strand
acaggaacuuugucuacug

SEQ ID NO: 371400 - RNA, 19 nt, Homo sapiens
  misc_RNA (1)...(19): siRNA sense strand
ucgaauugcugucauaucc

SEQ ID NO: 371401 - RNA, 19 nt, Homo sapiens
  misc_RNA (1)...(19): siRNA sense strand
uuacacagacugccauauc

SEQ ID NO: 371402 - RNA, 19 nt, Homo sapiens
  misc_RNA (1)...(19): siRNA sense strand
gagccugguuaacuuagag

SEQ ID NO: 371403 - RNA, 19 nt, Homo sapiens
  misc_RNA (1)...(19): siRNA sense strand
cagcuucuccgaccacuca

SEQ ID NO: 371404 - RNA, 19 nt, Homo sapiens
  misc_RNA (1)...(19): siRNA sense strand
aaauauaucccuucaucuc

SEQ ID NO: 371405 - RNA, 19 nt, Homo sapiens
  misc_RNA (1)...(19): siRNA sense strand
uaauaaugcuggauuuccu

SEQ ID NO: 371406 - RNA, 19 nt, Homo sapiens
  misc_RNA (1)...(19): siRNA sense strand
gcucuugcccagcucuuga

SEQ ID NO: 371407 - RNA, 19 nt, Homo sapiens
  misc_RNA (1)...(19): siRNA sense strand
ccaagaaggacaacuccau

SEQ ID NO: 371408 - RNA, 19 nt, Homo sapiens
  misc_RNA (1)...(19): siRNA sense strand
gccaagguccugaacaagu

SEQ ID NO: 371409 - RNA, 19 nt, Homo sapiens
  misc_RNA (1)...(19): siRNA sense strand
ucucaaaucugcguaagcu

SEQ ID NO: 371410 - RNA, 19 nt, Homo sapiens
  misc_RNA (1)...(19): siRNA sense strand
aaaccacauuccuuugaca

SEQ ID NO: 371411 - RNA, 19 nt, Homo sapiens
  misc_RNA (1)...(19): siRNA sense strand
gagaguggaugaaaaucga

SEQ ID NO: 371412 - RNA, 19 nt, Homo sapiens
  misc_RNA (1)...(19): siRNA sense strand
gaaaaucgaauugcuguca

SEQ ID NO: 371413 - RNA, 19 nt, Homo sapiens
  misc_RNA (1)...(19): siRNA sense strand
cuaccuguauggcaaccaa

SEQ ID NO: 371414 - RNA, 19 nt, Homo sapiens
  misc_RNA (1)...(19): siRNA sense strand
uaaaccacauuccuuugac

SEQ ID NO: 371415 - RNA, 19 nt, Homo sapiens
  misc_RNA (1)...(19): siRNA sense strand
auaaaccacauuccuuuga

SEQ ID NO: 371416 - RNA, 19 nt, Homo sapiens
  misc_RNA (1)...(19): siRNA sense strand
ugaucaggcucuauuugca

SEQ ID NO: 371417 - RNA, 19 nt, Homo sapiens
  misc_RNA (1)...(19): siRNA sense strand
gggaaccuccugaccaaca

SEQ ID NO: 371418 - RNA, 19 nt, Homo sapiens
  misc_RNA (1)...(19): siRNA sense strand
acucacagguguccaaacu

SEQ ID NO: 371419 - RNA, 19 nt, Homo sapiens
  misc_RNA (1)...(19): siRNA sense strand
uaaaugggucacagaaugg

SEQ ID NO: 371420 - RNA, 19 nt, Homo sapiens
  misc_RNA (1)...(19): siRNA sense strand
ccuaccacaucgaaacuuc

SEQ ID NO: 371421 - RNA, 19 nt, Homo sapiens
  misc_RNA (1)...(19): siRNA sense strand
gcgaggcccugucuuacua

SEQ ID NO: 371422 - RNA, 19 nt, Homo sapiens
  misc_RNA (1)...(19): siRNA sense strand
gcaugugggacaaguauaa

SEQ ID NO: 371423 - RNA, 19 nt, Homo sapiens
  misc_RNA (1)...(19): siRNA sense strand
ccaaccgacuggcccguuu

SEQ ID NO: 371424 - RNA, 19 nt, Homo sapiens
  misc_RNA (1)...(19): siRNA sense strand
caacuucgaccggcucgua

SEQ ID NO: 371425 - RNA, 19 nt, Homo sapiens
  misc_RNA (1)...(19): siRNA sense strand
ggagcugguggaccuagua

SEQ ID NO: 371426 - RNA, 19 nt, Homo sapiens
  misc_RNA (1)...(19): siRNA sense strand
acaauggaccgacuuaauc

SEQ ID NO: 371427 - RNA, 19 nt, Homo sapiens
  misc_RNA (1)...(19): siRNA sense strand
guacaauggaccgacuuaa

SEQ ID NO: 371428 - RNA, 19 nt, Homo sapiens
  misc_RNA (1)...(19): siRNA sense strand
gcaggcaugugggacaagu

SEQ ID NO: 371429 - RNA, 19 nt, Homo sapiens
  misc_RNA (1)...(19): siRNA sense strand
gcugguggaccuaguacaa

SEQ ID NO: 371430 - RNA, 19 nt, Homo sapiens
  misc_RNA (1)...(19): siRNA sense strand
uggaccgacuuaauccuuu

SEQ ID NO: 371431 - RNA, 19 nt, Homo sapiens
  misc_RNA (1)...(19): siRNA sense strand
ggaccgacuuaauccuuuu

SEQ ID NO: 371432 - RNA, 19 nt, Homo sapiens
  misc_RNA (1)...(19): siRNA sense strand
gcucguaagcaaccucuuc

SEQ ID NO: 371433 - RNA, 19 nt, Homo sapiens
  misc_RNA (1)...(19): siRNA sense strand
gcagucagugugcguguuc

SEQ ID NO: 371434 - RNA, 19 nt, Homo sapiens
  misc_RNA (1)...(19): siRNA sense strand
gcaucaacccggagcagau

SEQ ID NO: 371435 - RNA, 19 nt, Homo sapiens
  misc_RNA (1)...(19): siRNA sense strand
uacaauggaccgacuuaau

SEQ ID NO: 371436 - RNA, 19 nt, Homo sapiens
  misc_RNA (1)...(19): siRNA sense strand
ggcccugucuuacuaucug

SEQ ID NO: 371437 - RNA, 19 nt, Homo sapiens
  misc_RNA (1)...(19): siRNA sense strand
caucaacccggagcagauu

SEQ ID NO: 371438 - RNA, 19 nt, Homo sapiens
  misc_RNA (1)...(19): siRNA sense strand
gcggcucccugaaaacuuu

SEQ ID NO: 371439 - RNA, 19 nt, Homo sapiens
  misc_RNA (1)...(19): siRNA sense strand
ugguggaccuaguacaaug

SEQ ID NO: 371440 - RNA, 19 nt, Homo sapiens
  misc_RNA (1)...(19): siRNA sense strand
uagcaggcaugugggacaa

SEQ ID NO: 371441 - RNA, 19 nt, Homo sapiens
  misc_RNA (1)...(19): siRNA sense strand
guauaacgagccgcuguug

SEQ ID NO: 371442 - RNA, 19 nt, Homo sapiens
  misc_RNA (1)...(19): siRNA sense strand
gaugagaucggcuugauga

SEQ ID NO: 371443 - RNA, 19 nt, Homo sapiens
  misc_RNA (1)...(19): siRNA sense strand
gagaucggcuugaugaaca

SEQ ID NO: 371444 - RNA, 19 nt, Homo sapiens
  misc_RNA (1)...(19): siRNA sense strand
gaauucugccggagguuua

SEQ ID NO: 371445 - RNA, 19 nt, Homo sapiens
  misc_RNA (1)...(19): siRNA sense strand
cgaggcaccuuucaagaau

SEQ ID NO: 371446 - RNA, 19 nt, Homo sapiens
  misc_RNA (1)...(19): siRNA sense strand
uggagcagcuggccagauu

SEQ ID NO: 371447 - RNA, 19 nt, Homo sapiens
  misc_RNA (1)...(19): siRNA sense strand
gagcaaguacuucgaguuc

SEQ ID NO: 371448 - RNA, 19 nt, Homo sapiens
  misc_RNA (1)...(19): siRNA sense strand
ccucugaccuccacaaugg

SEQ ID NO: 371449 - RNA, 19 nt, Homo sapiens
  misc_RNA (1)...(19): siRNA sense strand
gcaaguacuucgaguucca

SEQ ID NO: 371450 - RNA, 19 nt, Homo sapiens
  misc_RNA (1)...(19): siRNA sense strand
acuccaaggucaucuauau

SEQ ID NO: 371451 - RNA, 19 nt, Homo sapiens
  misc_RNA (1)...(19): siRNA sense strand
gccggagguuuaugaauga

SEQ ID NO: 371452 - RNA, 19 nt, Homo sapiens
  misc_RNA (1)...(19): siRNA sense strand
gcgggaagauggaggagau

SEQ ID NO: 371453 - RNA, 19 nt, Homo sapiens
  misc_RNA (1)...(19): siRNA sense strand
uggaggagaucgccaacuu

SEQ ID NO: 371454 - RNA, 19 nt, Homo sapiens
  misc_RNA (1)...(19): siRNA sense strand
ucucaaguaugaagacaug

SEQ ID NO: 371455 - RNA, 19 nt, Homo sapiens
  misc_RNA (1)...(19): siRNA sense strand
gaguugggcuguggaagga

SEQ ID NO: 371456 - RNA, 19 nt, Homo sapiens
  misc_RNA (1)...(19): siRNA sense strand
gaggcaccuuucaagaauu

SEQ ID NO: 371457 - RNA, 19 nt, Homo sapiens
  misc_RNA (1)...(19): siRNA sense strand
gaucugguggugucuuauu

SEQ ID NO: 371458 - RNA, 19 nt, Homo sapiens
  misc_RNA (1)...(19): siRNA sense strand
gggcuacggcuccugguuu

SEQ ID NO: 371459 - RNA, 19 nt, Homo sapiens
  misc_RNA (1)...(19): siRNA sense strand
ugccggagguuuaugaaug

SEQ ID NO: 371460 - RNA, 19 nt, Homo sapiens
  misc_RNA (1)...(19): siRNA sense strand
ugacaaggcccagcuggaa

SEQ ID NO: 371461 - RNA, 19 nt, Homo sapiens
  misc_RNA (1)...(19): siRNA sense strand
ugaccucacguuugacuuu

SEQ ID NO: 371462 - RNA, 19 nt, Homo sapiens
  misc_RNA (1)...(19): siRNA sense strand
gaagaguugggcuguggaa

SEQ ID NO: 371463 - RNA, 19 nt, Homo sapiens
  misc_RNA (1)...(19): siRNA sense strand
gcaggagguggucuacuug

SEQ ID NO: 371464 - RNA, 19 nt, Homo sapiens
  misc_RNA (1)...(19): siRNA sense strand
aguuugacuugguguauaa

SEQ ID NO: 371465 - RNA, 19 nt, Homo sapiens
  misc_RNA (1)...(19): siRNA sense strand
ugcaggagguggucuacuu

SEQ ID NO: 371466 - RNA, 19 nt, Homo sapiens
  misc_RNA (1)...(19): siRNA sense strand
aggaucugguggugucuua

SEQ ID NO: 371467 - RNA, 19 nt, Homo sapiens
  misc_RNA (1)...(19): siRNA sense strand
ccaccugcccuaccgcuuu

SEQ ID NO: 371468 - RNA, 19 nt, Homo sapiens
  misc_RNA (1)...(19): siRNA sense strand
gguggugucuuauuaucag

SEQ ID NO: 371469 - RNA, 19 nt, Homo sapiens
  misc_RNA (1)...(19): siRNA sense strand
gagcuaccgaggcaccuuu

SEQ ID NO: 371470 - RNA, 19 nt, Homo sapiens
  misc_RNA (1)...(19): siRNA sense strand
ggcuacggcuccugguuug

SEQ ID NO: 371471 - RNA, 19 nt, Homo sapiens
  misc_RNA (1)...(19): siRNA sense strand
ccgaggcaccuuucaagaa

SEQ ID NO: 371472 - RNA, 19 nt, Homo sapiens
  misc_RNA (1)...(19): siRNA sense strand
gccuggacaucaucaagga

SEQ ID NO: 371473 - RNA, 19 nt, Homo sapiens
  misc_RNA (1)...(19): siRNA sense strand
ccaugaaugagaaguuuga

SEQ ID NO: 371474 - RNA, 19 nt, Homo sapiens
  misc_RNA (1)...(19): siRNA sense strand
auaaacagaagaugggaaa

SEQ ID NO: 371475 - RNA, 19 nt, Homo sapiens
  misc_RNA (1)...(19): siRNA sense strand
aacagaagaugggaaagug

SEQ ID NO: 371476 - RNA, 19 nt, Homo sapiens
  misc_RNA (1)...(19): siRNA sense strand
cuccaugaaugagaaguuu

SEQ ID NO: 371477 - RNA, 19 nt, Homo sapiens
  misc_RNA (1)...(19): siRNA sense strand
gacuugguguauaaacaga

SEQ ID NO: 371478 - RNA, 19 nt, Homo sapiens
  misc_RNA (1)...(19): siRNA sense strand
ggugucuuauuaucaguuc

SEQ ID NO: 371479 - RNA, 19 nt, Homo sapiens
  misc_RNA (1)...(19): siRNA sense strand
aaacagaagaugggaaagu

SEQ ID NO: 371480 - RNA, 19 nt, Homo sapiens
  misc_RNA (1)...(19): siRNA sense strand
ggaggagaucgccaacuuc

SEQ ID NO: 371481 - RNA, 19 nt, Homo sapiens
  misc_RNA (1)...(19): siRNA sense strand
gagacuccaaggucaucua

SEQ ID NO: 371482 - RNA, 19 nt, Homo sapiens
  misc_RNA (1)...(19): siRNA sense strand
aggcaccuuucaagaauuc

SEQ ID NO: 371483 - RNA, 19 nt, Homo sapiens
  misc_RNA (1)...(19): siRNA sense strand
ggaguucgagagcaaguac

SEQ ID NO: 371484 - RNA, 19 nt, Homo sapiens
  misc_RNA (1)...(19): siRNA sense strand
caccugcccuaccgcuuuc

SEQ ID NO: 371485 - RNA, 19 nt, Homo sapiens
  misc_RNA (1)...(19): siRNA sense strand
gacaucaucaaggaacuga

SEQ ID NO: 371486 - RNA, 19 nt, Homo sapiens
  misc_RNA (1)...(19): siRNA sense strand
ggacaucaucaaggaacug

SEQ ID NO: 371487 - RNA, 19 nt, Homo sapiens
  misc_RNA (1)...(19): siRNA sense strand
gaugagaucggcuugauga

SEQ ID NO: 371488 - RNA, 19 nt, Homo sapiens
  misc_RNA (1)...(19): siRNA sense strand
gagaucggcuugaugaaca

SEQ ID NO: 371489 - RNA, 19 nt, Homo sapiens
  misc_RNA (1)...(19): siRNA sense strand
gaauucugccggagguuua

SEQ ID NO: 371490 - RNA, 19 nt, Homo sapiens
  misc_RNA (1)...(19): siRNA sense strand
cgaggcaccuuucaagaau

SEQ ID NO: 371491 - RNA, 19 nt, Homo sapiens
  misc_RNA (1)...(19): siRNA sense strand
uggagcagcuggccagauu

SEQ ID NO: 371492 - RNA, 19 nt, Homo sapiens
  misc_RNA (1)...(19): siRNA sense strand
gagcaaguacuucgaguuc

SEQ ID NO: 371493 - RNA, 19 nt, Homo sapiens
  misc_RNA (1)...(19): siRNA sense strand
ccucugaccuccacaaugg

SEQ ID NO: 371494 - RNA, 19 nt, Homo sapiens
  misc_RNA (1)...(19): siRNA sense strand
gcaaguacuucgaguucca

SEQ ID NO: 371495 - RNA, 19 nt, Homo sapiens
  misc_RNA (1)...(19): siRNA sense strand
acuccaaggucaucuauau

SEQ ID NO: 371496 - RNA, 19 nt, Homo sapiens
  misc_RNA (1)...(19): siRNA sense strand
gccggagguuuaugaauga

SEQ ID NO: 371497 - RNA, 19 nt, Homo sapiens
  misc_RNA (1)...(19): siRNA sense strand
gcgggaagauggaggagau

SEQ ID NO: 371498 - RNA, 19 nt, Homo sapiens
  misc_RNA (1)...(19): siRNA sense strand
uggaggagaucgccaacuu

SEQ ID NO: 371499 - RNA, 19 nt, Homo sapiens
  misc_RNA (1)...(19): siRNA sense strand
ucucaaguaugaagacaug

SEQ ID NO: 371500 - RNA, 19 nt, Homo sapiens
  misc_RNA (1)...(19): siRNA sense strand
gaggcaccuuucaagaauu

SEQ ID NO: 371501 - RNA, 19 nt, Homo sapiens
  misc_RNA (1)...(19): siRNA sense strand
gaucugguggugucuuauu

SEQ ID NO: 371502 - RNA, 19 nt, Homo sapiens
  misc_RNA (1)...(19): siRNA sense strand
gggcuacggcuccugguuu

SEQ ID NO: 371503 - RNA, 19 nt, Homo sapiens
  misc_RNA (1)...(19): siRNA sense strand
ugccggagguuuaugaaug

SEQ ID NO: 371504 - RNA, 19 nt, Homo sapiens
  misc_RNA (1)...(19): siRNA sense strand
ugacaaggcccagcuggaa

SEQ ID NO: 371505 - RNA, 19 nt, Homo sapiens
  misc_RNA (1)...(19): siRNA sense strand
gcaggagguggucuacuug

SEQ ID NO: 371506 - RNA, 19 nt, Homo sapiens
  misc_RNA (1)...(19): siRNA sense strand
ugcaggagguggucuacuu

SEQ ID NO: 371507 - RNA, 19 nt, Homo sapiens
  misc_RNA (1)...(19): siRNA sense strand
aggaucugguggugucuua

SEQ ID NO: 371508 - RNA, 19 nt, Homo sapiens
  misc_RNA (1)...(19): siRNA sense strand
ccaccugcccuaccgcuuu

SEQ ID NO: 371509 - RNA, 19 nt, Homo sapiens
  misc_RNA (1)...(19): siRNA sense strand
gguggugucuuauuaucag

SEQ ID NO: 371510 - RNA, 19 nt, Homo sapiens
  misc_RNA (1)...(19): siRNA sense strand
gagcuaccgaggcaccuuu

SEQ ID NO: 371511 - RNA, 19 nt, Homo sapiens
  misc_RNA (1)...(19): siRNA sense strand
ggcuacggcuccugguuug

SEQ ID NO: 371512 - RNA, 19 nt, Homo sapiens
  misc_RNA (1)...(19): siRNA sense strand
ccgaggcaccuuucaagaa

SEQ ID NO: 371513 - RNA, 19 nt, Homo sapiens
  misc_RNA (1)...(19): siRNA sense strand
gccuggacaucaucaagga

SEQ ID NO: 371514 - RNA, 19 nt, Homo sapiens
  misc_RNA (1)...(19): siRNA sense strand
ggaggagaucgccaacuuc

SEQ ID NO: 371515 - RNA, 19 nt, Homo sapiens
  misc_RNA (1)...(19): siRNA sense strand
ggugucuuauuaucaguuc

SEQ ID NO: 371516 - RNA, 19 nt, Homo sapiens
  misc_RNA (1)...(19): siRNA sense strand
gagacuccaaggucaucua

SEQ ID NO: 371517 - RNA, 19 nt, Homo sapiens
  misc_RNA (1)...(19): siRNA sense strand
aggcaccuuucaagaauuc

SEQ ID NO: 371518 - RNA, 19 nt, Homo sapiens
  misc_RNA (1)...(19): siRNA sense strand
ggaguucgagagcaaguac

SEQ ID NO: 371519 - RNA, 19 nt, Homo sapiens
  misc_RNA (1)...(19): siRNA sense strand
gacaucaucaaggaacuga

SEQ ID NO: 371520 - RNA, 19 nt, Homo sapiens
  misc_RNA (1)...(19): siRNA sense strand
caccugcccuaccgcuuuc

SEQ ID NO: 371521 - RNA, 19 nt, Homo sapiens
  misc_RNA (1)...(19): siRNA sense strand
ggacaucaucaaggaacug

SEQ ID NO: 371522 - RNA, 19 nt, Homo sapiens
  misc_RNA (1)...(19): siRNA sense strand
caaguguccucccaagugu

SEQ ID NO: 371523 - RNA, 19 nt, Homo sapiens
  misc_RNA (1)...(19): siRNA sense strand
ccaaguguccucccaagug

SEQ ID NO: 371524 - RNA, 19 nt, Homo sapiens
  misc_RNA (1)...(19): siRNA sense strand
cgacugcugugagagugaa

SEQ ID NO: 371525 - RNA, 19 nt, Homo sapiens
  misc_RNA (1)...(19): siRNA sense strand
caaaauguccaccuaagug

SEQ ID NO: 371526 - RNA, 19 nt, Homo sapiens
  misc_RNA (1)...(19): siRNA sense strand
ggaugaagguuaaugguua

SEQ ID NO: 371527 - RNA, 19 nt, Homo sapiens
  misc_RNA (1)...(19): siRNA sense strand
ggauagaacuuacuccuaa

SEQ ID NO: 371528 - RNA, 19 nt, Homo sapiens
  misc_RNA (1)...(19): siRNA sense strand
gaaagugucccuccucuua

SEQ ID NO: 371529 - RNA, 19 nt, Homo sapiens
  misc_RNA (1)...(19): siRNA sense strand
gauggcaccuucauuauaa

SEQ ID NO: 371530 - RNA, 19 nt, Homo sapiens
  misc_RNA (1)...(19): siRNA sense strand
gcaauccaguucccaguua

SEQ ID NO: 371531 - RNA, 19 nt, Homo sapiens
  misc_RNA (1)...(19): siRNA sense strand
gagaaagcauuguccuuaa

SEQ ID NO: 371532 - RNA, 19 nt, Homo sapiens
  misc_RNA (1)...(19): siRNA sense strand
ggagaaagcauuguccuua

SEQ ID NO: 371533 - RNA, 19 nt, Homo sapiens
  misc_RNA (1)...(19): siRNA sense strand
gccaguaucugaagaguuu

SEQ ID NO: 371534 - RNA, 19 nt, Homo sapiens
  misc_RNA (1)...(19): siRNA sense strand
aaauagaucuggaaaguga

SEQ ID NO: 371535 - RNA, 19 nt, Homo sapiens
  misc_RNA (1)...(19): siRNA sense strand
ggaaauacguuauaucacu

SEQ ID NO: 371536 - RNA, 19 nt, Homo sapiens
  misc_RNA (1)...(19): siRNA sense strand
ucacauggaugaagguuaa

SEQ ID NO: 371537 - RNA, 19 nt, Homo sapiens
  misc_RNA (1)...(19): siRNA sense strand
cagcaaggcucucagguuu

SEQ ID NO: 371538 - RNA, 19 nt, Homo sapiens
  misc_RNA (1)...(19): siRNA sense strand
gcaagaaccagaugauauu

SEQ ID NO: 371539 - RNA, 19 nt, Homo sapiens
  misc_RNA (1)...(19): siRNA sense strand
gauuaucgcuacaguuuga

SEQ ID NO: 371540 - RNA, 19 nt, Homo sapiens
  misc_RNA (1)...(19): siRNA sense strand
acagcuaguucucaaauua

SEQ ID NO: 371541 - RNA, 19 nt, Homo sapiens
  misc_RNA (1)...(19): siRNA sense strand
gauaguaauuguugaggaa

SEQ ID NO: 371542 - RNA, 19 nt, Homo sapiens
  misc_RNA (1)...(19): siRNA sense strand
gauguuggcagcuauauuu

SEQ ID NO: 371543 - RNA, 19 nt, Homo sapiens
  misc_RNA (1)...(19): siRNA sense strand
gaaaggagacagagcaguu

SEQ ID NO: 371544 - RNA, 19 nt, Homo sapiens
  misc_RNA (1)...(19): siRNA sense strand
gauccuaaaugcuuccaaa

SEQ ID NO: 371545 - RNA, 19 nt, Homo sapiens
  misc_RNA (1)...(19): siRNA sense strand
aaucugaaguuguggguua

SEQ ID NO: 371546 - RNA, 19 nt, Homo sapiens
  misc_RNA (1)...(19): siRNA sense strand
gcaaaggauucuggucauu

SEQ ID NO: 371547 - RNA, 19 nt, Homo sapiens
  misc_RNA (1)...(19): siRNA sense strand
gcuggagucuauauuauug

SEQ ID NO: 371548 - RNA, 19 nt, Homo sapiens
  misc_RNA (1)...(19): siRNA sense strand
ccuaaaugcuuccaaauca

SEQ ID NO: 371549 - RNA, 19 nt, Homo sapiens
  misc_RNA (1)...(19): siRNA sense strand
gguuacagcugcuaaagga

SEQ ID NO: 371550 - RNA, 19 nt, Homo sapiens
  misc_RNA (1)...(19): siRNA sense strand
uaaagagagucuaggaaga

SEQ ID NO: 371551 - RNA, 19 nt, Homo sapiens
  misc_RNA (1)...(19): siRNA sense strand
cgaaugauccgcacaaaug

SEQ ID NO: 371552 - RNA, 19 nt, Homo sapiens
  misc_RNA (1)...(19): siRNA sense strand
gaaagcauuguccuuaauu

SEQ ID NO: 371553 - RNA, 19 nt, Homo sapiens
  misc_RNA (1)...(19): siRNA sense strand
gaagaaggcaugaguuagu

SEQ ID NO: 371554 - RNA, 19 nt, Homo sapiens
  misc_RNA (1)...(19): siRNA sense strand
caaaggauucuggucauua

SEQ ID NO: 371555 - RNA, 19 nt, Homo sapiens
  misc_RNA (1)...(19): siRNA sense strand
ggaagaggguggacauuuu

SEQ ID NO: 371556 - RNA, 19 nt, Homo sapiens
  misc_RNA (1)...(19): siRNA sense strand
gaagguagcauugaauugu

SEQ ID NO: 371557 - RNA, 19 nt, Homo sapiens
  misc_RNA (1)...(19): siRNA sense strand
gaugcuggagucuauauua

SEQ ID NO: 371558 - RNA, 19 nt, Homo sapiens
  misc_RNA (1)...(19): siRNA sense strand
acagaaacuucaagcagua

SEQ ID NO: 371559 - RNA, 19 nt, Homo sapiens
  misc_RNA (1)...(19): siRNA sense strand
acacguggcuggaaggaaa

SEQ ID NO: 371560 - RNA, 19 nt, Homo sapiens
  misc_RNA (1)...(19): siRNA sense strand
guaaagacagucccagaaa

SEQ ID NO: 371561 - RNA, 19 nt, Homo sapiens
  misc_RNA (1)...(19): siRNA sense strand
gauagaacuuacuccuaaa

SEQ ID NO: 371562 - RNA, 19 nt, Homo sapiens
  misc_RNA (1)...(19): siRNA sense strand
ucaaucagaugcuggaaug

SEQ ID NO: 371563 - RNA, 19 nt, Homo sapiens
  misc_RNA (1)...(19): siRNA sense strand
agaaauagaucuggaaagu

SEQ ID NO: 371564 - RNA, 19 nt, Homo sapiens
  misc_RNA (1)...(19): siRNA sense strand
gaugguuaauggaguauug

SEQ ID NO: 371565 - RNA, 19 nt, Homo sapiens
  misc_RNA (1)...(19): siRNA sense strand
gaaauggaacagaaauaga

SEQ ID NO: 371566 - RNA, 19 nt, Homo sapiens
  misc_RNA (1)...(19): siRNA sense strand
uaaagacagucccagaaau

SEQ ID NO: 371567 - RNA, 19 nt, Homo sapiens
  misc_RNA (1)...(19): siRNA sense strand
ccaagaaguugucauagag

SEQ ID NO: 371568 - RNA, 19 nt, Homo sapiens
  misc_RNA (1)...(19): siRNA sense strand
gugcugagcugaagauucu

SEQ ID NO: 371569 - RNA, 19 nt, Homo sapiens
  misc_RNA (1)...(19): siRNA sense strand
gaagacagcacccaccaau

SEQ ID NO: 371570 - RNA, 19 nt, Homo sapiens
  misc_RNA (1)...(19): siRNA sense strand
aaauuaggguaccaucaua

SEQ ID NO: 371571 - RNA, 19 nt, Homo sapiens
  misc_RNA (1)...(19): siRNA sense strand
gacaagaagugcagucucu

SEQ ID NO: 371572 - RNA, 19 nt, Homo sapiens
  misc_RNA (1)...(19): siRNA sense strand
agacagagcaguuagagaa

SEQ ID NO: 371573 - RNA, 19 nt, Homo sapiens
  misc_RNA (1)...(19): siRNA sense strand
gaugaagguuaaugguuau

SEQ ID NO: 371574 - RNA, 19 nt, Homo sapiens
  misc_RNA (1)...(19): siRNA sense strand
gaaguucgagcauauagug

SEQ ID NO: 371575 - RNA, 19 nt, Homo sapiens
  misc_RNA (1)...(19): siRNA sense strand
uaacaggauuagaaggaaa

SEQ ID NO: 371576 - RNA, 19 nt, Homo sapiens
  misc_RNA (1)...(19): siRNA sense strand
gaaaguacggccacacugu

SEQ ID NO: 371577 - RNA, 19 nt, Homo sapiens
  misc_RNA (1)...(19): siRNA sense strand
ugagaugguuaauggagua

SEQ ID NO: 371578 - RNA, 19 nt, Homo sapiens
  misc_RNA (1)...(19): siRNA sense strand
gugauuaucgcuacaguuu

SEQ ID NO: 371579 - RNA, 19 nt, Homo sapiens
  misc_RNA (1)...(19): siRNA sense strand
acaggcaaccuuuauauuu

SEQ ID NO: 371580 - RNA, 19 nt, Homo sapiens
  misc_RNA (1)...(19): siRNA sense strand
ggaguauucuuaguagaga

SEQ ID NO: 371581 - RNA, 19 nt, Homo sapiens
  misc_RNA (1)...(19): siRNA sense strand
auagauggcaccuucauua

SEQ ID NO: 371582 - RNA, 19 nt, Homo sapiens
  misc_RNA (1)...(19): siRNA sense strand
gacagucccagaaaucaua

SEQ ID NO: 371583 - RNA, 19 nt, Homo sapiens
  misc_RNA (1)...(19): siRNA sense strand
gaaaggacagccuauugau

SEQ ID NO: 371584 - RNA, 19 nt, Homo sapiens
  misc_RNA (1)...(19): siRNA sense strand
caggcaaccuuuauauuuc

SEQ ID NO: 371585 - RNA, 19 nt, Homo sapiens
  misc_RNA (1)...(19): siRNA sense strand
aaaggauucuggucauuau

SEQ ID NO: 371586 - RNA, 19 nt, Homo sapiens
  misc_RNA (1)...(19): siRNA sense strand
aaggacagccuauugauuu

SEQ ID NO: 371587 - RNA, 19 nt, Homo sapiens
  misc_RNA (1)...(19): siRNA sense strand
ggagacaggcaaccuuuau

SEQ ID NO: 371588 - RNA, 19 nt, Homo sapiens
  misc_RNA (1)...(19): siRNA sense strand
gaagcuacacugcaguuug

SEQ ID NO: 371589 - RNA, 19 nt, Homo sapiens
  misc_RNA (1)...(19): siRNA sense strand
gaaacuucaagcaguagua

SEQ ID NO: 371590 - RNA, 19 nt, Homo sapiens
  misc_RNA (1)...(19): siRNA sense strand
gcaaggcucucagguuucu

SEQ ID NO: 371591 - RNA, 19 nt, Homo sapiens
  misc_RNA (1)...(19): siRNA sense strand
caagaaccagaugauauua

SEQ ID NO: 371592 - RNA, 19 nt, Homo sapiens
  misc_RNA (1)...(19): siRNA sense strand
gaggaaauaaccgaaagua

SEQ ID NO: 371593 - RNA, 19 nt, Homo sapiens
  misc_RNA (1)...(19): siRNA sense strand
gcauuguccuuaauugcaa

SEQ ID NO: 371594 - RNA, 19 nt, Homo sapiens
  misc_RNA (1)...(19): siRNA sense strand
aaaagaaccuacaaggaua

SEQ ID NO: 371595 - RNA, 19 nt, Homo sapiens
  misc_RNA (1)...(19): siRNA sense strand
gagacaggcaaccuuuaua

SEQ ID NO: 371596 - RNA, 19 nt, Homo sapiens
  misc_RNA (1)...(19): siRNA sense strand
gaaagugauuaucgcuaca

SEQ ID NO: 371597 - RNA, 19 nt, Homo sapiens
  misc_RNA (1)...(19): siRNA sense strand
ggguugagaugguuaaugg

SEQ ID NO: 371598 - RNA, 19 nt, Homo sapiens
  misc_RNA (1)...(19): siRNA sense strand
uauaagcaauccaagugaa

SEQ ID NO: 371599 - RNA, 19 nt, Homo sapiens
  misc_RNA (1)...(19): siRNA sense strand
caacagccaaguuauugaa

SEQ ID NO: 371600 - RNA, 19 nt, Homo sapiens
  misc_RNA (1)...(19): siRNA sense strand
gaagugaaaguuggcguuu

SEQ ID NO: 371601 - RNA, 19 nt, Homo sapiens
  misc_RNA (1)...(19): siRNA sense strand
gaaugauccgcacaaauga

SEQ ID NO: 371602 - RNA, 19 nt, Homo sapiens
  misc_RNA (1)...(19): siRNA sense strand
ugaaaggacagccuauuga

SEQ ID NO: 371603 - RNA, 19 nt, Homo sapiens
  misc_RNA (1)...(19): siRNA sense strand
ccaacaaucacauggauga

SEQ ID NO: 371604 - RNA, 19 nt, Homo sapiens
  misc_RNA (1)...(19): siRNA sense strand
gggagaauaugagccgaaa

SEQ ID NO: 371605 - RNA, 19 nt, Homo sapiens
  misc_RNA (1)...(19): siRNA sense strand
gcaccuucauuauaagcaa

SEQ ID NO: 371606 - RNA, 19 nt, Homo sapiens
  misc_RNA (1)...(19): siRNA sense strand
gaaacacauuaaagagagu

SEQ ID NO: 371607 - RNA, 19 nt, Homo sapiens
  misc_RNA (1)...(19): siRNA sense strand
uggaagaaggcaugaguua

SEQ ID NO: 371608 - RNA, 19 nt, Homo sapiens
  misc_RNA (1)...(19): siRNA sense strand
uaccaaagaccaagaaguu

SEQ ID NO: 371609 - RNA, 19 nt, Homo sapiens
  misc_RNA (1)...(19): siRNA sense strand
guuaauggaguauugauga

SEQ ID NO: 371610 - RNA, 19 nt, Homo sapiens
  misc_RNA (1)...(19): siRNA sense strand
ugaaugauacucaguuaga

SEQ ID NO: 371611 - RNA, 19 nt, Homo sapiens
  misc_RNA (1)...(19): siRNA sense strand
gugcagagcugaaaacuca

SEQ ID NO: 371612 - RNA, 19 nt, Homo sapiens
  misc_RNA (1)...(19): siRNA sense strand
ggaaauaccgaauguacag

SEQ ID NO: 371613 - RNA, 19 nt, Homo sapiens
  misc_RNA (1)...(19): siRNA sense strand
gaauguaaggcuacuggaa

SEQ ID NO: 371614 - RNA, 19 nt, Homo sapiens
  misc_RNA (1)...(19): siRNA sense strand
gggaacccgucauaccauu

SEQ ID NO: 371615 - RNA, 19 nt, Homo sapiens
  misc_RNA (1)...(19): siRNA sense strand
acaggaagauacagcagaa

SEQ ID NO: 371616 - RNA, 19 nt, Homo sapiens
  misc_RNA (1)...(19): siRNA sense strand
gguggaauaugaauuucga

SEQ ID NO: 371617 - RNA, 19 nt, Homo sapiens
  misc_RNA (1)...(19): siRNA sense strand
gaguauugaugauccacaa

SEQ ID NO: 371618 - RNA, 19 nt, Homo sapiens
  misc_RNA (1)...(19): siRNA sense strand
gcacugaaucaacugaaga

SEQ ID NO: 371619 - RNA, 19 nt, Homo sapiens
  misc_RNA (1)...(19): siRNA sense strand
ucaccuugcucuuggcauu

SEQ ID NO: 371620 - RNA, 19 nt, Homo sapiens
  misc_RNA (1)...(19): siRNA sense strand
gcagcaaggcucucagguu

SEQ ID NO: 371621 - RNA, 19 nt, Homo sapiens
  misc_RNA (1)...(19): siRNA sense strand
gaaagacauggaacaggaa

SEQ ID NO: 371622 - RNA, 19 nt, Homo sapiens
  misc_RNA (1)...(19): siRNA sense strand
cauggaaacacauuaaaga

SEQ ID NO: 371623 - RNA, 19 nt, Homo sapiens
  misc_RNA (1)...(19): siRNA sense strand
ugaaaguuggcguuuauaa

SEQ ID NO: 371624 - RNA, 19 nt, Homo sapiens
  misc_RNA (1)...(19): siRNA sense strand
gaacuuacuccuaaaagaa

SEQ ID NO: 371625 - RNA, 19 nt, Homo sapiens
  misc_RNA (1)...(19): siRNA sense strand
agaccaagaaguugucaua

SEQ ID NO: 371626 - RNA, 19 nt, Homo sapiens
  misc_RNA (1)...(19): siRNA sense strand
ggaugaagguuaaugguua

SEQ ID NO: 371627 - RNA, 19 nt, Homo sapiens
  misc_RNA (1)...(19): siRNA sense strand
ggauagaacuuacuccuaa

SEQ ID NO: 371628 - RNA, 19 nt, Homo sapiens
  misc_RNA (1)...(19): siRNA sense strand
gaaagugucccuccucuua

SEQ ID NO: 371629 - RNA, 19 nt, Homo sapiens
  misc_RNA (1)...(19): siRNA sense strand
gauggcaccuucauuauaa

SEQ ID NO: 371630 - RNA, 19 nt, Homo sapiens
  misc_RNA (1)...(19): siRNA sense strand
gcaauccaguucccaguua

SEQ ID NO: 371631 - RNA, 19 nt, Homo sapiens
  misc_RNA (1)...(19): siRNA sense strand
gagaaagcauuguccuuaa

SEQ ID NO: 371632 - RNA, 19 nt, Homo sapiens
  misc_RNA (1)...(19): siRNA sense strand
ggagaaagcauuguccuua

SEQ ID NO: 371633 - RNA, 19 nt, Homo sapiens
  misc_RNA (1)...(19): siRNA sense strand
gccaguaucugaagaguuu

SEQ ID NO: 371634 - RNA, 19 nt, Homo sapiens
  misc_RNA (1)...(19): siRNA sense strand
aaauagaucuggaaaguga

SEQ ID NO: 371635 - RNA, 19 nt, Homo sapiens
  misc_RNA (1)...(19): siRNA sense strand
ggaaauacguuauaucacu

SEQ ID NO: 371636 - RNA, 19 nt, Homo sapiens
  misc_RNA (1)...(19): siRNA sense strand
ucacauggaugaagguuaa

SEQ ID NO: 371637 - RNA, 19 nt, Homo sapiens
  misc_RNA (1)...(19): siRNA sense strand
cagcaaggcucucagguuu

SEQ ID NO: 371638 - RNA, 19 nt, Homo sapiens
  misc_RNA (1)...(19): siRNA sense strand
gcaagaaccagaugauauu

SEQ ID NO: 371639 - RNA, 19 nt, Homo sapiens
  misc_RNA (1)...(19): siRNA sense strand
gauuaucgcuacaguuuga

SEQ ID NO: 371640 - RNA, 19 nt, Homo sapiens
  misc_RNA (1)...(19): siRNA sense strand
acagcuaguucucaaauua

SEQ ID NO: 371641 - RNA, 19 nt, Homo sapiens
  misc_RNA (1)...(19): siRNA sense strand
gauaguaauuguugaggaa

SEQ ID NO: 371642 - RNA, 19 nt, Homo sapiens
  misc_RNA (1)...(19): siRNA sense strand
gauguuggcagcuauauuu

SEQ ID NO: 371643 - RNA, 19 nt, Homo sapiens
  misc_RNA (1)...(19): siRNA sense strand
gaaaggagacagagcaguu

SEQ ID NO: 371644 - RNA, 19 nt, Homo sapiens
  misc_RNA (1)...(19): siRNA sense strand
gauccuaaaugcuuccaaa

SEQ ID NO: 371645 - RNA, 19 nt, Homo sapiens
  misc_RNA (1)...(19): siRNA sense strand
aaucugaaguuguggguua

SEQ ID NO: 371646 - RNA, 19 nt, Homo sapiens
  misc_RNA (1)...(19): siRNA sense strand
gcaaaggauucuggucauu

SEQ ID NO: 371647 - RNA, 19 nt, Homo sapiens
  misc_RNA (1)...(19): siRNA sense strand
gcuggagucuauauuauug

SEQ ID NO: 371648 - RNA, 19 nt, Homo sapiens
  misc_RNA (1)...(19): siRNA sense strand
ccuaaaugcuuccaaauca

SEQ ID NO: 371649 - RNA, 19 nt, Homo sapiens
  misc_RNA (1)...(19): siRNA sense strand
gguuacagcugcuaaagga

SEQ ID NO: 371650 - RNA, 19 nt, Homo sapiens
  misc_RNA (1)...(19): siRNA sense strand
uaaagagagucuaggaaga

SEQ ID NO: 371651 - RNA, 19 nt, Homo sapiens
  misc_RNA (1)...(19): siRNA sense strand
cgaaugauccgcacaaaug

SEQ ID NO: 371652 - RNA, 19 nt, Homo sapiens
  misc_RNA (1)...(19): siRNA sense strand
gaaagcauuguccuuaauu

SEQ ID NO: 371653 - RNA, 19 nt, Homo sapiens
  misc_RNA (1)...(19): siRNA sense strand
gaagaaggcaugaguuagu

SEQ ID NO: 371654 - RNA, 19 nt, Homo sapiens
  misc_RNA (1)...(19): siRNA sense strand
caaaggauucuggucauua

SEQ ID NO: 371655 - RNA, 19 nt, Homo sapiens
  misc_RNA (1)...(19): siRNA sense strand
ggaagaggguggacauuuu

SEQ ID NO: 371656 - RNA, 19 nt, Homo sapiens
  misc_RNA (1)...(19): siRNA sense strand
gaagguagcauugaauugu

SEQ ID NO: 371657 - RNA, 19 nt, Homo sapiens
  misc_RNA (1)...(19): siRNA sense strand
gaugcuggagucuauauua

SEQ ID NO: 371658 - RNA, 19 nt, Homo sapiens
  misc_RNA (1)...(19): siRNA sense strand
acagaaacuucaagcagua

SEQ ID NO: 371659 - RNA, 19 nt, Homo sapiens
  misc_RNA (1)...(19): siRNA sense strand
acacguggcuggaaggaaa

SEQ ID NO: 371660 - RNA, 19 nt, Homo sapiens
  misc_RNA (1)...(19): siRNA sense strand
guaaagacagucccagaaa

SEQ ID NO: 371661 - RNA, 19 nt, Homo sapiens
  misc_RNA (1)...(19): siRNA sense strand
gauagaacuuacuccuaaa

SEQ ID NO: 371662 - RNA, 19 nt, Homo sapiens
  misc_RNA (1)...(19): siRNA sense strand
ucaaucagaugcuggaaug

SEQ ID NO: 371663 - RNA, 19 nt, Homo sapiens
  misc_RNA (1)...(19): siRNA sense strand
agaaauagaucuggaaagu

SEQ ID NO: 371664 - RNA, 19 nt, Homo sapiens
  misc_RNA (1)...(19): siRNA sense strand
gaugguuaauggaguauug

SEQ ID NO: 371665 - RNA, 19 nt, Homo sapiens
  misc_RNA (1)...(19): siRNA sense strand
gaaauggaacagaaauaga

SEQ ID NO: 371666 - RNA, 19 nt, Homo sapiens
  misc_RNA (1)...(19): siRNA sense strand
uaaagacagucccagaaau

SEQ ID NO: 371667 - RNA, 19 nt, Homo sapiens
  misc_RNA (1)...(19): siRNA sense strand
ccaagaaguugucauagag

SEQ ID NO: 371668 - RNA, 19 nt, Homo sapiens
  misc_RNA (1)...(19): siRNA sense strand
gugcugagcugaagauucu

SEQ ID NO: 371669 - RNA, 19 nt, Homo sapiens
  misc_RNA (1)...(19): siRNA sense strand
gaagacagcacccaccaau

SEQ ID NO: 371670 - RNA, 19 nt, Homo sapiens
  misc_RNA (1)...(19): siRNA sense strand
aaauuaggguaccaucaua

SEQ ID NO: 371671 - RNA, 19 nt, Homo sapiens
  misc_RNA (1)...(19): siRNA sense strand
gacaagaagugcagucucu

SEQ ID NO: 371672 - RNA, 19 nt, Homo sapiens
  misc_RNA (1)...(19): siRNA sense strand
agacagagcaguuagagaa

SEQ ID NO: 371673 - RNA, 19 nt, Homo sapiens
  misc_RNA (1)...(19): siRNA sense strand
gaugaagguuaaugguuau

SEQ ID NO: 371674 - RNA, 19 nt, Homo sapiens
  misc_RNA (1)...(19): siRNA sense strand
gaaguucgagcauauagug

SEQ ID NO: 371675 - RNA, 19 nt, Homo sapiens
  misc_RNA (1)...(19): siRNA sense strand
uaacaggauuagaaggaaa

SEQ ID NO: 371676 - RNA, 19 nt, Homo sapiens
  misc_RNA (1)...(19): siRNA sense strand
gaaaguacggccacacugu

SEQ ID NO: 371677 - RNA, 19 nt, Homo sapiens
  misc_RNA (1)...(19): siRNA sense strand
ugagaugguuaauggagua

SEQ ID NO: 371678 - RNA, 19 nt, Homo sapiens
  misc_RNA (1)...(19): siRNA sense strand
gugauuaucgcuacaguuu

SEQ ID NO: 371679 - RNA, 19 nt, Homo sapiens
  misc_RNA (1)...(19): siRNA sense strand
acaggcaaccuuuauauuu

SEQ ID NO: 371680 - RNA, 19 nt, Homo sapiens
  misc_RNA (1)...(19): siRNA sense strand
ggaguauucuuaguagaga

SEQ ID NO: 371681 - RNA, 19 nt, Homo sapiens
  misc_RNA (1)...(19): siRNA sense strand
auagauggcaccuucauua

SEQ ID NO: 371682 - RNA, 19 nt, Homo sapiens
  misc_RNA (1)...(19): siRNA sense strand
gacagucccagaaaucaua

SEQ ID NO: 371683 - RNA, 19 nt, Homo sapiens
  misc_RNA (1)...(19): siRNA sense strand
gaaaggacagccuauugau

SEQ ID NO: 371684 - RNA, 19 nt, Homo sapiens
  misc_RNA (1)...(19): siRNA sense strand
caggcaaccuuuauauuuc

SEQ ID NO: 371685 - RNA, 19 nt, Homo sapiens
  misc_RNA (1)...(19): siRNA sense strand
aaaggauucuggucauuau

SEQ ID NO: 371686 - RNA, 19 nt, Homo sapiens
  misc_RNA (1)...(19): siRNA sense strand
aaggacagccuauugauuu

SEQ ID NO: 371687 - RNA, 19 nt, Homo sapiens
  misc_RNA (1)...(19): siRNA sense strand
ggagacaggcaaccuuuau

SEQ ID NO: 371688 - RNA, 19 nt, Homo sapiens
  misc_RNA (1)...(19): siRNA sense strand
gaagcuacacugcaguuug

SEQ ID NO: 371689 - RNA, 19 nt, Homo sapiens
  misc_RNA (1)...(19): siRNA sense strand
gaaacuucaagcaguagua

SEQ ID NO: 371690 - RNA, 19 nt, Homo sapiens
  misc_RNA (1)...(19): siRNA sense strand
gcaaggcucucagguuucu

SEQ ID NO: 371691 - RNA, 19 nt, Homo sapiens
  misc_RNA (1)...(19): siRNA sense strand
caagaaccagaugauauua

SEQ ID NO: 371692 - RNA, 19 nt, Homo sapiens
  misc_RNA (1)...(19): siRNA sense strand
gaggaaauaaccgaaagua

SEQ ID NO: 371693 - RNA, 19 nt, Homo sapiens
  misc_RNA (1)...(19): siRNA sense strand
gcauuguccuuaauugcaa

SEQ ID NO: 371694 - RNA, 19 nt, Homo sapiens
  misc_RNA (1)...(19): siRNA sense strand
aaaagaaccuacaaggaua

SEQ ID NO: 371695 - RNA, 19 nt, Homo sapiens
  misc_RNA (1)...(19): siRNA sense strand
gagacaggcaaccuuuaua

SEQ ID NO: 371696 - RNA, 19 nt, Homo sapiens
  misc_RNA (1)...(19): siRNA sense strand
gaaagugauuaucgcuaca

SEQ ID NO: 371697 - RNA, 19 nt, Homo sapiens
  misc_RNA (1)...(19): siRNA sense strand
ggguugagaugguuaaugg

SEQ ID NO: 371698 - RNA, 19 nt, Homo sapiens
  misc_RNA (1)...(19): siRNA sense strand
uauaagcaauccaagugaa

SEQ ID NO: 371699 - RNA, 19 nt, Homo sapiens
  misc_RNA (1)...(19): siRNA sense strand
caacagccaaguuauugaa

SEQ ID NO: 371700 - RNA, 19 nt, Homo sapiens
  misc_RNA (1)...(19): siRNA sense strand
gaagugaaaguuggcguuu

SEQ ID NO: 371701 - RNA, 19 nt, Homo sapiens
  misc_RNA (1)...(19): siRNA sense strand
gaaugauccgcacaaauga

SEQ ID NO: 371702 - RNA, 19 nt, Homo sapiens
  misc_RNA (1)...(19): siRNA sense strand
ugaaaggacagccuauuga

SEQ ID NO: 371703 - RNA, 19 nt, Homo sapiens
  misc_RNA (1)...(19): siRNA sense strand
ccaacaaucacauggauga

SEQ ID NO: 371704 - RNA, 19 nt, Homo sapiens
  misc_RNA (1)...(19): siRNA sense strand
gggagaauaugagccgaaa

SEQ ID NO: 371705 - RNA, 19 nt, Homo sapiens
  misc_RNA (1)...(19): siRNA sense strand
gcaccuucauuauaagcaa

SEQ ID NO: 371706 - RNA, 19 nt, Homo sapiens
  misc_RNA (1)...(19): siRNA sense strand
gaaacacauuaaagagagu

SEQ ID NO: 371707 - RNA, 19 nt, Homo sapiens
  misc_RNA (1)...(19): siRNA sense strand
uggaagaaggcaugaguua

SEQ ID NO: 371708 - RNA, 19 nt, Homo sapiens
  misc_RNA (1)...(19): siRNA sense strand
uaccaaagaccaagaaguu

SEQ ID NO: 371709 - RNA, 19 nt, Homo sapiens
  misc_RNA (1)...(19): siRNA sense strand
guuaauggaguauugauga

SEQ ID NO: 371710 - RNA, 19 nt, Homo sapiens
  misc_RNA (1)...(19): siRNA sense strand
ugaaugauacucaguuaga

SEQ ID NO: 371711 - RNA, 19 nt, Homo sapiens
  misc_RNA (1)...(19): siRNA sense strand
gugcagagcugaaaacuca

SEQ ID NO: 371712 - RNA, 19 nt, Homo sapiens
  misc_RNA (1)...(19): siRNA sense strand
ggaaauaccgaauguacag

SEQ ID NO: 371713 - RNA, 19 nt, Homo sapiens
  misc_RNA (1)...(19): siRNA sense strand
gaauguaaggcuacuggaa

SEQ ID NO: 371714 - RNA, 19 nt, Homo sapiens
  misc_RNA (1)...(19): siRNA sense strand
gggaacccgucauaccauu

SEQ ID NO: 371715 - RNA, 19 nt, Homo sapiens
  misc_RNA (1)...(19): siRNA sense strand
acaggaagauacagcagaa

SEQ ID NO: 371716 - RNA, 19 nt, Homo sapiens
  misc_RNA (1)...(19): siRNA sense strand
gguggaauaugaauuucga

SEQ ID NO: 371717 - RNA, 19 nt, Homo sapiens
  misc_RNA (1)...(19): siRNA sense strand
gaguauugaugauccacaa

SEQ ID NO: 371718 - RNA, 19 nt, Homo sapiens
  misc_RNA (1)...(19): siRNA sense strand
gcacugaaucaacugaaga

SEQ ID NO: 371719 - RNA, 19 nt, Homo sapiens
  misc_RNA (1)...(19): siRNA sense strand
ucaccuugcucuuggcauu

SEQ ID NO: 371720 - RNA, 19 nt, Homo sapiens
  misc_RNA (1)...(19): siRNA sense strand
gcagcaaggcucucagguu

SEQ ID NO: 371721 - RNA, 19 nt, Homo sapiens
  misc_RNA (1)...(19): siRNA sense strand
gaaagacauggaacaggaa

SEQ ID NO: 371722 - RNA, 19 nt, Homo sapiens
  misc_RNA (1)...(19): siRNA sense strand
cauggaaacacauuaaaga

SEQ ID NO: 371723 - RNA, 19 nt, Homo sapiens
  misc_RNA (1)...(19): siRNA sense strand
ugaaaguuggcguuuauaa

SEQ ID NO: 371724 - RNA, 19 nt, Homo sapiens
  misc_RNA (1)...(19): siRNA sense strand
gaacuuacuccuaaaagaa

SEQ ID NO: 371725 - RNA, 19 nt, Homo sapiens
  misc_RNA (1)...(19): siRNA sense strand
agaccaagaaguugucaua

SEQ ID NO: 371726 - RNA, 19 nt, Homo sapiens
  misc_RNA (1)...(19): siRNA sense strand
ggacacagcgacuacauua

SEQ ID NO: 371727 - RNA, 19 nt, Homo sapiens
  misc_RNA (1)...(19): siRNA sense strand
acaaagacgugcugccuua

SEQ ID NO: 371728 - RNA, 19 nt, Homo sapiens
  misc_RNA (1)...(19): siRNA sense strand
ggaagaaccgcuacaaaga

SEQ ID NO: 371729 - RNA, 19 nt, Homo sapiens
  misc_RNA (1)...(19): siRNA sense strand
gauggccugucgagagaua

SEQ ID NO: 371730 - RNA, 19 nt, Homo sapiens
  misc_RNA (1)...(19): siRNA sense strand
gaugugguccuuaagauga

SEQ ID NO: 371731 - RNA, 19 nt, Homo sapiens
  misc_RNA (1)...(19): siRNA sense strand
gaacaucaaagagaauugu

SEQ ID NO: 371732 - RNA, 19 nt, Homo sapiens
  misc_RNA (1)...(19): siRNA sense strand
cagagaacgugaggaagaa

SEQ ID NO: 371733 - RNA, 19 nt, Homo sapiens
  misc_RNA (1)...(19): siRNA sense strand
gaggaagaaccgcuacaaa

SEQ ID NO: 371734 - RNA, 19 nt, Homo sapiens
  misc_RNA (1)...(19): siRNA sense strand
gauagagaaugggcggaaa

SEQ ID NO: 371735 - RNA, 19 nt, Homo sapiens
  misc_RNA (1)...(19): siRNA sense strand
cuacgacgaugcccucuuc

SEQ ID NO: 371736 - RNA, 19 nt, Homo sapiens
  misc_RNA (1)...(19): siRNA sense strand
ccagagaacgugaggaaga

SEQ ID NO: 371737 - RNA, 19 nt, Homo sapiens
  misc_RNA (1)...(19): siRNA sense strand
cuacauuaauggcaacuuc

SEQ ID NO: 371738 - RNA, 19 nt, Homo sapiens
  misc_RNA (1)...(19): siRNA sense strand
cagcaguccugaccacaug

SEQ ID NO: 371739 - RNA, 19 nt, Homo sapiens
  misc_RNA (1)...(19): siRNA sense strand
aagacgugcugccuuauga

SEQ ID NO: 371740 - RNA, 19 nt, Homo sapiens
  misc_RNA (1)...(19): siRNA sense strand
ccaaaguccugccggaucu

SEQ ID NO: 371741 - RNA, 19 nt, Homo sapiens
  misc_RNA (1)...(19): siRNA sense strand
cagaggagcaguacagguu

SEQ ID NO: 371742 - RNA, 19 nt, Homo sapiens
  misc_RNA (1)...(19): siRNA sense strand
ccaggcacuucucgccaua

SEQ ID NO: 371743 - RNA, 19 nt, Homo sapiens
  misc_RNA (1)...(19): siRNA sense strand
aaggagaaguggcugaaug

SEQ ID NO: 371744 - RNA, 19 nt, Homo sapiens
  misc_RNA (1)...(19): siRNA sense strand
gaagaaccgcuacaaagac

SEQ ID NO: 371745 - RNA, 19 nt, Homo sapiens
  misc_RNA (1)...(19): siRNA sense strand
acacagcgacuacauuaau

SEQ ID NO: 371746 - RNA, 19 nt, Homo sapiens
  misc_RNA (1)...(19): siRNA sense strand
gaugaucccaccugacuuc

SEQ ID NO: 371747 - RNA, 19 nt, Homo sapiens
  misc_RNA (1)...(19): siRNA sense strand
gucgagagauagagaaugg

SEQ ID NO: 371748 - RNA, 19 nt, Homo sapiens
  misc_RNA (1)...(19): siRNA sense strand
gcuccacacuccagaaugc

SEQ ID NO: 371749 - RNA, 19 nt, Homo sapiens
  misc_RNA (1)...(19): siRNA sense strand
ggagucccguucuguguac

SEQ ID NO: 371750 - RNA, 19 nt, Homo sapiens
  misc_RNA (1)...(19): siRNA sense strand
uaccagaacaucaaagaga

SEQ ID NO: 371751 - RNA, 19 nt, Homo sapiens
  misc_RNA (1)...(19): siRNA sense strand
ggccagagaacgugaggaa

SEQ ID NO: 371752 - RNA, 19 nt, Homo sapiens
  misc_RNA (1)...(19): siRNA sense strand
cacagcgacuacauuaaug

SEQ ID NO: 371753 - RNA, 19 nt, Homo sapiens
  misc_RNA (1)...(19): siRNA sense strand
ucuuugaugugguccuuaa

SEQ ID NO: 371754 - RNA, 19 nt, Homo sapiens
  misc_RNA (1)...(19): siRNA sense strand
ggaagccuggccuacauug

SEQ ID NO: 371755 - RNA, 19 nt, Homo sapiens
  misc_RNA (1)...(19): siRNA sense strand
cugauggccugucgagaga

SEQ ID NO: 371756 - RNA, 19 nt, Homo sapiens
  misc_RNA (1)...(19): siRNA sense strand
ucacucugauaaaggagaa

SEQ ID NO: 371757 - RNA, 19 nt, Homo sapiens
  misc_RNA (1)...(19): siRNA sense strand
accagaacaucaaagagaa

SEQ ID NO: 371758 - RNA, 19 nt, Homo sapiens
  misc_RNA (1)...(19): siRNA sense strand
uaaaggagaaguggcugaa

SEQ ID NO: 371759 - RNA, 19 nt, Homo sapiens
  misc_RNA (1)...(19): siRNA sense strand
gacacagcgacuacauuaa

SEQ ID NO: 371760 - RNA, 19 nt, Homo sapiens
  misc_RNA (1)...(19): siRNA sense strand
ccuacgcgguggugcagaa

SEQ ID NO: 371761 - RNA, 19 nt, Homo sapiens
  misc_RNA (1)...(19): siRNA sense strand
ccacuaccagaacaucaaa

SEQ ID NO: 371762 - RNA, 19 nt, Homo sapiens
  misc_RNA (1)...(19): siRNA sense strand
caaggucacauuccagaag

SEQ ID NO: 371763 - RNA, 19 nt, Homo sapiens
  misc_RNA (1)...(19): siRNA sense strand
gauggaagccuggccuaca

SEQ ID NO: 371764 - RNA, 19 nt, Homo sapiens
  misc_RNA (1)...(19): siRNA sense strand
uaugaucagacgcgaguaa

SEQ ID NO: 371765 - RNA, 19 nt, Homo sapiens
  misc_RNA (1)...(19): siRNA sense strand
cagaacaucaaagagaauu

SEQ ID NO: 371766 - RNA, 19 nt, Homo sapiens
  misc_RNA (1)...(19): siRNA sense strand
cacgguggcucagauguuc

SEQ ID NO: 371767 - RNA, 19 nt, Homo sapiens
  misc_RNA (1)...(19): siRNA sense strand
gggacacagcgacuacauu

SEQ ID NO: 371768 - RNA, 19 nt, Homo sapiens
  misc_RNA (1)...(19): siRNA sense strand
ugaguggacccggguguaa

SEQ ID NO: 371769 - RNA, 19 nt, Homo sapiens
  misc_RNA (1)...(19): siRNA sense strand
cagaugaucccaccugacu

SEQ ID NO: 371770 - RNA, 19 nt, Homo sapiens
  misc_RNA (1)...(19): siRNA sense strand
aggaagaaccgcuacaaag

SEQ ID NO: 371771 - RNA, 19 nt, Homo sapiens
  misc_RNA (1)...(19): siRNA sense strand
gggucaaggugauccugau

SEQ ID NO: 371772 - RNA, 19 nt, Homo sapiens
  misc_RNA (1)...(19): siRNA sense strand
gaucagacgcgaguaaucc

SEQ ID NO: 371773 - RNA, 19 nt, Homo sapiens
  misc_RNA (1)...(19): siRNA sense strand
gcagacagaggagcaguac

SEQ ID NO: 371774 - RNA, 19 nt, Homo sapiens
  misc_RNA (1)...(19): siRNA sense strand
aggagaaguggcugaauga

SEQ ID NO: 371775 - RNA, 19 nt, Homo sapiens
  misc_RNA (1)...(19): siRNA sense strand
ccgcguuccugcugaccaa

SEQ ID NO: 371776 - RNA, 19 nt, Homo sapiens
  misc_RNA (1)...(19): siRNA sense strand
agacagaggagcaguacag

SEQ ID NO: 371777 - RNA, 19 nt, Homo sapiens
  misc_RNA (1)...(19): siRNA sense strand
ggucaaggugauccugaug

SEQ ID NO: 371778 - RNA, 19 nt, Homo sapiens
  misc_RNA (1)...(19): siRNA sense strand
aaagacgugcugccuuaug

SEQ ID NO: 371779 - RNA, 19 nt, Homo sapiens
  misc_RNA (1)...(19): siRNA sense strand
ccagaacaucaaagagaau

SEQ ID NO: 371780 - RNA, 19 nt, Homo sapiens
  misc_RNA (1)...(19): siRNA sense strand
ggagaaacccuggauauuu

SEQ ID NO: 371781 - RNA, 19 nt, Homo sapiens
  misc_RNA (1)...(19): siRNA sense strand
gcaguauucucucuucaaa

SEQ ID NO: 371782 - RNA, 19 nt, Homo sapiens
  misc_RNA (1)...(19): siRNA sense strand
ggaucucuguucuaucuua

SEQ ID NO: 371783 - RNA, 19 nt, Homo sapiens
  misc_RNA (1)...(19): siRNA sense strand
ccgagucucuugcgaaaua

SEQ ID NO: 371784 - RNA, 19 nt, Homo sapiens
  misc_RNA (1)...(19): siRNA sense strand
gcuuauaacuguacucuuc

SEQ ID NO: 371785 - RNA, 19 nt, Homo sapiens
  misc_RNA (1)...(19): siRNA sense strand
aagaggaucuguccaauau

SEQ ID NO: 371786 - RNA, 19 nt, Homo sapiens
  misc_RNA (1)...(19): siRNA sense strand
ggaagaaucccagcagaaa

SEQ ID NO: 371787 - RNA, 19 nt, Homo sapiens
  misc_RNA (1)...(19): siRNA sense strand
gaacaacccaaguagaguu

SEQ ID NO: 371788 - RNA, 19 nt, Homo sapiens
  misc_RNA (1)...(19): siRNA sense strand
ccagaaaccuacaaaccuu

SEQ ID NO: 371789 - RNA, 19 nt, Homo sapiens
  misc_RNA (1)...(19): siRNA sense strand
gaaucaccauguacuaaau

SEQ ID NO: 371790 - RNA, 19 nt, Homo sapiens
  misc_RNA (1)...(19): siRNA sense strand
gaacacauccaagcaguau

SEQ ID NO: 371791 - RNA, 19 nt, Homo sapiens
  misc_RNA (1)...(19): siRNA sense strand
gaggaucuguccaauaucu

SEQ ID NO: 371792 - RNA, 19 nt, Homo sapiens
  misc_RNA (1)...(19): siRNA sense strand
cagaaaggauggcuaugug

SEQ ID NO: 371793 - RNA, 19 nt, Homo sapiens
  misc_RNA (1)...(19): siRNA sense strand
caagaggaucuguccaaua

SEQ ID NO: 371794 - RNA, 19 nt, Homo sapiens
  misc_RNA (1)...(19): siRNA sense strand
cgaaauacaacaaugagaa

SEQ ID NO: 371795 - RNA, 19 nt, Homo sapiens
  misc_RNA (1)...(19): siRNA sense strand
gaaagaaggcauggcaaga

SEQ ID NO: 371796 - RNA, 19 nt, Homo sapiens
  misc_RNA (1)...(19): siRNA sense strand
gaacgacgcccaggaauac

SEQ ID NO: 371797 - RNA, 19 nt, Homo sapiens
  misc_RNA (1)...(19): siRNA sense strand
uaacaaagacagaaaggau

SEQ ID NO: 371798 - RNA, 19 nt, Homo sapiens
  misc_RNA (1)...(19): siRNA sense strand
cuucuuacuucguggaaua

SEQ ID NO: 371799 - RNA, 19 nt, Homo sapiens
  misc_RNA (1)...(19): siRNA sense strand
uggcaagacuguggaauga

SEQ ID NO: 371800 - RNA, 19 nt, Homo sapiens
  misc_RNA (1)...(19): siRNA sense strand
caagcaguauucucucuuc

SEQ ID NO: 371801 - RNA, 19 nt, Homo sapiens
  misc_RNA (1)...(19): siRNA sense strand
uccaauaucuuccugacuu

SEQ ID NO: 371802 - RNA, 19 nt, Homo sapiens
  misc_RNA (1)...(19): siRNA sense strand
uauaugaacaacccaagua

SEQ ID NO: 371803 - RNA, 19 nt, Homo sapiens
  misc_RNA (1)...(19): siRNA sense strand
cuauuuagcugcuuauaac

SEQ ID NO: 371804 - RNA, 19 nt, Homo sapiens
  misc_RNA (1)...(19): siRNA sense strand
gcuggcaguugcaggcuuu

SEQ ID NO: 371805 - RNA, 19 nt, Homo sapiens
  misc_RNA (1)...(19): siRNA sense strand
gggagaaacccuggauauu

SEQ ID NO: 371806 - RNA, 19 nt, Homo sapiens
  misc_RNA (1)...(19): siRNA sense strand
ugaaucaguuuauggucaa

SEQ ID NO: 371807 - RNA, 19 nt, Homo sapiens
  misc_RNA (1)...(19): siRNA sense strand
ccaauaucuuccugacuug

SEQ ID NO: 371808 - RNA, 19 nt, Homo sapiens
  misc_RNA (1)...(19): siRNA sense strand
caccgagucucuugcgaaa

SEQ ID NO: 371809 - RNA, 19 nt, Homo sapiens
  misc_RNA (1)...(19): siRNA sense strand
ugaacgacgcccaggaaua

SEQ ID NO: 371810 - RNA, 19 nt, Homo sapiens
  misc_RNA (1)...(19): siRNA sense strand
ggauauuuccuuccucuuc

SEQ ID NO: 371811 - RNA, 19 nt, Homo sapiens
  misc_RNA (1)...(19): siRNA sense strand
gcuguuaaccagaaaccua

SEQ ID NO: 371812 - RNA, 19 nt, Homo sapiens
  misc_RNA (1)...(19): siRNA sense strand
gccaugugcucagaaagaa

SEQ ID NO: 371813 - RNA, 19 nt, Homo sapiens
  misc_RNA (1)...(19): siRNA sense strand
ccacugacucuuccaauca

SEQ ID NO: 371814 - RNA, 19 nt, Homo sapiens
  misc_RNA (1)...(19): siRNA sense strand
gaaauacaacaaugagaac

SEQ ID NO: 371815 - RNA, 19 nt, Homo sapiens
  misc_RNA (1)...(19): siRNA sense strand
caagcuccauacccacuga

SEQ ID NO: 371816 - RNA, 19 nt, Homo sapiens
  misc_RNA (1)...(19): siRNA sense strand
ccaagaggaucuguccaau

SEQ ID NO: 371817 - RNA, 19 nt, Homo sapiens
  misc_RNA (1)...(19): siRNA sense strand
gggaaaaguuugucucugu

SEQ ID NO: 371818 - RNA, 19 nt, Homo sapiens
  misc_RNA (1)...(19): siRNA sense strand
aguauucucucuucaaagu

SEQ ID NO: 371819 - RNA, 19 nt, Homo sapiens
  misc_RNA (1)...(19): siRNA sense strand
ccugggaucucuguucuau

SEQ ID NO: 371820 - RNA, 19 nt, Homo sapiens
  misc_RNA (1)...(19): siRNA sense strand
ugggaucucuguucuaucu

SEQ ID NO: 371821 - RNA, 19 nt, Homo sapiens
  misc_RNA (1)...(19): siRNA sense strand
aaagaaucaccauguacua

SEQ ID NO: 371822 - RNA, 19 nt, Homo sapiens
  misc_RNA (1)...(19): siRNA sense strand
ugucggcccuucuuacuuc

SEQ ID NO: 371823 - RNA, 19 nt, Homo sapiens
  misc_RNA (1)...(19): siRNA sense strand
gaaggcauggcaagacugu

SEQ ID NO: 371824 - RNA, 19 nt, Homo sapiens
  misc_RNA (1)...(19): siRNA sense strand
cagaaugccagcccucuug

SEQ ID NO: 371825 - RNA, 19 nt, Homo sapiens
  misc_RNA (1)...(19): siRNA sense strand
ggauggcuaugugcugaga

SEQ ID NO: 371826 - RNA, 19 nt, Homo sapiens
  misc_RNA (1)...(19): siRNA sense strand
uggaugugcuagagacuga

SEQ ID NO: 371827 - RNA, 19 nt, Homo sapiens
  misc_RNA (1)...(19): siRNA sense strand
ugcgggauauuaacaaaga

SEQ ID NO: 371828 - RNA, 19 nt, Homo sapiens
  misc_RNA (1)...(19): siRNA sense strand
cuccaaagcugggccaaga

SEQ ID NO: 371829 - RNA, 19 nt, Homo sapiens
  misc_RNA (1)...(19): siRNA sense strand
agaaucaccauguacuaaa

SEQ ID NO: 371830 - RNA, 19 nt, Homo sapiens
  misc_RNA (1)...(19): siRNA sense strand
agacagaaaggauggcuau

SEQ ID NO: 371831 - RNA, 19 nt, Homo sapiens
  misc_RNA (1)...(19): siRNA sense strand
cuuccugacuuggaugaua

SEQ ID NO: 371832 - RNA, 19 nt, Homo sapiens
  misc_RNA (1)...(19): siRNA sense strand
ugacuugugacuucuuuga

SEQ ID NO: 371833 - RNA, 19 nt, Homo sapiens
  misc_RNA (1)...(19): siRNA sense strand
acaaugagaacacauccaa

SEQ ID NO: 371834 - RNA, 19 nt, Homo sapiens
  misc_RNA (1)...(19): siRNA sense strand
ugacugccaugugcucaga

SEQ ID NO: 371835 - RNA, 19 nt, Homo sapiens
  misc_RNA (1)...(19): siRNA sense strand
gccaagaggaucuguccaa

SEQ ID NO: 371836 - RNA, 19 nt, Homo sapiens
  misc_RNA (1)...(19): siRNA sense strand
uaaagaaucaccauguacu

SEQ ID NO: 371837 - RNA, 19 nt, Homo sapiens
  misc_RNA (1)...(19): siRNA sense strand
cuuacuucguggaauauuu

SEQ ID NO: 371838 - RNA, 19 nt, Homo sapiens
  misc_RNA (1)...(19): siRNA sense strand
ggucaaugcaaagcaauau

SEQ ID NO: 371839 - RNA, 19 nt, Homo sapiens
  misc_RNA (1)...(19): siRNA sense strand
agugaaaacucugcuguua

SEQ ID NO: 371840 - RNA, 19 nt, Homo sapiens
  misc_RNA (1)...(19): siRNA sense strand
aagaaucaccauguacuaa

SEQ ID NO: 371841 - RNA, 19 nt, Homo sapiens
  misc_RNA (1)...(19): siRNA sense strand
acacauccaagcaguauuc

SEQ ID NO: 371842 - RNA, 19 nt, Homo sapiens
  misc_RNA (1)...(19): siRNA sense strand
uauggucaaugcaaagcaa

SEQ ID NO: 371843 - RNA, 19 nt, Homo sapiens
  misc_RNA (1)...(19): siRNA sense strand
uuccugacuuggaugauaa

SEQ ID NO: 371844 - RNA, 19 nt, Homo sapiens
  misc_RNA (1)...(19): siRNA sense strand
uugcaaagguucucugacu

SEQ ID NO: 371845 - RNA, 19 nt, Homo sapiens
  misc_RNA (1)...(19): siRNA sense strand
ugacugcccaagcuccaua

SEQ ID NO: 371846 - RNA, 19 nt, Homo sapiens
  misc_RNA (1)...(19): siRNA sense strand
gaacacacugggaaaaguu

SEQ ID NO: 371847 - RNA, 19 nt, Homo sapiens
  misc_RNA (1)...(19): siRNA sense strand
uauucucucuucaaaguca

SEQ ID NO: 371848 - RNA, 19 nt, Homo sapiens
  misc_RNA (1)...(19): siRNA sense strand
ggauauuaacaaagacaga

SEQ ID NO: 371849 - RNA, 19 nt, Homo sapiens
  misc_RNA (1)...(19): siRNA sense strand
gcuuugcccugcgggauau

SEQ ID NO: 371850 - RNA, 19 nt, Homo sapiens
  misc_RNA (1)...(19): siRNA sense strand
ccugcgggauauuaacaaa

SEQ ID NO: 371851 - RNA, 19 nt, Homo sapiens
  misc_RNA (1)...(19): siRNA sense strand
gaagaaucccagcagaaaa

SEQ ID NO: 371852 - RNA, 19 nt, Homo sapiens
  misc_RNA (1)...(19): siRNA sense strand
cauccaagcaguauucucu

SEQ ID NO: 371853 - RNA, 19 nt, Homo sapiens
  misc_RNA (1)...(19): siRNA sense strand
gcgaaauacaacaaugaga

SEQ ID NO: 371854 - RNA, 19 nt, Homo sapiens
  misc_RNA (1)...(19): siRNA sense strand
gaucucuguucuaucuuac

SEQ ID NO: 371855 - RNA, 19 nt, Homo sapiens
  misc_RNA (1)...(19): siRNA sense strand
ggaucuguccaauaucuuc

SEQ ID NO: 371856 - RNA, 19 nt, Homo sapiens
  misc_RNA (1)...(19): siRNA sense strand
ugugacuugugacuucuuu

SEQ ID NO: 371857 - RNA, 19 nt, Homo sapiens
  misc_RNA (1)...(19): siRNA sense strand
auacaacaaugagaacaca

SEQ ID NO: 371858 - RNA, 19 nt, Homo sapiens
  misc_RNA (1)...(19): siRNA sense strand
ugccagcccucuuguccuu

SEQ ID NO: 371859 - RNA, 19 nt, Homo sapiens
  misc_RNA (1)...(19): siRNA sense strand
ggccugggaucucuguucu

SEQ ID NO: 371860 - RNA, 19 nt, Homo sapiens
  misc_RNA (1)...(19): siRNA sense strand
acagaaaggauggcuaugu

SEQ ID NO: 371861 - RNA, 19 nt, Homo sapiens
  misc_RNA (1)...(19): siRNA sense strand
ugaaaacucugcuguuaac

SEQ ID NO: 371862 - RNA, 19 nt, Homo sapiens
  misc_RNA (1)...(19): siRNA sense strand
uuuagcugcuuauaacugu

SEQ ID NO: 371863 - RNA, 19 nt, Homo sapiens
  misc_RNA (1)...(19): siRNA sense strand
gaaucaguuuauggucaau

SEQ ID NO: 371864 - RNA, 19 nt, Homo sapiens
  misc_RNA (1)...(19): siRNA sense strand
acuugugacuucuuugaau

SEQ ID NO: 371865 - RNA, 19 nt, Homo sapiens
  misc_RNA (1)...(19): siRNA sense strand
gaaaaguuugucucuguga

SEQ ID NO: 371866 - RNA, 19 nt, Homo sapiens
  misc_RNA (1)...(19): siRNA sense strand
gccuguuggucuuugcaaa

SEQ ID NO: 371867 - RNA, 19 nt, Homo sapiens
  misc_RNA (1)...(19): siRNA sense strand
caacccaaguagaguucuc

SEQ ID NO: 371868 - RNA, 19 nt, Homo sapiens
  misc_RNA (1)...(19): siRNA sense strand
aagaaggcauggcaagacu

SEQ ID NO: 371869 - RNA, 19 nt, Homo sapiens
  misc_RNA (1)...(19): siRNA sense strand
uggaagaaucccagcagaa

SEQ ID NO: 371870 - RNA, 19 nt, Homo sapiens
  misc_RNA (1)...(19): siRNA sense strand
ggaggccuuuccugugcau

SEQ ID NO: 371871 - RNA, 19 nt, Homo sapiens
  misc_RNA (1)...(19): siRNA sense strand
gacuguggaaugaggauau

SEQ ID NO: 371872 - RNA, 19 nt, Homo sapiens
  misc_RNA (1)...(19): siRNA sense strand
uaugaacaacccaaguaga

SEQ ID NO: 371873 - RNA, 19 nt, Homo sapiens
  misc_RNA (1)...(19): siRNA sense strand
ggaaggacauuuggcaauu

SEQ ID NO: 371874 - RNA, 19 nt, Homo sapiens
  misc_RNA (1)...(19): siRNA sense strand
gaauggaaccaaagcaaua

SEQ ID NO: 371875 - RNA, 19 nt, Homo sapiens
  misc_RNA (1)...(19): siRNA sense strand
ugaagcugcuguuacuuua

SEQ ID NO: 371876 - RNA, 19 nt, Homo sapiens
  misc_RNA (1)...(19): siRNA sense strand
ucgcauagcuacauucuga

SEQ ID NO: 371877 - RNA, 19 nt, Homo sapiens
  misc_RNA (1)...(19): siRNA sense strand
agagagaacuccuacaaga

SEQ ID NO: 371878 - RNA, 19 nt, Homo sapiens
  misc_RNA (1)...(19): siRNA sense strand
gaaggacauuuggcaauug

SEQ ID NO: 371879 - RNA, 19 nt, Homo sapiens
  misc_RNA (1)...(19): siRNA sense strand
gcgcggaucucaacaucaa

SEQ ID NO: 371880 - RNA, 19 nt, Homo sapiens
  misc_RNA (1)...(19): siRNA sense strand
ggugaggacuggccacuau

SEQ ID NO: 371881 - RNA, 19 nt, Homo sapiens
  misc_RNA (1)...(19): siRNA sense strand
gaaagaagaauggcaaugg

SEQ ID NO: 371882 - RNA, 19 nt, Homo sapiens
  misc_RNA (1)...(19): siRNA sense strand
cuacaagaccucucgcaua

SEQ ID NO: 371883 - RNA, 19 nt, Homo sapiens
  misc_RNA (1)...(19): siRNA sense strand
cagaucgaauuccgugaua

SEQ ID NO: 371884 - RNA, 19 nt, Homo sapiens
  misc_RNA (1)...(19): siRNA sense strand
aggcugcucuggagaauaa

SEQ ID NO: 371885 - RNA, 19 nt, Homo sapiens
  misc_RNA (1)...(19): siRNA sense strand
uuucagagauggagaguau

SEQ ID NO: 371886 - RNA, 19 nt, Homo sapiens
  misc_RNA (1)...(19): siRNA sense strand
guaugaagcugcuguuacu

SEQ ID NO: 371887 - RNA, 19 nt, Homo sapiens
  misc_RNA (1)...(19): siRNA sense strand
uacaagaccucucgcauag

SEQ ID NO: 371888 - RNA, 19 nt, Homo sapiens
  misc_RNA (1)...(19): siRNA sense strand
gaacuggucacuggaaaga

SEQ ID NO: 371889 - RNA, 19 nt, Homo sapiens
  misc_RNA (1)...(19): siRNA sense strand
agacugaaccgcuauaaga

SEQ ID NO: 371890 - RNA, 19 nt, Homo sapiens
  misc_RNA (1)...(19): siRNA sense strand
aaacggacagcucuucaua

SEQ ID NO: 371891 - RNA, 19 nt, Homo sapiens
  misc_RNA (1)...(19): siRNA sense strand
ggaagacgccgauggaucu

SEQ ID NO: 371892 - RNA, 19 nt, Homo sapiens
  misc_RNA (1)...(19): siRNA sense strand
cgaauuccgugauaugcuu

SEQ ID NO: 371893 - RNA, 19 nt, Homo sapiens
  misc_RNA (1)...(19): siRNA sense strand
gugcuacacuggcagaaug

SEQ ID NO: 371894 - RNA, 19 nt, Homo sapiens
  misc_RNA (1)...(19): siRNA sense strand
accagaaccugaaaucauu

SEQ ID NO: 371895 - RNA, 19 nt, Homo sapiens
  misc_RNA (1)...(19): siRNA sense strand
gaaggcugcucuggagaau

SEQ ID NO: 371896 - RNA, 19 nt, Homo sapiens
  misc_RNA (1)...(19): siRNA sense strand
gcaggaggaucugaagaca

SEQ ID NO: 371897 - RNA, 19 nt, Homo sapiens
  misc_RNA (1)...(19): siRNA sense strand
gcaauuguggagaaguuaa

SEQ ID NO: 371898 - RNA, 19 nt, Homo sapiens
  misc_RNA (1)...(19): siRNA sense strand
cugaaccgcuauaagauga

SEQ ID NO: 371899 - RNA, 19 nt, Homo sapiens
  misc_RNA (1)...(19): siRNA sense strand
gacaagaacaauccagaug

SEQ ID NO: 371900 - RNA, 19 nt, Homo sapiens
  misc_RNA (1)...(19): siRNA sense strand
gaucgaauuccgugauaug

SEQ ID NO: 371901 - RNA, 19 nt, Homo sapiens
  misc_RNA (1)...(19): siRNA sense strand
ucauagagcaugcuuggaa

SEQ ID NO: 371902 - RNA, 19 nt, Homo sapiens
  misc_RNA (1)...(19): siRNA sense strand
acggacagcucuucauaga

SEQ ID NO: 371903 - RNA, 19 nt, Homo sapiens
  misc_RNA (1)...(19): siRNA sense strand
gaaccagaaccugaaauca

SEQ ID NO: 371904 - RNA, 19 nt, Homo sapiens
  misc_RNA (1)...(19): siRNA sense strand
gaaccaaagcaauauucga

SEQ ID NO: 371905 - RNA, 19 nt, Homo sapiens
  misc_RNA (1)...(19): siRNA sense strand
caagaccucucgcauagcu

SEQ ID NO: 371906 - RNA, 19 nt, Homo sapiens
  misc_RNA (1)...(19): siRNA sense strand
ucagagagaacuccuacaa

SEQ ID NO: 371907 - RNA, 19 nt, Homo sapiens
  misc_RNA (1)...(19): siRNA sense strand
agaagaccuugaaauaauc

SEQ ID NO: 371908 - RNA, 19 nt, Homo sapiens
  misc_RNA (1)...(19): siRNA sense strand
ggaaccagaaccugaaauc

SEQ ID NO: 371909 - RNA, 19 nt, Homo sapiens
  misc_RNA (1)...(19): siRNA sense strand
cgauggaucuggugcuaca

SEQ ID NO: 371910 - RNA, 19 nt, Homo sapiens
  misc_RNA (1)...(19): siRNA sense strand
gaaccgcuauaagaugauc

SEQ ID NO: 371911 - RNA, 19 nt, Homo sapiens
  misc_RNA (1)...(19): siRNA sense strand
ccagaaccugaaaucauua

SEQ ID NO: 371912 - RNA, 19 nt, Homo sapiens
  misc_RNA (1)...(19): siRNA sense strand
ggaaagaagaauggcaaug

SEQ ID NO: 371913 - RNA, 19 nt, Homo sapiens
  misc_RNA (1)...(19): siRNA sense strand
ucagagauggagaguauga

SEQ ID NO: 371914 - RNA, 19 nt, Homo sapiens
  misc_RNA (1)...(19): siRNA sense strand
aagcugcuguuacuuuaga

SEQ ID NO: 371915 - RNA, 19 nt, Homo sapiens
  misc_RNA (1)...(19): siRNA sense strand
gaugauccgacuccugauu

SEQ ID NO: 371916 - RNA, 19 nt, Homo sapiens
  misc_RNA (1)...(19): siRNA sense strand
gaagaccuugaaauaauca

SEQ ID NO: 371917 - RNA, 19 nt, Homo sapiens
  misc_RNA (1)...(19): siRNA sense strand
gaguaugaagcugcuguua

SEQ ID NO: 371918 - RNA, 19 nt, Homo sapiens
  misc_RNA (1)...(19): siRNA sense strand
uuacggaaccuguggaugu

SEQ ID NO: 371919 - RNA, 19 nt, Homo sapiens
  misc_RNA (1)...(19): siRNA sense strand
uggcaauuguggagaaguu

SEQ ID NO: 371920 - RNA, 19 nt, Homo sapiens
  misc_RNA (1)...(19): siRNA sense strand
gccgauggaucuggugcua

SEQ ID NO: 371921 - RNA, 19 nt, Homo sapiens
  misc_RNA (1)...(19): siRNA sense strand
ccucaacgccaaagacaga

SEQ ID NO: 371922 - RNA, 19 nt, Homo sapiens
  misc_RNA (1)...(19): siRNA sense strand
caauccagauguuugugau

SEQ ID NO: 371923 - RNA, 19 nt, Homo sapiens
  misc_RNA (1)...(19): siRNA sense strand
uaaaguuccaguuguaaag

SEQ ID NO: 371924 - RNA, 19 nt, Homo sapiens
  misc_RNA (1)...(19): siRNA sense strand
aaaggaaccagaaccugaa

SEQ ID NO: 371925 - RNA, 19 nt, Homo sapiens
  misc_RNA (1)...(19): siRNA sense strand
gaccuugaaauaaucauuc

SEQ ID NO: 371926 - RNA, 19 nt, Homo sapiens
  misc_RNA (1)...(19): siRNA sense strand
gaggaacuggucacuggaa

SEQ ID NO: 371927 - RNA, 19 nt, Homo sapiens
  misc_RNA (1)...(19): siRNA sense strand
cagaauggaaccaaagcaa

SEQ ID NO: 371928 - RNA, 19 nt, Homo sapiens
  misc_RNA (1)...(19): siRNA sense strand
aaagacagagaaggagaua

SEQ ID NO: 371929 - RNA, 19 nt, Homo sapiens
  misc_RNA (1)...(19): siRNA sense strand
cuaaaguuccaguuguaaa

SEQ ID NO: 371930 - RNA, 19 nt, Homo sapiens
  misc_RNA (1)...(19): siRNA sense strand
gaucucaacaucaagaacu

SEQ ID NO: 371931 - RNA, 19 nt, Homo sapiens
  misc_RNA (1)...(19): siRNA sense strand
gaagcaggaggaucugaag

SEQ ID NO: 371932 - RNA, 19 nt, Homo sapiens
  misc_RNA (1)...(19): siRNA sense strand
uagagaagcaggaggaucu

SEQ ID NO: 371933 - RNA, 19 nt, Homo sapiens
  misc_RNA (1)...(19): siRNA sense strand
caaagacagagaaggagau

SEQ ID NO: 371934 - RNA, 19 nt, Homo sapiens
  misc_RNA (1)...(19): siRNA sense strand
ugaaggcugcucuggagaa

SEQ ID NO: 371935 - RNA, 19 nt, Homo sapiens
  misc_RNA (1)...(19): siRNA sense strand
gagauaccccguugcauga

SEQ ID NO: 371936 - RNA, 19 nt, Homo sapiens
  misc_RNA (1)...(19): siRNA sense strand
acaagaacaauccagaugu

SEQ ID NO: 371937 - RNA, 19 nt, Homo sapiens
  misc_RNA (1)...(19): siRNA sense strand
caacgccaaagacagagaa

SEQ ID NO: 371938 - RNA, 19 nt, Homo sapiens
  misc_RNA (1)...(19): siRNA sense strand
aggaggaucugaagacacu

SEQ ID NO: 371939 - RNA, 19 nt, Homo sapiens
  misc_RNA (1)...(19): siRNA sense strand
gcggaucucaacaucaaga

SEQ ID NO: 371940 - RNA, 19 nt, Homo sapiens
  misc_RNA (1)...(19): siRNA sense strand
ugauccgacuccugauuau

SEQ ID NO: 371941 - RNA, 19 nt, Homo sapiens
  misc_RNA (1)...(19): siRNA sense strand
ccagauguuugugaugagu

SEQ ID NO: 371942 - RNA, 19 nt, Homo sapiens
  misc_RNA (1)...(19): siRNA sense strand
gagagaacuccuacaagac

SEQ ID NO: 371943 - RNA, 19 nt, Homo sapiens
  misc_RNA (1)...(19): siRNA sense strand
gaaaagcgagaaacaacga

SEQ ID NO: 371944 - RNA, 19 nt, Homo sapiens
  misc_RNA (1)...(19): siRNA sense strand
gacugaaccgcuauaagau

SEQ ID NO: 371945 - RNA, 19 nt, Homo sapiens
  misc_RNA (1)...(19): siRNA sense strand
aaggacauuuggcaauugu

SEQ ID NO: 371946 - RNA, 19 nt, Homo sapiens
  misc_RNA (1)...(19): siRNA sense strand
agauguuugugaugaguau

SEQ ID NO: 371947 - RNA, 19 nt, Homo sapiens
  misc_RNA (1)...(19): siRNA sense strand
ugaggacuggccacuauga

SEQ ID NO: 371948 - RNA, 19 nt, Homo sapiens
  misc_RNA (1)...(19): siRNA sense strand
ggcaagccguggaggaaac

SEQ ID NO: 371949 - RNA, 19 nt, Homo sapiens
  misc_RNA (1)...(19): siRNA sense strand
ggcaauuguggagaaguua

SEQ ID NO: 371950 - RNA, 19 nt, Homo sapiens
  misc_RNA (1)...(19): siRNA sense strand
gaagcugcuguuacuuuag

SEQ ID NO: 371951 - RNA, 19 nt, Homo sapiens
  misc_RNA (1)...(19): siRNA sense strand
ccucucgcauagcuacauu

SEQ ID NO: 371952 - RNA, 19 nt, Homo sapiens
  misc_RNA (1)...(19): siRNA sense strand
caugaugcggugagacuga

SEQ ID NO: 371953 - RNA, 19 nt, Homo sapiens
  misc_RNA (1)...(19): siRNA sense strand
cgccaaagacagagaagga

SEQ ID NO: 371954 - RNA, 19 nt, Homo sapiens
  misc_RNA (1)...(19): siRNA sense strand
gaccucaacgccaaagaca

SEQ ID NO: 371955 - RNA, 19 nt, Homo sapiens
  misc_RNA (1)...(19): siRNA sense strand
gaugugccuacguuucuga

SEQ ID NO: 371956 - RNA, 19 nt, Homo sapiens
  misc_RNA (1)...(19): siRNA sense strand
ggaugugccuacguuucug

SEQ ID NO: 371957 - RNA, 19 nt, Homo sapiens
  misc_RNA (1)...(19): siRNA sense strand
uccgacuccugauuaugua

SEQ ID NO: 371958 - RNA, 19 nt, Homo sapiens
  misc_RNA (1)...(19): siRNA sense strand
gggcaagccguggaggaaa

SEQ ID NO: 371959 - RNA, 19 nt, Homo sapiens
  misc_RNA (1)...(19): siRNA sense strand
gagaagcaggaggaucuga

SEQ ID NO: 371960 - RNA, 19 nt, Homo sapiens
  misc_RNA (1)...(19): siRNA sense strand
auccagauguuugugauga

SEQ ID NO: 371961 - RNA, 19 nt, Homo sapiens
  misc_RNA (1)...(19): siRNA sense strand
gcagaauggaaccaaagca

SEQ ID NO: 371962 - RNA, 19 nt, Homo sapiens
  misc_RNA (1)...(19): siRNA sense strand
augaagcugcuguuacuuu

SEQ ID NO: 371963 - RNA, 19 nt, Homo sapiens
  misc_RNA (1)...(19): siRNA sense strand
caacugaagaaaaggaaaa

SEQ ID NO: 371964 - RNA, 19 nt, Homo sapiens
  misc_RNA (1)...(19): siRNA sense strand
aauuguugcugaauaaagg

SEQ ID NO: 371965 - RNA, 19 nt, Homo sapiens
  misc_RNA (1)...(19): siRNA sense strand
gagacugaaccgcuauaag

SEQ ID NO: 371966 - RNA, 19 nt, Homo sapiens
  misc_RNA (1)...(19): siRNA sense strand
augauccgacuccugauua

SEQ ID NO: 371967 - RNA, 19 nt, Homo sapiens
  misc_RNA (1)...(19): siRNA sense strand
aggaacuggucacuggaaa

SEQ ID NO: 371968 - RNA, 19 nt, Homo sapiens
  misc_RNA (1)...(19): siRNA sense strand
aaccagaaccugaaaucau

SEQ ID NO: 371969 - RNA, 19 nt, Homo sapiens
  misc_RNA (1)...(19): siRNA sense strand
ucacuggaaagaagaaugg

SEQ ID NO: 371970 - RNA, 19 nt, Homo sapiens
  misc_RNA (1)...(19): siRNA sense strand
ccagaucgaauuccgugau

SEQ ID NO: 371971 - RNA, 19 nt, Homo sapiens
  misc_RNA (1)...(19): siRNA sense strand
agaauggaaccaaagcaau

SEQ ID NO: 371972 - RNA, 19 nt, Homo sapiens
  misc_RNA (1)...(19): siRNA sense strand
gaaaggauauggaugauga

SEQ ID NO: 371973 - RNA, 19 nt, Homo sapiens
  misc_RNA (1)...(19): siRNA sense strand
gaaauaugccugucaguuu

SEQ ID NO: 371974 - RNA, 19 nt, Homo sapiens
  misc_RNA (1)...(19): siRNA sense strand
ggauauggaugaugacaaa

SEQ ID NO: 371975 - RNA, 19 nt, Homo sapiens
  misc_RNA (1)...(19): siRNA sense strand
caaagccauucccaaauua

SEQ ID NO: 371976 - RNA, 19 nt, Homo sapiens
  misc_RNA (1)...(19): siRNA sense strand
gcaaugcuguuacaacuug

SEQ ID NO: 371977 - RNA, 19 nt, Homo sapiens
  misc_RNA (1)...(19): siRNA sense strand
gcaaauaagucugagauca

SEQ ID NO: 371978 - RNA, 19 nt, Homo sapiens
  misc_RNA (1)...(19): siRNA sense strand
gcacuacucuaggcuauuu

SEQ ID NO: 371979 - RNA, 19 nt, Homo sapiens
  misc_RNA (1)...(19): siRNA sense strand
ccaaagccauucccaaauu

SEQ ID NO: 371980 - RNA, 19 nt, Homo sapiens
  misc_RNA (1)...(19): siRNA sense strand
ccacuaaucuucaggauca

SEQ ID NO: 371981 - RNA, 19 nt, Homo sapiens
  misc_RNA (1)...(19): siRNA sense strand
ccagaaagaucuccucaga

SEQ ID NO: 371982 - RNA, 19 nt, Homo sapiens
  misc_RNA (1)...(19): siRNA sense strand
agaaagaucuccucagaau

SEQ ID NO: 371983 - RNA, 19 nt, Homo sapiens
  misc_RNA (1)...(19): siRNA sense strand
ugacaaagaugcaaauaag

SEQ ID NO: 371984 - RNA, 19 nt, Homo sapiens
  misc_RNA (1)...(19): siRNA sense strand
gaaggcagcaguauaaaga

SEQ ID NO: 371985 - RNA, 19 nt, Homo sapiens
  misc_RNA (1)...(19): siRNA sense strand
caauaaagcuuugacugaa

SEQ ID NO: 371986 - RNA, 19 nt, Homo sapiens
  misc_RNA (1)...(19): siRNA sense strand
ugaaugggcuugcuaugaa

SEQ ID NO: 371987 - RNA, 19 nt, Homo sapiens
  misc_RNA (1)...(19): siRNA sense strand
acacaaugcugcaaugaaa

SEQ ID NO: 371988 - RNA, 19 nt, Homo sapiens
  misc_RNA (1)...(19): siRNA sense strand
gagaucagcuuaguguuug

SEQ ID NO: 371989 - RNA, 19 nt, Homo sapiens
  misc_RNA (1)...(19): siRNA sense strand
gaagguaggcaaugaaguu

SEQ ID NO: 371990 - RNA, 19 nt, Homo sapiens
  misc_RNA (1)...(19): siRNA sense strand
ccagggaacuccuuaugaa

SEQ ID NO: 371991 - RNA, 19 nt, Homo sapiens
  misc_RNA (1)...(19): siRNA sense strand
uaaaucagauguucucagu

SEQ ID NO: 371992 - RNA, 19 nt, Homo sapiens
  misc_RNA (1)...(19): siRNA sense strand
gaaugggcuugcuaugaaa

SEQ ID NO: 371993 - RNA, 19 nt, Homo sapiens
  misc_RNA (1)...(19): siRNA sense strand
ccaauaaagcuuugacuga

SEQ ID NO: 371994 - RNA, 19 nt, Homo sapiens
  misc_RNA (1)...(19): siRNA sense strand
aaaguaaucucuggcacua

SEQ ID NO: 371995 - RNA, 19 nt, Homo sapiens
  misc_RNA (1)...(19): siRNA sense strand
gaacugaaugggcuugcua

SEQ ID NO: 371996 - RNA, 19 nt, Homo sapiens
  misc_RNA (1)...(19): siRNA sense strand
caacuggaauauuuagcaa

SEQ ID NO: 371997 - RNA, 19 nt, Homo sapiens
  misc_RNA (1)...(19): siRNA sense strand
gcagaaggagaaggaaaua

SEQ ID NO: 371998 - RNA, 19 nt, Homo sapiens
  misc_RNA (1)...(19): siRNA sense strand
gaauaguucagcuacaauu

SEQ ID NO: 371999 - RNA, 19 nt, Homo sapiens
  misc_RNA (1)...(19): siRNA sense strand
uauaaagcauccacuaauc

SEQ ID NO: 372000 - RNA, 19 nt, Homo sapiens
  misc_RNA (1)...(19): siRNA sense strand
uccaagcacugcagaauga

SEQ ID NO: 372001 - RNA, 19 nt, Homo sapiens
  misc_RNA (1)...(19): siRNA sense strand
gaauauggccaagggauga

SEQ ID NO: 372002 - RNA, 19 nt, Homo sapiens
  misc_RNA (1)...(19): siRNA sense strand
aaauugcucugaagcgaaa

SEQ ID NO: 372003 - RNA, 19 nt, Homo sapiens
  misc_RNA (1)...(19): siRNA sense strand
caauaacccaggcaguaua

SEQ ID NO: 372004 - RNA, 19 nt, Homo sapiens
  misc_RNA (1)...(19): siRNA sense strand
ggaaaagccaaaacuauuu

SEQ ID NO: 372005 - RNA, 19 nt, Homo sapiens
  misc_RNA (1)...(19): siRNA sense strand
cagcuuaguguuugaaauu

SEQ ID NO: 372006 - RNA, 19 nt, Homo sapiens
  misc_RNA (1)...(19): siRNA sense strand
gcauguacaaucagaggua

SEQ ID NO: 372007 - RNA, 19 nt, Homo sapiens
  misc_RNA (1)...(19): siRNA sense strand
ugagaucagcuuaguguuu

SEQ ID NO: 372008 - RNA, 19 nt, Homo sapiens
  misc_RNA (1)...(19): siRNA sense strand
caggaaaggauauggauga

SEQ ID NO: 372009 - RNA, 19 nt, Homo sapiens
  misc_RNA (1)...(19): siRNA sense strand
gcaggcuguugccaauaaa

SEQ ID NO: 372010 - RNA, 19 nt, Homo sapiens
  misc_RNA (1)...(19): siRNA sense strand
gauucaaggcuuucaggua

SEQ ID NO: 372011 - RNA, 19 nt, Homo sapiens
  misc_RNA (1)...(19): siRNA sense strand
gggaacuccuuaugaaugg

SEQ ID NO: 372012 - RNA, 19 nt, Homo sapiens
  misc_RNA (1)...(19): siRNA sense strand
ucauuugucuccugauguu

SEQ ID NO: 372013 - RNA, 19 nt, Homo sapiens
  misc_RNA (1)...(19): siRNA sense strand
ccuaagaucuuuuauguuc

SEQ ID NO: 372014 - RNA, 19 nt, Homo sapiens
  misc_RNA (1)...(19): siRNA sense strand
guauaucucccacaucgaa

SEQ ID NO: 372015 - RNA, 19 nt, Homo sapiens
  misc_RNA (1)...(19): siRNA sense strand
caagcucuuucuucaguau

SEQ ID NO: 372016 - RNA, 19 nt, Homo sapiens
  misc_RNA (1)...(19): siRNA sense strand
guuauaaagcauccacuaa

SEQ ID NO: 372017 - RNA, 19 nt, Homo sapiens
  misc_RNA (1)...(19): siRNA sense strand
caacuugguuauaaagcau

SEQ ID NO: 372018 - RNA, 19 nt, Homo sapiens
  misc_RNA (1)...(19): siRNA sense strand
gggagagccugccaucuac

SEQ ID NO: 372019 - RNA, 19 nt, Homo sapiens
  misc_RNA (1)...(19): siRNA sense strand
auucaaggcuuucagguau

SEQ ID NO: 372020 - RNA, 19 nt, Homo sapiens
  misc_RNA (1)...(19): siRNA sense strand
gaauggaacaucuucuaca

SEQ ID NO: 372021 - RNA, 19 nt, Homo sapiens
  misc_RNA (1)...(19): siRNA sense strand
guaaaggccggaccagaau

SEQ ID NO: 372022 - RNA, 19 nt, Homo sapiens
  misc_RNA (1)...(19): siRNA sense strand
cgaaauaugccugucaguu

SEQ ID NO: 372023 - RNA, 19 nt, Homo sapiens
  misc_RNA (1)...(19): siRNA sense strand
cagcugaagccauagguuu

SEQ ID NO: 372024 - RNA, 19 nt, Homo sapiens
  misc_RNA (1)...(19): siRNA sense strand
acaggaacaggaccuaaua

SEQ ID NO: 372025 - RNA, 19 nt, Homo sapiens
  misc_RNA (1)...(19): siRNA sense strand
gaaggaaagacucgacaag

SEQ ID NO: 372026 - RNA, 19 nt, Homo sapiens
  misc_RNA (1)...(19): siRNA sense strand
ucaaggcuuucagguauga

SEQ ID NO: 372027 - RNA, 19 nt, Homo sapiens
  misc_RNA (1)...(19): siRNA sense strand
gaagccagccgccacaaag

SEQ ID NO: 372028 - RNA, 19 nt, Homo sapiens
  misc_RNA (1)...(19): siRNA sense strand
aaagaucuccucagaaugg

SEQ ID NO: 372029 - RNA, 19 nt, Homo sapiens
  misc_RNA (1)...(19): siRNA sense strand
gaaagaucuccucagaaug

SEQ ID NO: 372030 - RNA, 19 nt, Homo sapiens
  misc_RNA (1)...(19): siRNA sense strand
ccugaaccaacaaauaaua

SEQ ID NO: 372031 - RNA, 19 nt, Homo sapiens
  misc_RNA (1)...(19): siRNA sense strand
ugaaguugcuacaggaaca

SEQ ID NO: 372032 - RNA, 19 nt, Homo sapiens
  misc_RNA (1)...(19): siRNA sense strand
gaugacaaagaugcaaaua

SEQ ID NO: 372033 - RNA, 19 nt, Homo sapiens
  misc_RNA (1)...(19): siRNA sense strand
ucagcucacuguaggaaau

SEQ ID NO: 372034 - RNA, 19 nt, Homo sapiens
  misc_RNA (1)...(19): siRNA sense strand
ucgaauaguucagcuacaa

SEQ ID NO: 372035 - RNA, 19 nt, Homo sapiens
  misc_RNA (1)...(19): siRNA sense strand
gaagacaggggaaaacaaa

SEQ ID NO: 372036 - RNA, 19 nt, Homo sapiens
  misc_RNA (1)...(19): siRNA sense strand
ggaacaggaccuaauaaaa

SEQ ID NO: 372037 - RNA, 19 nt, Homo sapiens
  misc_RNA (1)...(19): siRNA sense strand
ggaagccagccgccacaaa

SEQ ID NO: 372038 - RNA, 19 nt, Homo sapiens
  misc_RNA (1)...(19): siRNA sense strand
uaaagcauccacuaaucuu

SEQ ID NO: 372039 - RNA, 19 nt, Homo sapiens
  misc_RNA (1)...(19): siRNA sense strand
gaaccuauuccagaaagau

SEQ ID NO: 372040 - RNA, 19 nt, Homo sapiens
  misc_RNA (1)...(19): siRNA sense strand
gaacuccuuaugaauggaa

SEQ ID NO: 372041 - RNA, 19 nt, Homo sapiens
  misc_RNA (1)...(19): siRNA sense strand
gaaggagaaggaaauagca

SEQ ID NO: 372042 - RNA, 19 nt, Homo sapiens
  misc_RNA (1)...(19): siRNA sense strand
ggaaggaaagacucgacaa

SEQ ID NO: 372043 - RNA, 19 nt, Homo sapiens
  misc_RNA (1)...(19): siRNA sense strand
gcugaagccauagguuuaa

SEQ ID NO: 372044 - RNA, 19 nt, Homo sapiens
  misc_RNA (1)...(19): siRNA sense strand
aaaaggagccggauuaugu

SEQ ID NO: 372045 - RNA, 19 nt, Homo sapiens
  misc_RNA (1)...(19): siRNA sense strand
aaaacgcccuaaaacaaua

SEQ ID NO: 372046 - RNA, 19 nt, Homo sapiens
  misc_RNA (1)...(19): siRNA sense strand
aaauaugccugucaguuuu

SEQ ID NO: 372047 - RNA, 19 nt, Homo sapiens
  misc_RNA (1)...(19): siRNA sense strand
uaaaggccggaccagaaua

SEQ ID NO: 372048 - RNA, 19 nt, Homo sapiens
  misc_RNA (1)...(19): siRNA sense strand
aaugaaagcccuccaagca

SEQ ID NO: 372049 - RNA, 19 nt, Homo sapiens
  misc_RNA (1)...(19): siRNA sense strand
gaaccaacaaauaauacuc

SEQ ID NO: 372050 - RNA, 19 nt, Homo sapiens
  misc_RNA (1)...(19): siRNA sense strand
gguuauaaagcauccacua

SEQ ID NO: 372051 - RNA, 19 nt, Homo sapiens
  misc_RNA (1)...(19): siRNA sense strand
cgacgucgagaauuuguga

SEQ ID NO: 372052 - RNA, 19 nt, Homo sapiens
  misc_RNA (1)...(19): siRNA sense strand
agcaggcuguugccaauaa

SEQ ID NO: 372053 - RNA, 19 nt, Homo sapiens
  misc_RNA (1)...(19): siRNA sense strand
gccagggaacuccuuauga

SEQ ID NO: 372054 - RNA, 19 nt, Homo sapiens
  misc_RNA (1)...(19): siRNA sense strand
ucaagcucuuucuucagua

SEQ ID NO: 372055 - RNA, 19 nt, Homo sapiens
  misc_RNA (1)...(19): siRNA sense strand
ccuucaagcucuuucuuca

SEQ ID NO: 372056 - RNA, 19 nt, Homo sapiens
  misc_RNA (1)...(19): siRNA sense strand
gacacaaugcugcaaugaa

SEQ ID NO: 372057 - RNA, 19 nt, Homo sapiens
  misc_RNA (1)...(19): siRNA sense strand
cauuagauccaaagccauu

SEQ ID NO: 372058 - RNA, 19 nt, Homo sapiens
  misc_RNA (1)...(19): siRNA sense strand
uucuacagcugaagccaua

SEQ ID NO: 372059 - RNA, 19 nt, Homo sapiens
  misc_RNA (1)...(19): siRNA sense strand
gcucugaagcgaaauaugc

SEQ ID NO: 372060 - RNA, 19 nt, Homo sapiens
  misc_RNA (1)...(19): siRNA sense strand
acaaagaugcaaauaaguc

SEQ ID NO: 372061 - RNA, 19 nt, Homo sapiens
  misc_RNA (1)...(19): siRNA sense strand
uccgaaggcagcaguauaa

SEQ ID NO: 372062 - RNA, 19 nt, Homo sapiens
  misc_RNA (1)...(19): siRNA sense strand
aacaauaacccaggcagua

SEQ ID NO: 372063 - RNA, 19 nt, Homo sapiens
  misc_RNA (1)...(19): siRNA sense strand
auaaagcuuugacugaauc

SEQ ID NO: 372064 - RNA, 19 nt, Homo sapiens
  misc_RNA (1)...(19): siRNA sense strand
uauggaugaugacaaagau

SEQ ID NO: 372065 - RNA, 19 nt, Homo sapiens
  misc_RNA (1)...(19): siRNA sense strand
uagacacaaugcugcaaug

SEQ ID NO: 372066 - RNA, 19 nt, Homo sapiens
  misc_RNA (1)...(19): siRNA sense strand
gccagccgccacaaaguaa

SEQ ID NO: 372067 - RNA, 19 nt, Homo sapiens
  misc_RNA (1)...(19): siRNA sense strand
caggaacaggaccuaauaa

SEQ ID NO: 372068 - RNA, 19 nt, Homo sapiens
  misc_RNA (1)...(19): siRNA sense strand
aguaaaggccggaccagaa

SEQ ID NO: 372069 - RNA, 19 nt, Homo sapiens
  misc_RNA (1)...(19): siRNA sense strand
acaacuugguuauaaagca

SEQ ID NO: 372070 - RNA, 19 nt, Homo sapiens
  misc_RNA (1)...(19): siRNA sense strand
ggaauauuuagcaaggauu

SEQ ID NO: 372071 - RNA, 19 nt, Homo sapiens
  misc_RNA (1)...(19): siRNA sense strand
uuccugaaccaacaaauaa

SEQ ID NO: 372072 - RNA, 19 nt, Homo sapiens
  misc_RNA (1)...(19): siRNA sense strand
gcaaugcucuggaaauaua

SEQ ID NO: 372073 - RNA, 19 nt, Homo sapiens
  misc_RNA (1)...(19): siRNA sense strand
gaacaucacucagaaguuu

SEQ ID NO: 372074 - RNA, 19 nt, Homo sapiens
  misc_RNA (1)...(19): siRNA sense strand
ggaagaagcugcuacuguu

SEQ ID NO: 372075 - RNA, 19 nt, Homo sapiens
  misc_RNA (1)...(19): siRNA sense strand
gcaccgaacucaaaugaaa

SEQ ID NO: 372076 - RNA, 19 nt, Homo sapiens
  misc_RNA (1)...(19): siRNA sense strand
gaagaaauaugaagaagca

SEQ ID NO: 372077 - RNA, 19 nt, Homo sapiens
  misc_RNA (1)...(19): siRNA sense strand
gaaauagugucucaguuug

SEQ ID NO: 372078 - RNA, 19 nt, Homo sapiens
  misc_RNA (1)...(19): siRNA sense strand
gagaaugaauguagagauu

SEQ ID NO: 372079 - RNA, 19 nt, Homo sapiens
  misc_RNA (1)...(19): siRNA sense strand
gacauaagauucuggauau

SEQ ID NO: 372080 - RNA, 19 nt, Homo sapiens
  misc_RNA (1)...(19): siRNA sense strand
gacaaaccaccauuuauua

SEQ ID NO: 372081 - RNA, 19 nt, Homo sapiens
  misc_RNA (1)...(19): siRNA sense strand
gaaacugaauucuacauca

SEQ ID NO: 372082 - RNA, 19 nt, Homo sapiens
  misc_RNA (1)...(19): siRNA sense strand
gaagaaagauagucagaac

SEQ ID NO: 372083 - RNA, 19 nt, Homo sapiens
  misc_RNA (1)...(19): siRNA sense strand
cuggagaucuguauaauaa

SEQ ID NO: 372084 - RNA, 19 nt, Homo sapiens
  misc_RNA (1)...(19): siRNA sense strand
agagaaagcuguugacaug

SEQ ID NO: 372085 - RNA, 19 nt, Homo sapiens
  misc_RNA (1)...(19): siRNA sense strand
gaccagagcuacagcaugu

SEQ ID NO: 372086 - RNA, 19 nt, Homo sapiens
  misc_RNA (1)...(19): siRNA sense strand
gaauggagauccccaauuu

SEQ ID NO: 372087 - RNA, 19 nt, Homo sapiens
  misc_RNA (1)...(19): siRNA sense strand
gaagugcccugaagaugau

SEQ ID NO: 372088 - RNA, 19 nt, Homo sapiens
  misc_RNA (1)...(19): siRNA sense strand
gcagguauuuggacuguau

SEQ ID NO: 372089 - RNA, 19 nt, Homo sapiens
  misc_RNA (1)...(19): siRNA sense strand
gacaucaucucaaagcaaa

SEQ ID NO: 372090 - RNA, 19 nt, Homo sapiens
  misc_RNA (1)...(19): siRNA sense strand
gcacacauguugacccaau

SEQ ID NO: 372091 - RNA, 19 nt, Homo sapiens
  misc_RNA (1)...(19): siRNA sense strand
gacaguccaugacaaguuu

SEQ ID NO: 372092 - RNA, 19 nt, Homo sapiens
  misc_RNA (1)...(19): siRNA sense strand
gccaagaggugauccaguu

SEQ ID NO: 372093 - RNA, 19 nt, Homo sapiens
  misc_RNA (1)...(19): siRNA sense strand
gcacaguucugcaacaucu

SEQ ID NO: 372094 - RNA, 19 nt, Homo sapiens
  misc_RNA (1)...(19): siRNA sense strand
agaccaagaugaucacauu

SEQ ID NO: 372095 - RNA, 19 nt, Homo sapiens
  misc_RNA (1)...(19): siRNA sense strand
ugaaagguguucuuguuga

SEQ ID NO: 372096 - RNA, 19 nt, Homo sapiens
  misc_RNA (1)...(19): siRNA sense strand
ugacaaaccaccauuuauu

SEQ ID NO: 372097 - RNA, 19 nt, Homo sapiens
  misc_RNA (1)...(19): siRNA sense strand
gaaauaugaagaagcauug

SEQ ID NO: 372098 - RNA, 19 nt, Homo sapiens
  misc_RNA (1)...(19): siRNA sense strand
ggucuuggaugaacagaug

SEQ ID NO: 372099 - RNA, 19 nt, Homo sapiens
  misc_RNA (1)...(19): siRNA sense strand
gaaagguguucuuguugau

SEQ ID NO: 372100 - RNA, 19 nt, Homo sapiens
  misc_RNA (1)...(19): siRNA sense strand
ugaaauagugucucaguuu

SEQ ID NO: 372101 - RNA, 19 nt, Homo sapiens
  misc_RNA (1)...(19): siRNA sense strand
gacaaugugacacugauua

SEQ ID NO: 372102 - RNA, 19 nt, Homo sapiens
  misc_RNA (1)...(19): siRNA sense strand
ucucguagcugacucuuug

SEQ ID NO: 372103 - RNA, 19 nt, Homo sapiens
  misc_RNA (1)...(19): siRNA sense strand
cagcauguguauuugcaua

SEQ ID NO: 372104 - RNA, 19 nt, Homo sapiens
  misc_RNA (1)...(19): siRNA sense strand
aacccaagcugaaguauga

SEQ ID NO: 372105 - RNA, 19 nt, Homo sapiens
  misc_RNA (1)...(19): siRNA sense strand
aaugaaagguguucuuguu

SEQ ID NO: 372106 - RNA, 19 nt, Homo sapiens
  misc_RNA (1)...(19): siRNA sense strand
ggagagcugugggaagauu

SEQ ID NO: 372107 - RNA, 19 nt, Homo sapiens
  misc_RNA (1)...(19): siRNA sense strand
aaacagaucagucuuuaug

SEQ ID NO: 372108 - RNA, 19 nt, Homo sapiens
  misc_RNA (1)...(19): siRNA sense strand
uaaagaaauuggacagcuu

SEQ ID NO: 372109 - RNA, 19 nt, Homo sapiens
  misc_RNA (1)...(19): siRNA sense strand
ugacauagcagcacgcaaa

SEQ ID NO: 372110 - RNA, 19 nt, Homo sapiens
  misc_RNA (1)...(19): siRNA sense strand
gcacccacauuucgugaga

SEQ ID NO: 372111 - RNA, 19 nt, Homo sapiens
  misc_RNA (1)...(19): siRNA sense strand
uggcaaugcucuggaaaua

SEQ ID NO: 372112 - RNA, 19 nt, Homo sapiens
  misc_RNA (1)...(19): siRNA sense strand
cagaacaagacuuuacuua

SEQ ID NO: 372113 - RNA, 19 nt, Homo sapiens
  misc_RNA (1)...(19): siRNA sense strand
gaagaagcugcuacuguuu

SEQ ID NO: 372114 - RNA, 19 nt, Homo sapiens
  misc_RNA (1)...(19): siRNA sense strand
uaauaugggugugaagauu

SEQ ID NO: 372115 - RNA, 19 nt, Homo sapiens
  misc_RNA (1)...(19): siRNA sense strand
gggaucauuugaagaaaga

SEQ ID NO: 372116 - RNA, 19 nt, Homo sapiens
  misc_RNA (1)...(19): siRNA sense strand
caacagagaaacuuuguag

SEQ ID NO: 372117 - RNA, 19 nt, Homo sapiens
  misc_RNA (1)...(19): siRNA sense strand
cgugaaggcugcaagaaga

SEQ ID NO: 372118 - RNA, 19 nt, Homo sapiens
  misc_RNA (1)...(19): siRNA sense strand
gagaaacuuuguagaagag

SEQ ID NO: 372119 - RNA, 19 nt, Homo sapiens
  misc_RNA (1)...(19): siRNA sense strand
gggcagcguuaccaugaaa

SEQ ID NO: 372120 - RNA, 19 nt, Homo sapiens
  misc_RNA (1)...(19): siRNA sense strand
ccaagucgauauguugaaa

SEQ ID NO: 372121 - RNA, 19 nt, Homo sapiens
  misc_RNA (1)...(19): siRNA sense strand
agagaaacuuuguagaaga

SEQ ID NO: 372122 - RNA, 19 nt, Homo sapiens
  misc_RNA (1)...(19): siRNA sense strand
gaacauaaggagugugaag

SEQ ID NO: 372123 - RNA, 19 nt, Homo sapiens
  misc_RNA (1)...(19): siRNA sense strand
cuacugauucaccguauua

SEQ ID NO: 372124 - RNA, 19 nt, Homo sapiens
  misc_RNA (1)...(19): siRNA sense strand
gaagaugauuauggaggaa

SEQ ID NO: 372125 - RNA, 19 nt, Homo sapiens
  misc_RNA (1)...(19): siRNA sense strand
cgaagugcccugaagauga

SEQ ID NO: 372126 - RNA, 19 nt, Homo sapiens
  misc_RNA (1)...(19): siRNA sense strand
caagagagaccaccauaag

SEQ ID NO: 372127 - RNA, 19 nt, Homo sapiens
  misc_RNA (1)...(19): siRNA sense strand
agacauaagauucuggaua

SEQ ID NO: 372128 - RNA, 19 nt, Homo sapiens
  misc_RNA (1)...(19): siRNA sense strand
gaucucuucugaugcuuug

SEQ ID NO: 372129 - RNA, 19 nt, Homo sapiens
  misc_RNA (1)...(19): siRNA sense strand
gaagucugcuguucugcau

SEQ ID NO: 372130 - RNA, 19 nt, Homo sapiens
  misc_RNA (1)...(19): siRNA sense strand
gaaauuggacagcuuaagg

SEQ ID NO: 372131 - RNA, 19 nt, Homo sapiens
  misc_RNA (1)...(19): siRNA sense strand
aaagaaauuggacagcuua

SEQ ID NO: 372132 - RNA, 19 nt, Homo sapiens
  misc_RNA (1)...(19): siRNA sense strand
ccaauaauaugggugugaa

SEQ ID NO: 372133 - RNA, 19 nt, Homo sapiens
  misc_RNA (1)...(19): siRNA sense strand
ggacagcuuaaggcuauua

SEQ ID NO: 372134 - RNA, 19 nt, Homo sapiens
  misc_RNA (1)...(19): siRNA sense strand
gaacggucuuggaugaaca

SEQ ID NO: 372135 - RNA, 19 nt, Homo sapiens
  misc_RNA (1)...(19): siRNA sense strand
acagagaaacuuuguagaa

SEQ ID NO: 372136 - RNA, 19 nt, Homo sapiens
  misc_RNA (1)...(19): siRNA sense strand
ggaacgagaccaagaugau

SEQ ID NO: 372137 - RNA, 19 nt, Homo sapiens
  misc_RNA (1)...(19): siRNA sense strand
ggaacggcaugccagugaa

SEQ ID NO: 372138 - RNA, 19 nt, Homo sapiens
  misc_RNA (1)...(19): siRNA sense strand
cagagaaacuuuguagaag

SEQ ID NO: 372139 - RNA, 19 nt, Homo sapiens
  misc_RNA (1)...(19): siRNA sense strand
ggaagaauuggaagacaga

SEQ ID NO: 372140 - RNA, 19 nt, Homo sapiens
  misc_RNA (1)...(19): siRNA sense strand
gaaagauagucagaacaag

SEQ ID NO: 372141 - RNA, 19 nt, Homo sapiens
  misc_RNA (1)...(19): siRNA sense strand
agucauaguucaagcaguu

SEQ ID NO: 372142 - RNA, 19 nt, Homo sapiens
  misc_RNA (1)...(19): siRNA sense strand
gauggcagcugaaauuagc

SEQ ID NO: 372143 - RNA, 19 nt, Homo sapiens
  misc_RNA (1)...(19): siRNA sense strand
guuguacuuucguauguaa

SEQ ID NO: 372144 - RNA, 19 nt, Homo sapiens
  misc_RNA (1)...(19): siRNA sense strand
gcacgcaaaugccagaaaa

SEQ ID NO: 372145 - RNA, 19 nt, Homo sapiens
  misc_RNA (1)...(19): siRNA sense strand
gcaaagaaucaccaaugug

SEQ ID NO: 372146 - RNA, 19 nt, Homo sapiens
  misc_RNA (1)...(19): siRNA sense strand
ggaccaggaagugcaauuu

SEQ ID NO: 372147 - RNA, 19 nt, Homo sapiens
  misc_RNA (1)...(19): siRNA sense strand
uggcaagguuuauuuacuu

SEQ ID NO: 372148 - RNA, 19 nt, Homo sapiens
  misc_RNA (1)...(19): siRNA sense strand
uggcagaauuguacaccua

SEQ ID NO: 372149 - RNA, 19 nt, Homo sapiens
  misc_RNA (1)...(19): siRNA sense strand
gaacggcaugccagugaaa

SEQ ID NO: 372150 - RNA, 19 nt, Homo sapiens
  misc_RNA (1)...(19): siRNA sense strand
gggaagaagcugcuacugu

SEQ ID NO: 372151 - RNA, 19 nt, Homo sapiens
  misc_RNA (1)...(19): siRNA sense strand
caaaugaaagguguucuug

SEQ ID NO: 372152 - RNA, 19 nt, Homo sapiens
  misc_RNA (1)...(19): siRNA sense strand
gagacaguuuaucuucuga

SEQ ID NO: 372153 - RNA, 19 nt, Homo sapiens
  misc_RNA (1)...(19): siRNA sense strand
caaacuuacuucccuuucu

SEQ ID NO: 372154 - RNA, 19 nt, Homo sapiens
  misc_RNA (1)...(19): siRNA sense strand
gcagcacucugggaauaug

SEQ ID NO: 372155 - RNA, 19 nt, Homo sapiens
  misc_RNA (1)...(19): siRNA sense strand
gacaucauccagccacuuu

SEQ ID NO: 372156 - RNA, 19 nt, Homo sapiens
  misc_RNA (1)...(19): siRNA sense strand
guggagaggccaucugauu

SEQ ID NO: 372157 - RNA, 19 nt, Homo sapiens
  misc_RNA (1)...(19): siRNA sense strand
uuugagagauuccuugguu

SEQ ID NO: 372158 - RNA, 19 nt, Homo sapiens
  misc_RNA (1)...(19): siRNA sense strand
aaagguaguggaagaauug

SEQ ID NO: 372159 - RNA, 19 nt, Homo sapiens
  misc_RNA (1)...(19): siRNA sense strand
gcagaauuguacaccuaug

SEQ ID NO: 372160 - RNA, 19 nt, Homo sapiens
  misc_RNA (1)...(19): siRNA sense strand
gucaaggugugcucaguga

SEQ ID NO: 372161 - RNA, 19 nt, Homo sapiens
  misc_RNA (1)...(19): siRNA sense strand
cauaagauucuggauauug

SEQ ID NO: 372162 - RNA, 19 nt, Homo sapiens
  misc_RNA (1)...(19): siRNA sense strand
gaggagaacaucugugagu

SEQ ID NO: 372163 - RNA, 19 nt, Homo sapiens
  misc_RNA (1)...(19): siRNA sense strand
ugagagauuccuugguuaa

SEQ ID NO: 372164 - RNA, 19 nt, Homo sapiens
  misc_RNA (1)...(19): siRNA sense strand
ggaagacagaccagagcua

SEQ ID NO: 372165 - RNA, 19 nt, Homo sapiens
  misc_RNA (1)...(19): siRNA sense strand
gcauugggcacacauuaug

SEQ ID NO: 372166 - RNA, 19 nt, Homo sapiens
  misc_RNA (1)...(19): siRNA sense strand
gaacccaagcugaaguaug

SEQ ID NO: 372167 - RNA, 19 nt, Homo sapiens
  misc_RNA (1)...(19): siRNA sense strand
aaaccaccauuuauuacug

SEQ ID NO: 372168 - RNA, 19 nt, Homo sapiens
  misc_RNA (1)...(19): siRNA sense strand
ugaaaaggcucuugagauc

SEQ ID NO: 372169 - RNA, 19 nt, Homo sapiens
  misc_RNA (1)...(19): siRNA sense strand
agaaagauagucagaacaa

SEQ ID NO: 372170 - RNA, 19 nt, Homo sapiens
  misc_RNA (1)...(19): siRNA sense strand
gauaaagcaaucgaauuug

SEQ ID NO: 372171 - RNA, 19 nt, Homo sapiens
  misc_RNA (1)...(19): siRNA sense strand
ugacccaauucuacugauu

SEQ ID NO: 372172 - RNA, 19 nt, Homo sapiens
  misc_RNA (1)...(19): siRNA sense strand
gcaaugcucuggaaauaua

SEQ ID NO: 372173 - RNA, 19 nt, Homo sapiens
  misc_RNA (1)...(19): siRNA sense strand
gaacaucacucagaaguuu

SEQ ID NO: 372174 - RNA, 19 nt, Homo sapiens
  misc_RNA (1)...(19): siRNA sense strand
ggaagaagcugcuacuguu

SEQ ID NO: 372175 - RNA, 19 nt, Homo sapiens
  misc_RNA (1)...(19): siRNA sense strand
gcaccgaacucaaaugaaa

SEQ ID NO: 372176 - RNA, 19 nt, Homo sapiens
  misc_RNA (1)...(19): siRNA sense strand
gaagaaauaugaagaagca

SEQ ID NO: 372177 - RNA, 19 nt, Homo sapiens
  misc_RNA (1)...(19): siRNA sense strand
gaaauagugucucaguuug

SEQ ID NO: 372178 - RNA, 19 nt, Homo sapiens
  misc_RNA (1)...(19): siRNA sense strand
gagaaugaauguagagauu

SEQ ID NO: 372179 - RNA, 19 nt, Homo sapiens
  misc_RNA (1)...(19): siRNA sense strand
gacauaagauucuggauau

SEQ ID NO: 372180 - RNA, 19 nt, Homo sapiens
  misc_RNA (1)...(19): siRNA sense strand
gacaaaccaccauuuauua

SEQ ID NO: 372181 - RNA, 19 nt, Homo sapiens
  misc_RNA (1)...(19): siRNA sense strand
gaaacugaauucuacauca

SEQ ID NO: 372182 - RNA, 19 nt, Homo sapiens
  misc_RNA (1)...(19): siRNA sense strand
gaagaaagauagucagaac

SEQ ID NO: 372183 - RNA, 19 nt, Homo sapiens
  misc_RNA (1)...(19): siRNA sense strand
cuggagaucuguauaauaa

SEQ ID NO: 372184 - RNA, 19 nt, Homo sapiens
  misc_RNA (1)...(19): siRNA sense strand
agagaaagcuguugacaug

SEQ ID NO: 372185 - RNA, 19 nt, Homo sapiens
  misc_RNA (1)...(19): siRNA sense strand
gaccagagcuacagcaugu

SEQ ID NO: 372186 - RNA, 19 nt, Homo sapiens
  misc_RNA (1)...(19): siRNA sense strand
gaauggagauccccaauuu

SEQ ID NO: 372187 - RNA, 19 nt, Homo sapiens
  misc_RNA (1)...(19): siRNA sense strand
gaagugcccugaagaugau

SEQ ID NO: 372188 - RNA, 19 nt, Homo sapiens
  misc_RNA (1)...(19): siRNA sense strand
gcagguauuuggacuguau

SEQ ID NO: 372189 - RNA, 19 nt, Homo sapiens
  misc_RNA (1)...(19): siRNA sense strand
gacaucaucucaaagcaaa

SEQ ID NO: 372190 - RNA, 19 nt, Homo sapiens
  misc_RNA (1)...(19): siRNA sense strand
gcacacauguugacccaau

SEQ ID NO: 372191 - RNA, 19 nt, Homo sapiens
  misc_RNA (1)...(19): siRNA sense strand
gccaagaggugauccaguu

SEQ ID NO: 372192 - RNA, 19 nt, Homo sapiens
  misc_RNA (1)...(19): siRNA sense strand
gacaguccaugacaaguuu

SEQ ID NO: 372193 - RNA, 19 nt, Homo sapiens
  misc_RNA (1)...(19): siRNA sense strand
gcacaguucugcaacaucu

SEQ ID NO: 372194 - RNA, 19 nt, Homo sapiens
  misc_RNA (1)...(19): siRNA sense strand
agaccaagaugaucacauu

SEQ ID NO: 372195 - RNA, 19 nt, Homo sapiens
  misc_RNA (1)...(19): siRNA sense strand
ugaaagguguucuuguuga

SEQ ID NO: 372196 - RNA, 19 nt, Homo sapiens
  misc_RNA (1)...(19): siRNA sense strand
ugacaaaccaccauuuauu

SEQ ID NO: 372197 - RNA, 19 nt, Homo sapiens
  misc_RNA (1)...(19): siRNA sense strand
gaaauaugaagaagcauug

SEQ ID NO: 372198 - RNA, 19 nt, Homo sapiens
  misc_RNA (1)...(19): siRNA sense strand
ggucuuggaugaacagaug

SEQ ID NO: 372199 - RNA, 19 nt, Homo sapiens
  misc_RNA (1)...(19): siRNA sense strand
gaaagguguucuuguugau

SEQ ID NO: 372200 - RNA, 19 nt, Homo sapiens
  misc_RNA (1)...(19): siRNA sense strand
ugaaauagugucucaguuu

SEQ ID NO: 372201 - RNA, 19 nt, Homo sapiens
  misc_RNA (1)...(19): siRNA sense strand
gacaaugugacacugauua

SEQ ID NO: 372202 - RNA, 19 nt, Homo sapiens
  misc_RNA (1)...(19): siRNA sense strand
ucucguagcugacucuuug

SEQ ID NO: 372203 - RNA, 19 nt, Homo sapiens
  misc_RNA (1)...(19): siRNA sense strand
cagcauguguauuugcaua

SEQ ID NO: 372204 - RNA, 19 nt, Homo sapiens
  misc_RNA (1)...(19): siRNA sense strand
ugacauagcagcacgcaaa

SEQ ID NO: 372205 - RNA, 19 nt, Homo sapiens
  misc_RNA (1)...(19): siRNA sense strand
aaugaaagguguucuuguu

SEQ ID NO: 372206 - RNA, 19 nt, Homo sapiens
  misc_RNA (1)...(19): siRNA sense strand
ggagagcugugggaagauu

SEQ ID NO: 372207 - RNA, 19 nt, Homo sapiens
  misc_RNA (1)...(19): siRNA sense strand
aaacagaucagucuuuaug

SEQ ID NO: 372208 - RNA, 19 nt, Homo sapiens
  misc_RNA (1)...(19): siRNA sense strand
uaaagaaauuggacagcuu

SEQ ID NO: 372209 - RNA, 19 nt, Homo sapiens
  misc_RNA (1)...(19): siRNA sense strand
gcacccacauuucgugaga

SEQ ID NO: 372210 - RNA, 19 nt, Homo sapiens
  misc_RNA (1)...(19): siRNA sense strand
uggcaaugcucuggaaaua

SEQ ID NO: 372211 - RNA, 19 nt, Homo sapiens
  misc_RNA (1)...(19): siRNA sense strand
cagaacaagacuuuacuua

SEQ ID NO: 372212 - RNA, 19 nt, Homo sapiens
  misc_RNA (1)...(19): siRNA sense strand
gaagaagcugcuacuguuu

SEQ ID NO: 372213 - RNA, 19 nt, Homo sapiens
  misc_RNA (1)...(19): siRNA sense strand
uaauaugggugugaagauu

SEQ ID NO: 372214 - RNA, 19 nt, Homo sapiens
  misc_RNA (1)...(19): siRNA sense strand
gggaucauuugaagaaaga

SEQ ID NO: 372215 - RNA, 19 nt, Homo sapiens
  misc_RNA (1)...(19): siRNA sense strand
caacagagaaacuuuguag

SEQ ID NO: 372216 - RNA, 19 nt, Homo sapiens
  misc_RNA (1)...(19): siRNA sense strand
cgugaaggcugcaagaaga

SEQ ID NO: 372217 - RNA, 19 nt, Homo sapiens
  misc_RNA (1)...(19): siRNA sense strand
gagaaacuuuguagaagag

SEQ ID NO: 372218 - RNA, 19 nt, Homo sapiens
  misc_RNA (1)...(19): siRNA sense strand
gggcagcguuaccaugaaa

SEQ ID NO: 372219 - RNA, 19 nt, Homo sapiens
  misc_RNA (1)...(19): siRNA sense strand
ccaagucgauauguugaaa

SEQ ID NO: 372220 - RNA, 19 nt, Homo sapiens
  misc_RNA (1)...(19): siRNA sense strand
agagaaacuuuguagaaga

SEQ ID NO: 372221 - RNA, 19 nt, Homo sapiens
  misc_RNA (1)...(19): siRNA sense strand
gaacauaaggagugugaag

SEQ ID NO: 372222 - RNA, 19 nt, Homo sapiens
  misc_RNA (1)...(19): siRNA sense strand
cuacugauucaccguauua

SEQ ID NO: 372223 - RNA, 19 nt, Homo sapiens
  misc_RNA (1)...(19): siRNA sense strand
gaagaugauuauggaggaa

SEQ ID NO: 372224 - RNA, 19 nt, Homo sapiens
  misc_RNA (1)...(19): siRNA sense strand
cgaagugcccugaagauga

SEQ ID NO: 372225 - RNA, 19 nt, Homo sapiens
  misc_RNA (1)...(19): siRNA sense strand
caagagagaccaccauaag

SEQ ID NO: 372226 - RNA, 19 nt, Homo sapiens
  misc_RNA (1)...(19): siRNA sense strand
agacauaagauucuggaua

SEQ ID NO: 372227 - RNA, 19 nt, Homo sapiens
  misc_RNA (1)...(19): siRNA sense strand
gaucucuucugaugcuuug

SEQ ID NO: 372228 - RNA, 19 nt, Homo sapiens
  misc_RNA (1)...(19): siRNA sense strand
gaagucugcuguucugcau

SEQ ID NO: 372229 - RNA, 19 nt, Homo sapiens
  misc_RNA (1)...(19): siRNA sense strand
gaaauuggacagcuuaagg

SEQ ID NO: 372230 - RNA, 19 nt, Homo sapiens
  misc_RNA (1)...(19): siRNA sense strand
aaagaaauuggacagcuua

SEQ ID NO: 372231 - RNA, 19 nt, Homo sapiens
  misc_RNA (1)...(19): siRNA sense strand
ccaauaauaugggugugaa

SEQ ID NO: 372232 - RNA, 19 nt, Homo sapiens
  misc_RNA (1)...(19): siRNA sense strand
ggacagcuuaaggcuauua

SEQ ID NO: 372233 - RNA, 19 nt, Homo sapiens
  misc_RNA (1)...(19): siRNA sense strand
gaacggucuuggaugaaca

SEQ ID NO: 372234 - RNA, 19 nt, Homo sapiens
  misc_RNA (1)...(19): siRNA sense strand
acagagaaacuuuguagaa

SEQ ID NO: 372235 - RNA, 19 nt, Homo sapiens
  misc_RNA (1)...(19): siRNA sense strand
ggaacgagaccaagaugau

SEQ ID NO: 372236 - RNA, 19 nt, Homo sapiens
  misc_RNA (1)...(19): siRNA sense strand
ggaacggcaugccagugaa

SEQ ID NO: 372237 - RNA, 19 nt, Homo sapiens
  misc_RNA (1)...(19): siRNA sense strand
cagagaaacuuuguagaag

SEQ ID NO: 372238 - RNA, 19 nt, Homo sapiens
  misc_RNA (1)...(19): siRNA sense strand
ggaagaauuggaagacaga

SEQ ID NO: 372239 - RNA, 19 nt, Homo sapiens
  misc_RNA (1)...(19): siRNA sense strand
gaaagauagucagaacaag

SEQ ID NO: 372240 - RNA, 19 nt, Homo sapiens
  misc_RNA (1)...(19): siRNA sense strand
agucauaguucaagcaguu

SEQ ID NO: 372241 - RNA, 19 nt, Homo sapiens
  misc_RNA (1)...(19): siRNA sense strand
gauggcagcugaaauuagc

SEQ ID NO: 372242 - RNA, 19 nt, Homo sapiens
  misc_RNA (1)...(19): siRNA sense strand
guuguacuuucguauguaa

SEQ ID NO: 372243 - RNA, 19 nt, Homo sapiens
  misc_RNA (1)...(19): siRNA sense strand
gcacgcaaaugccagaaaa

SEQ ID NO: 372244 - RNA, 19 nt, Homo sapiens
  misc_RNA (1)...(19): siRNA sense strand
gcaaagaaucaccaaugug

SEQ ID NO: 372245 - RNA, 19 nt, Homo sapiens
  misc_RNA (1)...(19): siRNA sense strand
ggaccaggaagugcaauuu

SEQ ID NO: 372246 - RNA, 19 nt, Homo sapiens
  misc_RNA (1)...(19): siRNA sense strand
uggcaagguuuauuuacuu

SEQ ID NO: 372247 - RNA, 19 nt, Homo sapiens
  misc_RNA (1)...(19): siRNA sense strand
uggcagaauuguacaccua

SEQ ID NO: 372248 - RNA, 19 nt, Homo sapiens
  misc_RNA (1)...(19): siRNA sense strand
gaacggcaugccagugaaa

SEQ ID NO: 372249 - RNA, 19 nt, Homo sapiens
  misc_RNA (1)...(19): siRNA sense strand
gacaucauccagccacuuu

SEQ ID NO: 372250 - RNA, 19 nt, Homo sapiens
  misc_RNA (1)...(19): siRNA sense strand
caaaugaaagguguucuug

SEQ ID NO: 372251 - RNA, 19 nt, Homo sapiens
  misc_RNA (1)...(19): siRNA sense strand
gagacaguuuaucuucuga

SEQ ID NO: 372252 - RNA, 19 nt, Homo sapiens
  misc_RNA (1)...(19): siRNA sense strand
caaacuuacuucccuuucu

SEQ ID NO: 372253 - RNA, 19 nt, Homo sapiens
  misc_RNA (1)...(19): siRNA sense strand
gggaagaagcugcuacugu

SEQ ID NO: 372254 - RNA, 19 nt, Homo sapiens
  misc_RNA (1)...(19): siRNA sense strand
gcagcacucugggaauaug

SEQ ID NO: 372255 - RNA, 19 nt, Homo sapiens
  misc_RNA (1)...(19): siRNA sense strand
guggagaggccaucugauu

SEQ ID NO: 372256 - RNA, 19 nt, Homo sapiens
  misc_RNA (1)...(19): siRNA sense strand
uuugagagauuccuugguu

SEQ ID NO: 372257 - RNA, 19 nt, Homo sapiens
  misc_RNA (1)...(19): siRNA sense strand
aaagguaguggaagaauug

SEQ ID NO: 372258 - RNA, 19 nt, Homo sapiens
  misc_RNA (1)...(19): siRNA sense strand
gcagaauuguacaccuaug

SEQ ID NO: 372259 - RNA, 19 nt, Homo sapiens
  misc_RNA (1)...(19): siRNA sense strand
gucaaggugugcucaguga

SEQ ID NO: 372260 - RNA, 19 nt, Homo sapiens
  misc_RNA (1)...(19): siRNA sense strand
gcauugggcacacauuaug

SEQ ID NO: 372261 - RNA, 19 nt, Homo sapiens
  misc_RNA (1)...(19): siRNA sense strand
gaggagaacaucugugagu

SEQ ID NO: 372262 - RNA, 19 nt, Homo sapiens
  misc_RNA (1)...(19): siRNA sense strand
ugagagauuccuugguuaa

SEQ ID NO: 372263 - RNA, 19 nt, Homo sapiens
  misc_RNA (1)...(19): siRNA sense strand
ggaagacagaccagagcua

SEQ ID NO: 372264 - RNA, 19 nt, Homo sapiens
  misc_RNA (1)...(19): siRNA sense strand
cauaagauucuggauauug

SEQ ID NO: 372265 - RNA, 19 nt, Homo sapiens
  misc_RNA (1)...(19): siRNA sense strand
agaaagauagucagaacaa

SEQ ID NO: 372266 - RNA, 19 nt, Homo sapiens
  misc_RNA (1)...(19): siRNA sense strand
aaaccaccauuuauuacug

SEQ ID NO: 372267 - RNA, 19 nt, Homo sapiens
  misc_RNA (1)...(19): siRNA sense strand
ugaaaaggcucuugagauc

SEQ ID NO: 372268 - RNA, 19 nt, Homo sapiens
  misc_RNA (1)...(19): siRNA sense strand
aaagauagucagaacaaga

SEQ ID NO: 372269 - RNA, 19 nt, Homo sapiens
  misc_RNA (1)...(19): siRNA sense strand
ugacccaauucuacugauu

SEQ ID NO: 372270 - RNA, 19 nt, Homo sapiens
  misc_RNA (1)...(19): siRNA sense strand
gauaaagcaaucgaauuug

SEQ ID NO: 372271 - RNA, 19 nt, Homo sapiens
  misc_RNA (1)...(19): siRNA sense strand
cacauuauggcaagguuua

SEQ ID NO: 372272 - RNA, 19 nt, Homo sapiens
  misc_RNA (1)...(19): siRNA sense strand
gaaaugacauccagagaaa

SEQ ID NO: 372273 - RNA, 19 nt, Homo sapiens
  misc_RNA (1)...(19): siRNA sense strand
gagguugguuggaacaaua

SEQ ID NO: 372274 - RNA, 19 nt, Homo sapiens
  misc_RNA (1)...(19): siRNA sense strand
gccaugugcuccaaucaua

SEQ ID NO: 372275 - RNA, 19 nt, Homo sapiens
  misc_RNA (1)...(19): siRNA sense strand
agaauaugcuggagagguu

SEQ ID NO: 372276 - RNA, 19 nt, Homo sapiens
  misc_RNA (1)...(19): siRNA sense strand
gagauuuguugguggcauu

SEQ ID NO: 372277 - RNA, 19 nt, Homo sapiens
  misc_RNA (1)...(19): siRNA sense strand
cgaaaugacauccagagaa

SEQ ID NO: 372278 - RNA, 19 nt, Homo sapiens
  misc_RNA (1)...(19): siRNA sense strand
gaaguguuaacccaaauga

SEQ ID NO: 372279 - RNA, 19 nt, Homo sapiens
  misc_RNA (1)...(19): siRNA sense strand
acagagauccuggguguuu

SEQ ID NO: 372280 - RNA, 19 nt, Homo sapiens
  misc_RNA (1)...(19): siRNA sense strand
gcagugggcaucuucuugu

SEQ ID NO: 372281 - RNA, 19 nt, Homo sapiens
  misc_RNA (1)...(19): siRNA sense strand
gauacaggaaccagaaaga

SEQ ID NO: 372282 - RNA, 19 nt, Homo sapiens
  misc_RNA (1)...(19): siRNA sense strand
ggagguugguuggaacaau

SEQ ID NO: 372283 - RNA, 19 nt, Homo sapiens
  misc_RNA (1)...(19): siRNA sense strand
caucagguguugcuauuuu

SEQ ID NO: 372284 - RNA, 19 nt, Homo sapiens
  misc_RNA (1)...(19): siRNA sense strand
ggagagguuuugagauuug

SEQ ID NO: 372285 - RNA, 19 nt, Homo sapiens
  misc_RNA (1)...(19): siRNA sense strand
gauuggagcuguaaaacau

SEQ ID NO: 372286 - RNA, 19 nt, Homo sapiens
  misc_RNA (1)...(19): siRNA sense strand
gcgcgaauccuagugcauu

SEQ ID NO: 372287 - RNA, 19 nt, Homo sapiens
  misc_RNA (1)...(19): siRNA sense strand
ggccuguucuucaguuuua

SEQ ID NO: 372288 - RNA, 19 nt, Homo sapiens
  misc_RNA (1)...(19): siRNA sense strand
gcauuggccuguucuucag

SEQ ID NO: 372289 - RNA, 19 nt, Homo sapiens
  misc_RNA (1)...(19): siRNA sense strand
gcaacagggucagcuucug

SEQ ID NO: 372290 - RNA, 19 nt, Homo sapiens
  misc_RNA (1)...(19): siRNA sense strand
gcaagugcucgaaaugaca

SEQ ID NO: 372291 - RNA, 19 nt, Homo sapiens
  misc_RNA (1)...(19): siRNA sense strand
ucaaccugcuuuacaccuu

SEQ ID NO: 372292 - RNA, 19 nt, Homo sapiens
  misc_RNA (1)...(19): siRNA sense strand
uggcugaccuacagauaca

SEQ ID NO: 372293 - RNA, 19 nt, Homo sapiens
  misc_RNA (1)...(19): siRNA sense strand
ggcauuggccuguucuuca

SEQ ID NO: 372294 - RNA, 19 nt, Homo sapiens
  misc_RNA (1)...(19): siRNA sense strand
gacauccagagaaaucuaa

SEQ ID NO: 372295 - RNA, 19 nt, Homo sapiens
  misc_RNA (1)...(19): siRNA sense strand
ggcaagugcucgaaaugac

SEQ ID NO: 372296 - RNA, 19 nt, Homo sapiens
  misc_RNA (1)...(19): siRNA sense strand
acagauacaggaaccagaa

SEQ ID NO: 372297 - RNA, 19 nt, Homo sapiens
  misc_RNA (1)...(19): siRNA sense strand
ugacauccagagaaaucua

SEQ ID NO: 372298 - RNA, 19 nt, Homo sapiens
  misc_RNA (1)...(19): siRNA sense strand
gaauaugcuggagagguuu

SEQ ID NO: 372299 - RNA, 19 nt, Homo sapiens
  misc_RNA (1)...(19): siRNA sense strand
cagagauccuggguguuug

SEQ ID NO: 372300 - RNA, 19 nt, Homo sapiens
  misc_RNA (1)...(19): siRNA sense strand
cagugggcaucuucuuguu

SEQ ID NO: 372301 - RNA, 19 nt, Homo sapiens
  misc_RNA (1)...(19): siRNA sense strand
uguggguuccgaaguguua

SEQ ID NO: 372302 - RNA, 19 nt, Homo sapiens
  misc_RNA (1)...(19): siRNA sense strand
caucaucagguguugcuau

SEQ ID NO: 372303 - RNA, 19 nt, Homo sapiens
  misc_RNA (1)...(19): siRNA sense strand
ggucugauuggagcuguaa

SEQ ID NO: 372304 - RNA, 19 nt, Homo sapiens
  misc_RNA (1)...(19): siRNA sense strand
guuccugauugcuuuagug

SEQ ID NO: 372305 - RNA, 19 nt, Homo sapiens
  misc_RNA (1)...(19): siRNA sense strand
ucuuguuccugauugcuuu

SEQ ID NO: 372306 - RNA, 19 nt, Homo sapiens
  misc_RNA (1)...(19): siRNA sense strand
cuggagagguuuugagauu

SEQ ID NO: 372307 - RNA, 19 nt, Homo sapiens
  misc_RNA (1)...(19): siRNA sense strand
uccgaaguguuaacccaaa

SEQ ID NO: 372308 - RNA, 19 nt, Homo sapiens
  misc_RNA (1)...(19): siRNA sense strand
gcgcuuguuuagcccugaa

SEQ ID NO: 372309 - RNA, 19 nt, Homo sapiens
  misc_RNA (1)...(19): siRNA sense strand
cggcaagugcucgaaauga

SEQ ID NO: 372310 - RNA, 19 nt, Homo sapiens
  misc_RNA (1)...(19): siRNA sense strand
guguuuggcugaccuacag

SEQ ID NO: 372311 - RNA, 19 nt, Homo sapiens
  misc_RNA (1)...(19): siRNA sense strand
ggagcaacagggucagcuu

SEQ ID NO: 372312 - RNA, 19 nt, Homo sapiens
  misc_RNA (1)...(19): siRNA sense strand
gcccucaaccugcuuuaca

SEQ ID NO: 372313 - RNA, 19 nt, Homo sapiens
  misc_RNA (1)...(19): siRNA sense strand
ccgaaguguuaacccaaau

SEQ ID NO: 372314 - RNA, 19 nt, Homo sapiens
  misc_RNA (1)...(19): siRNA sense strand
caucuucuuguuccugauu

SEQ ID NO: 372315 - RNA, 19 nt, Homo sapiens
  misc_RNA (1)...(19): siRNA sense strand
gcuguggguuccgaagugu

SEQ ID NO: 372316 - RNA, 19 nt, Homo sapiens
  misc_RNA (1)...(19): siRNA sense strand
aaugacauccagagaaauc

SEQ ID NO: 372317 - RNA, 19 nt, Homo sapiens
  misc_RNA (1)...(19): siRNA sense strand
ggauccagcugccuaugaa

SEQ ID NO: 372318 - RNA, 19 nt, Homo sapiens
  misc_RNA (1)...(19): siRNA sense strand
ggaugacgguucccugucu

SEQ ID NO: 372319 - RNA, 19 nt, Homo sapiens
  misc_RNA (1)...(19): siRNA sense strand
ccgcacgucuucacuaaag

SEQ ID NO: 372320 - RNA, 19 nt, Homo sapiens
  misc_RNA (1)...(19): siRNA sense strand
cugaagaguucgagagauc

SEQ ID NO: 372321 - RNA, 19 nt, Homo sapiens
  misc_RNA (1)...(19): siRNA sense strand
cgucuucacuaaaggaauc

SEQ ID NO: 372322 - RNA, 19 nt, Homo sapiens
  misc_RNA (1)...(19): siRNA sense strand
gcacgucuucacuaaagga

SEQ ID NO: 372323 - RNA, 19 nt, Homo sapiens
  misc_RNA (1)...(19): siRNA sense strand
gaaaaugacaaaugagcaa

SEQ ID NO: 372324 - RNA, 19 nt, Homo sapiens
  misc_RNA (1)...(19): siRNA sense strand
cuaaaggaauccccaaugu

SEQ ID NO: 372325 - RNA, 19 nt, Homo sapiens
  misc_RNA (1)...(19): siRNA sense strand
gccgcaguuuguaguguuu

SEQ ID NO: 372326 - RNA, 19 nt, Homo sapiens
  misc_RNA (1)...(19): siRNA sense strand
gacugaagaguucgagaga

SEQ ID NO: 372327 - RNA, 19 nt, Homo sapiens
  misc_RNA (1)...(19): siRNA sense strand
ggaggauccagcugccuau

SEQ ID NO: 372328 - RNA, 19 nt, Homo sapiens
  misc_RNA (1)...(19): siRNA sense strand
gacgguucccugucucuga

SEQ ID NO: 372329 - RNA, 19 nt, Homo sapiens
  misc_RNA (1)...(19): siRNA sense strand
gcgccuauccgcacgucuu

SEQ ID NO: 372330 - RNA, 19 nt, Homo sapiens
  misc_RNA (1)...(19): siRNA sense strand
gauccagcugccuaugaaa

SEQ ID NO: 372331 - RNA, 19 nt, Homo sapiens
  misc_RNA (1)...(19): siRNA sense strand
gcaccgagaucaagauguc

SEQ ID NO: 372332 - RNA, 19 nt, Homo sapiens
  misc_RNA (1)...(19): siRNA sense strand
gcagagaccuacuucaacu

SEQ ID NO: 372333 - RNA, 19 nt, Homo sapiens
  misc_RNA (1)...(19): siRNA sense strand
ggacgauacuggccuuugu

SEQ ID NO: 372334 - RNA, 19 nt, Homo sapiens
  misc_RNA (1)...(19): siRNA sense strand
ggucaauguucuaaagaug

SEQ ID NO: 372335 - RNA, 19 nt, Homo sapiens
  misc_RNA (1)...(19): siRNA sense strand
gggcguugcuucaccauag

SEQ ID NO: 372336 - RNA, 19 nt, Homo sapiens
  misc_RNA (1)...(19): siRNA sense strand
gaacaacaucggacacauc

SEQ ID NO: 372337 - RNA, 19 nt, Homo sapiens
  misc_RNA (1)...(19): siRNA sense strand
gaauaugugaugcccauga

SEQ ID NO: 372338 - RNA, 19 nt, Homo sapiens
  misc_RNA (1)...(19): siRNA sense strand
ggaggagggugugauugug

SEQ ID NO: 372339 - RNA, 19 nt, Homo sapiens
  misc_RNA (1)...(19): siRNA sense strand
gauacuggccuuugucucu

SEQ ID NO: 372340 - RNA, 19 nt, Homo sapiens
  misc_RNA (1)...(19): siRNA sense strand
agaccuacuucaacuacaa

SEQ ID NO: 372341 - RNA, 19 nt, Homo sapiens
  misc_RNA (1)...(19): siRNA sense strand
ucucuggcaucuucuuuau

SEQ ID NO: 372342 - RNA, 19 nt, Homo sapiens
  misc_RNA (1)...(19): siRNA sense strand
caagaugucccugcacuca

SEQ ID NO: 372343 - RNA, 19 nt, Homo sapiens
  misc_RNA (1)...(19): siRNA sense strand
ccaaggaugcagagaccua

SEQ ID NO: 372344 - RNA, 19 nt, Homo sapiens
  misc_RNA (1)...(19): siRNA sense strand
gccgccaucuccuuccuuu

SEQ ID NO: 372345 - RNA, 19 nt, Homo sapiens
  misc_RNA (1)...(19): siRNA sense strand
aauaugugaugcccaugaa

SEQ ID NO: 372346 - RNA, 19 nt, Homo sapiens
  misc_RNA (1)...(19): siRNA sense strand
gcuugggccuccuggguau

SEQ ID NO: 372347 - RNA, 19 nt, Homo sapiens
  misc_RNA (1)...(19): siRNA sense strand
ggguuuauccugaacaaca

SEQ ID NO: 372348 - RNA, 19 nt, Homo sapiens
  misc_RNA (1)...(19): siRNA sense strand
aaguauggguggucguuug

SEQ ID NO: 372349 - RNA, 19 nt, Homo sapiens
  misc_RNA (1)...(19): siRNA sense strand
caucuucuuuauccucuca

SEQ ID NO: 372350 - RNA, 19 nt, Homo sapiens
  misc_RNA (1)...(19): siRNA sense strand
ucauuggguuuauccugaa

SEQ ID NO: 372351 - RNA, 19 nt, Homo sapiens
  misc_RNA (1)...(19): siRNA sense strand
ggucagccucuucuucaug

SEQ ID NO: 372352 - RNA, 19 nt, Homo sapiens
  misc_RNA (1)...(19): siRNA sense strand
gucagccucuucuucaugu

SEQ ID NO: 372353 - RNA, 19 nt, Homo sapiens
  misc_RNA (1)...(19): siRNA sense strand
gucaauguucuaaagauga

SEQ ID NO: 372354 - RNA, 19 nt, Homo sapiens
  misc_RNA (1)...(19): siRNA sense strand
gguuuauccugaacaacau

SEQ ID NO: 372355 - RNA, 19 nt, Homo sapiens
  misc_RNA (1)...(19): siRNA sense strand
gagcaccgagaucaagaug

SEQ ID NO: 372356 - RNA, 19 nt, Homo sapiens
  misc_RNA (1)...(19): siRNA sense strand
gagaccuacuucaacuaca

SEQ ID NO: 372357 - RNA, 19 nt, Homo sapiens
  misc_RNA (1)...(19): siRNA sense strand
cacggucaauguucuaaag

SEQ ID NO: 372358 - RNA, 19 nt, Homo sapiens
  misc_RNA (1)...(19): siRNA sense strand
gaaccagagcaccgagauc

SEQ ID NO: 372359 - RNA, 19 nt, Homo sapiens
  misc_RNA (1)...(19): siRNA sense strand
ggcguugcuucaccauaga

SEQ ID NO: 372360 - RNA, 19 nt, Homo sapiens
  misc_RNA (1)...(19): siRNA sense strand
cggucaauguucuaaagau

SEQ ID NO: 372361 - RNA, 19 nt, Homo sapiens
  misc_RNA (1)...(19): siRNA sense strand
cagagaccuacuucaacua

SEQ ID NO: 372362 - RNA, 19 nt, Homo sapiens
  misc_RNA (1)...(19): siRNA sense strand
ggaugcagagaccuacuuc

SEQ ID NO: 372363 - RNA, 19 nt, Homo sapiens
  misc_RNA (1)...(19): siRNA sense strand
caacaggaccaaggaugca

SEQ ID NO: 372364 - RNA, 19 nt, Homo sapiens
  misc_RNA (1)...(19): siRNA sense strand
ugaacaacaucggacacau

SEQ ID NO: 372365 - RNA, 19 nt, Homo sapiens
  misc_RNA (1)...(19): siRNA sense strand
cgccaucuccuuccuuuua

SEQ ID NO: 372366 - RNA, 19 nt, Homo sapiens
  misc_RNA (1)...(19): siRNA sense strand
uugcuucaccauagaauau

SEQ ID NO: 372367 - RNA, 19 nt, Homo sapiens
  misc_RNA (1)...(19): siRNA sense strand
cuuugucucuggcaucuuc

SEQ ID NO: 372368 - RNA, 19 nt, Homo sapiens
  misc_RNA (1)...(19): siRNA sense strand
ccgcucagccacaccauuc

SEQ ID NO: 372369 - RNA, 19 nt, Homo sapiens
  misc_RNA (1)...(19): siRNA sense strand
gcaccgagaucaagauguc

SEQ ID NO: 372370 - RNA, 19 nt, Homo sapiens
  misc_RNA (1)...(19): siRNA sense strand
gcagagaccuacuucaacu

SEQ ID NO: 372371 - RNA, 19 nt, Homo sapiens
  misc_RNA (1)...(19): siRNA sense strand
ggacgauacuggccuuugu

SEQ ID NO: 372372 - RNA, 19 nt, Homo sapiens
  misc_RNA (1)...(19): siRNA sense strand
ggucaauguucuaaagaug

SEQ ID NO: 372373 - RNA, 19 nt, Homo sapiens
  misc_RNA (1)...(19): siRNA sense strand
gggcguugcuucaccauag

SEQ ID NO: 372374 - RNA, 19 nt, Homo sapiens
  misc_RNA (1)...(19): siRNA sense strand
gaacaacaucggacacauc

SEQ ID NO: 372375 - RNA, 19 nt, Homo sapiens
  misc_RNA (1)...(19): siRNA sense strand
gaauaugugaugcccauga

SEQ ID NO: 372376 - RNA, 19 nt, Homo sapiens
  misc_RNA (1)...(19): siRNA sense strand
ggaggagggugugauugug

SEQ ID NO: 372377 - RNA, 19 nt, Homo sapiens
  misc_RNA (1)...(19): siRNA sense strand
gauacuggccuuugucucu

SEQ ID NO: 372378 - RNA, 19 nt, Homo sapiens
  misc_RNA (1)...(19): siRNA sense strand
agaccuacuucaacuacaa

SEQ ID NO: 372379 - RNA, 19 nt, Homo sapiens
  misc_RNA (1)...(19): siRNA sense strand
ucucuggcaucuucuuuau

SEQ ID NO: 372380 - RNA, 19 nt, Homo sapiens
  misc_RNA (1)...(19): siRNA sense strand
caagaugucccugcacuca

SEQ ID NO: 372381 - RNA, 19 nt, Homo sapiens
  misc_RNA (1)...(19): siRNA sense strand
ccaaggaugcagagaccua

SEQ ID NO: 372382 - RNA, 19 nt, Homo sapiens
  misc_RNA (1)...(19): siRNA sense strand
gccgccaucuccuuccuuu

SEQ ID NO: 372383 - RNA, 19 nt, Homo sapiens
  misc_RNA (1)...(19): siRNA sense strand
aauaugugaugcccaugaa

SEQ ID NO: 372384 - RNA, 19 nt, Homo sapiens
  misc_RNA (1)...(19): siRNA sense strand
gcuugggccuccuggguau

SEQ ID NO: 372385 - RNA, 19 nt, Homo sapiens
  misc_RNA (1)...(19): siRNA sense strand
ggguuuauccugaacaaca

SEQ ID NO: 372386 - RNA, 19 nt, Homo sapiens
  misc_RNA (1)...(19): siRNA sense strand
aaguauggguggucguuug

SEQ ID NO: 372387 - RNA, 19 nt, Homo sapiens
  misc_RNA (1)...(19): siRNA sense strand
caucuucuuuauccucuca

SEQ ID NO: 372388 - RNA, 19 nt, Homo sapiens
  misc_RNA (1)...(19): siRNA sense strand
ucauuggguuuauccugaa

SEQ ID NO: 372389 - RNA, 19 nt, Homo sapiens
  misc_RNA (1)...(19): siRNA sense strand
ggucagccucuucuucaug

SEQ ID NO: 372390 - RNA, 19 nt, Homo sapiens
  misc_RNA (1)...(19): siRNA sense strand
gucagccucuucuucaugu

SEQ ID NO: 372391 - RNA, 19 nt, Homo sapiens
  misc_RNA (1)...(19): siRNA sense strand
gucaauguucuaaagauga

SEQ ID NO: 372392 - RNA, 19 nt, Homo sapiens
  misc_RNA (1)...(19): siRNA sense strand
gguuuauccugaacaacau

SEQ ID NO: 372393 - RNA, 19 nt, Homo sapiens
  misc_RNA (1)...(19): siRNA sense strand
gagcaccgagaucaagaug

SEQ ID NO: 372394 - RNA, 19 nt, Homo sapiens
  misc_RNA (1)...(19): siRNA sense strand
gagaccuacuucaacuaca

SEQ ID NO: 372395 - RNA, 19 nt, Homo sapiens
  misc_RNA (1)...(19): siRNA sense strand
cacggucaauguucuaaag

SEQ ID NO: 372396 - RNA, 19 nt, Homo sapiens
  misc_RNA (1)...(19): siRNA sense strand
gaaccagagcaccgagauc

SEQ ID NO: 372397 - RNA, 19 nt, Homo sapiens
  misc_RNA (1)...(19): siRNA sense strand
ggcguugcuucaccauaga

SEQ ID NO: 372398 - RNA, 19 nt, Homo sapiens
  misc_RNA (1)...(19): siRNA sense strand
cggucaauguucuaaagau

SEQ ID NO: 372399 - RNA, 19 nt, Homo sapiens
  misc_RNA (1)...(19): siRNA sense strand
cagagaccuacuucaacua

SEQ ID NO: 372400 - RNA, 19 nt, Homo sapiens
  misc_RNA (1)...(19): siRNA sense strand
ggaugcagagaccuacuuc

SEQ ID NO: 372401 - RNA, 19 nt, Homo sapiens
  misc_RNA (1)...(19): siRNA sense strand
caacaggaccaaggaugca

SEQ ID NO: 372402 - RNA, 19 nt, Homo sapiens
  misc_RNA (1)...(19): siRNA sense strand
ugaacaacaucggacacau

SEQ ID NO: 372403 - RNA, 19 nt, Homo sapiens
  misc_RNA (1)...(19): siRNA sense strand
cgccaucuccuuccuuuua

SEQ ID NO: 372404 - RNA, 19 nt, Homo sapiens
  misc_RNA (1)...(19): siRNA sense strand
uugcuucaccauagaauau

SEQ ID NO: 372405 - RNA, 19 nt, Homo sapiens
  misc_RNA (1)...(19): siRNA sense strand
cuuugucucuggcaucuuc

SEQ ID NO: 372406 - RNA, 19 nt, Homo sapiens
  misc_RNA (1)...(19): siRNA sense strand
ccgcucagccacaccauuc

SEQ ID NO: 372407 - RNA, 19 nt, Homo sapiens
  misc_RNA (1)...(19): siRNA sense strand
gcaccaaccugaccaugga

SEQ ID NO: 372408 - RNA, 19 nt, Homo sapiens
  misc_RNA (1)...(19): siRNA sense strand
ggagcucugucuuucauug

SEQ ID NO: 372409 - RNA, 19 nt, Homo sapiens
  misc_RNA (1)...(19): siRNA sense strand
gguaucaucgucuacauuu

SEQ ID NO: 372410 - RNA, 19 nt, Homo sapiens
  misc_RNA (1)...(19): siRNA sense strand
ucaguaacaucaucgguau

SEQ ID NO: 372411 - RNA, 19 nt, Homo sapiens
  misc_RNA (1)...(19): siRNA sense strand
cguccuggcuguaaacauu

SEQ ID NO: 372412 - RNA, 19 nt, Homo sapiens
  misc_RNA (1)...(19): siRNA sense strand
aaagaaccauuacaacuac

SEQ ID NO: 372413 - RNA, 19 nt, Homo sapiens
  misc_RNA (1)...(19): siRNA sense strand
gcaucgaagggaucuauaa

SEQ ID NO: 372414 - RNA, 19 nt, Homo sapiens
  misc_RNA (1)...(19): siRNA sense strand
gaacaacaucguccucagu

SEQ ID NO: 372415 - RNA, 19 nt, Homo sapiens
  misc_RNA (1)...(19): siRNA sense strand
gggcacugcuuccggauca

SEQ ID NO: 372416 - RNA, 19 nt, Homo sapiens
  misc_RNA (1)...(19): siRNA sense strand
aaacgggaauuccuuaagg

SEQ ID NO: 372417 - RNA, 19 nt, Homo sapiens
  misc_RNA (1)...(19): siRNA sense strand
ucgaagggaucuauaaagg

SEQ ID NO: 372418 - RNA, 19 nt, Homo sapiens
  misc_RNA (1)...(19): siRNA sense strand
caucgaagggaucuauaaa

SEQ ID NO: 372419 - RNA, 19 nt, Homo sapiens
  misc_RNA (1)...(19): siRNA sense strand
caagcgggacgaagacaaa

SEQ ID NO: 372420 - RNA, 19 nt, Homo sapiens
  misc_RNA (1)...(19): siRNA sense strand
uaacaucaucgguaucauc

SEQ ID NO: 372421 - RNA, 19 nt, Homo sapiens
  misc_RNA (1)...(19): siRNA sense strand
gaccaaacgggaauuccuu

SEQ ID NO: 372422 - RNA, 19 nt, Homo sapiens
  misc_RNA (1)...(19): siRNA sense strand
ccaaacgggaauuccuuaa

SEQ ID NO: 372423 - RNA, 19 nt, Homo sapiens
  misc_RNA (1)...(19): siRNA sense strand
gcaggccucaguaacauca

SEQ ID NO: 372424 - RNA, 19 nt, Homo sapiens
  misc_RNA (1)...(19): siRNA sense strand
uaaggcgucuuccucuucu

SEQ ID NO: 372425 - RNA, 19 nt, Homo sapiens
  misc_RNA (1)...(19): siRNA sense strand
gugacaagcgggacgaaga

SEQ ID NO: 372426 - RNA, 19 nt, Homo sapiens
  misc_RNA (1)...(19): siRNA sense strand
ggaugccgagcuacaggua

SEQ ID NO: 372427 - RNA, 19 nt, Homo sapiens
  misc_RNA (1)...(19): siRNA sense strand
gcugcaggccucaguaaca

SEQ ID NO: 372428 - RNA, 19 nt, Homo sapiens
  misc_RNA (1)...(19): siRNA sense strand
cgucuuccucuucuccuua

SEQ ID NO: 372429 - RNA, 19 nt, Homo sapiens
  misc_RNA (1)...(19): siRNA sense strand
aaagaguugagguuuaaga

SEQ ID NO: 372430 - RNA, 19 nt, Homo sapiens
  misc_RNA (1)...(19): siRNA sense strand
caaacgggaauuccuuaag

SEQ ID NO: 372431 - RNA, 19 nt, Homo sapiens
  misc_RNA (1)...(19): siRNA sense strand
guaucaucgucuacauuuc

SEQ ID NO: 372432 - RNA, 19 nt, Homo sapiens
  misc_RNA (1)...(19): siRNA sense strand
acacaggugacccgaguga

SEQ ID NO: 372433 - RNA, 19 nt, Homo sapiens
  misc_RNA (1)...(19): siRNA sense strand
ucccagaggacaaugacua

SEQ ID NO: 372434 - RNA, 19 nt, Homo sapiens
  misc_RNA (1)...(19): siRNA sense strand
cagaggacaaugacuacga

SEQ ID NO: 372435 - RNA, 19 nt, Homo sapiens
  misc_RNA (1)...(19): siRNA sense strand
cccaugggccugaagauca

SEQ ID NO: 372436 - RNA, 19 nt, Homo sapiens
  misc_RNA (1)...(19): siRNA sense strand
gcacugcuuccggaucaau

SEQ ID NO: 372437 - RNA, 19 nt, Homo sapiens
  misc_RNA (1)...(19): siRNA sense strand
gaucuacagccgcaagaac

SEQ ID NO: 372438 - RNA, 19 nt, Homo sapiens
  misc_RNA (1)...(19): siRNA sense strand
ucaucgguaucaucgucua

SEQ ID NO: 372439 - RNA, 19 nt, Homo sapiens
  misc_RNA (1)...(19): siRNA sense strand
cuuaaggcgucuuccucuu

SEQ ID NO: 372440 - RNA, 19 nt, Homo sapiens
  misc_RNA (1)...(19): siRNA sense strand
gaacgaggcugcccuagag

SEQ ID NO: 372441 - RNA, 19 nt, Homo sapiens
  misc_RNA (1)...(19): siRNA sense strand
ggacaugccuauccugugu

SEQ ID NO: 372442 - RNA, 19 nt, Homo sapiens
  misc_RNA (1)...(19): siRNA sense strand
gaagacauguccaucagau

SEQ ID NO: 372443 - RNA, 19 nt, Homo sapiens
  misc_RNA (1)...(19): siRNA sense strand
gcacggagaugaagauacu

SEQ ID NO: 372444 - RNA, 19 nt, Homo sapiens
  misc_RNA (1)...(19): siRNA sense strand
gcaaaguccucaccuuaca

SEQ ID NO: 372445 - RNA, 19 nt, Homo sapiens
  misc_RNA (1)...(19): siRNA sense strand
ccauuuggcuugugauauu

SEQ ID NO: 372446 - RNA, 19 nt, Homo sapiens
  misc_RNA (1)...(19): siRNA sense strand
gagcauuccuagauaacaa

SEQ ID NO: 372447 - RNA, 19 nt, Homo sapiens
  misc_RNA (1)...(19): siRNA sense strand
gcaauaugaaguacaguuu

SEQ ID NO: 372448 - RNA, 19 nt, Homo sapiens
  misc_RNA (1)...(19): siRNA sense strand
gcucaggguugcucucuug

SEQ ID NO: 372449 - RNA, 19 nt, Homo sapiens
  misc_RNA (1)...(19): siRNA sense strand
gcagugagaacaacgguuu

SEQ ID NO: 372450 - RNA, 19 nt, Homo sapiens
  misc_RNA (1)...(19): siRNA sense strand
uuugacaacuccuguauaa

SEQ ID NO: 372451 - RNA, 19 nt, Homo sapiens
  misc_RNA (1)...(19): siRNA sense strand
gugcaaaguccucaccuua

SEQ ID NO: 372452 - RNA, 19 nt, Homo sapiens
  misc_RNA (1)...(19): siRNA sense strand
ggaggaggaugaugaggau

SEQ ID NO: 372453 - RNA, 19 nt, Homo sapiens
  misc_RNA (1)...(19): siRNA sense strand
gcagaaugcuagccagaag

SEQ ID NO: 372454 - RNA, 19 nt, Homo sapiens
  misc_RNA (1)...(19): siRNA sense strand
ugacuggaauuacacaaga

SEQ ID NO: 372455 - RNA, 19 nt, Homo sapiens
  misc_RNA (1)...(19): siRNA sense strand
guugaacacugcagaaauc

SEQ ID NO: 372456 - RNA, 19 nt, Homo sapiens
  misc_RNA (1)...(19): siRNA sense strand
gcauuaagcgcgucaagga

SEQ ID NO: 372457 - RNA, 19 nt, Homo sapiens
  misc_RNA (1)...(19): siRNA sense strand
ggacguacccgcugaggau

SEQ ID NO: 372458 - RNA, 19 nt, Homo sapiens
  misc_RNA (1)...(19): siRNA sense strand
guccucaccuuacauauuc

SEQ ID NO: 372459 - RNA, 19 nt, Homo sapiens
  misc_RNA (1)...(19): siRNA sense strand
ccagacagcggcuugauug

SEQ ID NO: 372460 - RNA, 19 nt, Homo sapiens
  misc_RNA (1)...(19): siRNA sense strand
gauguggacugugucaaau

SEQ ID NO: 372461 - RNA, 19 nt, Homo sapiens
  misc_RNA (1)...(19): siRNA sense strand
ggcaguacguggacucaga

SEQ ID NO: 372462 - RNA, 19 nt, Homo sapiens
  misc_RNA (1)...(19): siRNA sense strand
ccucugggacccuuuauaa

SEQ ID NO: 372463 - RNA, 19 nt, Homo sapiens
  misc_RNA (1)...(19): siRNA sense strand
ccagaaggaugucauugag

SEQ ID NO: 372464 - RNA, 19 nt, Homo sapiens
  misc_RNA (1)...(19): siRNA sense strand
cuucgagcauuccuagaua

SEQ ID NO: 372465 - RNA, 19 nt, Homo sapiens
  misc_RNA (1)...(19): siRNA sense strand
cagcauagccacgaaguga

SEQ ID NO: 372466 - RNA, 19 nt, Homo sapiens
  misc_RNA (1)...(19): siRNA sense strand
ggacauccuaucuaacuuc

SEQ ID NO: 372467 - RNA, 19 nt, Homo sapiens
  misc_RNA (1)...(19): siRNA sense strand
gaagagcacaguggaaagu

SEQ ID NO: 372468 - RNA, 19 nt, Homo sapiens
  misc_RNA (1)...(19): siRNA sense strand
guucauggccuguaaccuu

SEQ ID NO: 372469 - RNA, 19 nt, Homo sapiens
  misc_RNA (1)...(19): siRNA sense strand
gcugcuugcugcuggguuu

SEQ ID NO: 372470 - RNA, 19 nt, Homo sapiens
  misc_RNA (1)...(19): siRNA sense strand
cauccuaucuaacuucaag

SEQ ID NO: 372471 - RNA, 19 nt, Homo sapiens
  misc_RNA (1)...(19): siRNA sense strand
uggcagauguggacugugu

SEQ ID NO: 372472 - RNA, 19 nt, Homo sapiens
  misc_RNA (1)...(19): siRNA sense strand
gccaggcuguggucauuug

SEQ ID NO: 372473 - RNA, 19 nt, Homo sapiens
  misc_RNA (1)...(19): siRNA sense strand
caggguugcucucuuguuc

SEQ ID NO: 372474 - RNA, 19 nt, Homo sapiens
  misc_RNA (1)...(19): siRNA sense strand
guaccgagcagauucagau

SEQ ID NO: 372475 - RNA, 19 nt, Homo sapiens
  misc_RNA (1)...(19): siRNA sense strand
gcauccauuuggcuuguga

SEQ ID NO: 372476 - RNA, 19 nt, Homo sapiens
  misc_RNA (1)...(19): siRNA sense strand
gcuucuaugccuucuauaa

SEQ ID NO: 372477 - RNA, 19 nt, Homo sapiens
  misc_RNA (1)...(19): siRNA sense strand
agagcacaguggaaaguuu

SEQ ID NO: 372478 - RNA, 19 nt, Homo sapiens
  misc_RNA (1)...(19): siRNA sense strand
acagacugcugaagagaug

SEQ ID NO: 372479 - RNA, 19 nt, Homo sapiens
  misc_RNA (1)...(19): siRNA sense strand
gguugaagcugugggacuu

SEQ ID NO: 372480 - RNA, 19 nt, Homo sapiens
  misc_RNA (1)...(19): siRNA sense strand
ugacaacuccuguauaaaa

SEQ ID NO: 372481 - RNA, 19 nt, Homo sapiens
  misc_RNA (1)...(19): siRNA sense strand
ucacuaccaucugcuucua

SEQ ID NO: 372482 - RNA, 19 nt, Homo sapiens
  misc_RNA (1)...(19): siRNA sense strand
gccagaaggaugucauuga

SEQ ID NO: 372483 - RNA, 19 nt, Homo sapiens
  misc_RNA (1)...(19): siRNA sense strand
aagaagacagcuacaacua

SEQ ID NO: 372484 - RNA, 19 nt, Homo sapiens
  misc_RNA (1)...(19): siRNA sense strand
gcauagccacgaagugaug

SEQ ID NO: 372485 - RNA, 19 nt, Homo sapiens
  misc_RNA (1)...(19): siRNA sense strand
aaaguccucaccuuacaua

SEQ ID NO: 372486 - RNA, 19 nt, Homo sapiens
  misc_RNA (1)...(19): siRNA sense strand
gacauccuaucuaacuuca

SEQ ID NO: 372487 - RNA, 19 nt, Homo sapiens
  misc_RNA (1)...(19): siRNA sense strand
agugaugccucuccucuau

SEQ ID NO: 372488 - RNA, 19 nt, Homo sapiens
  misc_RNA (1)...(19): siRNA sense strand
gauucugauucccagcaua

SEQ ID NO: 372489 - RNA, 19 nt, Homo sapiens
  misc_RNA (1)...(19): siRNA sense strand
guaccaaggacaugccuau

SEQ ID NO: 372490 - RNA, 19 nt, Homo sapiens
  misc_RNA (1)...(19): siRNA sense strand
ccuuacauauucaucuuga

SEQ ID NO: 372491 - RNA, 19 nt, Homo sapiens
  misc_RNA (1)...(19): siRNA sense strand
ucuccucuauccucucuuu

SEQ ID NO: 372492 - RNA, 19 nt, Homo sapiens
  misc_RNA (1)...(19): siRNA sense strand
gacuggaauuacacaagaa

SEQ ID NO: 372493 - RNA, 19 nt, Homo sapiens
  misc_RNA (1)...(19): siRNA sense strand
cguacccgcugaggauaua

SEQ ID NO: 372494 - RNA, 19 nt, Homo sapiens
  misc_RNA (1)...(19): siRNA sense strand
caccuuacauauucaucuu

SEQ ID NO: 372495 - RNA, 19 nt, Homo sapiens
  misc_RNA (1)...(19): siRNA sense strand
ccuccaaagugacaacaau

SEQ ID NO: 372496 - RNA, 19 nt, Homo sapiens
  misc_RNA (1)...(19): siRNA sense strand
caauaugaaguacaguuug

SEQ ID NO: 372497 - RNA, 19 nt, Homo sapiens
  misc_RNA (1)...(19): siRNA sense strand
ccaagaaguuaaaaucaga

SEQ ID NO: 372498 - RNA, 19 nt, Homo sapiens
  misc_RNA (1)...(19): siRNA sense strand
caagagaacagacuaucag

SEQ ID NO: 372499 - RNA, 19 nt, Homo sapiens
  misc_RNA (1)...(19): siRNA sense strand
caaagugacaacaauacug

SEQ ID NO: 372500 - RNA, 19 nt, Homo sapiens
  misc_RNA (1)...(19): siRNA sense strand
ucuauccucucuuugucua

SEQ ID NO: 372501 - RNA, 19 nt, Homo sapiens
  misc_RNA (1)...(19): siRNA sense strand
ggaggaugaugaggaugau

SEQ ID NO: 372502 - RNA, 19 nt, Homo sapiens
  misc_RNA (1)...(19): siRNA sense strand
ggaguuuacgauccaagaa

SEQ ID NO: 372503 - RNA, 19 nt, Homo sapiens
  misc_RNA (1)...(19): siRNA sense strand
ugacaugcccagcccuauu

SEQ ID NO: 372504 - RNA, 19 nt, Homo sapiens
  misc_RNA (1)...(19): siRNA sense strand
ccaagagaacagacuauca

SEQ ID NO: 372505 - RNA, 19 nt, Homo sapiens
  misc_RNA (1)...(19): siRNA sense strand
ggaugucauugagcagcua

SEQ ID NO: 372506 - RNA, 19 nt, Homo sapiens
  misc_RNA (1)...(19): siRNA sense strand
ccagcaauaugaaguacag

SEQ ID NO: 372507 - RNA, 19 nt, Homo sapiens
  misc_RNA (1)...(19): siRNA sense strand
gacaugcccagcccuauuc

SEQ ID NO: 372508 - RNA, 19 nt, Homo sapiens
  misc_RNA (1)...(19): siRNA sense strand
uaacagugcaaucagaauc

SEQ ID NO: 372509 - RNA, 19 nt, Homo sapiens
  misc_RNA (1)...(19): siRNA sense strand
cugcuucuaugccuucuau

SEQ ID NO: 372510 - RNA, 19 nt, Homo sapiens
  misc_RNA (1)...(19): siRNA sense strand
ccgaagagcacaguggaaa

SEQ ID NO: 372511 - RNA, 19 nt, Homo sapiens
  misc_RNA (1)...(19): siRNA sense strand
uguggacugugucaaauuc

SEQ ID NO: 372512 - RNA, 19 nt, Homo sapiens
  misc_RNA (1)...(19): siRNA sense strand
guugcucucuuguucugaa

SEQ ID NO: 372513 - RNA, 19 nt, Homo sapiens
  misc_RNA (1)...(19): siRNA sense strand
aauaugaaguacaguuugg

SEQ ID NO: 372514 - RNA, 19 nt, Homo sapiens
  misc_RNA (1)...(19): siRNA sense strand
cuacagaccacucaaacca

SEQ ID NO: 372515 - RNA, 19 nt, Homo sapiens
  misc_RNA (1)...(19): siRNA sense strand
ccgccaggcuguggucauu

SEQ ID NO: 372516 - RNA, 19 nt, Homo sapiens
  misc_RNA (1)...(19): siRNA sense strand
ugaugaggaugauaaugca

SEQ ID NO: 372517 - RNA, 19 nt, Homo sapiens
  misc_RNA (1)...(19): siRNA sense strand
caagaagacagcuacaacu

SEQ ID NO: 372518 - RNA, 19 nt, Homo sapiens
  misc_RNA (1)...(19): siRNA sense strand
cgugguccgucuccaagaa

SEQ ID NO: 372519 - RNA, 19 nt, Homo sapiens
  misc_RNA (1)...(19): siRNA sense strand
ugucacagacugcugaaga

SEQ ID NO: 372520 - RNA, 19 nt, Homo sapiens
  misc_RNA (1)...(19): siRNA sense strand
gcagauguggacuguguca

SEQ ID NO: 372521 - RNA, 19 nt, Homo sapiens
  misc_RNA (1)...(19): siRNA sense strand
guacguggacucagauggu

SEQ ID NO: 372522 - RNA, 19 nt, Homo sapiens
  misc_RNA (1)...(19): siRNA sense strand
guacgugguccgucuccaa

SEQ ID NO: 372523 - RNA, 19 nt, Homo sapiens
  misc_RNA (1)...(19): siRNA sense strand
ggaacucggugaggcuuuu

SEQ ID NO: 372524 - RNA, 19 nt, Homo sapiens
  misc_RNA (1)...(19): siRNA sense strand
ggaguuucaccaacacugu

SEQ ID NO: 372525 - RNA, 19 nt, Homo sapiens
  misc_RNA (1)...(19): siRNA sense strand
ggguugcucucuuguucug

SEQ ID NO: 372526 - RNA, 19 nt, Homo sapiens
  misc_RNA (1)...(19): siRNA sense strand
uccgcuaccuccaaaguga

SEQ ID NO: 372527 - RNA, 19 nt, Homo sapiens
  misc_RNA (1)...(19): siRNA sense strand
ccaagaagacagcuacaac

SEQ ID NO: 372528 - RNA, 19 nt, Homo sapiens
  misc_RNA (1)...(19): siRNA sense strand
cuuauccgcuaccuccaaa

SEQ ID NO: 372529 - RNA, 19 nt, Homo sapiens
  misc_RNA (1)...(19): siRNA sense strand
ucuggugacuggaauuaca

SEQ ID NO: 372530 - RNA, 19 nt, Homo sapiens
  misc_RNA (1)...(19): siRNA sense strand
gggacaucaggaacacuua

SEQ ID NO: 372531 - RNA, 19 nt, Homo sapiens
  misc_RNA (1)...(19): siRNA sense strand
uggaggaggaggaugauga

SEQ ID NO: 372532 - RNA, 19 nt, Homo sapiens
  misc_RNA (1)...(19): siRNA sense strand
aggaugaugaggaugauaa

SEQ ID NO: 372533 - RNA, 19 nt, Homo sapiens
  misc_RNA (1)...(19): siRNA sense strand
cuucaagcuucgagcauuc

SEQ ID NO: 372534 - RNA, 19 nt, Homo sapiens
  misc_RNA (1)...(19): siRNA sense strand
gugucaaauuccacccuaa

SEQ ID NO: 372535 - RNA, 19 nt, Homo sapiens
  misc_RNA (1)...(19): siRNA sense strand
caaucuaacagugcaauca

SEQ ID NO: 372536 - RNA, 19 nt, Homo sapiens
  misc_RNA (1)...(19): siRNA sense strand
agacauguccaucagauac

SEQ ID NO: 372537 - RNA, 19 nt, Homo sapiens
  misc_RNA (1)...(19): siRNA sense strand
uuggacgacugcggaauuu

SEQ ID NO: 372538 - RNA, 19 nt, Homo sapiens
  misc_RNA (1)...(19): siRNA sense strand
gagaggccacacagacaau

SEQ ID NO: 372539 - RNA, 19 nt, Homo sapiens
  misc_RNA (1)...(19): siRNA sense strand
ggacaucaggaacacuuac

SEQ ID NO: 372540 - RNA, 19 nt, Homo sapiens
  misc_RNA (1)...(19): siRNA sense strand
caacagaaaucacagaaga

SEQ ID NO: 372541 - RNA, 19 nt, Homo sapiens
  misc_RNA (1)...(19): siRNA sense strand
cagaagagcuacagaaaga

SEQ ID NO: 372542 - RNA, 19 nt, Homo sapiens
  misc_RNA (1)...(19): siRNA sense strand
gauaugaagcgaaccauua

SEQ ID NO: 372543 - RNA, 19 nt, Homo sapiens
  misc_RNA (1)...(19): siRNA sense strand
guaaagguguugcuggaaa

SEQ ID NO: 372544 - RNA, 19 nt, Homo sapiens
  misc_RNA (1)...(19): siRNA sense strand
agacagaaaucaagaacaa

SEQ ID NO: 372545 - RNA, 19 nt, Homo sapiens
  misc_RNA (1)...(19): siRNA sense strand
gaaaaggagugcaaagaaa

SEQ ID NO: 372546 - RNA, 19 nt, Homo sapiens
  misc_RNA (1)...(19): siRNA sense strand
gagaagcccuccuaugaca

SEQ ID NO: 372547 - RNA, 19 nt, Homo sapiens
  misc_RNA (1)...(19): siRNA sense strand
gaagcgaaccauuaauaaa

SEQ ID NO: 372548 - RNA, 19 nt, Homo sapiens
  misc_RNA (1)...(19): siRNA sense strand
gaacaagaugcaacagaaa

SEQ ID NO: 372549 - RNA, 19 nt, Homo sapiens
  misc_RNA (1)...(19): siRNA sense strand
ggaaaaggcuacuaggaaa

SEQ ID NO: 372550 - RNA, 19 nt, Homo sapiens
  misc_RNA (1)...(19): siRNA sense strand
gaugggaucagucagauaa

SEQ ID NO: 372551 - RNA, 19 nt, Homo sapiens
  misc_RNA (1)...(19): siRNA sense strand
caaaggagacacggaauuu

SEQ ID NO: 372552 - RNA, 19 nt, Homo sapiens
  misc_RNA (1)...(19): siRNA sense strand
agaacaagaugcaacagaa

SEQ ID NO: 372553 - RNA, 19 nt, Homo sapiens
  misc_RNA (1)...(19): siRNA sense strand
acagaaagaucuagaagag

SEQ ID NO: 372554 - RNA, 19 nt, Homo sapiens
  misc_RNA (1)...(19): siRNA sense strand
aagagaagcccuccuauga

SEQ ID NO: 372555 - RNA, 19 nt, Homo sapiens
  misc_RNA (1)...(19): siRNA sense strand
gaagauggagacgaugaua

SEQ ID NO: 372556 - RNA, 19 nt, Homo sapiens
  misc_RNA (1)...(19): siRNA sense strand
uagaagagguaaagguguu

SEQ ID NO: 372557 - RNA, 19 nt, Homo sapiens
  misc_RNA (1)...(19): siRNA sense strand
gagaggucauuugaucuuu

SEQ ID NO: 372558 - RNA, 19 nt, Homo sapiens
  misc_RNA (1)...(19): siRNA sense strand
ugaagcgaaccauuaauaa

SEQ ID NO: 372559 - RNA, 19 nt, Homo sapiens
  misc_RNA (1)...(19): siRNA sense strand
uaauaaagccuggguggaa

SEQ ID NO: 372560 - RNA, 19 nt, Homo sapiens
  misc_RNA (1)...(19): siRNA sense strand
ugugaacaaucucuugaaa

SEQ ID NO: 372561 - RNA, 19 nt, Homo sapiens
  misc_RNA (1)...(19): siRNA sense strand
gaaagaucuagaagaggua

SEQ ID NO: 372562 - RNA, 19 nt, Homo sapiens
  misc_RNA (1)...(19): siRNA sense strand
gaagagcuacagaaagauc

SEQ ID NO: 372563 - RNA, 19 nt, Homo sapiens
  misc_RNA (1)...(19): siRNA sense strand
ggaucagucagauaaguuu

SEQ ID NO: 372564 - RNA, 19 nt, Homo sapiens
  misc_RNA (1)...(19): siRNA sense strand
gaaucuaaaugggaagagu

SEQ ID NO: 372565 - RNA, 19 nt, Homo sapiens
  misc_RNA (1)...(19): siRNA sense strand
ccaaaggagacacggaauu

SEQ ID NO: 372566 - RNA, 19 nt, Homo sapiens
  misc_RNA (1)...(19): siRNA sense strand
gaaagaaaguggaaaacac

SEQ ID NO: 372567 - RNA, 19 nt, Homo sapiens
  misc_RNA (1)...(19): siRNA sense strand
ugaacaaucucuugaaacc

SEQ ID NO: 372568 - RNA, 19 nt, Homo sapiens
  misc_RNA (1)...(19): siRNA sense strand
gagagaagcaagccaaagg

SEQ ID NO: 372569 - RNA, 19 nt, Homo sapiens
  misc_RNA (1)...(19): siRNA sense strand
gugagggauugaugaaugu

SEQ ID NO: 372570 - RNA, 19 nt, Homo sapiens
  misc_RNA (1)...(19): siRNA sense strand
acagaaaucacagaagaaa

SEQ ID NO: 372571 - RNA, 19 nt, Homo sapiens
  misc_RNA (1)...(19): siRNA sense strand
agugagggauugaugaaug

SEQ ID NO: 372572 - RNA, 19 nt, Homo sapiens
  misc_RNA (1)...(19): siRNA sense strand
acagaaaucaagaacaaga

SEQ ID NO: 372573 - RNA, 19 nt, Homo sapiens
  misc_RNA (1)...(19): siRNA sense strand
aaagagaagcccuccuaug

SEQ ID NO: 372574 - RNA, 19 nt, Homo sapiens
  misc_RNA (1)...(19): siRNA sense strand
augaagcgaaccauuaaua

SEQ ID NO: 372575 - RNA, 19 nt, Homo sapiens
  misc_RNA (1)...(19): siRNA sense strand
uuaugaagauggagacgau

SEQ ID NO: 372576 - RNA, 19 nt, Homo sapiens
  misc_RNA (1)...(19): siRNA sense strand
cuaugacacugaaacagau

SEQ ID NO: 372577 - RNA, 19 nt, Homo sapiens
  misc_RNA (1)...(19): siRNA sense strand
ggauugaugaauguucuaa

SEQ ID NO: 372578 - RNA, 19 nt, Homo sapiens
  misc_RNA (1)...(19): siRNA sense strand
caagaugcaacagaaauca

SEQ ID NO: 372579 - RNA, 19 nt, Homo sapiens
  misc_RNA (1)...(19): siRNA sense strand
gaaaaggcuacuaggaaaa

SEQ ID NO: 372580 - RNA, 19 nt, Homo sapiens
  misc_RNA (1)...(19): siRNA sense strand
uggagacgaugauaugaag

SEQ ID NO: 372581 - RNA, 19 nt, Homo sapiens
  misc_RNA (1)...(19): siRNA sense strand
ccuaugacacugaaacaga

SEQ ID NO: 372582 - RNA, 19 nt, Homo sapiens
  misc_RNA (1)...(19): siRNA sense strand
gggaucagucagauaaguu

SEQ ID NO: 372583 - RNA, 19 nt, Homo sapiens
  misc_RNA (1)...(19): siRNA sense strand
ggaugggaucagucagaua

SEQ ID NO: 372584 - RNA, 19 nt, Homo sapiens
  misc_RNA (1)...(19): siRNA sense strand
gaaaacacaaggugggauu

SEQ ID NO: 372585 - RNA, 19 nt, Homo sapiens
  misc_RNA (1)...(19): siRNA sense strand
gaaacccaucucuguggaa

SEQ ID NO: 372586 - RNA, 19 nt, Homo sapiens
  misc_RNA (1)...(19): siRNA sense strand
guuacuccaugauugugaa

SEQ ID NO: 372587 - RNA, 19 nt, Homo sapiens
  misc_RNA (1)...(19): siRNA sense strand
aagcgaaccauuaauaaag

SEQ ID NO: 372588 - RNA, 19 nt, Homo sapiens
  misc_RNA (1)...(19): siRNA sense strand
aauaaagccuggguggaau

SEQ ID NO: 372589 - RNA, 19 nt, Homo sapiens
  misc_RNA (1)...(19): siRNA sense strand
gcugugguugcucccauua

SEQ ID NO: 372590 - RNA, 19 nt, Homo sapiens
  misc_RNA (1)...(19): siRNA sense strand
gauggagacgaugauauga

SEQ ID NO: 372591 - RNA, 19 nt, Homo sapiens
  misc_RNA (1)...(19): siRNA sense strand
ucaagaacaagaugcaaca

SEQ ID NO: 372592 - RNA, 19 nt, Homo sapiens
  misc_RNA (1)...(19): siRNA sense strand
auaugaagcgaaccauuaa

SEQ ID NO: 372593 - RNA, 19 nt, Homo sapiens
  misc_RNA (1)...(19): siRNA sense strand
gcuacagaaagaucuagaa

SEQ ID NO: 372594 - RNA, 19 nt, Homo sapiens
  misc_RNA (1)...(19): siRNA sense strand
uaaagguguugcuggaaaa

SEQ ID NO: 372595 - RNA, 19 nt, Homo sapiens
  misc_RNA (1)...(19): siRNA sense strand
caucaaguucccacugaga

SEQ ID NO: 372596 - RNA, 19 nt, Homo sapiens
  misc_RNA (1)...(19): siRNA sense strand
agauggagacgaugauaug

SEQ ID NO: 372597 - RNA, 19 nt, Homo sapiens
  misc_RNA (1)...(19): siRNA sense strand
guagaaagaaaguggaaaa

SEQ ID NO: 372598 - RNA, 19 nt, Homo sapiens
  misc_RNA (1)...(19): siRNA sense strand
gcaacagaaaucacagaag

SEQ ID NO: 372599 - RNA, 19 nt, Homo sapiens
  misc_RNA (1)...(19): siRNA sense strand
ggaaucaagagagaagcaa

SEQ ID NO: 372600 - RNA, 19 nt, Homo sapiens
  misc_RNA (1)...(19): siRNA sense strand
gaggucauuugaucuuuug

SEQ ID NO: 372601 - RNA, 19 nt, Homo sapiens
  misc_RNA (1)...(19): siRNA sense strand
gaucagucagauaaguuug

SEQ ID NO: 372602 - RNA, 19 nt, Homo sapiens
  misc_RNA (1)...(19): siRNA sense strand
gaaaucacagaagaaagca

SEQ ID NO: 372603 - RNA, 19 nt, Homo sapiens
  misc_RNA (1)...(19): siRNA sense strand
cggugaaaaucaguaauua

SEQ ID NO: 372604 - RNA, 19 nt, Homo sapiens
  misc_RNA (1)...(19): siRNA sense strand
caaguucccacugagaaug

SEQ ID NO: 372605 - RNA, 19 nt, Homo sapiens
  misc_RNA (1)...(19): siRNA sense strand
ucagucagauaaguuugug

SEQ ID NO: 372606 - RNA, 19 nt, Homo sapiens
  misc_RNA (1)...(19): siRNA sense strand
guaauuauggaugggauca

SEQ ID NO: 372607 - RNA, 19 nt, Homo sapiens
  misc_RNA (1)...(19): siRNA sense strand
uggguggaaucaagagaga

SEQ ID NO: 372608 - RNA, 19 nt, Homo sapiens
  misc_RNA (1)...(19): siRNA sense strand
gcccuccuaugacacugaa

SEQ ID NO: 372609 - RNA, 19 nt, Homo sapiens
  misc_RNA (1)...(19): siRNA sense strand
agaaaucacagaagaaagc

SEQ ID NO: 372610 - RNA, 19 nt, Homo sapiens
  misc_RNA (1)...(19): siRNA sense strand
ucagaagagcuacagaaag

SEQ ID NO: 372611 - RNA, 19 nt, Homo sapiens
  misc_RNA (1)...(19): siRNA sense strand
agaaaucaagaacaagaug

SEQ ID NO: 372612 - RNA, 19 nt, Homo sapiens
  misc_RNA (1)...(19): siRNA sense strand
ugugguugcucccauuaca

SEQ ID NO: 372613 - RNA, 19 nt, Homo sapiens
  misc_RNA (1)...(19): siRNA sense strand
cuagugagggauugaugaa

SEQ ID NO: 372614 - RNA, 19 nt, Homo sapiens
  misc_RNA (1)...(19): siRNA sense strand
ugaaaaggagugcaaagaa

SEQ ID NO: 372615 - RNA, 19 nt, Homo sapiens
  misc_RNA (1)...(19): siRNA sense strand
cuacagaaagaucuagaag

SEQ ID NO: 372616 - RNA, 19 nt, Homo sapiens
  misc_RNA (1)...(19): siRNA sense strand
uucaucaaguucccacuga

SEQ ID NO: 372617 - RNA, 19 nt, Homo sapiens
  misc_RNA (1)...(19): siRNA sense strand
uacagaaagaucuagaaga

SEQ ID NO: 372618 - RNA, 19 nt, Homo sapiens
  misc_RNA (1)...(19): siRNA sense strand
gagacagaaaucaagaaca

SEQ ID NO: 372619 - RNA, 19 nt, Homo sapiens
  misc_RNA (1)...(19): siRNA sense strand
gaugauaugaagcgaacca

SEQ ID NO: 372620 - RNA, 19 nt, Homo sapiens
  misc_RNA (1)...(19): siRNA sense strand
gaagcccuccuaugacacu

SEQ ID NO: 372621 - RNA, 19 nt, Homo sapiens
  misc_RNA (1)...(19): siRNA sense strand
gguaaagguguugcuggaa

SEQ ID NO: 372622 - RNA, 19 nt, Homo sapiens
  misc_RNA (1)...(19): siRNA sense strand
acagaagaaagcagaacuu

SEQ ID NO: 372623 - RNA, 19 nt, Homo sapiens
  misc_RNA (1)...(19): siRNA sense strand
aagaacaagaugcaacaga

SEQ ID NO: 372624 - RNA, 19 nt, Homo sapiens
  misc_RNA (1)...(19): siRNA sense strand
aaaaggagugcaaagaaaa

SEQ ID NO: 372625 - RNA, 19 nt, Homo sapiens
  misc_RNA (1)...(19): siRNA sense strand
gcacagacauccuacagaa

SEQ ID NO: 372626 - RNA, 19 nt, Homo sapiens
  misc_RNA (1)...(19): siRNA sense strand
gaaguacaccaccaauuua

SEQ ID NO: 372627 - RNA, 19 nt, Homo sapiens
  misc_RNA (1)...(19): siRNA sense strand
gaucugaagccaagaaaua

SEQ ID NO: 372628 - RNA, 19 nt, Homo sapiens
  misc_RNA (1)...(19): siRNA sense strand
aguagcagcucauccauua

SEQ ID NO: 372629 - RNA, 19 nt, Homo sapiens
  misc_RNA (1)...(19): siRNA sense strand
gaaccaaacccacuucguu

SEQ ID NO: 372630 - RNA, 19 nt, Homo sapiens
  misc_RNA (1)...(19): siRNA sense strand
ggaaggaucugaguaugau

SEQ ID NO: 372631 - RNA, 19 nt, Homo sapiens
  misc_RNA (1)...(19): siRNA sense strand
gaacuugccaucuuaggaa

SEQ ID NO: 372632 - RNA, 19 nt, Homo sapiens
  misc_RNA (1)...(19): siRNA sense strand
gauuaagggugcaacuaaa

SEQ ID NO: 372633 - RNA, 19 nt, Homo sapiens
  misc_RNA (1)...(19): siRNA sense strand
gagacuacaucacaacaga

SEQ ID NO: 372634 - RNA, 19 nt, Homo sapiens
  misc_RNA (1)...(19): siRNA sense strand
gaacuaaagaagcagcuaa

SEQ ID NO: 372635 - RNA, 19 nt, Homo sapiens
  misc_RNA (1)...(19): siRNA sense strand
ugaaguacaccaccaauuu

SEQ ID NO: 372636 - RNA, 19 nt, Homo sapiens
  misc_RNA (1)...(19): siRNA sense strand
gcacaaacuucacguuacu

SEQ ID NO: 372637 - RNA, 19 nt, Homo sapiens
  misc_RNA (1)...(19): siRNA sense strand
gaaaauggcuuggcugguu

SEQ ID NO: 372638 - RNA, 19 nt, Homo sapiens
  misc_RNA (1)...(19): siRNA sense strand
uauacaaggucaggaauaa

SEQ ID NO: 372639 - RNA, 19 nt, Homo sapiens
  misc_RNA (1)...(19): siRNA sense strand
agacagagcugccauugag

SEQ ID NO: 372640 - RNA, 19 nt, Homo sapiens
  misc_RNA (1)...(19): siRNA sense strand
gcagaaauccagguguuaa

SEQ ID NO: 372641 - RNA, 19 nt, Homo sapiens
  misc_RNA (1)...(19): siRNA sense strand
aagagaaucuggugaacuu

SEQ ID NO: 372642 - RNA, 19 nt, Homo sapiens
  misc_RNA (1)...(19): siRNA sense strand
gaaaguagcagcucaucca

SEQ ID NO: 372643 - RNA, 19 nt, Homo sapiens
  misc_RNA (1)...(19): siRNA sense strand
caucacaacagagcuauua

SEQ ID NO: 372644 - RNA, 19 nt, Homo sapiens
  misc_RNA (1)...(19): siRNA sense strand
caaggucaggaauaaauua

SEQ ID NO: 372645 - RNA, 19 nt, Homo sapiens
  misc_RNA (1)...(19): siRNA sense strand
gaaauugcagaacuaaaga

SEQ ID NO: 372646 - RNA, 19 nt, Homo sapiens
  misc_RNA (1)...(19): siRNA sense strand
gaagagaacaccaacacau

SEQ ID NO: 372647 - RNA, 19 nt, Homo sapiens
  misc_RNA (1)...(19): siRNA sense strand
cgaagaaaaugucaacuuu

SEQ ID NO: 372648 - RNA, 19 nt, Homo sapiens
  misc_RNA (1)...(19): siRNA sense strand
caagacagguguuuaagcu

SEQ ID NO: 372649 - RNA, 19 nt, Homo sapiens
  misc_RNA (1)...(19): siRNA sense strand
cagcagaaauccagguguu

SEQ ID NO: 372650 - RNA, 19 nt, Homo sapiens
  misc_RNA (1)...(19): siRNA sense strand
caccaccaauuuagucaua

SEQ ID NO: 372651 - RNA, 19 nt, Homo sapiens
  misc_RNA (1)...(19): siRNA sense strand
ggaaguagccuuggaagca

SEQ ID NO: 372652 - RNA, 19 nt, Homo sapiens
  misc_RNA (1)...(19): siRNA sense strand
ggucaggaauaaauuagau

SEQ ID NO: 372653 - RNA, 19 nt, Homo sapiens
  misc_RNA (1)...(19): siRNA sense strand
agagagcaaugugguguua

SEQ ID NO: 372654 - RNA, 19 nt, Homo sapiens
  misc_RNA (1)...(19): siRNA sense strand
gugaggauauuucucguau

SEQ ID NO: 372655 - RNA, 19 nt, Homo sapiens
  misc_RNA (1)...(19): siRNA sense strand
ccaauuuagucauaagaga

SEQ ID NO: 372656 - RNA, 19 nt, Homo sapiens
  misc_RNA (1)...(19): siRNA sense strand
gaagauaauagagcaagaa

SEQ ID NO: 372657 - RNA, 19 nt, Homo sapiens
  misc_RNA (1)...(19): siRNA sense strand
guucaagacagguguuuaa

SEQ ID NO: 372658 - RNA, 19 nt, Homo sapiens
  misc_RNA (1)...(19): siRNA sense strand
ugacgaaucugauguucca

SEQ ID NO: 372659 - RNA, 19 nt, Homo sapiens
  misc_RNA (1)...(19): siRNA sense strand
gaaguucuaacagguuuaa

SEQ ID NO: 372660 - RNA, 19 nt, Homo sapiens
  misc_RNA (1)...(19): siRNA sense strand
caacagaaacgggaagaga

SEQ ID NO: 372661 - RNA, 19 nt, Homo sapiens
  misc_RNA (1)...(19): siRNA sense strand
uggagaaucugacacugaa

SEQ ID NO: 372662 - RNA, 19 nt, Homo sapiens
  misc_RNA (1)...(19): siRNA sense strand
gaggagaguuucacaucca

SEQ ID NO: 372663 - RNA, 19 nt, Homo sapiens
  misc_RNA (1)...(19): siRNA sense strand
gaauaugacgaaucugaug

SEQ ID NO: 372664 - RNA, 19 nt, Homo sapiens
  misc_RNA (1)...(19): siRNA sense strand
gggcugcugucuucuuuca

SEQ ID NO: 372665 - RNA, 19 nt, Homo sapiens
  misc_RNA (1)...(19): siRNA sense strand
agagcaaugugguguuaaa

SEQ ID NO: 372666 - RNA, 19 nt, Homo sapiens
  misc_RNA (1)...(19): siRNA sense strand
aagagaacaccaacacaua

SEQ ID NO: 372667 - RNA, 19 nt, Homo sapiens
  misc_RNA (1)...(19): siRNA sense strand
gcucauccauuaucuuugc

SEQ ID NO: 372668 - RNA, 19 nt, Homo sapiens
  misc_RNA (1)...(19): siRNA sense strand
cagcucauccauuaucuuu

SEQ ID NO: 372669 - RNA, 19 nt, Homo sapiens
  misc_RNA (1)...(19): siRNA sense strand
aagcacaaacuucacguua

SEQ ID NO: 372670 - RNA, 19 nt, Homo sapiens
  misc_RNA (1)...(19): siRNA sense strand
ggugagggaugacggaaag

SEQ ID NO: 372671 - RNA, 19 nt, Homo sapiens
  misc_RNA (1)...(19): siRNA sense strand
gagaaucuggugaacuuga

SEQ ID NO: 372672 - RNA, 19 nt, Homo sapiens
  misc_RNA (1)...(19): siRNA sense strand
guauacaaggucaggaaua

SEQ ID NO: 372673 - RNA, 19 nt, Homo sapiens
  misc_RNA (1)...(19): siRNA sense strand
uuaaugaggucugcuaaag

SEQ ID NO: 372674 - RNA, 19 nt, Homo sapiens
  misc_RNA (1)...(19): siRNA sense strand
cauaagagaaucuggugaa

SEQ ID NO: 372675 - RNA, 19 nt, Homo sapiens
  misc_RNA (1)...(19): siRNA sense strand
acaaacuucacguuacuua

SEQ ID NO: 372676 - RNA, 19 nt, Homo sapiens
  misc_RNA (1)...(19): siRNA sense strand
cuacuuugccagacguuua

SEQ ID NO: 372677 - RNA, 19 nt, Homo sapiens
  misc_RNA (1)...(19): siRNA sense strand
agagagaguucgucaggau

SEQ ID NO: 372678 - RNA, 19 nt, Homo sapiens
  misc_RNA (1)...(19): siRNA sense strand
uaaaccuccuuucucaaga

SEQ ID NO: 372679 - RNA, 19 nt, Homo sapiens
  misc_RNA (1)...(19): siRNA sense strand
caacacauacguccagagu

SEQ ID NO: 372680 - RNA, 19 nt, Homo sapiens
  misc_RNA (1)...(19): siRNA sense strand
ugauuaagggugcaacuaa

SEQ ID NO: 372681 - RNA, 19 nt, Homo sapiens
  misc_RNA (1)...(19): siRNA sense strand
gauggucaguauuaugcaa

SEQ ID NO: 372682 - RNA, 19 nt, Homo sapiens
  misc_RNA (1)...(19): siRNA sense strand
acagagcuauuacucacuu

SEQ ID NO: 372683 - RNA, 19 nt, Homo sapiens
  misc_RNA (1)...(19): siRNA sense strand
agucagauauguacagcuu

SEQ ID NO: 372684 - RNA, 19 nt, Homo sapiens
  misc_RNA (1)...(19): siRNA sense strand
ggaagaggacagagagcaa

SEQ ID NO: 372685 - RNA, 19 nt, Homo sapiens
  misc_RNA (1)...(19): siRNA sense strand
gaggucugcuaaagagaga

SEQ ID NO: 372686 - RNA, 19 nt, Homo sapiens
  misc_RNA (1)...(19): siRNA sense strand
auacauaacaugggaauug

SEQ ID NO: 372687 - RNA, 19 nt, Homo sapiens
  misc_RNA (1)...(19): siRNA sense strand
ccaaaauucuggaaauguu

SEQ ID NO: 372688 - RNA, 19 nt, Homo sapiens
  misc_RNA (1)...(19): siRNA sense strand
ugacgaguuuagcucauug

SEQ ID NO: 372689 - RNA, 19 nt, Homo sapiens
  misc_RNA (1)...(19): siRNA sense strand
ugaguaugaugccaaguca

SEQ ID NO: 372690 - RNA, 19 nt, Homo sapiens
  misc_RNA (1)...(19): siRNA sense strand
gagucugccuguccuuaug

SEQ ID NO: 372691 - RNA, 19 nt, Homo sapiens
  misc_RNA (1)...(19): siRNA sense strand
caaacuucacguuacuuaa

SEQ ID NO: 372692 - RNA, 19 nt, Homo sapiens
  misc_RNA (1)...(19): siRNA sense strand
uaaagaagcagcuaaaccu

SEQ ID NO: 372693 - RNA, 19 nt, Homo sapiens
  misc_RNA (1)...(19): siRNA sense strand
uaaccucacccuacagaug

SEQ ID NO: 372694 - RNA, 19 nt, Homo sapiens
  misc_RNA (1)...(19): siRNA sense strand
acagacauccuacagaaga

SEQ ID NO: 372695 - RNA, 19 nt, Homo sapiens
  misc_RNA (1)...(19): siRNA sense strand
ccgaauaugacgaaucuga

SEQ ID NO: 372696 - RNA, 19 nt, Homo sapiens
  misc_RNA (1)...(19): siRNA sense strand
gaagaggacagagagcaau

SEQ ID NO: 372697 - RNA, 19 nt, Homo sapiens
  misc_RNA (1)...(19): siRNA sense strand
ucuaacagguuuaagaacu

SEQ ID NO: 372698 - RNA, 19 nt, Homo sapiens
  misc_RNA (1)...(19): siRNA sense strand
gugacgaguuuagcucauu

SEQ ID NO: 372699 - RNA, 19 nt, Homo sapiens
  misc_RNA (1)...(19): siRNA sense strand
ccuccuuucucaagacaaa

SEQ ID NO: 372700 - RNA, 19 nt, Homo sapiens
  misc_RNA (1)...(19): siRNA sense strand
uugcagaacuaaagaagca

SEQ ID NO: 372701 - RNA, 19 nt, Homo sapiens
  misc_RNA (1)...(19): siRNA sense strand
ugaagauaauagagcaaga

SEQ ID NO: 372702 - RNA, 19 nt, Homo sapiens
  misc_RNA (1)...(19): siRNA sense strand
cuacagaugaagauaauag

SEQ ID NO: 372703 - RNA, 19 nt, Homo sapiens
  misc_RNA (1)...(19): siRNA sense strand
gaagguguguuuuacauac

SEQ ID NO: 372704 - RNA, 19 nt, Homo sapiens
  misc_RNA (1)...(19): siRNA sense strand
cagaaauccagguguuaaa

SEQ ID NO: 372705 - RNA, 19 nt, Homo sapiens
  misc_RNA (1)...(19): siRNA sense strand
gaguauacaaggucaggaa

SEQ ID NO: 372706 - RNA, 19 nt, Homo sapiens
  misc_RNA (1)...(19): siRNA sense strand
aaugaggucugcuaaagag

SEQ ID NO: 372707 - RNA, 19 nt, Homo sapiens
  misc_RNA (1)...(19): siRNA sense strand
ccauugaguugccaucucu

SEQ ID NO: 372708 - RNA, 19 nt, Homo sapiens
  misc_RNA (1)...(19): siRNA sense strand
agaaauugcagaacuaaag

SEQ ID NO: 372709 - RNA, 19 nt, Homo sapiens
  misc_RNA (1)...(19): siRNA sense strand
ccacgugcaugaaccaaac

SEQ ID NO: 372710 - RNA, 19 nt, Homo sapiens
  misc_RNA (1)...(19): siRNA sense strand
gcccugaucagcaaguaaa

SEQ ID NO: 372711 - RNA, 19 nt, Homo sapiens
  misc_RNA (1)...(19): siRNA sense strand
aaacccacuucguucaaga

SEQ ID NO: 372712 - RNA, 19 nt, Homo sapiens
  misc_RNA (1)...(19): siRNA sense strand
uggcuuggcugguuugucu

SEQ ID NO: 372713 - RNA, 19 nt, Homo sapiens
  misc_RNA (1)...(19): siRNA sense strand
guacaccaccaauuuaguc

SEQ ID NO: 372714 - RNA, 19 nt, Homo sapiens
  misc_RNA (1)...(19): siRNA sense strand
auaacaagucggugaagua

SEQ ID NO: 372715 - RNA, 19 nt, Homo sapiens
  misc_RNA (1)...(19): siRNA sense strand
cagagcuauuacucacuua

SEQ ID NO: 372716 - RNA, 19 nt, Homo sapiens
  misc_RNA (1)...(19): siRNA sense strand
uaaaagaaccccuacaaca

SEQ ID NO: 372717 - RNA, 19 nt, Homo sapiens
  misc_RNA (1)...(19): siRNA sense strand
gagaccaucugccauucag

SEQ ID NO: 372718 - RNA, 19 nt, Homo sapiens
  misc_RNA (1)...(19): siRNA sense strand
gaugccaagucagauaugu

SEQ ID NO: 372719 - RNA, 19 nt, Homo sapiens
  misc_RNA (1)...(19): siRNA sense strand
uaugaugccaagucagaua

SEQ ID NO: 372720 - RNA, 19 nt, Homo sapiens
  misc_RNA (1)...(19): siRNA sense strand
cagacauccuacagaagaa

SEQ ID NO: 372721 - RNA, 19 nt, Homo sapiens
  misc_RNA (1)...(19): siRNA sense strand
cugaagccaagaaauauuu

SEQ ID NO: 372722 - RNA, 19 nt, Homo sapiens
  misc_RNA (1)...(19): siRNA sense strand
ggaagagaacaccaacaca

SEQ ID NO: 372723 - RNA, 19 nt, Homo sapiens
  misc_RNA (1)...(19): siRNA sense strand
cuaacagguuuaagaacug

SEQ ID NO: 372724 - RNA, 19 nt, Homo sapiens
  misc_RNA (1)...(19): siRNA sense strand
agaaauggagcgagcagaa

SEQ ID NO: 372725 - RNA, 19 nt, Homo sapiens
  misc_RNA (1)...(19): siRNA sense strand
gcacgugccugucucauuc

SEQ ID NO: 372726 - RNA, 19 nt, Homo sapiens
  misc_RNA (1)...(19): siRNA sense strand
caaagugggagcccgauaa

SEQ ID NO: 372727 - RNA, 19 nt, Homo sapiens
  misc_RNA (1)...(19): siRNA sense strand
gcacaagucauaccuacau

SEQ ID NO: 372728 - RNA, 19 nt, Homo sapiens
  misc_RNA (1)...(19): siRNA sense strand
aagcaaggcacaagucaua

SEQ ID NO: 372729 - RNA, 19 nt, Homo sapiens
  misc_RNA (1)...(19): siRNA sense strand
caagucauaccuacauuca

SEQ ID NO: 372730 - RNA, 19 nt, Homo sapiens
  misc_RNA (1)...(19): siRNA sense strand
agucauaccuacauucaag

SEQ ID NO: 372731 - RNA, 19 nt, Homo sapiens
  misc_RNA (1)...(19): siRNA sense strand
cacaagucauaccuacauu

SEQ ID NO: 372732 - RNA, 19 nt, Homo sapiens
  misc_RNA (1)...(19): siRNA sense strand
gggaccaugcaaaggauaa

SEQ ID NO: 372733 - RNA, 19 nt, Homo sapiens
  misc_RNA (1)...(19): siRNA sense strand
gaagcaaggcacaagucau

SEQ ID NO: 372734 - RNA, 19 nt, Homo sapiens
  misc_RNA (1)...(19): siRNA sense strand
ggaccaugcaaaggauaaa

SEQ ID NO: 372735 - RNA, 19 nt, Homo sapiens
  misc_RNA (1)...(19): siRNA sense strand
gcacgugccugucucauuc

SEQ ID NO: 372736 - RNA, 19 nt, Homo sapiens
  misc_RNA (1)...(19): siRNA sense strand
caaagugggagcccgauaa

SEQ ID NO: 372737 - RNA, 19 nt, Homo sapiens
  misc_RNA (1)...(19): siRNA sense strand
gcacaagucauaccuacau

SEQ ID NO: 372738 - RNA, 19 nt, Homo sapiens
  misc_RNA (1)...(19): siRNA sense strand
aagcaaggcacaagucaua

SEQ ID NO: 372739 - RNA, 19 nt, Homo sapiens
  misc_RNA (1)...(19): siRNA sense strand
caagucauaccuacauuca

SEQ ID NO: 372740 - RNA, 19 nt, Homo sapiens
  misc_RNA (1)...(19): siRNA sense strand
agucauaccuacauucaag

SEQ ID NO: 372741 - RNA, 19 nt, Homo sapiens
  misc_RNA (1)...(19): siRNA sense strand
cacaagucauaccuacauu

SEQ ID NO: 372742 - RNA, 19 nt, Homo sapiens
  misc_RNA (1)...(19): siRNA sense strand
gggaccaugcaaaggauaa

SEQ ID NO: 372743 - RNA, 19 nt, Homo sapiens
  misc_RNA (1)...(19): siRNA sense strand
gaagcaaggcacaagucau

SEQ ID NO: 372744 - RNA, 19 nt, Homo sapiens
  misc_RNA (1)...(19): siRNA sense strand
ggaccaugcaaaggauaaa

SEQ ID NO: 372745 - RNA, 19 nt, Homo sapiens
  misc_RNA (1)...(19): siRNA sense strand
gcacgugccugucucauuc

SEQ ID NO: 372746 - RNA, 19 nt, Homo sapiens
  misc_RNA (1)...(19): siRNA sense strand
caaagugggagcccgauaa

SEQ ID NO: 372747 - RNA, 19 nt, Homo sapiens
  misc_RNA (1)...(19): siRNA sense strand
gcacaagucauaccuacau

SEQ ID NO: 372748 - RNA, 19 nt, Homo sapiens
  misc_RNA (1)...(19): siRNA sense strand
aagcaaggcacaagucaua

SEQ ID NO: 372749 - RNA, 19 nt, Homo sapiens
  misc_RNA (1)...(19): siRNA sense strand
caagucauaccuacauuca

SEQ ID NO: 372750 - RNA, 19 nt, Homo sapiens
  misc_RNA (1)...(19): siRNA sense strand
agucauaccuacauucaag

SEQ ID NO: 372751 - RNA, 19 nt, Homo sapiens
  misc_RNA (1)...(19): siRNA sense strand
cacaagucauaccuacauu

SEQ ID NO: 372752 - RNA, 19 nt, Homo sapiens
  misc_RNA (1)...(19): siRNA sense strand
gggaccaugcaaaggauaa

SEQ ID NO: 372753 - RNA, 19 nt, Homo sapiens
  misc_RNA (1)...(19): siRNA sense strand
gaagcaaggcacaagucau

SEQ ID NO: 372754 - RNA, 19 nt, Homo sapiens
  misc_RNA (1)...(19): siRNA sense strand
ggaccaugcaaaggauaaa

SEQ ID NO: 372755 - RNA, 19 nt, Homo sapiens
  misc_RNA (1)...(19): siRNA sense strand
gaacaccacuuauguauug

SEQ ID NO: 372756 - RNA, 19 nt, Homo sapiens
  misc_RNA (1)...(19): siRNA sense strand
uaacauggcugacaaauau

SEQ ID NO: 372757 - RNA, 19 nt, Homo sapiens
  misc_RNA (1)...(19): siRNA sense strand
ggacauagauauuaacaug

SEQ ID NO: 372758 - RNA, 19 nt, Homo sapiens
  misc_RNA (1)...(19): siRNA sense strand
ggaaggaacuggaacuaaa

SEQ ID NO: 372759 - RNA, 19 nt, Homo sapiens
  misc_RNA (1)...(19): siRNA sense strand
gcacugggcagcuuuauua

SEQ ID NO: 372760 - RNA, 19 nt, Homo sapiens
  misc_RNA (1)...(19): siRNA sense strand
guaggaaacucugcucuua

SEQ ID NO: 372761 - RNA, 19 nt, Homo sapiens
  misc_RNA (1)...(19): siRNA sense strand
gaacuaugcugagcuuaaa

SEQ ID NO: 372762 - RNA, 19 nt, Homo sapiens
  misc_RNA (1)...(19): siRNA sense strand
gcaagagucuacagcauug

SEQ ID NO: 372763 - RNA, 19 nt, Homo sapiens
  misc_RNA (1)...(19): siRNA sense strand
gacauucucuucuacauug

SEQ ID NO: 372764 - RNA, 19 nt, Homo sapiens
  misc_RNA (1)...(19): siRNA sense strand
gcaaacagcucugcauugg

SEQ ID NO: 372765 - RNA, 19 nt, Homo sapiens
  misc_RNA (1)...(19): siRNA sense strand
gaagaacagcuuugcauug

SEQ ID NO: 372766 - RNA, 19 nt, Homo sapiens
  misc_RNA (1)...(19): siRNA sense strand
gaagaucaguuugggagaa

SEQ ID NO: 372767 - RNA, 19 nt, Homo sapiens
  misc_RNA (1)...(19): siRNA sense strand
gaugauguccuuagaacua

SEQ ID NO: 372768 - RNA, 19 nt, Homo sapiens
  misc_RNA (1)...(19): siRNA sense strand
uggaagagaugacuccuuu

SEQ ID NO: 372769 - RNA, 19 nt, Homo sapiens
  misc_RNA (1)...(19): siRNA sense strand
gaaauaagucuggaacuau

SEQ ID NO: 372770 - RNA, 19 nt, Homo sapiens
  misc_RNA (1)...(19): siRNA sense strand
ggagaacaccacuuaugua

SEQ ID NO: 372771 - RNA, 19 nt, Homo sapiens
  misc_RNA (1)...(19): siRNA sense strand
gcaaaucuaugguuguucu

SEQ ID NO: 372772 - RNA, 19 nt, Homo sapiens
  misc_RNA (1)...(19): siRNA sense strand
aauccaagcugucuacaaa

SEQ ID NO: 372773 - RNA, 19 nt, Homo sapiens
  misc_RNA (1)...(19): siRNA sense strand
cagaguaacuuugcugaaa

SEQ ID NO: 372774 - RNA, 19 nt, Homo sapiens
  misc_RNA (1)...(19): siRNA sense strand
gcacuaugcugcucagagu

SEQ ID NO: 372775 - RNA, 19 nt, Homo sapiens
  misc_RNA (1)...(19): siRNA sense strand
agaaauaagucuggaacua

SEQ ID NO: 372776 - RNA, 19 nt, Homo sapiens
  misc_RNA (1)...(19): siRNA sense strand
gcugcaauauaacgucuua

SEQ ID NO: 372777 - RNA, 19 nt, Homo sapiens
  misc_RNA (1)...(19): siRNA sense strand
gcagauaauucagagagaa

SEQ ID NO: 372778 - RNA, 19 nt, Homo sapiens
  misc_RNA (1)...(19): siRNA sense strand
agacaaagaagaucaguuu

SEQ ID NO: 372779 - RNA, 19 nt, Homo sapiens
  misc_RNA (1)...(19): siRNA sense strand
caacagagucuuuacugaa

SEQ ID NO: 372780 - RNA, 19 nt, Homo sapiens
  misc_RNA (1)...(19): siRNA sense strand
gaagugauccaguucaugu

SEQ ID NO: 372781 - RNA, 19 nt, Homo sapiens
  misc_RNA (1)...(19): siRNA sense strand
ggaaaauaaugcucaagua

SEQ ID NO: 372782 - RNA, 19 nt, Homo sapiens
  misc_RNA (1)...(19): siRNA sense strand
gaacuccucuucacuuugc

SEQ ID NO: 372783 - RNA, 19 nt, Homo sapiens
  misc_RNA (1)...(19): siRNA sense strand
gggaggaaaugcugauguu

SEQ ID NO: 372784 - RNA, 19 nt, Homo sapiens
  misc_RNA (1)...(19): siRNA sense strand
gagaacaccacuuauguau

SEQ ID NO: 372785 - RNA, 19 nt, Homo sapiens
  misc_RNA (1)...(19): siRNA sense strand
gaaaauacaucauccuaca

SEQ ID NO: 372786 - RNA, 19 nt, Homo sapiens
  misc_RNA (1)...(19): siRNA sense strand
gagaacagcccuccaucuu

SEQ ID NO: 372787 - RNA, 19 nt, Homo sapiens
  misc_RNA (1)...(19): siRNA sense strand
gcacaaaguccaccaagca

SEQ ID NO: 372788 - RNA, 19 nt, Homo sapiens
  misc_RNA (1)...(19): siRNA sense strand
caagcaugauucuaacauu

SEQ ID NO: 372789 - RNA, 19 nt, Homo sapiens
  misc_RNA (1)...(19): siRNA sense strand
ggaguucccucuguugaga

SEQ ID NO: 372790 - RNA, 19 nt, Homo sapiens
  misc_RNA (1)...(19): siRNA sense strand
ugacaaauauggagguaca

SEQ ID NO: 372791 - RNA, 19 nt, Homo sapiens
  misc_RNA (1)...(19): siRNA sense strand
ccaacagagucuuuacuga

SEQ ID NO: 372792 - RNA, 19 nt, Homo sapiens
  misc_RNA (1)...(19): siRNA sense strand
ggaagaacagcuuugcauu

SEQ ID NO: 372793 - RNA, 19 nt, Homo sapiens
  misc_RNA (1)...(19): siRNA sense strand
aggaaacucugcucuuaaa

SEQ ID NO: 372794 - RNA, 19 nt, Homo sapiens
  misc_RNA (1)...(19): siRNA sense strand
ggaaaacaaugaagagaga

SEQ ID NO: 372795 - RNA, 19 nt, Homo sapiens
  misc_RNA (1)...(19): siRNA sense strand
gaccgugguugaugucuug

SEQ ID NO: 372796 - RNA, 19 nt, Homo sapiens
  misc_RNA (1)...(19): siRNA sense strand
gaggaaaugcugauguuug

SEQ ID NO: 372797 - RNA, 19 nt, Homo sapiens
  misc_RNA (1)...(19): siRNA sense strand
ggaacuaucccaucugaca

SEQ ID NO: 372798 - RNA, 19 nt, Homo sapiens
  misc_RNA (1)...(19): siRNA sense strand
cguguuggcugacagauug

SEQ ID NO: 372799 - RNA, 19 nt, Homo sapiens
  misc_RNA (1)...(19): siRNA sense strand
cagcauguuuccucagauu

SEQ ID NO: 372800 - RNA, 19 nt, Homo sapiens
  misc_RNA (1)...(19): siRNA sense strand
gauguuugccagauauuaa

SEQ ID NO: 372801 - RNA, 19 nt, Homo sapiens
  misc_RNA (1)...(19): siRNA sense strand
gccaugaagugauccaguu

SEQ ID NO: 372802 - RNA, 19 nt, Homo sapiens
  misc_RNA (1)...(19): siRNA sense strand
uggagugccuacuacaaua

SEQ ID NO: 372803 - RNA, 19 nt, Homo sapiens
  misc_RNA (1)...(19): siRNA sense strand
gcuuggagcuggagaugug

SEQ ID NO: 372804 - RNA, 19 nt, Homo sapiens
  misc_RNA (1)...(19): siRNA sense strand
gagcuccgacugcagauaa

SEQ ID NO: 372805 - RNA, 19 nt, Homo sapiens
  misc_RNA (1)...(19): siRNA sense strand
uaagaucaauccaaauguc

SEQ ID NO: 372806 - RNA, 19 nt, Homo sapiens
  misc_RNA (1)...(19): siRNA sense strand
gcuguuugcugguucauca

SEQ ID NO: 372807 - RNA, 19 nt, Homo sapiens
  misc_RNA (1)...(19): siRNA sense strand
gaaagaaauaagucuggaa

SEQ ID NO: 372808 - RNA, 19 nt, Homo sapiens
  misc_RNA (1)...(19): siRNA sense strand
gcacaggagcccuaagugu

SEQ ID NO: 372809 - RNA, 19 nt, Homo sapiens
  misc_RNA (1)...(19): siRNA sense strand
ugagaacaguggaagauca

SEQ ID NO: 372810 - RNA, 19 nt, Homo sapiens
  misc_RNA (1)...(19): siRNA sense strand
ggacauucucuucuacauu

SEQ ID NO: 372811 - RNA, 19 nt, Homo sapiens
  misc_RNA (1)...(19): siRNA sense strand
gagcaaggguagaucuagu

SEQ ID NO: 372812 - RNA, 19 nt, Homo sapiens
  misc_RNA (1)...(19): siRNA sense strand
ucagagaaccugcuguuug

SEQ ID NO: 372813 - RNA, 19 nt, Homo sapiens
  misc_RNA (1)...(19): siRNA sense strand
agagcaaacuggaugcaaa

SEQ ID NO: 372814 - RNA, 19 nt, Homo sapiens
  misc_RNA (1)...(19): siRNA sense strand
gcugauguuugccagauau

SEQ ID NO: 372815 - RNA, 19 nt, Homo sapiens
  misc_RNA (1)...(19): siRNA sense strand
gggcagcacugggaggaaa

SEQ ID NO: 372816 - RNA, 19 nt, Homo sapiens
  misc_RNA (1)...(19): siRNA sense strand
caaaggcagugaugauguc

SEQ ID NO: 372817 - RNA, 19 nt, Homo sapiens
  misc_RNA (1)...(19): siRNA sense strand
ggagugccuacuacaauaa

SEQ ID NO: 372818 - RNA, 19 nt, Homo sapiens
  misc_RNA (1)...(19): siRNA sense strand
gcauugcuccuccagguuu

SEQ ID NO: 372819 - RNA, 19 nt, Homo sapiens
  misc_RNA (1)...(19): siRNA sense strand
caaaugaaacagccagaga

SEQ ID NO: 372820 - RNA, 19 nt, Homo sapiens
  misc_RNA (1)...(19): siRNA sense strand
ggaaggcggagcccagauu

SEQ ID NO: 372821 - RNA, 19 nt, Homo sapiens
  misc_RNA (1)...(19): siRNA sense strand
gcaaaggcagugaugaugu

SEQ ID NO: 372822 - RNA, 19 nt, Homo sapiens
  misc_RNA (1)...(19): siRNA sense strand
cagauuggauugugcagau

SEQ ID NO: 372823 - RNA, 19 nt, Homo sapiens
  misc_RNA (1)...(19): siRNA sense strand
ugaccaagauggacauucu

SEQ ID NO: 372824 - RNA, 19 nt, Homo sapiens
  misc_RNA (1)...(19): siRNA sense strand
gugaaguuauuacuggaaa

SEQ ID NO: 372825 - RNA, 19 nt, Homo sapiens
  misc_RNA (1)...(19): siRNA sense strand
gucuugaccucauaugaaa

SEQ ID NO: 372826 - RNA, 19 nt, Homo sapiens
  misc_RNA (1)...(19): siRNA sense strand
aagcaugauucuaacauug

SEQ ID NO: 372827 - RNA, 19 nt, Homo sapiens
  misc_RNA (1)...(19): siRNA sense strand
gaaguggauacacaggaua

SEQ ID NO: 372828 - RNA, 19 nt, Homo sapiens
  misc_RNA (1)...(19): siRNA sense strand
caggagaaguggauacaca

SEQ ID NO: 372829 - RNA, 19 nt, Homo sapiens
  misc_RNA (1)...(19): siRNA sense strand
ggaaugugaccgugguuga

SEQ ID NO: 372830 - RNA, 19 nt, Homo sapiens
  misc_RNA (1)...(19): siRNA sense strand
cagagaaccugcuguuugc

SEQ ID NO: 372831 - RNA, 19 nt, Homo sapiens
  misc_RNA (1)...(19): siRNA sense strand
gaaacagccagagaacauu

SEQ ID NO: 372832 - RNA, 19 nt, Homo sapiens
  misc_RNA (1)...(19): siRNA sense strand
gggagaacaccacuuaugu

SEQ ID NO: 372833 - RNA, 19 nt, Homo sapiens
  misc_RNA (1)...(19): siRNA sense strand
aaauaagucuggaacuauc

SEQ ID NO: 372834 - RNA, 19 nt, Homo sapiens
  misc_RNA (1)...(19): siRNA sense strand
aagcaaaucuaugguuguu

SEQ ID NO: 372835 - RNA, 19 nt, Homo sapiens
  misc_RNA (1)...(19): siRNA sense strand
acaauaacccugagcaugu

SEQ ID NO: 372836 - RNA, 19 nt, Homo sapiens
  misc_RNA (1)...(19): siRNA sense strand
ccaaaccacugcaguaagc

SEQ ID NO: 372837 - RNA, 19 nt, Homo sapiens
  misc_RNA (1)...(19): siRNA sense strand
ccaaggcccugagccaaga

SEQ ID NO: 372838 - RNA, 19 nt, Homo sapiens
  misc_RNA (1)...(19): siRNA sense strand
gagcagaugugaauaaaac

SEQ ID NO: 372839 - RNA, 19 nt, Homo sapiens
  misc_RNA (1)...(19): siRNA sense strand
agauggacauucucuucua

SEQ ID NO: 372840 - RNA, 19 nt, Homo sapiens
  misc_RNA (1)...(19): siRNA sense strand
gugauucagacacucauua

SEQ ID NO: 372841 - RNA, 19 nt, Homo sapiens
  misc_RNA (1)...(19): siRNA sense strand
gagccacaccuuugcacua

SEQ ID NO: 372842 - RNA, 19 nt, Homo sapiens
  misc_RNA (1)...(19): siRNA sense strand
ucgaacuccucuucacuuu

SEQ ID NO: 372843 - RNA, 19 nt, Homo sapiens
  misc_RNA (1)...(19): siRNA sense strand
caauaacccugagcaugug

SEQ ID NO: 372844 - RNA, 19 nt, Homo sapiens
  misc_RNA (1)...(19): siRNA sense strand
gaagagaugacuccuuugc

SEQ ID NO: 372845 - RNA, 19 nt, Homo sapiens
  misc_RNA (1)...(19): siRNA sense strand
ucaugaaacucuuacuuac

SEQ ID NO: 372846 - RNA, 19 nt, Homo sapiens
  misc_RNA (1)...(19): siRNA sense strand
gaugacuccuuugcacuug

SEQ ID NO: 372847 - RNA, 19 nt, Homo sapiens
  misc_RNA (1)...(19): siRNA sense strand
gauaagggugcucuacaga

SEQ ID NO: 372848 - RNA, 19 nt, Homo sapiens
  misc_RNA (1)...(19): siRNA sense strand
gcugacaaauauggaggua

SEQ ID NO: 372849 - RNA, 19 nt, Homo sapiens
  misc_RNA (1)...(19): siRNA sense strand
cugaaacgguuaaaguguu

SEQ ID NO: 372850 - RNA, 19 nt, Homo sapiens
  misc_RNA (1)...(19): siRNA sense strand
uuacugaacuggcaagacu

SEQ ID NO: 372851 - RNA, 19 nt, Homo sapiens
  misc_RNA (1)...(19): siRNA sense strand
gauuguccaucuccuuuua

SEQ ID NO: 372852 - RNA, 19 nt, Homo sapiens
  misc_RNA (1)...(19): siRNA sense strand
ggcaagagucuacagcauu

SEQ ID NO: 372853 - RNA, 19 nt, Homo sapiens
  misc_RNA (1)...(19): siRNA sense strand
gaaggaggaaggagcuguu

SEQ ID NO: 372854 - RNA, 19 nt, Homo sapiens
  misc_RNA (1)...(19): siRNA sense strand
gcauguuuccucagauuug

SEQ ID NO: 372855 - RNA, 19 nt, Homo sapiens
  misc_RNA (1)...(19): siRNA sense strand
gaacaccacuuauguauug

SEQ ID NO: 372856 - RNA, 19 nt, Homo sapiens
  misc_RNA (1)...(19): siRNA sense strand
uaacauggcugacaaauau

SEQ ID NO: 372857 - RNA, 19 nt, Homo sapiens
  misc_RNA (1)...(19): siRNA sense strand
ggacauagauauuaacaug

SEQ ID NO: 372858 - RNA, 19 nt, Homo sapiens
  misc_RNA (1)...(19): siRNA sense strand
ggaaggaacuggaacuaaa

SEQ ID NO: 372859 - RNA, 19 nt, Homo sapiens
  misc_RNA (1)...(19): siRNA sense strand
gcacugggcagcuuuauua

SEQ ID NO: 372860 - RNA, 19 nt, Homo sapiens
  misc_RNA (1)...(19): siRNA sense strand
guaggaaacucugcucuua

SEQ ID NO: 372861 - RNA, 19 nt, Homo sapiens
  misc_RNA (1)...(19): siRNA sense strand
gaacuaugcugagcuuaaa

SEQ ID NO: 372862 - RNA, 19 nt, Homo sapiens
  misc_RNA (1)...(19): siRNA sense strand
gcaagagucuacagcauug

SEQ ID NO: 372863 - RNA, 19 nt, Homo sapiens
  misc_RNA (1)...(19): siRNA sense strand
gacauucucuucuacauug

SEQ ID NO: 372864 - RNA, 19 nt, Homo sapiens
  misc_RNA (1)...(19): siRNA sense strand
gcaaacagcucugcauugg

SEQ ID NO: 372865 - RNA, 19 nt, Homo sapiens
  misc_RNA (1)...(19): siRNA sense strand
gaagaacagcuuugcauug

SEQ ID NO: 372866 - RNA, 19 nt, Homo sapiens
  misc_RNA (1)...(19): siRNA sense strand
gaagaucaguuugggagaa

SEQ ID NO: 372867 - RNA, 19 nt, Homo sapiens
  misc_RNA (1)...(19): siRNA sense strand
gaugauguccuuagaacua

SEQ ID NO: 372868 - RNA, 19 nt, Homo sapiens
  misc_RNA (1)...(19): siRNA sense strand
uggaagagaugacuccuuu

SEQ ID NO: 372869 - RNA, 19 nt, Homo sapiens
  misc_RNA (1)...(19): siRNA sense strand
gaaauaagucuggaacuau

SEQ ID NO: 372870 - RNA, 19 nt, Homo sapiens
  misc_RNA (1)...(19): siRNA sense strand
ggagaacaccacuuaugua

SEQ ID NO: 372871 - RNA, 19 nt, Homo sapiens
  misc_RNA (1)...(19): siRNA sense strand
gcaaaucuaugguuguucu

SEQ ID NO: 372872 - RNA, 19 nt, Homo sapiens
  misc_RNA (1)...(19): siRNA sense strand
aauccaagcugucuacaaa

SEQ ID NO: 372873 - RNA, 19 nt, Homo sapiens
  misc_RNA (1)...(19): siRNA sense strand
cagaguaacuuugcugaaa

SEQ ID NO: 372874 - RNA, 19 nt, Homo sapiens
  misc_RNA (1)...(19): siRNA sense strand
gcacuaugcugcucagagu

SEQ ID NO: 372875 - RNA, 19 nt, Homo sapiens
  misc_RNA (1)...(19): siRNA sense strand
agaaauaagucuggaacua

SEQ ID NO: 372876 - RNA, 19 nt, Homo sapiens
  misc_RNA (1)...(19): siRNA sense strand
gcugcaauauaacgucuua

SEQ ID NO: 372877 - RNA, 19 nt, Homo sapiens
  misc_RNA (1)...(19): siRNA sense strand
gcagauaauucagagagaa

SEQ ID NO: 372878 - RNA, 19 nt, Homo sapiens
  misc_RNA (1)...(19): siRNA sense strand
agacaaagaagaucaguuu

SEQ ID NO: 372879 - RNA, 19 nt, Homo sapiens
  misc_RNA (1)...(19): siRNA sense strand
caacagagucuuuacugaa

SEQ ID NO: 372880 - RNA, 19 nt, Homo sapiens
  misc_RNA (1)...(19): siRNA sense strand
gaagugauccaguucaugu

SEQ ID NO: 372881 - RNA, 19 nt, Homo sapiens
  misc_RNA (1)...(19): siRNA sense strand
ggaaaauaaugcucaagua

SEQ ID NO: 372882 - RNA, 19 nt, Homo sapiens
  misc_RNA (1)...(19): siRNA sense strand
gaacuccucuucacuuugc

SEQ ID NO: 372883 - RNA, 19 nt, Homo sapiens
  misc_RNA (1)...(19): siRNA sense strand
gggaggaaaugcugauguu

SEQ ID NO: 372884 - RNA, 19 nt, Homo sapiens
  misc_RNA (1)...(19): siRNA sense strand
gagaacaccacuuauguau

SEQ ID NO: 372885 - RNA, 19 nt, Homo sapiens
  misc_RNA (1)...(19): siRNA sense strand
gaaaauacaucauccuaca

SEQ ID NO: 372886 - RNA, 19 nt, Homo sapiens
  misc_RNA (1)...(19): siRNA sense strand
gagaacagcccuccaucuu

SEQ ID NO: 372887 - RNA, 19 nt, Homo sapiens
  misc_RNA (1)...(19): siRNA sense strand
gcacaaaguccaccaagca

SEQ ID NO: 372888 - RNA, 19 nt, Homo sapiens
  misc_RNA (1)...(19): siRNA sense strand
caagcaugauucuaacauu

SEQ ID NO: 372889 - RNA, 19 nt, Homo sapiens
  misc_RNA (1)...(19): siRNA sense strand
ggaguucccucuguugaga

SEQ ID NO: 372890 - RNA, 19 nt, Homo sapiens
  misc_RNA (1)...(19): siRNA sense strand
ugacaaauauggagguaca

SEQ ID NO: 372891 - RNA, 19 nt, Homo sapiens
  misc_RNA (1)...(19): siRNA sense strand
ccaacagagucuuuacuga

SEQ ID NO: 372892 - RNA, 19 nt, Homo sapiens
  misc_RNA (1)...(19): siRNA sense strand
ggaagaacagcuuugcauu

SEQ ID NO: 372893 - RNA, 19 nt, Homo sapiens
  misc_RNA (1)...(19): siRNA sense strand
aggaaacucugcucuuaaa

SEQ ID NO: 372894 - RNA, 19 nt, Homo sapiens
  misc_RNA (1)...(19): siRNA sense strand
ggaaaacaaugaagagaga

SEQ ID NO: 372895 - RNA, 19 nt, Homo sapiens
  misc_RNA (1)...(19): siRNA sense strand
gaccgugguugaugucuug

SEQ ID NO: 372896 - RNA, 19 nt, Homo sapiens
  misc_RNA (1)...(19): siRNA sense strand
gaggaaaugcugauguuug

SEQ ID NO: 372897 - RNA, 19 nt, Homo sapiens
  misc_RNA (1)...(19): siRNA sense strand
ggaacuaucccaucugaca

SEQ ID NO: 372898 - RNA, 19 nt, Homo sapiens
  misc_RNA (1)...(19): siRNA sense strand
cguguuggcugacagauug

SEQ ID NO: 372899 - RNA, 19 nt, Homo sapiens
  misc_RNA (1)...(19): siRNA sense strand
cagcauguuuccucagauu

SEQ ID NO: 372900 - RNA, 19 nt, Homo sapiens
  misc_RNA (1)...(19): siRNA sense strand
gauguuugccagauauuaa

SEQ ID NO: 372901 - RNA, 19 nt, Homo sapiens
  misc_RNA (1)...(19): siRNA sense strand
gccaugaagugauccaguu

SEQ ID NO: 372902 - RNA, 19 nt, Homo sapiens
  misc_RNA (1)...(19): siRNA sense strand
uggagugccuacuacaaua

SEQ ID NO: 372903 - RNA, 19 nt, Homo sapiens
  misc_RNA (1)...(19): siRNA sense strand
gcuuggagcuggagaugug

SEQ ID NO: 372904 - RNA, 19 nt, Homo sapiens
  misc_RNA (1)...(19): siRNA sense strand
gagcuccgacugcagauaa

SEQ ID NO: 372905 - RNA, 19 nt, Homo sapiens
  misc_RNA (1)...(19): siRNA sense strand
uaagaucaauccaaauguc

SEQ ID NO: 372906 - RNA, 19 nt, Homo sapiens
  misc_RNA (1)...(19): siRNA sense strand
gcuguuugcugguucauca

SEQ ID NO: 372907 - RNA, 19 nt, Homo sapiens
  misc_RNA (1)...(19): siRNA sense strand
gaaagaaauaagucuggaa

SEQ ID NO: 372908 - RNA, 19 nt, Homo sapiens
  misc_RNA (1)...(19): siRNA sense strand
gcacaggagcccuaagugu

SEQ ID NO: 372909 - RNA, 19 nt, Homo sapiens
  misc_RNA (1)...(19): siRNA sense strand
ugagaacaguggaagauca

SEQ ID NO: 372910 - RNA, 19 nt, Homo sapiens
  misc_RNA (1)...(19): siRNA sense strand
ggacauucucuucuacauu

SEQ ID NO: 372911 - RNA, 19 nt, Homo sapiens
  misc_RNA (1)...(19): siRNA sense strand
gagcaaggguagaucuagu

SEQ ID NO: 372912 - RNA, 19 nt, Homo sapiens
  misc_RNA (1)...(19): siRNA sense strand
ucagagaaccugcuguuug

SEQ ID NO: 372913 - RNA, 19 nt, Homo sapiens
  misc_RNA (1)...(19): siRNA sense strand
agagcaaacuggaugcaaa

SEQ ID NO: 372914 - RNA, 19 nt, Homo sapiens
  misc_RNA (1)...(19): siRNA sense strand
gcugauguuugccagauau

SEQ ID NO: 372915 - RNA, 19 nt, Homo sapiens
  misc_RNA (1)...(19): siRNA sense strand
gggcagcacugggaggaaa

SEQ ID NO: 372916 - RNA, 19 nt, Homo sapiens
  misc_RNA (1)...(19): siRNA sense strand
caaaggcagugaugauguc

SEQ ID NO: 372917 - RNA, 19 nt, Homo sapiens
  misc_RNA (1)...(19): siRNA sense strand
ggagugccuacuacaauaa

SEQ ID NO: 372918 - RNA, 19 nt, Homo sapiens
  misc_RNA (1)...(19): siRNA sense strand
gcauugcuccuccagguuu

SEQ ID NO: 372919 - RNA, 19 nt, Homo sapiens
  misc_RNA (1)...(19): siRNA sense strand
caaaugaaacagccagaga

SEQ ID NO: 372920 - RNA, 19 nt, Homo sapiens
  misc_RNA (1)...(19): siRNA sense strand
ggaaggcggagcccagauu

SEQ ID NO: 372921 - RNA, 19 nt, Homo sapiens
  misc_RNA (1)...(19): siRNA sense strand
gcaaaggcagugaugaugu

SEQ ID NO: 372922 - RNA, 19 nt, Homo sapiens
  misc_RNA (1)...(19): siRNA sense strand
cagauuggauugugcagau

SEQ ID NO: 372923 - RNA, 19 nt, Homo sapiens
  misc_RNA (1)...(19): siRNA sense strand
ugaccaagauggacauucu

SEQ ID NO: 372924 - RNA, 19 nt, Homo sapiens
  misc_RNA (1)...(19): siRNA sense strand
gugaaguuauuacuggaaa

SEQ ID NO: 372925 - RNA, 19 nt, Homo sapiens
  misc_RNA (1)...(19): siRNA sense strand
gucuugaccucauaugaaa

SEQ ID NO: 372926 - RNA, 19 nt, Homo sapiens
  misc_RNA (1)...(19): siRNA sense strand
aagcaugauucuaacauug

SEQ ID NO: 372927 - RNA, 19 nt, Homo sapiens
  misc_RNA (1)...(19): siRNA sense strand
gaaguggauacacaggaua

SEQ ID NO: 372928 - RNA, 19 nt, Homo sapiens
  misc_RNA (1)...(19): siRNA sense strand
caggagaaguggauacaca

SEQ ID NO: 372929 - RNA, 19 nt, Homo sapiens
  misc_RNA (1)...(19): siRNA sense strand
ggaaugugaccgugguuga

SEQ ID NO: 372930 - RNA, 19 nt, Homo sapiens
  misc_RNA (1)...(19): siRNA sense strand
cagagaaccugcuguuugc

SEQ ID NO: 372931 - RNA, 19 nt, Homo sapiens
  misc_RNA (1)...(19): siRNA sense strand
gaaacagccagagaacauu

SEQ ID NO: 372932 - RNA, 19 nt, Homo sapiens
  misc_RNA (1)...(19): siRNA sense strand
gggagaacaccacuuaugu

SEQ ID NO: 372933 - RNA, 19 nt, Homo sapiens
  misc_RNA (1)...(19): siRNA sense strand
aaauaagucuggaacuauc

SEQ ID NO: 372934 - RNA, 19 nt, Homo sapiens
  misc_RNA (1)...(19): siRNA sense strand
aagcaaaucuaugguuguu

SEQ ID NO: 372935 - RNA, 19 nt, Homo sapiens
  misc_RNA (1)...(19): siRNA sense strand
acaauaacccugagcaugu

SEQ ID NO: 372936 - RNA, 19 nt, Homo sapiens
  misc_RNA (1)...(19): siRNA sense strand
ccaaaccacugcaguaagc

SEQ ID NO: 372937 - RNA, 19 nt, Homo sapiens
  misc_RNA (1)...(19): siRNA sense strand
ccaaggcccugagccaaga

SEQ ID NO: 372938 - RNA, 19 nt, Homo sapiens
  misc_RNA (1)...(19): siRNA sense strand
gagcagaugugaauaaaac

SEQ ID NO: 372939 - RNA, 19 nt, Homo sapiens
  misc_RNA (1)...(19): siRNA sense strand
agauggacauucucuucua

SEQ ID NO: 372940 - RNA, 19 nt, Homo sapiens
  misc_RNA (1)...(19): siRNA sense strand
gugauucagacacucauua

SEQ ID NO: 372941 - RNA, 19 nt, Homo sapiens
  misc_RNA (1)...(19): siRNA sense strand
gagccacaccuuugcacua

SEQ ID NO: 372942 - RNA, 19 nt, Homo sapiens
  misc_RNA (1)...(19): siRNA sense strand
ucgaacuccucuucacuuu

SEQ ID NO: 372943 - RNA, 19 nt, Homo sapiens
  misc_RNA (1)...(19): siRNA sense strand
caauaacccugagcaugug

SEQ ID NO: 372944 - RNA, 19 nt, Homo sapiens
  misc_RNA (1)...(19): siRNA sense strand
gaagagaugacuccuuugc

SEQ ID NO: 372945 - RNA, 19 nt, Homo sapiens
  misc_RNA (1)...(19): siRNA sense strand
ucaugaaacucuuacuuac

SEQ ID NO: 372946 - RNA, 19 nt, Homo sapiens
  misc_RNA (1)...(19): siRNA sense strand
gaugacuccuuugcacuug

SEQ ID NO: 372947 - RNA, 19 nt, Homo sapiens
  misc_RNA (1)...(19): siRNA sense strand
gauaagggugcucuacaga

SEQ ID NO: 372948 - RNA, 19 nt, Homo sapiens
  misc_RNA (1)...(19): siRNA sense strand
gcugacaaauauggaggua

SEQ ID NO: 372949 - RNA, 19 nt, Homo sapiens
  misc_RNA (1)...(19): siRNA sense strand
cugaaacgguuaaaguguu

SEQ ID NO: 372950 - RNA, 19 nt, Homo sapiens
  misc_RNA (1)...(19): siRNA sense strand
uuacugaacuggcaagacu

SEQ ID NO: 372951 - RNA, 19 nt, Homo sapiens
  misc_RNA (1)...(19): siRNA sense strand
gauuguccaucuccuuuua

SEQ ID NO: 372952 - RNA, 19 nt, Homo sapiens
  misc_RNA (1)...(19): siRNA sense strand
ggcaagagucuacagcauu

SEQ ID NO: 372953 - RNA, 19 nt, Homo sapiens
  misc_RNA (1)...(19): siRNA sense strand
gaaggaggaaggagcuguu

SEQ ID NO: 372954 - RNA, 19 nt, Homo sapiens
  misc_RNA (1)...(19): siRNA sense strand
gcauguuuccucagauuug

SEQ ID NO: 372955 - RNA, 19 nt, Homo sapiens
  misc_RNA (1)...(19): siRNA sense strand
uaacagagcuccuccgaua

SEQ ID NO: 372956 - RNA, 19 nt, Homo sapiens
  misc_RNA (1)...(19): siRNA sense strand
ggagguagaugacuucuuu

SEQ ID NO: 372957 - RNA, 19 nt, Homo sapiens
  misc_RNA (1)...(19): siRNA sense strand
gaucgcaacuuucauguuu

SEQ ID NO: 372958 - RNA, 19 nt, Homo sapiens
  misc_RNA (1)...(19): siRNA sense strand
gaagguugcugagcuauuu

SEQ ID NO: 372959 - RNA, 19 nt, Homo sapiens
  misc_RNA (1)...(19): siRNA sense strand
ccaaagcccucauugacua

SEQ ID NO: 372960 - RNA, 19 nt, Homo sapiens
  misc_RNA (1)...(19): siRNA sense strand
gagcaaagacgucaaguug

SEQ ID NO: 372961 - RNA, 19 nt, Homo sapiens
  misc_RNA (1)...(19): siRNA sense strand
gaagagaguggcagcauuu

SEQ ID NO: 372962 - RNA, 19 nt, Homo sapiens
  misc_RNA (1)...(19): siRNA sense strand
ugaaaugucugaacuggaa

SEQ ID NO: 372963 - RNA, 19 nt, Homo sapiens
  misc_RNA (1)...(19): siRNA sense strand
gaaaguagagggucgaguu

SEQ ID NO: 372964 - RNA, 19 nt, Homo sapiens
  misc_RNA (1)...(19): siRNA sense strand
gagagaagaugcagaaacu

SEQ ID NO: 372965 - RNA, 19 nt, Homo sapiens
  misc_RNA (1)...(19): siRNA sense strand
aaacaaagcucuggauaag

SEQ ID NO: 372966 - RNA, 19 nt, Homo sapiens
  misc_RNA (1)...(19): siRNA sense strand
gaugaagauuugaagcuaa

SEQ ID NO: 372967 - RNA, 19 nt, Homo sapiens
  misc_RNA (1)...(19): siRNA sense strand
ggaagagaguggcagcauu

SEQ ID NO: 372968 - RNA, 19 nt, Homo sapiens
  misc_RNA (1)...(19): siRNA sense strand
gcagagcuguauugacuug

SEQ ID NO: 372969 - RNA, 19 nt, Homo sapiens
  misc_RNA (1)...(19): siRNA sense strand
ugucugaacuggaaauaaa

SEQ ID NO: 372970 - RNA, 19 nt, Homo sapiens
  misc_RNA (1)...(19): siRNA sense strand
caaacaaagcucuggauaa

SEQ ID NO: 372971 - RNA, 19 nt, Homo sapiens
  misc_RNA (1)...(19): siRNA sense strand
ccagaaauuugaacaacuu

SEQ ID NO: 372972 - RNA, 19 nt, Homo sapiens
  misc_RNA (1)...(19): siRNA sense strand
gagagacaaagucaaauuu

SEQ ID NO: 372973 - RNA, 19 nt, Homo sapiens
  misc_RNA (1)...(19): siRNA sense strand
acaauaggaucaaagauuc

SEQ ID NO: 372974 - RNA, 19 nt, Homo sapiens
  misc_RNA (1)...(19): siRNA sense strand
gaaaagugcugaugaaguc

SEQ ID NO: 372975 - RNA, 19 nt, Homo sapiens
  misc_RNA (1)...(19): siRNA sense strand
cuacgaagcccgacuuuga

SEQ ID NO: 372976 - RNA, 19 nt, Homo sapiens
  misc_RNA (1)...(19): siRNA sense strand
gagacaaagucaaauuuac

SEQ ID NO: 372977 - RNA, 19 nt, Homo sapiens
  misc_RNA (1)...(19): siRNA sense strand
gaaggugaagggucuauga

SEQ ID NO: 372978 - RNA, 19 nt, Homo sapiens
  misc_RNA (1)...(19): siRNA sense strand
gauacuacaugcucaacau

SEQ ID NO: 372979 - RNA, 19 nt, Homo sapiens
  misc_RNA (1)...(19): siRNA sense strand
gcaccaaagcccucauuga

SEQ ID NO: 372980 - RNA, 19 nt, Homo sapiens
  misc_RNA (1)...(19): siRNA sense strand
cuacaugacacucuuauug

SEQ ID NO: 372981 - RNA, 19 nt, Homo sapiens
  misc_RNA (1)...(19): siRNA sense strand
gaacaacuuuccgaaucug

SEQ ID NO: 372982 - RNA, 19 nt, Homo sapiens
  misc_RNA (1)...(19): siRNA sense strand
gagaguggcagcauuuaga

SEQ ID NO: 372983 - RNA, 19 nt, Homo sapiens
  misc_RNA (1)...(19): siRNA sense strand
ugagagagacaaagucaaa

SEQ ID NO: 372984 - RNA, 19 nt, Homo sapiens
  misc_RNA (1)...(19): siRNA sense strand
cauugaagcugcuaaggau

SEQ ID NO: 372985 - RNA, 19 nt, Homo sapiens
  misc_RNA (1)...(19): siRNA sense strand
guugaucccucgcuucaga

SEQ ID NO: 372986 - RNA, 19 nt, Homo sapiens
  misc_RNA (1)...(19): siRNA sense strand
agaagaauuugccaagaug

SEQ ID NO: 372987 - RNA, 19 nt, Homo sapiens
  misc_RNA (1)...(19): siRNA sense strand
gauguuugguggcuucuuc

SEQ ID NO: 372988 - RNA, 19 nt, Homo sapiens
  misc_RNA (1)...(19): siRNA sense strand
gaugaaacaagaacuggaa

SEQ ID NO: 372989 - RNA, 19 nt, Homo sapiens
  misc_RNA (1)...(19): siRNA sense strand
ggagugcugccagaaauuu

SEQ ID NO: 372990 - RNA, 19 nt, Homo sapiens
  misc_RNA (1)...(19): siRNA sense strand
aaagaagaauuugccaaga

SEQ ID NO: 372991 - RNA, 19 nt, Homo sapiens
  misc_RNA (1)...(19): siRNA sense strand
caggagugcugccagaaau

SEQ ID NO: 372992 - RNA, 19 nt, Homo sapiens
  misc_RNA (1)...(19): siRNA sense strand
ucaaacaaagcucuggaua

SEQ ID NO: 372993 - RNA, 19 nt, Homo sapiens
  misc_RNA (1)...(19): siRNA sense strand
aagaagaauuugccaagau

SEQ ID NO: 372994 - RNA, 19 nt, Homo sapiens
  misc_RNA (1)...(19): siRNA sense strand
uuaaggagguagaugacuu

SEQ ID NO: 372995 - RNA, 19 nt, Homo sapiens
  misc_RNA (1)...(19): siRNA sense strand
acaugacacucuuauugaa

SEQ ID NO: 372996 - RNA, 19 nt, Homo sapiens
  misc_RNA (1)...(19): siRNA sense strand
aaacaugccaggaacaaug

SEQ ID NO: 372997 - RNA, 19 nt, Homo sapiens
  misc_RNA (1)...(19): siRNA sense strand
gaguuaaggagguagauga

SEQ ID NO: 372998 - RNA, 19 nt, Homo sapiens
  misc_RNA (1)...(19): siRNA sense strand
gaagaauuugccaagauga

SEQ ID NO: 372999 - RNA, 19 nt, Homo sapiens
  misc_RNA (1)...(19): siRNA sense strand
agacuaugcugggcuuauu

SEQ ID NO: 373000 - RNA, 19 nt, Homo sapiens
  misc_RNA (1)...(19): siRNA sense strand
aaggcaacaugaagacuuu

SEQ ID NO: 373001 - RNA, 19 nt, Homo sapiens
  misc_RNA (1)...(19): siRNA sense strand
gaagagcccacagucauca

SEQ ID NO: 373002 - RNA, 19 nt, Homo sapiens
  misc_RNA (1)...(19): siRNA sense strand
gaaacugggagaaggugaa

SEQ ID NO: 373003 - RNA, 19 nt, Homo sapiens
  misc_RNA (1)...(19): siRNA sense strand
ugugaaagcugacaaaaug

SEQ ID NO: 373004 - RNA, 19 nt, Homo sapiens
  misc_RNA (1)...(19): siRNA sense strand
gagcuguauugacuuguuc

SEQ ID NO: 373005 - RNA, 19 nt, Homo sapiens
  misc_RNA (1)...(19): siRNA sense strand
agaugaagauuugaagcua

SEQ ID NO: 373006 - RNA, 19 nt, Homo sapiens
  misc_RNA (1)...(19): siRNA sense strand
uugcagagcuguauugacu

SEQ ID NO: 373007 - RNA, 19 nt, Homo sapiens
  misc_RNA (1)...(19): siRNA sense strand
cugaguaucucgcuguguu

SEQ ID NO: 373008 - RNA, 19 nt, Homo sapiens
  misc_RNA (1)...(19): siRNA sense strand
gaguaucucgcuguguuua

SEQ ID NO: 373009 - RNA, 19 nt, Homo sapiens
  misc_RNA (1)...(19): siRNA sense strand
ugaacaacuuuccgaaucu

SEQ ID NO: 373010 - RNA, 19 nt, Homo sapiens
  misc_RNA (1)...(19): siRNA sense strand
caacaugaagacuuugugu

SEQ ID NO: 373011 - RNA, 19 nt, Homo sapiens
  misc_RNA (1)...(19): siRNA sense strand
uugaacaacuuuccgaauc

SEQ ID NO: 373012 - RNA, 19 nt, Homo sapiens
  misc_RNA (1)...(19): siRNA sense strand
agaccacacugcccacguu

SEQ ID NO: 373013 - RNA, 19 nt, Homo sapiens
  misc_RNA (1)...(19): siRNA sense strand
gacuaugcugggcuuauua

SEQ ID NO: 373014 - RNA, 19 nt, Homo sapiens
  misc_RNA (1)...(19): siRNA sense strand
uacaugacacucuuauuga

SEQ ID NO: 373015 - RNA, 19 nt, Homo sapiens
  misc_RNA (1)...(19): siRNA sense strand
agagagacaaagucaaauu

SEQ ID NO: 373016 - RNA, 19 nt, Homo sapiens
  misc_RNA (1)...(19): siRNA sense strand
ggugaaaagugcugaugaa

SEQ ID NO: 373017 - RNA, 19 nt, Homo sapiens
  misc_RNA (1)...(19): siRNA sense strand
uugccaagaugaaacaaga

SEQ ID NO: 373018 - RNA, 19 nt, Homo sapiens
  misc_RNA (1)...(19): siRNA sense strand
caaggcaacaugaagacuu

SEQ ID NO: 373019 - RNA, 19 nt, Homo sapiens
  misc_RNA (1)...(19): siRNA sense strand
ccacacugcccacguuuca

SEQ ID NO: 373020 - RNA, 19 nt, Homo sapiens
  misc_RNA (1)...(19): siRNA sense strand
gcaaaagaagaacugauaa

SEQ ID NO: 373021 - RNA, 19 nt, Homo sapiens
  misc_RNA (1)...(19): siRNA sense strand
guccucccaugaagucuuu

SEQ ID NO: 373022 - RNA, 19 nt, Homo sapiens
  misc_RNA (1)...(19): siRNA sense strand
caagaugaaacaagaacug

SEQ ID NO: 373023 - RNA, 19 nt, Homo sapiens
  misc_RNA (1)...(19): siRNA sense strand
uuacaaggcaacaugaaga

SEQ ID NO: 373024 - RNA, 19 nt, Homo sapiens
  misc_RNA (1)...(19): siRNA sense strand
caugacacucuuauugaaa

SEQ ID NO: 373025 - RNA, 19 nt, Homo sapiens
  misc_RNA (1)...(19): siRNA sense strand
guggcagcauuuagaaaga

SEQ ID NO: 373026 - RNA, 19 nt, Homo sapiens
  misc_RNA (1)...(19): siRNA sense strand
uagaagagcccacagucau

SEQ ID NO: 373027 - RNA, 19 nt, Homo sapiens
  misc_RNA (1)...(19): siRNA sense strand
gacuuuguguggcuacaug

SEQ ID NO: 373028 - RNA, 19 nt, Homo sapiens
  misc_RNA (1)...(19): siRNA sense strand
gcagaaacugggagaaggu

SEQ ID NO: 373029 - RNA, 19 nt, Homo sapiens
  misc_RNA (1)...(19): siRNA sense strand
cagauugacauaccugaug

SEQ ID NO: 373030 - RNA, 19 nt, Homo sapiens
  misc_RNA (1)...(19): siRNA sense strand
aguagagggucgaguuuca

SEQ ID NO: 373031 - RNA, 19 nt, Homo sapiens
  misc_RNA (1)...(19): siRNA sense strand
aaaguagagggucgaguuu

SEQ ID NO: 373032 - RNA, 19 nt, Homo sapiens
  misc_RNA (1)...(19): siRNA sense strand
cuguggaccugaauguuga

SEQ ID NO: 373033 - RNA, 19 nt, Homo sapiens
  misc_RNA (1)...(19): siRNA sense strand
aauuuacagugcacacaaa

SEQ ID NO: 373034 - RNA, 19 nt, Homo sapiens
  misc_RNA (1)...(19): siRNA sense strand
gccagaaauuugaacaacu

SEQ ID NO: 373035 - RNA, 19 nt, Homo sapiens
  misc_RNA (1)...(19): siRNA sense strand
aaauguugccgaugacuau

SEQ ID NO: 373036 - RNA, 19 nt, Homo sapiens
  misc_RNA (1)...(19): siRNA sense strand
gaaacaagaacuggaagcu

SEQ ID NO: 373037 - RNA, 19 nt, Homo sapiens
  misc_RNA (1)...(19): siRNA sense strand
agagcuguauugacuuguu

SEQ ID NO: 373038 - RNA, 19 nt, Homo sapiens
  misc_RNA (1)...(19): siRNA sense strand
gaacuggaaauaaaacaug

SEQ ID NO: 373039 - RNA, 19 nt, Homo sapiens
  misc_RNA (1)...(19): siRNA sense strand
guaucucgcuguguuuaag

SEQ ID NO: 373040 - RNA, 19 nt, Homo sapiens
  misc_RNA (1)...(19): siRNA sense strand
ucaaaaguguggugaaaag

SEQ ID NO: 373041 - RNA, 19 nt, Homo sapiens
  misc_RNA (1)...(19): siRNA sense strand
uggcagcauuuagaaagaa

SEQ ID NO: 373042 - RNA, 19 nt, Homo sapiens
  misc_RNA (1)...(19): siRNA sense strand
cagagcuccuccgauacua

SEQ ID NO: 373043 - RNA, 19 nt, Homo sapiens
  misc_RNA (1)...(19): siRNA sense strand
gaaaugucugaacuggaaa

SEQ ID NO: 373044 - RNA, 19 nt, Homo sapiens
  misc_RNA (1)...(19): siRNA sense strand
caccaaagcccucauugac

SEQ ID NO: 373045 - RNA, 19 nt, Homo sapiens
  misc_RNA (1)...(19): siRNA sense strand
caacauugaagcugcuaag

SEQ ID NO: 373046 - RNA, 19 nt, Homo sapiens
  misc_RNA (1)...(19): siRNA sense strand
gcaacaugaagacuuugug

SEQ ID NO: 373047 - RNA, 19 nt, Homo sapiens
  misc_RNA (1)...(19): siRNA sense strand
ggcagcauuuagaaagaau

SEQ ID NO: 373048 - RNA, 19 nt, Homo sapiens
  misc_RNA (1)...(19): siRNA sense strand
uugcugagcuauuugaaaa

SEQ ID NO: 373049 - RNA, 19 nt, Homo sapiens
  misc_RNA (1)...(19): siRNA sense strand
gggucgaguuucaucagau

SEQ ID NO: 373050 - RNA, 19 nt, Homo sapiens
  misc_RNA (1)...(19): siRNA sense strand
gagcuccuccgauacuaca

SEQ ID NO: 373051 - RNA, 19 nt, Homo sapiens
  misc_RNA (1)...(19): siRNA sense strand
gaacuggaagcugaguauc

SEQ ID NO: 373052 - RNA, 19 nt, Homo sapiens
  misc_RNA (1)...(19): siRNA sense strand
gaguggcagcauuuagaaa

SEQ ID NO: 373053 - RNA, 19 nt, Homo sapiens
  misc_RNA (1)...(19): siRNA sense strand
acacugcccacguuucaga

SEQ ID NO: 373054 - RNA, 19 nt, Homo sapiens
  misc_RNA (1)...(19): siRNA sense strand
uaaggagguagaugacuuc

SEQ ID NO: 373055 - RNA, 19 nt, Homo sapiens
  misc_RNA (1)...(19): siRNA sense strand
uaacagagcuccuccgaua

SEQ ID NO: 373056 - RNA, 19 nt, Homo sapiens
  misc_RNA (1)...(19): siRNA sense strand
ggagguagaugacuucuuu

SEQ ID NO: 373057 - RNA, 19 nt, Homo sapiens
  misc_RNA (1)...(19): siRNA sense strand
gaucgcaacuuucauguuu

SEQ ID NO: 373058 - RNA, 19 nt, Homo sapiens
  misc_RNA (1)...(19): siRNA sense strand
gaagguugcugagcuauuu

SEQ ID NO: 373059 - RNA, 19 nt, Homo sapiens
  misc_RNA (1)...(19): siRNA sense strand
ccaaagcccucauugacua

SEQ ID NO: 373060 - RNA, 19 nt, Homo sapiens
  misc_RNA (1)...(19): siRNA sense strand
gagcaaagacgucaaguug

SEQ ID NO: 373061 - RNA, 19 nt, Homo sapiens
  misc_RNA (1)...(19): siRNA sense strand
gaagagaguggcagcauuu

SEQ ID NO: 373062 - RNA, 19 nt, Homo sapiens
  misc_RNA (1)...(19): siRNA sense strand
ugaaaugucugaacuggaa

SEQ ID NO: 373063 - RNA, 19 nt, Homo sapiens
  misc_RNA (1)...(19): siRNA sense strand
gaaaguagagggucgaguu

SEQ ID NO: 373064 - RNA, 19 nt, Homo sapiens
  misc_RNA (1)...(19): siRNA sense strand
gagagaagaugcagaaacu

SEQ ID NO: 373065 - RNA, 19 nt, Homo sapiens
  misc_RNA (1)...(19): siRNA sense strand
aaacaaagcucuggauaag

SEQ ID NO: 373066 - RNA, 19 nt, Homo sapiens
  misc_RNA (1)...(19): siRNA sense strand
gaugaagauuugaagcuaa

SEQ ID NO: 373067 - RNA, 19 nt, Homo sapiens
  misc_RNA (1)...(19): siRNA sense strand
ggaagagaguggcagcauu

SEQ ID NO: 373068 - RNA, 19 nt, Homo sapiens
  misc_RNA (1)...(19): siRNA sense strand
gcagagcuguauugacuug

SEQ ID NO: 373069 - RNA, 19 nt, Homo sapiens
  misc_RNA (1)...(19): siRNA sense strand
ugucugaacuggaaauaaa

SEQ ID NO: 373070 - RNA, 19 nt, Homo sapiens
  misc_RNA (1)...(19): siRNA sense strand
caaacaaagcucuggauaa

SEQ ID NO: 373071 - RNA, 19 nt, Homo sapiens
  misc_RNA (1)...(19): siRNA sense strand
ccagaaauuugaacaacuu

SEQ ID NO: 373072 - RNA, 19 nt, Homo sapiens
  misc_RNA (1)...(19): siRNA sense strand
gagagacaaagucaaauuu

SEQ ID NO: 373073 - RNA, 19 nt, Homo sapiens
  misc_RNA (1)...(19): siRNA sense strand
acaauaggaucaaagauuc

SEQ ID NO: 373074 - RNA, 19 nt, Homo sapiens
  misc_RNA (1)...(19): siRNA sense strand
gaaaagugcugaugaaguc

SEQ ID NO: 373075 - RNA, 19 nt, Homo sapiens
  misc_RNA (1)...(19): siRNA sense strand
cuacgaagcccgacuuuga

SEQ ID NO: 373076 - RNA, 19 nt, Homo sapiens
  misc_RNA (1)...(19): siRNA sense strand
gagacaaagucaaauuuac

SEQ ID NO: 373077 - RNA, 19 nt, Homo sapiens
  misc_RNA (1)...(19): siRNA sense strand
gaaggugaagggucuauga

SEQ ID NO: 373078 - RNA, 19 nt, Homo sapiens
  misc_RNA (1)...(19): siRNA sense strand
gauacuacaugcucaacau

SEQ ID NO: 373079 - RNA, 19 nt, Homo sapiens
  misc_RNA (1)...(19): siRNA sense strand
gcaccaaagcccucauuga

SEQ ID NO: 373080 - RNA, 19 nt, Homo sapiens
  misc_RNA (1)...(19): siRNA sense strand
cuacaugacacucuuauug

SEQ ID NO: 373081 - RNA, 19 nt, Homo sapiens
  misc_RNA (1)...(19): siRNA sense strand
gaacaacuuuccgaaucug

SEQ ID NO: 373082 - RNA, 19 nt, Homo sapiens
  misc_RNA (1)...(19): siRNA sense strand
gagaguggcagcauuuaga

SEQ ID NO: 373083 - RNA, 19 nt, Homo sapiens
  misc_RNA (1)...(19): siRNA sense strand
ugagagagacaaagucaaa

SEQ ID NO: 373084 - RNA, 19 nt, Homo sapiens
  misc_RNA (1)...(19): siRNA sense strand
cauugaagcugcuaaggau

SEQ ID NO: 373085 - RNA, 19 nt, Homo sapiens
  misc_RNA (1)...(19): siRNA sense strand
guugaucccucgcuucaga

SEQ ID NO: 373086 - RNA, 19 nt, Homo sapiens
  misc_RNA (1)...(19): siRNA sense strand
agaagaauuugccaagaug

SEQ ID NO: 373087 - RNA, 19 nt, Homo sapiens
  misc_RNA (1)...(19): siRNA sense strand
gauguuugguggcuucuuc

SEQ ID NO: 373088 - RNA, 19 nt, Homo sapiens
  misc_RNA (1)...(19): siRNA sense strand
gaugaaacaagaacuggaa

SEQ ID NO: 373089 - RNA, 19 nt, Homo sapiens
  misc_RNA (1)...(19): siRNA sense strand
ggagugcugccagaaauuu

SEQ ID NO: 373090 - RNA, 19 nt, Homo sapiens
  misc_RNA (1)...(19): siRNA sense strand
aaagaagaauuugccaaga

SEQ ID NO: 373091 - RNA, 19 nt, Homo sapiens
  misc_RNA (1)...(19): siRNA sense strand
caggagugcugccagaaau

SEQ ID NO: 373092 - RNA, 19 nt, Homo sapiens
  misc_RNA (1)...(19): siRNA sense strand
ucaaacaaagcucuggaua

SEQ ID NO: 373093 - RNA, 19 nt, Homo sapiens
  misc_RNA (1)...(19): siRNA sense strand
aagaagaauuugccaagau

SEQ ID NO: 373094 - RNA, 19 nt, Homo sapiens
  misc_RNA (1)...(19): siRNA sense strand
uuaaggagguagaugacuu

SEQ ID NO: 373095 - RNA, 19 nt, Homo sapiens
  misc_RNA (1)...(19): siRNA sense strand
acaugacacucuuauugaa

SEQ ID NO: 373096 - RNA, 19 nt, Homo sapiens
  misc_RNA (1)...(19): siRNA sense strand
aaacaugccaggaacaaug

SEQ ID NO: 373097 - RNA, 19 nt, Homo sapiens
  misc_RNA (1)...(19): siRNA sense strand
gaguuaaggagguagauga

SEQ ID NO: 373098 - RNA, 19 nt, Homo sapiens
  misc_RNA (1)...(19): siRNA sense strand
gaagaauuugccaagauga

SEQ ID NO: 373099 - RNA, 19 nt, Homo sapiens
  misc_RNA (1)...(19): siRNA sense strand
agacuaugcugggcuuauu

SEQ ID NO: 373100 - RNA, 19 nt, Homo sapiens
  misc_RNA (1)...(19): siRNA sense strand
aaggcaacaugaagacuuu

SEQ ID NO: 373101 - RNA, 19 nt, Homo sapiens
  misc_RNA (1)...(19): siRNA sense strand
gaagagcccacagucauca

SEQ ID NO: 373102 - RNA, 19 nt, Homo sapiens
  misc_RNA (1)...(19): siRNA sense strand
gaaacugggagaaggugaa

SEQ ID NO: 373103 - RNA, 19 nt, Homo sapiens
  misc_RNA (1)...(19): siRNA sense strand
ugugaaagcugacaaaaug

SEQ ID NO: 373104 - RNA, 19 nt, Homo sapiens
  misc_RNA (1)...(19): siRNA sense strand
gagcuguauugacuuguuc

SEQ ID NO: 373105 - RNA, 19 nt, Homo sapiens
  misc_RNA (1)...(19): siRNA sense strand
agaugaagauuugaagcua

SEQ ID NO: 373106 - RNA, 19 nt, Homo sapiens
  misc_RNA (1)...(19): siRNA sense strand
uugcagagcuguauugacu

SEQ ID NO: 373107 - RNA, 19 nt, Homo sapiens
  misc_RNA (1)...(19): siRNA sense strand
cugaguaucucgcuguguu

SEQ ID NO: 373108 - RNA, 19 nt, Homo sapiens
  misc_RNA (1)...(19): siRNA sense strand
gaguaucucgcuguguuua

SEQ ID NO: 373109 - RNA, 19 nt, Homo sapiens
  misc_RNA (1)...(19): siRNA sense strand
ugaacaacuuuccgaaucu

SEQ ID NO: 373110 - RNA, 19 nt, Homo sapiens
  misc_RNA (1)...(19): siRNA sense strand
caacaugaagacuuugugu

SEQ ID NO: 373111 - RNA, 19 nt, Homo sapiens
  misc_RNA (1)...(19): siRNA sense strand
uugaacaacuuuccgaauc

SEQ ID NO: 373112 - RNA, 19 nt, Homo sapiens
  misc_RNA (1)...(19): siRNA sense strand
agaccacacugcccacguu

SEQ ID NO: 373113 - RNA, 19 nt, Homo sapiens
  misc_RNA (1)...(19): siRNA sense strand
gacuaugcugggcuuauua

SEQ ID NO: 373114 - RNA, 19 nt, Homo sapiens
  misc_RNA (1)...(19): siRNA sense strand
uacaugacacucuuauuga

SEQ ID NO: 373115 - RNA, 19 nt, Homo sapiens
  misc_RNA (1)...(19): siRNA sense strand
agagagacaaagucaaauu

SEQ ID NO: 373116 - RNA, 19 nt, Homo sapiens
  misc_RNA (1)...(19): siRNA sense strand
ggugaaaagugcugaugaa

SEQ ID NO: 373117 - RNA, 19 nt, Homo sapiens
  misc_RNA (1)...(19): siRNA sense strand
uugccaagaugaaacaaga

SEQ ID NO: 373118 - RNA, 19 nt, Homo sapiens
  misc_RNA (1)...(19): siRNA sense strand
caaggcaacaugaagacuu

SEQ ID NO: 373119 - RNA, 19 nt, Homo sapiens
  misc_RNA (1)...(19): siRNA sense strand
ccacacugcccacguuuca

SEQ ID NO: 373120 - RNA, 19 nt, Homo sapiens
  misc_RNA (1)...(19): siRNA sense strand
gcaaaagaagaacugauaa

SEQ ID NO: 373121 - RNA, 19 nt, Homo sapiens
  misc_RNA (1)...(19): siRNA sense strand
guccucccaugaagucuuu

SEQ ID NO: 373122 - RNA, 19 nt, Homo sapiens
  misc_RNA (1)...(19): siRNA sense strand
caagaugaaacaagaacug

SEQ ID NO: 373123 - RNA, 19 nt, Homo sapiens
  misc_RNA (1)...(19): siRNA sense strand
uuacaaggcaacaugaaga

SEQ ID NO: 373124 - RNA, 19 nt, Homo sapiens
  misc_RNA (1)...(19): siRNA sense strand
caugacacucuuauugaaa

SEQ ID NO: 373125 - RNA, 19 nt, Homo sapiens
  misc_RNA (1)...(19): siRNA sense strand
guggcagcauuuagaaaga

SEQ ID NO: 373126 - RNA, 19 nt, Homo sapiens
  misc_RNA (1)...(19): siRNA sense strand
uagaagagcccacagucau

SEQ ID NO: 373127 - RNA, 19 nt, Homo sapiens
  misc_RNA (1)...(19): siRNA sense strand
gacuuuguguggcuacaug

SEQ ID NO: 373128 - RNA, 19 nt, Homo sapiens
  misc_RNA (1)...(19): siRNA sense strand
gcagaaacugggagaaggu

SEQ ID NO: 373129 - RNA, 19 nt, Homo sapiens
  misc_RNA (1)...(19): siRNA sense strand
cagauugacauaccugaug

SEQ ID NO: 373130 - RNA, 19 nt, Homo sapiens
  misc_RNA (1)...(19): siRNA sense strand
aguagagggucgaguuuca

SEQ ID NO: 373131 - RNA, 19 nt, Homo sapiens
  misc_RNA (1)...(19): siRNA sense strand
aaaguagagggucgaguuu

SEQ ID NO: 373132 - RNA, 19 nt, Homo sapiens
  misc_RNA (1)...(19): siRNA sense strand
cuguggaccugaauguuga

SEQ ID NO: 373133 - RNA, 19 nt, Homo sapiens
  misc_RNA (1)...(19): siRNA sense strand
aauuuacagugcacacaaa

SEQ ID NO: 373134 - RNA, 19 nt, Homo sapiens
  misc_RNA (1)...(19): siRNA sense strand
gccagaaauuugaacaacu

SEQ ID NO: 373135 - RNA, 19 nt, Homo sapiens
  misc_RNA (1)...(19): siRNA sense strand
aaauguugccgaugacuau

SEQ ID NO: 373136 - RNA, 19 nt, Homo sapiens
  misc_RNA (1)...(19): siRNA sense strand
gaaacaagaacuggaagcu

SEQ ID NO: 373137 - RNA, 19 nt, Homo sapiens
  misc_RNA (1)...(19): siRNA sense strand
agagcuguauugacuuguu

SEQ ID NO: 373138 - RNA, 19 nt, Homo sapiens
  misc_RNA (1)...(19): siRNA sense strand
gaacuggaaauaaaacaug

SEQ ID NO: 373139 - RNA, 19 nt, Homo sapiens
  misc_RNA (1)...(19): siRNA sense strand
guaucucgcuguguuuaag

SEQ ID NO: 373140 - RNA, 19 nt, Homo sapiens
  misc_RNA (1)...(19): siRNA sense strand
ucaaaaguguggugaaaag

SEQ ID NO: 373141 - RNA, 19 nt, Homo sapiens
  misc_RNA (1)...(19): siRNA sense strand
uggcagcauuuagaaagaa

SEQ ID NO: 373142 - RNA, 19 nt, Homo sapiens
  misc_RNA (1)...(19): siRNA sense strand
cagagcuccuccgauacua

SEQ ID NO: 373143 - RNA, 19 nt, Homo sapiens
  misc_RNA (1)...(19): siRNA sense strand
gaaaugucugaacuggaaa

SEQ ID NO: 373144 - RNA, 19 nt, Homo sapiens
  misc_RNA (1)...(19): siRNA sense strand
caccaaagcccucauugac

SEQ ID NO: 373145 - RNA, 19 nt, Homo sapiens
  misc_RNA (1)...(19): siRNA sense strand
caacauugaagcugcuaag

SEQ ID NO: 373146 - RNA, 19 nt, Homo sapiens
  misc_RNA (1)...(19): siRNA sense strand
gcaacaugaagacuuugug

SEQ ID NO: 373147 - RNA, 19 nt, Homo sapiens
  misc_RNA (1)...(19): siRNA sense strand
ggcagcauuuagaaagaau

SEQ ID NO: 373148 - RNA, 19 nt, Homo sapiens
  misc_RNA (1)...(19): siRNA sense strand
uugcugagcuauuugaaaa

SEQ ID NO: 373149 - RNA, 19 nt, Homo sapiens
  misc_RNA (1)...(19): siRNA sense strand
gggucgaguuucaucagau

SEQ ID NO: 373150 - RNA, 19 nt, Homo sapiens
  misc_RNA (1)...(19): siRNA sense strand
gagcuccuccgauacuaca

SEQ ID NO: 373151 - RNA, 19 nt, Homo sapiens
  misc_RNA (1)...(19): siRNA sense strand
gaacuggaagcugaguauc

SEQ ID NO: 373152 - RNA, 19 nt, Homo sapiens
  misc_RNA (1)...(19): siRNA sense strand
gaguggcagcauuuagaaa

SEQ ID NO: 373153 - RNA, 19 nt, Homo sapiens
  misc_RNA (1)...(19): siRNA sense strand
acacugcccacguuucaga

SEQ ID NO: 373154 - RNA, 19 nt, Homo sapiens
  misc_RNA (1)...(19): siRNA sense strand
uaaggagguagaugacuuc

SEQ ID NO: 373155 - RNA, 19 nt, Homo sapiens
  misc_RNA (1)...(19): siRNA sense strand
ggacggagguggugaagaa

SEQ ID NO: 373156 - RNA, 19 nt, Homo sapiens
  misc_RNA (1)...(19): siRNA sense strand
cagaagagacgcaguuaua

SEQ ID NO: 373157 - RNA, 19 nt, Homo sapiens
  misc_RNA (1)...(19): siRNA sense strand
gaaagccucucaauacuac

SEQ ID NO: 373158 - RNA, 19 nt, Homo sapiens
  misc_RNA (1)...(19): siRNA sense strand
cgaagcaggugguggagua

SEQ ID NO: 373159 - RNA, 19 nt, Homo sapiens
  misc_RNA (1)...(19): siRNA sense strand
ggaaagccucucaauacua

SEQ ID NO: 373160 - RNA, 19 nt, Homo sapiens
  misc_RNA (1)...(19): siRNA sense strand
acaaggaccucuucagcaa

SEQ ID NO: 373161 - RNA, 19 nt, Homo sapiens
  misc_RNA (1)...(19): siRNA sense strand
gauuacgacucucgaggaa

SEQ ID NO: 373162 - RNA, 19 nt, Homo sapiens
  misc_RNA (1)...(19): siRNA sense strand
agacaaggccucuaaagug

SEQ ID NO: 373163 - RNA, 19 nt, Homo sapiens
  misc_RNA (1)...(19): siRNA sense strand
gggaaagccucucaauacu

SEQ ID NO: 373164 - RNA, 19 nt, Homo sapiens
  misc_RNA (1)...(19): siRNA sense strand
aguaugaggugucccauga

SEQ ID NO: 373165 - RNA, 19 nt, Homo sapiens
  misc_RNA (1)...(19): siRNA sense strand
gaagagacgcaguuauaag

SEQ ID NO: 373166 - RNA, 19 nt, Homo sapiens
  misc_RNA (1)...(19): siRNA sense strand
gagacaaggccucuaaagu

SEQ ID NO: 373167 - RNA, 19 nt, Homo sapiens
  misc_RNA (1)...(19): siRNA sense strand
ggucugggauuacgacucu

SEQ ID NO: 373168 - RNA, 19 nt, Homo sapiens
  misc_RNA (1)...(19): siRNA sense strand
ccggaucccucccaaguau

SEQ ID NO: 373169 - RNA, 19 nt, Homo sapiens
  misc_RNA (1)...(19): siRNA sense strand
ugaggugucccaugacuuu

SEQ ID NO: 373170 - RNA, 19 nt, Homo sapiens
  misc_RNA (1)...(19): siRNA sense strand
gaggaaagcacgacuucau

SEQ ID NO: 373171 - RNA, 19 nt, Homo sapiens
  misc_RNA (1)...(19): siRNA sense strand
cgggaaagccucucaauac

SEQ ID NO: 373172 - RNA, 19 nt, Homo sapiens
  misc_RNA (1)...(19): siRNA sense strand
uuacgacucucgaggaaag

SEQ ID NO: 373173 - RNA, 19 nt, Homo sapiens
  misc_RNA (1)...(19): siRNA sense strand
agaagagacgcaguuauaa

SEQ ID NO: 373174 - RNA, 19 nt, Homo sapiens
  misc_RNA (1)...(19): siRNA sense strand
gcagaagagacgcaguuau

SEQ ID NO: 373175 - RNA, 19 nt, Homo sapiens
  misc_RNA (1)...(19): siRNA sense strand
ccaaauacaagcagaagag

SEQ ID NO: 373176 - RNA, 19 nt, Homo sapiens
  misc_RNA (1)...(19): siRNA sense strand
gcccgcugcugcucaaguu

SEQ ID NO: 373177 - RNA, 19 nt, Homo sapiens
  misc_RNA (1)...(19): siRNA sense strand
aagagacgcaguuauaaga

SEQ ID NO: 373178 - RNA, 19 nt, Homo sapiens
  misc_RNA (1)...(19): siRNA sense strand
ggacgacaaggaccucuuc

SEQ ID NO: 373179 - RNA, 19 nt, Homo sapiens
  misc_RNA (1)...(19): siRNA sense strand
gcuggcaaguccaccauca

SEQ ID NO: 373180 - RNA, 19 nt, Homo sapiens
  misc_RNA (1)...(19): siRNA sense strand
ggagacaaggccucuaaag

SEQ ID NO: 373181 - RNA, 19 nt, Homo sapiens
  misc_RNA (1)...(19): siRNA sense strand
gagacgcaguuauaagaac

SEQ ID NO: 373182 - RNA, 19 nt, Homo sapiens
  misc_RNA (1)...(19): siRNA sense strand
gcugucaggaggacgauuu

SEQ ID NO: 373183 - RNA, 19 nt, Homo sapiens
  misc_RNA (1)...(19): siRNA sense strand
ggaucccucccaaguauga

SEQ ID NO: 373184 - RNA, 19 nt, Homo sapiens
  misc_RNA (1)...(19): siRNA sense strand
uucaaagucucucugaguu

SEQ ID NO: 373185 - RNA, 19 nt, Homo sapiens
  misc_RNA (1)...(19): siRNA sense strand
ccgggaaagccucucaaua

SEQ ID NO: 373186 - RNA, 19 nt, Homo sapiens
  misc_RNA (1)...(19): siRNA sense strand
cgacuucaucggagaauuc

SEQ ID NO: 373187 - RNA, 19 nt, Homo sapiens
  misc_RNA (1)...(19): siRNA sense strand
ccuaccagccgaacgagua

SEQ ID NO: 373188 - RNA, 19 nt, Homo sapiens
  misc_RNA (1)...(19): siRNA sense strand
ugacuuugccaucaauuuc

SEQ ID NO: 373189 - RNA, 19 nt, Homo sapiens
  misc_RNA (1)...(19): siRNA sense strand
gcuugcagcugguguacag

SEQ ID NO: 373190 - RNA, 19 nt, Homo sapiens
  misc_RNA (1)...(19): siRNA sense strand
ggaguacuacagccacaga

SEQ ID NO: 373191 - RNA, 19 nt, Homo sapiens
  misc_RNA (1)...(19): siRNA sense strand
cggagguggugaagaacaa

SEQ ID NO: 373192 - RNA, 19 nt, Homo sapiens
  misc_RNA (1)...(19): siRNA sense strand
gcacgacuucaucggagaa

SEQ ID NO: 373193 - RNA, 19 nt, Homo sapiens
  misc_RNA (1)...(19): siRNA sense strand
caaauacaagcagaagaga

SEQ ID NO: 373194 - RNA, 19 nt, Homo sapiens
  misc_RNA (1)...(19): siRNA sense strand
gaggagagcaccgggaaag

SEQ ID NO: 373195 - RNA, 19 nt, Homo sapiens
  misc_RNA (1)...(19): siRNA sense strand
ugaggacgaugagugugaa

SEQ ID NO: 373196 - RNA, 19 nt, Homo sapiens
  misc_RNA (1)...(19): siRNA sense strand
cguccuggcugaccucaag

SEQ ID NO: 373197 - RNA, 19 nt, Homo sapiens
  misc_RNA (1)...(19): siRNA sense strand
ggacuaugacagugacaag

SEQ ID NO: 373198 - RNA, 19 nt, Homo sapiens
  misc_RNA (1)...(19): siRNA sense strand
gcugcucccugcacuacau

SEQ ID NO: 373199 - RNA, 19 nt, Homo sapiens
  misc_RNA (1)...(19): siRNA sense strand
ggugugggaggccuucaaa

SEQ ID NO: 373200 - RNA, 19 nt, Homo sapiens
  misc_RNA (1)...(19): siRNA sense strand
ccaugacuuugccaucaau

SEQ ID NO: 373201 - RNA, 19 nt, Homo sapiens
  misc_RNA (1)...(19): siRNA sense strand
ugacuucaccgccuccaau

SEQ ID NO: 373202 - RNA, 19 nt, Homo sapiens
  misc_RNA (1)...(19): siRNA sense strand
ugggaggccuucaaagucu

SEQ ID NO: 373203 - RNA, 19 nt, Homo sapiens
  misc_RNA (1)...(19): siRNA sense strand
cagccugcaucccguguuc

SEQ ID NO: 373204 - RNA, 19 nt, Homo sapiens
  misc_RNA (1)...(19): siRNA sense strand
uggcugaccucaaguucca

SEQ ID NO: 373205 - RNA, 19 nt, Homo sapiens
  misc_RNA (1)...(19): siRNA sense strand
acuccuuccuggacuauau

SEQ ID NO: 373206 - RNA, 19 nt, Homo sapiens
  misc_RNA (1)...(19): siRNA sense strand
ggcagauuguggcccagaa

SEQ ID NO: 373207 - RNA, 19 nt, Homo sapiens
  misc_RNA (1)...(19): siRNA sense strand
caagagguuuuccgcuuug

SEQ ID NO: 373208 - RNA, 19 nt, Homo sapiens
  misc_RNA (1)...(19): siRNA sense strand
ucccaugacuuugccauca

SEQ ID NO: 373209 - RNA, 19 nt, Homo sapiens
  misc_RNA (1)...(19): siRNA sense strand
ggaagcuggacgacaagga

SEQ ID NO: 373210 - RNA, 19 nt, Homo sapiens
  misc_RNA (1)...(19): siRNA sense strand
aaggaccucuucagcaagu

SEQ ID NO: 373211 - RNA, 19 nt, Homo sapiens
  misc_RNA (1)...(19): siRNA sense strand
gcaggaacgcuggcaaguc

SEQ ID NO: 373212 - RNA, 19 nt, Homo sapiens
  misc_RNA (1)...(19): siRNA sense strand
ggugaucgccgaggacauc

SEQ ID NO: 373213 - RNA, 19 nt, Homo sapiens
  misc_RNA (1)...(19): siRNA sense strand
ggagaugcagaaggccuuu

SEQ ID NO: 373214 - RNA, 19 nt, Homo sapiens
  misc_RNA (1)...(19): siRNA sense strand
aagcagaagagacgcaguu

SEQ ID NO: 373215 - RNA, 19 nt, Homo sapiens
  misc_RNA (1)...(19): siRNA sense strand
gcccauguccaucaucauc

SEQ ID NO: 373216 - RNA, 19 nt, Homo sapiens
  misc_RNA (1)...(19): siRNA sense strand
acaagagguuuuccgcuuu

SEQ ID NO: 373217 - RNA, 19 nt, Homo sapiens
  misc_RNA (1)...(19): siRNA sense strand
cgagaucugccaggacuau

SEQ ID NO: 373218 - RNA, 19 nt, Homo sapiens
  misc_RNA (1)...(19): siRNA sense strand
gugggaggccuucaaaguc

SEQ ID NO: 373219 - RNA, 19 nt, Homo sapiens
  misc_RNA (1)...(19): siRNA sense strand
aauacuacauccugcugau

SEQ ID NO: 373220 - RNA, 19 nt, Homo sapiens
  misc_RNA (1)...(19): siRNA sense strand
gcaccgggaaagccucuca

SEQ ID NO: 373221 - RNA, 19 nt, Homo sapiens
  misc_RNA (1)...(19): siRNA sense strand
cccaugacuuugccaucaa

SEQ ID NO: 373222 - RNA, 19 nt, Homo sapiens
  misc_RNA (1)...(19): siRNA sense strand
ucuucacgguggacuacua

SEQ ID NO: 373223 - RNA, 19 nt, Homo sapiens
  misc_RNA (1)...(19): siRNA sense strand
caccguggccauugacuuc

SEQ ID NO: 373224 - RNA, 19 nt, Homo sapiens
  misc_RNA (1)...(19): siRNA sense strand
ugacagugacaagagguuu

SEQ ID NO: 373225 - RNA, 19 nt, Homo sapiens
  misc_RNA (1)...(19): siRNA sense strand
gccaggacuaugacaguga

SEQ ID NO: 373226 - RNA, 19 nt, Homo sapiens
  misc_RNA (1)...(19): siRNA sense strand
ucaaagucucucugaguuc

SEQ ID NO: 373227 - RNA, 19 nt, Homo sapiens
  misc_RNA (1)...(19): siRNA sense strand
uccgggacaucguacaguu

SEQ ID NO: 373228 - RNA, 19 nt, Homo sapiens
  misc_RNA (1)...(19): siRNA sense strand
gguggaggccuaccagaac

SEQ ID NO: 373229 - RNA, 19 nt, Homo sapiens
  misc_RNA (1)...(19): siRNA sense strand
gacuuugccaucaauuuca

SEQ ID NO: 373230 - RNA, 19 nt, Homo sapiens
  misc_RNA (1)...(19): siRNA sense strand
uaugaggugucccaugacu

SEQ ID NO: 373231 - RNA, 19 nt, Homo sapiens
  misc_RNA (1)...(19): siRNA sense strand
ggacggagguggugaagaa

SEQ ID NO: 373232 - RNA, 19 nt, Homo sapiens
  misc_RNA (1)...(19): siRNA sense strand
cagaagagacgcaguuaua

SEQ ID NO: 373233 - RNA, 19 nt, Homo sapiens
  misc_RNA (1)...(19): siRNA sense strand
gaaagccucucaauacuac

SEQ ID NO: 373234 - RNA, 19 nt, Homo sapiens
  misc_RNA (1)...(19): siRNA sense strand
cgaagcaggugguggagua

SEQ ID NO: 373235 - RNA, 19 nt, Homo sapiens
  misc_RNA (1)...(19): siRNA sense strand
ggaaagccucucaauacua

SEQ ID NO: 373236 - RNA, 19 nt, Homo sapiens
  misc_RNA (1)...(19): siRNA sense strand
acaaggaccucuucagcaa

SEQ ID NO: 373237 - RNA, 19 nt, Homo sapiens
  misc_RNA (1)...(19): siRNA sense strand
gauuacgacucucgaggaa

SEQ ID NO: 373238 - RNA, 19 nt, Homo sapiens
  misc_RNA (1)...(19): siRNA sense strand
agacaaggccucuaaagug

SEQ ID NO: 373239 - RNA, 19 nt, Homo sapiens
  misc_RNA (1)...(19): siRNA sense strand
gggaaagccucucaauacu

SEQ ID NO: 373240 - RNA, 19 nt, Homo sapiens
  misc_RNA (1)...(19): siRNA sense strand
aguaugaggugucccauga

SEQ ID NO: 373241 - RNA, 19 nt, Homo sapiens
  misc_RNA (1)...(19): siRNA sense strand
gaagagacgcaguuauaag

SEQ ID NO: 373242 - RNA, 19 nt, Homo sapiens
  misc_RNA (1)...(19): siRNA sense strand
gagacaaggccucuaaagu

SEQ ID NO: 373243 - RNA, 19 nt, Homo sapiens
  misc_RNA (1)...(19): siRNA sense strand
ggucugggauuacgacucu

SEQ ID NO: 373244 - RNA, 19 nt, Homo sapiens
  misc_RNA (1)...(19): siRNA sense strand
ccggaucccucccaaguau

SEQ ID NO: 373245 - RNA, 19 nt, Homo sapiens
  misc_RNA (1)...(19): siRNA sense strand
ugaggugucccaugacuuu

SEQ ID NO: 373246 - RNA, 19 nt, Homo sapiens
  misc_RNA (1)...(19): siRNA sense strand
gaggaaagcacgacuucau

SEQ ID NO: 373247 - RNA, 19 nt, Homo sapiens
  misc_RNA (1)...(19): siRNA sense strand
cgggaaagccucucaauac

SEQ ID NO: 373248 - RNA, 19 nt, Homo sapiens
  misc_RNA (1)...(19): siRNA sense strand
uuacgacucucgaggaaag

SEQ ID NO: 373249 - RNA, 19 nt, Homo sapiens
  misc_RNA (1)...(19): siRNA sense strand
agaagagacgcaguuauaa

SEQ ID NO: 373250 - RNA, 19 nt, Homo sapiens
  misc_RNA (1)...(19): siRNA sense strand
gcagaagagacgcaguuau

SEQ ID NO: 373251 - RNA, 19 nt, Homo sapiens
  misc_RNA (1)...(19): siRNA sense strand
ccaaauacaagcagaagag

SEQ ID NO: 373252 - RNA, 19 nt, Homo sapiens
  misc_RNA (1)...(19): siRNA sense strand
gcccgcugcugcucaaguu

SEQ ID NO: 373253 - RNA, 19 nt, Homo sapiens
  misc_RNA (1)...(19): siRNA sense strand
aagagacgcaguuauaaga

SEQ ID NO: 373254 - RNA, 19 nt, Homo sapiens
  misc_RNA (1)...(19): siRNA sense strand
ggacgacaaggaccucuuc

SEQ ID NO: 373255 - RNA, 19 nt, Homo sapiens
  misc_RNA (1)...(19): siRNA sense strand
gcuggcaaguccaccauca

SEQ ID NO: 373256 - RNA, 19 nt, Homo sapiens
  misc_RNA (1)...(19): siRNA sense strand
ggagacaaggccucuaaag

SEQ ID NO: 373257 - RNA, 19 nt, Homo sapiens
  misc_RNA (1)...(19): siRNA sense strand
gagacgcaguuauaagaac

SEQ ID NO: 373258 - RNA, 19 nt, Homo sapiens
  misc_RNA (1)...(19): siRNA sense strand
gcugucaggaggacgauuu

SEQ ID NO: 373259 - RNA, 19 nt, Homo sapiens
  misc_RNA (1)...(19): siRNA sense strand
ggaucccucccaaguauga

SEQ ID NO: 373260 - RNA, 19 nt, Homo sapiens
  misc_RNA (1)...(19): siRNA sense strand
uucaaagucucucugaguu

SEQ ID NO: 373261 - RNA, 19 nt, Homo sapiens
  misc_RNA (1)...(19): siRNA sense strand
ccgggaaagccucucaaua

SEQ ID NO: 373262 - RNA, 19 nt, Homo sapiens
  misc_RNA (1)...(19): siRNA sense strand
cgacuucaucggagaauuc

SEQ ID NO: 373263 - RNA, 19 nt, Homo sapiens
  misc_RNA (1)...(19): siRNA sense strand
ccuaccagccgaacgagua

SEQ ID NO: 373264 - RNA, 19 nt, Homo sapiens
  misc_RNA (1)...(19): siRNA sense strand
ugacuuugccaucaauuuc

SEQ ID NO: 373265 - RNA, 19 nt, Homo sapiens
  misc_RNA (1)...(19): siRNA sense strand
gcuugcagcugguguacag

SEQ ID NO: 373266 - RNA, 19 nt, Homo sapiens
  misc_RNA (1)...(19): siRNA sense strand
ggaguacuacagccacaga

SEQ ID NO: 373267 - RNA, 19 nt, Homo sapiens
  misc_RNA (1)...(19): siRNA sense strand
cggagguggugaagaacaa

SEQ ID NO: 373268 - RNA, 19 nt, Homo sapiens
  misc_RNA (1)...(19): siRNA sense strand
gcacgacuucaucggagaa

SEQ ID NO: 373269 - RNA, 19 nt, Homo sapiens
  misc_RNA (1)...(19): siRNA sense strand
caaauacaagcagaagaga

SEQ ID NO: 373270 - RNA, 19 nt, Homo sapiens
  misc_RNA (1)...(19): siRNA sense strand
gaggagagcaccgggaaag

SEQ ID NO: 373271 - RNA, 19 nt, Homo sapiens
  misc_RNA (1)...(19): siRNA sense strand
ugaggacgaugagugugaa

SEQ ID NO: 373272 - RNA, 19 nt, Homo sapiens
  misc_RNA (1)...(19): siRNA sense strand
cguccuggcugaccucaag

SEQ ID NO: 373273 - RNA, 19 nt, Homo sapiens
  misc_RNA (1)...(19): siRNA sense strand
ggacuaugacagugacaag

SEQ ID NO: 373274 - RNA, 19 nt, Homo sapiens
  misc_RNA (1)...(19): siRNA sense strand
gcugcucccugcacuacau

SEQ ID NO: 373275 - RNA, 19 nt, Homo sapiens
  misc_RNA (1)...(19): siRNA sense strand
ggugugggaggccuucaaa

SEQ ID NO: 373276 - RNA, 19 nt, Homo sapiens
  misc_RNA (1)...(19): siRNA sense strand
ccaugacuuugccaucaau

SEQ ID NO: 373277 - RNA, 19 nt, Homo sapiens
  misc_RNA (1)...(19): siRNA sense strand
ugacuucaccgccuccaau

SEQ ID NO: 373278 - RNA, 19 nt, Homo sapiens
  misc_RNA (1)...(19): siRNA sense strand
ugggaggccuucaaagucu

SEQ ID NO: 373279 - RNA, 19 nt, Homo sapiens
  misc_RNA (1)...(19): siRNA sense strand
cagccugcaucccguguuc

SEQ ID NO: 373280 - RNA, 19 nt, Homo sapiens
  misc_RNA (1)...(19): siRNA sense strand
uggcugaccucaaguucca

SEQ ID NO: 373281 - RNA, 19 nt, Homo sapiens
  misc_RNA (1)...(19): siRNA sense strand
acuccuuccuggacuauau

SEQ ID NO: 373282 - RNA, 19 nt, Homo sapiens
  misc_RNA (1)...(19): siRNA sense strand
ggcagauuguggcccagaa

SEQ ID NO: 373283 - RNA, 19 nt, Homo sapiens
  misc_RNA (1)...(19): siRNA sense strand
caagagguuuuccgcuuug

SEQ ID NO: 373284 - RNA, 19 nt, Homo sapiens
  misc_RNA (1)...(19): siRNA sense strand
ucccaugacuuugccauca

SEQ ID NO: 373285 - RNA, 19 nt, Homo sapiens
  misc_RNA (1)...(19): siRNA sense strand
ggaagcuggacgacaagga

SEQ ID NO: 373286 - RNA, 19 nt, Homo sapiens
  misc_RNA (1)...(19): siRNA sense strand
aaggaccucuucagcaagu

SEQ ID NO: 373287 - RNA, 19 nt, Homo sapiens
  misc_RNA (1)...(19): siRNA sense strand
gcaggaacgcuggcaaguc

SEQ ID NO: 373288 - RNA, 19 nt, Homo sapiens
  misc_RNA (1)...(19): siRNA sense strand
ggugaucgccgaggacauc

SEQ ID NO: 373289 - RNA, 19 nt, Homo sapiens
  misc_RNA (1)...(19): siRNA sense strand
ggagaugcagaaggccuuu

SEQ ID NO: 373290 - RNA, 19 nt, Homo sapiens
  misc_RNA (1)...(19): siRNA sense strand
aagcagaagagacgcaguu

SEQ ID NO: 373291 - RNA, 19 nt, Homo sapiens
  misc_RNA (1)...(19): siRNA sense strand
gcccauguccaucaucauc

SEQ ID NO: 373292 - RNA, 19 nt, Homo sapiens
  misc_RNA (1)...(19): siRNA sense strand
acaagagguuuuccgcuuu

SEQ ID NO: 373293 - RNA, 19 nt, Homo sapiens
  misc_RNA (1)...(19): siRNA sense strand
cgagaucugccaggacuau

SEQ ID NO: 373294 - RNA, 19 nt, Homo sapiens
  misc_RNA (1)...(19): siRNA sense strand
gugggaggccuucaaaguc

SEQ ID NO: 373295 - RNA, 19 nt, Homo sapiens
  misc_RNA (1)...(19): siRNA sense strand
aauacuacauccugcugau

SEQ ID NO: 373296 - RNA, 19 nt, Homo sapiens
  misc_RNA (1)...(19): siRNA sense strand
gcaccgggaaagccucuca

SEQ ID NO: 373297 - RNA, 19 nt, Homo sapiens
  misc_RNA (1)...(19): siRNA sense strand
cccaugacuuugccaucaa

SEQ ID NO: 373298 - RNA, 19 nt, Homo sapiens
  misc_RNA (1)...(19): siRNA sense strand
ucuucacgguggacuacua

SEQ ID NO: 373299 - RNA, 19 nt, Homo sapiens
  misc_RNA (1)...(19): siRNA sense strand
caccguggccauugacuuc

SEQ ID NO: 373300 - RNA, 19 nt, Homo sapiens
  misc_RNA (1)...(19): siRNA sense strand
ugacagugacaagagguuu

SEQ ID NO: 373301 - RNA, 19 nt, Homo sapiens
  misc_RNA (1)...(19): siRNA sense strand
gccaggacuaugacaguga

SEQ ID NO: 373302 - RNA, 19 nt, Homo sapiens
  misc_RNA (1)...(19): siRNA sense strand
ucaaagucucucugaguuc

SEQ ID NO: 373303 - RNA, 19 nt, Homo sapiens
  misc_RNA (1)...(19): siRNA sense strand
uccgggacaucguacaguu

SEQ ID NO: 373304 - RNA, 19 nt, Homo sapiens
  misc_RNA (1)...(19): siRNA sense strand
gguggaggccuaccagaac

SEQ ID NO: 373305 - RNA, 19 nt, Homo sapiens
  misc_RNA (1)...(19): siRNA sense strand
gacuuugccaucaauuuca

SEQ ID NO: 373306 - RNA, 19 nt, Homo sapiens
  misc_RNA (1)...(19): siRNA sense strand
uaugaggugucccaugacu

SEQ ID NO: 373307 - RNA, 19 nt, Homo sapiens
  misc_RNA (1)...(19): siRNA sense strand
guacuuugcugguuauuua

SEQ ID NO: 373308 - RNA, 19 nt, Homo sapiens
  misc_RNA (1)...(19): siRNA sense strand
gaagucagauugcuaauau

SEQ ID NO: 373309 - RNA, 19 nt, Homo sapiens
  misc_RNA (1)...(19): siRNA sense strand
gaaagaagcacaaaucaaa

SEQ ID NO: 373310 - RNA, 19 nt, Homo sapiens
  misc_RNA (1)...(19): siRNA sense strand
ggaagaaccugcauuaagu

SEQ ID NO: 373311 - RNA, 19 nt, Homo sapiens
  misc_RNA (1)...(19): siRNA sense strand
gagagucggucauaaagua

SEQ ID NO: 373312 - RNA, 19 nt, Homo sapiens
  misc_RNA (1)...(19): siRNA sense strand
gaaccagaguuggauguua

SEQ ID NO: 373313 - RNA, 19 nt, Homo sapiens
  misc_RNA (1)...(19): siRNA sense strand
caaagaagauauacugaug

SEQ ID NO: 373314 - RNA, 19 nt, Homo sapiens
  misc_RNA (1)...(19): siRNA sense strand
acacaucuguucuguauuu

SEQ ID NO: 373315 - RNA, 19 nt, Homo sapiens
  misc_RNA (1)...(19): siRNA sense strand
uaagggagauucuucugua

SEQ ID NO: 373316 - RNA, 19 nt, Homo sapiens
  misc_RNA (1)...(19): siRNA sense strand
gcaaugauguucuagcaau

SEQ ID NO: 373317 - RNA, 19 nt, Homo sapiens
  misc_RNA (1)...(19): siRNA sense strand
caagaggaauacauaauga

SEQ ID NO: 373318 - RNA, 19 nt, Homo sapiens
  misc_RNA (1)...(19): siRNA sense strand
gggagauucuucuguauuu

SEQ ID NO: 373319 - RNA, 19 nt, Homo sapiens
  misc_RNA (1)...(19): siRNA sense strand
ccaaugcccucaugguuaa

SEQ ID NO: 373320 - RNA, 19 nt, Homo sapiens
  misc_RNA (1)...(19): siRNA sense strand
caagaacgcucucccuguu

SEQ ID NO: 373321 - RNA, 19 nt, Homo sapiens
  misc_RNA (1)...(19): siRNA sense strand
cuaaacaucuuugcuauug

SEQ ID NO: 373322 - RNA, 19 nt, Homo sapiens
  misc_RNA (1)...(19): siRNA sense strand
gacagaaccucuuuaucuu

SEQ ID NO: 373323 - RNA, 19 nt, Homo sapiens
  misc_RNA (1)...(19): siRNA sense strand
gaacacgagugauucagau

SEQ ID NO: 373324 - RNA, 19 nt, Homo sapiens
  misc_RNA (1)...(19): siRNA sense strand
gcugagagaucccagagaa

SEQ ID NO: 373325 - RNA, 19 nt, Homo sapiens
  misc_RNA (1)...(19): siRNA sense strand
aaacaggaauuucucaaug

SEQ ID NO: 373326 - RNA, 19 nt, Homo sapiens
  misc_RNA (1)...(19): siRNA sense strand
auacuuacaugguccaaua

SEQ ID NO: 373327 - RNA, 19 nt, Homo sapiens
  misc_RNA (1)...(19): siRNA sense strand
ggaaauugcaguccauuau

SEQ ID NO: 373328 - RNA, 19 nt, Homo sapiens
  misc_RNA (1)...(19): siRNA sense strand
gaauuuggauaccagaaug

SEQ ID NO: 373329 - RNA, 19 nt, Homo sapiens
  misc_RNA (1)...(19): siRNA sense strand
gaagaagcaguaaagauug

SEQ ID NO: 373330 - RNA, 19 nt, Homo sapiens
  misc_RNA (1)...(19): siRNA sense strand
gaaaagacuucggaaaauu

SEQ ID NO: 373331 - RNA, 19 nt, Homo sapiens
  misc_RNA (1)...(19): siRNA sense strand
gacauagacucccuuuaga

SEQ ID NO: 373332 - RNA, 19 nt, Homo sapiens
  misc_RNA (1)...(19): siRNA sense strand
gaaccugcauuaaguugug

SEQ ID NO: 373333 - RNA, 19 nt, Homo sapiens
  misc_RNA (1)...(19): siRNA sense strand
ggacacauagccagaguuu

SEQ ID NO: 373334 - RNA, 19 nt, Homo sapiens
  misc_RNA (1)...(19): siRNA sense strand
ggaaccaucccauaauaaa

SEQ ID NO: 373335 - RNA, 19 nt, Homo sapiens
  misc_RNA (1)...(19): siRNA sense strand
gaugauggauguggcauga

SEQ ID NO: 373336 - RNA, 19 nt, Homo sapiens
  misc_RNA (1)...(19): siRNA sense strand
aaacaguugucaucaggua

SEQ ID NO: 373337 - RNA, 19 nt, Homo sapiens
  misc_RNA (1)...(19): siRNA sense strand
aaagugggcucacaguuga

SEQ ID NO: 373338 - RNA, 19 nt, Homo sapiens
  misc_RNA (1)...(19): siRNA sense strand
ccagaaauuugcaauggaa

SEQ ID NO: 373339 - RNA, 19 nt, Homo sapiens
  misc_RNA (1)...(19): siRNA sense strand
ugaggaagcuucagacauc

SEQ ID NO: 373340 - RNA, 19 nt, Homo sapiens
  misc_RNA (1)...(19): siRNA sense strand
gccacagccucaauuuaua

SEQ ID NO: 373341 - RNA, 19 nt, Homo sapiens
  misc_RNA (1)...(19): siRNA sense strand
ugagaaaacugaagucuaa

SEQ ID NO: 373342 - RNA, 19 nt, Homo sapiens
  misc_RNA (1)...(19): siRNA sense strand
gaugagaacacgagugauu

SEQ ID NO: 373343 - RNA, 19 nt, Homo sapiens
  misc_RNA (1)...(19): siRNA sense strand
guagaggaauguaagguau

SEQ ID NO: 373344 - RNA, 19 nt, Homo sapiens
  misc_RNA (1)...(19): siRNA sense strand
gcgaugacuugaagcauga

SEQ ID NO: 373345 - RNA, 19 nt, Homo sapiens
  misc_RNA (1)...(19): siRNA sense strand
gagaaagagaagcaacuua

SEQ ID NO: 373346 - RNA, 19 nt, Homo sapiens
  misc_RNA (1)...(19): siRNA sense strand
ucuaaguucuggacacaua

SEQ ID NO: 373347 - RNA, 19 nt, Homo sapiens
  misc_RNA (1)...(19): siRNA sense strand
agaagaagcaguaaagauu

SEQ ID NO: 373348 - RNA, 19 nt, Homo sapiens
  misc_RNA (1)...(19): siRNA sense strand
gacugacacuuauuuagaa

SEQ ID NO: 373349 - RNA, 19 nt, Homo sapiens
  misc_RNA (1)...(19): siRNA sense strand
ggagcagacugacacuuau

SEQ ID NO: 373350 - RNA, 19 nt, Homo sapiens
  misc_RNA (1)...(19): siRNA sense strand
ugacagaaccucuuuaucu

SEQ ID NO: 373351 - RNA, 19 nt, Homo sapiens
  misc_RNA (1)...(19): siRNA sense strand
acagagagcuuuggaagau

SEQ ID NO: 373352 - RNA, 19 nt, Homo sapiens
  misc_RNA (1)...(19): siRNA sense strand
gcagacugacacuuauuua

SEQ ID NO: 373353 - RNA, 19 nt, Homo sapiens
  misc_RNA (1)...(19): siRNA sense strand
gaaagagaagcaacuuaga

SEQ ID NO: 373354 - RNA, 19 nt, Homo sapiens
  misc_RNA (1)...(19): siRNA sense strand
ccaagaguauaaucaucua

SEQ ID NO: 373355 - RNA, 19 nt, Homo sapiens
  misc_RNA (1)...(19): siRNA sense strand
gaagacaagccauggguau

SEQ ID NO: 373356 - RNA, 19 nt, Homo sapiens
  misc_RNA (1)...(19): siRNA sense strand
gaagggugccugaagaaug

SEQ ID NO: 373357 - RNA, 19 nt, Homo sapiens
  misc_RNA (1)...(19): siRNA sense strand
gaagcacaaaucaaaguaa

SEQ ID NO: 373358 - RNA, 19 nt, Homo sapiens
  misc_RNA (1)...(19): siRNA sense strand
guaauaaccguuugaucaa

SEQ ID NO: 373359 - RNA, 19 nt, Homo sapiens
  misc_RNA (1)...(19): siRNA sense strand
gcaguuugaugugaucuau

SEQ ID NO: 373360 - RNA, 19 nt, Homo sapiens
  misc_RNA (1)...(19): siRNA sense strand
aggauaagcugaagaaucu

SEQ ID NO: 373361 - RNA, 19 nt, Homo sapiens
  misc_RNA (1)...(19): siRNA sense strand
gaagaaccugcauuaaguu

SEQ ID NO: 373362 - RNA, 19 nt, Homo sapiens
  misc_RNA (1)...(19): siRNA sense strand
cacgagugauucagauaua

SEQ ID NO: 373363 - RNA, 19 nt, Homo sapiens
  misc_RNA (1)...(19): siRNA sense strand
cagaauugaugcagcaguu

SEQ ID NO: 373364 - RNA, 19 nt, Homo sapiens
  misc_RNA (1)...(19): siRNA sense strand
guggagaaaccuuuaaauu

SEQ ID NO: 373365 - RNA, 19 nt, Homo sapiens
  misc_RNA (1)...(19): siRNA sense strand
aaccagaguuggauguuaa

SEQ ID NO: 373366 - RNA, 19 nt, Homo sapiens
  misc_RNA (1)...(19): siRNA sense strand
cuucagacaucauuuacuu

SEQ ID NO: 373367 - RNA, 19 nt, Homo sapiens
  misc_RNA (1)...(19): siRNA sense strand
aagcacaccugucaaggaa

SEQ ID NO: 373368 - RNA, 19 nt, Homo sapiens
  misc_RNA (1)...(19): siRNA sense strand
gcagagaauuccaguagcu

SEQ ID NO: 373369 - RNA, 19 nt, Homo sapiens
  misc_RNA (1)...(19): siRNA sense strand
aagccaagcuggaauguuc

SEQ ID NO: 373370 - RNA, 19 nt, Homo sapiens
  misc_RNA (1)...(19): siRNA sense strand
aaaggagcauuuaaagaug

SEQ ID NO: 373371 - RNA, 19 nt, Homo sapiens
  misc_RNA (1)...(19): siRNA sense strand
gaguggcaguuguaaaguu

SEQ ID NO: 373372 - RNA, 19 nt, Homo sapiens
  misc_RNA (1)...(19): siRNA sense strand
cuacagacccagaaaguau

SEQ ID NO: 373373 - RNA, 19 nt, Homo sapiens
  misc_RNA (1)...(19): siRNA sense strand
cauagacucccuuuagaaa

SEQ ID NO: 373374 - RNA, 19 nt, Homo sapiens
  misc_RNA (1)...(19): siRNA sense strand
gcugugcaaugauguucua

SEQ ID NO: 373375 - RNA, 19 nt, Homo sapiens
  misc_RNA (1)...(19): siRNA sense strand
aauguaagguauugacuga

SEQ ID NO: 373376 - RNA, 19 nt, Homo sapiens
  misc_RNA (1)...(19): siRNA sense strand
caaugugaucuuugucuua

SEQ ID NO: 373377 - RNA, 19 nt, Homo sapiens
  misc_RNA (1)...(19): siRNA sense strand
aagaaacgaugaccugugu

SEQ ID NO: 373378 - RNA, 19 nt, Homo sapiens
  misc_RNA (1)...(19): siRNA sense strand
agacauagacucccuuuag

SEQ ID NO: 373379 - RNA, 19 nt, Homo sapiens
  misc_RNA (1)...(19): siRNA sense strand
gaaauugcaguccauuauc

SEQ ID NO: 373380 - RNA, 19 nt, Homo sapiens
  misc_RNA (1)...(19): siRNA sense strand
gauacagaauacuuacaug

SEQ ID NO: 373381 - RNA, 19 nt, Homo sapiens
  misc_RNA (1)...(19): siRNA sense strand
gcccagagcagaugaacaa

SEQ ID NO: 373382 - RNA, 19 nt, Homo sapiens
  misc_RNA (1)...(19): siRNA sense strand
guuguaaaguugcuucuuc

SEQ ID NO: 373383 - RNA, 19 nt, Homo sapiens
  misc_RNA (1)...(19): siRNA sense strand
gguauugacugaagaugag

SEQ ID NO: 373384 - RNA, 19 nt, Homo sapiens
  misc_RNA (1)...(19): siRNA sense strand
gaauccauauugaaagaag

SEQ ID NO: 373385 - RNA, 19 nt, Homo sapiens
  misc_RNA (1)...(19): siRNA sense strand
ugacaaagaagauauacug

SEQ ID NO: 373386 - RNA, 19 nt, Homo sapiens
  misc_RNA (1)...(19): siRNA sense strand
ccagcgagguggucauuca

SEQ ID NO: 373387 - RNA, 19 nt, Homo sapiens
  misc_RNA (1)...(19): siRNA sense strand
guauaaaacuggcacuauu

SEQ ID NO: 373388 - RNA, 19 nt, Homo sapiens
  misc_RNA (1)...(19): siRNA sense strand
gcacaccugucaaggaaac

SEQ ID NO: 373389 - RNA, 19 nt, Homo sapiens
  misc_RNA (1)...(19): siRNA sense strand
ggagagcucaaccaacuga

SEQ ID NO: 373390 - RNA, 19 nt, Homo sapiens
  misc_RNA (1)...(19): siRNA sense strand
gcaaugaauuuggauacca

SEQ ID NO: 373391 - RNA, 19 nt, Homo sapiens
  misc_RNA (1)...(19): siRNA sense strand
gacaccggcaucaauaaua

SEQ ID NO: 373392 - RNA, 19 nt, Homo sapiens
  misc_RNA (1)...(19): siRNA sense strand
gaaacgaugaccugugugu

SEQ ID NO: 373393 - RNA, 19 nt, Homo sapiens
  misc_RNA (1)...(19): siRNA sense strand
gaggauaagcugaagaauc

SEQ ID NO: 373394 - RNA, 19 nt, Homo sapiens
  misc_RNA (1)...(19): siRNA sense strand
gaaucucuuucauccuuug

SEQ ID NO: 373395 - RNA, 19 nt, Homo sapiens
  misc_RNA (1)...(19): siRNA sense strand
uggagaaaccuuuaaauuc

SEQ ID NO: 373396 - RNA, 19 nt, Homo sapiens
  misc_RNA (1)...(19): siRNA sense strand
guaaaccagugugacagaa

SEQ ID NO: 373397 - RNA, 19 nt, Homo sapiens
  misc_RNA (1)...(19): siRNA sense strand
cuggagcucuggaggauuu

SEQ ID NO: 373398 - RNA, 19 nt, Homo sapiens
  misc_RNA (1)...(19): siRNA sense strand
ucagauauaauccugguuu

SEQ ID NO: 373399 - RNA, 19 nt, Homo sapiens
  misc_RNA (1)...(19): siRNA sense strand
uggaagauguagaagcaaa

SEQ ID NO: 373400 - RNA, 19 nt, Homo sapiens
  misc_RNA (1)...(19): siRNA sense strand
ggaaaagcuugcucaaugu

SEQ ID NO: 373401 - RNA, 19 nt, Homo sapiens
  misc_RNA (1)...(19): siRNA sense strand
guaagguauugacugaaga

SEQ ID NO: 373402 - RNA, 19 nt, Homo sapiens
  misc_RNA (1)...(19): siRNA sense strand
ggguaucccauucaucaua

SEQ ID NO: 373403 - RNA, 19 nt, Homo sapiens
  misc_RNA (1)...(19): siRNA sense strand
ugugguacuuugcugguua

SEQ ID NO: 373404 - RNA, 19 nt, Homo sapiens
  misc_RNA (1)...(19): siRNA sense strand
uggagcagacugacacuua

SEQ ID NO: 373405 - RNA, 19 nt, Homo sapiens
  misc_RNA (1)...(19): siRNA sense strand
gcacuauuguugcagaaac

SEQ ID NO: 373406 - RNA, 19 nt, Homo sapiens
  misc_RNA (1)...(19): siRNA sense strand
agacaucauuuacuuugga

SEQ ID NO: 373407 - RNA, 19 nt, Homo sapiens
  misc_RNA (1)...(19): siRNA sense strand
caaauauacuccaaucuga

SEQ ID NO: 373408 - RNA, 19 nt, Homo sapiens
  misc_RNA (1)...(19): siRNA sense strand
agaaauggcugaauaaauc

SEQ ID NO: 373409 - RNA, 19 nt, Homo sapiens
  misc_RNA (1)...(19): siRNA sense strand
caaaagaaauggcugaaua

SEQ ID NO: 373410 - RNA, 19 nt, Homo sapiens
  misc_RNA (1)...(19): siRNA sense strand
aaaccuaucucaugcaauu

SEQ ID NO: 373411 - RNA, 19 nt, Homo sapiens
  misc_RNA (1)...(19): siRNA sense strand
gaagagaaauccagaagac

SEQ ID NO: 373412 - RNA, 19 nt, Homo sapiens
  misc_RNA (1)...(19): siRNA sense strand
caucagaguucaaggcuaa

SEQ ID NO: 373413 - RNA, 19 nt, Homo sapiens
  misc_RNA (1)...(19): siRNA sense strand
caacaaauauacuccaauc

SEQ ID NO: 373414 - RNA, 19 nt, Homo sapiens
  misc_RNA (1)...(19): siRNA sense strand
gcagaaauaucaauagaac

SEQ ID NO: 373415 - RNA, 19 nt, Homo sapiens
  misc_RNA (1)...(19): siRNA sense strand
aagaggaggugaaacauuu

SEQ ID NO: 373416 - RNA, 19 nt, Homo sapiens
  misc_RNA (1)...(19): siRNA sense strand
ccagagaaguggaagagaa

SEQ ID NO: 373417 - RNA, 19 nt, Homo sapiens
  misc_RNA (1)...(19): siRNA sense strand
gcuauuccaucuaccgaua

SEQ ID NO: 373418 - RNA, 19 nt, Homo sapiens
  misc_RNA (1)...(19): siRNA sense strand
ggugaaacauuuaggguau

SEQ ID NO: 373419 - RNA, 19 nt, Homo sapiens
  misc_RNA (1)...(19): siRNA sense strand
ugaagaauguccuacaaug

SEQ ID NO: 373420 - RNA, 19 nt, Homo sapiens
  misc_RNA (1)...(19): siRNA sense strand
acuccaaucugaaguauaa

SEQ ID NO: 373421 - RNA, 19 nt, Homo sapiens
  misc_RNA (1)...(19): siRNA sense strand
gcaaacaucaccuucuuau

SEQ ID NO: 373422 - RNA, 19 nt, Homo sapiens
  misc_RNA (1)...(19): siRNA sense strand
gagaaacacccagcaaauu

SEQ ID NO: 373423 - RNA, 19 nt, Homo sapiens
  misc_RNA (1)...(19): siRNA sense strand
gaaacacccagcaaauuug

SEQ ID NO: 373424 - RNA, 19 nt, Homo sapiens
  misc_RNA (1)...(19): siRNA sense strand
gaagaggaggugaaacauu

SEQ ID NO: 373425 - RNA, 19 nt, Homo sapiens
  misc_RNA (1)...(19): siRNA sense strand
agaaacacccagcaaauuu

SEQ ID NO: 373426 - RNA, 19 nt, Homo sapiens
  misc_RNA (1)...(19): siRNA sense strand
uaacgugucuguguugaau

SEQ ID NO: 373427 - RNA, 19 nt, Homo sapiens
  misc_RNA (1)...(19): siRNA sense strand
gaaaguggacgguucuauc

SEQ ID NO: 373428 - RNA, 19 nt, Homo sapiens
  misc_RNA (1)...(19): siRNA sense strand
cagaaccacugacauuugu

SEQ ID NO: 373429 - RNA, 19 nt, Homo sapiens
  misc_RNA (1)...(19): siRNA sense strand
ugaaacuucugacuacgaa

SEQ ID NO: 373430 - RNA, 19 nt, Homo sapiens
  misc_RNA (1)...(19): siRNA sense strand
caugaagaauguccuacaa

SEQ ID NO: 373431 - RNA, 19 nt, Homo sapiens
  misc_RNA (1)...(19): siRNA sense strand
gaacguggucccagugugu

SEQ ID NO: 373432 - RNA, 19 nt, Homo sapiens
  misc_RNA (1)...(19): siRNA sense strand
cuucaaggaguuaaaguua

SEQ ID NO: 373433 - RNA, 19 nt, Homo sapiens
  misc_RNA (1)...(19): siRNA sense strand
gguuauaugugcagaugga

SEQ ID NO: 373434 - RNA, 19 nt, Homo sapiens
  misc_RNA (1)...(19): siRNA sense strand
aaagaucaaucaucagagu

SEQ ID NO: 373435 - RNA, 19 nt, Homo sapiens
  misc_RNA (1)...(19): siRNA sense strand
ugaaagaucaaucaucaga

SEQ ID NO: 373436 - RNA, 19 nt, Homo sapiens
  misc_RNA (1)...(19): siRNA sense strand
gaagaauguccuacaaugg

SEQ ID NO: 373437 - RNA, 19 nt, Homo sapiens
  misc_RNA (1)...(19): siRNA sense strand
aaacguuacaguacucaua

SEQ ID NO: 373438 - RNA, 19 nt, Homo sapiens
  misc_RNA (1)...(19): siRNA sense strand
ccaguauuaugccaaaguu

SEQ ID NO: 373439 - RNA, 19 nt, Homo sapiens
  misc_RNA (1)...(19): siRNA sense strand
gaaauggcugaauaaauca

SEQ ID NO: 373440 - RNA, 19 nt, Homo sapiens
  misc_RNA (1)...(19): siRNA sense strand
ugaaaccuaucucaugcaa

SEQ ID NO: 373441 - RNA, 19 nt, Homo sapiens
  misc_RNA (1)...(19): siRNA sense strand
caaacuggcaggcugugua

SEQ ID NO: 373442 - RNA, 19 nt, Homo sapiens
  misc_RNA (1)...(19): siRNA sense strand
uaucucggaugauucuaaa

SEQ ID NO: 373443 - RNA, 19 nt, Homo sapiens
  misc_RNA (1)...(19): siRNA sense strand
ucuauuaccguguuucuuu

SEQ ID NO: 373444 - RNA, 19 nt, Homo sapiens
  misc_RNA (1)...(19): siRNA sense strand
ggaagagaaauccagaaga

SEQ ID NO: 373445 - RNA, 19 nt, Homo sapiens
  misc_RNA (1)...(19): siRNA sense strand
gccuaaaccugcaaacauc

SEQ ID NO: 373446 - RNA, 19 nt, Homo sapiens
  misc_RNA (1)...(19): siRNA sense strand
agugauguauccagccuua

SEQ ID NO: 373447 - RNA, 19 nt, Homo sapiens
  misc_RNA (1)...(19): siRNA sense strand
caauagaaccuacugugau

SEQ ID NO: 373448 - RNA, 19 nt, Homo sapiens
  misc_RNA (1)...(19): siRNA sense strand
gaggagggucuucuaucua

SEQ ID NO: 373449 - RNA, 19 nt, Homo sapiens
  misc_RNA (1)...(19): siRNA sense strand
ggaggaagaggaggugaaa

SEQ ID NO: 373450 - RNA, 19 nt, Homo sapiens
  misc_RNA (1)...(19): siRNA sense strand
ucaauagaaccuacuguga

SEQ ID NO: 373451 - RNA, 19 nt, Homo sapiens
  misc_RNA (1)...(19): siRNA sense strand
ggagaggagggucuucuau

SEQ ID NO: 373452 - RNA, 19 nt, Homo sapiens
  misc_RNA (1)...(19): siRNA sense strand
cucaauaucucggaugauu

SEQ ID NO: 373453 - RNA, 19 nt, Homo sapiens
  misc_RNA (1)...(19): siRNA sense strand
acuacgaacaccaguauua

SEQ ID NO: 373454 - RNA, 19 nt, Homo sapiens
  misc_RNA (1)...(19): siRNA sense strand
ucagaaugcagaaauauca

SEQ ID NO: 373455 - RNA, 19 nt, Homo sapiens
  misc_RNA (1)...(19): siRNA sense strand
aauagaaccuacugugauc

SEQ ID NO: 373456 - RNA, 19 nt, Homo sapiens
  misc_RNA (1)...(19): siRNA sense strand
ccugacagcuccagagaag

SEQ ID NO: 373457 - RNA, 19 nt, Homo sapiens
  misc_RNA (1)...(19): siRNA sense strand
caagagucccucagcagaa

SEQ ID NO: 373458 - RNA, 19 nt, Homo sapiens
  misc_RNA (1)...(19): siRNA sense strand
gaagaaaacacggaaggua

SEQ ID NO: 373459 - RNA, 19 nt, Homo sapiens
  misc_RNA (1)...(19): siRNA sense strand
ugucuguguugaauacuaa

SEQ ID NO: 373460 - RNA, 19 nt, Homo sapiens
  misc_RNA (1)...(19): siRNA sense strand
gaaguccauuucuguuguc

SEQ ID NO: 373461 - RNA, 19 nt, Homo sapiens
  misc_RNA (1)...(19): siRNA sense strand
gaucaaucaucagaguuca

SEQ ID NO: 373462 - RNA, 19 nt, Homo sapiens
  misc_RNA (1)...(19): siRNA sense strand
acaccaguauuaugccaaa

SEQ ID NO: 373463 - RNA, 19 nt, Homo sapiens
  misc_RNA (1)...(19): siRNA sense strand
cugcaaacaucaccuucuu

SEQ ID NO: 373464 - RNA, 19 nt, Homo sapiens
  misc_RNA (1)...(19): siRNA sense strand
gaaccuacugugaucuuuc

SEQ ID NO: 373465 - RNA, 19 nt, Homo sapiens
  misc_RNA (1)...(19): siRNA sense strand
guccacacaaggaacauua

SEQ ID NO: 373466 - RNA, 19 nt, Homo sapiens
  misc_RNA (1)...(19): siRNA sense strand
cagagaaguggaagagaaa

SEQ ID NO: 373467 - RNA, 19 nt, Homo sapiens
  misc_RNA (1)...(19): siRNA sense strand
cagaugagaaguccauuuc

SEQ ID NO: 373468 - RNA, 19 nt, Homo sapiens
  misc_RNA (1)...(19): siRNA sense strand
guggacgguucuauccuuu

SEQ ID NO: 373469 - RNA, 19 nt, Homo sapiens
  misc_RNA (1)...(19): siRNA sense strand
aaacaucaccuucuuaucc

SEQ ID NO: 373470 - RNA, 19 nt, Homo sapiens
  misc_RNA (1)...(19): siRNA sense strand
agaggagggucuucuaucu

SEQ ID NO: 373471 - RNA, 19 nt, Homo sapiens
  misc_RNA (1)...(19): siRNA sense strand
ccacacaaggaacauuauu

SEQ ID NO: 373472 - RNA, 19 nt, Homo sapiens
  misc_RNA (1)...(19): siRNA sense strand
ucaaggaguuaaaguuacu

SEQ ID NO: 373473 - RNA, 19 nt, Homo sapiens
  misc_RNA (1)...(19): siRNA sense strand
cuaccgauauauccacguu

SEQ ID NO: 373474 - RNA, 19 nt, Homo sapiens
  misc_RNA (1)...(19): siRNA sense strand
acaaauauacuccaaucug

SEQ ID NO: 373475 - RNA, 19 nt, Homo sapiens
  misc_RNA (1)...(19): siRNA sense strand
gaaaaugaaaccuaucuca

SEQ ID NO: 373476 - RNA, 19 nt, Homo sapiens
  misc_RNA (1)...(19): siRNA sense strand
gugcaguauuucauauaug

SEQ ID NO: 373477 - RNA, 19 nt, Homo sapiens
  misc_RNA (1)...(19): siRNA sense strand
uauuccaucuaccgauaua

SEQ ID NO: 373478 - RNA, 19 nt, Homo sapiens
  misc_RNA (1)...(19): siRNA sense strand
ugacuacgaacaccaguau

SEQ ID NO: 373479 - RNA, 19 nt, Homo sapiens
  misc_RNA (1)...(19): siRNA sense strand
gagaggagggucuucuauc

SEQ ID NO: 373480 - RNA, 19 nt, Homo sapiens
  misc_RNA (1)...(19): siRNA sense strand
gagaaauccagaagaccuu

SEQ ID NO: 373481 - RNA, 19 nt, Homo sapiens
  misc_RNA (1)...(19): siRNA sense strand
ugacagcuccagagaagug

SEQ ID NO: 373482 - RNA, 19 nt, Homo sapiens
  misc_RNA (1)...(19): siRNA sense strand
aaacacccagcaaauuuga

SEQ ID NO: 373483 - RNA, 19 nt, Homo sapiens
  misc_RNA (1)...(19): siRNA sense strand
ugaaguauaacgugucugu

SEQ ID NO: 373484 - RNA, 19 nt, Homo sapiens
  misc_RNA (1)...(19): siRNA sense strand
aaaaucaucuucugguaug

SEQ ID NO: 373485 - RNA, 19 nt, Homo sapiens
  misc_RNA (1)...(19): siRNA sense strand
aguauaacgugucuguguu

SEQ ID NO: 373486 - RNA, 19 nt, Homo sapiens
  misc_RNA (1)...(19): siRNA sense strand
gcaacaaauauacuccaau

SEQ ID NO: 373487 - RNA, 19 nt, Homo sapiens
  misc_RNA (1)...(19): siRNA sense strand
aggagggucuucuaucuag

SEQ ID NO: 373488 - RNA, 19 nt, Homo sapiens
  misc_RNA (1)...(19): siRNA sense strand
ggcaggcuguguauuccuu

SEQ ID NO: 373489 - RNA, 19 nt, Homo sapiens
  misc_RNA (1)...(19): siRNA sense strand
ggauaaaacagucauugaa

SEQ ID NO: 373490 - RNA, 19 nt, Homo sapiens
  misc_RNA (1)...(19): siRNA sense strand
gauguauccagccuuaaug

SEQ ID NO: 373491 - RNA, 19 nt, Homo sapiens
  misc_RNA (1)...(19): siRNA sense strand
aagaauguccuacaaugga

SEQ ID NO: 373492 - RNA, 19 nt, Homo sapiens
  misc_RNA (1)...(19): siRNA sense strand
agagaaacacccagcaaau

SEQ ID NO: 373493 - RNA, 19 nt, Homo sapiens
  misc_RNA (1)...(19): siRNA sense strand
guauaacgugucuguguug

SEQ ID NO: 373494 - RNA, 19 nt, Homo sapiens
  misc_RNA (1)...(19): siRNA sense strand
gcccgcaaacguuacagua

SEQ ID NO: 373495 - RNA, 19 nt, Homo sapiens
  misc_RNA (1)...(19): siRNA sense strand
gcacugacuacagaugaga

SEQ ID NO: 373496 - RNA, 19 nt, Homo sapiens
  misc_RNA (1)...(19): siRNA sense strand
caauaucucggaugauucu

SEQ ID NO: 373497 - RNA, 19 nt, Homo sapiens
  misc_RNA (1)...(19): siRNA sense strand
ccacguuggcaaagagaaa

SEQ ID NO: 373498 - RNA, 19 nt, Homo sapiens
  misc_RNA (1)...(19): siRNA sense strand
cuaaaaucaucuucuggua

SEQ ID NO: 373499 - RNA, 19 nt, Homo sapiens
  misc_RNA (1)...(19): siRNA sense strand
gacgggcaguucccugugu

SEQ ID NO: 373500 - RNA, 19 nt, Homo sapiens
  misc_RNA (1)...(19): siRNA sense strand
uauaacgugucuguguuga

SEQ ID NO: 373501 - RNA, 19 nt, Homo sapiens
  misc_RNA (1)...(19): siRNA sense strand
ucuuauccaucaacaugaa

SEQ ID NO: 373502 - RNA, 19 nt, Homo sapiens
  misc_RNA (1)...(19): siRNA sense strand
ccgcaaacguuacaguacu

SEQ ID NO: 373503 - RNA, 19 nt, Homo sapiens
  misc_RNA (1)...(19): siRNA sense strand
aagagaaacacccagcaaa

SEQ ID NO: 373504 - RNA, 19 nt, Homo sapiens
  misc_RNA (1)...(19): siRNA sense strand
gcguacacguggaguccuu

SEQ ID NO: 373505 - RNA, 19 nt, Homo sapiens
  misc_RNA (1)...(19): siRNA sense strand
gugucuguguugaauacua

SEQ ID NO: 373506 - RNA, 19 nt, Homo sapiens
  misc_RNA (1)...(19): siRNA sense strand
cuacgaacaccaguauuau

SEQ ID NO: 373507 - RNA, 19 nt, Homo sapiens
  misc_RNA (1)...(19): siRNA sense strand
ccauggagguggagacuua

SEQ ID NO: 373508 - RNA, 19 nt, Homo sapiens
  misc_RNA (1)...(19): siRNA sense strand
agaaacaggugugucauuu

SEQ ID NO: 373509 - RNA, 19 nt, Homo sapiens
  misc_RNA (1)...(19): siRNA sense strand
ucaaguggccgaagccuua

SEQ ID NO: 373510 - RNA, 19 nt, Homo sapiens
  misc_RNA (1)...(19): siRNA sense strand
ccuuggagcuucccauuaa

SEQ ID NO: 373511 - RNA, 19 nt, Homo sapiens
  misc_RNA (1)...(19): siRNA sense strand
gcaagaaacagguguguca

SEQ ID NO: 373512 - RNA, 19 nt, Homo sapiens
  misc_RNA (1)...(19): siRNA sense strand
uggagaaccugaaagcuuu

SEQ ID NO: 373513 - RNA, 19 nt, Homo sapiens
  misc_RNA (1)...(19): siRNA sense strand
gcagauacgccuuucuaga

SEQ ID NO: 373514 - RNA, 19 nt, Homo sapiens
  misc_RNA (1)...(19): siRNA sense strand
ugaaagcuuugcugaagga

SEQ ID NO: 373515 - RNA, 19 nt, Homo sapiens
  misc_RNA (1)...(19): siRNA sense strand
gggcagauacgccuuucua

SEQ ID NO: 373516 - RNA, 19 nt, Homo sapiens
  misc_RNA (1)...(19): siRNA sense strand
aggaggagcugcagucaga

SEQ ID NO: 373517 - RNA, 19 nt, Homo sapiens
  misc_RNA (1)...(19): siRNA sense strand
agacgcacgugcccacuuu

SEQ ID NO: 373518 - RNA, 19 nt, Homo sapiens
  misc_RNA (1)...(19): siRNA sense strand
caagagaucaucagcaaag

SEQ ID NO: 373519 - RNA, 19 nt, Homo sapiens
  misc_RNA (1)...(19): siRNA sense strand
cuacaaggccaugaacaua

SEQ ID NO: 373520 - RNA, 19 nt, Homo sapiens
  misc_RNA (1)...(19): siRNA sense strand
cccaagagaucaucagcaa

SEQ ID NO: 373521 - RNA, 19 nt, Homo sapiens
  misc_RNA (1)...(19): siRNA sense strand
uggagcaugugaagucuaa

SEQ ID NO: 373522 - RNA, 19 nt, Homo sapiens
  misc_RNA (1)...(19): siRNA sense strand
gagcuucccauuaacauca

SEQ ID NO: 373523 - RNA, 19 nt, Homo sapiens
  misc_RNA (1)...(19): siRNA sense strand
gcuccuuaaugucagcaua

SEQ ID NO: 373524 - RNA, 19 nt, Homo sapiens
  misc_RNA (1)...(19): siRNA sense strand
ccugaaagcuuugcugaag

SEQ ID NO: 373525 - RNA, 19 nt, Homo sapiens
  misc_RNA (1)...(19): siRNA sense strand
gcugaaggauagcaacagu

SEQ ID NO: 373526 - RNA, 19 nt, Homo sapiens
  misc_RNA (1)...(19): siRNA sense strand
aagcuuugcugaaggauag

SEQ ID NO: 373527 - RNA, 19 nt, Homo sapiens
  misc_RNA (1)...(19): siRNA sense strand
aaacaggugugucauuuug

SEQ ID NO: 373528 - RNA, 19 nt, Homo sapiens
  misc_RNA (1)...(19): siRNA sense strand
ugaaggauagcaacaguau

SEQ ID NO: 373529 - RNA, 19 nt, Homo sapiens
  misc_RNA (1)...(19): siRNA sense strand
gccauagcgugggcagaua

SEQ ID NO: 373530 - RNA, 19 nt, Homo sapiens
  misc_RNA (1)...(19): siRNA sense strand
caucaaugccacccagauu

SEQ ID NO: 373531 - RNA, 19 nt, Homo sapiens
  misc_RNA (1)...(19): siRNA sense strand
ggccuugugugaccucaug

SEQ ID NO: 373532 - RNA, 19 nt, Homo sapiens
  misc_RNA (1)...(19): siRNA sense strand
cccgugcgcuccuuaaugu

SEQ ID NO: 373533 - RNA, 19 nt, Homo sapiens
  misc_RNA (1)...(19): siRNA sense strand
cagauacgccuuucuagag

SEQ ID NO: 373534 - RNA, 19 nt, Homo sapiens
  misc_RNA (1)...(19): siRNA sense strand
uguccuuccugcugaauga

SEQ ID NO: 373535 - RNA, 19 nt, Homo sapiens
  misc_RNA (1)...(19): siRNA sense strand
gauguucgccacagugauc

SEQ ID NO: 373536 - RNA, 19 nt, Homo sapiens
  misc_RNA (1)...(19): siRNA sense strand
cagcaaaggucugauuucc

SEQ ID NO: 373537 - RNA, 19 nt, Homo sapiens
  misc_RNA (1)...(19): siRNA sense strand
ggagguggagacuuacgaa

SEQ ID NO: 373538 - RNA, 19 nt, Homo sapiens
  misc_RNA (1)...(19): siRNA sense strand
gaaggaggagcugcaguca

SEQ ID NO: 373539 - RNA, 19 nt, Homo sapiens
  misc_RNA (1)...(19): siRNA sense strand
aggaggaguuccaggaguu

SEQ ID NO: 373540 - RNA, 19 nt, Homo sapiens
  misc_RNA (1)...(19): siRNA sense strand
ccaugaacauaggcuguau

SEQ ID NO: 373541 - RNA, 19 nt, Homo sapiens
  misc_RNA (1)...(19): siRNA sense strand
gaaacaggugugucauuuu

SEQ ID NO: 373542 - RNA, 19 nt, Homo sapiens
  misc_RNA (1)...(19): siRNA sense strand
gaaagacccaguggagcau

SEQ ID NO: 373543 - RNA, 19 nt, Homo sapiens
  misc_RNA (1)...(19): siRNA sense strand
ccaucagugucaucgaguu

SEQ ID NO: 373544 - RNA, 19 nt, Homo sapiens
  misc_RNA (1)...(19): siRNA sense strand
acaaggccaugaacauagg

SEQ ID NO: 373545 - RNA, 19 nt, Homo sapiens
  misc_RNA (1)...(19): siRNA sense strand
gagguggagacuuacgaaa

SEQ ID NO: 373546 - RNA, 19 nt, Homo sapiens
  misc_RNA (1)...(19): siRNA sense strand
aagaaacaggugugucauu

SEQ ID NO: 373547 - RNA, 19 nt, Homo sapiens
  misc_RNA (1)...(19): siRNA sense strand
cugauuuccucacugguau

SEQ ID NO: 373548 - RNA, 19 nt, Homo sapiens
  misc_RNA (1)...(19): siRNA sense strand
gaaggauagcaacaguaug

SEQ ID NO: 373549 - RNA, 19 nt, Homo sapiens
  misc_RNA (1)...(19): siRNA sense strand
gccaugaacauaggcugua

SEQ ID NO: 373550 - RNA, 19 nt, Homo sapiens
  misc_RNA (1)...(19): siRNA sense strand
ggagaaccugaaagcuuug

SEQ ID NO: 373551 - RNA, 19 nt, Homo sapiens
  misc_RNA (1)...(19): siRNA sense strand
ucagugucaucgaguucaa

SEQ ID NO: 373552 - RNA, 19 nt, Homo sapiens
  misc_RNA (1)...(19): siRNA sense strand
ucugauuuccucacuggua

SEQ ID NO: 373553 - RNA, 19 nt, Homo sapiens
  misc_RNA (1)...(19): siRNA sense strand
aaggauagcaacaguaugg

SEQ ID NO: 373554 - RNA, 19 nt, Homo sapiens
  misc_RNA (1)...(19): siRNA sense strand
ccagauuaccacugccuau

SEQ ID NO: 373555 - RNA, 19 nt, Homo sapiens
  misc_RNA (1)...(19): siRNA sense strand
ggaaccuguacaaggcaua

SEQ ID NO: 373556 - RNA, 19 nt, Homo sapiens
  misc_RNA (1)...(19): siRNA sense strand
gguggagacuuacgaaaag

SEQ ID NO: 373557 - RNA, 19 nt, Homo sapiens
  misc_RNA (1)...(19): siRNA sense strand
ucacugaagggaaguaugc

SEQ ID NO: 373558 - RNA, 19 nt, Homo sapiens
  misc_RNA (1)...(19): siRNA sense strand
ccaagagaucaucagcaaa

SEQ ID NO: 373559 - RNA, 19 nt, Homo sapiens
  misc_RNA (1)...(19): siRNA sense strand
aucaaugccacccagauua

SEQ ID NO: 373560 - RNA, 19 nt, Homo sapiens
  misc_RNA (1)...(19): siRNA sense strand
gcccgugcgcuccuuaaug

SEQ ID NO: 373561 - RNA, 19 nt, Homo sapiens
  misc_RNA (1)...(19): siRNA sense strand
ugguccaucugcugaaaga

SEQ ID NO: 373562 - RNA, 19 nt, Homo sapiens
  misc_RNA (1)...(19): siRNA sense strand
uacaaggccaugaacauag

SEQ ID NO: 373563 - RNA, 19 nt, Homo sapiens
  misc_RNA (1)...(19): siRNA sense strand
gaucacugaagggaaguau

SEQ ID NO: 373564 - RNA, 19 nt, Homo sapiens
  misc_RNA (1)...(19): siRNA sense strand
caguggagcaugugaaguc

SEQ ID NO: 373565 - RNA, 19 nt, Homo sapiens
  misc_RNA (1)...(19): siRNA sense strand
ccugguccaucugcugaaa

SEQ ID NO: 373566 - RNA, 19 nt, Homo sapiens
  misc_RNA (1)...(19): siRNA sense strand
gaggaccgcuauccacaga

SEQ ID NO: 373567 - RNA, 19 nt, Homo sapiens
  misc_RNA (1)...(19): siRNA sense strand
ugaccuggcugcacacaug

SEQ ID NO: 373568 - RNA, 19 nt, Homo sapiens
  misc_RNA (1)...(19): siRNA sense strand
ggaccgcuauccacagaag

SEQ ID NO: 373569 - RNA, 19 nt, Homo sapiens
  misc_RNA (1)...(19): siRNA sense strand
gugcagaggcuguaucgau

SEQ ID NO: 373570 - RNA, 19 nt, Homo sapiens
  misc_RNA (1)...(19): siRNA sense strand
cgagacagcugcgcucaac

SEQ ID NO: 373571 - RNA, 19 nt, Homo sapiens
  misc_RNA (1)...(19): siRNA sense strand
cuacucggcugaggaacug

SEQ ID NO: 373572 - RNA, 19 nt, Homo sapiens
  misc_RNA (1)...(19): siRNA sense strand
ugagagaguccacuacuua

SEQ ID NO: 373573 - RNA, 19 nt, Homo sapiens
  misc_RNA (1)...(19): siRNA sense strand
gagcagagccguuggacuu

SEQ ID NO: 373574 - RNA, 19 nt, Homo sapiens
  misc_RNA (1)...(19): siRNA sense strand
ggacuuccuuugggacuaa

SEQ ID NO: 373575 - RNA, 19 nt, Homo sapiens
  misc_RNA (1)...(19): siRNA sense strand
gggaggagaucaccaccuu

SEQ ID NO: 373576 - RNA, 19 nt, Homo sapiens
  misc_RNA (1)...(19): siRNA sense strand
agacaaacaucuucucuac

SEQ ID NO: 373577 - RNA, 19 nt, Homo sapiens
  misc_RNA (1)...(19): siRNA sense strand
gggccgaguuugcaaaguu

SEQ ID NO: 373578 - RNA, 19 nt, Homo sapiens
  misc_RNA (1)...(19): siRNA sense strand
ggacgaggaggacgaggaa

SEQ ID NO: 373579 - RNA, 19 nt, Homo sapiens
  misc_RNA (1)...(19): siRNA sense strand
gaggagaucaccaccuuca

SEQ ID NO: 373580 - RNA, 19 nt, Homo sapiens
  misc_RNA (1)...(19): siRNA sense strand
ggagaucaccaccuucauc

SEQ ID NO: 373581 - RNA, 19 nt, Homo sapiens
  misc_RNA (1)...(19): siRNA sense strand
caucaugucugaggaggau

SEQ ID NO: 373582 - RNA, 19 nt, Homo sapiens
  misc_RNA (1)...(19): siRNA sense strand
gaucaccaccuucaucgau

SEQ ID NO: 373583 - RNA, 19 nt, Homo sapiens
  misc_RNA (1)...(19): siRNA sense strand
gcucuucccuccucuugag

SEQ ID NO: 373584 - RNA, 19 nt, Homo sapiens
  misc_RNA (1)...(19): siRNA sense strand
ggccagccuucgccaauuc

SEQ ID NO: 373585 - RNA, 19 nt, Homo sapiens
  misc_RNA (1)...(19): siRNA sense strand
gcaaugcguggccaucaug

SEQ ID NO: 373586 - RNA, 19 nt, Homo sapiens
  misc_RNA (1)...(19): siRNA sense strand
gcguggccaucaugucuga

SEQ ID NO: 373587 - RNA, 19 nt, Homo sapiens
  misc_RNA (1)...(19): siRNA sense strand
gcuccuuccugcacaagug

SEQ ID NO: 373588 - RNA, 19 nt, Homo sapiens
  misc_RNA (1)...(19): siRNA sense strand
gcagagggccgaguuugca

SEQ ID NO: 373589 - RNA, 19 nt, Homo sapiens
  misc_RNA (1)...(19): siRNA sense strand
ggccgaguuugcaaaguuc

SEQ ID NO: 373590 - RNA, 19 nt, Homo sapiens
  misc_RNA (1)...(19): siRNA sense strand
cggcgucugucccaugaug

SEQ ID NO: 373591 - RNA, 19 nt, Homo sapiens
  misc_RNA (1)...(19): siRNA sense strand
gagcaaugcguggccauca

SEQ ID NO: 373592 - RNA, 19 nt, Homo sapiens
  misc_RNA (1)...(19): siRNA sense strand
gugaagcugcugccuggaa

SEQ ID NO: 373593 - RNA, 19 nt, Homo sapiens
  misc_RNA (1)...(19): siRNA sense strand
ggacgaggaagaggcugaa

SEQ ID NO: 373594 - RNA, 19 nt, Homo sapiens
  misc_RNA (1)...(19): siRNA sense strand
gagagaguccacuacuuac

SEQ ID NO: 373595 - RNA, 19 nt, Homo sapiens
  misc_RNA (1)...(19): siRNA sense strand
gagaguccacuacuuacag

SEQ ID NO: 373596 - RNA, 19 nt, Homo sapiens
  misc_RNA (1)...(19): siRNA sense strand
cgaggaagaggcugaaggu

SEQ ID NO: 373597 - RNA, 19 nt, Homo sapiens
  misc_RNA (1)...(19): siRNA sense strand
ugagacaccucugccuucu

SEQ ID NO: 373598 - RNA, 19 nt, Homo sapiens
  misc_RNA (1)...(19): siRNA sense strand
ugaggaggauggagaugac

SEQ ID NO: 373599 - RNA, 19 nt, Homo sapiens
  misc_RNA (1)...(19): siRNA sense strand
uugagagaguccacuacuu

SEQ ID NO: 373600 - RNA, 19 nt, Homo sapiens
  misc_RNA (1)...(19): siRNA sense strand
gacaaagacacagguugga

SEQ ID NO: 373601 - RNA, 19 nt, Homo sapiens
  misc_RNA (1)...(19): siRNA sense strand
caaguggucauccucugau

SEQ ID NO: 373602 - RNA, 19 nt, Homo sapiens
  misc_RNA (1)...(19): siRNA sense strand
acaaguggucauccucuga

SEQ ID NO: 373603 - RNA, 19 nt, Homo sapiens
  misc_RNA (1)...(19): siRNA sense strand
cugaguaccugggacaaag

SEQ ID NO: 373604 - RNA, 19 nt, Homo sapiens
  misc_RNA (1)...(19): siRNA sense strand
cugcugcccuccuucaucu

SEQ ID NO: 373605 - RNA, 19 nt, Homo sapiens
  misc_RNA (1)...(19): siRNA sense strand
gagcuucuucucccucaag

SEQ ID NO: 373606 - RNA, 19 nt, Homo sapiens
  misc_RNA (1)...(19): siRNA sense strand
ugagagaguccacuacuua

SEQ ID NO: 373607 - RNA, 19 nt, Homo sapiens
  misc_RNA (1)...(19): siRNA sense strand
gagcagagccguuggacuu

SEQ ID NO: 373608 - RNA, 19 nt, Homo sapiens
  misc_RNA (1)...(19): siRNA sense strand
ggacuuccuuugggacuaa

SEQ ID NO: 373609 - RNA, 19 nt, Homo sapiens
  misc_RNA (1)...(19): siRNA sense strand
gggaggagaucaccaccuu

SEQ ID NO: 373610 - RNA, 19 nt, Homo sapiens
  misc_RNA (1)...(19): siRNA sense strand
agacaaacaucuucucuac

SEQ ID NO: 373611 - RNA, 19 nt, Homo sapiens
  misc_RNA (1)...(19): siRNA sense strand
gggccgaguuugcaaaguu

SEQ ID NO: 373612 - RNA, 19 nt, Homo sapiens
  misc_RNA (1)...(19): siRNA sense strand
ggacgaggaggacgaggaa

SEQ ID NO: 373613 - RNA, 19 nt, Homo sapiens
  misc_RNA (1)...(19): siRNA sense strand
gaggagaucaccaccuuca

SEQ ID NO: 373614 - RNA, 19 nt, Homo sapiens
  misc_RNA (1)...(19): siRNA sense strand
ggagaucaccaccuucauc

SEQ ID NO: 373615 - RNA, 19 nt, Homo sapiens
  misc_RNA (1)...(19): siRNA sense strand
caucaugucugaggaggau

SEQ ID NO: 373616 - RNA, 19 nt, Homo sapiens
  misc_RNA (1)...(19): siRNA sense strand
gaucaccaccuucaucgau

SEQ ID NO: 373617 - RNA, 19 nt, Homo sapiens
  misc_RNA (1)...(19): siRNA sense strand
gcucuucccuccucuugag

SEQ ID NO: 373618 - RNA, 19 nt, Homo sapiens
  misc_RNA (1)...(19): siRNA sense strand
ggccagccuucgccaauuc

SEQ ID NO: 373619 - RNA, 19 nt, Homo sapiens
  misc_RNA (1)...(19): siRNA sense strand
gcaaugcguggccaucaug

SEQ ID NO: 373620 - RNA, 19 nt, Homo sapiens
  misc_RNA (1)...(19): siRNA sense strand
gcguggccaucaugucuga

SEQ ID NO: 373621 - RNA, 19 nt, Homo sapiens
  misc_RNA (1)...(19): siRNA sense strand
gcuccuuccugcacaagug

SEQ ID NO: 373622 - RNA, 19 nt, Homo sapiens
  misc_RNA (1)...(19): siRNA sense strand
gcagagggccgaguuugca

SEQ ID NO: 373623 - RNA, 19 nt, Homo sapiens
  misc_RNA (1)...(19): siRNA sense strand
ggccgaguuugcaaaguuc

SEQ ID NO: 373624 - RNA, 19 nt, Homo sapiens
  misc_RNA (1)...(19): siRNA sense strand
cggcgucugucccaugaug

SEQ ID NO: 373625 - RNA, 19 nt, Homo sapiens
  misc_RNA (1)...(19): siRNA sense strand
gagcaaugcguggccauca

SEQ ID NO: 373626 - RNA, 19 nt, Homo sapiens
  misc_RNA (1)...(19): siRNA sense strand
gugaagcugcugccuggaa

SEQ ID NO: 373627 - RNA, 19 nt, Homo sapiens
  misc_RNA (1)...(19): siRNA sense strand
ggacgaggaagaggcugaa

SEQ ID NO: 373628 - RNA, 19 nt, Homo sapiens
  misc_RNA (1)...(19): siRNA sense strand
gagagaguccacuacuuac

SEQ ID NO: 373629 - RNA, 19 nt, Homo sapiens
  misc_RNA (1)...(19): siRNA sense strand
gagaguccacuacuuacag

SEQ ID NO: 373630 - RNA, 19 nt, Homo sapiens
  misc_RNA (1)...(19): siRNA sense strand
cgaggaagaggcugaaggu

SEQ ID NO: 373631 - RNA, 19 nt, Homo sapiens
  misc_RNA (1)...(19): siRNA sense strand
ugagacaccucugccuucu

SEQ ID NO: 373632 - RNA, 19 nt, Homo sapiens
  misc_RNA (1)...(19): siRNA sense strand
ugaggaggauggagaugac

SEQ ID NO: 373633 - RNA, 19 nt, Homo sapiens
  misc_RNA (1)...(19): siRNA sense strand
uugagagaguccacuacuu

SEQ ID NO: 373634 - RNA, 19 nt, Homo sapiens
  misc_RNA (1)...(19): siRNA sense strand
gacaaagacacagguugga

SEQ ID NO: 373635 - RNA, 19 nt, Homo sapiens
  misc_RNA (1)...(19): siRNA sense strand
caaguggucauccucugau

SEQ ID NO: 373636 - RNA, 19 nt, Homo sapiens
  misc_RNA (1)...(19): siRNA sense strand
acaaguggucauccucuga

SEQ ID NO: 373637 - RNA, 19 nt, Homo sapiens
  misc_RNA (1)...(19): siRNA sense strand
cugaguaccugggacaaag

SEQ ID NO: 373638 - RNA, 19 nt, Homo sapiens
  misc_RNA (1)...(19): siRNA sense strand
cugcugcccuccuucaucu

SEQ ID NO: 373639 - RNA, 19 nt, Homo sapiens
  misc_RNA (1)...(19): siRNA sense strand
gagcuucuucucccucaag

SEQ ID NO: 373640 - RNA, 19 nt, Homo sapiens
  misc_RNA (1)...(19): siRNA sense strand
ggaaagacguccucaauua

SEQ ID NO: 373641 - RNA, 19 nt, Homo sapiens
  misc_RNA (1)...(19): siRNA sense strand
cgagagggcuauggaauua

SEQ ID NO: 373642 - RNA, 19 nt, Homo sapiens
  misc_RNA (1)...(19): siRNA sense strand
gcagagacuugguagauga

SEQ ID NO: 373643 - RNA, 19 nt, Homo sapiens
  misc_RNA (1)...(19): siRNA sense strand
cgacaaaccuuggaaguga

SEQ ID NO: 373644 - RNA, 19 nt, Homo sapiens
  misc_RNA (1)...(19): siRNA sense strand
gaagauauaugcccaucga

SEQ ID NO: 373645 - RNA, 19 nt, Homo sapiens
  misc_RNA (1)...(19): siRNA sense strand
gcguauaccucccagauaa

SEQ ID NO: 373646 - RNA, 19 nt, Homo sapiens
  misc_RNA (1)...(19): siRNA sense strand
gaaguacucuuugcaguug

SEQ ID NO: 373647 - RNA, 19 nt, Homo sapiens
  misc_RNA (1)...(19): siRNA sense strand
gaaaacagauggcacacua

SEQ ID NO: 373648 - RNA, 19 nt, Homo sapiens
  misc_RNA (1)...(19): siRNA sense strand
gcuauggaauuacugauug

SEQ ID NO: 373649 - RNA, 19 nt, Homo sapiens
  misc_RNA (1)...(19): siRNA sense strand
ggagaaugguggcuucaau

SEQ ID NO: 373650 - RNA, 19 nt, Homo sapiens
  misc_RNA (1)...(19): siRNA sense strand
ccucuuaucucaauagugu

SEQ ID NO: 373651 - RNA, 19 nt, Homo sapiens
  misc_RNA (1)...(19): siRNA sense strand
caacauacuugaagaccau

SEQ ID NO: 373652 - RNA, 19 nt, Homo sapiens
  misc_RNA (1)...(19): siRNA sense strand
ggacucggguagcuucuau

SEQ ID NO: 373653 - RNA, 19 nt, Homo sapiens
  misc_RNA (1)...(19): siRNA sense strand
gccaauacauggagguuau

SEQ ID NO: 373654 - RNA, 19 nt, Homo sapiens
  misc_RNA (1)...(19): siRNA sense strand
ucaacacaguggaacguua

SEQ ID NO: 373655 - RNA, 19 nt, Homo sapiens
  misc_RNA (1)...(19): siRNA sense strand
gcaagaacgaccacuaaug

SEQ ID NO: 373656 - RNA, 19 nt, Homo sapiens
  misc_RNA (1)...(19): siRNA sense strand
gagaugccauuuccagugu

SEQ ID NO: 373657 - RNA, 19 nt, Homo sapiens
  misc_RNA (1)...(19): siRNA sense strand
ggacaugaucuaugcugua

SEQ ID NO: 373658 - RNA, 19 nt, Homo sapiens
  misc_RNA (1)...(19): siRNA sense strand
aaacagauggcacacuaua

SEQ ID NO: 373659 - RNA, 19 nt, Homo sapiens
  misc_RNA (1)...(19): siRNA sense strand
guacuuggaggcuuucuuu

SEQ ID NO: 373660 - RNA, 19 nt, Homo sapiens
  misc_RNA (1)...(19): siRNA sense strand
ggaauuacugauugacuuu

SEQ ID NO: 373661 - RNA, 19 nt, Homo sapiens
  misc_RNA (1)...(19): siRNA sense strand
ggaaguacucuuugcaguu

SEQ ID NO: 373662 - RNA, 19 nt, Homo sapiens
  misc_RNA (1)...(19): siRNA sense strand
cauugugaaucccauauuu

SEQ ID NO: 373663 - RNA, 19 nt, Homo sapiens
  misc_RNA (1)...(19): siRNA sense strand
gguaugauccgaaggagaa

SEQ ID NO: 373664 - RNA, 19 nt, Homo sapiens
  misc_RNA (1)...(19): siRNA sense strand
gacaagcacccucgacaaa

SEQ ID NO: 373665 - RNA, 19 nt, Homo sapiens
  misc_RNA (1)...(19): siRNA sense strand
gcuaaacguucgcagugaa

SEQ ID NO: 373666 - RNA, 19 nt, Homo sapiens
  misc_RNA (1)...(19): siRNA sense strand
gcgcagguguaccaacauu

SEQ ID NO: 373667 - RNA, 19 nt, Homo sapiens
  misc_RNA (1)...(19): siRNA sense strand
gauggauccucuuaucuca

SEQ ID NO: 373668 - RNA, 19 nt, Homo sapiens
  misc_RNA (1)...(19): siRNA sense strand
gaaagacguccucaauuac

SEQ ID NO: 373669 - RNA, 19 nt, Homo sapiens
  misc_RNA (1)...(19): siRNA sense strand
gaaagcaccgggagcuaug

SEQ ID NO: 373670 - RNA, 19 nt, Homo sapiens
  misc_RNA (1)...(19): siRNA sense strand
caugaucuaugcuguagga

SEQ ID NO: 373671 - RNA, 19 nt, Homo sapiens
  misc_RNA (1)...(19): siRNA sense strand
caggacaaguguuggugua

SEQ ID NO: 373672 - RNA, 19 nt, Homo sapiens
  misc_RNA (1)...(19): siRNA sense strand
caugauggauccucuuauc

SEQ ID NO: 373673 - RNA, 19 nt, Homo sapiens
  misc_RNA (1)...(19): siRNA sense strand
gauaugauccacagaccaa

SEQ ID NO: 373674 - RNA, 19 nt, Homo sapiens
  misc_RNA (1)...(19): siRNA sense strand
gacaaguucacccaacaua

SEQ ID NO: 373675 - RNA, 19 nt, Homo sapiens
  misc_RNA (1)...(19): siRNA sense strand
guuaggaggguucuuauau

SEQ ID NO: 373676 - RNA, 19 nt, Homo sapiens
  misc_RNA (1)...(19): siRNA sense strand
gaagagggcaauguucaga

SEQ ID NO: 373677 - RNA, 19 nt, Homo sapiens
  misc_RNA (1)...(19): siRNA sense strand
uauauggcgggaugaauua

SEQ ID NO: 373678 - RNA, 19 nt, Homo sapiens
  misc_RNA (1)...(19): siRNA sense strand
gacaugaucuaugcuguag

SEQ ID NO: 373679 - RNA, 19 nt, Homo sapiens
  misc_RNA (1)...(19): siRNA sense strand
guucuuauaugcuguaggu

SEQ ID NO: 373680 - RNA, 19 nt, Homo sapiens
  misc_RNA (1)...(19): siRNA sense strand
caauaguguugaaagguau

SEQ ID NO: 373681 - RNA, 19 nt, Homo sapiens
  misc_RNA (1)...(19): siRNA sense strand
guagugauccgagacauug

SEQ ID NO: 373682 - RNA, 19 nt, Homo sapiens
  misc_RNA (1)...(19): siRNA sense strand
ccuaggcugugcaguauau

SEQ ID NO: 373683 - RNA, 19 nt, Homo sapiens
  misc_RNA (1)...(19): siRNA sense strand
gacgggacaucuccucuca

SEQ ID NO: 373684 - RNA, 19 nt, Homo sapiens
  misc_RNA (1)...(19): siRNA sense strand
ggaagccugcugugaauuc

SEQ ID NO: 373685 - RNA, 19 nt, Homo sapiens
  misc_RNA (1)...(19): siRNA sense strand
acaagcaccugcaggacaa

SEQ ID NO: 373686 - RNA, 19 nt, Homo sapiens
  misc_RNA (1)...(19): siRNA sense strand
gaugaagaaugcagagacu

SEQ ID NO: 373687 - RNA, 19 nt, Homo sapiens
  misc_RNA (1)...(19): siRNA sense strand
acauaacuuucaagaggua

SEQ ID NO: 373688 - RNA, 19 nt, Homo sapiens
  misc_RNA (1)...(19): siRNA sense strand
ggacaucuccucucaacac

SEQ ID NO: 373689 - RNA, 19 nt, Homo sapiens
  misc_RNA (1)...(19): siRNA sense strand
uuaggaggguucuuauaug

SEQ ID NO: 373690 - RNA, 19 nt, Homo sapiens
  misc_RNA (1)...(19): siRNA sense strand
caagaacgaccacuaaugc

SEQ ID NO: 373691 - RNA, 19 nt, Homo sapiens
  misc_RNA (1)...(19): siRNA sense strand
ucggguagcuucuaugagu

SEQ ID NO: 373692 - RNA, 19 nt, Homo sapiens
  misc_RNA (1)...(19): siRNA sense strand
ccagauaacaguagaagag

SEQ ID NO: 373693 - RNA, 19 nt, Homo sapiens
  misc_RNA (1)...(19): siRNA sense strand
caccuaggcugugcaguau

SEQ ID NO: 373694 - RNA, 19 nt, Homo sapiens
  misc_RNA (1)...(19): siRNA sense strand
gagaaugguggcuucaaug

SEQ ID NO: 373695 - RNA, 19 nt, Homo sapiens
  misc_RNA (1)...(19): siRNA sense strand
agccugcugugaauucuua

SEQ ID NO: 373696 - RNA, 19 nt, Homo sapiens
  misc_RNA (1)...(19): siRNA sense strand
gaugccauuuccaguguug

SEQ ID NO: 373697 - RNA, 19 nt, Homo sapiens
  misc_RNA (1)...(19): siRNA sense strand
gaauuaccgucggcuaugg

SEQ ID NO: 373698 - RNA, 19 nt, Homo sapiens
  misc_RNA (1)...(19): siRNA sense strand
acaccuaggcugugcagua

SEQ ID NO: 373699 - RNA, 19 nt, Homo sapiens
  misc_RNA (1)...(19): siRNA sense strand
ugucuugccucaacauugu

SEQ ID NO: 373700 - RNA, 19 nt, Homo sapiens
  misc_RNA (1)...(19): siRNA sense strand
cuuggaggcuuucuuuaug

SEQ ID NO: 373701 - RNA, 19 nt, Homo sapiens
  misc_RNA (1)...(19): siRNA sense strand
ggucaguguucuugaugau

SEQ ID NO: 373702 - RNA, 19 nt, Homo sapiens
  misc_RNA (1)...(19): siRNA sense strand
gcuaugugauguggugcua

SEQ ID NO: 373703 - RNA, 19 nt, Homo sapiens
  misc_RNA (1)...(19): siRNA sense strand
ucuguuauaugcaguagga

SEQ ID NO: 373704 - RNA, 19 nt, Homo sapiens
  misc_RNA (1)...(19): siRNA sense strand
uugaugaucuguuauaugc

SEQ ID NO: 373705 - RNA, 19 nt, Homo sapiens
  misc_RNA (1)...(19): siRNA sense strand
ugaagaaugcagagacuug

SEQ ID NO: 373706 - RNA, 19 nt, Homo sapiens
  misc_RNA (1)...(19): siRNA sense strand
cugauugacuuugcguaua

SEQ ID NO: 373707 - RNA, 19 nt, Homo sapiens
  misc_RNA (1)...(19): siRNA sense strand
uggaauuacugauugacuu

SEQ ID NO: 373708 - RNA, 19 nt, Homo sapiens
  misc_RNA (1)...(19): siRNA sense strand
gcaguaggaggccaugaug

SEQ ID NO: 373709 - RNA, 19 nt, Homo sapiens
  misc_RNA (1)...(19): siRNA sense strand
ggacagcucauggcaguag

SEQ ID NO: 373710 - RNA, 19 nt, Homo sapiens
  misc_RNA (1)...(19): siRNA sense strand
gacaaguguugguguagca

SEQ ID NO: 373711 - RNA, 19 nt, Homo sapiens
  misc_RNA (1)...(19): siRNA sense strand
aaggauagcagacaaguuc

SEQ ID NO: 373712 - RNA, 19 nt, Homo sapiens
  misc_RNA (1)...(19): siRNA sense strand
ccgcaagaacgaccacuaa

SEQ ID NO: 373713 - RNA, 19 nt, Homo sapiens
  misc_RNA (1)...(19): siRNA sense strand
cagacaaguucacccaaca

SEQ ID NO: 373714 - RNA, 19 nt, Homo sapiens
  misc_RNA (1)...(19): siRNA sense strand
uaauggagagugaagaguu

SEQ ID NO: 373715 - RNA, 19 nt, Homo sapiens
  misc_RNA (1)...(19): siRNA sense strand
ggcacaacauacuugaaga

SEQ ID NO: 373716 - RNA, 19 nt, Homo sapiens
  misc_RNA (1)...(19): siRNA sense strand
caucuccucucaacacagu

SEQ ID NO: 373717 - RNA, 19 nt, Homo sapiens
  misc_RNA (1)...(19): siRNA sense strand
gacaaaccuuggaagugau

SEQ ID NO: 373718 - RNA, 19 nt, Homo sapiens
  misc_RNA (1)...(19): siRNA sense strand
gaaguagugauccgagaca

SEQ ID NO: 373719 - RNA, 19 nt, Homo sapiens
  misc_RNA (1)...(19): siRNA sense strand
ggagguagagaugacacua

SEQ ID NO: 373720 - RNA, 19 nt, Homo sapiens
  misc_RNA (1)...(19): siRNA sense strand
gagacuggaauggauguaa

SEQ ID NO: 373721 - RNA, 19 nt, Homo sapiens
  misc_RNA (1)...(19): siRNA sense strand
gguaugaccccaaaacaaa

SEQ ID NO: 373722 - RNA, 19 nt, Homo sapiens
  misc_RNA (1)...(19): siRNA sense strand
caaaagugaugaagaaugc

SEQ ID NO: 373723 - RNA, 19 nt, Homo sapiens
  misc_RNA (1)...(19): siRNA sense strand
cuauggaauuacugauuga

SEQ ID NO: 373724 - RNA, 19 nt, Homo sapiens
  misc_RNA (1)...(19): siRNA sense strand
uggcguaggaguuauuaaa

SEQ ID NO: 373725 - RNA, 19 nt, Homo sapiens
  misc_RNA (1)...(19): siRNA sense strand
gagaaagcaccgggagcua

SEQ ID NO: 373726 - RNA, 19 nt, Homo sapiens
  misc_RNA (1)...(19): siRNA sense strand
uggauccucuuaucucaau

SEQ ID NO: 373727 - RNA, 19 nt, Homo sapiens
  misc_RNA (1)...(19): siRNA sense strand
ccgcaugcccuauaucuca

SEQ ID NO: 373728 - RNA, 19 nt, Homo sapiens
  misc_RNA (1)...(19): siRNA sense strand
ucaguguucuugaugaucu

SEQ ID NO: 373729 - RNA, 19 nt, Homo sapiens
  misc_RNA (1)...(19): siRNA sense strand
uagaagagggcaauguuca

SEQ ID NO: 373730 - RNA, 19 nt, Homo sapiens
  misc_RNA (1)...(19): siRNA sense strand
ugauugacuuugcguauac

SEQ ID NO: 373731 - RNA, 19 nt, Homo sapiens
  misc_RNA (1)...(19): siRNA sense strand
guagaagagggcaauguuc

SEQ ID NO: 373732 - RNA, 19 nt, Homo sapiens
  misc_RNA (1)...(19): siRNA sense strand
uuauauggcgggaugaauu

SEQ ID NO: 373733 - RNA, 19 nt, Homo sapiens
  misc_RNA (1)...(19): siRNA sense strand
uguucuugaugaucuguua

SEQ ID NO: 373734 - RNA, 19 nt, Homo sapiens
  misc_RNA (1)...(19): siRNA sense strand
gggucaguguucuugauga

SEQ ID NO: 373735 - RNA, 19 nt, Homo sapiens
  misc_RNA (1)...(19): siRNA sense strand
aaaaggagaugcggaguug

SEQ ID NO: 373736 - RNA, 19 nt, Homo sapiens
  misc_RNA (1)...(19): siRNA sense strand
cuacuuccgagcuauguuu

SEQ ID NO: 373737 - RNA, 19 nt, Homo sapiens
  misc_RNA (1)...(19): siRNA sense strand
agaaugguggcuucaauga

SEQ ID NO: 373738 - RNA, 19 nt, Homo sapiens
  misc_RNA (1)...(19): siRNA sense strand
aauauccagugaugagcua

SEQ ID NO: 373739 - RNA, 19 nt, Homo sapiens
  misc_RNA (1)...(19): siRNA sense strand
caaguucacccaacauaac

SEQ ID NO: 373740 - RNA, 19 nt, Homo sapiens
  misc_RNA (1)...(19): siRNA sense strand
gugaagugcucuacucuuu

SEQ ID NO: 373741 - RNA, 19 nt, Homo sapiens
  misc_RNA (1)...(19): siRNA sense strand
gaagugcucuacucuuuca

SEQ ID NO: 373742 - RNA, 19 nt, Homo sapiens
  misc_RNA (1)...(19): siRNA sense strand
acaaggagauccgcacuua

SEQ ID NO: 373743 - RNA, 19 nt, Homo sapiens
  misc_RNA (1)...(19): siRNA sense strand
caacgacgaccaccuguuu

SEQ ID NO: 373744 - RNA, 19 nt, Homo sapiens
  misc_RNA (1)...(19): siRNA sense strand
ggucggaggugauguaucu

SEQ ID NO: 373745 - RNA, 19 nt, Homo sapiens
  misc_RNA (1)...(19): siRNA sense strand
gcaagaagaagaagaucaa

SEQ ID NO: 373746 - RNA, 19 nt, Homo sapiens
  misc_RNA (1)...(19): siRNA sense strand
gaagggcaaucuggacuau

SEQ ID NO: 373747 - RNA, 19 nt, Homo sapiens
  misc_RNA (1)...(19): siRNA sense strand
uucaguagcuccacguuua

SEQ ID NO: 373748 - RNA, 19 nt, Homo sapiens
  misc_RNA (1)...(19): siRNA sense strand
ucaagaaccucaacuacuc

SEQ ID NO: 373749 - RNA, 19 nt, Homo sapiens
  misc_RNA (1)...(19): siRNA sense strand
gaagaagaagaucaacaaa

SEQ ID NO: 373750 - RNA, 19 nt, Homo sapiens
  misc_RNA (1)...(19): siRNA sense strand
ggacaagggacuaaugcaa

SEQ ID NO: 373751 - RNA, 19 nt, Homo sapiens
  misc_RNA (1)...(19): siRNA sense strand
guacaguggucaucgaucu

SEQ ID NO: 373752 - RNA, 19 nt, Homo sapiens
  misc_RNA (1)...(19): siRNA sense strand
ggagaacuacgacaacuuc

SEQ ID NO: 373753 - RNA, 19 nt, Homo sapiens
  misc_RNA (1)...(19): siRNA sense strand
gaacuacgacaacuucuac

SEQ ID NO: 373754 - RNA, 19 nt, Homo sapiens
  misc_RNA (1)...(19): siRNA sense strand
gcaagggcaagaagaagaa

SEQ ID NO: 373755 - RNA, 19 nt, Homo sapiens
  misc_RNA (1)...(19): siRNA sense strand
ccacucggauguccauaau

SEQ ID NO: 373756 - RNA, 19 nt, Homo sapiens
  misc_RNA (1)...(19): siRNA sense strand
gaccaaggcuuuugaguuc

SEQ ID NO: 373757 - RNA, 19 nt, Homo sapiens
  misc_RNA (1)...(19): siRNA sense strand
ugacagugcuagacgugaa

SEQ ID NO: 373758 - RNA, 19 nt, Homo sapiens
  misc_RNA (1)...(19): siRNA sense strand
gcacaucggcgacgugucu

SEQ ID NO: 373759 - RNA, 19 nt, Homo sapiens
  misc_RNA (1)...(19): siRNA sense strand
agaaugggcuccgcaccua

SEQ ID NO: 373760 - RNA, 19 nt, Homo sapiens
  misc_RNA (1)...(19): siRNA sense strand
ccaagucguucgcgaucaa

SEQ ID NO: 373761 - RNA, 19 nt, Homo sapiens
  misc_RNA (1)...(19): siRNA sense strand
gagcaacagaaucaccaua

SEQ ID NO: 373762 - RNA, 19 nt, Homo sapiens
  misc_RNA (1)...(19): siRNA sense strand
gcccugcgcuccuuuaacu

SEQ ID NO: 373763 - RNA, 19 nt, Homo sapiens
  misc_RNA (1)...(19): siRNA sense strand
gcaggcagcaguuuguuca

SEQ ID NO: 373764 - RNA, 19 nt, Homo sapiens
  misc_RNA (1)...(19): siRNA sense strand
acucggauguccauaauuc

SEQ ID NO: 373765 - RNA, 19 nt, Homo sapiens
  misc_RNA (1)...(19): siRNA sense strand
ugaaggugauugacuccaa

SEQ ID NO: 373766 - RNA, 19 nt, Homo sapiens
  misc_RNA (1)...(19): siRNA sense strand
ccgcagagcccaauuacau

SEQ ID NO: 373767 - RNA, 19 nt, Homo sapiens
  misc_RNA (1)...(19): siRNA sense strand
agaagaagaagaucaacaa

SEQ ID NO: 373768 - RNA, 19 nt, Homo sapiens
  misc_RNA (1)...(19): siRNA sense strand
agggcaaucuggacuauga

SEQ ID NO: 373769 - RNA, 19 nt, Homo sapiens
  misc_RNA (1)...(19): siRNA sense strand
acaaggagaucugcaugau

SEQ ID NO: 373770 - RNA, 19 nt, Homo sapiens
  misc_RNA (1)...(19): siRNA sense strand
caacaucccgggagaguac

SEQ ID NO: 373771 - RNA, 19 nt, Homo sapiens
  misc_RNA (1)...(19): siRNA sense strand
gaccgggacucuggcaaga

SEQ ID NO: 373772 - RNA, 19 nt, Homo sapiens
  misc_RNA (1)...(19): siRNA sense strand
gacaaggagaucugcauga

SEQ ID NO: 373773 - RNA, 19 nt, Homo sapiens
  misc_RNA (1)...(19): siRNA sense strand
gaggugauguaucucaaac

SEQ ID NO: 373774 - RNA, 19 nt, Homo sapiens
  misc_RNA (1)...(19): siRNA sense strand
gaggagaacuacgacaacu

SEQ ID NO: 373775 - RNA, 19 nt, Homo sapiens
  misc_RNA (1)...(19): siRNA sense strand
gaacggacagcugcagugu

SEQ ID NO: 373776 - RNA, 19 nt, Homo sapiens
  misc_RNA (1)...(19): siRNA sense strand
guucaaaguauuucaguag

SEQ ID NO: 373777 - RNA, 19 nt, Homo sapiens
  misc_RNA (1)...(19): siRNA sense strand
guagagauccaggacauca

SEQ ID NO: 373778 - RNA, 19 nt, Homo sapiens
  misc_RNA (1)...(19): siRNA sense strand
ggaggugauguaucucaaa

SEQ ID NO: 373779 - RNA, 19 nt, Homo sapiens
  misc_RNA (1)...(19): siRNA sense strand
gcacggugaucgggaacau

SEQ ID NO: 373780 - RNA, 19 nt, Homo sapiens
  misc_RNA (1)...(19): siRNA sense strand
ugacaacgcgccagugauc

SEQ ID NO: 373781 - RNA, 19 nt, Homo sapiens
  misc_RNA (1)...(19): siRNA sense strand
cgaugaaggucccaauggu

SEQ ID NO: 373782 - RNA, 19 nt, Homo sapiens
  misc_RNA (1)...(19): siRNA sense strand
gcaacagaaucaccauacg

SEQ ID NO: 373783 - RNA, 19 nt, Homo sapiens
  misc_RNA (1)...(19): siRNA sense strand
gcagcaggcagcaguuugu

SEQ ID NO: 373784 - RNA, 19 nt, Homo sapiens
  misc_RNA (1)...(19): siRNA sense strand
ucuacacgguggugacuga

SEQ ID NO: 373785 - RNA, 19 nt, Homo sapiens
  misc_RNA (1)...(19): siRNA sense strand
ucuuuggacuggacguuaa

SEQ ID NO: 373786 - RNA, 19 nt, Homo sapiens
  misc_RNA (1)...(19): siRNA sense strand
ucaaaccggccuccaacaa

SEQ ID NO: 373787 - RNA, 19 nt, Homo sapiens
  misc_RNA (1)...(19): siRNA sense strand
gcgagacacaagacgagua

SEQ ID NO: 373788 - RNA, 19 nt, Homo sapiens
  misc_RNA (1)...(19): siRNA sense strand
gcuaccgggugcuggagaa

SEQ ID NO: 373789 - RNA, 19 nt, Homo sapiens
  misc_RNA (1)...(19): siRNA sense strand
ggaccgcgagcaacagaau

SEQ ID NO: 373790 - RNA, 19 nt, Homo sapiens
  misc_RNA (1)...(19): siRNA sense strand
cgacgaucacggccucuuu

SEQ ID NO: 373791 - RNA, 19 nt, Homo sapiens
  misc_RNA (1)...(19): siRNA sense strand
guuuaaggacccagaaaga

SEQ ID NO: 373792 - RNA, 19 nt, Homo sapiens
  misc_RNA (1)...(19): siRNA sense strand
cagcaccacugggacaugu

SEQ ID NO: 373793 - RNA, 19 nt, Homo sapiens
  misc_RNA (1)...(19): siRNA sense strand
ccagcccacugcaaaguca

SEQ ID NO: 373794 - RNA, 19 nt, Homo sapiens
  misc_RNA (1)...(19): siRNA sense strand
ccguacagaucaacgugaa

SEQ ID NO: 373795 - RNA, 19 nt, Homo sapiens
  misc_RNA (1)...(19): siRNA sense strand
ggcaagggcaagaagaaga

SEQ ID NO: 373796 - RNA, 19 nt, Homo sapiens
  misc_RNA (1)...(19): siRNA sense strand
ugguggagcugguggugaa

SEQ ID NO: 373797 - RNA, 19 nt, Homo sapiens
  misc_RNA (1)...(19): siRNA sense strand
gacgaccaccuguuugaga

SEQ ID NO: 373798 - RNA, 19 nt, Homo sapiens
  misc_RNA (1)...(19): siRNA sense strand
caaucuggacuaugaggaa

SEQ ID NO: 373799 - RNA, 19 nt, Homo sapiens
  misc_RNA (1)...(19): siRNA sense strand
gaggagaggaacgccauga

SEQ ID NO: 373800 - RNA, 19 nt, Homo sapiens
  misc_RNA (1)...(19): siRNA sense strand
gcaacgacgaccaccuguu

SEQ ID NO: 373801 - RNA, 19 nt, Homo sapiens
  misc_RNA (1)...(19): siRNA sense strand
gacgaucacggccucuuug

SEQ ID NO: 373802 - RNA, 19 nt, Homo sapiens
  misc_RNA (1)...(19): siRNA sense strand
ucaguagcuccacguuuaa

SEQ ID NO: 373803 - RNA, 19 nt, Homo sapiens
  misc_RNA (1)...(19): siRNA sense strand
ggagaggaacgccaugaac

SEQ ID NO: 373804 - RNA, 19 nt, Homo sapiens
  misc_RNA (1)...(19): siRNA sense strand
gcaguggccaagcucauca

SEQ ID NO: 373805 - RNA, 19 nt, Homo sapiens
  misc_RNA (1)...(19): siRNA sense strand
acgggaugcuggagauuga

SEQ ID NO: 373806 - RNA, 19 nt, Homo sapiens
  misc_RNA (1)...(19): siRNA sense strand
ugguggaacugcccgagaa

SEQ ID NO: 373807 - RNA, 19 nt, Homo sapiens
  misc_RNA (1)...(19): siRNA sense strand
cggaccagaucgaaaugga

SEQ ID NO: 373808 - RNA, 19 nt, Homo sapiens
  misc_RNA (1)...(19): siRNA sense strand
uuccaucuguugcugcuuu

SEQ ID NO: 373809 - RNA, 19 nt, Homo sapiens
  misc_RNA (1)...(19): siRNA sense strand
gcaagcgcgagaacaagga

SEQ ID NO: 373810 - RNA, 19 nt, Homo sapiens
  misc_RNA (1)...(19): siRNA sense strand
gcagcaagucggguagcua

SEQ ID NO: 373811 - RNA, 19 nt, Homo sapiens
  misc_RNA (1)...(19): siRNA sense strand
uaucccagcccacugcaaa

SEQ ID NO: 373812 - RNA, 19 nt, Homo sapiens
  misc_RNA (1)...(19): siRNA sense strand
aaucuggacuaugaggaaa

SEQ ID NO: 373813 - RNA, 19 nt, Homo sapiens
  misc_RNA (1)...(19): siRNA sense strand
gcaaagucacggucaagcu

SEQ ID NO: 373814 - RNA, 19 nt, Homo sapiens
  misc_RNA (1)...(19): siRNA sense strand
ucaaaguauuucaguagcu

SEQ ID NO: 373815 - RNA, 19 nt, Homo sapiens
  misc_RNA (1)...(19): siRNA sense strand
aaggagauccgcacuuaca

SEQ ID NO: 373816 - RNA, 19 nt, Homo sapiens
  misc_RNA (1)...(19): siRNA sense strand
caaagggcucuacgugcuu

SEQ ID NO: 373817 - RNA, 19 nt, Homo sapiens
  misc_RNA (1)...(19): siRNA sense strand
agacacaagacgaguacaa

SEQ ID NO: 373818 - RNA, 19 nt, Homo sapiens
  misc_RNA (1)...(19): siRNA sense strand
ugaagggcaaucuggacua

SEQ ID NO: 373819 - RNA, 19 nt, Homo sapiens
  misc_RNA (1)...(19): siRNA sense strand
gccacucggauguccauaa

SEQ ID NO: 373820 - RNA, 19 nt, Homo sapiens
  misc_RNA (1)...(19): siRNA sense strand
gcgaaguggaggagaggaa

SEQ ID NO: 373821 - RNA, 19 nt, Homo sapiens
  misc_RNA (1)...(19): siRNA sense strand
ggcaagaagaagaagauca

SEQ ID NO: 373822 - RNA, 19 nt, Homo sapiens
  misc_RNA (1)...(19): siRNA sense strand
uccaggacaucaacgacaa

SEQ ID NO: 373823 - RNA, 19 nt, Homo sapiens
  misc_RNA (1)...(19): siRNA sense strand
ucgagcagaccaaggcuuu

SEQ ID NO: 373824 - RNA, 19 nt, Homo sapiens
  misc_RNA (1)...(19): siRNA sense strand
gcaccguauccuacucuau

SEQ ID NO: 373825 - RNA, 19 nt, Homo sapiens
  misc_RNA (1)...(19): siRNA sense strand
guagcuccacguuuaagga

SEQ ID NO: 373826 - RNA, 19 nt, Homo sapiens
  misc_RNA (1)...(19): siRNA sense strand
gggcagcaggcagcaguuu

SEQ ID NO: 373827 - RNA, 19 nt, Homo sapiens
  misc_RNA (1)...(19): siRNA sense strand
ccauguacuucgacuacca

SEQ ID NO: 373828 - RNA, 19 nt, Homo sapiens
  misc_RNA (1)...(19): siRNA sense strand
gagauccgcacuuacaacu

SEQ ID NO: 373829 - RNA, 19 nt, Homo sapiens
  misc_RNA (1)...(19): siRNA sense strand
ccucggaccagaucgaaau

SEQ ID NO: 373830 - RNA, 19 nt, Homo sapiens
  misc_RNA (1)...(19): siRNA sense strand
ccgcucaucgugacucuga

SEQ ID NO: 373831 - RNA, 19 nt, Homo sapiens
  misc_RNA (1)...(19): siRNA sense strand
caccguauccuacucuauc

SEQ ID NO: 373832 - RNA, 19 nt, Homo sapiens
  misc_RNA (1)...(19): siRNA sense strand
ucggcgacgugucuaucua

SEQ ID NO: 373833 - RNA, 19 nt, Homo sapiens
  misc_RNA (1)...(19): siRNA sense strand
cgacaacagcccggucuuc

SEQ ID NO: 373834 - RNA, 19 nt, Homo sapiens
  misc_RNA (1)...(19): siRNA sense strand
caaaccggccuccaacaac

SEQ ID NO: 373835 - RNA, 19 nt, Homo sapiens
  misc_RNA (1)...(19): siRNA sense strand
cggaggugauguaucucaa

SEQ ID NO: 373836 - RNA, 19 nt, Homo sapiens
  misc_RNA (1)...(19): siRNA sense strand
ggagauccgcacuuacaac

SEQ ID NO: 373837 - RNA, 19 nt, Homo sapiens
  misc_RNA (1)...(19): siRNA sense strand
aaugacaacgcgccaguga

SEQ ID NO: 373838 - RNA, 19 nt, Homo sapiens
  misc_RNA (1)...(19): siRNA sense strand
uccgcacgcugcacccuuu

SEQ ID NO: 373839 - RNA, 19 nt, Homo sapiens
  misc_RNA (1)...(19): siRNA sense strand
uguugcugcuuucuucuau

SEQ ID NO: 373840 - RNA, 19 nt, Homo sapiens
  misc_RNA (1)...(19): siRNA sense strand
gaagaagacuacuuaauug

SEQ ID NO: 373841 - RNA, 19 nt, Homo sapiens
  misc_RNA (1)...(19): siRNA sense strand
caacuacacuugcuuuaua

SEQ ID NO: 373842 - RNA, 19 nt, Homo sapiens
  misc_RNA (1)...(19): siRNA sense strand
gcauggaccuucaaugaua

SEQ ID NO: 373843 - RNA, 19 nt, Homo sapiens
  misc_RNA (1)...(19): siRNA sense strand
gcaaaggauucaucuguaa

SEQ ID NO: 373844 - RNA, 19 nt, Homo sapiens
  misc_RNA (1)...(19): siRNA sense strand
ggagagaauucaaauagaa

SEQ ID NO: 373845 - RNA, 19 nt, Homo sapiens
  misc_RNA (1)...(19): siRNA sense strand
ggagaaggaucccugagua

SEQ ID NO: 373846 - RNA, 19 nt, Homo sapiens
  misc_RNA (1)...(19): siRNA sense strand
gaagacauuuccaguacua

SEQ ID NO: 373847 - RNA, 19 nt, Homo sapiens
  misc_RNA (1)...(19): siRNA sense strand
gaauaugaauuucguguug

SEQ ID NO: 373848 - RNA, 19 nt, Homo sapiens
  misc_RNA (1)...(19): siRNA sense strand
ccacacagaucaagauauu

SEQ ID NO: 373849 - RNA, 19 nt, Homo sapiens
  misc_RNA (1)...(19): siRNA sense strand
gaagagugcugggcuauga

SEQ ID NO: 373850 - RNA, 19 nt, Homo sapiens
  misc_RNA (1)...(19): siRNA sense strand
acaagaagaugaaggcuuu

SEQ ID NO: 373851 - RNA, 19 nt, Homo sapiens
  misc_RNA (1)...(19): siRNA sense strand
gcugacaaacucuaaauua

SEQ ID NO: 373852 - RNA, 19 nt, Homo sapiens
  misc_RNA (1)...(19): siRNA sense strand
cagaagaacugcagaaugg

SEQ ID NO: 373853 - RNA, 19 nt, Homo sapiens
  misc_RNA (1)...(19): siRNA sense strand
ggaaugcuauugccuggaa

SEQ ID NO: 373854 - RNA, 19 nt, Homo sapiens
  misc_RNA (1)...(19): siRNA sense strand
gagcaggcccagauaauaa

SEQ ID NO: 373855 - RNA, 19 nt, Homo sapiens
  misc_RNA (1)...(19): siRNA sense strand
guuaagaacuaaagcauca

SEQ ID NO: 373856 - RNA, 19 nt, Homo sapiens
  misc_RNA (1)...(19): siRNA sense strand
gaacggagacccuuagaca

SEQ ID NO: 373857 - RNA, 19 nt, Homo sapiens
  misc_RNA (1)...(19): siRNA sense strand
ggacagaugacuccaaaga

SEQ ID NO: 373858 - RNA, 19 nt, Homo sapiens
  misc_RNA (1)...(19): siRNA sense strand
gcuaugaggucuuauacug

SEQ ID NO: 373859 - RNA, 19 nt, Homo sapiens
  misc_RNA (1)...(19): siRNA sense strand
gauaauaacagucccauuc

SEQ ID NO: 373860 - RNA, 19 nt, Homo sapiens
  misc_RNA (1)...(19): siRNA sense strand
gauauuaguuggagaaggu

SEQ ID NO: 373861 - RNA, 19 nt, Homo sapiens
  misc_RNA (1)...(19): siRNA sense strand
uaacagucccauucaaaua

SEQ ID NO: 373862 - RNA, 19 nt, Homo sapiens
  misc_RNA (1)...(19): siRNA sense strand
gaaggcaaagcuccaauuu

SEQ ID NO: 373863 - RNA, 19 nt, Homo sapiens
  misc_RNA (1)...(19): siRNA sense strand
gaaagugucaucuguggaa

SEQ ID NO: 373864 - RNA, 19 nt, Homo sapiens
  misc_RNA (1)...(19): siRNA sense strand
gcaaagggucaacucauuu

SEQ ID NO: 373865 - RNA, 19 nt, Homo sapiens
  misc_RNA (1)...(19): siRNA sense strand
gaauaugaaccaaagauug

SEQ ID NO: 373866 - RNA, 19 nt, Homo sapiens
  misc_RNA (1)...(19): siRNA sense strand
gaaaaugagucugaaguuu

SEQ ID NO: 373867 - RNA, 19 nt, Homo sapiens
  misc_RNA (1)...(19): siRNA sense strand
ggagucaauuccagaagaa

SEQ ID NO: 373868 - RNA, 19 nt, Homo sapiens
  misc_RNA (1)...(19): siRNA sense strand
guacaaacaacccuagaaa

SEQ ID NO: 373869 - RNA, 19 nt, Homo sapiens
  misc_RNA (1)...(19): siRNA sense strand
cuacuuugcuuccguaaga

SEQ ID NO: 373870 - RNA, 19 nt, Homo sapiens
  misc_RNA (1)...(19): siRNA sense strand
ggucugaacucgucauuac

SEQ ID NO: 373871 - RNA, 19 nt, Homo sapiens
  misc_RNA (1)...(19): siRNA sense strand
cauuauagguggaagcaaa

SEQ ID NO: 373872 - RNA, 19 nt, Homo sapiens
  misc_RNA (1)...(19): siRNA sense strand
gcaagcaaccuucgaggaa

SEQ ID NO: 373873 - RNA, 19 nt, Homo sapiens
  misc_RNA (1)...(19): siRNA sense strand
gguaagacauacaaugcaa

SEQ ID NO: 373874 - RNA, 19 nt, Homo sapiens
  misc_RNA (1)...(19): siRNA sense strand
aaagagagaacugucauua

SEQ ID NO: 373875 - RNA, 19 nt, Homo sapiens
  misc_RNA (1)...(19): siRNA sense strand
guaccaaugugcugcagaa

SEQ ID NO: 373876 - RNA, 19 nt, Homo sapiens
  misc_RNA (1)...(19): siRNA sense strand
gaggagagaauucaaauag

SEQ ID NO: 373877 - RNA, 19 nt, Homo sapiens
  misc_RNA (1)...(19): siRNA sense strand
auacacaccucucuaucua

SEQ ID NO: 373878 - RNA, 19 nt, Homo sapiens
  misc_RNA (1)...(19): siRNA sense strand
gcuaauaccaucuacuuug

SEQ ID NO: 373879 - RNA, 19 nt, Homo sapiens
  misc_RNA (1)...(19): siRNA sense strand
caaaguggguguguauaau

SEQ ID NO: 373880 - RNA, 19 nt, Homo sapiens
  misc_RNA (1)...(19): siRNA sense strand
ggauuuggauauaucauca

SEQ ID NO: 373881 - RNA, 19 nt, Homo sapiens
  misc_RNA (1)...(19): siRNA sense strand
caagugaaccaucagaauu

SEQ ID NO: 373882 - RNA, 19 nt, Homo sapiens
  misc_RNA (1)...(19): siRNA sense strand
gaaaauaucucugcacagu

SEQ ID NO: 373883 - RNA, 19 nt, Homo sapiens
  misc_RNA (1)...(19): siRNA sense strand
caaaauggauguuacaguu

SEQ ID NO: 373884 - RNA, 19 nt, Homo sapiens
  misc_RNA (1)...(19): siRNA sense strand
gaaagucaaguacagcaaa

SEQ ID NO: 373885 - RNA, 19 nt, Homo sapiens
  misc_RNA (1)...(19): siRNA sense strand
gacaaacucuaaauuaugc

SEQ ID NO: 373886 - RNA, 19 nt, Homo sapiens
  misc_RNA (1)...(19): siRNA sense strand
aaauggagguuucauggaa

SEQ ID NO: 373887 - RNA, 19 nt, Homo sapiens
  misc_RNA (1)...(19): siRNA sense strand
gaaagcaucaucccacugu

SEQ ID NO: 373888 - RNA, 19 nt, Homo sapiens
  misc_RNA (1)...(19): siRNA sense strand
ggagggauuuggauauauc

SEQ ID NO: 373889 - RNA, 19 nt, Homo sapiens
  misc_RNA (1)...(19): siRNA sense strand
gcuccaauuugcauauauu

SEQ ID NO: 373890 - RNA, 19 nt, Homo sapiens
  misc_RNA (1)...(19): siRNA sense strand
ggaaacaaacaauacauca

SEQ ID NO: 373891 - RNA, 19 nt, Homo sapiens
  misc_RNA (1)...(19): siRNA sense strand
aagaauccaugauagguaa

SEQ ID NO: 373892 - RNA, 19 nt, Homo sapiens
  misc_RNA (1)...(19): siRNA sense strand
uaacaaagaggcccagaga

SEQ ID NO: 373893 - RNA, 19 nt, Homo sapiens
  misc_RNA (1)...(19): siRNA sense strand
ucauaacgaugcugaaugu

SEQ ID NO: 373894 - RNA, 19 nt, Homo sapiens
  misc_RNA (1)...(19): siRNA sense strand
gaauagaaacacuggaaga

SEQ ID NO: 373895 - RNA, 19 nt, Homo sapiens
  misc_RNA (1)...(19): siRNA sense strand
caagguuugucuacagaaa

SEQ ID NO: 373896 - RNA, 19 nt, Homo sapiens
  misc_RNA (1)...(19): siRNA sense strand
gggauuugaugauaaggaa

SEQ ID NO: 373897 - RNA, 19 nt, Homo sapiens
  misc_RNA (1)...(19): siRNA sense strand
gauggcagccucaagauau

SEQ ID NO: 373898 - RNA, 19 nt, Homo sapiens
  misc_RNA (1)...(19): siRNA sense strand
ccagagaaguguucaaggu

SEQ ID NO: 373899 - RNA, 19 nt, Homo sapiens
  misc_RNA (1)...(19): siRNA sense strand
acagaugacuccaaagaau

SEQ ID NO: 373900 - RNA, 19 nt, Homo sapiens
  misc_RNA (1)...(19): siRNA sense strand
gaaaguuuaucugcaguag

SEQ ID NO: 373901 - RNA, 19 nt, Homo sapiens
  misc_RNA (1)...(19): siRNA sense strand
ggaauaugaaccaaagauu

SEQ ID NO: 373902 - RNA, 19 nt, Homo sapiens
  misc_RNA (1)...(19): siRNA sense strand
ugaaccaucagaauuguua

SEQ ID NO: 373903 - RNA, 19 nt, Homo sapiens
  misc_RNA (1)...(19): siRNA sense strand
guccuuggguggaauauga

SEQ ID NO: 373904 - RNA, 19 nt, Homo sapiens
  misc_RNA (1)...(19): siRNA sense strand
gaauugugcugcuaauggu

SEQ ID NO: 373905 - RNA, 19 nt, Homo sapiens
  misc_RNA (1)...(19): siRNA sense strand
ggucagaugcuggaucaua

SEQ ID NO: 373906 - RNA, 19 nt, Homo sapiens
  misc_RNA (1)...(19): siRNA sense strand
uauacaagcugcaaaggau

SEQ ID NO: 373907 - RNA, 19 nt, Homo sapiens
  misc_RNA (1)...(19): siRNA sense strand
gcacagacauugauuuuac

SEQ ID NO: 373908 - RNA, 19 nt, Homo sapiens
  misc_RNA (1)...(19): siRNA sense strand
gggagucaauuccagaaga

SEQ ID NO: 373909 - RNA, 19 nt, Homo sapiens
  misc_RNA (1)...(19): siRNA sense strand
gaaauucucaaugguaaga

SEQ ID NO: 373910 - RNA, 19 nt, Homo sapiens
  misc_RNA (1)...(19): siRNA sense strand
caaacaacccuagaaaguu

SEQ ID NO: 373911 - RNA, 19 nt, Homo sapiens
  misc_RNA (1)...(19): siRNA sense strand
gagaugucauagacuuaaa

SEQ ID NO: 373912 - RNA, 19 nt, Homo sapiens
  misc_RNA (1)...(19): siRNA sense strand
ggagaugucauagacuuaa

SEQ ID NO: 373913 - RNA, 19 nt, Homo sapiens
  misc_RNA (1)...(19): siRNA sense strand
ucaaaguggguguguauaa

SEQ ID NO: 373914 - RNA, 19 nt, Homo sapiens
  misc_RNA (1)...(19): siRNA sense strand
ugaaaggauuggaggagaa

SEQ ID NO: 373915 - RNA, 19 nt, Homo sapiens
  misc_RNA (1)...(19): siRNA sense strand
gcugggcuaugaggucuua

SEQ ID NO: 373916 - RNA, 19 nt, Homo sapiens
  misc_RNA (1)...(19): siRNA sense strand
ggagagcaggcccagauaa

SEQ ID NO: 373917 - RNA, 19 nt, Homo sapiens
  misc_RNA (1)...(19): siRNA sense strand
guacauugccaaaguggaa

SEQ ID NO: 373918 - RNA, 19 nt, Homo sapiens
  misc_RNA (1)...(19): siRNA sense strand
caauggagaugucauagac

SEQ ID NO: 373919 - RNA, 19 nt, Homo sapiens
  misc_RNA (1)...(19): siRNA sense strand
gaauguaaagcuaguggaa

SEQ ID NO: 373920 - RNA, 19 nt, Homo sapiens
  misc_RNA (1)...(19): siRNA sense strand
ggacacucaucauaacgau

SEQ ID NO: 373921 - RNA, 19 nt, Homo sapiens
  misc_RNA (1)...(19): siRNA sense strand
ggaauauucaguuacauca

SEQ ID NO: 373922 - RNA, 19 nt, Homo sapiens
  misc_RNA (1)...(19): siRNA sense strand
ccauugaagugguauuugu

SEQ ID NO: 373923 - RNA, 19 nt, Homo sapiens
  misc_RNA (1)...(19): siRNA sense strand
ggaaggcaaagcuccaauu

SEQ ID NO: 373924 - RNA, 19 nt, Homo sapiens
  misc_RNA (1)...(19): siRNA sense strand
aaucugaggucauccugaa

SEQ ID NO: 373925 - RNA, 19 nt, Homo sapiens
  misc_RNA (1)...(19): siRNA sense strand
guggaaaugucacaaccaa

SEQ ID NO: 373926 - RNA, 19 nt, Homo sapiens
  misc_RNA (1)...(19): siRNA sense strand
uaauaacagucccauucaa

SEQ ID NO: 373927 - RNA, 19 nt, Homo sapiens
  misc_RNA (1)...(19): siRNA sense strand
cauggaccuucaaugauaa

SEQ ID NO: 373928 - RNA, 19 nt, Homo sapiens
  misc_RNA (1)...(19): siRNA sense strand
acgggaaacuuguacauug

SEQ ID NO: 373929 - RNA, 19 nt, Homo sapiens
  misc_RNA (1)...(19): siRNA sense strand
gagguuucauggaaugcua

SEQ ID NO: 373930 - RNA, 19 nt, Homo sapiens
  misc_RNA (1)...(19): siRNA sense strand
aaaguggguguguauaaua

SEQ ID NO: 373931 - RNA, 19 nt, Homo sapiens
  misc_RNA (1)...(19): siRNA sense strand
uauggaaacugguaauucu

SEQ ID NO: 373932 - RNA, 19 nt, Homo sapiens
  misc_RNA (1)...(19): siRNA sense strand
aaauaucucugcacaguac

SEQ ID NO: 373933 - RNA, 19 nt, Homo sapiens
  misc_RNA (1)...(19): siRNA sense strand
gaacacuggcagccucauu

SEQ ID NO: 373934 - RNA, 19 nt, Homo sapiens
  misc_RNA (1)...(19): siRNA sense strand
ggauggcagccucaagaua

SEQ ID NO: 373935 - RNA, 19 nt, Homo sapiens
  misc_RNA (1)...(19): siRNA sense strand
gaugcaaaccaaaugcuuu

SEQ ID NO: 373936 - RNA, 19 nt, Homo sapiens
  misc_RNA (1)...(19): siRNA sense strand
acacaccucucuaucuaug

SEQ ID NO: 373937 - RNA, 19 nt, Homo sapiens
  misc_RNA (1)...(19): siRNA sense strand
ugcaaaggauucaucugua

SEQ ID NO: 373938 - RNA, 19 nt, Homo sapiens
  misc_RNA (1)...(19): siRNA sense strand
gaacugggagcauguaaaa

SEQ ID NO: 373939 - RNA, 19 nt, Homo sapiens
  misc_RNA (1)...(19): siRNA sense strand
ggaagcagcagugaggaaa

SEQ ID NO: 373940 - RNA, 19 nt, Homo sapiens
  misc_RNA (1)...(19): siRNA sense strand
ggaaggagaugcuggacaa

SEQ ID NO: 373941 - RNA, 19 nt, Homo sapiens
  misc_RNA (1)...(19): siRNA sense strand
aggaugagcugcauaaaga

SEQ ID NO: 373942 - RNA, 19 nt, Homo sapiens
  misc_RNA (1)...(19): siRNA sense strand
guggacaccuucacacgua

SEQ ID NO: 373943 - RNA, 19 nt, Homo sapiens
  misc_RNA (1)...(19): siRNA sense strand
gcagugggaugacuucagu

SEQ ID NO: 373944 - RNA, 19 nt, Homo sapiens
  misc_RNA (1)...(19): siRNA sense strand
gagcucaaguggcaagaga

SEQ ID NO: 373945 - RNA, 19 nt, Homo sapiens
  misc_RNA (1)...(19): siRNA sense strand
gagcggaggcugagaugaa

SEQ ID NO: 373946 - RNA, 19 nt, Homo sapiens
  misc_RNA (1)...(19): siRNA sense strand
cgacgagguucaccagcua

SEQ ID NO: 373947 - RNA, 19 nt, Homo sapiens
  misc_RNA (1)...(19): siRNA sense strand
gaaccugccucuggaugug

SEQ ID NO: 373948 - RNA, 19 nt, Homo sapiens
  misc_RNA (1)...(19): siRNA sense strand
aagaaggccuugcaacaga

SEQ ID NO: 373949 - RNA, 19 nt, Homo sapiens
  misc_RNA (1)...(19): siRNA sense strand
gaaggacccuguggaggau

SEQ ID NO: 373950 - RNA, 19 nt, Homo sapiens
  misc_RNA (1)...(19): siRNA sense strand
uggagaaaguguacaguga

SEQ ID NO: 373951 - RNA, 19 nt, Homo sapiens
  misc_RNA (1)...(19): siRNA sense strand
cgagaucgaugcccugaca

SEQ ID NO: 373952 - RNA, 19 nt, Homo sapiens
  misc_RNA (1)...(19): siRNA sense strand
ggccacugcucuaacuauu

SEQ ID NO: 373953 - RNA, 19 nt, Homo sapiens
  misc_RNA (1)...(19): siRNA sense strand
ccaacaaccagaccauuug

SEQ ID NO: 373954 - RNA, 19 nt, Homo sapiens
  misc_RNA (1)...(19): siRNA sense strand
ggaggccacugcucuaacu

SEQ ID NO: 373955 - RNA, 19 nt, Homo sapiens
  misc_RNA (1)...(19): siRNA sense strand
gaaggagucagcagagcaa

SEQ ID NO: 373956 - RNA, 19 nt, Homo sapiens
  misc_RNA (1)...(19): siRNA sense strand
gcaacgagaccaacaacca

SEQ ID NO: 373957 - RNA, 19 nt, Homo sapiens
  misc_RNA (1)...(19): siRNA sense strand
acuaacagcuaccugcuau

SEQ ID NO: 373958 - RNA, 19 nt, Homo sapiens
  misc_RNA (1)...(19): siRNA sense strand
caacggaauuugccuucag

SEQ ID NO: 373959 - RNA, 19 nt, Homo sapiens
  misc_RNA (1)...(19): siRNA sense strand
ucaaguggcaagagaagaa

SEQ ID NO: 373960 - RNA, 19 nt, Homo sapiens
  misc_RNA (1)...(19): siRNA sense strand
uggagaggauugauacugu

SEQ ID NO: 373961 - RNA, 19 nt, Homo sapiens
  misc_RNA (1)...(19): siRNA sense strand
ccacugcucuaacuauugc

SEQ ID NO: 373962 - RNA, 19 nt, Homo sapiens
  misc_RNA (1)...(19): siRNA sense strand
agauuuagaugccgagauc

SEQ ID NO: 373963 - RNA, 19 nt, Homo sapiens
  misc_RNA (1)...(19): siRNA sense strand
gagaguugcaacggaauuu

SEQ ID NO: 373964 - RNA, 19 nt, Homo sapiens
  misc_RNA (1)...(19): siRNA sense strand
gccugaagcugucccauac

SEQ ID NO: 373965 - RNA, 19 nt, Homo sapiens
  misc_RNA (1)...(19): siRNA sense strand
gaggaugagcugcauaaag

SEQ ID NO: 373966 - RNA, 19 nt, Homo sapiens
  misc_RNA (1)...(19): siRNA sense strand
ggcaagagaagaauaccuu

SEQ ID NO: 373967 - RNA, 19 nt, Homo sapiens
  misc_RNA (1)...(19): siRNA sense strand
gaggcugucucucucucaa

SEQ ID NO: 373968 - RNA, 19 nt, Homo sapiens
  misc_RNA (1)...(19): siRNA sense strand
auaaagagguggaggucau

SEQ ID NO: 373969 - RNA, 19 nt, Homo sapiens
  misc_RNA (1)...(19): siRNA sense strand
acaucucgcugaagguuga

SEQ ID NO: 373970 - RNA, 19 nt, Homo sapiens
  misc_RNA (1)...(19): siRNA sense strand
aggaggaucugcgcacaaa

SEQ ID NO: 373971 - RNA, 19 nt, Homo sapiens
  misc_RNA (1)...(19): siRNA sense strand
agaaggccuugcaacagaa

SEQ ID NO: 373972 - RNA, 19 nt, Homo sapiens
  misc_RNA (1)...(19): siRNA sense strand
aaccaucgcugcccugaag

SEQ ID NO: 373973 - RNA, 19 nt, Homo sapiens
  misc_RNA (1)...(19): siRNA sense strand
ucacacguaccacaaauag

SEQ ID NO: 373974 - RNA, 19 nt, Homo sapiens
  misc_RNA (1)...(19): siRNA sense strand
ggagauggagaaaguguac

SEQ ID NO: 373975 - RNA, 19 nt, Homo sapiens
  misc_RNA (1)...(19): siRNA sense strand
aaacaucucgcugaagguu

SEQ ID NO: 373976 - RNA, 19 nt, Homo sapiens
  misc_RNA (1)...(19): siRNA sense strand
gagggaggccacugcucua

SEQ ID NO: 373977 - RNA, 19 nt, Homo sapiens
  misc_RNA (1)...(19): siRNA sense strand
ucagucgguucaacaagga

SEQ ID NO: 373978 - RNA, 19 nt, Homo sapiens
  misc_RNA (1)...(19): siRNA sense strand
acacguaccacaaauagca

SEQ ID NO: 373979 - RNA, 19 nt, Homo sapiens
  misc_RNA (1)...(19): siRNA sense strand
aggagaugcuggacaagug

SEQ ID NO: 373980 - RNA, 19 nt, Homo sapiens
  misc_RNA (1)...(19): siRNA sense strand
ccauuugggaugaacauga

SEQ ID NO: 373981 - RNA, 19 nt, Homo sapiens
  misc_RNA (1)...(19): siRNA sense strand
ggagaugcuggacaagugu

SEQ ID NO: 373982 - RNA, 19 nt, Homo sapiens
  misc_RNA (1)...(19): siRNA sense strand
uaccugcuauccaccaaug

SEQ ID NO: 373983 - RNA, 19 nt, Homo sapiens
  misc_RNA (1)...(19): siRNA sense strand
ucgaugcccugacacagau

SEQ ID NO: 373984 - RNA, 19 nt, Homo sapiens
  misc_RNA (1)...(19): siRNA sense strand
gggaugaacaugacaacag

SEQ ID NO: 373985 - RNA, 19 nt, Homo sapiens
  misc_RNA (1)...(19): siRNA sense strand
gagaggauugauacuguca

SEQ ID NO: 373986 - RNA, 19 nt, Homo sapiens
  misc_RNA (1)...(19): siRNA sense strand
agaauaccuuggaggagau

SEQ ID NO: 373987 - RNA, 19 nt, Homo sapiens
  misc_RNA (1)...(19): siRNA sense strand
uggaggaugagcugcauaa

SEQ ID NO: 373988 - RNA, 19 nt, Homo sapiens
  misc_RNA (1)...(19): siRNA sense strand
gaccaacaaccagaccauu

SEQ ID NO: 373989 - RNA, 19 nt, Homo sapiens
  misc_RNA (1)...(19): siRNA sense strand
gggagauggagaaagugua

SEQ ID NO: 373990 - RNA, 19 nt, Homo sapiens
  misc_RNA (1)...(19): siRNA sense strand
gaccaacaacgagcuugaa

SEQ ID NO: 373991 - RNA, 19 nt, Homo sapiens
  misc_RNA (1)...(19): siRNA sense strand
uaacuauugcugagaccaa

SEQ ID NO: 373992 - RNA, 19 nt, Homo sapiens
  misc_RNA (1)...(19): siRNA sense strand
ggaggaugagcugcauaaa

SEQ ID NO: 373993 - RNA, 19 nt, Homo sapiens
  misc_RNA (1)...(19): siRNA sense strand
caacaaccagaccauuugg

SEQ ID NO: 373994 - RNA, 19 nt, Homo sapiens
  misc_RNA (1)...(19): siRNA sense strand
ugcgggagauggagaaagu

SEQ ID NO: 373995 - RNA, 19 nt, Homo sapiens
  misc_RNA (1)...(19): siRNA sense strand
ucaucgaggccaccaagaa

SEQ ID NO: 373996 - RNA, 19 nt, Homo sapiens
  misc_RNA (1)...(19): siRNA sense strand
gacacuagagaucgacaga

SEQ ID NO: 373997 - RNA, 19 nt, Homo sapiens
  misc_RNA (1)...(19): siRNA sense strand
cuucacacguaccacaaau

SEQ ID NO: 373998 - RNA, 19 nt, Homo sapiens
  misc_RNA (1)...(19): siRNA sense strand
ccaugcugcuggacaccaa

SEQ ID NO: 373999 - RNA, 19 nt, Homo sapiens
  misc_RNA (1)...(19): siRNA sense strand
aagagaagaauaccuugga

SEQ ID NO: 374000 - RNA, 19 nt, Homo sapiens
  misc_RNA (1)...(19): siRNA sense strand
ccagaccauuugggaugaa

SEQ ID NO: 374001 - RNA, 19 nt, Homo sapiens
  misc_RNA (1)...(19): siRNA sense strand
gcuaccugcuauccaccaa

SEQ ID NO: 374002 - RNA, 19 nt, Homo sapiens
  misc_RNA (1)...(19): siRNA sense strand
accaacaaccagaccauuu

SEQ ID NO: 374003 - RNA, 19 nt, Homo sapiens
  misc_RNA (1)...(19): siRNA sense strand
gaggaggaucugcgcacaa

SEQ ID NO: 374004 - RNA, 19 nt, Homo sapiens
  misc_RNA (1)...(19): siRNA sense strand
gcucaaguggcaagagaag

SEQ ID NO: 374005 - RNA, 19 nt, Homo sapiens
  misc_RNA (1)...(19): siRNA sense strand
caucgaggccaccaagaag

SEQ ID NO: 374006 - RNA, 19 nt, Homo sapiens
  misc_RNA (1)...(19): siRNA sense strand
cgacugguggagaggauug

SEQ ID NO: 374007 - RNA, 19 nt, Homo sapiens
  misc_RNA (1)...(19): siRNA sense strand
ucucagagguccagauaaa

SEQ ID NO: 374008 - RNA, 19 nt, Homo sapiens
  misc_RNA (1)...(19): siRNA sense strand
gcacagccuucaccaugga

SEQ ID NO: 374009 - RNA, 19 nt, Homo sapiens
  misc_RNA (1)...(19): siRNA sense strand
gaaacacaaacggcaaaug

SEQ ID NO: 374010 - RNA, 19 nt, Homo sapiens
  misc_RNA (1)...(19): siRNA sense strand
cagaaucgccgcaugaaac

SEQ ID NO: 374011 - RNA, 19 nt, Homo sapiens
  misc_RNA (1)...(19): siRNA sense strand
aaacacaaacggcaaaugc

SEQ ID NO: 374012 - RNA, 19 nt, Homo sapiens
  misc_RNA (1)...(19): siRNA sense strand
ugaguaaggagccaaauac

SEQ ID NO: 374013 - RNA, 19 nt, Homo sapiens
  misc_RNA (1)...(19): siRNA sense strand
ucagaaucgccgcaugaaa

SEQ ID NO: 374014 - RNA, 19 nt, Homo sapiens
  misc_RNA (1)...(19): siRNA sense strand
uugaguaaggagccaaaua

SEQ ID NO: 374015 - RNA, 19 nt, Homo sapiens
  misc_RNA (1)...(19): siRNA sense strand
ccucaggccgucagcauca

SEQ ID NO: 374016 - RNA, 19 nt, Homo sapiens
  misc_RNA (1)...(19): siRNA sense strand
gcaagucccuggaugguaa

SEQ ID NO: 374017 - RNA, 19 nt, Homo sapiens
  misc_RNA (1)...(19): siRNA sense strand
gagagcccuuugagagcua

SEQ ID NO: 374018 - RNA, 19 nt, Homo sapiens
  misc_RNA (1)...(19): siRNA sense strand
gaucgugggcucucucugu

SEQ ID NO: 374019 - RNA, 19 nt, Homo sapiens
  misc_RNA (1)...(19): siRNA sense strand
gaggaggccggagcagaua

SEQ ID NO: 374020 - RNA, 19 nt, Homo sapiens
  misc_RNA (1)...(19): siRNA sense strand
ugaaagaccgagaaaccaa

SEQ ID NO: 374021 - RNA, 19 nt, Homo sapiens
  misc_RNA (1)...(19): siRNA sense strand
aagccgaguuuggcaagua

SEQ ID NO: 374022 - RNA, 19 nt, Homo sapiens
  misc_RNA (1)...(19): siRNA sense strand
gaacggcaagucccuggau

SEQ ID NO: 374023 - RNA, 19 nt, Homo sapiens
  misc_RNA (1)...(19): siRNA sense strand
ucgaggugcuccugaugaa

SEQ ID NO: 374024 - RNA, 19 nt, Homo sapiens
  misc_RNA (1)...(19): siRNA sense strand
gaugaaagaccgagaaacc

SEQ ID NO: 374025 - RNA, 19 nt, Homo sapiens
  misc_RNA (1)...(19): siRNA sense strand
gaggugcuccugaugaaag

SEQ ID NO: 374026 - RNA, 19 nt, Homo sapiens
  misc_RNA (1)...(19): siRNA sense strand
acaguuacagcagcaguua

SEQ ID NO: 374027 - RNA, 19 nt, Homo sapiens
  misc_RNA (1)...(19): siRNA sense strand
gaguacacccaccgcgauu

SEQ ID NO: 374028 - RNA, 19 nt, Homo sapiens
  misc_RNA (1)...(19): siRNA sense strand
ccaccaaaccggcguucga

SEQ ID NO: 374029 - RNA, 19 nt, Homo sapiens
  misc_RNA (1)...(19): siRNA sense strand
caucgagagcccuuugaga

SEQ ID NO: 374030 - RNA, 19 nt, Homo sapiens
  misc_RNA (1)...(19): siRNA sense strand
gaagccgaguuuggcaagu

SEQ ID NO: 374031 - RNA, 19 nt, Homo sapiens
  misc_RNA (1)...(19): siRNA sense strand
ucgcguucgucaccuuuga

SEQ ID NO: 374032 - RNA, 19 nt, Homo sapiens
  misc_RNA (1)...(19): siRNA sense strand
ggcaagucccuggauggua

SEQ ID NO: 374033 - RNA, 19 nt, Homo sapiens
  misc_RNA (1)...(19): siRNA sense strand
gacaguuacagcagcaguu

SEQ ID NO: 374034 - RNA, 19 nt, Homo sapiens
  misc_RNA (1)...(19): siRNA sense strand
guacacccaccgcgauuac

SEQ ID NO: 374035 - RNA, 19 nt, Homo sapiens
  misc_RNA (1)...(19): siRNA sense strand
agggaaggcugaagagaga

SEQ ID NO: 374036 - RNA, 19 nt, Homo sapiens
  misc_RNA (1)...(19): siRNA sense strand
gaccaugagacguuucuga

SEQ ID NO: 374037 - RNA, 19 nt, Homo sapiens
  misc_RNA (1)...(19): siRNA sense strand
gagcaugacccguucuucu

SEQ ID NO: 374038 - RNA, 19 nt, Homo sapiens
  misc_RNA (1)...(19): siRNA sense strand
cuacuugccugaagauggu

SEQ ID NO: 374039 - RNA, 19 nt, Homo sapiens
  misc_RNA (1)...(19): siRNA sense strand
guugacuggugcaauguga

SEQ ID NO: 374040 - RNA, 19 nt, Homo sapiens
  misc_RNA (1)...(19): siRNA sense strand
aaucgggacagcuuugaua

SEQ ID NO: 374041 - RNA, 19 nt, Homo sapiens
  misc_RNA (1)...(19): siRNA sense strand
aaagaagggguauacauua

SEQ ID NO: 374042 - RNA, 19 nt, Homo sapiens
  misc_RNA (1)...(19): siRNA sense strand
gaaaagaagggguauacau

SEQ ID NO: 374043 - RNA, 19 nt, Homo sapiens
  misc_RNA (1)...(19): siRNA sense strand
aagaagggguauacauuaa

SEQ ID NO: 374044 - RNA, 19 nt, Homo sapiens
  misc_RNA (1)...(19): siRNA sense strand
ugccggagccugcagauga

SEQ ID NO: 374045 - RNA, 19 nt, Homo sapiens
  misc_RNA (1)...(19): siRNA sense strand
cccagaccgugacuucuug

SEQ ID NO: 374046 - RNA, 19 nt, Homo sapiens
  misc_RNA (1)...(19): siRNA sense strand
aaaagaagggguauacauu

SEQ ID NO: 374047 - RNA, 19 nt, Homo sapiens
  misc_RNA (1)...(19): siRNA sense strand
ggagggaaggcugaagaga

SEQ ID NO: 374048 - RNA, 19 nt, Homo sapiens
  misc_RNA (1)...(19): siRNA sense strand
cgggacagcuuugauacca

SEQ ID NO: 374049 - RNA, 19 nt, Homo sapiens
  misc_RNA (1)...(19): siRNA sense strand
cgcguugacuggugcaaug

SEQ ID NO: 374050 - RNA, 19 nt, Homo sapiens
  misc_RNA (1)...(19): siRNA sense strand
ucuccacccugcccauguu

SEQ ID NO: 374051 - RNA, 19 nt, Homo sapiens
  misc_RNA (1)...(19): siRNA sense strand
gaagggguauacauuaagg

SEQ ID NO: 374052 - RNA, 19 nt, Homo sapiens
  misc_RNA (1)...(19): siRNA sense strand
aaugugacccugguggaua

SEQ ID NO: 374053 - RNA, 19 nt, Homo sapiens
  misc_RNA (1)...(19): siRNA sense strand
cuacaaucgggacagcuuu

SEQ ID NO: 374054 - RNA, 19 nt, Homo sapiens
  misc_RNA (1)...(19): siRNA sense strand
augugacccugguggauaa

SEQ ID NO: 374055 - RNA, 19 nt, Homo sapiens
  misc_RNA (1)...(19): siRNA sense strand
ugaggucacagccuacaau

SEQ ID NO: 374056 - RNA, 19 nt, Homo sapiens
  misc_RNA (1)...(19): siRNA sense strand
agccuccacuucugucuug

SEQ ID NO: 374057 - RNA, 19 nt, Homo sapiens
  misc_RNA (1)...(19): siRNA sense strand
caaagaagcugcugccaaa

SEQ ID NO: 374058 - RNA, 19 nt, Homo sapiens
  misc_RNA (1)...(19): siRNA sense strand
gaacaucucugaaguggau

SEQ ID NO: 374059 - RNA, 19 nt, Homo sapiens
  misc_RNA (1)...(19): siRNA sense strand
gcacagcgaccacauguuu

SEQ ID NO: 374060 - RNA, 19 nt, Homo sapiens
  misc_RNA (1)...(19): siRNA sense strand
gaaggaagcacuuauggaa

SEQ ID NO: 374061 - RNA, 19 nt, Homo sapiens
  misc_RNA (1)...(19): siRNA sense strand
gagcuucaccucuuccuua

SEQ ID NO: 374062 - RNA, 19 nt, Homo sapiens
  misc_RNA (1)...(19): siRNA sense strand
cgacugaacuuucuggaau

SEQ ID NO: 374063 - RNA, 19 nt, Homo sapiens
  misc_RNA (1)...(19): siRNA sense strand
ggaagaauaugccauugca

SEQ ID NO: 374064 - RNA, 19 nt, Homo sapiens
  misc_RNA (1)...(19): siRNA sense strand
ggaagaugcuggagaacau

SEQ ID NO: 374065 - RNA, 19 nt, Homo sapiens
  misc_RNA (1)...(19): siRNA sense strand
gaaaugauauucgaaagac

SEQ ID NO: 374066 - RNA, 19 nt, Homo sapiens
  misc_RNA (1)...(19): siRNA sense strand
caugagauguuaaacgaaa

SEQ ID NO: 374067 - RNA, 19 nt, Homo sapiens
  misc_RNA (1)...(19): siRNA sense strand
uaugagaccuuaugcaaug

SEQ ID NO: 374068 - RNA, 19 nt, Homo sapiens
  misc_RNA (1)...(19): siRNA sense strand
cggagaagguguuugcuaa

SEQ ID NO: 374069 - RNA, 19 nt, Homo sapiens
  misc_RNA (1)...(19): siRNA sense strand
ggacuucuauaacgugaga

SEQ ID NO: 374070 - RNA, 19 nt, Homo sapiens
  misc_RNA (1)...(19): siRNA sense strand
gaagguguuugcuaaagug

SEQ ID NO: 374071 - RNA, 19 nt, Homo sapiens
  misc_RNA (1)...(19): siRNA sense strand
uaaacgaaauguccgaguu

SEQ ID NO: 374072 - RNA, 19 nt, Homo sapiens
  misc_RNA (1)...(19): siRNA sense strand
agaaggaccugaaggaaau

SEQ ID NO: 374073 - RNA, 19 nt, Homo sapiens
  misc_RNA (1)...(19): siRNA sense strand
caagaagaguccgguauug

SEQ ID NO: 374074 - RNA, 19 nt, Homo sapiens
  misc_RNA (1)...(19): siRNA sense strand
gaagaggacagcaaagaug

SEQ ID NO: 374075 - RNA, 19 nt, Homo sapiens
  misc_RNA (1)...(19): siRNA sense strand
ggucuacucucccaacaug

SEQ ID NO: 374076 - RNA, 19 nt, Homo sapiens
  misc_RNA (1)...(19): siRNA sense strand
gauaugagaccuuaugcaa

SEQ ID NO: 374077 - RNA, 19 nt, Homo sapiens
  misc_RNA (1)...(19): siRNA sense strand
agagggagcugcagaagga

SEQ ID NO: 374078 - RNA, 19 nt, Homo sapiens
  misc_RNA (1)...(19): siRNA sense strand
ugagaaagguggacacaca

SEQ ID NO: 374079 - RNA, 19 nt, Homo sapiens
  misc_RNA (1)...(19): siRNA sense strand
ggaaaugauauucgaaaga

SEQ ID NO: 374080 - RNA, 19 nt, Homo sapiens
  misc_RNA (1)...(19): siRNA sense strand
gcuaugaaaucagaagaga

SEQ ID NO: 374081 - RNA, 19 nt, Homo sapiens
  misc_RNA (1)...(19): siRNA sense strand
gaagagaucaccgccuuga

SEQ ID NO: 374082 - RNA, 19 nt, Homo sapiens
  misc_RNA (1)...(19): siRNA sense strand
ugaaggaaaugauauucga

SEQ ID NO: 374083 - RNA, 19 nt, Homo sapiens
  misc_RNA (1)...(19): siRNA sense strand
gagaagguguuugcuaaag

SEQ ID NO: 374084 - RNA, 19 nt, Homo sapiens
  misc_RNA (1)...(19): siRNA sense strand
agacaaauguggcucagau

SEQ ID NO: 374085 - RNA, 19 nt, Homo sapiens
  misc_RNA (1)...(19): siRNA sense strand
ggaccugaaggaaaugaua

SEQ ID NO: 374086 - RNA, 19 nt, Homo sapiens
  misc_RNA (1)...(19): siRNA sense strand
gagaagaggacagcaaaga

SEQ ID NO: 374087 - RNA, 19 nt, Homo sapiens
  misc_RNA (1)...(19): siRNA sense strand
cgaaauguccgaguucaaa

SEQ ID NO: 374088 - RNA, 19 nt, Homo sapiens
  misc_RNA (1)...(19): siRNA sense strand
uaaagaaggaccugaagga

SEQ ID NO: 374089 - RNA, 19 nt, Homo sapiens
  misc_RNA (1)...(19): siRNA sense strand
gcaaaugccgccacagcaa

SEQ ID NO: 374090 - RNA, 19 nt, Homo sapiens
  misc_RNA (1)...(19): siRNA sense strand
ggacugcauguuucucuuu

SEQ ID NO: 374091 - RNA, 19 nt, Homo sapiens
  misc_RNA (1)...(19): siRNA sense strand
gagcagaacccacccuaca

SEQ ID NO: 374092 - RNA, 19 nt, Homo sapiens
  misc_RNA (1)...(19): siRNA sense strand
ccucacugcugacaacauu

SEQ ID NO: 374093 - RNA, 19 nt, Homo sapiens
  misc_RNA (1)...(19): siRNA sense strand
cuaaagugcuccgagaaga

SEQ ID NO: 374094 - RNA, 19 nt, Homo sapiens
  misc_RNA (1)...(19): siRNA sense strand
ggaagcacuuauggaagaa

SEQ ID NO: 374095 - RNA, 19 nt, Homo sapiens
  misc_RNA (1)...(19): siRNA sense strand
aggaagcacuuauggaaga

SEQ ID NO: 374096 - RNA, 19 nt, Homo sapiens
  misc_RNA (1)...(19): siRNA sense strand
gcagacauuccaccgcuuu

SEQ ID NO: 374097 - RNA, 19 nt, Homo sapiens
  misc_RNA (1)...(19): siRNA sense strand
gauauucgaaagacaaaug

SEQ ID NO: 374098 - RNA, 19 nt, Homo sapiens
  misc_RNA (1)...(19): siRNA sense strand
ggagaagguguuugcuaaa

SEQ ID NO: 374099 - RNA, 19 nt, Homo sapiens
  misc_RNA (1)...(19): siRNA sense strand
acaagggacugcauguuuc

SEQ ID NO: 374100 - RNA, 19 nt, Homo sapiens
  misc_RNA (1)...(19): siRNA sense strand
cacaagggacugcauguuu

SEQ ID NO: 374101 - RNA, 19 nt, Homo sapiens
  misc_RNA (1)...(19): siRNA sense strand
acaguuuguuccucgaaua

SEQ ID NO: 374102 - RNA, 19 nt, Homo sapiens
  misc_RNA (1)...(19): siRNA sense strand
aagcacuuauggaagaaua

SEQ ID NO: 374103 - RNA, 19 nt, Homo sapiens
  misc_RNA (1)...(19): siRNA sense strand
gaaggaaaugauauucgaa

SEQ ID NO: 374104 - RNA, 19 nt, Homo sapiens
  misc_RNA (1)...(19): siRNA sense strand
cuucaccucuuccuuaaau

SEQ ID NO: 374105 - RNA, 19 nt, Homo sapiens
  misc_RNA (1)...(19): siRNA sense strand
ggauggcauuccgauauga

SEQ ID NO: 374106 - RNA, 19 nt, Homo sapiens
  misc_RNA (1)...(19): siRNA sense strand
ucaagaagaguccgguauu

SEQ ID NO: 374107 - RNA, 19 nt, Homo sapiens
  misc_RNA (1)...(19): siRNA sense strand
guucagccuucaugagaug

SEQ ID NO: 374108 - RNA, 19 nt, Homo sapiens
  misc_RNA (1)...(19): siRNA sense strand
agaagcugcugccaaacuu

SEQ ID NO: 374109 - RNA, 19 nt, Homo sapiens
  misc_RNA (1)...(19): siRNA sense strand
ugugugagaucgccaggaa

SEQ ID NO: 374110 - RNA, 19 nt, Homo sapiens
  misc_RNA (1)...(19): siRNA sense strand
gggcugcuccucaagaaga

SEQ ID NO: 374111 - RNA, 19 nt, Homo sapiens
  misc_RNA (1)...(19): siRNA sense strand
ugagggaauuccuacacaa

SEQ ID NO: 374112 - RNA, 19 nt, Homo sapiens
  misc_RNA (1)...(19): siRNA sense strand
ggaucacuuuggaggacua

SEQ ID NO: 374113 - RNA, 19 nt, Homo sapiens
  misc_RNA (1)...(19): siRNA sense strand
gaagcugcugccaaacuuu

SEQ ID NO: 374114 - RNA, 19 nt, Homo sapiens
  misc_RNA (1)...(19): siRNA sense strand
cagccuucaugagauguua

SEQ ID NO: 374115 - RNA, 19 nt, Homo sapiens
  misc_RNA (1)...(19): siRNA sense strand
ucaccgccuugaccaacua

SEQ ID NO: 374116 - RNA, 19 nt, Homo sapiens
  misc_RNA (1)...(19): siRNA sense strand
gcggagaagguguuugcua

SEQ ID NO: 374117 - RNA, 19 nt, Homo sapiens
  misc_RNA (1)...(19): siRNA sense strand
aagaaggaccugaaggaaa

SEQ ID NO: 374118 - RNA, 19 nt, Homo sapiens
  misc_RNA (1)...(19): siRNA sense strand
ccaagaucaucgagagcuu

SEQ ID NO: 374119 - RNA, 19 nt, Homo sapiens
  misc_RNA (1)...(19): siRNA sense strand
ugcgugaccuguauuugaa

SEQ ID NO: 374120 - RNA, 19 nt, Homo sapiens
  misc_RNA (1)...(19): siRNA sense strand
ugaaguggaugagcaaguc

SEQ ID NO: 374121 - RNA, 19 nt, Homo sapiens
  misc_RNA (1)...(19): siRNA sense strand
gggcauccucuuuguguau

SEQ ID NO: 374122 - RNA, 19 nt, Homo sapiens
  misc_RNA (1)...(19): siRNA sense strand
cgaccucacuguggacuca

SEQ ID NO: 374123 - RNA, 19 nt, Homo sapiens
  misc_RNA (1)...(19): siRNA sense strand
ccuaugccaugccugaguu

SEQ ID NO: 374124 - RNA, 19 nt, Homo sapiens
  misc_RNA (1)...(19): siRNA sense strand
gcacuuauggaagaauaug

SEQ ID NO: 374125 - RNA, 19 nt, Homo sapiens
  misc_RNA (1)...(19): siRNA sense strand
guuuguuccucgaauauuc

SEQ ID NO: 374126 - RNA, 19 nt, Homo sapiens
  misc_RNA (1)...(19): siRNA sense strand
ucuacuaccuugcucagau

SEQ ID NO: 374127 - RNA, 19 nt, Homo sapiens
  misc_RNA (1)...(19): siRNA sense strand
agaguccgguauugcagua

SEQ ID NO: 374128 - RNA, 19 nt, Homo sapiens
  misc_RNA (1)...(19): siRNA sense strand
ucacuuuggaggacuauga

SEQ ID NO: 374129 - RNA, 19 nt, Homo sapiens
  misc_RNA (1)...(19): siRNA sense strand
aagagggccuuccagacuu

SEQ ID NO: 374130 - RNA, 19 nt, Homo sapiens
  misc_RNA (1)...(19): siRNA sense strand
uaugaaaucagaagagauc

SEQ ID NO: 374131 - RNA, 19 nt, Homo sapiens
  misc_RNA (1)...(19): siRNA sense strand
aagaugcccugucccuguu

SEQ ID NO: 374132 - RNA, 19 nt, Homo sapiens
  misc_RNA (1)...(19): siRNA sense strand
ccucgaauauuccaagaac

SEQ ID NO: 374133 - RNA, 19 nt, Homo sapiens
  misc_RNA (1)...(19): siRNA sense strand
ccaccgcuuugacaaguuc

SEQ ID NO: 374134 - RNA, 19 nt, Homo sapiens
  misc_RNA (1)...(19): siRNA sense strand
uguccgaguucaaagaguu

SEQ ID NO: 374135 - RNA, 19 nt, Homo sapiens
  misc_RNA (1)...(19): siRNA sense strand
gaaauguccgaguucaaag

SEQ ID NO: 374136 - RNA, 19 nt, Homo sapiens
  misc_RNA (1)...(19): siRNA sense strand
ccucuuagcaacaacaguu

SEQ ID NO: 374137 - RNA, 19 nt, Homo sapiens
  misc_RNA (1)...(19): siRNA sense strand
gaccugaaggaaaugauau

SEQ ID NO: 374138 - RNA, 19 nt, Homo sapiens
  misc_RNA (1)...(19): siRNA sense strand
agaagguguuugcuaaagu

SEQ ID NO: 374139 - RNA, 19 nt, Homo sapiens
  misc_RNA (1)...(19): siRNA sense strand
caucagcggagauuacugu

SEQ ID NO: 374140 - RNA, 19 nt, Homo sapiens
  misc_RNA (1)...(19): siRNA sense strand
gcaccugcgaccuguguga

SEQ ID NO: 374141 - RNA, 19 nt, Homo sapiens
  misc_RNA (1)...(19): siRNA sense strand
uugggaagaugcuggagaa

SEQ ID NO: 374142 - RNA, 19 nt, Homo sapiens
  misc_RNA (1)...(19): siRNA sense strand
uucaugagauguuaaacga

SEQ ID NO: 374143 - RNA, 19 nt, Homo sapiens
  misc_RNA (1)...(19): siRNA sense strand
uaaugauccgggagaagua

SEQ ID NO: 374144 - RNA, 19 nt, Homo sapiens
  misc_RNA (1)...(19): siRNA sense strand
aaagaaggaccugaaggaa

SEQ ID NO: 374145 - RNA, 19 nt, Homo sapiens
  misc_RNA (1)...(19): siRNA sense strand
cgaaggaagcacuuaugga

SEQ ID NO: 374146 - RNA, 19 nt, Homo sapiens
  misc_RNA (1)...(19): siRNA sense strand
ugagcugcgugaccuguau

SEQ ID NO: 374147 - RNA, 19 nt, Homo sapiens
  misc_RNA (1)...(19): siRNA sense strand
gaaagguggacacacacau

SEQ ID NO: 374148 - RNA, 19 nt, Homo sapiens
  misc_RNA (1)...(19): siRNA sense strand
gacugaacuuucuggaauc

SEQ ID NO: 374149 - RNA, 19 nt, Homo sapiens
  misc_RNA (1)...(19): siRNA sense strand
gugccgggaucacuuugga

SEQ ID NO: 374150 - RNA, 19 nt, Homo sapiens
  misc_RNA (1)...(19): siRNA sense strand
gcuaaagugcuccgagaag

SEQ ID NO: 374151 - RNA, 19 nt, Homo sapiens
  misc_RNA (1)...(19): siRNA sense strand
gacugcauguuucucuuuc

SEQ ID NO: 374152 - RNA, 19 nt, Homo sapiens
  misc_RNA (1)...(19): siRNA sense strand
gggacugcauguuucucuu

SEQ ID NO: 374153 - RNA, 19 nt, Homo sapiens
  misc_RNA (1)...(19): siRNA sense strand
cuacuaccuugcucagauc

SEQ ID NO: 374154 - RNA, 19 nt, Homo sapiens
  misc_RNA (1)...(19): siRNA sense strand
ucaccucuuccuuaaauau

SEQ ID NO: 374155 - RNA, 19 nt, Homo sapiens
  misc_RNA (1)...(19): siRNA sense strand
caacaugcgcuggaucauc

SEQ ID NO: 374156 - RNA, 19 nt, Homo sapiens
  misc_RNA (1)...(19): siRNA sense strand
gcauccucuuuguguauga

SEQ ID NO: 374157 - RNA, 19 nt, Homo sapiens
  misc_RNA (1)...(19): siRNA sense strand
ggacaccgcucuaugacuu

SEQ ID NO: 374158 - RNA, 19 nt, Homo sapiens
  misc_RNA (1)...(19): siRNA sense strand
ggacaaugcugcugguaga

SEQ ID NO: 374159 - RNA, 19 nt, Homo sapiens
  misc_RNA (1)...(19): siRNA sense strand
ggcaacagcuauucugaaa

SEQ ID NO: 374160 - RNA, 19 nt, Homo sapiens
  misc_RNA (1)...(19): siRNA sense strand
gcaggacaccgcucuauga

SEQ ID NO: 374161 - RNA, 19 nt, Homo sapiens
  misc_RNA (1)...(19): siRNA sense strand
gccuggagguguuggauaa

SEQ ID NO: 374162 - RNA, 19 nt, Homo sapiens
  misc_RNA (1)...(19): siRNA sense strand
gauggagagucuagugguu

SEQ ID NO: 374163 - RNA, 19 nt, Homo sapiens
  misc_RNA (1)...(19): siRNA sense strand
ucagggagcuucagaacca

SEQ ID NO: 374164 - RNA, 19 nt, Homo sapiens
  misc_RNA (1)...(19): siRNA sense strand
ucagcaagaugcccuuugu

SEQ ID NO: 374165 - RNA, 19 nt, Homo sapiens
  misc_RNA (1)...(19): siRNA sense strand
ugaggaaacugcccuucau

SEQ ID NO: 374166 - RNA, 19 nt, Homo sapiens
  misc_RNA (1)...(19): siRNA sense strand
gcagaugaccugaggaaac

SEQ ID NO: 374167 - RNA, 19 nt, Homo sapiens
  misc_RNA (1)...(19): siRNA sense strand
cauggaggguaccaagauu

SEQ ID NO: 374168 - RNA, 19 nt, Homo sapiens
  misc_RNA (1)...(19): siRNA sense strand
ugacauugaugaacacacu

SEQ ID NO: 374169 - RNA, 19 nt, Homo sapiens
  misc_RNA (1)...(19): siRNA sense strand
ucuagugguuggagacauu

SEQ ID NO: 374170 - RNA, 19 nt, Homo sapiens
  misc_RNA (1)...(19): siRNA sense strand
cagaugaccugaggaaacu

SEQ ID NO: 374171 - RNA, 19 nt, Homo sapiens
  misc_RNA (1)...(19): siRNA sense strand
agaauguggcgauggguua

SEQ ID NO: 374172 - RNA, 19 nt, Homo sapiens
  misc_RNA (1)...(19): siRNA sense strand
uugcagagcuaagaccaaa

SEQ ID NO: 374173 - RNA, 19 nt, Homo sapiens
  misc_RNA (1)...(19): siRNA sense strand
aaacuacuauacccucaag

SEQ ID NO: 374174 - RNA, 19 nt, Homo sapiens
  misc_RNA (1)...(19): siRNA sense strand
gaaccagggcagagaugug

SEQ ID NO: 374175 - RNA, 19 nt, Homo sapiens
  misc_RNA (1)...(19): siRNA sense strand
cuacuauacccucaaguga

SEQ ID NO: 374176 - RNA, 19 nt, Homo sapiens
  misc_RNA (1)...(19): siRNA sense strand
ggagguguuuggcgugucu

SEQ ID NO: 374177 - RNA, 19 nt, Homo sapiens
  misc_RNA (1)...(19): siRNA sense strand
guaagcugauggagagucu

SEQ ID NO: 374178 - RNA, 19 nt, Homo sapiens
  misc_RNA (1)...(19): siRNA sense strand
caagauugguacugugacu

SEQ ID NO: 374179 - RNA, 19 nt, Homo sapiens
  misc_RNA (1)...(19): siRNA sense strand
caugaccagugcugugaug

SEQ ID NO: 374180 - RNA, 19 nt, Homo sapiens
  misc_RNA (1)...(19): siRNA sense strand
ucuuugacgugucucauau

SEQ ID NO: 374181 - RNA, 19 nt, Homo sapiens
  misc_RNA (1)...(19): siRNA sense strand
gaggaaacugcccuucaug

SEQ ID NO: 374182 - RNA, 19 nt, Homo sapiens
  misc_RNA (1)...(19): siRNA sense strand
cacugucgcuguuuaccaa

SEQ ID NO: 374183 - RNA, 19 nt, Homo sapiens
  misc_RNA (1)...(19): siRNA sense strand
agaaagauuuggcccucau

SEQ ID NO: 374184 - RNA, 19 nt, Homo sapiens
  misc_RNA (1)...(19): siRNA sense strand
gagaggaugguguggagau

SEQ ID NO: 374185 - RNA, 19 nt, Homo sapiens
  misc_RNA (1)...(19): siRNA sense strand
ggaaacugcccuucaugac

SEQ ID NO: 374186 - RNA, 19 nt, Homo sapiens
  misc_RNA (1)...(19): siRNA sense strand
gaaagauuuggcccucaug

SEQ ID NO: 374187 - RNA, 19 nt, Homo sapiens
  misc_RNA (1)...(19): siRNA sense strand
ggccuugugucguccacuu

SEQ ID NO: 374188 - RNA, 19 nt, Homo sapiens
  misc_RNA (1)...(19): siRNA sense strand
ggagacauugcagagcuaa

SEQ ID NO: 374189 - RNA, 19 nt, Homo sapiens
  misc_RNA (1)...(19): siRNA sense strand
gugcugugauggagguguu

SEQ ID NO: 374190 - RNA, 19 nt, Homo sapiens
  misc_RNA (1)...(19): siRNA sense strand
gcugcugggagaaagauuu

SEQ ID NO: 374191 - RNA, 19 nt, Homo sapiens
  misc_RNA (1)...(19): siRNA sense strand
agacauugcagagcuaaga

SEQ ID NO: 374192 - RNA, 19 nt, Homo sapiens
  misc_RNA (1)...(19): siRNA sense strand
uggagacauugcagagcua

SEQ ID NO: 374193 - RNA, 19 nt, Homo sapiens
  misc_RNA (1)...(19): siRNA sense strand
ggaaaaugguggcguuugc

SEQ ID NO: 374194 - RNA, 19 nt, Homo sapiens
  misc_RNA (1)...(19): siRNA sense strand
gaauguggcgauggguuau

SEQ ID NO: 374195 - RNA, 19 nt, Homo sapiens
  misc_RNA (1)...(19): siRNA sense strand
guuggauaaugcccugcua

SEQ ID NO: 374196 - RNA, 19 nt, Homo sapiens
  misc_RNA (1)...(19): siRNA sense strand
cgaggcuggaggcaucuua

SEQ ID NO: 374197 - RNA, 19 nt, Homo sapiens
  misc_RNA (1)...(19): siRNA sense strand
guuaugugcccugcgagua

SEQ ID NO: 374198 - RNA, 19 nt, Homo sapiens
  misc_RNA (1)...(19): siRNA sense strand
gcacugcucgcucuuugac

SEQ ID NO: 374199 - RNA, 19 nt, Homo sapiens
  misc_RNA (1)...(19): siRNA sense strand
uagaugacuugauuguaac

SEQ ID NO: 374200 - RNA, 19 nt, Homo sapiens
  misc_RNA (1)...(19): siRNA sense strand
ggacaaggucagggagcuu

SEQ ID NO: 374201 - RNA, 19 nt, Homo sapiens
  misc_RNA (1)...(19): siRNA sense strand
ggagccaaggucauuguuc

SEQ ID NO: 374202 - RNA, 19 nt, Homo sapiens
  misc_RNA (1)...(19): siRNA sense strand
gcugauggagagucuagug

SEQ ID NO: 374203 - RNA, 19 nt, Homo sapiens
  misc_RNA (1)...(19): siRNA sense strand
aggaaacugcccuucauga

SEQ ID NO: 374204 - RNA, 19 nt, Homo sapiens
  misc_RNA (1)...(19): siRNA sense strand
ggccuggagguguuggaua

SEQ ID NO: 374205 - RNA, 19 nt, Homo sapiens
  misc_RNA (1)...(19): siRNA sense strand
ggucagggagcuucagaac

SEQ ID NO: 374206 - RNA, 19 nt, Homo sapiens
  misc_RNA (1)...(19): siRNA sense strand
caaacuacuauacccucaa

SEQ ID NO: 374207 - RNA, 19 nt, Homo sapiens
  misc_RNA (1)...(19): siRNA sense strand
ucaccuggcaacagcuauu

SEQ ID NO: 374208 - RNA, 19 nt, Homo sapiens
  misc_RNA (1)...(19): siRNA sense strand
gaagauggaugcagaauuc

SEQ ID NO: 374209 - RNA, 19 nt, Homo sapiens
  misc_RNA (1)...(19): siRNA sense strand
aaacaaaggugcaaucauu

SEQ ID NO: 374210 - RNA, 19 nt, Homo sapiens
  misc_RNA (1)...(19): siRNA sense strand
gaacaacuuugacacagaa

SEQ ID NO: 374211 - RNA, 19 nt, Homo sapiens
  misc_RNA (1)...(19): siRNA sense strand
gaggagaucucugaaguga

SEQ ID NO: 374212 - RNA, 19 nt, Homo sapiens
  misc_RNA (1)...(19): siRNA sense strand
ggagaucucugaagugaag

SEQ ID NO: 374213 - RNA, 19 nt, Homo sapiens
  misc_RNA (1)...(19): siRNA sense strand
ggaacaacuuugacacaga

SEQ ID NO: 374214 - RNA, 19 nt, Homo sapiens
  misc_RNA (1)...(19): siRNA sense strand
gaacuugccuaaagcugau

SEQ ID NO: 374215 - RNA, 19 nt, Homo sapiens
  misc_RNA (1)...(19): siRNA sense strand
aaagagacaugcagugaga

SEQ ID NO: 374216 - RNA, 19 nt, Homo sapiens
  misc_RNA (1)...(19): siRNA sense strand
ggugggcgguguugucaua

SEQ ID NO: 374217 - RNA, 19 nt, Homo sapiens
  misc_RNA (1)...(19): siRNA sense strand
caagaaagccgcucagauc

SEQ ID NO: 374218 - RNA, 19 nt, Homo sapiens
  misc_RNA (1)...(19): siRNA sense strand
gaaggcauccugcaguauu

SEQ ID NO: 374219 - RNA, 19 nt, Homo sapiens
  misc_RNA (1)...(19): siRNA sense strand
ccgaggagauucaggauga

SEQ ID NO: 374220 - RNA, 19 nt, Homo sapiens
  misc_RNA (1)...(19): siRNA sense strand
ugacaagugcaaauucuua

SEQ ID NO: 374221 - RNA, 19 nt, Homo sapiens
  misc_RNA (1)...(19): siRNA sense strand
ggguagaguuuguguguug

SEQ ID NO: 374222 - RNA, 19 nt, Homo sapiens
  misc_RNA (1)...(19): siRNA sense strand
cagaagauguggguucaaa

SEQ ID NO: 374223 - RNA, 19 nt, Homo sapiens
  misc_RNA (1)...(19): siRNA sense strand
cgacaugacucaggauaug

SEQ ID NO: 374224 - RNA, 19 nt, Homo sapiens
  misc_RNA (1)...(19): siRNA sense strand
gguucuggguugacaaaua

SEQ ID NO: 374225 - RNA, 19 nt, Homo sapiens
  misc_RNA (1)...(19): siRNA sense strand
agacaaaguaguagaagua

SEQ ID NO: 374226 - RNA, 19 nt, Homo sapiens
  misc_RNA (1)...(19): siRNA sense strand
guaccaacuugcaugacua

SEQ ID NO: 374227 - RNA, 19 nt, Homo sapiens
  misc_RNA (1)...(19): siRNA sense strand
gagagaaccaccagcauug

SEQ ID NO: 374228 - RNA, 19 nt, Homo sapiens
  misc_RNA (1)...(19): siRNA sense strand
ugaagaaagugacaaugug

SEQ ID NO: 374229 - RNA, 19 nt, Homo sapiens
  misc_RNA (1)...(19): siRNA sense strand
ggaagcagccaacgagaga

SEQ ID NO: 374230 - RNA, 19 nt, Homo sapiens
  misc_RNA (1)...(19): siRNA sense strand
guucuggguugacaaauau

SEQ ID NO: 374231 - RNA, 19 nt, Homo sapiens
  misc_RNA (1)...(19): siRNA sense strand
cagauccggucccagguua

SEQ ID NO: 374232 - RNA, 19 nt, Homo sapiens
  misc_RNA (1)...(19): siRNA sense strand
gagugaagacaaaguagua

SEQ ID NO: 374233 - RNA, 19 nt, Homo sapiens
  misc_RNA (1)...(19): siRNA sense strand
gagcaaaacuauucagaug

SEQ ID NO: 374234 - RNA, 19 nt, Homo sapiens
  misc_RNA (1)...(19): siRNA sense strand
gccuaaagcugauaagaag

SEQ ID NO: 374235 - RNA, 19 nt, Homo sapiens
  misc_RNA (1)...(19): siRNA sense strand
cgaagaagccacagagaga

SEQ ID NO: 374236 - RNA, 19 nt, Homo sapiens
  misc_RNA (1)...(19): siRNA sense strand
caugguggaucccaagaaa

SEQ ID NO: 374237 - RNA, 19 nt, Homo sapiens
  misc_RNA (1)...(19): siRNA sense strand
uugaugagcugcuucagaa

SEQ ID NO: 374238 - RNA, 19 nt, Homo sapiens
  misc_RNA (1)...(19): siRNA sense strand
cugcuuaguuggugaguuu

SEQ ID NO: 374239 - RNA, 19 nt, Homo sapiens
  misc_RNA (1)...(19): siRNA sense strand
gaagauguggguucaaaca

SEQ ID NO: 374240 - RNA, 19 nt, Homo sapiens
  misc_RNA (1)...(19): siRNA sense strand
uggaagccaugcucaauga

SEQ ID NO: 374241 - RNA, 19 nt, Homo sapiens
  misc_RNA (1)...(19): siRNA sense strand
gugaugagguagaggaaga

SEQ ID NO: 374242 - RNA, 19 nt, Homo sapiens
  misc_RNA (1)...(19): siRNA sense strand
cggaaacgaugcucucaug

SEQ ID NO: 374243 - RNA, 19 nt, Homo sapiens
  misc_RNA (1)...(19): siRNA sense strand
ugacaaguaucucgagaca

SEQ ID NO: 374244 - RNA, 19 nt, Homo sapiens
  misc_RNA (1)...(19): siRNA sense strand
gaacugcagaucaccaaug

SEQ ID NO: 374245 - RNA, 19 nt, Homo sapiens
  misc_RNA (1)...(19): siRNA sense strand
uaaagcauuucgagcaugu

SEQ ID NO: 374246 - RNA, 19 nt, Homo sapiens
  misc_RNA (1)...(19): siRNA sense strand
caaagaacuugccuaaagc

SEQ ID NO: 374247 - RNA, 19 nt, Homo sapiens
  misc_RNA (1)...(19): siRNA sense strand
ugaggaacccuacgaagaa

SEQ ID NO: 374248 - RNA, 19 nt, Homo sapiens
  misc_RNA (1)...(19): siRNA sense strand
ugagaagaguaccaacuug

SEQ ID NO: 374249 - RNA, 19 nt, Homo sapiens
  misc_RNA (1)...(19): siRNA sense strand
caaccuacaaguucuuuga

SEQ ID NO: 374250 - RNA, 19 nt, Homo sapiens
  misc_RNA (1)...(19): siRNA sense strand
gaagaagccacagagagaa

SEQ ID NO: 374251 - RNA, 19 nt, Homo sapiens
  misc_RNA (1)...(19): siRNA sense strand
ugaggauggugaugaggua

SEQ ID NO: 374252 - RNA, 19 nt, Homo sapiens
  misc_RNA (1)...(19): siRNA sense strand
caagaagucuacccugaac

SEQ ID NO: 374253 - RNA, 19 nt, Homo sapiens
  misc_RNA (1)...(19): siRNA sense strand
uggcugagguggaagaaga

SEQ ID NO: 374254 - RNA, 19 nt, Homo sapiens
  misc_RNA (1)...(19): siRNA sense strand
ccaaagagacaugcaguga

SEQ ID NO: 374255 - RNA, 19 nt, Homo sapiens
  misc_RNA (1)...(19): siRNA sense strand
gaagccaaccaaccaguga

SEQ ID NO: 374256 - RNA, 19 nt, Homo sapiens
  misc_RNA (1)...(19): siRNA sense strand
agaaguggcugagguggaa

SEQ ID NO: 374257 - RNA, 19 nt, Homo sapiens
  misc_RNA (1)...(19): siRNA sense strand
agauguggguucaaacaaa

SEQ ID NO: 374258 - RNA, 19 nt, Homo sapiens
  misc_RNA (1)...(19): siRNA sense strand
ggaagaggcagaacgucaa

SEQ ID NO: 374259 - RNA, 19 nt, Homo sapiens
  misc_RNA (1)...(19): siRNA sense strand
ucccaaaguuuacucaaga

SEQ ID NO: 374260 - RNA, 19 nt, Homo sapiens
  misc_RNA (1)...(19): siRNA sense strand
cagcagaacggcuacgaaa

SEQ ID NO: 374261 - RNA, 19 nt, Homo sapiens
  misc_RNA (1)...(19): siRNA sense strand
gaaacaguacacauccauu

SEQ ID NO: 374262 - RNA, 19 nt, Homo sapiens
  misc_RNA (1)...(19): siRNA sense strand
gauguggguucaaacaaag

SEQ ID NO: 374263 - RNA, 19 nt, Homo sapiens
  misc_RNA (1)...(19): siRNA sense strand
cuauucagaugacgucuug

SEQ ID NO: 374264 - RNA, 19 nt, Homo sapiens
  misc_RNA (1)...(19): siRNA sense strand
cagcacacccuaaagcauu

SEQ ID NO: 374265 - RNA, 19 nt, Homo sapiens
  misc_RNA (1)...(19): siRNA sense strand
caaaguuuacucaagacua

SEQ ID NO: 374266 - RNA, 19 nt, Homo sapiens
  misc_RNA (1)...(19): siRNA sense strand
cgccaugucccaaaguuua

SEQ ID NO: 374267 - RNA, 19 nt, Homo sapiens
  misc_RNA (1)...(19): siRNA sense strand
gaaagugacaauguggauu

SEQ ID NO: 374268 - RNA, 19 nt, Homo sapiens
  misc_RNA (1)...(19): siRNA sense strand
cggaggagaucucugaagu

SEQ ID NO: 374269 - RNA, 19 nt, Homo sapiens
  misc_RNA (1)...(19): siRNA sense strand
caacaugauuagugaacca

SEQ ID NO: 374270 - RNA, 19 nt, Homo sapiens
  misc_RNA (1)...(19): siRNA sense strand
gaaggcaguuauccagcau

SEQ ID NO: 374271 - RNA, 19 nt, Homo sapiens
  misc_RNA (1)...(19): siRNA sense strand
gagaaugucccaggucaug

SEQ ID NO: 374272 - RNA, 19 nt, Homo sapiens
  misc_RNA (1)...(19): siRNA sense strand
cugaugccguugacaagua

SEQ ID NO: 374273 - RNA, 19 nt, Homo sapiens
  misc_RNA (1)...(19): siRNA sense strand
caaaguaguagaaguagca

SEQ ID NO: 374274 - RNA, 19 nt, Homo sapiens
  misc_RNA (1)...(19): siRNA sense strand
gaggaugacucggaugucu

SEQ ID NO: 374275 - RNA, 19 nt, Homo sapiens
  misc_RNA (1)...(19): siRNA sense strand
gaugcagaauuccgacaug

SEQ ID NO: 374276 - RNA, 19 nt, Homo sapiens
  misc_RNA (1)...(19): siRNA sense strand
aaacgaaguugagccuguu

SEQ ID NO: 374277 - RNA, 19 nt, Homo sapiens
  misc_RNA (1)...(19): siRNA sense strand
gaagugugccccauucuuu

SEQ ID NO: 374278 - RNA, 19 nt, Homo sapiens
  misc_RNA (1)...(19): siRNA sense strand
guacuuugaugugacugaa

SEQ ID NO: 374279 - RNA, 19 nt, Homo sapiens
  misc_RNA (1)...(19): siRNA sense strand
aagaagaagccgaugauga

SEQ ID NO: 374280 - RNA, 19 nt, Homo sapiens
  misc_RNA (1)...(19): siRNA sense strand
uggccaacaugauuaguga

SEQ ID NO: 374281 - RNA, 19 nt, Homo sapiens
  misc_RNA (1)...(19): siRNA sense strand
uugagcagaugcagaacua

SEQ ID NO: 374282 - RNA, 19 nt, Homo sapiens
  misc_RNA (1)...(19): siRNA sense strand
ugacucaggauaugaaguu

SEQ ID NO: 374283 - RNA, 19 nt, Homo sapiens
  misc_RNA (1)...(19): siRNA sense strand
caauguggauucugcugau

SEQ ID NO: 374284 - RNA, 19 nt, Homo sapiens
  misc_RNA (1)...(19): siRNA sense strand
uguccaagaugcagcagaa

SEQ ID NO: 374285 - RNA, 19 nt, Homo sapiens
  misc_RNA (1)...(19): siRNA sense strand
gcucucaugccaucuuuga

SEQ ID NO: 374286 - RNA, 19 nt, Homo sapiens
  misc_RNA (1)...(19): siRNA sense strand
ggucccagguuaugacaca

SEQ ID NO: 374287 - RNA, 19 nt, Homo sapiens
  misc_RNA (1)...(19): siRNA sense strand
aaaguuuacucaagacuac

SEQ ID NO: 374288 - RNA, 19 nt, Homo sapiens
  misc_RNA (1)...(19): siRNA sense strand
aaaccugcauugauaccaa

SEQ ID NO: 374289 - RNA, 19 nt, Homo sapiens
  misc_RNA (1)...(19): siRNA sense strand
ccaagaagucuacccugaa

SEQ ID NO: 374290 - RNA, 19 nt, Homo sapiens
  misc_RNA (1)...(19): siRNA sense strand
ggcagaacgucaagcaaag

SEQ ID NO: 374291 - RNA, 19 nt, Homo sapiens
  misc_RNA (1)...(19): siRNA sense strand
gugaaccaaggaucaguua

SEQ ID NO: 374292 - RNA, 19 nt, Homo sapiens
  misc_RNA (1)...(19): siRNA sense strand
acacauggccagaguggaa

SEQ ID NO: 374293 - RNA, 19 nt, Homo sapiens
  misc_RNA (1)...(19): siRNA sense strand
gcaaccggaacaacuuuga

SEQ ID NO: 374294 - RNA, 19 nt, Homo sapiens
  misc_RNA (1)...(19): siRNA sense strand
agacggaggagaucucuga

SEQ ID NO: 374295 - RNA, 19 nt, Homo sapiens
  misc_RNA (1)...(19): siRNA sense strand
ccucgucacguguucaaua

SEQ ID NO: 374296 - RNA, 19 nt, Homo sapiens
  misc_RNA (1)...(19): siRNA sense strand
ccgagauccuguuaaacuu

SEQ ID NO: 374297 - RNA, 19 nt, Homo sapiens
  misc_RNA (1)...(19): siRNA sense strand
gaagaagaagccgaugaug

SEQ ID NO: 374298 - RNA, 19 nt, Homo sapiens
  misc_RNA (1)...(19): siRNA sense strand
guacacauccauucaucau

SEQ ID NO: 374299 - RNA, 19 nt, Homo sapiens
  misc_RNA (1)...(19): siRNA sense strand
ucucugaagugaagaugga

SEQ ID NO: 374300 - RNA, 19 nt, Homo sapiens
  misc_RNA (1)...(19): siRNA sense strand
gaaguugagccuguugaug

SEQ ID NO: 374301 - RNA, 19 nt, Homo sapiens
  misc_RNA (1)...(19): siRNA sense strand
gaaguauguccgcgcagaa

SEQ ID NO: 374302 - RNA, 19 nt, Homo sapiens
  misc_RNA (1)...(19): siRNA sense strand
agacacacauggccagagu

SEQ ID NO: 374303 - RNA, 19 nt, Homo sapiens
  misc_RNA (1)...(19): siRNA sense strand
gcugauaagaaggcaguua

SEQ ID NO: 374304 - RNA, 19 nt, Homo sapiens
  misc_RNA (1)...(19): siRNA sense strand
aggcaguuauccagcauuu

SEQ ID NO: 374305 - RNA, 19 nt, Homo sapiens
  misc_RNA (1)...(19): siRNA sense strand
gaugacgucuuggccaaca

SEQ ID NO: 374306 - RNA, 19 nt, Homo sapiens
  misc_RNA (1)...(19): siRNA sense strand
gccuggcccuggagaacua

SEQ ID NO: 374307 - RNA, 19 nt, Homo sapiens
  misc_RNA (1)...(19): siRNA sense strand
accaaaaccugcauugaua

SEQ ID NO: 374308 - RNA, 19 nt, Homo sapiens
  misc_RNA (1)...(19): siRNA sense strand
caacaaauccuccaaguua

SEQ ID NO: 374309 - RNA, 19 nt, Homo sapiens
  misc_RNA (1)...(19): siRNA sense strand
acaaauggguguccaauaa

SEQ ID NO: 374310 - RNA, 19 nt, Homo sapiens
  misc_RNA (1)...(19): siRNA sense strand
ggacaucagugaguuggua

SEQ ID NO: 374311 - RNA, 19 nt, Homo sapiens
  misc_RNA (1)...(19): siRNA sense strand
gaggacggcuucaguuuga

SEQ ID NO: 374312 - RNA, 19 nt, Homo sapiens
  misc_RNA (1)...(19): siRNA sense strand
gagcggccaucaacaaaug

SEQ ID NO: 374313 - RNA, 19 nt, Homo sapiens
  misc_RNA (1)...(19): siRNA sense strand
ucaaugagcucacuguucu

SEQ ID NO: 374314 - RNA, 19 nt, Homo sapiens
  misc_RNA (1)...(19): siRNA sense strand
gaaggcaaguuccguuauc

SEQ ID NO: 374315 - RNA, 19 nt, Homo sapiens
  misc_RNA (1)...(19): siRNA sense strand
ccaagaaugacaaugauaa

SEQ ID NO: 374316 - RNA, 19 nt, Homo sapiens
  misc_RNA (1)...(19): siRNA sense strand
acaaaucccuuaccuucaa

SEQ ID NO: 374317 - RNA, 19 nt, Homo sapiens
  misc_RNA (1)...(19): siRNA sense strand
aaacugaacugccgacucu

SEQ ID NO: 374318 - RNA, 19 nt, Homo sapiens
  misc_RNA (1)...(19): siRNA sense strand
guagccaacccuuguguua

SEQ ID NO: 374319 - RNA, 19 nt, Homo sapiens
  misc_RNA (1)...(19): siRNA sense strand
uaaggcauuucuugaggua

SEQ ID NO: 374320 - RNA, 19 nt, Homo sapiens
  misc_RNA (1)...(19): siRNA sense strand
gcaaguaccgcuguuguga

SEQ ID NO: 374321 - RNA, 19 nt, Homo sapiens
  misc_RNA (1)...(19): siRNA sense strand
ugauggagguauuuaaguu

SEQ ID NO: 374322 - RNA, 19 nt, Homo sapiens
  misc_RNA (1)...(19): siRNA sense strand
ugaaucccaugugcauuua

SEQ ID NO: 374323 - RNA, 19 nt, Homo sapiens
  misc_RNA (1)...(19): siRNA sense strand
caacugauggagguauuua

SEQ ID NO: 374324 - RNA, 19 nt, Homo sapiens
  misc_RNA (1)...(19): siRNA sense strand
caacccuuguguuaaguaa

SEQ ID NO: 374325 - RNA, 19 nt, Homo sapiens
  misc_RNA (1)...(19): siRNA sense strand
gaacuguaaccucuggaaa

SEQ ID NO: 374326 - RNA, 19 nt, Homo sapiens
  misc_RNA (1)...(19): siRNA sense strand
gaagaaggcaacugaggau

SEQ ID NO: 374327 - RNA, 19 nt, Homo sapiens
  misc_RNA (1)...(19): siRNA sense strand
ucagugaguugguauaugg

SEQ ID NO: 374328 - RNA, 19 nt, Homo sapiens
  misc_RNA (1)...(19): siRNA sense strand
caaggccaauucccgcuuu

SEQ ID NO: 374329 - RNA, 19 nt, Homo sapiens
  misc_RNA (1)...(19): siRNA sense strand
cagauccacuucuucuuug

SEQ ID NO: 374330 - RNA, 19 nt, Homo sapiens
  misc_RNA (1)...(19): siRNA sense strand
ucagauccacuucuucuuu

SEQ ID NO: 374331 - RNA, 19 nt, Homo sapiens
  misc_RNA (1)...(19): siRNA sense strand
ugaaggagcagcugcaaga

SEQ ID NO: 374332 - RNA, 19 nt, Homo sapiens
  misc_RNA (1)...(19): siRNA sense strand
gaaggcaacugaggaugag

SEQ ID NO: 374333 - RNA, 19 nt, Homo sapiens
  misc_RNA (1)...(19): siRNA sense strand
ccaacagggugacuuucaa

SEQ ID NO: 374334 - RNA, 19 nt, Homo sapiens
  misc_RNA (1)...(19): siRNA sense strand
gauggagguauuuaaguuu

SEQ ID NO: 374335 - RNA, 19 nt, Homo sapiens
  misc_RNA (1)...(19): siRNA sense strand
ucccuuaccuucaaugaga

SEQ ID NO: 374336 - RNA, 19 nt, Homo sapiens
  misc_RNA (1)...(19): siRNA sense strand
aaauggguguccaauaaga

SEQ ID NO: 374337 - RNA, 19 nt, Homo sapiens
  misc_RNA (1)...(19): siRNA sense strand
caaauccuccaaguuagua

SEQ ID NO: 374338 - RNA, 19 nt, Homo sapiens
  misc_RNA (1)...(19): siRNA sense strand
uaacaccauuuacuucaag

SEQ ID NO: 374339 - RNA, 19 nt, Homo sapiens
  misc_RNA (1)...(19): siRNA sense strand
ggagacaaaucccuuaccu

SEQ ID NO: 374340 - RNA, 19 nt, Homo sapiens
  misc_RNA (1)...(19): siRNA sense strand
ccgaaucaccgaugucauu

SEQ ID NO: 374341 - RNA, 19 nt, Homo sapiens
  misc_RNA (1)...(19): siRNA sense strand
ucagaugcauuccauaagg

SEQ ID NO: 374342 - RNA, 19 nt, Homo sapiens
  misc_RNA (1)...(19): siRNA sense strand
aaguaccgcuguugugauu

SEQ ID NO: 374343 - RNA, 19 nt, Homo sapiens
  misc_RNA (1)...(19): siRNA sense strand
caagcugggugccuguaau

SEQ ID NO: 374344 - RNA, 19 nt, Homo sapiens
  misc_RNA (1)...(19): siRNA sense strand
gccaacaaauccuccaagu

SEQ ID NO: 374345 - RNA, 19 nt, Homo sapiens
  misc_RNA (1)...(19): siRNA sense strand
ccagagcggccaucaacaa

SEQ ID NO: 374346 - RNA, 19 nt, Homo sapiens
  misc_RNA (1)...(19): siRNA sense strand
ucucagaugcauuccauaa

SEQ ID NO: 374347 - RNA, 19 nt, Homo sapiens
  misc_RNA (1)...(19): siRNA sense strand
ccucggaagccaucaauga

SEQ ID NO: 374348 - RNA, 19 nt, Homo sapiens
  misc_RNA (1)...(19): siRNA sense strand
ggagagucguguucagcau

SEQ ID NO: 374349 - RNA, 19 nt, Homo sapiens
  misc_RNA (1)...(19): siRNA sense strand
caaacucccagguauuguu

SEQ ID NO: 374350 - RNA, 19 nt, Homo sapiens
  misc_RNA (1)...(19): siRNA sense strand
agaagagccuggccaaggu

SEQ ID NO: 374351 - RNA, 19 nt, Homo sapiens
  misc_RNA (1)...(19): siRNA sense strand
aggcauuucuugagguaaa

SEQ ID NO: 374352 - RNA, 19 nt, Homo sapiens
  misc_RNA (1)...(19): siRNA sense strand
ccaacaaauccuccaaguu

SEQ ID NO: 374353 - RNA, 19 nt, Homo sapiens
  misc_RNA (1)...(19): siRNA sense strand
caaaucccuuaccuucaau

SEQ ID NO: 374354 - RNA, 19 nt, Homo sapiens
  misc_RNA (1)...(19): siRNA sense strand
cgagaugaccucuaugucu

SEQ ID NO: 374355 - RNA, 19 nt, Homo sapiens
  misc_RNA (1)...(19): siRNA sense strand
gaacugccgacucuaucga

SEQ ID NO: 374356 - RNA, 19 nt, Homo sapiens
  misc_RNA (1)...(19): siRNA sense strand
ggaacuguaaccucuggaa

SEQ ID NO: 374357 - RNA, 19 nt, Homo sapiens
  misc_RNA (1)...(19): siRNA sense strand
cagaguagccaacccuugu

SEQ ID NO: 374358 - RNA, 19 nt, Homo sapiens
  misc_RNA (1)...(19): siRNA sense strand
aggccgagaugaccucuau

SEQ ID NO: 374359 - RNA, 19 nt, Homo sapiens
  misc_RNA (1)...(19): siRNA sense strand
guuaacaccauuuacuuca

SEQ ID NO: 374360 - RNA, 19 nt, Homo sapiens
  misc_RNA (1)...(19): siRNA sense strand
caacaaauggguguccaau

SEQ ID NO: 374361 - RNA, 19 nt, Homo sapiens
  misc_RNA (1)...(19): siRNA sense strand
gacaaaucccuuaccuuca

SEQ ID NO: 374362 - RNA, 19 nt, Homo sapiens
  misc_RNA (1)...(19): siRNA sense strand
caaguuaguaucagccaau

SEQ ID NO: 374363 - RNA, 19 nt, Homo sapiens
  misc_RNA (1)...(19): siRNA sense strand
cggagaagaaggcaacuga

SEQ ID NO: 374364 - RNA, 19 nt, Homo sapiens
  misc_RNA (1)...(19): siRNA sense strand
gcaacugauggagguauuu

SEQ ID NO: 374365 - RNA, 19 nt, Homo sapiens
  misc_RNA (1)...(19): siRNA sense strand
aguccaaacucccagguau

SEQ ID NO: 374366 - RNA, 19 nt, Homo sapiens
  misc_RNA (1)...(19): siRNA sense strand
ucaagggccuguggaaguc

SEQ ID NO: 374367 - RNA, 19 nt, Homo sapiens
  misc_RNA (1)...(19): siRNA sense strand
caaggaaaaugcagagcaa

SEQ ID NO: 374368 - RNA, 19 nt, Homo sapiens
  misc_RNA (1)...(19): siRNA sense strand
gccaauucccgcuuugcua

SEQ ID NO: 374369 - RNA, 19 nt, Homo sapiens
  misc_RNA (1)...(19): siRNA sense strand
agaaggcaacugaggauga

SEQ ID NO: 374370 - RNA, 19 nt, Homo sapiens
  misc_RNA (1)...(19): siRNA sense strand
ugaccucuaugucucagau

SEQ ID NO: 374371 - RNA, 19 nt, Homo sapiens
  misc_RNA (1)...(19): siRNA sense strand
gaacuguccaaggccaauu

SEQ ID NO: 374372 - RNA, 19 nt, Homo sapiens
  misc_RNA (1)...(19): siRNA sense strand
gcccugagaacacaaggaa

SEQ ID NO: 374373 - RNA, 19 nt, Homo sapiens
  misc_RNA (1)...(19): siRNA sense strand
cagagcggccaucaacaaa

SEQ ID NO: 374374 - RNA, 19 nt, Homo sapiens
  misc_RNA (1)...(19): siRNA sense strand
ugaagaaggcagugaagca

SEQ ID NO: 374375 - RNA, 19 nt, Homo sapiens
  misc_RNA (1)...(19): siRNA sense strand
uaucagcaccuggcagauu

SEQ ID NO: 374376 - RNA, 19 nt, Homo sapiens
  misc_RNA (1)...(19): siRNA sense strand
gugcuugaguugcccuuca

SEQ ID NO: 374377 - RNA, 19 nt, Homo sapiens
  misc_RNA (1)...(19): siRNA sense strand
gguuaacaccauuuacuuc

SEQ ID NO: 374378 - RNA, 19 nt, Homo sapiens
  misc_RNA (1)...(19): siRNA sense strand
aaugugauaggaacuguaa

SEQ ID NO: 374379 - RNA, 19 nt, Homo sapiens
  misc_RNA (1)...(19): siRNA sense strand
guaccgcuguugugauugc

SEQ ID NO: 374380 - RNA, 19 nt, Homo sapiens
  misc_RNA (1)...(19): siRNA sense strand
gagacaaaucccuuaccuu

SEQ ID NO: 374381 - RNA, 19 nt, Homo sapiens
  misc_RNA (1)...(19): siRNA sense strand
uaaaugaagaaggcaguga

SEQ ID NO: 374382 - RNA, 19 nt, Homo sapiens
  misc_RNA (1)...(19): siRNA sense strand
caccaugguccucaucuug

SEQ ID NO: 374383 - RNA, 19 nt, Homo sapiens
  misc_RNA (1)...(19): siRNA sense strand
gaacacaaggaaggaacug

SEQ ID NO: 374384 - RNA, 19 nt, Homo sapiens
  misc_RNA (1)...(19): siRNA sense strand
caaauggguguccaauaag

SEQ ID NO: 374385 - RNA, 19 nt, Homo sapiens
  misc_RNA (1)...(19): siRNA sense strand
ccaaugugauaggaacugu

SEQ ID NO: 374386 - RNA, 19 nt, Homo sapiens
  misc_RNA (1)...(19): siRNA sense strand
acacaaggaaggaacuguu

SEQ ID NO: 374387 - RNA, 19 nt, Homo sapiens
  misc_RNA (1)...(19): siRNA sense strand
ugaggacggcuucaguuug

SEQ ID NO: 374388 - RNA, 19 nt, Homo sapiens
  misc_RNA (1)...(19): siRNA sense strand
ucaccaugguccucaucuu

SEQ ID NO: 374389 - RNA, 19 nt, Homo sapiens
  misc_RNA (1)...(19): siRNA sense strand
guaccaggaaggcaaguuc

SEQ ID NO: 374390 - RNA, 19 nt, Homo sapiens
  misc_RNA (1)...(19): siRNA sense strand
uagccaacccuuguguuaa

SEQ ID NO: 374391 - RNA, 19 nt, Homo sapiens
  misc_RNA (1)...(19): siRNA sense strand
uggagguauuuaaguuuga

SEQ ID NO: 374392 - RNA, 19 nt, Homo sapiens
  misc_RNA (1)...(19): siRNA sense strand
ugucucagaugcauuccau

SEQ ID NO: 374393 - RNA, 19 nt, Homo sapiens
  misc_RNA (1)...(19): siRNA sense strand
gauggagagucguguucag

SEQ ID NO: 374394 - RNA, 19 nt, Homo sapiens
  misc_RNA (1)...(19): siRNA sense strand
ccgcuuugcuaccacuuuc

SEQ ID NO: 374395 - RNA, 19 nt, Homo sapiens
  misc_RNA (1)...(19): siRNA sense strand
aacaaauccuccaaguuag

SEQ ID NO: 374396 - RNA, 19 nt, Homo sapiens
  misc_RNA (1)...(19): siRNA sense strand
uaaugacacccuccagcaa

SEQ ID NO: 374397 - RNA, 19 nt, Homo sapiens
  misc_RNA (1)...(19): siRNA sense strand
caacagggugacuuucaag

SEQ ID NO: 374398 - RNA, 19 nt, Homo sapiens
  misc_RNA (1)...(19): siRNA sense strand
gccgagaugaccucuaugu

SEQ ID NO: 374399 - RNA, 19 nt, Homo sapiens
  misc_RNA (1)...(19): siRNA sense strand
aggagcagcugcaagacau

SEQ ID NO: 374400 - RNA, 19 nt, Homo sapiens
  misc_RNA (1)...(19): siRNA sense strand
uggaugaauuggaggagau

SEQ ID NO: 374401 - RNA, 19 nt, Homo sapiens
  misc_RNA (1)...(19): siRNA sense strand
caucagugaguugguauau

SEQ ID NO: 374402 - RNA, 19 nt, Homo sapiens
  misc_RNA (1)...(19): siRNA sense strand
guauuccaaugugauagga

SEQ ID NO: 374403 - RNA, 19 nt, Homo sapiens
  misc_RNA (1)...(19): siRNA sense strand
caccauaucugagaaaaca

SEQ ID NO: 374404 - RNA, 19 nt, Homo sapiens
  misc_RNA (1)...(19): siRNA sense strand
aaacucccagguauuguug

SEQ ID NO: 374405 - RNA, 19 nt, Homo sapiens
  misc_RNA (1)...(19): siRNA sense strand
aaaugaagaaggcagugaa

SEQ ID NO: 374406 - RNA, 19 nt, Homo sapiens
  misc_RNA (1)...(19): siRNA sense strand
ccauaaggcauuucuugag

SEQ ID NO: 374407 - RNA, 19 nt, Homo sapiens
  misc_RNA (1)...(19): siRNA sense strand
augaaucccaugugcauuu

SEQ ID NO: 374408 - RNA, 19 nt, Homo sapiens
  misc_RNA (1)...(19): siRNA sense strand
gaagggagaacccggcuua

SEQ ID NO: 374409 - RNA, 19 nt, Homo sapiens
  misc_RNA (1)...(19): siRNA sense strand
gcagauacaagcagaaauu

SEQ ID NO: 374410 - RNA, 19 nt, Homo sapiens
  misc_RNA (1)...(19): siRNA sense strand
ccaacagccugaucagauu

SEQ ID NO: 374411 - RNA, 19 nt, Homo sapiens
  misc_RNA (1)...(19): siRNA sense strand
gaaauuccagucaguguuc

SEQ ID NO: 374412 - RNA, 19 nt, Homo sapiens
  misc_RNA (1)...(19): siRNA sense strand
gcggugugcugcugagguu

SEQ ID NO: 374413 - RNA, 19 nt, Homo sapiens
  misc_RNA (1)...(19): siRNA sense strand
cacgagcacuggcaaguuc

SEQ ID NO: 374414 - RNA, 19 nt, Homo sapiens
  misc_RNA (1)...(19): siRNA sense strand
caaguucaccugcaaaguc

SEQ ID NO: 374415 - RNA, 19 nt, Homo sapiens
  misc_RNA (1)...(19): siRNA sense strand
ucaaaguggucaccuucug

SEQ ID NO: 374416 - RNA, 19 nt, Homo sapiens
  misc_RNA (1)...(19): siRNA sense strand
gauacaagcagaaauucca

SEQ ID NO: 374417 - RNA, 19 nt, Homo sapiens
  misc_RNA (1)...(19): siRNA sense strand
gcacccaacagccugauca

SEQ ID NO: 374418 - RNA, 19 nt, Homo sapiens
  misc_RNA (1)...(19): siRNA sense strand
ucaacgcgguccucaccaa

SEQ ID NO: 374419 - RNA, 19 nt, Homo sapiens
  misc_RNA (1)...(19): siRNA sense strand
gggcagauacaagcagaaa

SEQ ID NO: 374420 - RNA, 19 nt, Homo sapiens
  misc_RNA (1)...(19): siRNA sense strand
caaaguggucaccuucugu

SEQ ID NO: 374421 - RNA, 19 nt, Homo sapiens
  misc_RNA (1)...(19): siRNA sense strand
caaugacuacuacgacaug

SEQ ID NO: 374422 - RNA, 19 nt, Homo sapiens
  misc_RNA (1)...(19): siRNA sense strand
caggugaggagggcagaua

SEQ ID NO: 374423 - RNA, 19 nt, Homo sapiens
  misc_RNA (1)...(19): siRNA sense strand
caacagccugaucagauuc

SEQ ID NO: 374424 - RNA, 19 nt, Homo sapiens
  misc_RNA (1)...(19): siRNA sense strand
gcgucaaaguggucaccuu

SEQ ID NO: 374425 - RNA, 19 nt, Homo sapiens
  misc_RNA (1)...(19): siRNA sense strand
cagaaauuccagucagugu

SEQ ID NO: 374426 - RNA, 19 nt, Homo sapiens
  misc_RNA (1)...(19): siRNA sense strand
cccaacagccugaucagau

SEQ ID NO: 374427 - RNA, 19 nt, Homo sapiens
  misc_RNA (1)...(19): siRNA sense strand
aaaccaaucaggucaacuc

SEQ ID NO: 374428 - RNA, 19 nt, Homo sapiens
  misc_RNA (1)...(19): siRNA sense strand
gcaaguucaccugcaaagu

SEQ ID NO: 374429 - RNA, 19 nt, Homo sapiens
  misc_RNA (1)...(19): siRNA sense strand
agaaauuccagucaguguu

SEQ ID NO: 374430 - RNA, 19 nt, Homo sapiens
  misc_RNA (1)...(19): siRNA sense strand
caagcagaaauuccaguca

SEQ ID NO: 374431 - RNA, 19 nt, Homo sapiens
  misc_RNA (1)...(19): siRNA sense strand
gaaaauaccugacccuaga

SEQ ID NO: 374432 - RNA, 19 nt, Homo sapiens
  misc_RNA (1)...(19): siRNA sense strand
gggcugaguuucaucacua

SEQ ID NO: 374433 - RNA, 19 nt, Homo sapiens
  misc_RNA (1)...(19): siRNA sense strand
gaucccagcucuccucaau

SEQ ID NO: 374434 - RNA, 19 nt, Homo sapiens
  misc_RNA (1)...(19): siRNA sense strand
gaagugccauucugugauc

SEQ ID NO: 374435 - RNA, 19 nt, Homo sapiens
  misc_RNA (1)...(19): siRNA sense strand
ggaaacccauguuguaagg

SEQ ID NO: 374436 - RNA, 19 nt, Homo sapiens
  misc_RNA (1)...(19): siRNA sense strand
ggugguggcuucagcaaug

SEQ ID NO: 374437 - RNA, 19 nt, Homo sapiens
  misc_RNA (1)...(19): siRNA sense strand
acacaggacuuucugacuu

SEQ ID NO: 374438 - RNA, 19 nt, Homo sapiens
  misc_RNA (1)...(19): siRNA sense strand
ccucuucgguggcaacuuu

SEQ ID NO: 374439 - RNA, 19 nt, Homo sapiens
  misc_RNA (1)...(19): siRNA sense strand
ggucaacacugagcucaug

SEQ ID NO: 374440 - RNA, 19 nt, Homo sapiens
  misc_RNA (1)...(19): siRNA sense strand
acucagaccuggcucaguu

SEQ ID NO: 374441 - RNA, 19 nt, Homo sapiens
  misc_RNA (1)...(19): siRNA sense strand
gaugugcaguaccugauga

SEQ ID NO: 374442 - RNA, 19 nt, Homo sapiens
  misc_RNA (1)...(19): siRNA sense strand
cguaagcgauacaacuuga

SEQ ID NO: 374443 - RNA, 19 nt, Homo sapiens
  misc_RNA (1)...(19): siRNA sense strand
gauacaacuugaccucaca

SEQ ID NO: 374444 - RNA, 19 nt, Homo sapiens
  misc_RNA (1)...(19): siRNA sense strand
gcugaagacucuacucaac

SEQ ID NO: 374445 - RNA, 19 nt, Homo sapiens
  misc_RNA (1)...(19): siRNA sense strand
gagcacaggauccuuagug

SEQ ID NO: 374446 - RNA, 19 nt, Homo sapiens
  misc_RNA (1)...(19): siRNA sense strand
gcacaucaggcaucaguag

SEQ ID NO: 374447 - RNA, 19 nt, Homo sapiens
  misc_RNA (1)...(19): siRNA sense strand
gaaccuuuccucaucacaa

SEQ ID NO: 374448 - RNA, 19 nt, Homo sapiens
  misc_RNA (1)...(19): siRNA sense strand
cacaggacuuucugacuug

SEQ ID NO: 374449 - RNA, 19 nt, Homo sapiens
  misc_RNA (1)...(19): siRNA sense strand
ggccucuacuccaguguuu

SEQ ID NO: 374450 - RNA, 19 nt, Homo sapiens
  misc_RNA (1)...(19): siRNA sense strand
uagagaauguggcugaucu

SEQ ID NO: 374451 - RNA, 19 nt, Homo sapiens
  misc_RNA (1)...(19): siRNA sense strand
gcuacuggguggucagcaa

SEQ ID NO: 374452 - RNA, 19 nt, Homo sapiens
  misc_RNA (1)...(19): siRNA sense strand
ccaagccugugcccaguuc

SEQ ID NO: 374453 - RNA, 19 nt, Homo sapiens
  misc_RNA (1)...(19): siRNA sense strand
aaugagcacaggauccuua

SEQ ID NO: 374454 - RNA, 19 nt, Homo sapiens
  misc_RNA (1)...(19): siRNA sense strand
gugcggacccugaggaaga

SEQ ID NO: 374455 - RNA, 19 nt, Homo sapiens
  misc_RNA (1)...(19): siRNA sense strand
agaccuggcucaguucaug

SEQ ID NO: 374456 - RNA, 19 nt, Homo sapiens
  misc_RNA (1)...(19): siRNA sense strand
uacggaaacccauguugua

SEQ ID NO: 374457 - RNA, 19 nt, Homo sapiens
  misc_RNA (1)...(19): siRNA sense strand
agucagcccugccacaugu

SEQ ID NO: 374458 - RNA, 19 nt, Homo sapiens
  misc_RNA (1)...(19): siRNA sense strand
uggcugggauccuguaaca

SEQ ID NO: 374459 - RNA, 19 nt, Homo sapiens
  misc_RNA (1)...(19): siRNA sense strand
cgaaguuccugagcucuag

SEQ ID NO: 374460 - RNA, 19 nt, Homo sapiens
  misc_RNA (1)...(19): siRNA sense strand
aaccuuuccucaucacaaa

SEQ ID NO: 374461 - RNA, 19 nt, Homo sapiens
  misc_RNA (1)...(19): siRNA sense strand
cauccucucuggcaaaugc

SEQ ID NO: 374462 - RNA, 19 nt, Homo sapiens
  misc_RNA (1)...(19): siRNA sense strand
acacccaacuucccagcuu

SEQ ID NO: 374463 - RNA, 19 nt, Homo sapiens
  misc_RNA (1)...(19): siRNA sense strand
ggcucaugcugcucaguaa

SEQ ID NO: 374464 - RNA, 19 nt, Homo sapiens
  misc_RNA (1)...(19): siRNA sense strand
ucccagcucuccucaauac

SEQ ID NO: 374465 - RNA, 19 nt, Homo sapiens
  misc_RNA (1)...(19): siRNA sense strand
gagcaguauuuccaugacu

SEQ ID NO: 374466 - RNA, 19 nt, Homo sapiens
  misc_RNA (1)...(19): siRNA sense strand
agauguggcugcacuuucu

SEQ ID NO: 374467 - RNA, 19 nt, Homo sapiens
  misc_RNA (1)...(19): siRNA sense strand
aggaagcuguaacgaaguu

SEQ ID NO: 374468 - RNA, 19 nt, Homo sapiens
  misc_RNA (1)...(19): siRNA sense strand
cacccaacuucccagcuuu

SEQ ID NO: 374469 - RNA, 19 nt, Homo sapiens
  misc_RNA (1)...(19): siRNA sense strand
ggauugaggccagucuaga

SEQ ID NO: 374470 - RNA, 19 nt, Homo sapiens
  misc_RNA (1)...(19): siRNA sense strand
caacagagugcccauucca

SEQ ID NO: 374471 - RNA, 19 nt, Homo sapiens
  misc_RNA (1)...(19): siRNA sense strand
gauugaggccagucuagau

SEQ ID NO: 374472 - RNA, 19 nt, Homo sapiens
  misc_RNA (1)...(19): siRNA sense strand
ggagcaguauuuccaugac

SEQ ID NO: 374473 - RNA, 19 nt, Homo sapiens
  misc_RNA (1)...(19): siRNA sense strand
gcaacagagugcccauucc

SEQ ID NO: 374474 - RNA, 19 nt, Homo sapiens
  misc_RNA (1)...(19): siRNA sense strand
gaucacacaggacuuucug

SEQ ID NO: 374475 - RNA, 19 nt, Homo sapiens
  misc_RNA (1)...(19): siRNA sense strand
ugaguuucaucacuaugug

SEQ ID NO: 374476 - RNA, 19 nt, Homo sapiens
  misc_RNA (1)...(19): siRNA sense strand
gcccugagacagcagaaug

SEQ ID NO: 374477 - RNA, 19 nt, Homo sapiens
  misc_RNA (1)...(19): siRNA sense strand
aguccugucuggaugaaga

SEQ ID NO: 374478 - RNA, 19 nt, Homo sapiens
  misc_RNA (1)...(19): siRNA sense strand
cuacggaaacccauguugu

SEQ ID NO: 374479 - RNA, 19 nt, Homo sapiens
  misc_RNA (1)...(19): siRNA sense strand
ugccacaugugcauacugu

SEQ ID NO: 374480 - RNA, 19 nt, Homo sapiens
  misc_RNA (1)...(19): siRNA sense strand
gcaguauuuccaugacuca

SEQ ID NO: 374481 - RNA, 19 nt, Homo sapiens
  misc_RNA (1)...(19): siRNA sense strand
ccagauguggcugcacuuu

SEQ ID NO: 374482 - RNA, 19 nt, Homo sapiens
  misc_RNA (1)...(19): siRNA sense strand
acuccaagccugccuccua

SEQ ID NO: 374483 - RNA, 19 nt, Homo sapiens
  misc_RNA (1)...(19): siRNA sense strand
acugugagcuauggagaug

SEQ ID NO: 374484 - RNA, 19 nt, Homo sapiens
  misc_RNA (1)...(19): siRNA sense strand
ugugagcuauggagaugau

SEQ ID NO: 374485 - RNA, 19 nt, Homo sapiens
  misc_RNA (1)...(19): siRNA sense strand
ggcugaguuucaucacuau

SEQ ID NO: 374486 - RNA, 19 nt, Homo sapiens
  misc_RNA (1)...(19): siRNA sense strand
uccuauccuugaucaauga

SEQ ID NO: 374487 - RNA, 19 nt, Homo sapiens
  misc_RNA (1)...(19): siRNA sense strand
caacacugagcucaugaag

SEQ ID NO: 374488 - RNA, 19 nt, Homo sapiens
  misc_RNA (1)...(19): siRNA sense strand
uccagcgggucaacacuga

SEQ ID NO: 374489 - RNA, 19 nt, Homo sapiens
  misc_RNA (1)...(19): siRNA sense strand
gacagcagaauguggaaag

SEQ ID NO: 374490 - RNA, 19 nt, Homo sapiens
  misc_RNA (1)...(19): siRNA sense strand
ugaggccagucuagaugug

SEQ ID NO: 374491 - RNA, 19 nt, Homo sapiens
  misc_RNA (1)...(19): siRNA sense strand
acagcagaauguggaaaga

SEQ ID NO: 374492 - RNA, 19 nt, Homo sapiens
  misc_RNA (1)...(19): siRNA sense strand
ccauccaguuacuucaaug

SEQ ID NO: 374493 - RNA, 19 nt, Homo sapiens
  misc_RNA (1)...(19): siRNA sense strand
acggaaacccauguuguaa

SEQ ID NO: 374494 - RNA, 19 nt, Homo sapiens
  misc_RNA (1)...(19): siRNA sense strand
uggcucaugcugcucagua

SEQ ID NO: 374495 - RNA, 19 nt, Homo sapiens
  misc_RNA (1)...(19): siRNA sense strand
gcccaaggcuccaggugua

SEQ ID NO: 374496 - RNA, 19 nt, Homo sapiens
  misc_RNA (1)...(19): siRNA sense strand
gaaacugcccuauggcuau

SEQ ID NO: 374497 - RNA, 19 nt, Homo sapiens
  misc_RNA (1)...(19): siRNA sense strand
uaaagcagcagcaaaguuc

SEQ ID NO: 374498 - RNA, 19 nt, Homo sapiens
  misc_RNA (1)...(19): siRNA sense strand
agccaaagcugcugccaaa

SEQ ID NO: 374499 - RNA, 19 nt, Homo sapiens
  misc_RNA (1)...(19): siRNA sense strand
cccaggaguugguggcuua

SEQ ID NO: 374500 - RNA, 19 nt, Homo sapiens
  misc_RNA (1)...(19): siRNA sense strand
caagcugccugguggcuau

SEQ ID NO: 374501 - RNA, 19 nt, Homo sapiens
  misc_RNA (1)...(19): siRNA sense strand
uaaagcagccaaauaugga

SEQ ID NO: 374502 - RNA, 19 nt, Homo sapiens
  misc_RNA (1)...(19): siRNA sense strand
uuggaggcauuccuacuua

SEQ ID NO: 374503 - RNA, 19 nt, Homo sapiens
  misc_RNA (1)...(19): siRNA sense strand
ggaguuggaggcauuccua

SEQ ID NO: 374504 - RNA, 19 nt, Homo sapiens
  misc_RNA (1)...(19): siRNA sense strand
ccgcuaaagcagcuaaaua

SEQ ID NO: 374505 - RNA, 19 nt, Homo sapiens
  misc_RNA (1)...(19): siRNA sense strand
ggccauuccugguggaguu

SEQ ID NO: 374506 - RNA, 19 nt, Homo sapiens
  misc_RNA (1)...(19): siRNA sense strand
ccgcuaaagcagccaaaua

SEQ ID NO: 374507 - RNA, 19 nt, Homo sapiens
  misc_RNA (1)...(19): siRNA sense strand
cccaggaguuggacccuuu

SEQ ID NO: 374508 - RNA, 19 nt, Homo sapiens
  misc_RNA (1)...(19): siRNA sense strand
ccgcuaaggcagccaagua

SEQ ID NO: 374509 - RNA, 19 nt, Homo sapiens
  misc_RNA (1)...(19): siRNA sense strand
uggcaucccuggacuugga

SEQ ID NO: 374510 - RNA, 19 nt, Homo sapiens
  misc_RNA (1)...(19): siRNA sense strand
cgccaaggcugccaaguac

SEQ ID NO: 374511 - RNA, 19 nt, Homo sapiens
  misc_RNA (1)...(19): siRNA sense strand
ccgccaaggcugccaagua

SEQ ID NO: 374512 - RNA, 19 nt, Homo sapiens
  misc_RNA (1)...(19): siRNA sense strand
gcuaaagcagccaaauaug

SEQ ID NO: 374513 - RNA, 19 nt, Homo sapiens
  misc_RNA (1)...(19): siRNA sense strand
guugguggcuuaggagugu

SEQ ID NO: 374514 - RNA, 19 nt, Homo sapiens
  misc_RNA (1)...(19): siRNA sense strand
cuaaagcagccaaauaugg

SEQ ID NO: 374515 - RNA, 19 nt, Homo sapiens
  misc_RNA (1)...(19): siRNA sense strand
cagcagcagcggcagcuaa

SEQ ID NO: 374516 - RNA, 19 nt, Homo sapiens
  misc_RNA (1)...(19): siRNA sense strand
gcuauggacugcccuacac

SEQ ID NO: 374517 - RNA, 19 nt, Homo sapiens
  misc_RNA (1)...(19): siRNA sense strand
gagugaagccugggaaagu

SEQ ID NO: 374518 - RNA, 19 nt, Homo sapiens
  misc_RNA (1)...(19): siRNA sense strand
cauuggcccugguggaguu

SEQ ID NO: 374519 - RNA, 19 nt, Homo sapiens
  misc_RNA (1)...(19): siRNA sense strand
cuaaagcagcagcaaaguu

SEQ ID NO: 374520 - RNA, 19 nt, Homo sapiens
  misc_RNA (1)...(19): siRNA sense strand
caaggcugguuacccaaca

SEQ ID NO: 374521 - RNA, 19 nt, Homo sapiens
  misc_RNA (1)...(19): siRNA sense strand
agaccuggcuucggauugu

SEQ ID NO: 374522 - RNA, 19 nt, Homo sapiens
  misc_RNA (1)...(19): siRNA sense strand
cgcuaaagcagccaaauau

SEQ ID NO: 374523 - RNA, 19 nt, Homo sapiens
  misc_RNA (1)...(19): siRNA sense strand
agucggaguuggaggcauu

SEQ ID NO: 374524 - RNA, 19 nt, Homo sapiens
  misc_RNA (1)...(19): siRNA sense strand
aaacugcccuauggcuaug

SEQ ID NO: 374525 - RNA, 19 nt, Homo sapiens
  misc_RNA (1)...(19): siRNA sense strand
gcuuguggccggaagagaa

SEQ ID NO: 374526 - RNA, 19 nt, Homo sapiens
  misc_RNA (1)...(19): siRNA sense strand
ucgcaggugucccuagugu

SEQ ID NO: 374527 - RNA, 19 nt, Homo sapiens
  misc_RNA (1)...(19): siRNA sense strand
cagcuaaagcagcagcaaa

SEQ ID NO: 374528 - RNA, 19 nt, Homo sapiens
  misc_RNA (1)...(19): siRNA sense strand
guuggaggcauuccuacuu

SEQ ID NO: 374529 - RNA, 19 nt, Homo sapiens
  misc_RNA (1)...(19): siRNA sense strand
gcuaaggcagccaaguaug

SEQ ID NO: 374530 - RNA, 19 nt, Homo sapiens
  misc_RNA (1)...(19): siRNA sense strand
caagaccuggcuucggauu

SEQ ID NO: 374531 - RNA, 19 nt, Homo sapiens
  misc_RNA (1)...(19): siRNA sense strand
ggagugaagccugggaaag

SEQ ID NO: 374532 - RNA, 19 nt, Homo sapiens
  misc_RNA (1)...(19): siRNA sense strand
gcaaaggcagccaaauacg

SEQ ID NO: 374533 - RNA, 19 nt, Homo sapiens
  misc_RNA (1)...(19): siRNA sense strand
ccaaagcugcugccaaagc

SEQ ID NO: 374534 - RNA, 19 nt, Homo sapiens
  misc_RNA (1)...(19): siRNA sense strand
gguggugucccaggaguug

SEQ ID NO: 374535 - RNA, 19 nt, Homo sapiens
  misc_RNA (1)...(19): siRNA sense strand
gcuggcaucccuggacuug

SEQ ID NO: 374536 - RNA, 19 nt, Homo sapiens
  misc_RNA (1)...(19): siRNA sense strand
aggaguugguggcuuagga

SEQ ID NO: 374537 - RNA, 19 nt, Homo sapiens
  misc_RNA (1)...(19): siRNA sense strand
uaaggcagccaaguaugga

SEQ ID NO: 374538 - RNA, 19 nt, Homo sapiens
  misc_RNA (1)...(19): siRNA sense strand
cuaaggcagccaaguaugg

SEQ ID NO: 374539 - RNA, 19 nt, Homo sapiens
  misc_RNA (1)...(19): siRNA sense strand
gagacaaacuguacaauga

SEQ ID NO: 374540 - RNA, 19 nt, Homo sapiens
  misc_RNA (1)...(19): siRNA sense strand
caaugucacugaugugcua

SEQ ID NO: 374541 - RNA, 19 nt, Homo sapiens
  misc_RNA (1)...(19): siRNA sense strand
ucacugaugugcuaacaga

SEQ ID NO: 374542 - RNA, 19 nt, Homo sapiens
  misc_RNA (1)...(19): siRNA sense strand
gagcagaauuuccuugucu

SEQ ID NO: 374543 - RNA, 19 nt, Homo sapiens
  misc_RNA (1)...(19): siRNA sense strand
uggaacaccugacaacauu

SEQ ID NO: 374544 - RNA, 19 nt, Homo sapiens
  misc_RNA (1)...(19): siRNA sense strand
gaacaccugacaacauuga

SEQ ID NO: 374545 - RNA, 19 nt, Homo sapiens
  misc_RNA (1)...(19): siRNA sense strand
gcaaggcccugagcagaau

SEQ ID NO: 374546 - RNA, 19 nt, Homo sapiens
  misc_RNA (1)...(19): siRNA sense strand
ggagacaaacuguacaaug

SEQ ID NO: 374547 - RNA, 19 nt, Homo sapiens
  misc_RNA (1)...(19): siRNA sense strand
gcuggcggaucguguauga

SEQ ID NO: 374548 - RNA, 19 nt, Homo sapiens
  misc_RNA (1)...(19): siRNA sense strand
ggaauggagacaaacugua

SEQ ID NO: 374549 - RNA, 19 nt, Homo sapiens
  misc_RNA (1)...(19): siRNA sense strand
ccacuuagcucugccuucu

SEQ ID NO: 374550 - RNA, 19 nt, Homo sapiens
  misc_RNA (1)...(19): siRNA sense strand
agaauuuccuugucucgaa

SEQ ID NO: 374551 - RNA, 19 nt, Homo sapiens
  misc_RNA (1)...(19): siRNA sense strand
gagcugagacgccugaauc

SEQ ID NO: 374552 - RNA, 19 nt, Homo sapiens
  misc_RNA (1)...(19): siRNA sense strand
gaauuuccuugucucgaau

SEQ ID NO: 374553 - RNA, 19 nt, Homo sapiens
  misc_RNA (1)...(19): siRNA sense strand
ucgacaaccugcacgauga

SEQ ID NO: 374554 - RNA, 19 nt, Homo sapiens
  misc_RNA (1)...(19): siRNA sense strand
ucaacgcgcucaccuccuu

SEQ ID NO: 374555 - RNA, 19 nt, Homo sapiens
  misc_RNA (1)...(19): siRNA sense strand
uuccuugucucgaauuaua

SEQ ID NO: 374556 - RNA, 19 nt, Homo sapiens
  misc_RNA (1)...(19): siRNA sense strand
gguggaugcugccuacaau

SEQ ID NO: 374557 - RNA, 19 nt, Homo sapiens
  misc_RNA (1)...(19): siRNA sense strand
caacauugacaucuggauu

SEQ ID NO: 374558 - RNA, 19 nt, Homo sapiens
  misc_RNA (1)...(19): siRNA sense strand
gaauggagacaaacuguac

SEQ ID NO: 374559 - RNA, 19 nt, Homo sapiens
  misc_RNA (1)...(19): siRNA sense strand
ccuggcagcucucaacaug

SEQ ID NO: 374560 - RNA, 19 nt, Homo sapiens
  misc_RNA (1)...(19): siRNA sense strand
caacucgcaugucccacuu

SEQ ID NO: 374561 - RNA, 19 nt, Homo sapiens
  misc_RNA (1)...(19): siRNA sense strand
aaccagcgcuuucaagaca

SEQ ID NO: 374562 - RNA, 19 nt, Homo sapiens
  misc_RNA (1)...(19): siRNA sense strand
uggcuugucuguucgagaa

SEQ ID NO: 374563 - RNA, 19 nt, Homo sapiens
  misc_RNA (1)...(19): siRNA sense strand
caaugaggcucggaagauc

SEQ ID NO: 374564 - RNA, 19 nt, Homo sapiens
  misc_RNA (1)...(19): siRNA sense strand
acuuagcucugccuucuuu

SEQ ID NO: 374565 - RNA, 19 nt, Homo sapiens
  misc_RNA (1)...(19): siRNA sense strand
gccaugcacacccucuuua

SEQ ID NO: 374566 - RNA, 19 nt, Homo sapiens
  misc_RNA (1)...(19): siRNA sense strand
ccgucaggaugccauguua

SEQ ID NO: 374567 - RNA, 19 nt, Homo sapiens
  misc_RNA (1)...(19): siRNA sense strand
ggacggugcaacaacaaga

SEQ ID NO: 374568 - RNA, 19 nt, Homo sapiens
  misc_RNA (1)...(19): siRNA sense strand
gacacccgaucaacggaaa

SEQ ID NO: 374569 - RNA, 19 nt, Homo sapiens
  misc_RNA (1)...(19): siRNA sense strand
ugucucgaauuauauguga

SEQ ID NO: 374570 - RNA, 19 nt, Homo sapiens
  misc_RNA (1)...(19): siRNA sense strand
gaugcugccuacaauugga

SEQ ID NO: 374571 - RNA, 19 nt, Homo sapiens
  misc_RNA (1)...(19): siRNA sense strand
caucaccuaccgagacuuu

SEQ ID NO: 374572 - RNA, 19 nt, Homo sapiens
  misc_RNA (1)...(19): siRNA sense strand
cugcaggcguugacuguga

SEQ ID NO: 374573 - RNA, 19 nt, Homo sapiens
  misc_RNA (1)...(19): siRNA sense strand
gaaguuccugaauuuguau

SEQ ID NO: 374574 - RNA, 19 nt, Homo sapiens
  misc_RNA (1)...(19): siRNA sense strand
gcucucaacaugcaacgaa

SEQ ID NO: 374575 - RNA, 19 nt, Homo sapiens
  misc_RNA (1)...(19): siRNA sense strand
gcauagcagaggccaaguu

SEQ ID NO: 374576 - RNA, 19 nt, Homo sapiens
  misc_RNA (1)...(19): siRNA sense strand
ggccgcagauuauaugcau

SEQ ID NO: 374577 - RNA, 19 nt, Homo sapiens
  misc_RNA (1)...(19): siRNA sense strand
gacaaguaccgcaccauca

SEQ ID NO: 374578 - RNA, 19 nt, Homo sapiens
  misc_RNA (1)...(19): siRNA sense strand
gcagccaccaggacaguug

SEQ ID NO: 374579 - RNA, 19 nt, Homo sapiens
  misc_RNA (1)...(19): siRNA sense strand
ggccaucgcugagccucuu

SEQ ID NO: 374580 - RNA, 19 nt, Homo sapiens
  misc_RNA (1)...(19): siRNA sense strand
ccgguggaauggagacaaa

SEQ ID NO: 374581 - RNA, 19 nt, Homo sapiens
  misc_RNA (1)...(19): siRNA sense strand
ucaagaucccacccaauga

SEQ ID NO: 374582 - RNA, 19 nt, Homo sapiens
  misc_RNA (1)...(19): siRNA sense strand
ggagaacccuggggcacua

SEQ ID NO: 374583 - RNA, 19 nt, Homo sapiens
  misc_RNA (1)...(19): siRNA sense strand
ucaaccagcgcuuucaaga

SEQ ID NO: 374584 - RNA, 19 nt, Homo sapiens
  misc_RNA (1)...(19): siRNA sense strand
cauagcagaggccaaguug

SEQ ID NO: 374585 - RNA, 19 nt, Homo sapiens
  misc_RNA (1)...(19): siRNA sense strand
uggcagcucucaacaugca

SEQ ID NO: 374586 - RNA, 19 nt, Homo sapiens
  misc_RNA (1)...(19): siRNA sense strand
gaggcgcaauggcuuccuu

SEQ ID NO: 374587 - RNA, 19 nt, Homo sapiens
  misc_RNA (1)...(19): siRNA sense strand
gaccuccuguccuacuuca

SEQ ID NO: 374588 - RNA, 19 nt, Homo sapiens
  misc_RNA (1)...(19): siRNA sense strand
gcuccagcccuucauguuc

SEQ ID NO: 374589 - RNA, 19 nt, Homo sapiens
  misc_RNA (1)...(19): siRNA sense strand
ggaauuuggcacagcuuag

SEQ ID NO: 374590 - RNA, 19 nt, Homo sapiens
  misc_RNA (1)...(19): siRNA sense strand
ggaccuggcagcucucaac

SEQ ID NO: 374591 - RNA, 19 nt, Homo sapiens
  misc_RNA (1)...(19): siRNA sense strand
ccuccuguccuacuucaaa

SEQ ID NO: 374592 - RNA, 19 nt, Homo sapiens
  misc_RNA (1)...(19): siRNA sense strand
ccagcuggcggaucgugua

SEQ ID NO: 374593 - RNA, 19 nt, Homo sapiens
  misc_RNA (1)...(19): siRNA sense strand
cuucagagccaacaucuac

SEQ ID NO: 374594 - RNA, 19 nt, Homo sapiens
  misc_RNA (1)...(19): siRNA sense strand
uggaugcugccuacaauug

SEQ ID NO: 374595 - RNA, 19 nt, Homo sapiens
  misc_RNA (1)...(19): siRNA sense strand
cggaauuuggcacagcuua

SEQ ID NO: 374596 - RNA, 19 nt, Homo sapiens
  misc_RNA (1)...(19): siRNA sense strand
cacccuggccuuccgcuuu

SEQ ID NO: 374597 - RNA, 19 nt, Homo sapiens
  misc_RNA (1)...(19): siRNA sense strand
acaaugaggcucggaagau

SEQ ID NO: 374598 - RNA, 19 nt, Homo sapiens
  misc_RNA (1)...(19): siRNA sense strand
gugacugcaucccuuucuu

SEQ ID NO: 374599 - RNA, 19 nt, Homo sapiens
  misc_RNA (1)...(19): siRNA sense strand
acaauuggacccagaagag

SEQ ID NO: 374600 - RNA, 19 nt, Homo sapiens
  misc_RNA (1)...(19): siRNA sense strand
ucuucuggcuugucuguuc

SEQ ID NO: 374601 - RNA, 19 nt, Homo sapiens
  misc_RNA (1)...(19): siRNA sense strand
ggaacaccugacaacauug

SEQ ID NO: 374602 - RNA, 19 nt, Homo sapiens
  misc_RNA (1)...(19): siRNA sense strand
ugacugcaucccuuucuuc

SEQ ID NO: 374603 - RNA, 19 nt, Homo sapiens
  misc_RNA (1)...(19): siRNA sense strand
gccaugguccagaucauca

SEQ ID NO: 374604 - RNA, 19 nt, Homo sapiens
  misc_RNA (1)...(19): siRNA sense strand
ccaugcacacccucuuuau

SEQ ID NO: 374605 - RNA, 19 nt, Homo sapiens
  misc_RNA (1)...(19): siRNA sense strand
caagaucccacccaaugac

SEQ ID NO: 374606 - RNA, 19 nt, Homo sapiens
  misc_RNA (1)...(19): siRNA sense strand
ugagcagaauuuccuuguc

SEQ ID NO: 374607 - RNA, 19 nt, Homo sapiens
  misc_RNA (1)...(19): siRNA sense strand
cgcaaggcccugagcagaa

SEQ ID NO: 374608 - RNA, 19 nt, Homo sapiens
  misc_RNA (1)...(19): siRNA sense strand
uuauaugcauguggcuuug

SEQ ID NO: 374609 - RNA, 19 nt, Homo sapiens
  misc_RNA (1)...(19): siRNA sense strand
uccggacccuucaauguca

SEQ ID NO: 374610 - RNA, 19 nt, Homo sapiens
  misc_RNA (1)...(19): siRNA sense strand
ccuucaaugucacugaugu

SEQ ID NO: 374611 - RNA, 19 nt, Homo sapiens
  misc_RNA (1)...(19): siRNA sense strand
caucaaccagcgcuuucaa

SEQ ID NO: 374612 - RNA, 19 nt, Homo sapiens
  misc_RNA (1)...(19): siRNA sense strand
gguccugcgagacugcaua

SEQ ID NO: 374613 - RNA, 19 nt, Homo sapiens
  misc_RNA (1)...(19): siRNA sense strand
caagagaaguauucaagga

SEQ ID NO: 374614 - RNA, 19 nt, Homo sapiens
  misc_RNA (1)...(19): siRNA sense strand
gaaugugccuggcuagaga

SEQ ID NO: 374615 - RNA, 19 nt, Homo sapiens
  misc_RNA (1)...(19): siRNA sense strand
gagcaucuguacagcauga

SEQ ID NO: 374616 - RNA, 19 nt, Homo sapiens
  misc_RNA (1)...(19): siRNA sense strand
caugagagcugccaaccuu

SEQ ID NO: 374617 - RNA, 19 nt, Homo sapiens
  misc_RNA (1)...(19): siRNA sense strand
agagaaagauuggccagua

SEQ ID NO: 374618 - RNA, 19 nt, Homo sapiens
  misc_RNA (1)...(19): siRNA sense strand
caaggagacucgcuacugu

SEQ ID NO: 374619 - RNA, 19 nt, Homo sapiens
  misc_RNA (1)...(19): siRNA sense strand
gaugaaaggugggauacga

SEQ ID NO: 374620 - RNA, 19 nt, Homo sapiens
  misc_RNA (1)...(19): siRNA sense strand
ucaaggacauaacgacuau

SEQ ID NO: 374621 - RNA, 19 nt, Homo sapiens
  misc_RNA (1)...(19): siRNA sense strand
gauggucagugccuuguug

SEQ ID NO: 374622 - RNA, 19 nt, Homo sapiens
  misc_RNA (1)...(19): siRNA sense strand
cuagagauccugaugauug

SEQ ID NO: 374623 - RNA, 19 nt, Homo sapiens
  misc_RNA (1)...(19): siRNA sense strand
gccagcaggugcccuacua

SEQ ID NO: 374624 - RNA, 19 nt, Homo sapiens
  misc_RNA (1)...(19): siRNA sense strand
gaagagggugccaggcuuu

SEQ ID NO: 374625 - RNA, 19 nt, Homo sapiens
  misc_RNA (1)...(19): siRNA sense strand
gaucaaacgcucuaagaag

SEQ ID NO: 374626 - RNA, 19 nt, Homo sapiens
  misc_RNA (1)...(19): siRNA sense strand
gagaaagauuggccaguac

SEQ ID NO: 374627 - RNA, 19 nt, Homo sapiens
  misc_RNA (1)...(19): siRNA sense strand
caagaucacagacacuuug

SEQ ID NO: 374628 - RNA, 19 nt, Homo sapiens
  misc_RNA (1)...(19): siRNA sense strand
ggaaguauggcuauggaau

SEQ ID NO: 374629 - RNA, 19 nt, Homo sapiens
  misc_RNA (1)...(19): siRNA sense strand
caagcccgcucaugaucaa

SEQ ID NO: 374630 - RNA, 19 nt, Homo sapiens
  misc_RNA (1)...(19): siRNA sense strand
gaaguauggcuauggaauc

SEQ ID NO: 374631 - RNA, 19 nt, Homo sapiens
  misc_RNA (1)...(19): siRNA sense strand
acagggagcugguucacau

SEQ ID NO: 374632 - RNA, 19 nt, Homo sapiens
  misc_RNA (1)...(19): siRNA sense strand
gaagugggaaugaugaaag

SEQ ID NO: 374633 - RNA, 19 nt, Homo sapiens
  misc_RNA (1)...(19): siRNA sense strand
cagugaagcuucgaugaug

SEQ ID NO: 374634 - RNA, 19 nt, Homo sapiens
  misc_RNA (1)...(19): siRNA sense strand
ggagcugguucacaugauc

SEQ ID NO: 374635 - RNA, 19 nt, Homo sapiens
  misc_RNA (1)...(19): siRNA sense strand
gaaguauucaaggacauaa

SEQ ID NO: 374636 - RNA, 19 nt, Homo sapiens
  misc_RNA (1)...(19): siRNA sense strand
ggcuagagauccugaugau

SEQ ID NO: 374637 - RNA, 19 nt, Homo sapiens
  misc_RNA (1)...(19): siRNA sense strand
ccuacuaccuggagaacga

SEQ ID NO: 374638 - RNA, 19 nt, Homo sapiens
  misc_RNA (1)...(19): siRNA sense strand
gaaacacaagcgccagaga

SEQ ID NO: 374639 - RNA, 19 nt, Homo sapiens
  misc_RNA (1)...(19): siRNA sense strand
gcgcaggucuacggucaga

SEQ ID NO: 374640 - RNA, 19 nt, Homo sapiens
  misc_RNA (1)...(19): siRNA sense strand
ccagugcaccauugauaaa

SEQ ID NO: 374641 - RNA, 19 nt, Homo sapiens
  misc_RNA (1)...(19): siRNA sense strand
acaaaggcauggagcaucu

SEQ ID NO: 374642 - RNA, 19 nt, Homo sapiens
  misc_RNA (1)...(19): siRNA sense strand
aucaaacgcucuaagaaga

SEQ ID NO: 374643 - RNA, 19 nt, Homo sapiens
  misc_RNA (1)...(19): siRNA sense strand
cgaagaggagggagaaugu

SEQ ID NO: 374644 - RNA, 19 nt, Homo sapiens
  misc_RNA (1)...(19): siRNA sense strand
gauuugacccuccaugauc

SEQ ID NO: 374645 - RNA, 19 nt, Homo sapiens
  misc_RNA (1)...(19): siRNA sense strand
ccaugacccuccacaccaa

SEQ ID NO: 374646 - RNA, 19 nt, Homo sapiens
  misc_RNA (1)...(19): siRNA sense strand
gguccaccuucuagaaugu

SEQ ID NO: 374647 - RNA, 19 nt, Homo sapiens
  misc_RNA (1)...(19): siRNA sense strand
ggagggagaauguugaaac

SEQ ID NO: 374648 - RNA, 19 nt, Homo sapiens
  misc_RNA (1)...(19): siRNA sense strand
gaagaggagggagaauguu

SEQ ID NO: 374649 - RNA, 19 nt, Homo sapiens
  misc_RNA (1)...(19): siRNA sense strand
gagaaguauucaaggacau

SEQ ID NO: 374650 - RNA, 19 nt, Homo sapiens
  misc_RNA (1)...(19): siRNA sense strand
uggaagagaaggaccauau

SEQ ID NO: 374651 - RNA, 19 nt, Homo sapiens
  misc_RNA (1)...(19): siRNA sense strand
ggaagagaaggaccauauc

SEQ ID NO: 374652 - RNA, 19 nt, Homo sapiens
  misc_RNA (1)...(19): siRNA sense strand
caagggaaguauggcuaug

SEQ ID NO: 374653 - RNA, 19 nt, Homo sapiens
  misc_RNA (1)...(19): siRNA sense strand
gcauggagcaucuguacag

SEQ ID NO: 374654 - RNA, 19 nt, Homo sapiens
  misc_RNA (1)...(19): siRNA sense strand
gcuuaauucuggaguguac

SEQ ID NO: 374655 - RNA, 19 nt, Homo sapiens
  misc_RNA (1)...(19): siRNA sense strand
acuguuugcuccuaacuug

SEQ ID NO: 374656 - RNA, 19 nt, Homo sapiens
  misc_RNA (1)...(19): siRNA sense strand
gugccaggcuuuguggauu

SEQ ID NO: 374657 - RNA, 19 nt, Homo sapiens
  misc_RNA (1)...(19): siRNA sense strand
gcuucaggcuaccauuaug

SEQ ID NO: 374658 - RNA, 19 nt, Homo sapiens
  misc_RNA (1)...(19): siRNA sense strand
gacaagaucacagacacuu

SEQ ID NO: 374659 - RNA, 19 nt, Homo sapiens
  misc_RNA (1)...(19): siRNA sense strand
ggaguguacacauuucugu

SEQ ID NO: 374660 - RNA, 19 nt, Homo sapiens
  misc_RNA (1)...(19): siRNA sense strand
ggauuugacccuccaugau

SEQ ID NO: 374661 - RNA, 19 nt, Homo sapiens
  misc_RNA (1)...(19): siRNA sense strand
ugaaaggugggauacgaaa

SEQ ID NO: 374662 - RNA, 19 nt, Homo sapiens
  misc_RNA (1)...(19): siRNA sense strand
ccgcaaaugcuacgaagug

SEQ ID NO: 374663 - RNA, 19 nt, Homo sapiens
  misc_RNA (1)...(19): siRNA sense strand
gaggagggagaauguugaa

SEQ ID NO: 374664 - RNA, 19 nt, Homo sapiens
  misc_RNA (1)...(19): siRNA sense strand
gaagagaaggaccauaucc

SEQ ID NO: 374665 - RNA, 19 nt, Homo sapiens
  misc_RNA (1)...(19): siRNA sense strand
ugccaggcuuuguggauuu

SEQ ID NO: 374666 - RNA, 19 nt, Homo sapiens
  misc_RNA (1)...(19): siRNA sense strand
gauccuaccagacccuuca

SEQ ID NO: 374667 - RNA, 19 nt, Homo sapiens
  misc_RNA (1)...(19): siRNA sense strand
ucaaacgcucuaagaagaa

SEQ ID NO: 374668 - RNA, 19 nt, Homo sapiens
  misc_RNA (1)...(19): siRNA sense strand
cuaccagacccuucaguga

SEQ ID NO: 374669 - RNA, 19 nt, Homo sapiens
  misc_RNA (1)...(19): siRNA sense strand
aaccagugcaccauugaua

SEQ ID NO: 374670 - RNA, 19 nt, Homo sapiens
  misc_RNA (1)...(19): siRNA sense strand
ccagcacccugaagucucu

SEQ ID NO: 374671 - RNA, 19 nt, Homo sapiens
  misc_RNA (1)...(19): siRNA sense strand
uagagauccugaugauugg

SEQ ID NO: 374672 - RNA, 19 nt, Homo sapiens
  misc_RNA (1)...(19): siRNA sense strand
uggccaagcccgcucauga

SEQ ID NO: 374673 - RNA, 19 nt, Homo sapiens
  misc_RNA (1)...(19): siRNA sense strand
ccaaugacaagggaaguau

SEQ ID NO: 374674 - RNA, 19 nt, Homo sapiens
  misc_RNA (1)...(19): siRNA sense strand
ucaggcacaugaguaacaa

SEQ ID NO: 374675 - RNA, 19 nt, Homo sapiens
  misc_RNA (1)...(19): siRNA sense strand
gcugcuggcuacaucaucu

SEQ ID NO: 374676 - RNA, 19 nt, Homo sapiens
  misc_RNA (1)...(19): siRNA sense strand
ccaaggagacucgcuacug

SEQ ID NO: 374677 - RNA, 19 nt, Homo sapiens
  misc_RNA (1)...(19): siRNA sense strand
ccacugcgggcucuacuuc

SEQ ID NO: 374678 - RNA, 19 nt, Homo sapiens
  misc_RNA (1)...(19): siRNA sense strand
ucacagacacuuugaucca

SEQ ID NO: 374679 - RNA, 19 nt, Homo sapiens
  misc_RNA (1)...(19): siRNA sense strand
gcauucuacaggccaaauu

SEQ ID NO: 374680 - RNA, 19 nt, Homo sapiens
  misc_RNA (1)...(19): siRNA sense strand
caggccaaauucagauaau

SEQ ID NO: 374681 - RNA, 19 nt, Homo sapiens
  misc_RNA (1)...(19): siRNA sense strand
cacaagcgccagagagaug

SEQ ID NO: 374682 - RNA, 19 nt, Homo sapiens
  misc_RNA (1)...(19): siRNA sense strand
gcuacgaagugggaaugau

SEQ ID NO: 374683 - RNA, 19 nt, Homo sapiens
  misc_RNA (1)...(19): siRNA sense strand
gcagggagaggaguuugug

SEQ ID NO: 374684 - RNA, 19 nt, Homo sapiens
  misc_RNA (1)...(19): siRNA sense strand
ccauggagcacccagugaa

SEQ ID NO: 374685 - RNA, 19 nt, Homo sapiens
  misc_RNA (1)...(19): siRNA sense strand
ugaucaaacgcucuaagaa

SEQ ID NO: 374686 - RNA, 19 nt, Homo sapiens
  misc_RNA (1)...(19): siRNA sense strand
cuacgaagugggaaugaug

SEQ ID NO: 374687 - RNA, 19 nt, Homo sapiens
  misc_RNA (1)...(19): siRNA sense strand
agaaguauucaaggacaua

SEQ ID NO: 374688 - RNA, 19 nt, Homo sapiens
  misc_RNA (1)...(19): siRNA sense strand
uaacaaaggcauggagcau

SEQ ID NO: 374689 - RNA, 19 nt, Homo sapiens
  misc_RNA (1)...(19): siRNA sense strand
cacaucaggcacaugagua

SEQ ID NO: 374690 - RNA, 19 nt, Homo sapiens
  misc_RNA (1)...(19): siRNA sense strand
caaacgcucuaagaagaac

SEQ ID NO: 374691 - RNA, 19 nt, Homo sapiens
  misc_RNA (1)...(19): siRNA sense strand
ugagagcugccaaccuuug

SEQ ID NO: 374692 - RNA, 19 nt, Homo sapiens
  misc_RNA (1)...(19): siRNA sense strand
gggagcugguucacaugau

SEQ ID NO: 374693 - RNA, 19 nt, Homo sapiens
  misc_RNA (1)...(19): siRNA sense strand
acacuuugauccaccugau

SEQ ID NO: 374694 - RNA, 19 nt, Homo sapiens
  misc_RNA (1)...(19): siRNA sense strand
auucuggaguguacacauu

SEQ ID NO: 374695 - RNA, 19 nt, Homo sapiens
  misc_RNA (1)...(19): siRNA sense strand
uagagggcaugguggagau

SEQ ID NO: 374696 - RNA, 19 nt, Homo sapiens
  misc_RNA (1)...(19): siRNA sense strand
aagcuacuguuugcuccua

SEQ ID NO: 374697 - RNA, 19 nt, Homo sapiens
  misc_RNA (1)...(19): siRNA sense strand
gcugcaaggccuucuucaa

SEQ ID NO: 374698 - RNA, 19 nt, Homo sapiens
  misc_RNA (1)...(19): siRNA sense strand
uggagcaucuguacagcau

SEQ ID NO: 374699 - RNA, 19 nt, Homo sapiens
  misc_RNA (1)...(19): siRNA sense strand
gaaagauuggccaguacca

SEQ ID NO: 374700 - RNA, 19 nt, Homo sapiens
  misc_RNA (1)...(19): siRNA sense strand
gaccgaagaggagggagaa

SEQ ID NO: 374701 - RNA, 19 nt, Homo sapiens
  misc_RNA (1)...(19): siRNA sense strand
acaucaggcacaugaguaa

SEQ ID NO: 374702 - RNA, 19 nt, Homo sapiens
  misc_RNA (1)...(19): siRNA sense strand
ccacaucaggcacaugagu

SEQ ID NO: 374703 - RNA, 19 nt, Homo sapiens
  misc_RNA (1)...(19): siRNA sense strand
ucagugaagcuucgaugau

SEQ ID NO: 374704 - RNA, 19 nt, Homo sapiens
  misc_RNA (1)...(19): siRNA sense strand
agaacagccuggccuuguc

SEQ ID NO: 374705 - RNA, 19 nt, Homo sapiens
  misc_RNA (1)...(19): siRNA sense strand
ccaaccagugcaccauuga

SEQ ID NO: 374706 - RNA, 19 nt, Homo sapiens
  misc_RNA (1)...(19): siRNA sense strand
gugugccucaaaucuauua

SEQ ID NO: 374707 - RNA, 19 nt, Homo sapiens
  misc_RNA (1)...(19): siRNA sense strand
gugcaaugacuaugcuuca

SEQ ID NO: 374708 - RNA, 19 nt, Homo sapiens
  misc_RNA (1)...(19): siRNA sense strand
gccaggcuuuguggauuug

SEQ ID NO: 374709 - RNA, 19 nt, Homo sapiens
  misc_RNA (1)...(19): siRNA sense strand
ggucagugccuuguuggau

SEQ ID NO: 374710 - RNA, 19 nt, Homo sapiens
  misc_RNA (1)...(19): siRNA sense strand
ggccaagcccgcucaugau

SEQ ID NO: 374711 - RNA, 19 nt, Homo sapiens
  misc_RNA (1)...(19): siRNA sense strand
cgaagugggaaugaugaaa

SEQ ID NO: 374712 - RNA, 19 nt, Homo sapiens
  misc_RNA (1)...(19): siRNA sense strand
cugcaaggccuucuucaag

SEQ ID NO: 374713 - RNA, 19 nt, Homo sapiens
  misc_RNA (1)...(19): siRNA sense strand
gaaugucguuucugcauaa

SEQ ID NO: 374714 - RNA, 19 nt, Homo sapiens
  misc_RNA (1)...(19): siRNA sense strand
caacaucaccauugcaaua

SEQ ID NO: 374715 - RNA, 19 nt, Homo sapiens
  misc_RNA (1)...(19): siRNA sense strand
gcagauuccuuguauacau

SEQ ID NO: 374716 - RNA, 19 nt, Homo sapiens
  misc_RNA (1)...(19): siRNA sense strand
cagauuccuuguauacaua

SEQ ID NO: 374717 - RNA, 19 nt, Homo sapiens
  misc_RNA (1)...(19): siRNA sense strand
ccaugcagauuccuuguau

SEQ ID NO: 374718 - RNA, 19 nt, Homo sapiens
  misc_RNA (1)...(19): siRNA sense strand
cgacagcacugauuguacu

SEQ ID NO: 374719 - RNA, 19 nt, Homo sapiens
  misc_RNA (1)...(19): siRNA sense strand
caauagagaaagaagaaug

SEQ ID NO: 374720 - RNA, 19 nt, Homo sapiens
  misc_RNA (1)...(19): siRNA sense strand
ccauugcaauagagaaaga

SEQ ID NO: 374721 - RNA, 19 nt, Homo sapiens
  misc_RNA (1)...(19): siRNA sense strand
gggaucugguguauaagga

SEQ ID NO: 374722 - RNA, 19 nt, Homo sapiens
  misc_RNA (1)...(19): siRNA sense strand
gagaaagaagaaugucguu

SEQ ID NO: 374723 - RNA, 19 nt, Homo sapiens
  misc_RNA (1)...(19): siRNA sense strand
caugcagauuccuuguaua

SEQ ID NO: 374724 - RNA, 19 nt, Homo sapiens
  misc_RNA (1)...(19): siRNA sense strand
gcccagcuacugcuccuuu

SEQ ID NO: 374725 - RNA, 19 nt, Homo sapiens
  misc_RNA (1)...(19): siRNA sense strand
ugaccaacaucaccauugc

SEQ ID NO: 374726 - RNA, 19 nt, Homo sapiens
  misc_RNA (1)...(19): siRNA sense strand
cuacugcuccuuuggugaa

SEQ ID NO: 374727 - RNA, 19 nt, Homo sapiens
  misc_RNA (1)...(19): siRNA sense strand
caucaccauugcaauagag

SEQ ID NO: 374728 - RNA, 19 nt, Homo sapiens
  misc_RNA (1)...(19): siRNA sense strand
caccauugcaauagagaaa

SEQ ID NO: 374729 - RNA, 19 nt, Homo sapiens
  misc_RNA (1)...(19): siRNA sense strand
cuccuuuggugaaaugaaa

SEQ ID NO: 374730 - RNA, 19 nt, Homo sapiens
  misc_RNA (1)...(19): siRNA sense strand
gacagcgacagcacugauu

SEQ ID NO: 374731 - RNA, 19 nt, Homo sapiens
  misc_RNA (1)...(19): siRNA sense strand
ugcaauagagaaagaagaa

SEQ ID NO: 374732 - RNA, 19 nt, Homo sapiens
  misc_RNA (1)...(19): siRNA sense strand
agaaagaagaaugucguuu

SEQ ID NO: 374733 - RNA, 19 nt, Homo sapiens
  misc_RNA (1)...(19): siRNA sense strand
ugucguuucugcauaagca

SEQ ID NO: 374734 - RNA, 19 nt, Homo sapiens
  misc_RNA (1)...(19): siRNA sense strand
gcaauagagaaagaagaau

SEQ ID NO: 374735 - RNA, 19 nt, Homo sapiens
  misc_RNA (1)...(19): siRNA sense strand
cggcugugcucaccaugca

SEQ ID NO: 374736 - RNA, 19 nt, Homo sapiens
  misc_RNA (1)...(19): siRNA sense strand
gugcucaccaugcagauuc

SEQ ID NO: 374737 - RNA, 19 nt, Homo sapiens
  misc_RNA (1)...(19): siRNA sense strand
acaucaccauugcaauaga

SEQ ID NO: 374738 - RNA, 19 nt, Homo sapiens
  misc_RNA (1)...(19): siRNA sense strand
ugaaagccauggacggaua

SEQ ID NO: 374739 - RNA, 19 nt, Homo sapiens
  misc_RNA (1)...(19): siRNA sense strand
ugaccacgcugcuguuuca

SEQ ID NO: 374740 - RNA, 19 nt, Homo sapiens
  misc_RNA (1)...(19): siRNA sense strand
gcugauggcuguguguuuc

SEQ ID NO: 374741 - RNA, 19 nt, Homo sapiens
  misc_RNA (1)...(19): siRNA sense strand
ccgagaagcuguggaggaa

SEQ ID NO: 374742 - RNA, 19 nt, Homo sapiens
  misc_RNA (1)...(19): siRNA sense strand
ugcaggagcuggacaagga

SEQ ID NO: 374743 - RNA, 19 nt, Homo sapiens
  misc_RNA (1)...(19): siRNA sense strand
gacggauacuucaaucuca

SEQ ID NO: 374744 - RNA, 19 nt, Homo sapiens
  misc_RNA (1)...(19): siRNA sense strand
ggacguggccuuuuaacaa

SEQ ID NO: 374745 - RNA, 19 nt, Homo sapiens
  misc_RNA (1)...(19): siRNA sense strand
ggacggauacuucaaucuc

SEQ ID NO: 374746 - RNA, 19 nt, Homo sapiens
  misc_RNA (1)...(19): siRNA sense strand
ggaaacugcaggaggaauc

SEQ ID NO: 374747 - RNA, 19 nt, Homo sapiens
  misc_RNA (1)...(19): siRNA sense strand
guaccagacacgcggcaua

SEQ ID NO: 374748 - RNA, 19 nt, Homo sapiens
  misc_RNA (1)...(19): siRNA sense strand
ccgacuacaucaccgagaa

SEQ ID NO: 374749 - RNA, 19 nt, Homo sapiens
  misc_RNA (1)...(19): siRNA sense strand
gacguggccuuuuaacaaa

SEQ ID NO: 374750 - RNA, 19 nt, Homo sapiens
  misc_RNA (1)...(19): siRNA sense strand
gaagcaacuacgagagguu

SEQ ID NO: 374751 - RNA, 19 nt, Homo sapiens
  misc_RNA (1)...(19): siRNA sense strand
accgagaggucauguacaa

SEQ ID NO: 374752 - RNA, 19 nt, Homo sapiens
  misc_RNA (1)...(19): siRNA sense strand
gcugggcacucgcuuucug

SEQ ID NO: 374753 - RNA, 19 nt, Homo sapiens
  misc_RNA (1)...(19): siRNA sense strand
ucguggcgcugcugucuga

SEQ ID NO: 374754 - RNA, 19 nt, Homo sapiens
  misc_RNA (1)...(19): siRNA sense strand
guacggacgcucccacaag

SEQ ID NO: 374755 - RNA, 19 nt, Homo sapiens
  misc_RNA (1)...(19): siRNA sense strand
cagcgacuccgacaucuuc

SEQ ID NO: 374756 - RNA, 19 nt, Homo sapiens
  misc_RNA (1)...(19): siRNA sense strand
cugcaaggccugcuggaaa

SEQ ID NO: 374757 - RNA, 19 nt, Homo sapiens
  misc_RNA (1)...(19): siRNA sense strand
aagacgaucccacugugua

SEQ ID NO: 374758 - RNA, 19 nt, Homo sapiens
  misc_RNA (1)...(19): siRNA sense strand
gagacgcugucccgguaca

SEQ ID NO: 374759 - RNA, 19 nt, Homo sapiens
  misc_RNA (1)...(19): siRNA sense strand
ggaauccagguaccagaca

SEQ ID NO: 374760 - RNA, 19 nt, Homo sapiens
  misc_RNA (1)...(19): siRNA sense strand
ccaccgagaggucauguac

SEQ ID NO: 374761 - RNA, 19 nt, Homo sapiens
  misc_RNA (1)...(19): siRNA sense strand
cagcugggcacucgcuuuc

SEQ ID NO: 374762 - RNA, 19 nt, Homo sapiens
  misc_RNA (1)...(19): siRNA sense strand
gcagcgacuccgacaucuu

SEQ ID NO: 374763 - RNA, 19 nt, Homo sapiens
  misc_RNA (1)...(19): siRNA sense strand
caagacgaucccacugugu

SEQ ID NO: 374764 - RNA, 19 nt, Homo sapiens
  misc_RNA (1)...(19): siRNA sense strand
gaaagccauggacggauac

SEQ ID NO: 374765 - RNA, 19 nt, Homo sapiens
  misc_RNA (1)...(19): siRNA sense strand
ggaucugguucagcaugga

SEQ ID NO: 374766 - RNA, 19 nt, Homo sapiens
  misc_RNA (1)...(19): siRNA sense strand
gaaggaaucggauauaaca

SEQ ID NO: 374767 - RNA, 19 nt, Homo sapiens
  misc_RNA (1)...(19): siRNA sense strand
gaagaaggaaucggauaua

SEQ ID NO: 374768 - RNA, 19 nt, Homo sapiens
  misc_RNA (1)...(19): siRNA sense strand
gaagauaccaagcucaaga

SEQ ID NO: 374769 - RNA, 19 nt, Homo sapiens
  misc_RNA (1)...(19): siRNA sense strand
ggaaucggauauaacauca

SEQ ID NO: 374770 - RNA, 19 nt, Homo sapiens
  misc_RNA (1)...(19): siRNA sense strand
caacauccuugcccuguca

SEQ ID NO: 374771 - RNA, 19 nt, Homo sapiens
  misc_RNA (1)...(19): siRNA sense strand
aagaaggaaucggauauaa

SEQ ID NO: 374772 - RNA, 19 nt, Homo sapiens
  misc_RNA (1)...(19): siRNA sense strand
gagcacaaguuacaguucu

SEQ ID NO: 374773 - RNA, 19 nt, Homo sapiens
  misc_RNA (1)...(19): siRNA sense strand
caaaggugguacugacaga

SEQ ID NO: 374774 - RNA, 19 nt, Homo sapiens
  misc_RNA (1)...(19): siRNA sense strand
ccaauugggugcguaacuu

SEQ ID NO: 374775 - RNA, 19 nt, Homo sapiens
  misc_RNA (1)...(19): siRNA sense strand
cuaaaccgcuccucuaagg

SEQ ID NO: 374776 - RNA, 19 nt, Homo sapiens
  misc_RNA (1)...(19): siRNA sense strand
gaaagugaagggauuugga

SEQ ID NO: 374777 - RNA, 19 nt, Homo sapiens
  misc_RNA (1)...(19): siRNA sense strand
gcuacuccauucacaccua

SEQ ID NO: 374778 - RNA, 19 nt, Homo sapiens
  misc_RNA (1)...(19): siRNA sense strand
gaacaucagcgagacuuca

SEQ ID NO: 374779 - RNA, 19 nt, Homo sapiens
  misc_RNA (1)...(19): siRNA sense strand
ucaccuggcuacuccauuc

SEQ ID NO: 374780 - RNA, 19 nt, Homo sapiens
  misc_RNA (1)...(19): siRNA sense strand
cuacuuaaaucguacuucu

SEQ ID NO: 374781 - RNA, 19 nt, Homo sapiens
  misc_RNA (1)...(19): siRNA sense strand
cgacagucccaucauugua

SEQ ID NO: 374782 - RNA, 19 nt, Homo sapiens
  misc_RNA (1)...(19): siRNA sense strand
ugaagaaggaaucggauau

SEQ ID NO: 374783 - RNA, 19 nt, Homo sapiens
  misc_RNA (1)...(19): siRNA sense strand
uuacaguucugggcaguga

SEQ ID NO: 374784 - RNA, 19 nt, Homo sapiens
  misc_RNA (1)...(19): siRNA sense strand
ugucgacagucccaucauu

SEQ ID NO: 374785 - RNA, 19 nt, Homo sapiens
  misc_RNA (1)...(19): siRNA sense strand
aacagaaguuccagaaagu

SEQ ID NO: 374786 - RNA, 19 nt, Homo sapiens
  misc_RNA (1)...(19): siRNA sense strand
caauugggugcguaacuuu

SEQ ID NO: 374787 - RNA, 19 nt, Homo sapiens
  misc_RNA (1)...(19): siRNA sense strand
aaucggauauaacaucauc

SEQ ID NO: 374788 - RNA, 19 nt, Homo sapiens
  misc_RNA (1)...(19): siRNA sense strand
uuaaaucguacuucucuga

SEQ ID NO: 374789 - RNA, 19 nt, Homo sapiens
  misc_RNA (1)...(19): siRNA sense strand
cagaaguuccagaaaguga

SEQ ID NO: 374790 - RNA, 19 nt, Homo sapiens
  misc_RNA (1)...(19): siRNA sense strand
cgacggauggagcugagua

SEQ ID NO: 374791 - RNA, 19 nt, Homo sapiens
  misc_RNA (1)...(19): siRNA sense strand
ucaccgagcccugcaguug

SEQ ID NO: 374792 - RNA, 19 nt, Homo sapiens
  misc_RNA (1)...(19): siRNA sense strand
uccagaaagugaagggauu

SEQ ID NO: 374793 - RNA, 19 nt, Homo sapiens
  misc_RNA (1)...(19): siRNA sense strand
ggcacaggccugcuacuga

SEQ ID NO: 374794 - RNA, 19 nt, Homo sapiens
  misc_RNA (1)...(19): siRNA sense strand
caucagcgagacuucauug

SEQ ID NO: 374795 - RNA, 19 nt, Homo sapiens
  misc_RNA (1)...(19): siRNA sense strand
gaaguuccuggaugccuau

SEQ ID NO: 374796 - RNA, 19 nt, Homo sapiens
  misc_RNA (1)...(19): siRNA sense strand
cacaauguccgccuacuca

SEQ ID NO: 374797 - RNA, 19 nt, Homo sapiens
  misc_RNA (1)...(19): siRNA sense strand
gguggugugugucugcaau

SEQ ID NO: 374798 - RNA, 19 nt, Homo sapiens
  misc_RNA (1)...(19): siRNA sense strand
ccagaaagugaagggauuu

SEQ ID NO: 374799 - RNA, 19 nt, Homo sapiens
  misc_RNA (1)...(19): siRNA sense strand
gacagucccaucauuguag

SEQ ID NO: 374800 - RNA, 19 nt, Homo sapiens
  misc_RNA (1)...(19): siRNA sense strand
cgaaggaggacccaauugg

SEQ ID NO: 374801 - RNA, 19 nt, Homo sapiens
  misc_RNA (1)...(19): siRNA sense strand
uaaaucguacuucucugaa

SEQ ID NO: 374802 - RNA, 19 nt, Homo sapiens
  misc_RNA (1)...(19): siRNA sense strand
gcugggcuguugaguggau

SEQ ID NO: 374803 - RNA, 19 nt, Homo sapiens
  misc_RNA (1)...(19): siRNA sense strand
acuggaaccuugcccugaa

SEQ ID NO: 374804 - RNA, 19 nt, Homo sapiens
  misc_RNA (1)...(19): siRNA sense strand
guacagccacagcaucauc

SEQ ID NO: 374805 - RNA, 19 nt, Homo sapiens
  misc_RNA (1)...(19): siRNA sense strand
ggacagcccggagacaucu

SEQ ID NO: 374806 - RNA, 19 nt, Homo sapiens
  misc_RNA (1)...(19): siRNA sense strand
gaaguuccagaaagugaag

SEQ ID NO: 374807 - RNA, 19 nt, Homo sapiens
  misc_RNA (1)...(19): siRNA sense strand
gaccuuuccugcccuuggu

SEQ ID NO: 374808 - RNA, 19 nt, Homo sapiens
  misc_RNA (1)...(19): siRNA sense strand
ccaacaccaugcucuuugc

SEQ ID NO: 374809 - RNA, 19 nt, Homo sapiens
  misc_RNA (1)...(19): siRNA sense strand
ucaccaaggacacguuuua

SEQ ID NO: 374810 - RNA, 19 nt, Homo sapiens
  misc_RNA (1)...(19): siRNA sense strand
gauaccaagcucaagauac

SEQ ID NO: 374811 - RNA, 19 nt, Homo sapiens
  misc_RNA (1)...(19): siRNA sense strand
cuucauugcccgugaccua

SEQ ID NO: 374812 - RNA, 19 nt, Homo sapiens
  misc_RNA (1)...(19): siRNA sense strand
acagcucgguggugugugu

SEQ ID NO: 374813 - RNA, 19 nt, Homo sapiens
  misc_RNA (1)...(19): siRNA sense strand
uuucaaguccuuccagaga

SEQ ID NO: 374814 - RNA, 19 nt, Homo sapiens
  misc_RNA (1)...(19): siRNA sense strand
caucaccaaggacacguuu

SEQ ID NO: 374815 - RNA, 19 nt, Homo sapiens
  misc_RNA (1)...(19): siRNA sense strand
uuguagacaucaccaagga

SEQ ID NO: 374816 - RNA, 19 nt, Homo sapiens
  misc_RNA (1)...(19): siRNA sense strand
gcguaacuuugucgacagu

SEQ ID NO: 374817 - RNA, 19 nt, Homo sapiens
  misc_RNA (1)...(19): siRNA sense strand
gaucgagggaugcaguaca

SEQ ID NO: 374818 - RNA, 19 nt, Homo sapiens
  misc_RNA (1)...(19): siRNA sense strand
gguacugacagacccagaa

SEQ ID NO: 374819 - RNA, 19 nt, Homo sapiens
  misc_RNA (1)...(19): siRNA sense strand
caauguccgccuacucaug

SEQ ID NO: 374820 - RNA, 19 nt, Homo sapiens
  misc_RNA (1)...(19): siRNA sense strand
caguacagccacagcauca

SEQ ID NO: 374821 - RNA, 19 nt, Homo sapiens
  misc_RNA (1)...(19): siRNA sense strand
caaggacacguuuuacaaa

SEQ ID NO: 374822 - RNA, 19 nt, Homo sapiens
  misc_RNA (1)...(19): siRNA sense strand
cugaagaaggaaucggaua

SEQ ID NO: 374823 - RNA, 19 nt, Homo sapiens
  misc_RNA (1)...(19): siRNA sense strand
acagucccaucauuguaga

SEQ ID NO: 374824 - RNA, 19 nt, Homo sapiens
  misc_RNA (1)...(19): siRNA sense strand
auaccaagcucaagauacc

SEQ ID NO: 374825 - RNA, 19 nt, Homo sapiens
  misc_RNA (1)...(19): siRNA sense strand
gcagacaccccugaugauu

SEQ ID NO: 374826 - RNA, 19 nt, Homo sapiens
  misc_RNA (1)...(19): siRNA sense strand
cauccgcaccuacaccuau

SEQ ID NO: 374827 - RNA, 19 nt, Homo sapiens
  misc_RNA (1)...(19): siRNA sense strand
ugucugcaaugccacauac

SEQ ID NO: 374828 - RNA, 19 nt, Homo sapiens
  misc_RNA (1)...(19): siRNA sense strand
gggaucgagggaugcagua

SEQ ID NO: 374829 - RNA, 19 nt, Homo sapiens
  misc_RNA (1)...(19): siRNA sense strand
ugugugggcuccaaguucu

SEQ ID NO: 374830 - RNA, 19 nt, Homo sapiens
  misc_RNA (1)...(19): siRNA sense strand
agacaccccugaugauuuc

SEQ ID NO: 374831 - RNA, 19 nt, Homo sapiens
  misc_RNA (1)...(19): siRNA sense strand
guacugacagacccagaag

SEQ ID NO: 374832 - RNA, 19 nt, Homo sapiens
  misc_RNA (1)...(19): siRNA sense strand
cuaccaccuuggccacuuc

SEQ ID NO: 374833 - RNA, 19 nt, Homo sapiens
  misc_RNA (1)...(19): siRNA sense strand
ccaaggacacguuuuacaa

SEQ ID NO: 374834 - RNA, 19 nt, Homo sapiens
  misc_RNA (1)...(19): siRNA sense strand
aaacggaggucucaucugu

SEQ ID NO: 374835 - RNA, 19 nt, Homo sapiens
  misc_RNA (1)...(19): siRNA sense strand
ggugcagucuuacaugauu

SEQ ID NO: 374836 - RNA, 19 nt, Homo sapiens
  misc_RNA (1)...(19): siRNA sense strand
uggcaaagcagcagaaaga

SEQ ID NO: 374837 - RNA, 19 nt, Homo sapiens
  misc_RNA (1)...(19): siRNA sense strand
ugaacuggauccuggugaa

SEQ ID NO: 374838 - RNA, 19 nt, Homo sapiens
  misc_RNA (1)...(19): siRNA sense strand
gacgauggcucugaacucu

SEQ ID NO: 374839 - RNA, 19 nt, Homo sapiens
  misc_RNA (1)...(19): siRNA sense strand
gcaaagcagcagaaagagu

SEQ ID NO: 374840 - RNA, 19 nt, Homo sapiens
  misc_RNA (1)...(19): siRNA sense strand
cccguuaucuaugucuuua

SEQ ID NO: 374841 - RNA, 19 nt, Homo sapiens
  misc_RNA (1)...(19): siRNA sense strand
ucacaggucucuggucucu

SEQ ID NO: 374842 - RNA, 19 nt, Homo sapiens
  misc_RNA (1)...(19): siRNA sense strand
gcaagcccuuuggcaaugu

SEQ ID NO: 374843 - RNA, 19 nt, Homo sapiens
  misc_RNA (1)...(19): siRNA sense strand
cguuaucuaugucuuuaug

SEQ ID NO: 374844 - RNA, 19 nt, Homo sapiens
  misc_RNA (1)...(19): siRNA sense strand
gguugacgauggcucugaa

SEQ ID NO: 374845 - RNA, 19 nt, Homo sapiens
  misc_RNA (1)...(19): siRNA sense strand
ccagaaggcagagaaggaa

SEQ ID NO: 374846 - RNA, 19 nt, Homo sapiens
  misc_RNA (1)...(19): siRNA sense strand
gcauugccuucuccuggau

SEQ ID NO: 374847 - RNA, 19 nt, Homo sapiens
  misc_RNA (1)...(19): siRNA sense strand
acggaggucucaucugugu

SEQ ID NO: 374848 - RNA, 19 nt, Homo sapiens
  misc_RNA (1)...(19): siRNA sense strand
gugcagucuuacaugauug

SEQ ID NO: 374849 - RNA, 19 nt, Homo sapiens
  misc_RNA (1)...(19): siRNA sense strand
gcucugcuaccuccaagug

SEQ ID NO: 374850 - RNA, 19 nt, Homo sapiens
  misc_RNA (1)...(19): siRNA sense strand
gugcugggccacccuaugu

SEQ ID NO: 374851 - RNA, 19 nt, Homo sapiens
  misc_RNA (1)...(19): siRNA sense strand
uguaccaccucaccagugu

SEQ ID NO: 374852 - RNA, 19 nt, Homo sapiens
  misc_RNA (1)...(19): siRNA sense strand
gaaggcagagaaggaagug

SEQ ID NO: 374853 - RNA, 19 nt, Homo sapiens
  misc_RNA (1)...(19): siRNA sense strand
ggcaaugugagauuugaug

SEQ ID NO: 374854 - RNA, 19 nt, Homo sapiens
  misc_RNA (1)...(19): siRNA sense strand
gcacuaucagcguugugaa

SEQ ID NO: 374855 - RNA, 19 nt, Homo sapiens
  misc_RNA (1)...(19): siRNA sense strand
gccacccgcugaacuggau

SEQ ID NO: 374856 - RNA, 19 nt, Homo sapiens
  misc_RNA (1)...(19): siRNA sense strand
ucaccuacaccaacagcaa

SEQ ID NO: 374857 - RNA, 19 nt, Homo sapiens
  misc_RNA (1)...(19): siRNA sense strand
ugcaagcccuuuggcaaug

SEQ ID NO: 374858 - RNA, 19 nt, Homo sapiens
  misc_RNA (1)...(19): siRNA sense strand
gugucuggaugaucuuugu

SEQ ID NO: 374859 - RNA, 19 nt, Homo sapiens
  misc_RNA (1)...(19): siRNA sense strand
ugaaccggcaguuucgaaa

SEQ ID NO: 374860 - RNA, 19 nt, Homo sapiens
  misc_RNA (1)...(19): siRNA sense strand
ccacccagaaggcagagaa

SEQ ID NO: 374861 - RNA, 19 nt, Homo sapiens
  misc_RNA (1)...(19): siRNA sense strand
cuacaaccccguuaucuau

SEQ ID NO: 374862 - RNA, 19 nt, Homo sapiens
  misc_RNA (1)...(19): siRNA sense strand
ggggugcagucuuacauga

SEQ ID NO: 374863 - RNA, 19 nt, Homo sapiens
  misc_RNA (1)...(19): siRNA sense strand
gccauccgcaggacagcua

SEQ ID NO: 374864 - RNA, 19 nt, Homo sapiens
  misc_RNA (1)...(19): siRNA sense strand
aaacggaggucucaucugu

SEQ ID NO: 374865 - RNA, 19 nt, Homo sapiens
  misc_RNA (1)...(19): siRNA sense strand
ggugcagucuuacaugauu

SEQ ID NO: 374866 - RNA, 19 nt, Homo sapiens
  misc_RNA (1)...(19): siRNA sense strand
uggcaaagcagcagaaaga

SEQ ID NO: 374867 - RNA, 19 nt, Homo sapiens
  misc_RNA (1)...(19): siRNA sense strand
ugaacuggauccuggugaa

SEQ ID NO: 374868 - RNA, 19 nt, Homo sapiens
  misc_RNA (1)...(19): siRNA sense strand
gacgauggcucugaacucu

SEQ ID NO: 374869 - RNA, 19 nt, Homo sapiens
  misc_RNA (1)...(19): siRNA sense strand
gcaaagcagcagaaagagu

SEQ ID NO: 374870 - RNA, 19 nt, Homo sapiens
  misc_RNA (1)...(19): siRNA sense strand
cccguuaucuaugucuuua

SEQ ID NO: 374871 - RNA, 19 nt, Homo sapiens
  misc_RNA (1)...(19): siRNA sense strand
ucacaggucucuggucucu

SEQ ID NO: 374872 - RNA, 19 nt, Homo sapiens
  misc_RNA (1)...(19): siRNA sense strand
gcaagcccuuuggcaaugu

SEQ ID NO: 374873 - RNA, 19 nt, Homo sapiens
  misc_RNA (1)...(19): siRNA sense strand
cguuaucuaugucuuuaug

SEQ ID NO: 374874 - RNA, 19 nt, Homo sapiens
  misc_RNA (1)...(19): siRNA sense strand
gguugacgauggcucugaa

SEQ ID NO: 374875 - RNA, 19 nt, Homo sapiens
  misc_RNA (1)...(19): siRNA sense strand
ccagaaggcagagaaggaa

SEQ ID NO: 374876 - RNA, 19 nt, Homo sapiens
  misc_RNA (1)...(19): siRNA sense strand
gcauugccuucuccuggau

SEQ ID NO: 374877 - RNA, 19 nt, Homo sapiens
  misc_RNA (1)...(19): siRNA sense strand
acggaggucucaucugugu

SEQ ID NO: 374878 - RNA, 19 nt, Homo sapiens
  misc_RNA (1)...(19): siRNA sense strand
gugcagucuuacaugauug

SEQ ID NO: 374879 - RNA, 19 nt, Homo sapiens
  misc_RNA (1)...(19): siRNA sense strand
gcucugcuaccuccaagug

SEQ ID NO: 374880 - RNA, 19 nt, Homo sapiens
  misc_RNA (1)...(19): siRNA sense strand
gugcugggccacccuaugu

SEQ ID NO: 374881 - RNA, 19 nt, Homo sapiens
  misc_RNA (1)...(19): siRNA sense strand
uguaccaccucaccagugu

SEQ ID NO: 374882 - RNA, 19 nt, Homo sapiens
  misc_RNA (1)...(19): siRNA sense strand
gaaggcagagaaggaagug

SEQ ID NO: 374883 - RNA, 19 nt, Homo sapiens
  misc_RNA (1)...(19): siRNA sense strand
ggcaaugugagauuugaug

SEQ ID NO: 374884 - RNA, 19 nt, Homo sapiens
  misc_RNA (1)...(19): siRNA sense strand
gcacuaucagcguugugaa

SEQ ID NO: 374885 - RNA, 19 nt, Homo sapiens
  misc_RNA (1)...(19): siRNA sense strand
gccacccgcugaacuggau

SEQ ID NO: 374886 - RNA, 19 nt, Homo sapiens
  misc_RNA (1)...(19): siRNA sense strand
ucaccuacaccaacagcaa

SEQ ID NO: 374887 - RNA, 19 nt, Homo sapiens
  misc_RNA (1)...(19): siRNA sense strand
ugcaagcccuuuggcaaug

SEQ ID NO: 374888 - RNA, 19 nt, Homo sapiens
  misc_RNA (1)...(19): siRNA sense strand
gugucuggaugaucuuugu

SEQ ID NO: 374889 - RNA, 19 nt, Homo sapiens
  misc_RNA (1)...(19): siRNA sense strand
ugaaccggcaguuucgaaa

SEQ ID NO: 374890 - RNA, 19 nt, Homo sapiens
  misc_RNA (1)...(19): siRNA sense strand
ccacccagaaggcagagaa

SEQ ID NO: 374891 - RNA, 19 nt, Homo sapiens
  misc_RNA (1)...(19): siRNA sense strand
cuacaaccccguuaucuau

SEQ ID NO: 374892 - RNA, 19 nt, Homo sapiens
  misc_RNA (1)...(19): siRNA sense strand
ggggugcagucuuacauga

SEQ ID NO: 374893 - RNA, 19 nt, Homo sapiens
  misc_RNA (1)...(19): siRNA sense strand
gccauccgcaggacagcua

SEQ ID NO: 374894 - RNA, 19 nt, Homo sapiens
  misc_RNA (1)...(19): siRNA sense strand
caaaugcgcugccgggauu

SEQ ID NO: 374895 - RNA, 19 nt, Homo sapiens
  misc_RNA (1)...(19): siRNA sense strand
ggacuaugcugcacccaau

SEQ ID NO: 374896 - RNA, 19 nt, Homo sapiens
  misc_RNA (1)...(19): siRNA sense strand
gccgggaguuggaaaguua

SEQ ID NO: 374897 - RNA, 19 nt, Homo sapiens
  misc_RNA (1)...(19): siRNA sense strand
ggagagaccauacacaaug

SEQ ID NO: 374898 - RNA, 19 nt, Homo sapiens
  misc_RNA (1)...(19): siRNA sense strand
gagagaccauacacaaugu

SEQ ID NO: 374899 - RNA, 19 nt, Homo sapiens
  misc_RNA (1)...(19): siRNA sense strand
ucaugaccaucuugauuaa

SEQ ID NO: 374900 - RNA, 19 nt, Homo sapiens
  misc_RNA (1)...(19): siRNA sense strand
uguaacggguccuucgaua

SEQ ID NO: 374901 - RNA, 19 nt, Homo sapiens
  misc_RNA (1)...(19): siRNA sense strand
uaacggguccuucgauaug

SEQ ID NO: 374902 - RNA, 19 nt, Homo sapiens
  misc_RNA (1)...(19): siRNA sense strand
ggaccaaaggcucaucuug

SEQ ID NO: 374903 - RNA, 19 nt, Homo sapiens
  misc_RNA (1)...(19): siRNA sense strand
ccauguggcugcagguuuc

SEQ ID NO: 374904 - RNA, 19 nt, Homo sapiens
  misc_RNA (1)...(19): siRNA sense strand
gugagaacccagagaagaa

SEQ ID NO: 374905 - RNA, 19 nt, Homo sapiens
  misc_RNA (1)...(19): siRNA sense strand
cucaugaccaucuugauua

SEQ ID NO: 374906 - RNA, 19 nt, Homo sapiens
  misc_RNA (1)...(19): siRNA sense strand
agagaagaaugaggccuuu

SEQ ID NO: 374907 - RNA, 19 nt, Homo sapiens
  misc_RNA (1)...(19): siRNA sense strand
gguguuugcucccgugaca

SEQ ID NO: 374908 - RNA, 19 nt, Homo sapiens
  misc_RNA (1)...(19): siRNA sense strand
gccauuugguggauuauac

SEQ ID NO: 374909 - RNA, 19 nt, Homo sapiens
  misc_RNA (1)...(19): siRNA sense strand
ggacuuuggagagaccaua

SEQ ID NO: 374910 - RNA, 19 nt, Homo sapiens
  misc_RNA (1)...(19): siRNA sense strand
ccucaugaccaucuugauu

SEQ ID NO: 374911 - RNA, 19 nt, Homo sapiens
  misc_RNA (1)...(19): siRNA sense strand
gcggcuacauugcacuaga

SEQ ID NO: 374912 - RNA, 19 nt, Homo sapiens
  misc_RNA (1)...(19): siRNA sense strand
cggcuacauugcacuagaa

SEQ ID NO: 374913 - RNA, 19 nt, Homo sapiens
  misc_RNA (1)...(19): siRNA sense strand
gggcggagacaggcucuaa

SEQ ID NO: 374914 - RNA, 19 nt, Homo sapiens
  misc_RNA (1)...(19): siRNA sense strand
guaacggguccuucgauau

SEQ ID NO: 374915 - RNA, 19 nt, Homo sapiens
  misc_RNA (1)...(19): siRNA sense strand
ucaaccuguucacgucuuu

SEQ ID NO: 374916 - RNA, 19 nt, Homo sapiens
  misc_RNA (1)...(19): siRNA sense strand
aaggccauuugguggauua

SEQ ID NO: 374917 - RNA, 19 nt, Homo sapiens
  misc_RNA (1)...(19): siRNA sense strand
caacgaagucaaggccauu

SEQ ID NO: 374918 - RNA, 19 nt, Homo sapiens
  misc_RNA (1)...(19): siRNA sense strand
gcugggagcgcaacgaagu

SEQ ID NO: 374919 - RNA, 19 nt, Homo sapiens
  misc_RNA (1)...(19): siRNA sense strand
gcgucuaccugcacagucu

SEQ ID NO: 374920 - RNA, 19 nt, Homo sapiens
  misc_RNA (1)...(19): siRNA sense strand
guacgucugcugggacuau

SEQ ID NO: 374921 - RNA, 19 nt, Homo sapiens
  misc_RNA (1)...(19): siRNA sense strand
gcucggcuuugagaucuuc

SEQ ID NO: 374922 - RNA, 19 nt, Homo sapiens
  misc_RNA (1)...(19): siRNA sense strand
gaagucaaggccauuuggu

SEQ ID NO: 374923 - RNA, 19 nt, Homo sapiens
  misc_RNA (1)...(19): siRNA sense strand
ucaaggccauuugguggau

SEQ ID NO: 374924 - RNA, 19 nt, Homo sapiens
  misc_RNA (1)...(19): siRNA sense strand
caaggccauuugguggauu

SEQ ID NO: 374925 - RNA, 19 nt, Homo sapiens
  misc_RNA (1)...(19): siRNA sense strand
uauccgcauucuuggcauu

SEQ ID NO: 374926 - RNA, 19 nt, Homo sapiens
  misc_RNA (1)...(19): siRNA sense strand
gagaacccagagaagaaug

SEQ ID NO: 374927 - RNA, 19 nt, Homo sapiens
  misc_RNA (1)...(19): siRNA sense strand
gcugaggacacggcaaaug

SEQ ID NO: 374928 - RNA, 19 nt, Homo sapiens
  misc_RNA (1)...(19): siRNA sense strand
aagcugaggacacggcaaa

SEQ ID NO: 374929 - RNA, 19 nt, Homo sapiens
  misc_RNA (1)...(19): siRNA sense strand
cccagaucgugacccagua

SEQ ID NO: 374930 - RNA, 19 nt, Homo sapiens
  misc_RNA (1)...(19): siRNA sense strand
gaccaucuugauuaauuuc

SEQ ID NO: 374931 - RNA, 19 nt, Homo sapiens
  misc_RNA (1)...(19): siRNA sense strand
aaugugagaacccagagaa

SEQ ID NO: 374932 - RNA, 19 nt, Homo sapiens
  misc_RNA (1)...(19): siRNA sense strand
guccucuacugcuucauca

SEQ ID NO: 374933 - RNA, 19 nt, Homo sapiens
  misc_RNA (1)...(19): siRNA sense strand
ucagcguccucuacugcuu

SEQ ID NO: 374934 - RNA, 19 nt, Homo sapiens
  misc_RNA (1)...(19): siRNA sense strand
gcauucuccuguccaagcu

SEQ ID NO: 374935 - RNA, 19 nt, Homo sapiens
  misc_RNA (1)...(19): siRNA sense strand
gggagugccaggagaccuu

SEQ ID NO: 374936 - RNA, 19 nt, Homo sapiens
  misc_RNA (1)...(19): siRNA sense strand
ugugagaacccagagaaga

SEQ ID NO: 374937 - RNA, 19 nt, Homo sapiens
  misc_RNA (1)...(19): siRNA sense strand
uaucauggcugcuccuuua

SEQ ID NO: 374938 - RNA, 19 nt, Homo sapiens
  misc_RNA (1)...(19): siRNA sense strand
guaaaggaguggccuguaa

SEQ ID NO: 374939 - RNA, 19 nt, Homo sapiens
  misc_RNA (1)...(19): siRNA sense strand
ggagagaauuguugauguu

SEQ ID NO: 374940 - RNA, 19 nt, Homo sapiens
  misc_RNA (1)...(19): siRNA sense strand
gaauggacuucaagguuaa

SEQ ID NO: 374941 - RNA, 19 nt, Homo sapiens
  misc_RNA (1)...(19): siRNA sense strand
gaaugacccagauauguua

SEQ ID NO: 374942 - RNA, 19 nt, Homo sapiens
  misc_RNA (1)...(19): siRNA sense strand
gacugaagcuagggauuua

SEQ ID NO: 374943 - RNA, 19 nt, Homo sapiens
  misc_RNA (1)...(19): siRNA sense strand
ccagauauguuagugauug

SEQ ID NO: 374944 - RNA, 19 nt, Homo sapiens
  misc_RNA (1)...(19): siRNA sense strand
ggaaugacccagauauguu

SEQ ID NO: 374945 - RNA, 19 nt, Homo sapiens
  misc_RNA (1)...(19): siRNA sense strand
ccagcuagcuaauuauguu

SEQ ID NO: 374946 - RNA, 19 nt, Homo sapiens
  misc_RNA (1)...(19): siRNA sense strand
ggaccucgcucuuauacca

SEQ ID NO: 374947 - RNA, 19 nt, Homo sapiens
  misc_RNA (1)...(19): siRNA sense strand
caucagcccucaagccaaa

SEQ ID NO: 374948 - RNA, 19 nt, Homo sapiens
  misc_RNA (1)...(19): siRNA sense strand
gaguagaucugcuaaaauu

SEQ ID NO: 374949 - RNA, 19 nt, Homo sapiens
  misc_RNA (1)...(19): siRNA sense strand
ggacugaagcuagggauuu

SEQ ID NO: 374950 - RNA, 19 nt, Homo sapiens
  misc_RNA (1)...(19): siRNA sense strand
ccucagcgcuuuccucaug

SEQ ID NO: 374951 - RNA, 19 nt, Homo sapiens
  misc_RNA (1)...(19): siRNA sense strand
cuaauuauguucacagcaa

SEQ ID NO: 374952 - RNA, 19 nt, Homo sapiens
  misc_RNA (1)...(19): siRNA sense strand
gcagaagcauuguguacuc

SEQ ID NO: 374953 - RNA, 19 nt, Homo sapiens
  misc_RNA (1)...(19): siRNA sense strand
gaagcuaggguucuaugaa

SEQ ID NO: 374954 - RNA, 19 nt, Homo sapiens
  misc_RNA (1)...(19): siRNA sense strand
gugaguggccucuuuauau

SEQ ID NO: 374955 - RNA, 19 nt, Homo sapiens
  misc_RNA (1)...(19): siRNA sense strand
aaaggaagcuaggguucua

SEQ ID NO: 374956 - RNA, 19 nt, Homo sapiens
  misc_RNA (1)...(19): siRNA sense strand
ggaaucagcaaguaacuca

SEQ ID NO: 374957 - RNA, 19 nt, Homo sapiens
  misc_RNA (1)...(19): siRNA sense strand
ugcaaucacuggcgaaauu

SEQ ID NO: 374958 - RNA, 19 nt, Homo sapiens
  misc_RNA (1)...(19): siRNA sense strand
ugaguggccucuuuauaug

SEQ ID NO: 374959 - RNA, 19 nt, Homo sapiens
  misc_RNA (1)...(19): siRNA sense strand
auacagaaauccgacagua

SEQ ID NO: 374960 - RNA, 19 nt, Homo sapiens
  misc_RNA (1)...(19): siRNA sense strand
ggaaggaugcagguuauga

SEQ ID NO: 374961 - RNA, 19 nt, Homo sapiens
  misc_RNA (1)...(19): siRNA sense strand
guuagugauuggcaacuuu

SEQ ID NO: 374962 - RNA, 19 nt, Homo sapiens
  misc_RNA (1)...(19): siRNA sense strand
gaguaccucugcauugaug

SEQ ID NO: 374963 - RNA, 19 nt, Homo sapiens
  misc_RNA (1)...(19): siRNA sense strand
ggaugcagguuaugaguac

SEQ ID NO: 374964 - RNA, 19 nt, Homo sapiens
  misc_RNA (1)...(19): siRNA sense strand
gcuggaaggaugcagguua

SEQ ID NO: 374965 - RNA, 19 nt, Homo sapiens
  misc_RNA (1)...(19): siRNA sense strand
cuagagcacuggacaaugg

SEQ ID NO: 374966 - RNA, 19 nt, Homo sapiens
  misc_RNA (1)...(19): siRNA sense strand
gcgcuuuccucaugggauu

SEQ ID NO: 374967 - RNA, 19 nt, Homo sapiens
  misc_RNA (1)...(19): siRNA sense strand
augcagauguuggaaauaa

SEQ ID NO: 374968 - RNA, 19 nt, Homo sapiens
  misc_RNA (1)...(19): siRNA sense strand
gaaaauacaaugcagaugu

SEQ ID NO: 374969 - RNA, 19 nt, Homo sapiens
  misc_RNA (1)...(19): siRNA sense strand
gcacugggagcgcuucaug

SEQ ID NO: 374970 - RNA, 19 nt, Homo sapiens
  misc_RNA (1)...(19): siRNA sense strand
aagcuaggguucuaugaau

SEQ ID NO: 374971 - RNA, 19 nt, Homo sapiens
  misc_RNA (1)...(19): siRNA sense strand
cgacaguacugcaaucacu

SEQ ID NO: 374972 - RNA, 19 nt, Homo sapiens
  misc_RNA (1)...(19): siRNA sense strand
gggaguagaucugcuaaaa

SEQ ID NO: 374973 - RNA, 19 nt, Homo sapiens
  misc_RNA (1)...(19): siRNA sense strand
ggagauggcagagcucaug

SEQ ID NO: 374974 - RNA, 19 nt, Homo sapiens
  misc_RNA (1)...(19): siRNA sense strand
gcaaucacuggcgaaauuu

SEQ ID NO: 374975 - RNA, 19 nt, Homo sapiens
  misc_RNA (1)...(19): siRNA sense strand
guuauaagcacauguccuu

SEQ ID NO: 374976 - RNA, 19 nt, Homo sapiens
  misc_RNA (1)...(19): siRNA sense strand
gggauucgccagcuagcua

SEQ ID NO: 374977 - RNA, 19 nt, Homo sapiens
  misc_RNA (1)...(19): siRNA sense strand
cauggcugcuccuuuauuc

SEQ ID NO: 374978 - RNA, 19 nt, Homo sapiens
  misc_RNA (1)...(19): siRNA sense strand
gcugaggaacccagaacua

SEQ ID NO: 374979 - RNA, 19 nt, Homo sapiens
  misc_RNA (1)...(19): siRNA sense strand
gagccagauuccugcauca

SEQ ID NO: 374980 - RNA, 19 nt, Homo sapiens
  misc_RNA (1)...(19): siRNA sense strand
ggcagacccucagcgcuuu

SEQ ID NO: 374981 - RNA, 19 nt, Homo sapiens
  misc_RNA (1)...(19): siRNA sense strand
gcuagggauuuaugcagau

SEQ ID NO: 374982 - RNA, 19 nt, Homo sapiens
  misc_RNA (1)...(19): siRNA sense strand
gagaauuguugauguugcu

SEQ ID NO: 374983 - RNA, 19 nt, Homo sapiens
  misc_RNA (1)...(19): siRNA sense strand
uugcugacauugaugauuc

SEQ ID NO: 374984 - RNA, 19 nt, Homo sapiens
  misc_RNA (1)...(19): siRNA sense strand
ggaagcuaggguucuauga

SEQ ID NO: 374985 - RNA, 19 nt, Homo sapiens
  misc_RNA (1)...(19): siRNA sense strand
uucgccagcuagcuaauua

SEQ ID NO: 374986 - RNA, 19 nt, Homo sapiens
  misc_RNA (1)...(19): siRNA sense strand
gcaaggguaccagcuuaga

SEQ ID NO: 374987 - RNA, 19 nt, Homo sapiens
  misc_RNA (1)...(19): siRNA sense strand
cuaaugaccuccgacacau

SEQ ID NO: 374988 - RNA, 19 nt, Homo sapiens
  misc_RNA (1)...(19): siRNA sense strand
cagcaaaggacugaagcua

SEQ ID NO: 374989 - RNA, 19 nt, Homo sapiens
  misc_RNA (1)...(19): siRNA sense strand
gaaggaugcagguuaugag

SEQ ID NO: 374990 - RNA, 19 nt, Homo sapiens
  misc_RNA (1)...(19): siRNA sense strand
gauaaaccggcaggagauu

SEQ ID NO: 374991 - RNA, 19 nt, Homo sapiens
  misc_RNA (1)...(19): siRNA sense strand
gcuccuuuauucaugucua

SEQ ID NO: 374992 - RNA, 19 nt, Homo sapiens
  misc_RNA (1)...(19): siRNA sense strand
gagagaauuguugauguug

SEQ ID NO: 374993 - RNA, 19 nt, Homo sapiens
  misc_RNA (1)...(19): siRNA sense strand
gaaauuuugcugacauuga

SEQ ID NO: 374994 - RNA, 19 nt, Homo sapiens
  misc_RNA (1)...(19): siRNA sense strand
gcccaauuauacagaaauc

SEQ ID NO: 374995 - RNA, 19 nt, Homo sapiens
  misc_RNA (1)...(19): siRNA sense strand
uuaugcagauguuggaaau

SEQ ID NO: 374996 - RNA, 19 nt, Homo sapiens
  misc_RNA (1)...(19): siRNA sense strand
gcccagaccuuugcugacu

SEQ ID NO: 374997 - RNA, 19 nt, Homo sapiens
  misc_RNA (1)...(19): siRNA sense strand
aauccugccugcuucauca

SEQ ID NO: 374998 - RNA, 19 nt, Homo sapiens
  misc_RNA (1)...(19): siRNA sense strand
gaggaacccagaacuacau

SEQ ID NO: 374999 - RNA, 19 nt, Homo sapiens
  misc_RNA (1)...(19): siRNA sense strand
aaagcccaauuauacagaa

SEQ ID NO: 375000 - RNA, 19 nt, Homo sapiens
  misc_RNA (1)...(19): siRNA sense strand
cuggaaggaugcagguuau

SEQ ID NO: 375001 - RNA, 19 nt, Homo sapiens
  misc_RNA (1)...(19): siRNA sense strand
uaaaggaguggccuguaau

SEQ ID NO: 375002 - RNA, 19 nt, Homo sapiens
  misc_RNA (1)...(19): siRNA sense strand
augaguaccucugcauuga

SEQ ID NO: 375003 - RNA, 19 nt, Homo sapiens
  misc_RNA (1)...(19): siRNA sense strand
gguuaagaagucacauaaa

SEQ ID NO: 375004 - RNA, 19 nt, Homo sapiens
  misc_RNA (1)...(19): siRNA sense strand
ggacaucccuggggcuaga

SEQ ID NO: 375005 - RNA, 19 nt, Homo sapiens
  misc_RNA (1)...(19): siRNA sense strand
gggcuguagcuaugauaaa

SEQ ID NO: 375006 - RNA, 19 nt, Homo sapiens
  misc_RNA (1)...(19): siRNA sense strand
cgacacaucagcccucaag

SEQ ID NO: 375007 - RNA, 19 nt, Homo sapiens
  misc_RNA (1)...(19): siRNA sense strand
gcuaaaauuugaugguugu

SEQ ID NO: 375008 - RNA, 19 nt, Homo sapiens
  misc_RNA (1)...(19): siRNA sense strand
gaagcuagggauuuaugca

SEQ ID NO: 375009 - RNA, 19 nt, Homo sapiens
  misc_RNA (1)...(19): siRNA sense strand
ggauucgccagcuagcuaa

SEQ ID NO: 375010 - RNA, 19 nt, Homo sapiens
  misc_RNA (1)...(19): siRNA sense strand
aaauuuggcagaugguuau

SEQ ID NO: 375011 - RNA, 19 nt, Homo sapiens
  misc_RNA (1)...(19): siRNA sense strand
uaagaagucacauaaaucc

SEQ ID NO: 375012 - RNA, 19 nt, Homo sapiens
  misc_RNA (1)...(19): siRNA sense strand
gguaaaggaguggccugua

SEQ ID NO: 375013 - RNA, 19 nt, Homo sapiens
  misc_RNA (1)...(19): siRNA sense strand
gguggaccucgcucuuaua

SEQ ID NO: 375014 - RNA, 19 nt, Homo sapiens
  misc_RNA (1)...(19): siRNA sense strand
gacagggagacaacuuuga

SEQ ID NO: 375015 - RNA, 19 nt, Homo sapiens
  misc_RNA (1)...(19): siRNA sense strand
caaccuugacugccaggaa

SEQ ID NO: 375016 - RNA, 19 nt, Homo sapiens
  misc_RNA (1)...(19): siRNA sense strand
uauauguggcccuuucaaa

SEQ ID NO: 375017 - RNA, 19 nt, Homo sapiens
  misc_RNA (1)...(19): siRNA sense strand
uaugaguaccucugcauug

SEQ ID NO: 375018 - RNA, 19 nt, Homo sapiens
  misc_RNA (1)...(19): siRNA sense strand
ugugaguggccucuuuaua

SEQ ID NO: 375019 - RNA, 19 nt, Homo sapiens
  misc_RNA (1)...(19): siRNA sense strand
gagcacuggacaauggauu

SEQ ID NO: 375020 - RNA, 19 nt, Homo sapiens
  misc_RNA (1)...(19): siRNA sense strand
acagggagacaacuuugaa

SEQ ID NO: 375021 - RNA, 19 nt, Homo sapiens
  misc_RNA (1)...(19): siRNA sense strand
aggagagaauuguugaugu

SEQ ID NO: 375022 - RNA, 19 nt, Homo sapiens
  misc_RNA (1)...(19): siRNA sense strand
gcagauguuggaaauaaaa

SEQ ID NO: 375023 - RNA, 19 nt, Homo sapiens
  misc_RNA (1)...(19): siRNA sense strand
ugguggaccucgcucuuau

SEQ ID NO: 375024 - RNA, 19 nt, Homo sapiens
  misc_RNA (1)...(19): siRNA sense strand
cgaccucucucaggcuuag

SEQ ID NO: 375025 - RNA, 19 nt, Homo sapiens
  misc_RNA (1)...(19): siRNA sense strand
ugacccagauauguuagug

SEQ ID NO: 375026 - RNA, 19 nt, Homo sapiens
  misc_RNA (1)...(19): siRNA sense strand
ccugugaguggccucuuua

SEQ ID NO: 375027 - RNA, 19 nt, Homo sapiens
  misc_RNA (1)...(19): siRNA sense strand
guucacagcaaaggacuga

SEQ ID NO: 375028 - RNA, 19 nt, Homo sapiens
  misc_RNA (1)...(19): siRNA sense strand
uagacagggagacaacuuu

SEQ ID NO: 375029 - RNA, 19 nt, Homo sapiens
  misc_RNA (1)...(19): siRNA sense strand
agccaaagcucuccuucag

SEQ ID NO: 375030 - RNA, 19 nt, Homo sapiens
  misc_RNA (1)...(19): siRNA sense strand
gcugcuccuuuauucaugu

SEQ ID NO: 375031 - RNA, 19 nt, Homo sapiens
  misc_RNA (1)...(19): siRNA sense strand
caggagagaauuguugaug

SEQ ID NO: 375032 - RNA, 19 nt, Homo sapiens
  misc_RNA (1)...(19): siRNA sense strand
ccucugcauugaugacugu

SEQ ID NO: 375033 - RNA, 19 nt, Homo sapiens
  misc_RNA (1)...(19): siRNA sense strand
gaugguuguuacugugaca

SEQ ID NO: 375034 - RNA, 19 nt, Homo sapiens
  misc_RNA (1)...(19): siRNA sense strand
guagaucugcuaaaauuug

SEQ ID NO: 375035 - RNA, 19 nt, Homo sapiens
  misc_RNA (1)...(19): siRNA sense strand
ugcagauguuggaaauaaa

SEQ ID NO: 375036 - RNA, 19 nt, Homo sapiens
  misc_RNA (1)...(19): siRNA sense strand
uaaccaggagagaauuguu

SEQ ID NO: 375037 - RNA, 19 nt, Homo sapiens
  misc_RNA (1)...(19): siRNA sense strand
ggacaacacuuccucaaga

SEQ ID NO: 375038 - RNA, 19 nt, Homo sapiens
  misc_RNA (1)...(19): siRNA sense strand
gugcauauaucaacgauuu

SEQ ID NO: 375039 - RNA, 19 nt, Homo sapiens
  misc_RNA (1)...(19): siRNA sense strand
gaugaagccucuccucuau

SEQ ID NO: 375040 - RNA, 19 nt, Homo sapiens
  misc_RNA (1)...(19): siRNA sense strand
gaaacaaugugaucacucu

SEQ ID NO: 375041 - RNA, 19 nt, Homo sapiens
  misc_RNA (1)...(19): siRNA sense strand
guuauuggcucaucuguga

SEQ ID NO: 375042 - RNA, 19 nt, Homo sapiens
  misc_RNA (1)...(19): siRNA sense strand
caaccucacuccacaauca

SEQ ID NO: 375043 - RNA, 19 nt, Homo sapiens
  misc_RNA (1)...(19): siRNA sense strand
gaauggagggccaguuaua

SEQ ID NO: 375044 - RNA, 19 nt, Homo sapiens
  misc_RNA (1)...(19): siRNA sense strand
gaaacaucauccagaaguu

SEQ ID NO: 375045 - RNA, 19 nt, Homo sapiens
  misc_RNA (1)...(19): siRNA sense strand
gaauauggcagcuacuuug

SEQ ID NO: 375046 - RNA, 19 nt, Homo sapiens
  misc_RNA (1)...(19): siRNA sense strand
gagcugggacugcugguua

SEQ ID NO: 375047 - RNA, 19 nt, Homo sapiens
  misc_RNA (1)...(19): siRNA sense strand
gaagauggcugggcugaac

SEQ ID NO: 375048 - RNA, 19 nt, Homo sapiens
  misc_RNA (1)...(19): siRNA sense strand
cagaggauguuugaaauug

SEQ ID NO: 375049 - RNA, 19 nt, Homo sapiens
  misc_RNA (1)...(19): siRNA sense strand
gggcgagugugaacuugua

SEQ ID NO: 375050 - RNA, 19 nt, Homo sapiens
  misc_RNA (1)...(19): siRNA sense strand
cuuuaucccuugacauuua

SEQ ID NO: 375051 - RNA, 19 nt, Homo sapiens
  misc_RNA (1)...(19): siRNA sense strand
gcagcuacuuugccuguga

SEQ ID NO: 375052 - RNA, 19 nt, Homo sapiens
  misc_RNA (1)...(19): siRNA sense strand
cagaauggagggccaguua

SEQ ID NO: 375053 - RNA, 19 nt, Homo sapiens
  misc_RNA (1)...(19): siRNA sense strand
gaugaugugguucuguuua

SEQ ID NO: 375054 - RNA, 19 nt, Homo sapiens
  misc_RNA (1)...(19): siRNA sense strand
ggaccaugauguggaauau

SEQ ID NO: 375055 - RNA, 19 nt, Homo sapiens
  misc_RNA (1)...(19): siRNA sense strand
gggaugaugugguucuguu

SEQ ID NO: 375056 - RNA, 19 nt, Homo sapiens
  misc_RNA (1)...(19): siRNA sense strand
ugaagccucuccucuauca

SEQ ID NO: 375057 - RNA, 19 nt, Homo sapiens
  misc_RNA (1)...(19): siRNA sense strand
accaugauguggaauauuu

SEQ ID NO: 375058 - RNA, 19 nt, Homo sapiens
  misc_RNA (1)...(19): siRNA sense strand
caacacuuccucaagauug

SEQ ID NO: 375059 - RNA, 19 nt, Homo sapiens
  misc_RNA (1)...(19): siRNA sense strand
gcucaucugugaccuacga

SEQ ID NO: 375060 - RNA, 19 nt, Homo sapiens
  misc_RNA (1)...(19): siRNA sense strand
cagcagugaugauccagaa

SEQ ID NO: 375061 - RNA, 19 nt, Homo sapiens
  misc_RNA (1)...(19): siRNA sense strand
uuaaggguuugguuucuaa

SEQ ID NO: 375062 - RNA, 19 nt, Homo sapiens
  misc_RNA (1)...(19): siRNA sense strand
agacguaugugcccuggaa

SEQ ID NO: 375063 - RNA, 19 nt, Homo sapiens
  misc_RNA (1)...(19): siRNA sense strand
ugugaucacucugaacaua

SEQ ID NO: 375064 - RNA, 19 nt, Homo sapiens
  misc_RNA (1)...(19): siRNA sense strand
ggaaggaccggcugcugaa

SEQ ID NO: 375065 - RNA, 19 nt, Homo sapiens
  misc_RNA (1)...(19): siRNA sense strand
ccagaacuaugugcuguga

SEQ ID NO: 375066 - RNA, 19 nt, Homo sapiens
  misc_RNA (1)...(19): siRNA sense strand
gaacauaacagggaaagcu

SEQ ID NO: 375067 - RNA, 19 nt, Homo sapiens
  misc_RNA (1)...(19): siRNA sense strand
cagcacagcccaccagcua

SEQ ID NO: 375068 - RNA, 19 nt, Homo sapiens
  misc_RNA (1)...(19): siRNA sense strand
ggaacaggcagcaacauca

SEQ ID NO: 375069 - RNA, 19 nt, Homo sapiens
  misc_RNA (1)...(19): siRNA sense strand
gacaacacuuccucaagau

SEQ ID NO: 375070 - RNA, 19 nt, Homo sapiens
  misc_RNA (1)...(19): siRNA sense strand
gacccuugaucaauucuga

SEQ ID NO: 375071 - RNA, 19 nt, Homo sapiens
  misc_RNA (1)...(19): siRNA sense strand
gaacaugggacgugugaac

SEQ ID NO: 375072 - RNA, 19 nt, Homo sapiens
  misc_RNA (1)...(19): siRNA sense strand
ugaacgccauccagacgua

SEQ ID NO: 375073 - RNA, 19 nt, Homo sapiens
  misc_RNA (1)...(19): siRNA sense strand
gagaacaugggacguguga

SEQ ID NO: 375074 - RNA, 19 nt, Homo sapiens
  misc_RNA (1)...(19): siRNA sense strand
cugcuuggcugcuagagaa

SEQ ID NO: 375075 - RNA, 19 nt, Homo sapiens
  misc_RNA (1)...(19): siRNA sense strand
ugacauuuauccaggugaa

SEQ ID NO: 375076 - RNA, 19 nt, Homo sapiens
  misc_RNA (1)...(19): siRNA sense strand
gguccuaucccuccaucua

SEQ ID NO: 375077 - RNA, 19 nt, Homo sapiens
  misc_RNA (1)...(19): siRNA sense strand
gaggaagugugagcccaaa

SEQ ID NO: 375078 - RNA, 19 nt, Homo sapiens
  misc_RNA (1)...(19): siRNA sense strand
gugaacuuguacauguuua

SEQ ID NO: 375079 - RNA, 19 nt, Homo sapiens
  misc_RNA (1)...(19): siRNA sense strand
ggucuggauuaauggcuuu

SEQ ID NO: 375080 - RNA, 19 nt, Homo sapiens
  misc_RNA (1)...(19): siRNA sense strand
ccacugauggagcacauaa

SEQ ID NO: 375081 - RNA, 19 nt, Homo sapiens
  misc_RNA (1)...(19): siRNA sense strand
ugaggaccaugauguggaa

SEQ ID NO: 375082 - RNA, 19 nt, Homo sapiens
  misc_RNA (1)...(19): siRNA sense strand
uauacuggcuggcuagauc

SEQ ID NO: 375083 - RNA, 19 nt, Homo sapiens
  misc_RNA (1)...(19): siRNA sense strand
agugugaacuuguacaugu

SEQ ID NO: 375084 - RNA, 19 nt, Homo sapiens
  misc_RNA (1)...(19): siRNA sense strand
cgaaacaucauccagaagu

SEQ ID NO: 375085 - RNA, 19 nt, Homo sapiens
  misc_RNA (1)...(19): siRNA sense strand
acaaugugaucacucugaa

SEQ ID NO: 375086 - RNA, 19 nt, Homo sapiens
  misc_RNA (1)...(19): siRNA sense strand
cuacaucucaggaagcauu

SEQ ID NO: 375087 - RNA, 19 nt, Homo sapiens
  misc_RNA (1)...(19): siRNA sense strand
agaggauguuugaaauuga

SEQ ID NO: 375088 - RNA, 19 nt, Homo sapiens
  misc_RNA (1)...(19): siRNA sense strand
gcccucaguugaccuuguu

SEQ ID NO: 375089 - RNA, 19 nt, Homo sapiens
  misc_RNA (1)...(19): siRNA sense strand
gaagugugagcccaaagga

SEQ ID NO: 375090 - RNA, 19 nt, Homo sapiens
  misc_RNA (1)...(19): siRNA sense strand
ccagaggauguuugaaauu

SEQ ID NO: 375091 - RNA, 19 nt, Homo sapiens
  misc_RNA (1)...(19): siRNA sense strand
cagugaugauccagaacua

SEQ ID NO: 375092 - RNA, 19 nt, Homo sapiens
  misc_RNA (1)...(19): siRNA sense strand
gagccacucuggaccuucu

SEQ ID NO: 375093 - RNA, 19 nt, Homo sapiens
  misc_RNA (1)...(19): siRNA sense strand
caugggacgugugaacuau

SEQ ID NO: 375094 - RNA, 19 nt, Homo sapiens
  misc_RNA (1)...(19): siRNA sense strand
gccaggacaguaccaguuu

SEQ ID NO: 375095 - RNA, 19 nt, Homo sapiens
  misc_RNA (1)...(19): siRNA sense strand
gacaguggccaccaugaug

SEQ ID NO: 375096 - RNA, 19 nt, Homo sapiens
  misc_RNA (1)...(19): siRNA sense strand
gccuuuaucccuugacauu

SEQ ID NO: 375097 - RNA, 19 nt, Homo sapiens
  misc_RNA (1)...(19): siRNA sense strand
ugaauauggcagcuacuuu

SEQ ID NO: 375098 - RNA, 19 nt, Homo sapiens
  misc_RNA (1)...(19): siRNA sense strand
cccagaggauguuugaaau

SEQ ID NO: 375099 - RNA, 19 nt, Homo sapiens
  misc_RNA (1)...(19): siRNA sense strand
gcaaugccacccagaggau

SEQ ID NO: 375100 - RNA, 19 nt, Homo sapiens
  misc_RNA (1)...(19): siRNA sense strand
uaugugcccuggaacuuuc

SEQ ID NO: 375101 - RNA, 19 nt, Homo sapiens
  misc_RNA (1)...(19): siRNA sense strand
ugcgaaacaucauccagaa

SEQ ID NO: 375102 - RNA, 19 nt, Homo sapiens
  misc_RNA (1)...(19): siRNA sense strand
uuauaacagugcagguuga

SEQ ID NO: 375103 - RNA, 19 nt, Homo sapiens
  misc_RNA (1)...(19): siRNA sense strand
ggaaaugggaggauuaccu

SEQ ID NO: 375104 - RNA, 19 nt, Homo sapiens
  misc_RNA (1)...(19): siRNA sense strand
cuacgaucaucccuccaaa

SEQ ID NO: 375105 - RNA, 19 nt, Homo sapiens
  misc_RNA (1)...(19): siRNA sense strand
gaccggcugcugaagauga

SEQ ID NO: 375106 - RNA, 19 nt, Homo sapiens
  misc_RNA (1)...(19): siRNA sense strand
gaggauguuugaaauugac

SEQ ID NO: 375107 - RNA, 19 nt, Homo sapiens
  misc_RNA (1)...(19): siRNA sense strand
gugaucacucugaacauaa

SEQ ID NO: 375108 - RNA, 19 nt, Homo sapiens
  misc_RNA (1)...(19): siRNA sense strand
cuuccucccucuaugauau

SEQ ID NO: 375109 - RNA, 19 nt, Homo sapiens
  misc_RNA (1)...(19): siRNA sense strand
ucacagaugcuuuccuaag

SEQ ID NO: 375110 - RNA, 19 nt, Homo sapiens
  misc_RNA (1)...(19): siRNA sense strand
gcuccuccgacccagauua

SEQ ID NO: 375111 - RNA, 19 nt, Homo sapiens
  misc_RNA (1)...(19): siRNA sense strand
guaugugcccuggaacuuu

SEQ ID NO: 375112 - RNA, 19 nt, Homo sapiens
  misc_RNA (1)...(19): siRNA sense strand
gagggccaguuauaacagu

SEQ ID NO: 375113 - RNA, 19 nt, Homo sapiens
  misc_RNA (1)...(19): siRNA sense strand
agaugaagccucuccucua

SEQ ID NO: 375114 - RNA, 19 nt, Homo sapiens
  misc_RNA (1)...(19): siRNA sense strand
uggcagcuguggacaagug

SEQ ID NO: 375115 - RNA, 19 nt, Homo sapiens
  misc_RNA (1)...(19): siRNA sense strand
gugggaaaugggaggauua

SEQ ID NO: 375116 - RNA, 19 nt, Homo sapiens
  misc_RNA (1)...(19): siRNA sense strand
caggaagcauucacuacuc

SEQ ID NO: 375117 - RNA, 19 nt, Homo sapiens
  misc_RNA (1)...(19): siRNA sense strand
gagcgaaacaaugugauca

SEQ ID NO: 375118 - RNA, 19 nt, Homo sapiens
  misc_RNA (1)...(19): siRNA sense strand
ccacccagaggauguuuga

SEQ ID NO: 375119 - RNA, 19 nt, Homo sapiens
  misc_RNA (1)...(19): siRNA sense strand
gcgaaacaaugugaucacu

SEQ ID NO: 375120 - RNA, 19 nt, Homo sapiens
  misc_RNA (1)...(19): siRNA sense strand
ggaugaugugguucuguuu

SEQ ID NO: 375121 - RNA, 19 nt, Homo sapiens
  misc_RNA (1)...(19): siRNA sense strand
gugaugauccagaacuaug

SEQ ID NO: 375122 - RNA, 19 nt, Homo sapiens
  misc_RNA (1)...(19): siRNA sense strand
ggccagccauuucgcuaca

SEQ ID NO: 375123 - RNA, 19 nt, Homo sapiens
  misc_RNA (1)...(19): siRNA sense strand
guuuauaggugggaccaau

SEQ ID NO: 375124 - RNA, 19 nt, Homo sapiens
  misc_RNA (1)...(19): siRNA sense strand
gugugaacuuguacauguu

SEQ ID NO: 375125 - RNA, 19 nt, Homo sapiens
  misc_RNA (1)...(19): siRNA sense strand
ccucuccucuaucagaaug

SEQ ID NO: 375126 - RNA, 19 nt, Homo sapiens
  misc_RNA (1)...(19): siRNA sense strand
uaagccagaggaaguguga

SEQ ID NO: 375127 - RNA, 19 nt, Homo sapiens
  misc_RNA (1)...(19): siRNA sense strand
gaagcgcuuucgccaccau

SEQ ID NO: 375128 - RNA, 19 nt, Homo sapiens
  misc_RNA (1)...(19): siRNA sense strand
ggccaggacaguaccaguu

SEQ ID NO: 375129 - RNA, 19 nt, Homo sapiens
  misc_RNA (1)...(19): siRNA sense strand
guggacaggccaguuauug

SEQ ID NO: 375130 - RNA, 19 nt, Homo sapiens
  misc_RNA (1)...(19): siRNA sense strand
caacccagcaccucucucu

SEQ ID NO: 375131 - RNA, 19 nt, Homo sapiens
  misc_RNA (1)...(19): siRNA sense strand
uaacagugcagguugaaaa

SEQ ID NO: 375132 - RNA, 19 nt, Homo sapiens
  misc_RNA (1)...(19): siRNA sense strand
ggaagugugagcccaaagg

SEQ ID NO: 375133 - RNA, 19 nt, Homo sapiens
  misc_RNA (1)...(19): siRNA sense strand
aguccacgaucgagcauau

SEQ ID NO: 375134 - RNA, 19 nt, Homo sapiens
  misc_RNA (1)...(19): siRNA sense strand
ucaacgauuuuaaggguuu

SEQ ID NO: 375135 - RNA, 19 nt, Homo sapiens
  misc_RNA (1)...(19): siRNA sense strand
gcagugaugauccagaacu

SEQ ID NO: 375136 - RNA, 19 nt, Homo sapiens
  misc_RNA (1)...(19): siRNA sense strand
uuuaaggguuugguuucua

SEQ ID NO: 375137 - RNA, 19 nt, Homo sapiens
  misc_RNA (1)...(19): siRNA sense strand
gaaauggacuucaguggaa

SEQ ID NO: 375138 - RNA, 19 nt, Homo sapiens
  misc_RNA (1)...(19): siRNA sense strand
ccaagagacuccaggauua

SEQ ID NO: 375139 - RNA, 19 nt, Homo sapiens
  misc_RNA (1)...(19): siRNA sense strand
ggagagagcucaucagagu

SEQ ID NO: 375140 - RNA, 19 nt, Homo sapiens
  misc_RNA (1)...(19): siRNA sense strand
gaacaucagugacgugugu

SEQ ID NO: 375141 - RNA, 19 nt, Homo sapiens
  misc_RNA (1)...(19): siRNA sense strand
gaaguuacccugugaaaug

SEQ ID NO: 375142 - RNA, 19 nt, Homo sapiens
  misc_RNA (1)...(19): siRNA sense strand
gaaacacacuacagaauuc

SEQ ID NO: 375143 - RNA, 19 nt, Homo sapiens
  misc_RNA (1)...(19): siRNA sense strand
gaaagaauuugcaaacauc

SEQ ID NO: 375144 - RNA, 19 nt, Homo sapiens
  misc_RNA (1)...(19): siRNA sense strand
ggaucaagcucaaggauau

SEQ ID NO: 375145 - RNA, 19 nt, Homo sapiens
  misc_RNA (1)...(19): siRNA sense strand
ggaaagaauuugcaaacau

SEQ ID NO: 375146 - RNA, 19 nt, Homo sapiens
  misc_RNA (1)...(19): siRNA sense strand
ggaagacccuguuugugaa

SEQ ID NO: 375147 - RNA, 19 nt, Homo sapiens
  misc_RNA (1)...(19): siRNA sense strand
ggagaggagugcagaggua

SEQ ID NO: 375148 - RNA, 19 nt, Homo sapiens
  misc_RNA (1)...(19): siRNA sense strand
cgagaaagcuuggugagaa

SEQ ID NO: 375149 - RNA, 19 nt, Homo sapiens
  misc_RNA (1)...(19): siRNA sense strand
ggaaauugcugacauugag

SEQ ID NO: 375150 - RNA, 19 nt, Homo sapiens
  misc_RNA (1)...(19): siRNA sense strand
gcaggaaauugcugacauu

SEQ ID NO: 375151 - RNA, 19 nt, Homo sapiens
  misc_RNA (1)...(19): siRNA sense strand
gaggccaccuggagaauuu

SEQ ID NO: 375152 - RNA, 19 nt, Homo sapiens
  misc_RNA (1)...(19): siRNA sense strand
gauauuaaaugccaacuac

SEQ ID NO: 375153 - RNA, 19 nt, Homo sapiens
  misc_RNA (1)...(19): siRNA sense strand
ccagagagguggcagcauu

SEQ ID NO: 375154 - RNA, 19 nt, Homo sapiens
  misc_RNA (1)...(19): siRNA sense strand
cacggaaacugcgauauua

SEQ ID NO: 375155 - RNA, 19 nt, Homo sapiens
  misc_RNA (1)...(19): siRNA sense strand
aggcagagcuggacagauu

SEQ ID NO: 375156 - RNA, 19 nt, Homo sapiens
  misc_RNA (1)...(19): siRNA sense strand
gagcauugaugaauugauc

SEQ ID NO: 375157 - RNA, 19 nt, Homo sapiens
  misc_RNA (1)...(19): siRNA sense strand
cacaagaccuucugcauuc

SEQ ID NO: 375158 - RNA, 19 nt, Homo sapiens
  misc_RNA (1)...(19): siRNA sense strand
gcaccuaaaucuucacaag

SEQ ID NO: 375159 - RNA, 19 nt, Homo sapiens
  misc_RNA (1)...(19): siRNA sense strand
caggauggaucacccagua

SEQ ID NO: 375160 - RNA, 19 nt, Homo sapiens
  misc_RNA (1)...(19): siRNA sense strand
ucaaggccaugguggauaa

SEQ ID NO: 375161 - RNA, 19 nt, Homo sapiens
  misc_RNA (1)...(19): siRNA sense strand
gaggauggcacacuuggua

SEQ ID NO: 375162 - RNA, 19 nt, Homo sapiens
  misc_RNA (1)...(19): siRNA sense strand
gaugaaacagucaaugaaa

SEQ ID NO: 375163 - RNA, 19 nt, Homo sapiens
  misc_RNA (1)...(19): siRNA sense strand
cagcuaucaugauuacaua

SEQ ID NO: 375164 - RNA, 19 nt, Homo sapiens
  misc_RNA (1)...(19): siRNA sense strand
gaucuuugguugugaguca

SEQ ID NO: 375165 - RNA, 19 nt, Homo sapiens
  misc_RNA (1)...(19): siRNA sense strand
gagaaagcuuggugagaau

SEQ ID NO: 375166 - RNA, 19 nt, Homo sapiens
  misc_RNA (1)...(19): siRNA sense strand
gagagaugcugcagaccuu

SEQ ID NO: 375167 - RNA, 19 nt, Homo sapiens
  misc_RNA (1)...(19): siRNA sense strand
caugaccuguucuuugaua

SEQ ID NO: 375168 - RNA, 19 nt, Homo sapiens
  misc_RNA (1)...(19): siRNA sense strand
ggcaucaacuccagcauga

SEQ ID NO: 375169 - RNA, 19 nt, Homo sapiens
  misc_RNA (1)...(19): siRNA sense strand
cauaaugccacuuugauuu

SEQ ID NO: 375170 - RNA, 19 nt, Homo sapiens
  misc_RNA (1)...(19): siRNA sense strand
gaaaagacccuugaaaaug

SEQ ID NO: 375171 - RNA, 19 nt, Homo sapiens
  misc_RNA (1)...(19): siRNA sense strand
gaucagcaccugguuugua

SEQ ID NO: 375172 - RNA, 19 nt, Homo sapiens
  misc_RNA (1)...(19): siRNA sense strand
uuaugugggucaugaauuu

SEQ ID NO: 375173 - RNA, 19 nt, Homo sapiens
  misc_RNA (1)...(19): siRNA sense strand
gagguuaugugggucauga

SEQ ID NO: 375174 - RNA, 19 nt, Homo sapiens
  misc_RNA (1)...(19): siRNA sense strand
ggauggaucacccaguaua

SEQ ID NO: 375175 - RNA, 19 nt, Homo sapiens
  misc_RNA (1)...(19): siRNA sense strand
gaaacugcgauauuaaaug

SEQ ID NO: 375176 - RNA, 19 nt, Homo sapiens
  misc_RNA (1)...(19): siRNA sense strand
uaaagacauuucccuuguu

SEQ ID NO: 375177 - RNA, 19 nt, Homo sapiens
  misc_RNA (1)...(19): siRNA sense strand
guacauaaugccacuuuga

SEQ ID NO: 375178 - RNA, 19 nt, Homo sapiens
  misc_RNA (1)...(19): siRNA sense strand
gcccacccauggaaguuua

SEQ ID NO: 375179 - RNA, 19 nt, Homo sapiens
  misc_RNA (1)...(19): siRNA sense strand
cuguggagguggauaaaua

SEQ ID NO: 375180 - RNA, 19 nt, Homo sapiens
  misc_RNA (1)...(19): siRNA sense strand
cuacauggccaagcgauua

SEQ ID NO: 375181 - RNA, 19 nt, Homo sapiens
  misc_RNA (1)...(19): siRNA sense strand
guggauaaauaugggaaua

SEQ ID NO: 375182 - RNA, 19 nt, Homo sapiens
  misc_RNA (1)...(19): siRNA sense strand
cgucugaacucgcaccuau

SEQ ID NO: 375183 - RNA, 19 nt, Homo sapiens
  misc_RNA (1)...(19): siRNA sense strand
gaaaccagagaacaaauuc

SEQ ID NO: 375184 - RNA, 19 nt, Homo sapiens
  misc_RNA (1)...(19): siRNA sense strand
ucacaagaccuucugcauu

SEQ ID NO: 375185 - RNA, 19 nt, Homo sapiens
  misc_RNA (1)...(19): siRNA sense strand
ccacggaaacugcgauauu

SEQ ID NO: 375186 - RNA, 19 nt, Homo sapiens
  misc_RNA (1)...(19): siRNA sense strand
gcuaggaggguacauaaug

SEQ ID NO: 375187 - RNA, 19 nt, Homo sapiens
  misc_RNA (1)...(19): siRNA sense strand
ggaaacugcgauauuaaau

SEQ ID NO: 375188 - RNA, 19 nt, Homo sapiens
  misc_RNA (1)...(19): siRNA sense strand
uuugauaccuugaagauuc

SEQ ID NO: 375189 - RNA, 19 nt, Homo sapiens
  misc_RNA (1)...(19): siRNA sense strand
gagaucagcaccugguuug

SEQ ID NO: 375190 - RNA, 19 nt, Homo sapiens
  misc_RNA (1)...(19): siRNA sense strand
ccggauugaugacauauau

SEQ ID NO: 375191 - RNA, 19 nt, Homo sapiens
  misc_RNA (1)...(19): siRNA sense strand
ucugaugucucgcaccuaa

SEQ ID NO: 375192 - RNA, 19 nt, Homo sapiens
  misc_RNA (1)...(19): siRNA sense strand
gaauaucgaugcaguucac

SEQ ID NO: 375193 - RNA, 19 nt, Homo sapiens
  misc_RNA (1)...(19): siRNA sense strand
cagaacgguuugccucauu

SEQ ID NO: 375194 - RNA, 19 nt, Homo sapiens
  misc_RNA (1)...(19): siRNA sense strand
uggaagacccuguuuguga

SEQ ID NO: 375195 - RNA, 19 nt, Homo sapiens
  misc_RNA (1)...(19): siRNA sense strand
ugacauauauggagaucag

SEQ ID NO: 375196 - RNA, 19 nt, Homo sapiens
  misc_RNA (1)...(19): siRNA sense strand
aaacugcgauauuaaaugc

SEQ ID NO: 375197 - RNA, 19 nt, Homo sapiens
  misc_RNA (1)...(19): siRNA sense strand
uccgagagcuugagaagga

SEQ ID NO: 375198 - RNA, 19 nt, Homo sapiens
  misc_RNA (1)...(19): siRNA sense strand
auaaagacauuucccuugu

SEQ ID NO: 375199 - RNA, 19 nt, Homo sapiens
  misc_RNA (1)...(19): siRNA sense strand
cuacugaccuuuuagcuuu

SEQ ID NO: 375200 - RNA, 19 nt, Homo sapiens
  misc_RNA (1)...(19): siRNA sense strand
aaagacauuucccuuguuc

SEQ ID NO: 375201 - RNA, 19 nt, Homo sapiens
  misc_RNA (1)...(19): siRNA sense strand
gccaagagacuccaggauu

SEQ ID NO: 375202 - RNA, 19 nt, Homo sapiens
  misc_RNA (1)...(19): siRNA sense strand
gaaagcuuggugagaauga

SEQ ID NO: 375203 - RNA, 19 nt, Homo sapiens
  misc_RNA (1)...(19): siRNA sense strand
agaaacacacuacagaauu

SEQ ID NO: 375204 - RNA, 19 nt, Homo sapiens
  misc_RNA (1)...(19): siRNA sense strand
ccaaucaucccgucauuuc

SEQ ID NO: 375205 - RNA, 19 nt, Homo sapiens
  misc_RNA (1)...(19): siRNA sense strand
caacagcuaccacucugaa

SEQ ID NO: 375206 - RNA, 19 nt, Homo sapiens
  misc_RNA (1)...(19): siRNA sense strand
ggcgagcauugaugaauug

SEQ ID NO: 375207 - RNA, 19 nt, Homo sapiens
  misc_RNA (1)...(19): siRNA sense strand
aaugaugccuggaagaaug

SEQ ID NO: 375208 - RNA, 19 nt, Homo sapiens
  misc_RNA (1)...(19): siRNA sense strand
ggaacuuacuggagaacuc

SEQ ID NO: 375209 - RNA, 19 nt, Homo sapiens
  misc_RNA (1)...(19): siRNA sense strand
ggagaucagcaccugguuu

SEQ ID NO: 375210 - RNA, 19 nt, Homo sapiens
  misc_RNA (1)...(19): siRNA sense strand
gagccuacuuaaaccagaa

SEQ ID NO: 375211 - RNA, 19 nt, Homo sapiens
  misc_RNA (1)...(19): siRNA sense strand
gagaaggauuugugugaac

SEQ ID NO: 375212 - RNA, 19 nt, Homo sapiens
  misc_RNA (1)...(19): siRNA sense strand
agcaugaccuguucuuuga

SEQ ID NO: 375213 - RNA, 19 nt, Homo sapiens
  misc_RNA (1)...(19): siRNA sense strand
cagcaugaccuguucuuug

SEQ ID NO: 375214 - RNA, 19 nt, Homo sapiens
  misc_RNA (1)...(19): siRNA sense strand
gggcagcucccagagauuu

SEQ ID NO: 375215 - RNA, 19 nt, Homo sapiens
  misc_RNA (1)...(19): siRNA sense strand
ucacugagcugaaguuacc

SEQ ID NO: 375216 - RNA, 19 nt, Homo sapiens
  misc_RNA (1)...(19): siRNA sense strand
caacaagaggaggaaauuu

SEQ ID NO: 375217 - RNA, 19 nt, Homo sapiens
  misc_RNA (1)...(19): siRNA sense strand
cccaugggcuggagcauau

SEQ ID NO: 375218 - RNA, 19 nt, Homo sapiens
  misc_RNA (1)...(19): siRNA sense strand
ucaauccgcugaagauguc

SEQ ID NO: 375219 - RNA, 19 nt, Homo sapiens
  misc_RNA (1)...(19): siRNA sense strand
ggacacgagacccuucaaa

SEQ ID NO: 375220 - RNA, 19 nt, Homo sapiens
  misc_RNA (1)...(19): siRNA sense strand
aggcaagggucuuaaacaa

SEQ ID NO: 375221 - RNA, 19 nt, Homo sapiens
  misc_RNA (1)...(19): siRNA sense strand
ugagucaucugcagaacug

SEQ ID NO: 375222 - RNA, 19 nt, Homo sapiens
  misc_RNA (1)...(19): siRNA sense strand
gcucagcggcagaucaauu

SEQ ID NO: 375223 - RNA, 19 nt, Homo sapiens
  misc_RNA (1)...(19): siRNA sense strand
gaucagcauucggcaggaa

SEQ ID NO: 375224 - RNA, 19 nt, Homo sapiens
  misc_RNA (1)...(19): siRNA sense strand
gggcuccaguuccaucuug

SEQ ID NO: 375225 - RNA, 19 nt, Homo sapiens
  misc_RNA (1)...(19): siRNA sense strand
ugagaaggauuugugugaa

SEQ ID NO: 375226 - RNA, 19 nt, Homo sapiens
  misc_RNA (1)...(19): siRNA sense strand
gcaccuaucacauggaaag

SEQ ID NO: 375227 - RNA, 19 nt, Homo sapiens
  misc_RNA (1)...(19): siRNA sense strand
ggcaugggcuauuauaacu

SEQ ID NO: 375228 - RNA, 19 nt, Homo sapiens
  misc_RNA (1)...(19): siRNA sense strand
gaagacccuguuugugaaa

SEQ ID NO: 375229 - RNA, 19 nt, Homo sapiens
  misc_RNA (1)...(19): siRNA sense strand
ugugugaccucauccauca

SEQ ID NO: 375230 - RNA, 19 nt, Homo sapiens
  misc_RNA (1)...(19): siRNA sense strand
gacaaagaccagagagaga

SEQ ID NO: 375231 - RNA, 19 nt, Homo sapiens
  misc_RNA (1)...(19): siRNA sense strand
cauggaaguuuaugagucu

SEQ ID NO: 375232 - RNA, 19 nt, Homo sapiens
  misc_RNA (1)...(19): siRNA sense strand
gcccaaucaucccgucauu

SEQ ID NO: 375233 - RNA, 19 nt, Homo sapiens
  misc_RNA (1)...(19): siRNA sense strand
gauggcacacuugguauuu

SEQ ID NO: 375234 - RNA, 19 nt, Homo sapiens
  misc_RNA (1)...(19): siRNA sense strand
gagacaaggcuaccagcaa

SEQ ID NO: 375235 - RNA, 19 nt, Homo sapiens
  misc_RNA (1)...(19): siRNA sense strand
caacauccguuugaaaaga

SEQ ID NO: 375236 - RNA, 19 nt, Homo sapiens
  misc_RNA (1)...(19): siRNA sense strand
gcagcuaucaugauuacau

SEQ ID NO: 375237 - RNA, 19 nt, Homo sapiens
  misc_RNA (1)...(19): siRNA sense strand
gaaugaagcugcucuuaaa

SEQ ID NO: 375238 - RNA, 19 nt, Homo sapiens
  misc_RNA (1)...(19): siRNA sense strand
guaaaucacuucuucuuuc

SEQ ID NO: 375239 - RNA, 19 nt, Homo sapiens
  misc_RNA (1)...(19): siRNA sense strand
gaagaaagagaaagggaaa

SEQ ID NO: 375240 - RNA, 19 nt, Homo sapiens
  misc_RNA (1)...(19): siRNA sense strand
gcauuugccacuucauuua

SEQ ID NO: 375241 - RNA, 19 nt, Homo sapiens
  misc_RNA (1)...(19): siRNA sense strand
ggacacagaagaaagagaa

SEQ ID NO: 375242 - RNA, 19 nt, Homo sapiens
  misc_RNA (1)...(19): siRNA sense strand
ggaauuugguauugguuug

SEQ ID NO: 375243 - RNA, 19 nt, Homo sapiens
  misc_RNA (1)...(19): siRNA sense strand
caagaacaauauaccaaga

SEQ ID NO: 375244 - RNA, 19 nt, Homo sapiens
  misc_RNA (1)...(19): siRNA sense strand
gcaaaguucucaguuaucu

SEQ ID NO: 375245 - RNA, 19 nt, Homo sapiens
  misc_RNA (1)...(19): siRNA sense strand
gagcacggcugaagacucu

SEQ ID NO: 375246 - RNA, 19 nt, Homo sapiens
  misc_RNA (1)...(19): siRNA sense strand
gauccucaguagugucuuu

SEQ ID NO: 375247 - RNA, 19 nt, Homo sapiens
  misc_RNA (1)...(19): siRNA sense strand
guuugauccugaaauguua

SEQ ID NO: 375248 - RNA, 19 nt, Homo sapiens
  misc_RNA (1)...(19): siRNA sense strand
gaccuugucuggaaagauc

SEQ ID NO: 375249 - RNA, 19 nt, Homo sapiens
  misc_RNA (1)...(19): siRNA sense strand
ucugcaaaguucucaguua

SEQ ID NO: 375250 - RNA, 19 nt, Homo sapiens
  misc_RNA (1)...(19): siRNA sense strand
ggaccacaguuauacaucu

SEQ ID NO: 375251 - RNA, 19 nt, Homo sapiens
  misc_RNA (1)...(19): siRNA sense strand
ugacacggguccuucauca

SEQ ID NO: 375252 - RNA, 19 nt, Homo sapiens
  misc_RNA (1)...(19): siRNA sense strand
gaaguggacacagaagaaa

SEQ ID NO: 375253 - RNA, 19 nt, Homo sapiens
  misc_RNA (1)...(19): siRNA sense strand
acucugaccuugucuggaa

SEQ ID NO: 375254 - RNA, 19 nt, Homo sapiens
  misc_RNA (1)...(19): siRNA sense strand
gaccacaguuauacaucuu

SEQ ID NO: 375255 - RNA, 19 nt, Homo sapiens
  misc_RNA (1)...(19): siRNA sense strand
cugcaaaguucucaguuau

SEQ ID NO: 375256 - RNA, 19 nt, Homo sapiens
  misc_RNA (1)...(19): siRNA sense strand
agaaugaagcugcucuuaa

SEQ ID NO: 375257 - RNA, 19 nt, Homo sapiens
  misc_RNA (1)...(19): siRNA sense strand
gagugacgguuacuuucuu

SEQ ID NO: 375258 - RNA, 19 nt, Homo sapiens
  misc_RNA (1)...(19): siRNA sense strand
uaaugcuucuuucuuguug

SEQ ID NO: 375259 - RNA, 19 nt, Homo sapiens
  misc_RNA (1)...(19): siRNA sense strand
gcacggcugaagacucuaa

SEQ ID NO: 375260 - RNA, 19 nt, Homo sapiens
  misc_RNA (1)...(19): siRNA sense strand
ucacaaugguggcaucaag

SEQ ID NO: 375261 - RNA, 19 nt, Homo sapiens
  misc_RNA (1)...(19): siRNA sense strand
ucacuucuucuuucucuuu

SEQ ID NO: 375262 - RNA, 19 nt, Homo sapiens
  misc_RNA (1)...(19): siRNA sense strand
aaacagugccucuccugaa

SEQ ID NO: 375263 - RNA, 19 nt, Homo sapiens
  misc_RNA (1)...(19): siRNA sense strand
gguuugauccugaaauguu

SEQ ID NO: 375264 - RNA, 19 nt, Homo sapiens
  misc_RNA (1)...(19): siRNA sense strand
cuuuaaugcuucuuucuug

SEQ ID NO: 375265 - RNA, 19 nt, Homo sapiens
  misc_RNA (1)...(19): siRNA sense strand
cccaguaaaucacuucuuc

SEQ ID NO: 375266 - RNA, 19 nt, Homo sapiens
  misc_RNA (1)...(19): siRNA sense strand
augguaugcuggagaguua

SEQ ID NO: 375267 - RNA, 19 nt, Homo sapiens
  misc_RNA (1)...(19): siRNA sense strand
ccacaguuauacaucuuca

SEQ ID NO: 375268 - RNA, 19 nt, Homo sapiens
  misc_RNA (1)...(19): siRNA sense strand
ugucagacccaguaaauca

SEQ ID NO: 375269 - RNA, 19 nt, Homo sapiens
  misc_RNA (1)...(19): siRNA sense strand
gacgguuacuuucuuccuu

SEQ ID NO: 375270 - RNA, 19 nt, Homo sapiens
  misc_RNA (1)...(19): siRNA sense strand
cugcuggacucccuacuau

SEQ ID NO: 375271 - RNA, 19 nt, Homo sapiens
  misc_RNA (1)...(19): siRNA sense strand
gaccuuuaaugcuucuuuc

SEQ ID NO: 375272 - RNA, 19 nt, Homo sapiens
  misc_RNA (1)...(19): siRNA sense strand
gcuggacucccuacuaugu

SEQ ID NO: 375273 - RNA, 19 nt, Homo sapiens
  misc_RNA (1)...(19): siRNA sense strand
ugaaucaguccaagaacaa

SEQ ID NO: 375274 - RNA, 19 nt, Homo sapiens
  misc_RNA (1)...(19): siRNA sense strand
gcuuugauccacuuaucua

SEQ ID NO: 375275 - RNA, 19 nt, Homo sapiens
  misc_RNA (1)...(19): siRNA sense strand
gaauuugguauugguuuga

SEQ ID NO: 375276 - RNA, 19 nt, Homo sapiens
  misc_RNA (1)...(19): siRNA sense strand
uuaaacccaugcuuugauc

SEQ ID NO: 375277 - RNA, 19 nt, Homo sapiens
  misc_RNA (1)...(19): siRNA sense strand
agaaguggacacagaagaa

SEQ ID NO: 375278 - RNA, 19 nt, Homo sapiens
  misc_RNA (1)...(19): siRNA sense strand
guucagccaucaacaacag

SEQ ID NO: 375279 - RNA, 19 nt, Homo sapiens
  misc_RNA (1)...(19): siRNA sense strand
guauugguuugauccugaa

SEQ ID NO: 375280 - RNA, 19 nt, Homo sapiens
  misc_RNA (1)...(19): siRNA sense strand
gaaucaaaaucacuguuca

SEQ ID NO: 375281 - RNA, 19 nt, Homo sapiens
  misc_RNA (1)...(19): siRNA sense strand
ccaagagcacggcugaaga

SEQ ID NO: 375282 - RNA, 19 nt, Homo sapiens
  misc_RNA (1)...(19): siRNA sense strand
acgguuacuuucuuccuuu

SEQ ID NO: 375283 - RNA, 19 nt, Homo sapiens
  misc_RNA (1)...(19): siRNA sense strand
caucaucccucuuuucauc

SEQ ID NO: 375284 - RNA, 19 nt, Homo sapiens
  misc_RNA (1)...(19): siRNA sense strand
aacaacagcaucccacuga

SEQ ID NO: 375285 - RNA, 19 nt, Homo sapiens
  misc_RNA (1)...(19): siRNA sense strand
ucugcgaccuuuaaugcuu

SEQ ID NO: 375286 - RNA, 19 nt, Homo sapiens
  misc_RNA (1)...(19): siRNA sense strand
caguaaaucacuucuucuu

SEQ ID NO: 375287 - RNA, 19 nt, Homo sapiens
  misc_RNA (1)...(19): siRNA sense strand
ucucaguuaucuaaagcuu

SEQ ID NO: 375288 - RNA, 19 nt, Homo sapiens
  misc_RNA (1)...(19): siRNA sense strand
guugucagacccaguaaau

SEQ ID NO: 375289 - RNA, 19 nt, Homo sapiens
  misc_RNA (1)...(19): siRNA sense strand
cagguugucagacccagua

SEQ ID NO: 375290 - RNA, 19 nt, Homo sapiens
  misc_RNA (1)...(19): siRNA sense strand
uugcaggaccacaguuaua

SEQ ID NO: 375291 - RNA, 19 nt, Homo sapiens
  misc_RNA (1)...(19): siRNA sense strand
cuuaaaacaucugaccuua

SEQ ID NO: 375292 - RNA, 19 nt, Homo sapiens
  misc_RNA (1)...(19): siRNA sense strand
aaucaguccaagaacaaua

SEQ ID NO: 375293 - RNA, 19 nt, Homo sapiens
  misc_RNA (1)...(19): siRNA sense strand
ccacgaacuacaacugaau

SEQ ID NO: 375294 - RNA, 19 nt, Homo sapiens
  misc_RNA (1)...(19): siRNA sense strand
uaaaacaucugaccuuagc

SEQ ID NO: 375295 - RNA, 19 nt, Homo sapiens
  misc_RNA (1)...(19): siRNA sense strand
cuaggaauuugguauuggu

SEQ ID NO: 375296 - RNA, 19 nt, Homo sapiens
  misc_RNA (1)...(19): siRNA sense strand
aaucacuucuucuuucucu

SEQ ID NO: 375297 - RNA, 19 nt, Homo sapiens
  misc_RNA (1)...(19): siRNA sense strand
caaaguucucaguuaucua

SEQ ID NO: 375298 - RNA, 19 nt, Homo sapiens
  misc_RNA (1)...(19): siRNA sense strand
cuacuauguccuaggaauu

SEQ ID NO: 375299 - RNA, 19 nt, Homo sapiens
  misc_RNA (1)...(19): siRNA sense strand
cgaccuuuaaugcuucuuu

SEQ ID NO: 375300 - RNA, 19 nt, Homo sapiens
  misc_RNA (1)...(19): siRNA sense strand
uacuauguccuaggaauuu

SEQ ID NO: 375301 - RNA, 19 nt, Homo sapiens
  misc_RNA (1)...(19): siRNA sense strand
caagagcacggcugaagac

SEQ ID NO: 375302 - RNA, 19 nt, Homo sapiens
  misc_RNA (1)...(19): siRNA sense strand
gcaggaccacaguuauaca

SEQ ID NO: 375303 - RNA, 19 nt, Homo sapiens
  misc_RNA (1)...(19): siRNA sense strand
cagaaguggacacagaaga

SEQ ID NO: 375304 - RNA, 19 nt, Homo sapiens
  misc_RNA (1)...(19): siRNA sense strand
uugauccacuuaucuaugg

SEQ ID NO: 375305 - RNA, 19 nt, Homo sapiens
  misc_RNA (1)...(19): siRNA sense strand
ucagcugccucuucaucau

SEQ ID NO: 375306 - RNA, 19 nt, Homo sapiens
  misc_RNA (1)...(19): siRNA sense strand
aguuauacaucuucaggau

SEQ ID NO: 375307 - RNA, 19 nt, Homo sapiens
  misc_RNA (1)...(19): siRNA sense strand
gaaaagcaacagcaaaguc

SEQ ID NO: 375308 - RNA, 19 nt, Homo sapiens
  misc_RNA (1)...(19): siRNA sense strand
aagauccgagugacgguua

SEQ ID NO: 375309 - RNA, 19 nt, Homo sapiens
  misc_RNA (1)...(19): siRNA sense strand
cccacgaacuacaacugaa

SEQ ID NO: 375310 - RNA, 19 nt, Homo sapiens
  misc_RNA (1)...(19): siRNA sense strand
augguggcaucaagcauuu

SEQ ID NO: 375311 - RNA, 19 nt, Homo sapiens
  misc_RNA (1)...(19): siRNA sense strand
gugccucuccugaacagaa

SEQ ID NO: 375312 - RNA, 19 nt, Homo sapiens
  misc_RNA (1)...(19): siRNA sense strand
ugaagcugcucuuaaaaca

SEQ ID NO: 375313 - RNA, 19 nt, Homo sapiens
  misc_RNA (1)...(19): siRNA sense strand
uugguuugauccugaaaug

SEQ ID NO: 375314 - RNA, 19 nt, Homo sapiens
  misc_RNA (1)...(19): siRNA sense strand
gaaucaguccaagaacaau

SEQ ID NO: 375315 - RNA, 19 nt, Homo sapiens
  misc_RNA (1)...(19): siRNA sense strand
gccuggauccucaguagug

SEQ ID NO: 375316 - RNA, 19 nt, Homo sapiens
  misc_RNA (1)...(19): siRNA sense strand
uggccuggauccucaguag

SEQ ID NO: 375317 - RNA, 19 nt, Homo sapiens
  misc_RNA (1)...(19): siRNA sense strand
ucacgaggccccuagcuuu

SEQ ID NO: 375318 - RNA, 19 nt, Homo sapiens
  misc_RNA (1)...(19): siRNA sense strand
guucucaguuaucuaaagc

SEQ ID NO: 375319 - RNA, 19 nt, Homo sapiens
  misc_RNA (1)...(19): siRNA sense strand
uggagacucugauugucau

SEQ ID NO: 375320 - RNA, 19 nt, Homo sapiens
  misc_RNA (1)...(19): siRNA sense strand
ccacagaggcccuggauug

SEQ ID NO: 375321 - RNA, 19 nt, Homo sapiens
  misc_RNA (1)...(19): siRNA sense strand
cagcagaggccaccaagga

SEQ ID NO: 375322 - RNA, 19 nt, Homo sapiens
  misc_RNA (1)...(19): siRNA sense strand
cugcagacccucgauguga

SEQ ID NO: 375323 - RNA, 19 nt, Homo sapiens
  misc_RNA (1)...(19): siRNA sense strand
ugacugcagccucaccuau

SEQ ID NO: 375324 - RNA, 19 nt, Homo sapiens
  misc_RNA (1)...(19): siRNA sense strand
cacagaggcccuggauuga

SEQ ID NO: 375325 - RNA, 19 nt, Homo sapiens
  misc_RNA (1)...(19): siRNA sense strand
ccacagcagaggccaccaa

SEQ ID NO: 375326 - RNA, 19 nt, Homo sapiens
  misc_RNA (1)...(19): siRNA sense strand
gcaguaaccuguucaaguu

SEQ ID NO: 375327 - RNA, 19 nt, Homo sapiens
  misc_RNA (1)...(19): siRNA sense strand
acagugggcuggugaauua

SEQ ID NO: 375328 - RNA, 19 nt, Homo sapiens
  misc_RNA (1)...(19): siRNA sense strand
ccaaguaucccaaggguua

SEQ ID NO: 375329 - RNA, 19 nt, Homo sapiens
  misc_RNA (1)...(19): siRNA sense strand
gagagauacuggaagauug

SEQ ID NO: 375330 - RNA, 19 nt, Homo sapiens
  misc_RNA (1)...(19): siRNA sense strand
gaacugguauaagaaguau

SEQ ID NO: 375331 - RNA, 19 nt, Homo sapiens
  misc_RNA (1)...(19): siRNA sense strand
cgagagagauacuggaaga

SEQ ID NO: 375332 - RNA, 19 nt, Homo sapiens
  misc_RNA (1)...(19): siRNA sense strand
gcagaugugugaccgcuau

SEQ ID NO: 375333 - RNA, 19 nt, Homo sapiens
  misc_RNA (1)...(19): siRNA sense strand
ggagagcucauuuggaauu

SEQ ID NO: 375334 - RNA, 19 nt, Homo sapiens
  misc_RNA (1)...(19): siRNA sense strand
gagcgaguauggagcagaa

SEQ ID NO: 375335 - RNA, 19 nt, Homo sapiens
  misc_RNA (1)...(19): siRNA sense strand
caacaacguuucucugcau

SEQ ID NO: 375336 - RNA, 19 nt, Homo sapiens
  misc_RNA (1)...(19): siRNA sense strand
gagcaacucuaacuaugca

SEQ ID NO: 375337 - RNA, 19 nt, Homo sapiens
  misc_RNA (1)...(19): siRNA sense strand
ugacugacaccuccaagua

SEQ ID NO: 375338 - RNA, 19 nt, Homo sapiens
  misc_RNA (1)...(19): siRNA sense strand
uuugagaacugguauaaga

SEQ ID NO: 375339 - RNA, 19 nt, Homo sapiens
  misc_RNA (1)...(19): siRNA sense strand
gaucuucacucggcagaga

SEQ ID NO: 375340 - RNA, 19 nt, Homo sapiens
  misc_RNA (1)...(19): siRNA sense strand
gguauaagaaguaucagaa

SEQ ID NO: 375341 - RNA, 19 nt, Homo sapiens
  misc_RNA (1)...(19): siRNA sense strand
uuggagagcucauuuggaa

SEQ ID NO: 375342 - RNA, 19 nt, Homo sapiens
  misc_RNA (1)...(19): siRNA sense strand
gcacgaacgcccugccuau

SEQ ID NO: 375343 - RNA, 19 nt, Homo sapiens
  misc_RNA (1)...(19): siRNA sense strand
gagagcucauuuggaauuu

SEQ ID NO: 375344 - RNA, 19 nt, Homo sapiens
  misc_RNA (1)...(19): siRNA sense strand
uaucagaagcccauuauuc

SEQ ID NO: 375345 - RNA, 19 nt, Homo sapiens
  misc_RNA (1)...(19): siRNA sense strand
cugccuaucuguauucauu

SEQ ID NO: 375346 - RNA, 19 nt, Homo sapiens
  misc_RNA (1)...(19): siRNA sense strand
gugagcaacucuaacuaug

SEQ ID NO: 375347 - RNA, 19 nt, Homo sapiens
  misc_RNA (1)...(19): siRNA sense strand
caagaguggugcugaggau

SEQ ID NO: 375348 - RNA, 19 nt, Homo sapiens
  misc_RNA (1)...(19): siRNA sense strand
caccagggaccauccaaua

SEQ ID NO: 375349 - RNA, 19 nt, Homo sapiens
  misc_RNA (1)...(19): siRNA sense strand
gaaucacuaucgccaucaa

SEQ ID NO: 375350 - RNA, 19 nt, Homo sapiens
  misc_RNA (1)...(19): siRNA sense strand
guauggagcagaaacgauu

SEQ ID NO: 375351 - RNA, 19 nt, Homo sapiens
  misc_RNA (1)...(19): siRNA sense strand
cagaggaagugaugcagau

SEQ ID NO: 375352 - RNA, 19 nt, Homo sapiens
  misc_RNA (1)...(19): siRNA sense strand
ccaguucccuccagcuuca

SEQ ID NO: 375353 - RNA, 19 nt, Homo sapiens
  misc_RNA (1)...(19): siRNA sense strand
gcagcggucuguacuucug

SEQ ID NO: 375354 - RNA, 19 nt, Homo sapiens
  misc_RNA (1)...(19): siRNA sense strand
guagccaagucacaauguu

SEQ ID NO: 375355 - RNA, 19 nt, Homo sapiens
  misc_RNA (1)...(19): siRNA sense strand
ggacccagggccaacuuaa

SEQ ID NO: 375356 - RNA, 19 nt, Homo sapiens
  misc_RNA (1)...(19): siRNA sense strand
caagggcaguaaccuguuc

SEQ ID NO: 375357 - RNA, 19 nt, Homo sapiens
  misc_RNA (1)...(19): siRNA sense strand
gagaacugguauaagaagu

SEQ ID NO: 375358 - RNA, 19 nt, Homo sapiens
  misc_RNA (1)...(19): siRNA sense strand
cagaagcccauuauucaga

SEQ ID NO: 375359 - RNA, 19 nt, Homo sapiens
  misc_RNA (1)...(19): siRNA sense strand
ccaccuacaucgaugacau

SEQ ID NO: 375360 - RNA, 19 nt, Homo sapiens
  misc_RNA (1)...(19): siRNA sense strand
gcuaugggauuguggucau

SEQ ID NO: 375361 - RNA, 19 nt, Homo sapiens
  misc_RNA (1)...(19): siRNA sense strand
gcacuguggcugucaccaa

SEQ ID NO: 375362 - RNA, 19 nt, Homo sapiens
  misc_RNA (1)...(19): siRNA sense strand
cgagagugcuggggaauaa

SEQ ID NO: 375363 - RNA, 19 nt, Homo sapiens
  misc_RNA (1)...(19): siRNA sense strand
ggauccaccucugauguuc

SEQ ID NO: 375364 - RNA, 19 nt, Homo sapiens
  misc_RNA (1)...(19): siRNA sense strand
guauguggaugugaucugu

SEQ ID NO: 375365 - RNA, 19 nt, Homo sapiens
  misc_RNA (1)...(19): siRNA sense strand
ucgacacgcuagagcauga

SEQ ID NO: 375366 - RNA, 19 nt, Homo sapiens
  misc_RNA (1)...(19): siRNA sense strand
gccaguuccucaucaaugg

SEQ ID NO: 375367 - RNA, 19 nt, Homo sapiens
  misc_RNA (1)...(19): siRNA sense strand
ggcaguaaccuguucaagu

SEQ ID NO: 375368 - RNA, 19 nt, Homo sapiens
  misc_RNA (1)...(19): siRNA sense strand
caagucacaauguuuggaa

SEQ ID NO: 375369 - RNA, 19 nt, Homo sapiens
  misc_RNA (1)...(19): siRNA sense strand
acaugcaggugauggaaga

SEQ ID NO: 375370 - RNA, 19 nt, Homo sapiens
  misc_RNA (1)...(19): siRNA sense strand
cgaacgcccugccuaucug

SEQ ID NO: 375371 - RNA, 19 nt, Homo sapiens
  misc_RNA (1)...(19): siRNA sense strand
gagcucauuuggaauuuug

SEQ ID NO: 375372 - RNA, 19 nt, Homo sapiens
  misc_RNA (1)...(19): siRNA sense strand
ggacugcagcggucuguac

SEQ ID NO: 375373 - RNA, 19 nt, Homo sapiens
  misc_RNA (1)...(19): siRNA sense strand
acaaagucguggcgaaugg

SEQ ID NO: 375374 - RNA, 19 nt, Homo sapiens
  misc_RNA (1)...(19): siRNA sense strand
acacgacacccaccaccua

SEQ ID NO: 375375 - RNA, 19 nt, Homo sapiens
  misc_RNA (1)...(19): siRNA sense strand
gcgccgacuucucugacaa

SEQ ID NO: 375376 - RNA, 19 nt, Homo sapiens
  misc_RNA (1)...(19): siRNA sense strand
agagagauacuggaagauu

SEQ ID NO: 375377 - RNA, 19 nt, Homo sapiens
  misc_RNA (1)...(19): siRNA sense strand
ggaagugcgucuuuuggau

SEQ ID NO: 375378 - RNA, 19 nt, Homo sapiens
  misc_RNA (1)...(19): siRNA sense strand
caccucugauguucacuga

SEQ ID NO: 375379 - RNA, 19 nt, Homo sapiens
  misc_RNA (1)...(19): siRNA sense strand
agaacugguauaagaagua

SEQ ID NO: 375380 - RNA, 19 nt, Homo sapiens
  misc_RNA (1)...(19): siRNA sense strand
agaaucugcuggcuacuac

SEQ ID NO: 375381 - RNA, 19 nt, Homo sapiens
  misc_RNA (1)...(19): siRNA sense strand
gacagugggcuggugaauu

SEQ ID NO: 375382 - RNA, 19 nt, Homo sapiens
  misc_RNA (1)...(19): siRNA sense strand
gcagugcccauuccuaugc

SEQ ID NO: 375383 - RNA, 19 nt, Homo sapiens
  misc_RNA (1)...(19): siRNA sense strand
uugaacagcuacuacucuu

SEQ ID NO: 375384 - RNA, 19 nt, Homo sapiens
  misc_RNA (1)...(19): siRNA sense strand
uaacuaugcagcagacaag

SEQ ID NO: 375385 - RNA, 19 nt, Homo sapiens
  misc_RNA (1)...(19): siRNA sense strand
gcuacuacuugaagauggu

SEQ ID NO: 375386 - RNA, 19 nt, Homo sapiens
  misc_RNA (1)...(19): siRNA sense strand
gaggaagugaugcagaugu

SEQ ID NO: 375387 - RNA, 19 nt, Homo sapiens
  misc_RNA (1)...(19): siRNA sense strand
aaacaaagucguggcgaau

SEQ ID NO: 375388 - RNA, 19 nt, Homo sapiens
  misc_RNA (1)...(19): siRNA sense strand
uagccaagucacaauguuu

SEQ ID NO: 375389 - RNA, 19 nt, Homo sapiens
  misc_RNA (1)...(19): siRNA sense strand
gacugacaccuccaaguau

SEQ ID NO: 375390 - RNA, 19 nt, Homo sapiens
  misc_RNA (1)...(19): siRNA sense strand
gcaguucuucaacaacguu

SEQ ID NO: 375391 - RNA, 19 nt, Homo sapiens
  misc_RNA (1)...(19): siRNA sense strand
caagagccaguuccucauc

SEQ ID NO: 375392 - RNA, 19 nt, Homo sapiens
  misc_RNA (1)...(19): siRNA sense strand
cagcuacuacucuugguau

SEQ ID NO: 375393 - RNA, 19 nt, Homo sapiens
  misc_RNA (1)...(19): siRNA sense strand
uagaaucugcuggcuacua

SEQ ID NO: 375394 - RNA, 19 nt, Homo sapiens
  misc_RNA (1)...(19): siRNA sense strand
gaauuuugccgauuucaug

SEQ ID NO: 375395 - RNA, 19 nt, Homo sapiens
  misc_RNA (1)...(19): siRNA sense strand
guaaccuguucaaguugga

SEQ ID NO: 375396 - RNA, 19 nt, Homo sapiens
  misc_RNA (1)...(19): siRNA sense strand
auguggaugugaucuguuu

SEQ ID NO: 375397 - RNA, 19 nt, Homo sapiens
  misc_RNA (1)...(19): siRNA sense strand
gcuggcuacuacuugaaga

SEQ ID NO: 375398 - RNA, 19 nt, Homo sapiens
  misc_RNA (1)...(19): siRNA sense strand
ucccaaggguuacuuuguc

SEQ ID NO: 375399 - RNA, 19 nt, Homo sapiens
  misc_RNA (1)...(19): siRNA sense strand
ccacucaguagccaaguca

SEQ ID NO: 375400 - RNA, 19 nt, Homo sapiens
  misc_RNA (1)...(19): siRNA sense strand
guggaugugaucuguuuga

SEQ ID NO: 375401 - RNA, 19 nt, Homo sapiens
  misc_RNA (1)...(19): siRNA sense strand
ucugcuggcuacuacuuga

SEQ ID NO: 375402 - RNA, 19 nt, Homo sapiens
  misc_RNA (1)...(19): siRNA sense strand
gcaggugauggaagaagug

SEQ ID NO: 375403 - RNA, 19 nt, Homo sapiens
  misc_RNA (1)...(19): siRNA sense strand
gaacgcccugccuaucugu

SEQ ID NO: 375404 - RNA, 19 nt, Homo sapiens
  misc_RNA (1)...(19): siRNA sense strand
cugcagcggucuguacuuc

SEQ ID NO: 375405 - RNA, 19 nt, Homo sapiens
  misc_RNA (1)...(19): siRNA sense strand
gccugugucugacuucuac

SEQ ID NO: 375406 - RNA, 19 nt, Homo sapiens
  misc_RNA (1)...(19): siRNA sense strand
aggaagugaugcagaugug

SEQ ID NO: 375407 - RNA, 19 nt, Homo sapiens
  misc_RNA (1)...(19): siRNA sense strand
aggguuacuuuguccagaa

SEQ ID NO: 375408 - RNA, 19 nt, Homo sapiens
  misc_RNA (1)...(19): siRNA sense strand
uugccgauuucaugacuga

SEQ ID NO: 375409 - RNA, 19 nt, Homo sapiens
  misc_RNA (1)...(19): siRNA sense strand
acugacaccuccaaguauc

SEQ ID NO: 375410 - RNA, 19 nt, Homo sapiens
  misc_RNA (1)...(19): siRNA sense strand
guauaagaaguaucagaag

SEQ ID NO: 375411 - RNA, 19 nt, Homo sapiens
  misc_RNA (1)...(19): siRNA sense strand
aagagccaguuccucauca

SEQ ID NO: 375412 - RNA, 19 nt, Homo sapiens
  misc_RNA (1)...(19): siRNA sense strand
ucacuaucgccaucaacaa

SEQ ID NO: 375413 - RNA, 19 nt, Homo sapiens
  misc_RNA (1)...(19): siRNA sense strand
gcuucgaggagcaguggua

SEQ ID NO: 375414 - RNA, 19 nt, Homo sapiens
  misc_RNA (1)...(19): siRNA sense strand
gaguggugcugaggauugg

SEQ ID NO: 375415 - RNA, 19 nt, Homo sapiens
  misc_RNA (1)...(19): siRNA sense strand
caggauccaccucugaugu

SEQ ID NO: 375416 - RNA, 19 nt, Homo sapiens
  misc_RNA (1)...(19): siRNA sense strand
ugugagcaacucuaacuau

SEQ ID NO: 375417 - RNA, 19 nt, Homo sapiens
  misc_RNA (1)...(19): siRNA sense strand
ccacaugcaggugauggaa

SEQ ID NO: 375418 - RNA, 19 nt, Homo sapiens
  misc_RNA (1)...(19): siRNA sense strand
ugccgcaguucuucaacaa

SEQ ID NO: 375419 - RNA, 19 nt, Homo sapiens
  misc_RNA (1)...(19): siRNA sense strand
ugugaccgcuaugggauug

SEQ ID NO: 375420 - RNA, 19 nt, Homo sapiens
  misc_RNA (1)...(19): siRNA sense strand
gggacccagggccaacuua

SEQ ID NO: 375421 - RNA, 19 nt, Homo sapiens
  misc_RNA (1)...(19): siRNA sense strand
agaguggugcugaggauug

SEQ ID NO: 375422 - RNA, 19 nt, Homo sapiens
  misc_RNA (1)...(19): siRNA sense strand
caucugggucuggaucaaa

SEQ ID NO: 375423 - RNA, 19 nt, Homo sapiens
  misc_RNA (1)...(19): siRNA sense strand
uggaugugaucuguuugaa

SEQ ID NO: 375424 - RNA, 19 nt, Homo sapiens
  misc_RNA (1)...(19): siRNA sense strand
gagcagcgcuuacggguuu

SEQ ID NO: 375425 - RNA, 19 nt, Homo sapiens
  misc_RNA (1)...(19): siRNA sense strand
ggaaguaguugauuauauc

SEQ ID NO: 375426 - RNA, 19 nt, Homo sapiens
  misc_RNA (1)...(19): siRNA sense strand
cuaaggaaguaguugauua

SEQ ID NO: 375427 - RNA, 19 nt, Homo sapiens
  misc_RNA (1)...(19): siRNA sense strand
gcagggccaugcuaugaua

SEQ ID NO: 375428 - RNA, 19 nt, Homo sapiens
  misc_RNA (1)...(19): siRNA sense strand
gaaagaaggaggccaguau

SEQ ID NO: 375429 - RNA, 19 nt, Homo sapiens
  misc_RNA (1)...(19): siRNA sense strand
caacauaugcuacuccaaa

SEQ ID NO: 375430 - RNA, 19 nt, Homo sapiens
  misc_RNA (1)...(19): siRNA sense strand
ggauugaccaugaaugaua

SEQ ID NO: 375431 - RNA, 19 nt, Homo sapiens
  misc_RNA (1)...(19): siRNA sense strand
gcaaauucuucuuucuuga

SEQ ID NO: 375432 - RNA, 19 nt, Homo sapiens
  misc_RNA (1)...(19): siRNA sense strand
gaagaagacguuagccaaa

SEQ ID NO: 375433 - RNA, 19 nt, Homo sapiens
  misc_RNA (1)...(19): siRNA sense strand
guuauaagccgaaggcaua

SEQ ID NO: 375434 - RNA, 19 nt, Homo sapiens
  misc_RNA (1)...(19): siRNA sense strand
gagcagauggccaaacuaa

SEQ ID NO: 375435 - RNA, 19 nt, Homo sapiens
  misc_RNA (1)...(19): siRNA sense strand
ucaauaaggccaaaucuau

SEQ ID NO: 375436 - RNA, 19 nt, Homo sapiens
  misc_RNA (1)...(19): siRNA sense strand
uuaaagccauggauucuga

SEQ ID NO: 375437 - RNA, 19 nt, Homo sapiens
  misc_RNA (1)...(19): siRNA sense strand
ggagcuggcuucucugaca

SEQ ID NO: 375438 - RNA, 19 nt, Homo sapiens
  misc_RNA (1)...(19): siRNA sense strand
gguguuggcuugauugcuu

SEQ ID NO: 375439 - RNA, 19 nt, Homo sapiens
  misc_RNA (1)...(19): siRNA sense strand
ggaacaggaugaauaugca

SEQ ID NO: 375440 - RNA, 19 nt, Homo sapiens
  misc_RNA (1)...(19): siRNA sense strand
caagcaauguggcuagaga

SEQ ID NO: 375441 - RNA, 19 nt, Homo sapiens
  misc_RNA (1)...(19): siRNA sense strand
gaccaugaaugauauugau

SEQ ID NO: 375442 - RNA, 19 nt, Homo sapiens
  misc_RNA (1)...(19): siRNA sense strand
gauugaccaugaaugauau

SEQ ID NO: 375443 - RNA, 19 nt, Homo sapiens
  misc_RNA (1)...(19): siRNA sense strand
gauaauggcauccguccuu

SEQ ID NO: 375444 - RNA, 19 nt, Homo sapiens
  misc_RNA (1)...(19): siRNA sense strand
guacaguuauucaggaagu

SEQ ID NO: 375445 - RNA, 19 nt, Homo sapiens
  misc_RNA (1)...(19): siRNA sense strand
caccauggcuuguaucucu

SEQ ID NO: 375446 - RNA, 19 nt, Homo sapiens
  misc_RNA (1)...(19): siRNA sense strand
gauguccgaugucccuauu

SEQ ID NO: 375447 - RNA, 19 nt, Homo sapiens
  misc_RNA (1)...(19): siRNA sense strand
ccaagaaggcacaggauga

SEQ ID NO: 375448 - RNA, 19 nt, Homo sapiens
  misc_RNA (1)...(19): siRNA sense strand
ggccagcgacugucuuuaa

SEQ ID NO: 375449 - RNA, 19 nt, Homo sapiens
  misc_RNA (1)...(19): siRNA sense strand
cauggauucugauugguuu

SEQ ID NO: 375450 - RNA, 19 nt, Homo sapiens
  misc_RNA (1)...(19): siRNA sense strand
gccaacagauuacggaaag

SEQ ID NO: 375451 - RNA, 19 nt, Homo sapiens
  misc_RNA (1)...(19): siRNA sense strand
gaccugaugccacaugauu

SEQ ID NO: 375452 - RNA, 19 nt, Homo sapiens
  misc_RNA (1)...(19): siRNA sense strand
gcagauggccaaacuaaaa

SEQ ID NO: 375453 - RNA, 19 nt, Homo sapiens
  misc_RNA (1)...(19): siRNA sense strand
uaucaucuuugguacaguu

SEQ ID NO: 375454 - RNA, 19 nt, Homo sapiens
  misc_RNA (1)...(19): siRNA sense strand
ugagaaaacugaugcuuga

SEQ ID NO: 375455 - RNA, 19 nt, Homo sapiens
  misc_RNA (1)...(19): siRNA sense strand
uagagaggcugcccuugga

SEQ ID NO: 375456 - RNA, 19 nt, Homo sapiens
  misc_RNA (1)...(19): siRNA sense strand
caucuuugguacaguuauu

SEQ ID NO: 375457 - RNA, 19 nt, Homo sapiens
  misc_RNA (1)...(19): siRNA sense strand
ggaaagaaggaggccagua

SEQ ID NO: 375458 - RNA, 19 nt, Homo sapiens
  misc_RNA (1)...(19): siRNA sense strand
gcgacugucuuuaaucucu

SEQ ID NO: 375459 - RNA, 19 nt, Homo sapiens
  misc_RNA (1)...(19): siRNA sense strand
gcacagugacagcugcaaa

SEQ ID NO: 375460 - RNA, 19 nt, Homo sapiens
  misc_RNA (1)...(19): siRNA sense strand
ugugguacccuucaaagua

SEQ ID NO: 375461 - RNA, 19 nt, Homo sapiens
  misc_RNA (1)...(19): siRNA sense strand
caauaaggccaaaucuaug

SEQ ID NO: 375462 - RNA, 19 nt, Homo sapiens
  misc_RNA (1)...(19): siRNA sense strand
caacagauuacggaaagaa

SEQ ID NO: 375463 - RNA, 19 nt, Homo sapiens
  misc_RNA (1)...(19): siRNA sense strand
uaagaccucugagcuguuc

SEQ ID NO: 375464 - RNA, 19 nt, Homo sapiens
  misc_RNA (1)...(19): siRNA sense strand
gaagcuuucucgggucaga

SEQ ID NO: 375465 - RNA, 19 nt, Homo sapiens
  misc_RNA (1)...(19): siRNA sense strand
ugcaaauucuucuuucuug

SEQ ID NO: 375466 - RNA, 19 nt, Homo sapiens
  misc_RNA (1)...(19): siRNA sense strand
gagcuggcuucucugacaa

SEQ ID NO: 375467 - RNA, 19 nt, Homo sapiens
  misc_RNA (1)...(19): siRNA sense strand
gggcagggccaugcuauga

SEQ ID NO: 375468 - RNA, 19 nt, Homo sapiens
  misc_RNA (1)...(19): siRNA sense strand
cagcgacugucuuuaaucu

SEQ ID NO: 375469 - RNA, 19 nt, Homo sapiens
  misc_RNA (1)...(19): siRNA sense strand
caagaaggcacaggaugaa

SEQ ID NO: 375470 - RNA, 19 nt, Homo sapiens
  misc_RNA (1)...(19): siRNA sense strand
gaaggcacaggaugaagga

SEQ ID NO: 375471 - RNA, 19 nt, Homo sapiens
  misc_RNA (1)...(19): siRNA sense strand
ggcaggugguguugaguug

SEQ ID NO: 375472 - RNA, 19 nt, Homo sapiens
  misc_RNA (1)...(19): siRNA sense strand
caggauugaccaugaauga

SEQ ID NO: 375473 - RNA, 19 nt, Homo sapiens
  misc_RNA (1)...(19): siRNA sense strand
gaucguggcaggugguguu

SEQ ID NO: 375474 - RNA, 19 nt, Homo sapiens
  misc_RNA (1)...(19): siRNA sense strand
gcuggaacaggaugaauau

SEQ ID NO: 375475 - RNA, 19 nt, Homo sapiens
  misc_RNA (1)...(19): siRNA sense strand
gcccucagauuuuccauaa

SEQ ID NO: 375476 - RNA, 19 nt, Homo sapiens
  misc_RNA (1)...(19): siRNA sense strand
aggcauauuugagggauuu

SEQ ID NO: 375477 - RNA, 19 nt, Homo sapiens
  misc_RNA (1)...(19): siRNA sense strand
gccagcgacugucuuuaau

SEQ ID NO: 375478 - RNA, 19 nt, Homo sapiens
  misc_RNA (1)...(19): siRNA sense strand
ugucuggcacuucauauaa

SEQ ID NO: 375479 - RNA, 19 nt, Homo sapiens
  misc_RNA (1)...(19): siRNA sense strand
caaaaugggcccucagauu

SEQ ID NO: 375480 - RNA, 19 nt, Homo sapiens
  misc_RNA (1)...(19): siRNA sense strand
cgacugucuuuaaucucua

SEQ ID NO: 375481 - RNA, 19 nt, Homo sapiens
  misc_RNA (1)...(19): siRNA sense strand
gaaaacugaugcuugaucu

SEQ ID NO: 375482 - RNA, 19 nt, Homo sapiens
  misc_RNA (1)...(19): siRNA sense strand
gucuggcacuucauauaaa

SEQ ID NO: 375483 - RNA, 19 nt, Homo sapiens
  misc_RNA (1)...(19): siRNA sense strand
caucugcaauguuaaucau

SEQ ID NO: 375484 - RNA, 19 nt, Homo sapiens
  misc_RNA (1)...(19): siRNA sense strand
cagcugcaaauucuucuuu

SEQ ID NO: 375485 - RNA, 19 nt, Homo sapiens
  misc_RNA (1)...(19): siRNA sense strand
gacugucuuuaaucucuaa

SEQ ID NO: 375486 - RNA, 19 nt, Homo sapiens
  misc_RNA (1)...(19): siRNA sense strand
ccacagguguuggcuugau

SEQ ID NO: 375487 - RNA, 19 nt, Homo sapiens
  misc_RNA (1)...(19): siRNA sense strand
ggcuggaacaggaugaaua

SEQ ID NO: 375488 - RNA, 19 nt, Homo sapiens
  misc_RNA (1)...(19): siRNA sense strand
gcucuggccauggguuaua

SEQ ID NO: 375489 - RNA, 19 nt, Homo sapiens
  misc_RNA (1)...(19): siRNA sense strand
agugacagcugcaaauucu

SEQ ID NO: 375490 - RNA, 19 nt, Homo sapiens
  misc_RNA (1)...(19): siRNA sense strand
gacguuagccaaacccaau

SEQ ID NO: 375491 - RNA, 19 nt, Homo sapiens
  misc_RNA (1)...(19): siRNA sense strand
uaucuugacuuaccccuuu

SEQ ID NO: 375492 - RNA, 19 nt, Homo sapiens
  misc_RNA (1)...(19): siRNA sense strand
ggaccaacauaugcuacuc

SEQ ID NO: 375493 - RNA, 19 nt, Homo sapiens
  misc_RNA (1)...(19): siRNA sense strand
ccaaacccaauauaaggaa

SEQ ID NO: 375494 - RNA, 19 nt, Homo sapiens
  misc_RNA (1)...(19): siRNA sense strand
aaacugaugcuugaucuca

SEQ ID NO: 375495 - RNA, 19 nt, Homo sapiens
  misc_RNA (1)...(19): siRNA sense strand
caaacccaauauaaggaau

SEQ ID NO: 375496 - RNA, 19 nt, Homo sapiens
  misc_RNA (1)...(19): siRNA sense strand
cagugucccuaaggaagua

SEQ ID NO: 375497 - RNA, 19 nt, Homo sapiens
  misc_RNA (1)...(19): siRNA sense strand
aaggcaggauugaccauga

SEQ ID NO: 375498 - RNA, 19 nt, Homo sapiens
  misc_RNA (1)...(19): siRNA sense strand
ccuuggagcuggcuucucu

SEQ ID NO: 375499 - RNA, 19 nt, Homo sapiens
  misc_RNA (1)...(19): siRNA sense strand
ccacaugauuuggcuagag

SEQ ID NO: 375500 - RNA, 19 nt, Homo sapiens
  misc_RNA (1)...(19): siRNA sense strand
cccaauauaaggaauguug

SEQ ID NO: 375501 - RNA, 19 nt, Homo sapiens
  misc_RNA (1)...(19): siRNA sense strand
ugacagcugcaaauucuuc

SEQ ID NO: 375502 - RNA, 19 nt, Homo sapiens
  misc_RNA (1)...(19): siRNA sense strand
caagacuccugcucacacu

SEQ ID NO: 375503 - RNA, 19 nt, Homo sapiens
  misc_RNA (1)...(19): siRNA sense strand
cacagguguuggcuugauu

SEQ ID NO: 375504 - RNA, 19 nt, Homo sapiens
  misc_RNA (1)...(19): siRNA sense strand
ccucagauuuuccauaaga

SEQ ID NO: 375505 - RNA, 19 nt, Homo sapiens
  misc_RNA (1)...(19): siRNA sense strand
uuagccaaacccaauauaa

SEQ ID NO: 375506 - RNA, 19 nt, Homo sapiens
  misc_RNA (1)...(19): siRNA sense strand
gaagugaaaacaagcaaug

SEQ ID NO: 375507 - RNA, 19 nt, Homo sapiens
  misc_RNA (1)...(19): siRNA sense strand
gcugcaaauucuucuuucu

SEQ ID NO: 375508 - RNA, 19 nt, Homo sapiens
  misc_RNA (1)...(19): siRNA sense strand
caauauaaggaauguugug

SEQ ID NO: 375509 - RNA, 19 nt, Homo sapiens
  misc_RNA (1)...(19): siRNA sense strand
aauaugcacugcgcucuca

SEQ ID NO: 375510 - RNA, 19 nt, Homo sapiens
  misc_RNA (1)...(19): siRNA sense strand
gccgcugccuuugcuguuu

SEQ ID NO: 375511 - RNA, 19 nt, Homo sapiens
  misc_RNA (1)...(19): siRNA sense strand
uauaucaucuuugguacag

SEQ ID NO: 375512 - RNA, 19 nt, Homo sapiens
  misc_RNA (1)...(19): siRNA sense strand
gccaaacccaauauaagga

SEQ ID NO: 375513 - RNA, 19 nt, Homo sapiens
  misc_RNA (1)...(19): siRNA sense strand
auaagccgaaggcauauuu

SEQ ID NO: 375514 - RNA, 19 nt, Homo sapiens
  misc_RNA (1)...(19): siRNA sense strand
acuccuuucugauguggua

SEQ ID NO: 375515 - RNA, 19 nt, Homo sapiens
  misc_RNA (1)...(19): siRNA sense strand
gaaaaugagaaaacugaug

SEQ ID NO: 375516 - RNA, 19 nt, Homo sapiens
  misc_RNA (1)...(19): siRNA sense strand
caggugguguugaguugau

SEQ ID NO: 375517 - RNA, 19 nt, Homo sapiens
  misc_RNA (1)...(19): siRNA sense strand
uaugauaguggaagcuuau

SEQ ID NO: 375518 - RNA, 19 nt, Homo sapiens
  misc_RNA (1)...(19): siRNA sense strand
ccugaugccacaugauuug

SEQ ID NO: 375519 - RNA, 19 nt, Homo sapiens
  misc_RNA (1)...(19): siRNA sense strand
ucccugcgguuucugaguu

SEQ ID NO: 375520 - RNA, 19 nt, Homo sapiens
  misc_RNA (1)...(19): siRNA sense strand
uagccaaacccaauauaag

SEQ ID NO: 375521 - RNA, 19 nt, Homo sapiens
  misc_RNA (1)...(19): siRNA sense strand
aaagaaggaggccaguaug

SEQ ID NO: 375522 - RNA, 19 nt, Homo sapiens
  misc_RNA (1)...(19): siRNA sense strand
guuagccaaacccaauaua

SEQ ID NO: 375523 - RNA, 19 nt, Homo sapiens
  misc_RNA (1)...(19): siRNA sense strand
gcaucugcaauguuaauca

SEQ ID NO: 375524 - RNA, 19 nt, Homo sapiens
  misc_RNA (1)...(19): siRNA sense strand
gauaugcccuugacuauaa

SEQ ID NO: 375525 - RNA, 19 nt, Homo sapiens
  misc_RNA (1)...(19): siRNA sense strand
gaugaucucucaacuuuaa

SEQ ID NO: 375526 - RNA, 19 nt, Homo sapiens
  misc_RNA (1)...(19): siRNA sense strand
ucaaagcacugaauagaaa

SEQ ID NO: 375527 - RNA, 19 nt, Homo sapiens
  misc_RNA (1)...(19): siRNA sense strand
ggacaggacugaacgucuu

SEQ ID NO: 375528 - RNA, 19 nt, Homo sapiens
  misc_RNA (1)...(19): siRNA sense strand
gcaaaacaaugcagacuuu

SEQ ID NO: 375529 - RNA, 19 nt, Homo sapiens
  misc_RNA (1)...(19): siRNA sense strand
cugaagagcuauuguaaug

SEQ ID NO: 375530 - RNA, 19 nt, Homo sapiens
  misc_RNA (1)...(19): siRNA sense strand
uugcugaccugcuggauua

SEQ ID NO: 375531 - RNA, 19 nt, Homo sapiens
  misc_RNA (1)...(19): siRNA sense strand
gauauaagccagacuuugu

SEQ ID NO: 375532 - RNA, 19 nt, Homo sapiens
  misc_RNA (1)...(19): siRNA sense strand
gaagagcuauuguaaugac

SEQ ID NO: 375533 - RNA, 19 nt, Homo sapiens
  misc_RNA (1)...(19): siRNA sense strand
gggaggccaucacauugua

SEQ ID NO: 375534 - RNA, 19 nt, Homo sapiens
  misc_RNA (1)...(19): siRNA sense strand
gcaguauaauccaaagaug

SEQ ID NO: 375535 - RNA, 19 nt, Homo sapiens
  misc_RNA (1)...(19): siRNA sense strand
caaguuuguuguaggauau

SEQ ID NO: 375536 - RNA, 19 nt, Homo sapiens
  misc_RNA (1)...(19): siRNA sense strand
agugauagauccauuccua

SEQ ID NO: 375537 - RNA, 19 nt, Homo sapiens
  misc_RNA (1)...(19): siRNA sense strand
gaaucauguuugugucauu

SEQ ID NO: 375538 - RNA, 19 nt, Homo sapiens
  misc_RNA (1)...(19): siRNA sense strand
ggauaugcccuugacuaua

SEQ ID NO: 375539 - RNA, 19 nt, Homo sapiens
  misc_RNA (1)...(19): siRNA sense strand
gagaugugaugaaggagau

SEQ ID NO: 375540 - RNA, 19 nt, Homo sapiens
  misc_RNA (1)...(19): siRNA sense strand
gccagacuuuguuggauuu

SEQ ID NO: 375541 - RNA, 19 nt, Homo sapiens
  misc_RNA (1)...(19): siRNA sense strand
ugaaauuccagacaaguuu

SEQ ID NO: 375542 - RNA, 19 nt, Homo sapiens
  misc_RNA (1)...(19): siRNA sense strand
caucaaagcacugaauaga

SEQ ID NO: 375543 - RNA, 19 nt, Homo sapiens
  misc_RNA (1)...(19): siRNA sense strand
gaaauuccagacaaguuug

SEQ ID NO: 375544 - RNA, 19 nt, Homo sapiens
  misc_RNA (1)...(19): siRNA sense strand
cacgaaguguuggauauaa

SEQ ID NO: 375545 - RNA, 19 nt, Homo sapiens
  misc_RNA (1)...(19): siRNA sense strand
gcccuugacuauaaugaau

SEQ ID NO: 375546 - RNA, 19 nt, Homo sapiens
  misc_RNA (1)...(19): siRNA sense strand
gacugaagagcuauuguaa

SEQ ID NO: 375547 - RNA, 19 nt, Homo sapiens
  misc_RNA (1)...(19): siRNA sense strand
ccacgaaguguuggauaua

SEQ ID NO: 375548 - RNA, 19 nt, Homo sapiens
  misc_RNA (1)...(19): siRNA sense strand
guuuauuccucauggacua

SEQ ID NO: 375549 - RNA, 19 nt, Homo sapiens
  misc_RNA (1)...(19): siRNA sense strand
ggauauaagccagacuuug

SEQ ID NO: 375550 - RNA, 19 nt, Homo sapiens
  misc_RNA (1)...(19): siRNA sense strand
agacugaagagcuauugua

SEQ ID NO: 375551 - RNA, 19 nt, Homo sapiens
  misc_RNA (1)...(19): siRNA sense strand
gaacgucuugcucgagaug

SEQ ID NO: 375552 - RNA, 19 nt, Homo sapiens
  misc_RNA (1)...(19): siRNA sense strand
agacuuuguuggauuugaa

SEQ ID NO: 375553 - RNA, 19 nt, Homo sapiens
  misc_RNA (1)...(19): siRNA sense strand
ccugcuggauuacaucaaa

SEQ ID NO: 375554 - RNA, 19 nt, Homo sapiens
  misc_RNA (1)...(19): siRNA sense strand
gauuagugaugaugaacca

SEQ ID NO: 375555 - RNA, 19 nt, Homo sapiens
  misc_RNA (1)...(19): siRNA sense strand
agacuuugcuuuccuuggu

SEQ ID NO: 375556 - RNA, 19 nt, Homo sapiens
  misc_RNA (1)...(19): siRNA sense strand
uaggauaugcccuugacua

SEQ ID NO: 375557 - RNA, 19 nt, Homo sapiens
  misc_RNA (1)...(19): siRNA sense strand
ucauuaugcugaggauuug

SEQ ID NO: 375558 - RNA, 19 nt, Homo sapiens
  misc_RNA (1)...(19): siRNA sense strand
ccucauggacuaauuaugg

SEQ ID NO: 375559 - RNA, 19 nt, Homo sapiens
  misc_RNA (1)...(19): siRNA sense strand
gaaaaggaccccacgaagu

SEQ ID NO: 375560 - RNA, 19 nt, Homo sapiens
  misc_RNA (1)...(19): siRNA sense strand
gguuaugaccuugauuuau

SEQ ID NO: 375561 - RNA, 19 nt, Homo sapiens
  misc_RNA (1)...(19): siRNA sense strand
cgugauuagugaugaugaa

SEQ ID NO: 375562 - RNA, 19 nt, Homo sapiens
  misc_RNA (1)...(19): siRNA sense strand
caaugcagacuuugcuuuc

SEQ ID NO: 375563 - RNA, 19 nt, Homo sapiens
  misc_RNA (1)...(19): siRNA sense strand
gacuguagauuuuaucaga

SEQ ID NO: 375564 - RNA, 19 nt, Homo sapiens
  misc_RNA (1)...(19): siRNA sense strand
gauccauuccuaugacugu

SEQ ID NO: 375565 - RNA, 19 nt, Homo sapiens
  misc_RNA (1)...(19): siRNA sense strand
cccacgaaguguuggauau

SEQ ID NO: 375566 - RNA, 19 nt, Homo sapiens
  misc_RNA (1)...(19): siRNA sense strand
gcccuggcgucgugauuag

SEQ ID NO: 375567 - RNA, 19 nt, Homo sapiens
  misc_RNA (1)...(19): siRNA sense strand
ucucaacuuuaacuggaaa

SEQ ID NO: 375568 - RNA, 19 nt, Homo sapiens
  misc_RNA (1)...(19): siRNA sense strand
gaaauagugauagauccau

SEQ ID NO: 375569 - RNA, 19 nt, Homo sapiens
  misc_RNA (1)...(19): siRNA sense strand
gaauacuucagggauuuga

SEQ ID NO: 375570 - RNA, 19 nt, Homo sapiens
  misc_RNA (1)...(19): siRNA sense strand
cucgagaugugaugaagga

SEQ ID NO: 375571 - RNA, 19 nt, Homo sapiens
  misc_RNA (1)...(19): siRNA sense strand
acaaugcagacuuugcuuu

SEQ ID NO: 375572 - RNA, 19 nt, Homo sapiens
  misc_RNA (1)...(19): siRNA sense strand
uacaucaaagcacugaaua

SEQ ID NO: 375573 - RNA, 19 nt, Homo sapiens
  misc_RNA (1)...(19): siRNA sense strand
ggcaguauaauccaaagau

SEQ ID NO: 375574 - RNA, 19 nt, Homo sapiens
  misc_RNA (1)...(19): siRNA sense strand
agccagacuuuguuggauu

SEQ ID NO: 375575 - RNA, 19 nt, Homo sapiens
  misc_RNA (1)...(19): siRNA sense strand
uaagccagacuuuguugga

SEQ ID NO: 375576 - RNA, 19 nt, Homo sapiens
  misc_RNA (1)...(19): siRNA sense strand
ggauuuggaaaggguguuu

SEQ ID NO: 375577 - RNA, 19 nt, Homo sapiens
  misc_RNA (1)...(19): siRNA sense strand
ccauuccuaugacuguaga

SEQ ID NO: 375578 - RNA, 19 nt, Homo sapiens
  misc_RNA (1)...(19): siRNA sense strand
uauaauugacacuggcaaa

SEQ ID NO: 375579 - RNA, 19 nt, Homo sapiens
  misc_RNA (1)...(19): siRNA sense strand
aguaauugguggagaugau

SEQ ID NO: 375580 - RNA, 19 nt, Homo sapiens
  misc_RNA (1)...(19): siRNA sense strand
gauuacaucaaagcacuga

SEQ ID NO: 375581 - RNA, 19 nt, Homo sapiens
  misc_RNA (1)...(19): siRNA sense strand
uuggaaaggguguuuauuc

SEQ ID NO: 375582 - RNA, 19 nt, Homo sapiens
  misc_RNA (1)...(19): siRNA sense strand
gauuuggaaaggguguuua

SEQ ID NO: 375583 - RNA, 19 nt, Homo sapiens
  misc_RNA (1)...(19): siRNA sense strand
auccaaagauggucaaggu

SEQ ID NO: 375584 - RNA, 19 nt, Homo sapiens
  misc_RNA (1)...(19): siRNA sense strand
uuacaucaaagcacugaau

SEQ ID NO: 375585 - RNA, 19 nt, Homo sapiens
  misc_RNA (1)...(19): siRNA sense strand
guuugugucauuagugaaa

SEQ ID NO: 375586 - RNA, 19 nt, Homo sapiens
  misc_RNA (1)...(19): siRNA sense strand
cagacuuuguuggauuuga

SEQ ID NO: 375587 - RNA, 19 nt, Homo sapiens
  misc_RNA (1)...(19): siRNA sense strand
uauaagccagacuuuguug

SEQ ID NO: 375588 - RNA, 19 nt, Homo sapiens
  misc_RNA (1)...(19): siRNA sense strand
ggacauaaaaguaauuggu

SEQ ID NO: 375589 - RNA, 19 nt, Homo sapiens
  misc_RNA (1)...(19): siRNA sense strand
caaagcacugaauagaaau

SEQ ID NO: 375590 - RNA, 19 nt, Homo sapiens
  misc_RNA (1)...(19): siRNA sense strand
caacaggggacauaaaagu

SEQ ID NO: 375591 - RNA, 19 nt, Homo sapiens
  misc_RNA (1)...(19): siRNA sense strand
gaaugucuugauuguggaa

SEQ ID NO: 375592 - RNA, 19 nt, Homo sapiens
  misc_RNA (1)...(19): siRNA sense strand
ugaagagcuauuguaauga

SEQ ID NO: 375593 - RNA, 19 nt, Homo sapiens
  misc_RNA (1)...(19): siRNA sense strand
gguguuuauuccucaugga

SEQ ID NO: 375594 - RNA, 19 nt, Homo sapiens
  misc_RNA (1)...(19): siRNA sense strand
aaaaguaauugguggagau

SEQ ID NO: 375595 - RNA, 19 nt, Homo sapiens
  misc_RNA (1)...(19): siRNA sense strand
ucaggcaguauaauccaaa

SEQ ID NO: 375596 - RNA, 19 nt, Homo sapiens
  misc_RNA (1)...(19): siRNA sense strand
ugaaucauguuugugucau

SEQ ID NO: 375597 - RNA, 19 nt, Homo sapiens
  misc_RNA (1)...(19): siRNA sense strand
aggauaugcccuugacuau

SEQ ID NO: 375598 - RNA, 19 nt, Homo sapiens
  misc_RNA (1)...(19): siRNA sense strand
aaaaggaccccacgaagug

SEQ ID NO: 375599 - RNA, 19 nt, Homo sapiens
  misc_RNA (1)...(19): siRNA sense strand
caagcuugcuggugaaaag

SEQ ID NO: 375600 - RNA, 19 nt, Homo sapiens
  misc_RNA (1)...(19): siRNA sense strand
gcuaauggguggaaucuaa

SEQ ID NO: 375601 - RNA, 19 nt, Homo sapiens
  misc_RNA (1)...(19): siRNA sense strand
ggaaaguucucuacaguca

SEQ ID NO: 375602 - RNA, 19 nt, Homo sapiens
  misc_RNA (1)...(19): siRNA sense strand
ggugauaccuuguacacuu

SEQ ID NO: 375603 - RNA, 19 nt, Homo sapiens
  misc_RNA (1)...(19): siRNA sense strand
ccaaagcuaugauaaccuu

SEQ ID NO: 375604 - RNA, 19 nt, Homo sapiens
  misc_RNA (1)...(19): siRNA sense strand
caaauaguguguucaccuu

SEQ ID NO: 375605 - RNA, 19 nt, Homo sapiens
  misc_RNA (1)...(19): siRNA sense strand
ggaccaagcugacuguacu

SEQ ID NO: 375606 - RNA, 19 nt, Homo sapiens
  misc_RNA (1)...(19): siRNA sense strand
acaaggaaaucauccagaa

SEQ ID NO: 375607 - RNA, 19 nt, Homo sapiens
  misc_RNA (1)...(19): siRNA sense strand
uaaaugaggcccugaacaa

SEQ ID NO: 375608 - RNA, 19 nt, Homo sapiens
  misc_RNA (1)...(19): siRNA sense strand
ccacaccgccuguaucauu

SEQ ID NO: 375609 - RNA, 19 nt, Homo sapiens
  misc_RNA (1)...(19): siRNA sense strand
agaaggaacugaaggagau

SEQ ID NO: 375610 - RNA, 19 nt, Homo sapiens
  misc_RNA (1)...(19): siRNA sense strand
caagaaggcucagcgagau

SEQ ID NO: 375611 - RNA, 19 nt, Homo sapiens
  misc_RNA (1)...(19): siRNA sense strand
agcgagaucuggcguauaa

SEQ ID NO: 375612 - RNA, 19 nt, Homo sapiens
  misc_RNA (1)...(19): siRNA sense strand
aaggagacauucuggauga

SEQ ID NO: 375613 - RNA, 19 nt, Homo sapiens
  misc_RNA (1)...(19): siRNA sense strand
ggaggaagccaagcagaaa

SEQ ID NO: 375614 - RNA, 19 nt, Homo sapiens
  misc_RNA (1)...(19): siRNA sense strand
gcguuaagacccacauaua

SEQ ID NO: 375615 - RNA, 19 nt, Homo sapiens
  misc_RNA (1)...(19): siRNA sense strand
ggcuggagcugccuuguga

SEQ ID NO: 375616 - RNA, 19 nt, Homo sapiens
  misc_RNA (1)...(19): siRNA sense strand
caucaugaaugucaaugug

SEQ ID NO: 375617 - RNA, 19 nt, Homo sapiens
  misc_RNA (1)...(19): siRNA sense strand
agauggagccuuccuuuaa

SEQ ID NO: 375618 - RNA, 19 nt, Homo sapiens
  misc_RNA (1)...(19): siRNA sense strand
guacccagcuacuguugga

SEQ ID NO: 375619 - RNA, 19 nt, Homo sapiens
  misc_RNA (1)...(19): siRNA sense strand
uuaauuacauccugagcaa

SEQ ID NO: 375620 - RNA, 19 nt, Homo sapiens
  misc_RNA (1)...(19): siRNA sense strand
cuuguacacuugugcguua

SEQ ID NO: 375621 - RNA, 19 nt, Homo sapiens
  misc_RNA (1)...(19): siRNA sense strand
ccagaacggccacgaagaa

SEQ ID NO: 375622 - RNA, 19 nt, Homo sapiens
  misc_RNA (1)...(19): siRNA sense strand
ggucaauucuauuacaucu

SEQ ID NO: 375623 - RNA, 19 nt, Homo sapiens
  misc_RNA (1)...(19): siRNA sense strand
gggauccugucaaguguug

SEQ ID NO: 375624 - RNA, 19 nt, Homo sapiens
  misc_RNA (1)...(19): siRNA sense strand
uguccgaggucaauucuau

SEQ ID NO: 375625 - RNA, 19 nt, Homo sapiens
  misc_RNA (1)...(19): siRNA sense strand
gauggagccuuccuuuaac

SEQ ID NO: 375626 - RNA, 19 nt, Homo sapiens
  misc_RNA (1)...(19): siRNA sense strand
cgaggucaauucuauuaca

SEQ ID NO: 375627 - RNA, 19 nt, Homo sapiens
  misc_RNA (1)...(19): siRNA sense strand
ucaugaaugucaaugugaa

SEQ ID NO: 375628 - RNA, 19 nt, Homo sapiens
  misc_RNA (1)...(19): siRNA sense strand
ccaauuuacuccuaucaac

SEQ ID NO: 375629 - RNA, 19 nt, Homo sapiens
  misc_RNA (1)...(19): siRNA sense strand
cagauggagccuuccuuua

SEQ ID NO: 375630 - RNA, 19 nt, Homo sapiens
  misc_RNA (1)...(19): siRNA sense strand
gaacggccacgaagaagag

SEQ ID NO: 375631 - RNA, 19 nt, Homo sapiens
  misc_RNA (1)...(19): siRNA sense strand
ugugaaagguacccagcua

SEQ ID NO: 375632 - RNA, 19 nt, Homo sapiens
  misc_RNA (1)...(19): siRNA sense strand
ggaugagccauuccugaaa

SEQ ID NO: 375633 - RNA, 19 nt, Homo sapiens
  misc_RNA (1)...(19): siRNA sense strand
ccacacagucacauuauca

SEQ ID NO: 375634 - RNA, 19 nt, Homo sapiens
  misc_RNA (1)...(19): siRNA sense strand
gugauaccuuguacacuug

SEQ ID NO: 375635 - RNA, 19 nt, Homo sapiens
  misc_RNA (1)...(19): siRNA sense strand
gaaugucaaugugaaaggu

SEQ ID NO: 375636 - RNA, 19 nt, Homo sapiens
  misc_RNA (1)...(19): siRNA sense strand
guacacuugugcguuaaga

SEQ ID NO: 375637 - RNA, 19 nt, Homo sapiens
  misc_RNA (1)...(19): siRNA sense strand
ccagauggagccuuccuuu

SEQ ID NO: 375638 - RNA, 19 nt, Homo sapiens
  misc_RNA (1)...(19): siRNA sense strand
gaggucaauucuauuacau

SEQ ID NO: 375639 - RNA, 19 nt, Homo sapiens
  misc_RNA (1)...(19): siRNA sense strand
acaaugggauccugucaag

SEQ ID NO: 375640 - RNA, 19 nt, Homo sapiens
  misc_RNA (1)...(19): siRNA sense strand
gaugagccauuccugaaaa

SEQ ID NO: 375641 - RNA, 19 nt, Homo sapiens
  misc_RNA (1)...(19): siRNA sense strand
gaggaucguccgccuguug

SEQ ID NO: 375642 - RNA, 19 nt, Homo sapiens
  misc_RNA (1)...(19): siRNA sense strand
gaugacacgccucaccaaa

SEQ ID NO: 375643 - RNA, 19 nt, Homo sapiens
  misc_RNA (1)...(19): siRNA sense strand
guuaagacccacauauauc

SEQ ID NO: 375644 - RNA, 19 nt, Homo sapiens
  misc_RNA (1)...(19): siRNA sense strand
gggaggaagccaagcagaa

SEQ ID NO: 375645 - RNA, 19 nt, Homo sapiens
  misc_RNA (1)...(19): siRNA sense strand
ugucaaguguuggaaaguu

SEQ ID NO: 375646 - RNA, 19 nt, Homo sapiens
  misc_RNA (1)...(19): siRNA sense strand
gaaagguacccagcuacug

SEQ ID NO: 375647 - RNA, 19 nt, Homo sapiens
  misc_RNA (1)...(19): siRNA sense strand
gcacaaggagacccugaag

SEQ ID NO: 375648 - RNA, 19 nt, Homo sapiens
  misc_RNA (1)...(19): siRNA sense strand
ugacacgccucaccaaagc

SEQ ID NO: 375649 - RNA, 19 nt, Homo sapiens
  misc_RNA (1)...(19): siRNA sense strand
cguuaagacccacauauau

SEQ ID NO: 375650 - RNA, 19 nt, Homo sapiens
  misc_RNA (1)...(19): siRNA sense strand
ggaagagaaggaacugaag

SEQ ID NO: 375651 - RNA, 19 nt, Homo sapiens
  misc_RNA (1)...(19): siRNA sense strand
ggaggcccauuccuuucug

SEQ ID NO: 375652 - RNA, 19 nt, Homo sapiens
  misc_RNA (1)...(19): siRNA sense strand
acaaggagacccugaaguc

SEQ ID NO: 375653 - RNA, 19 nt, Homo sapiens
  misc_RNA (1)...(19): siRNA sense strand
gaacaggaccaagcugacu

SEQ ID NO: 375654 - RNA, 19 nt, Homo sapiens
  misc_RNA (1)...(19): siRNA sense strand
aaaguucucuacagucaac

SEQ ID NO: 375655 - RNA, 19 nt, Homo sapiens
  misc_RNA (1)...(19): siRNA sense strand
aaagguacccagcuacugu

SEQ ID NO: 375656 - RNA, 19 nt, Homo sapiens
  misc_RNA (1)...(19): siRNA sense strand
cuucagaccagaauugaga

SEQ ID NO: 375657 - RNA, 19 nt, Homo sapiens
  misc_RNA (1)...(19): siRNA sense strand
ccgccacacagucacauua

SEQ ID NO: 375658 - RNA, 19 nt, Homo sapiens
  misc_RNA (1)...(19): siRNA sense strand
gaaaguucucuacagucaa

SEQ ID NO: 375659 - RNA, 19 nt, Homo sapiens
  misc_RNA (1)...(19): siRNA sense strand
ugaaggagacauucuggau

SEQ ID NO: 375660 - RNA, 19 nt, Homo sapiens
  misc_RNA (1)...(19): siRNA sense strand
cacaccgccuguaucauug

SEQ ID NO: 375661 - RNA, 19 nt, Homo sapiens
  misc_RNA (1)...(19): siRNA sense strand
gucaaguguuggaaaguuc

SEQ ID NO: 375662 - RNA, 19 nt, Homo sapiens
  misc_RNA (1)...(19): siRNA sense strand
caacaaugggauccuguca

SEQ ID NO: 375663 - RNA, 19 nt, Homo sapiens
  misc_RNA (1)...(19): siRNA sense strand
uaagacccacauauaucua

SEQ ID NO: 375664 - RNA, 19 nt, Homo sapiens
  misc_RNA (1)...(19): siRNA sense strand
ucagcgagaucuggcguau

SEQ ID NO: 375665 - RNA, 19 nt, Homo sapiens
  misc_RNA (1)...(19): siRNA sense strand
uccgaggucaauucuauua

SEQ ID NO: 375666 - RNA, 19 nt, Homo sapiens
  misc_RNA (1)...(19): siRNA sense strand
guuggaaaguucucuacag

SEQ ID NO: 375667 - RNA, 19 nt, Homo sapiens
  misc_RNA (1)...(19): siRNA sense strand
gucuucaucuacaccagua

SEQ ID NO: 375668 - RNA, 19 nt, Homo sapiens
  misc_RNA (1)...(19): siRNA sense strand
guguucaccuucucuuaca

SEQ ID NO: 375669 - RNA, 19 nt, Homo sapiens
  misc_RNA (1)...(19): siRNA sense strand
cuacucagcccaauuuacu

SEQ ID NO: 375670 - RNA, 19 nt, Homo sapiens
  misc_RNA (1)...(19): siRNA sense strand
guauaaaugaggcccugaa

SEQ ID NO: 375671 - RNA, 19 nt, Homo sapiens
  misc_RNA (1)...(19): siRNA sense strand
gugccagucuucaucuaca

SEQ ID NO: 375672 - RNA, 19 nt, Homo sapiens
  misc_RNA (1)...(19): siRNA sense strand
ucagcccaauuuacuccua

SEQ ID NO: 375673 - RNA, 19 nt, Homo sapiens
  misc_RNA (1)...(19): siRNA sense strand
ccucaccaaagcuaugaua

SEQ ID NO: 375674 - RNA, 19 nt, Homo sapiens
  misc_RNA (1)...(19): siRNA sense strand
aaugggauccugucaagug

SEQ ID NO: 375675 - RNA, 19 nt, Homo sapiens
  misc_RNA (1)...(19): siRNA sense strand
aggagacccugaaguccaa

SEQ ID NO: 375676 - RNA, 19 nt, Homo sapiens
  misc_RNA (1)...(19): siRNA sense strand
cagcccaauuuacuccuau

SEQ ID NO: 375677 - RNA, 19 nt, Homo sapiens
  misc_RNA (1)...(19): siRNA sense strand
uaacccugauguacuggau

SEQ ID NO: 375678 - RNA, 19 nt, Homo sapiens
  misc_RNA (1)...(19): siRNA sense strand
uggaagagaaggaacugaa

SEQ ID NO: 375679 - RNA, 19 nt, Homo sapiens
  misc_RNA (1)...(19): siRNA sense strand
caccaaagcuaugauaacc

SEQ ID NO: 375680 - RNA, 19 nt, Homo sapiens
  misc_RNA (1)...(19): siRNA sense strand
ccaaguguccgaggucaau

SEQ ID NO: 375681 - RNA, 19 nt, Homo sapiens
  misc_RNA (1)...(19): siRNA sense strand
uuggaaaguucucuacagu

SEQ ID NO: 375682 - RNA, 19 nt, Homo sapiens
  misc_RNA (1)...(19): siRNA sense strand
acacagucacauuaucaaa

SEQ ID NO: 375683 - RNA, 19 nt, Homo sapiens
  misc_RNA (1)...(19): siRNA sense strand
uggaugagccauuccugaa

SEQ ID NO: 375684 - RNA, 19 nt, Homo sapiens
  misc_RNA (1)...(19): siRNA sense strand
ggccuucagaccagaauug

SEQ ID NO: 375685 - RNA, 19 nt, Homo sapiens
  misc_RNA (1)...(19): siRNA sense strand
gccacacagucacauuauc

SEQ ID NO: 375686 - RNA, 19 nt, Homo sapiens
  misc_RNA (1)...(19): siRNA sense strand
augaggcccugaacaacaa

SEQ ID NO: 375687 - RNA, 19 nt, Homo sapiens
  misc_RNA (1)...(19): siRNA sense strand
cuaauggguggaaucuaaa

SEQ ID NO: 375688 - RNA, 19 nt, Homo sapiens
  misc_RNA (1)...(19): siRNA sense strand
cacagucacauuaucaaau

SEQ ID NO: 375689 - RNA, 19 nt, Homo sapiens
  misc_RNA (1)...(19): siRNA sense strand
cuuuaacccugauguacug

SEQ ID NO: 375690 - RNA, 19 nt, Homo sapiens
  misc_RNA (1)...(19): siRNA sense strand
uuaagacccacauauaucu

SEQ ID NO: 375691 - RNA, 19 nt, Homo sapiens
  misc_RNA (1)...(19): siRNA sense strand
ugagagaggaauuuucuaa

SEQ ID NO: 375692 - RNA, 19 nt, Homo sapiens
  misc_RNA (1)...(19): siRNA sense strand
cauccugagcaaagaguuu

SEQ ID NO: 375693 - RNA, 19 nt, Homo sapiens
  misc_RNA (1)...(19): siRNA sense strand
caaagcuaugauaaccuua

SEQ ID NO: 375694 - RNA, 19 nt, Homo sapiens
  misc_RNA (1)...(19): siRNA sense strand
guacuugaaggagacauuc

SEQ ID NO: 375695 - RNA, 19 nt, Homo sapiens
  misc_RNA (1)...(19): siRNA sense strand
cguauaagccacucuacag

SEQ ID NO: 375696 - RNA, 19 nt, Homo sapiens
  misc_RNA (1)...(19): siRNA sense strand
acccugauguacuggauug

SEQ ID NO: 375697 - RNA, 19 nt, Homo sapiens
  misc_RNA (1)...(19): siRNA sense strand
caugaaugucaaugugaaa

SEQ ID NO: 375698 - RNA, 19 nt, Homo sapiens
  misc_RNA (1)...(19): siRNA sense strand
guguguucaccuucucuua

SEQ ID NO: 375699 - RNA, 19 nt, Homo sapiens
  misc_RNA (1)...(19): siRNA sense strand
gccuguugguggaagagaa

SEQ ID NO: 375700 - RNA, 19 nt, Homo sapiens
  misc_RNA (1)...(19): siRNA sense strand
ccaaggagcuggucgauua

SEQ ID NO: 375701 - RNA, 19 nt, Homo sapiens
  misc_RNA (1)...(19): siRNA sense strand
ggaaggagguggaugguua

SEQ ID NO: 375702 - RNA, 19 nt, Homo sapiens
  misc_RNA (1)...(19): siRNA sense strand
gagcaggccucgcuguuug

SEQ ID NO: 375703 - RNA, 19 nt, Homo sapiens
  misc_RNA (1)...(19): siRNA sense strand
gaaggugaauuggauggua

SEQ ID NO: 375704 - RNA, 19 nt, Homo sapiens
  misc_RNA (1)...(19): siRNA sense strand
gcucggacuuccaauauga

SEQ ID NO: 375705 - RNA, 19 nt, Homo sapiens
  misc_RNA (1)...(19): siRNA sense strand
gcccagcgaugugguaaua

SEQ ID NO: 375706 - RNA, 19 nt, Homo sapiens
  misc_RNA (1)...(19): siRNA sense strand
acacaccgcuggagacaaa

SEQ ID NO: 375707 - RNA, 19 nt, Homo sapiens
  misc_RNA (1)...(19): siRNA sense strand
gaacaugaaucagcaacuc

SEQ ID NO: 375708 - RNA, 19 nt, Homo sapiens
  misc_RNA (1)...(19): siRNA sense strand
ggaaacuacuauccaguca

SEQ ID NO: 375709 - RNA, 19 nt, Homo sapiens
  misc_RNA (1)...(19): siRNA sense strand
caguauaggugacaacgaa

SEQ ID NO: 375710 - RNA, 19 nt, Homo sapiens
  misc_RNA (1)...(19): siRNA sense strand
cgacccaccuggaaacuga

SEQ ID NO: 375711 - RNA, 19 nt, Homo sapiens
  misc_RNA (1)...(19): siRNA sense strand
gcuggucgauuacuuccua

SEQ ID NO: 375712 - RNA, 19 nt, Homo sapiens
  misc_RNA (1)...(19): siRNA sense strand
gcucagaggcuucaaagau

SEQ ID NO: 375713 - RNA, 19 nt, Homo sapiens
  misc_RNA (1)...(19): siRNA sense strand
ccagcgaugugguaauauu

SEQ ID NO: 375714 - RNA, 19 nt, Homo sapiens
  misc_RNA (1)...(19): siRNA sense strand
gcacuuuccuggccucagu

SEQ ID NO: 375715 - RNA, 19 nt, Homo sapiens
  misc_RNA (1)...(19): siRNA sense strand
gcacauccgggcaacguuu

SEQ ID NO: 375716 - RNA, 19 nt, Homo sapiens
  misc_RNA (1)...(19): siRNA sense strand
ggagaggauuccggacgua

SEQ ID NO: 375717 - RNA, 19 nt, Homo sapiens
  misc_RNA (1)...(19): siRNA sense strand
gccaacaugugguucaaga

SEQ ID NO: 375718 - RNA, 19 nt, Homo sapiens
  misc_RNA (1)...(19): siRNA sense strand
gcuuccaggucaucguuua

SEQ ID NO: 375719 - RNA, 19 nt, Homo sapiens
  misc_RNA (1)...(19): siRNA sense strand
uaaaugcgcagcaggcaaa

SEQ ID NO: 375720 - RNA, 19 nt, Homo sapiens
  misc_RNA (1)...(19): siRNA sense strand
gaaacaugacgacuucuuc

SEQ ID NO: 375721 - RNA, 19 nt, Homo sapiens
  misc_RNA (1)...(19): siRNA sense strand
ucaaagaucacuucaccuu

SEQ ID NO: 375722 - RNA, 19 nt, Homo sapiens
  misc_RNA (1)...(19): siRNA sense strand
guacaacgccaguauaggu

SEQ ID NO: 375723 - RNA, 19 nt, Homo sapiens
  misc_RNA (1)...(19): siRNA sense strand
ugauggagauuaugaacau

SEQ ID NO: 375724 - RNA, 19 nt, Homo sapiens
  misc_RNA (1)...(19): siRNA sense strand
gcugggugaugaacgauga

SEQ ID NO: 375725 - RNA, 19 nt, Homo sapiens
  misc_RNA (1)...(19): siRNA sense strand
ccauggaaauccgcacuuu

SEQ ID NO: 375726 - RNA, 19 nt, Homo sapiens
  misc_RNA (1)...(19): siRNA sense strand
gcaccaguuugccguagga

SEQ ID NO: 375727 - RNA, 19 nt, Homo sapiens
  misc_RNA (1)...(19): siRNA sense strand
guucuggaccgguuacuuu

SEQ ID NO: 375728 - RNA, 19 nt, Homo sapiens
  misc_RNA (1)...(19): siRNA sense strand
gcugggaugugcugugugu

SEQ ID NO: 375729 - RNA, 19 nt, Homo sapiens
  misc_RNA (1)...(19): siRNA sense strand
gaaacaugcagcugacugu

SEQ ID NO: 375730 - RNA, 19 nt, Homo sapiens
  misc_RNA (1)...(19): siRNA sense strand
ggacuuccaauaugagaau

SEQ ID NO: 375731 - RNA, 19 nt, Homo sapiens
  misc_RNA (1)...(19): siRNA sense strand
ggagcaggccucgcuguuu

SEQ ID NO: 375732 - RNA, 19 nt, Homo sapiens
  misc_RNA (1)...(19): siRNA sense strand
ucgauuacuuccuaaaugu

SEQ ID NO: 375733 - RNA, 19 nt, Homo sapiens
  misc_RNA (1)...(19): siRNA sense strand
gucgauuacuuccuaaaug

SEQ ID NO: 375734 - RNA, 19 nt, Homo sapiens
  misc_RNA (1)...(19): siRNA sense strand
gcgagguucuucugagcaa

SEQ ID NO: 375735 - RNA, 19 nt, Homo sapiens
  misc_RNA (1)...(19): siRNA sense strand
gcacguggccaacgacuac

SEQ ID NO: 375736 - RNA, 19 nt, Homo sapiens
  misc_RNA (1)...(19): siRNA sense strand
ugcagaagcuggagaugga

SEQ ID NO: 375737 - RNA, 19 nt, Homo sapiens
  misc_RNA (1)...(19): siRNA sense strand
cccguuaccuugaacuuga

SEQ ID NO: 375738 - RNA, 19 nt, Homo sapiens
  misc_RNA (1)...(19): siRNA sense strand
gcgcuuggagcaccaguuu

SEQ ID NO: 375739 - RNA, 19 nt, Homo sapiens
  misc_RNA (1)...(19): siRNA sense strand
ggacgauggacgcggagua

SEQ ID NO: 375740 - RNA, 19 nt, Homo sapiens
  misc_RNA (1)...(19): siRNA sense strand
ggacagugcccagcgaugu

SEQ ID NO: 375741 - RNA, 19 nt, Homo sapiens
  misc_RNA (1)...(19): siRNA sense strand
ucagaggcuucaaagauca

SEQ ID NO: 375742 - RNA, 19 nt, Homo sapiens
  misc_RNA (1)...(19): siRNA sense strand
gaagcaguguccauguucu

SEQ ID NO: 375743 - RNA, 19 nt, Homo sapiens
  misc_RNA (1)...(19): siRNA sense strand
gcucccgccucucugcuuu

SEQ ID NO: 375744 - RNA, 19 nt, Homo sapiens
  misc_RNA (1)...(19): siRNA sense strand
ggaagcaguguccauguuc

SEQ ID NO: 375745 - RNA, 19 nt, Homo sapiens
  misc_RNA (1)...(19): siRNA sense strand
ccagucaacacccggauuu

SEQ ID NO: 375746 - RNA, 19 nt, Homo sapiens
  misc_RNA (1)...(19): siRNA sense strand
cuucagcaccuauucagua

SEQ ID NO: 375747 - RNA, 19 nt, Homo sapiens
  misc_RNA (1)...(19): siRNA sense strand
ggcggaaggugaauuggau

SEQ ID NO: 375748 - RNA, 19 nt, Homo sapiens
  misc_RNA (1)...(19): siRNA sense strand
gcuacgagcgccucagcua

SEQ ID NO: 375749 - RNA, 19 nt, Homo sapiens
  misc_RNA (1)...(19): siRNA sense strand
ccacccgucgcuucauuua

SEQ ID NO: 375750 - RNA, 19 nt, Homo sapiens
  misc_RNA (1)...(19): siRNA sense strand
aaacuacuauccagucaac

SEQ ID NO: 375751 - RNA, 19 nt, Homo sapiens
  misc_RNA (1)...(19): siRNA sense strand
gacaaaugccacacaggaa

SEQ ID NO: 375752 - RNA, 19 nt, Homo sapiens
  misc_RNA (1)...(19): siRNA sense strand
gaccuguucuccaccuuca

SEQ ID NO: 375753 - RNA, 19 nt, Homo sapiens
  misc_RNA (1)...(19): siRNA sense strand
ggacgcuucuacacagaca

SEQ ID NO: 375754 - RNA, 19 nt, Homo sapiens
  misc_RNA (1)...(19): siRNA sense strand
gggcucggacuuccaauau

SEQ ID NO: 375755 - RNA, 19 nt, Homo sapiens
  misc_RNA (1)...(19): siRNA sense strand
ccucuucacuggugugcuu

SEQ ID NO: 375756 - RNA, 19 nt, Homo sapiens
  misc_RNA (1)...(19): siRNA sense strand
ccuggucagugaaacauga

SEQ ID NO: 375757 - RNA, 19 nt, Homo sapiens
  misc_RNA (1)...(19): siRNA sense strand
ucaaaaccguggaccagua

SEQ ID NO: 375758 - RNA, 19 nt, Homo sapiens
  misc_RNA (1)...(19): siRNA sense strand
agugaaacaugacgacuuc

SEQ ID NO: 375759 - RNA, 19 nt, Homo sapiens
  misc_RNA (1)...(19): siRNA sense strand
gccaacagcuaaacaucag

SEQ ID NO: 375760 - RNA, 19 nt, Homo sapiens
  misc_RNA (1)...(19): siRNA sense strand
cagaaaccgcugccuguga

SEQ ID NO: 375761 - RNA, 19 nt, Homo sapiens
  misc_RNA (1)...(19): siRNA sense strand
aaugguggcugggugauga

SEQ ID NO: 375762 - RNA, 19 nt, Homo sapiens
  misc_RNA (1)...(19): siRNA sense strand
ggccucaggugccuacauc

SEQ ID NO: 375763 - RNA, 19 nt, Homo sapiens
  misc_RNA (1)...(19): siRNA sense strand
ggaggacacauuuggcaau

SEQ ID NO: 375764 - RNA, 19 nt, Homo sapiens
  misc_RNA (1)...(19): siRNA sense strand
gaccaguacuuuuauggaa

SEQ ID NO: 375765 - RNA, 19 nt, Homo sapiens
  misc_RNA (1)...(19): siRNA sense strand
ggcagcagccugagagaug

SEQ ID NO: 375766 - RNA, 19 nt, Homo sapiens
  misc_RNA (1)...(19): siRNA sense strand
gaaacuacuauccagucaa

SEQ ID NO: 375767 - RNA, 19 nt, Homo sapiens
  misc_RNA (1)...(19): siRNA sense strand
uccaggucaucguuuauaa

SEQ ID NO: 375768 - RNA, 19 nt, Homo sapiens
  misc_RNA (1)...(19): siRNA sense strand
gggcuucgacggcuucuuc

SEQ ID NO: 375769 - RNA, 19 nt, Homo sapiens
  misc_RNA (1)...(19): siRNA sense strand
gagaggauuccggacguaa

SEQ ID NO: 375770 - RNA, 19 nt, Homo sapiens
  misc_RNA (1)...(19): siRNA sense strand
uaucggagccacuaaugga

SEQ ID NO: 375771 - RNA, 19 nt, Homo sapiens
  misc_RNA (1)...(19): siRNA sense strand
ucaggugccuacaucuuca

SEQ ID NO: 375772 - RNA, 19 nt, Homo sapiens
  misc_RNA (1)...(19): siRNA sense strand
gacgugggcuggcucaaaa

SEQ ID NO: 375773 - RNA, 19 nt, Homo sapiens
  misc_RNA (1)...(19): siRNA sense strand
gagaggaggcgggauuauc

SEQ ID NO: 375774 - RNA, 19 nt, Homo sapiens
  misc_RNA (1)...(19): siRNA sense strand
guuacaacccgccaaggaa

SEQ ID NO: 375775 - RNA, 19 nt, Homo sapiens
  misc_RNA (1)...(19): siRNA sense strand
cagcgaugugguaauauuu

SEQ ID NO: 375776 - RNA, 19 nt, Homo sapiens
  misc_RNA (1)...(19): siRNA sense strand
aggaagcaguguccauguu

SEQ ID NO: 375777 - RNA, 19 nt, Homo sapiens
  misc_RNA (1)...(19): siRNA sense strand
ggagcuggucgauuacuuc

SEQ ID NO: 375778 - RNA, 19 nt, Homo sapiens
  misc_RNA (1)...(19): siRNA sense strand
gaaggagguggaugguuag

SEQ ID NO: 375779 - RNA, 19 nt, Homo sapiens
  misc_RNA (1)...(19): siRNA sense strand
gcaguguccauguucucua

SEQ ID NO: 375780 - RNA, 19 nt, Homo sapiens
  misc_RNA (1)...(19): siRNA sense strand
ggaagucgugcgagaccuu

SEQ ID NO: 375781 - RNA, 19 nt, Homo sapiens
  misc_RNA (1)...(19): siRNA sense strand
cuucgacggcuucuucuuu

SEQ ID NO: 375782 - RNA, 19 nt, Homo sapiens
  misc_RNA (1)...(19): siRNA sense strand
accgaaggcugcugaagga

SEQ ID NO: 375783 - RNA, 19 nt, Homo sapiens
  misc_RNA (1)...(19): siRNA sense strand
cagcuaaacaucagcaucu

SEQ ID NO: 375784 - RNA, 19 nt, Homo sapiens
  misc_RNA (1)...(19): siRNA sense strand
cucagaggcuucaaagauc

SEQ ID NO: 375785 - RNA, 19 nt, Homo sapiens
  misc_RNA (1)...(19): siRNA sense strand
ggucgauuacuuccuaaau

SEQ ID NO: 375786 - RNA, 19 nt, Homo sapiens
  misc_RNA (1)...(19): siRNA sense strand
caacuccugcugccuguuc

SEQ ID NO: 375787 - RNA, 19 nt, Homo sapiens
  misc_RNA (1)...(19): siRNA sense strand
gugcugggaugugcugugu

SEQ ID NO: 375788 - RNA, 19 nt, Homo sapiens
  misc_RNA (1)...(19): siRNA sense strand
uggagauuaugaacaugaa

SEQ ID NO: 375789 - RNA, 19 nt, Homo sapiens
  misc_RNA (1)...(19): siRNA sense strand
ccacagugcagccgaacau

SEQ ID NO: 375790 - RNA, 19 nt, Homo sapiens
  misc_RNA (1)...(19): siRNA sense strand
cggagccacuaauggagaa

SEQ ID NO: 375791 - RNA, 19 nt, Homo sapiens
  misc_RNA (1)...(19): siRNA sense strand
ucauuuacguggagauugc

SEQ ID NO: 375792 - RNA, 19 nt, Homo sapiens
  misc_RNA (1)...(19): siRNA sense strand
gacaaagggacgcuucuac

SEQ ID NO: 375793 - RNA, 19 nt, Homo sapiens
  misc_RNA (1)...(19): siRNA sense strand
ggcuguugauggagauuau

SEQ ID NO: 375794 - RNA, 19 nt, Homo sapiens
  misc_RNA (1)...(19): siRNA sense strand
caggucaucguuuauaauc

SEQ ID NO: 375795 - RNA, 19 nt, Homo sapiens
  misc_RNA (1)...(19): siRNA sense strand
ugaaacaugacgacuucuu

SEQ ID NO: 375796 - RNA, 19 nt, Homo sapiens
  misc_RNA (1)...(19): siRNA sense strand
gauggagauuaugaacaug

SEQ ID NO: 375797 - RNA, 19 nt, Homo sapiens
  misc_RNA (1)...(19): siRNA sense strand
ggagaggaggcgggauuau

SEQ ID NO: 375798 - RNA, 19 nt, Homo sapiens
  misc_RNA (1)...(19): siRNA sense strand
aaagggacgcuucuacaca

SEQ ID NO: 375799 - RNA, 19 nt, Homo sapiens
  misc_RNA (1)...(19): siRNA sense strand
acaaagggacgcuucuaca

SEQ ID NO: 375800 - RNA, 19 nt, Homo sapiens
  misc_RNA (1)...(19): siRNA sense strand
caaccgaucugauguguuu

SEQ ID NO: 375801 - RNA, 19 nt, Homo sapiens
  misc_RNA (1)...(19): siRNA sense strand
gcacagaccacaucuaugg

SEQ ID NO: 375802 - RNA, 19 nt, Homo sapiens
  misc_RNA (1)...(19): siRNA sense strand
gagcuggccucccuguuga

SEQ ID NO: 375803 - RNA, 19 nt, Homo sapiens
  misc_RNA (1)...(19): siRNA sense strand
gagcaggccuucguucuca

SEQ ID NO: 375804 - RNA, 19 nt, Homo sapiens
  misc_RNA (1)...(19): siRNA sense strand
ucacgaagaugggcaguug

SEQ ID NO: 375805 - RNA, 19 nt, Homo sapiens
  misc_RNA (1)...(19): siRNA sense strand
ugcgagagcugaucaaaga

SEQ ID NO: 375806 - RNA, 19 nt, Homo sapiens
  misc_RNA (1)...(19): siRNA sense strand
cagaaugugugcacgcaaa

SEQ ID NO: 375807 - RNA, 19 nt, Homo sapiens
  misc_RNA (1)...(19): siRNA sense strand
aggcagagaucaaugaguu

SEQ ID NO: 375808 - RNA, 19 nt, Homo sapiens
  misc_RNA (1)...(19): siRNA sense strand
agaacgaaguggucuauuc

SEQ ID NO: 375809 - RNA, 19 nt, Homo sapiens
  misc_RNA (1)...(19): siRNA sense strand
agagaucaaugaguucuuu

SEQ ID NO: 375810 - RNA, 19 nt, Homo sapiens
  misc_RNA (1)...(19): siRNA sense strand
gaacggaggcccagaagcu

SEQ ID NO: 375811 - RNA, 19 nt, Homo sapiens
  misc_RNA (1)...(19): siRNA sense strand
gagagcugaucaaagaguu

SEQ ID NO: 375812 - RNA, 19 nt, Homo sapiens
  misc_RNA (1)...(19): siRNA sense strand
gcuaccagcugaccuugug

SEQ ID NO: 375813 - RNA, 19 nt, Homo sapiens
  misc_RNA (1)...(19): siRNA sense strand
guaccgcuauuaccagaau

SEQ ID NO: 375814 - RNA, 19 nt, Homo sapiens
  misc_RNA (1)...(19): siRNA sense strand
gggcaucccuuuccaacag

SEQ ID NO: 375815 - RNA, 19 nt, Homo sapiens
  misc_RNA (1)...(19): siRNA sense strand
gagcagcggcagucaguga

SEQ ID NO: 375816 - RNA, 19 nt, Homo sapiens
  misc_RNA (1)...(19): siRNA sense strand
gcaacauccuggacuaugc

SEQ ID NO: 375817 - RNA, 19 nt, Homo sapiens
  misc_RNA (1)...(19): siRNA sense strand
ggccaugacugcaguggau

SEQ ID NO: 375818 - RNA, 19 nt, Homo sapiens
  misc_RNA (1)...(19): siRNA sense strand
caacagcaccaguuugaca

SEQ ID NO: 375819 - RNA, 19 nt, Homo sapiens
  misc_RNA (1)...(19): siRNA sense strand
gggccgacacuuucaauga

SEQ ID NO: 375820 - RNA, 19 nt, Homo sapiens
  misc_RNA (1)...(19): siRNA sense strand
caacagguaccgcuauuac

SEQ ID NO: 375821 - RNA, 19 nt, Homo sapiens
  misc_RNA (1)...(19): siRNA sense strand
gcgccuaccugagcaagga

SEQ ID NO: 375822 - RNA, 19 nt, Homo sapiens
  misc_RNA (1)...(19): siRNA sense strand
gagaucaaugaguucuuua

SEQ ID NO: 375823 - RNA, 19 nt, Homo sapiens
  misc_RNA (1)...(19): siRNA sense strand
ggccgucccuacagaugaa

SEQ ID NO: 375824 - RNA, 19 nt, Homo sapiens
  misc_RNA (1)...(19): siRNA sense strand
gaacgaaguggucuauucc

SEQ ID NO: 375825 - RNA, 19 nt, Homo sapiens
  misc_RNA (1)...(19): siRNA sense strand
gguguucccucaggucaau

SEQ ID NO: 375826 - RNA, 19 nt, Homo sapiens
  misc_RNA (1)...(19): siRNA sense strand
acgaggugcuggcuaguga

SEQ ID NO: 375827 - RNA, 19 nt, Homo sapiens
  misc_RNA (1)...(19): siRNA sense strand
ccaccacugccgucuauga

SEQ ID NO: 375828 - RNA, 19 nt, Homo sapiens
  misc_RNA (1)...(19): siRNA sense strand
gccgacacuuucaaugaga

SEQ ID NO: 375829 - RNA, 19 nt, Homo sapiens
  misc_RNA (1)...(19): siRNA sense strand
ggccgacacuuucaaugag

SEQ ID NO: 375830 - RNA, 19 nt, Homo sapiens
  misc_RNA (1)...(19): siRNA sense strand
ggacccagugccagauuug

SEQ ID NO: 375831 - RNA, 19 nt, Homo sapiens
  misc_RNA (1)...(19): siRNA sense strand
ccaacagguaccgcuauua

SEQ ID NO: 375832 - RNA, 19 nt, Homo sapiens
  misc_RNA (1)...(19): siRNA sense strand
guacaaccgaucugaugug

SEQ ID NO: 375833 - RNA, 19 nt, Homo sapiens
  misc_RNA (1)...(19): siRNA sense strand
uggcacagaccacaucuau

SEQ ID NO: 375834 - RNA, 19 nt, Homo sapiens
  misc_RNA (1)...(19): siRNA sense strand
cuggucagcuuguacuaug

SEQ ID NO: 375835 - RNA, 19 nt, Homo sapiens
  misc_RNA (1)...(19): siRNA sense strand
gcugggagcgagagauaga

SEQ ID NO: 375836 - RNA, 19 nt, Homo sapiens
  misc_RNA (1)...(19): siRNA sense strand
cccaacagguaccgcuauu

SEQ ID NO: 375837 - RNA, 19 nt, Homo sapiens
  misc_RNA (1)...(19): siRNA sense strand
cuguggaccuggccaagaa

SEQ ID NO: 375838 - RNA, 19 nt, Homo sapiens
  misc_RNA (1)...(19): siRNA sense strand
uagacuggauggcgcugaa

SEQ ID NO: 375839 - RNA, 19 nt, Homo sapiens
  misc_RNA (1)...(19): siRNA sense strand
aaggcaacauccuggacua

SEQ ID NO: 375840 - RNA, 19 nt, Homo sapiens
  misc_RNA (1)...(19): siRNA sense strand
gaucaaugaguucuuuacu

SEQ ID NO: 375841 - RNA, 19 nt, Homo sapiens
  misc_RNA (1)...(19): siRNA sense strand
uccaacagcaccaguuuga

SEQ ID NO: 375842 - RNA, 19 nt, Homo sapiens
  misc_RNA (1)...(19): siRNA sense strand
cuacugcuccggagugugu

SEQ ID NO: 375843 - RNA, 19 nt, Homo sapiens
  misc_RNA (1)...(19): siRNA sense strand
ccagaacgaaguggucuau

SEQ ID NO: 375844 - RNA, 19 nt, Homo sapiens
  misc_RNA (1)...(19): siRNA sense strand
gcaguuggggccacuuuaa

SEQ ID NO: 375845 - RNA, 19 nt, Homo sapiens
  misc_RNA (1)...(19): siRNA sense strand
ggaccuggccaagaagauc

SEQ ID NO: 375846 - RNA, 19 nt, Homo sapiens
  misc_RNA (1)...(19): siRNA sense strand
gagagccagccuguguaua

SEQ ID NO: 375847 - RNA, 19 nt, Homo sapiens
  misc_RNA (1)...(19): siRNA sense strand
gguacaaccgaucugaugu

SEQ ID NO: 375848 - RNA, 19 nt, Homo sapiens
  misc_RNA (1)...(19): siRNA sense strand
ggagcaggccuucguucuc

SEQ ID NO: 375849 - RNA, 19 nt, Homo sapiens
  misc_RNA (1)...(19): siRNA sense strand
gcagagaucaaugaguucu

SEQ ID NO: 375850 - RNA, 19 nt, Homo sapiens
  misc_RNA (1)...(19): siRNA sense strand
gggcaucagccagaacgaa

SEQ ID NO: 375851 - RNA, 19 nt, Homo sapiens
  misc_RNA (1)...(19): siRNA sense strand
ccucagagcccuccuaccu

SEQ ID NO: 375852 - RNA, 19 nt, Homo sapiens
  misc_RNA (1)...(19): siRNA sense strand
uacaaccgaucugaugugu

SEQ ID NO: 375853 - RNA, 19 nt, Homo sapiens
  misc_RNA (1)...(19): siRNA sense strand
ugagagccagccuguguau

SEQ ID NO: 375854 - RNA, 19 nt, Homo sapiens
  misc_RNA (1)...(19): siRNA sense strand
agccaccacugccgucuau

SEQ ID NO: 375855 - RNA, 19 nt, Homo sapiens
  misc_RNA (1)...(19): siRNA sense strand
gaucuuccucaaauauuac

SEQ ID NO: 375856 - RNA, 19 nt, Homo sapiens
  misc_RNA (1)...(19): siRNA sense strand
caucaucgggagccucuuc

SEQ ID NO: 375857 - RNA, 19 nt, Homo sapiens
  misc_RNA (1)...(19): siRNA sense strand
gcuccaaggcuggcucuuc

SEQ ID NO: 375858 - RNA, 19 nt, Homo sapiens
  misc_RNA (1)...(19): siRNA sense strand
ggaaggcgcuggcugauga

SEQ ID NO: 375859 - RNA, 19 nt, Homo sapiens
  misc_RNA (1)...(19): siRNA sense strand
gaaaguaggcacagaaauu

SEQ ID NO: 375860 - RNA, 19 nt, Homo sapiens
  misc_RNA (1)...(19): siRNA sense strand
gaagagauccugcccaugu

SEQ ID NO: 375861 - RNA, 19 nt, Homo sapiens
  misc_RNA (1)...(19): siRNA sense strand
gcacagaaauuugcaaugg

SEQ ID NO: 375862 - RNA, 19 nt, Homo sapiens
  misc_RNA (1)...(19): siRNA sense strand
gcacauucguguacaagga

SEQ ID NO: 375863 - RNA, 19 nt, Homo sapiens
  misc_RNA (1)...(19): siRNA sense strand
acaaggaguucucucguuu

SEQ ID NO: 375864 - RNA, 19 nt, Homo sapiens
  misc_RNA (1)...(19): siRNA sense strand
ugaaggcucuggaggagaa

SEQ ID NO: 375865 - RNA, 19 nt, Homo sapiens
  misc_RNA (1)...(19): siRNA sense strand
ccacguggcucagaccaaa

SEQ ID NO: 375866 - RNA, 19 nt, Homo sapiens
  misc_RNA (1)...(19): siRNA sense strand
ccaacaaccuguaccagau

SEQ ID NO: 375867 - RNA, 19 nt, Homo sapiens
  misc_RNA (1)...(19): siRNA sense strand
agagagcgauguuucagaa

SEQ ID NO: 375868 - RNA, 19 nt, Homo sapiens
  misc_RNA (1)...(19): siRNA sense strand
gcugcagccucuucaugua

SEQ ID NO: 375869 - RNA, 19 nt, Homo sapiens
  misc_RNA (1)...(19): siRNA sense strand
cauuugacaucuacgaauu

SEQ ID NO: 375870 - RNA, 19 nt, Homo sapiens
  misc_RNA (1)...(19): siRNA sense strand
ggaaaggacagucuuggau

SEQ ID NO: 375871 - RNA, 19 nt, Homo sapiens
  misc_RNA (1)...(19): siRNA sense strand
ccggguggcucaucaagaa

SEQ ID NO: 375872 - RNA, 19 nt, Homo sapiens
  misc_RNA (1)...(19): siRNA sense strand
gaucagcagcccauuccua

SEQ ID NO: 375873 - RNA, 19 nt, Homo sapiens
  misc_RNA (1)...(19): siRNA sense strand
ggacaucgcacaggacaug

SEQ ID NO: 375874 - RNA, 19 nt, Homo sapiens
  misc_RNA (1)...(19): siRNA sense strand
caagaaaguaggcacagaa

SEQ ID NO: 375875 - RNA, 19 nt, Homo sapiens
  misc_RNA (1)...(19): siRNA sense strand
gcaaggaggagaucaaggu

SEQ ID NO: 375876 - RNA, 19 nt, Homo sapiens
  misc_RNA (1)...(19): siRNA sense strand
aaaguaggcacagaaauuu

SEQ ID NO: 375877 - RNA, 19 nt, Homo sapiens
  misc_RNA (1)...(19): siRNA sense strand
cugacgagcucacugacua

SEQ ID NO: 375878 - RNA, 19 nt, Homo sapiens
  misc_RNA (1)...(19): siRNA sense strand
cagcagcccauuccuauga

SEQ ID NO: 375879 - RNA, 19 nt, Homo sapiens
  misc_RNA (1)...(19): siRNA sense strand
gagcgauguuucagaagau

SEQ ID NO: 375880 - RNA, 19 nt, Homo sapiens
  misc_RNA (1)...(19): siRNA sense strand
gaggagacccugaacaucu

SEQ ID NO: 375881 - RNA, 19 nt, Homo sapiens
  misc_RNA (1)...(19): siRNA sense strand
aaacugagcccugagaaug

SEQ ID NO: 375882 - RNA, 19 nt, Homo sapiens
  misc_RNA (1)...(19): siRNA sense strand
cugacgaaauguucaaauu

SEQ ID NO: 375883 - RNA, 19 nt, Homo sapiens
  misc_RNA (1)...(19): siRNA sense strand
gccgggaaauugucuucua

SEQ ID NO: 375884 - RNA, 19 nt, Homo sapiens
  misc_RNA (1)...(19): siRNA sense strand
cguuguaccugaagaucua

SEQ ID NO: 375885 - RNA, 19 nt, Homo sapiens
  misc_RNA (1)...(19): siRNA sense strand
gaaacugagcccugagaau

SEQ ID NO: 375886 - RNA, 19 nt, Homo sapiens
  misc_RNA (1)...(19): siRNA sense strand
gcucaacggcccauucuuc

SEQ ID NO: 375887 - RNA, 19 nt, Homo sapiens
  misc_RNA (1)...(19): siRNA sense strand
aaaggacagucuuggauca

SEQ ID NO: 375888 - RNA, 19 nt, Homo sapiens
  misc_RNA (1)...(19): siRNA sense strand
ucucguggcugcugaguuc

SEQ ID NO: 375889 - RNA, 19 nt, Homo sapiens
  misc_RNA (1)...(19): siRNA sense strand
ucaagaaugugcuguccau

SEQ ID NO: 375890 - RNA, 19 nt, Homo sapiens
  misc_RNA (1)...(19): siRNA sense strand
ccagcggccuuccaagcua

SEQ ID NO: 375891 - RNA, 19 nt, Homo sapiens
  misc_RNA (1)...(19): siRNA sense strand
gagaaucaccuaccacaac

SEQ ID NO: 375892 - RNA, 19 nt, Homo sapiens
  misc_RNA (1)...(19): siRNA sense strand
acaaagugaucgacuacau

SEQ ID NO: 375893 - RNA, 19 nt, Homo sapiens
  misc_RNA (1)...(19): siRNA sense strand
ccaagaaaguaggcacaga

SEQ ID NO: 375894 - RNA, 19 nt, Homo sapiens
  misc_RNA (1)...(19): siRNA sense strand
ccaccacauuugacaucua

SEQ ID NO: 375895 - RNA, 19 nt, Homo sapiens
  misc_RNA (1)...(19): siRNA sense strand
caagcuacguggcagaaag

SEQ ID NO: 375896 - RNA, 19 nt, Homo sapiens
  misc_RNA (1)...(19): siRNA sense strand
ugagcuaccuccacaacug

SEQ ID NO: 375897 - RNA, 19 nt, Homo sapiens
  misc_RNA (1)...(19): siRNA sense strand
ggcgcuggcugaugaguau

SEQ ID NO: 375898 - RNA, 19 nt, Homo sapiens
  misc_RNA (1)...(19): siRNA sense strand
gaacuaccaggacaagaag

SEQ ID NO: 375899 - RNA, 19 nt, Homo sapiens
  misc_RNA (1)...(19): siRNA sense strand
cuccacggcuccucgauuu

SEQ ID NO: 375900 - RNA, 19 nt, Homo sapiens
  misc_RNA (1)...(19): siRNA sense strand
ccggcaaacugaagagcua

SEQ ID NO: 375901 - RNA, 19 nt, Homo sapiens
  misc_RNA (1)...(19): siRNA sense strand
ucuacaaagugaucgacua

SEQ ID NO: 375902 - RNA, 19 nt, Homo sapiens
  misc_RNA (1)...(19): siRNA sense strand
ggaagcccuuugacgaaca

SEQ ID NO: 375903 - RNA, 19 nt, Homo sapiens
  misc_RNA (1)...(19): siRNA sense strand
caucaugaauggcaaagac

SEQ ID NO: 375904 - RNA, 19 nt, Homo sapiens
  misc_RNA (1)...(19): siRNA sense strand
gcagaacaauaggaaagag

SEQ ID NO: 375905 - RNA, 19 nt, Homo sapiens
  misc_RNA (1)...(19): siRNA sense strand
uacaaggaguucucucguu

SEQ ID NO: 375906 - RNA, 19 nt, Homo sapiens
  misc_RNA (1)...(19): siRNA sense strand
uucagaagaucguggauga

SEQ ID NO: 375907 - RNA, 19 nt, Homo sapiens
  misc_RNA (1)...(19): siRNA sense strand
gcucaugaccggcaaacug

SEQ ID NO: 375908 - RNA, 19 nt, Homo sapiens
  misc_RNA (1)...(19): siRNA sense strand
caacaagaaggaggagauu

SEQ ID NO: 375909 - RNA, 19 nt, Homo sapiens
  misc_RNA (1)...(19): siRNA sense strand
gacuacaagacaaagaaua

SEQ ID NO: 375910 - RNA, 19 nt, Homo sapiens
  misc_RNA (1)...(19): siRNA sense strand
gaccgacugcagaacaaua

SEQ ID NO: 375911 - RNA, 19 nt, Homo sapiens
  misc_RNA (1)...(19): siRNA sense strand
agagcgauguuucagaaga

SEQ ID NO: 375912 - RNA, 19 nt, Homo sapiens
  misc_RNA (1)...(19): siRNA sense strand
ggaccuggcccuguacuuc

SEQ ID NO: 375913 - RNA, 19 nt, Homo sapiens
  misc_RNA (1)...(19): siRNA sense strand
aggagacccugaacaucua

SEQ ID NO: 375914 - RNA, 19 nt, Homo sapiens
  misc_RNA (1)...(19): siRNA sense strand
uggagucccugacacaguu

SEQ ID NO: 375915 - RNA, 19 nt, Homo sapiens
  misc_RNA (1)...(19): siRNA sense strand
gaccaaggagaaggaauuu

SEQ ID NO: 375916 - RNA, 19 nt, Homo sapiens
  misc_RNA (1)...(19): siRNA sense strand
ugaccaaggagaaggaauu

SEQ ID NO: 375917 - RNA, 19 nt, Homo sapiens
  misc_RNA (1)...(19): siRNA sense strand
caagaagagagcgauguuu

SEQ ID NO: 375918 - RNA, 19 nt, Homo sapiens
  misc_RNA (1)...(19): siRNA sense strand
gaucauggcagugaacaag

SEQ ID NO: 375919 - RNA, 19 nt, Homo sapiens
  misc_RNA (1)...(19): siRNA sense strand
gccaguacuuugggaagaa

SEQ ID NO: 375920 - RNA, 19 nt, Homo sapiens
  misc_RNA (1)...(19): siRNA sense strand
gcacgugauccaccugaug

SEQ ID NO: 375921 - RNA, 19 nt, Homo sapiens
  misc_RNA (1)...(19): siRNA sense strand
gcaaacugaagagcuacua

SEQ ID NO: 375922 - RNA, 19 nt, Homo sapiens
  misc_RNA (1)...(19): siRNA sense strand
cgaagacgaagauguguuc

SEQ ID NO: 375923 - RNA, 19 nt, Homo sapiens
  misc_RNA (1)...(19): siRNA sense strand
cgagcucacugacuacaag

SEQ ID NO: 375924 - RNA, 19 nt, Homo sapiens
  misc_RNA (1)...(19): siRNA sense strand
agaacuaccaggacaagaa

SEQ ID NO: 375925 - RNA, 19 nt, Homo sapiens
  misc_RNA (1)...(19): siRNA sense strand
caacaaccuguaccagaug

SEQ ID NO: 375926 - RNA, 19 nt, Homo sapiens
  misc_RNA (1)...(19): siRNA sense strand
cagcgaagacgaagaugug

SEQ ID NO: 375927 - RNA, 19 nt, Homo sapiens
  misc_RNA (1)...(19): siRNA sense strand
ucacugacuacaagacaaa

SEQ ID NO: 375928 - RNA, 19 nt, Homo sapiens
  misc_RNA (1)...(19): siRNA sense strand
ccaguacuuugggaagaaa

SEQ ID NO: 375929 - RNA, 19 nt, Homo sapiens
  misc_RNA (1)...(19): siRNA sense strand
ggacaugaccaaggagaag

SEQ ID NO: 375930 - RNA, 19 nt, Homo sapiens
  misc_RNA (1)...(19): siRNA sense strand
gcccagcacccaagucuuc

SEQ ID NO: 375931 - RNA, 19 nt, Homo sapiens
  misc_RNA (1)...(19): siRNA sense strand
gaagagagcgauguuucag

SEQ ID NO: 375932 - RNA, 19 nt, Homo sapiens
  misc_RNA (1)...(19): siRNA sense strand
ggagaaucaccuaccacaa

SEQ ID NO: 375933 - RNA, 19 nt, Homo sapiens
  misc_RNA (1)...(19): siRNA sense strand
ggcuuuauuuguaacauca

SEQ ID NO: 375934 - RNA, 19 nt, Homo sapiens
  misc_RNA (1)...(19): siRNA sense strand
ucaagaagagagcgauguu

SEQ ID NO: 375935 - RNA, 19 nt, Homo sapiens
  misc_RNA (1)...(19): siRNA sense strand
caaagugaucgacuacauc

SEQ ID NO: 375936 - RNA, 19 nt, Homo sapiens
  misc_RNA (1)...(19): siRNA sense strand
gcacccaagucuucaaccu

SEQ ID NO: 375937 - RNA, 19 nt, Homo sapiens
  misc_RNA (1)...(19): siRNA sense strand
gaguaugaggccaaaguga

SEQ ID NO: 375938 - RNA, 19 nt, Homo sapiens
  misc_RNA (1)...(19): siRNA sense strand
gggacgagauccagcucau

SEQ ID NO: 375939 - RNA, 19 nt, Homo sapiens
  misc_RNA (1)...(19): siRNA sense strand
cgacaccuacgacaagaug

SEQ ID NO: 375940 - RNA, 19 nt, Homo sapiens
  misc_RNA (1)...(19): siRNA sense strand
uuccugggcuggucaguga

SEQ ID NO: 375941 - RNA, 19 nt, Homo sapiens
  misc_RNA (1)...(19): siRNA sense strand
ggacaucgagaggcaguuc

SEQ ID NO: 375942 - RNA, 19 nt, Homo sapiens
  misc_RNA (1)...(19): siRNA sense strand
aagagauccugcccauguu

SEQ ID NO: 375943 - RNA, 19 nt, Homo sapiens
  misc_RNA (1)...(19): siRNA sense strand
gcagcccauuccuaugaug

SEQ ID NO: 375944 - RNA, 19 nt, Homo sapiens
  misc_RNA (1)...(19): siRNA sense strand
gcaggagagcaucaacaug

SEQ ID NO: 375945 - RNA, 19 nt, Homo sapiens
  misc_RNA (1)...(19): siRNA sense strand
uugaggagcugacggacau

SEQ ID NO: 375946 - RNA, 19 nt, Homo sapiens
  misc_RNA (1)...(19): siRNA sense strand
gcaaaggguaccggagaau

SEQ ID NO: 375947 - RNA, 19 nt, Homo sapiens
  misc_RNA (1)...(19): siRNA sense strand
caucuacgaauuccacuuc

SEQ ID NO: 375948 - RNA, 19 nt, Homo sapiens
  misc_RNA (1)...(19): siRNA sense strand
gaggagaucaaggucauuc

SEQ ID NO: 375949 - RNA, 19 nt, Homo sapiens
  misc_RNA (1)...(19): siRNA sense strand
ugaaguaccugaauuuugc

SEQ ID NO: 375950 - RNA, 19 nt, Homo sapiens
  misc_RNA (1)...(19): siRNA sense strand
aagaagagagcgauguuuc

SEQ ID NO: 375951 - RNA, 19 nt, Homo sapiens
  misc_RNA (1)...(19): siRNA sense strand
gaccuggcccuguacuuca

SEQ ID NO: 375952 - RNA, 19 nt, Homo sapiens
  misc_RNA (1)...(19): siRNA sense strand
gccagggcccaccacauuu

SEQ ID NO: 375953 - RNA, 19 nt, Homo sapiens
  misc_RNA (1)...(19): siRNA sense strand
ugacgaacaggacgagguu

SEQ ID NO: 375954 - RNA, 19 nt, Homo sapiens
  misc_RNA (1)...(19): siRNA sense strand
gaaugcuuccgcugacgaa

SEQ ID NO: 375955 - RNA, 19 nt, Homo sapiens
  misc_RNA (1)...(19): siRNA sense strand
aaaggguaccggagaauca

SEQ ID NO: 375956 - RNA, 19 nt, Homo sapiens
  misc_RNA (1)...(19): siRNA sense strand
ggaggagacccugaacauc

SEQ ID NO: 375957 - RNA, 19 nt, Homo sapiens
  misc_RNA (1)...(19): siRNA sense strand
agaaucaccuaccacaacu

SEQ ID NO: 375958 - RNA, 19 nt, Homo sapiens
  misc_RNA (1)...(19): siRNA sense strand
gaaagcagaucagcuguau

SEQ ID NO: 375959 - RNA, 19 nt, Homo sapiens
  misc_RNA (1)...(19): siRNA sense strand
gaggaucgaugcacaugua

SEQ ID NO: 375960 - RNA, 19 nt, Homo sapiens
  misc_RNA (1)...(19): siRNA sense strand
gcucuagccuguaaguaua

SEQ ID NO: 375961 - RNA, 19 nt, Homo sapiens
  misc_RNA (1)...(19): siRNA sense strand
gagaagaaauucaggaagu

SEQ ID NO: 375962 - RNA, 19 nt, Homo sapiens
  misc_RNA (1)...(19): siRNA sense strand
gaagaaggcccuccuguca

SEQ ID NO: 375963 - RNA, 19 nt, Homo sapiens
  misc_RNA (1)...(19): siRNA sense strand
caagagaggcgauuucauu

SEQ ID NO: 375964 - RNA, 19 nt, Homo sapiens
  misc_RNA (1)...(19): siRNA sense strand
cagaucagcuguauaaaca

SEQ ID NO: 375965 - RNA, 19 nt, Homo sapiens
  misc_RNA (1)...(19): siRNA sense strand
gaaauucucgcagagcuua

SEQ ID NO: 375966 - RNA, 19 nt, Homo sapiens
  misc_RNA (1)...(19): siRNA sense strand
gcucacggcuuuacuuuca

SEQ ID NO: 375967 - RNA, 19 nt, Homo sapiens
  misc_RNA (1)...(19): siRNA sense strand
ggauugcucuagccuguaa

SEQ ID NO: 375968 - RNA, 19 nt, Homo sapiens
  misc_RNA (1)...(19): siRNA sense strand
ggaaauugauguggaagug

SEQ ID NO: 375969 - RNA, 19 nt, Homo sapiens
  misc_RNA (1)...(19): siRNA sense strand
gaaguaagagugacccuau

SEQ ID NO: 375970 - RNA, 19 nt, Homo sapiens
  misc_RNA (1)...(19): siRNA sense strand
gcacauguaugccaagaac

SEQ ID NO: 375971 - RNA, 19 nt, Homo sapiens
  misc_RNA (1)...(19): siRNA sense strand
gaugaggucugccugacuu

SEQ ID NO: 375972 - RNA, 19 nt, Homo sapiens
  misc_RNA (1)...(19): siRNA sense strand
gaacuaaaggaaauugaug

SEQ ID NO: 375973 - RNA, 19 nt, Homo sapiens
  misc_RNA (1)...(19): siRNA sense strand
aagcagaucagcuguauaa

SEQ ID NO: 375974 - RNA, 19 nt, Homo sapiens
  misc_RNA (1)...(19): siRNA sense strand
gaagaaauucaggaaguaa

SEQ ID NO: 375975 - RNA, 19 nt, Homo sapiens
  misc_RNA (1)...(19): siRNA sense strand
gagaguggauggaauggau

SEQ ID NO: 375976 - RNA, 19 nt, Homo sapiens
  misc_RNA (1)...(19): siRNA sense strand
gggaacgucuguugagaga

SEQ ID NO: 375977 - RNA, 19 nt, Homo sapiens
  misc_RNA (1)...(19): siRNA sense strand
ugaggaugcugcccaguuu

SEQ ID NO: 375978 - RNA, 19 nt, Homo sapiens
  misc_RNA (1)...(19): siRNA sense strand
aggaugggcucaaauacua

SEQ ID NO: 375979 - RNA, 19 nt, Homo sapiens
  misc_RNA (1)...(19): siRNA sense strand
gagaauaaucgcuauggaa

SEQ ID NO: 375980 - RNA, 19 nt, Homo sapiens
  misc_RNA (1)...(19): siRNA sense strand
gggaggaugggcucaaaua

SEQ ID NO: 375981 - RNA, 19 nt, Homo sapiens
  misc_RNA (1)...(19): siRNA sense strand
agaagaaauucaggaagua

SEQ ID NO: 375982 - RNA, 19 nt, Homo sapiens
  misc_RNA (1)...(19): siRNA sense strand
ggaaugggaacgucuguug

SEQ ID NO: 375983 - RNA, 19 nt, Homo sapiens
  misc_RNA (1)...(19): siRNA sense strand
aaaggaaauugauguggaa

SEQ ID NO: 375984 - RNA, 19 nt, Homo sapiens
  misc_RNA (1)...(19): siRNA sense strand
cuaccgggcucacggcuuu

SEQ ID NO: 375985 - RNA, 19 nt, Homo sapiens
  misc_RNA (1)...(19): siRNA sense strand
gagcugggcuaccacaucu

SEQ ID NO: 375986 - RNA, 19 nt, Homo sapiens
  misc_RNA (1)...(19): siRNA sense strand
auucgaagcuuacaacaug

SEQ ID NO: 375987 - RNA, 19 nt, Homo sapiens
  misc_RNA (1)...(19): siRNA sense strand
ggaucaaguuuaagucagu

SEQ ID NO: 375988 - RNA, 19 nt, Homo sapiens
  misc_RNA (1)...(19): siRNA sense strand
aaaaggagguugugcuaaa

SEQ ID NO: 375989 - RNA, 19 nt, Homo sapiens
  misc_RNA (1)...(19): siRNA sense strand
cauggcagcuuuguggaaa

SEQ ID NO: 375990 - RNA, 19 nt, Homo sapiens
  misc_RNA (1)...(19): siRNA sense strand
gaagugaggaaggagauug

SEQ ID NO: 375991 - RNA, 19 nt, Homo sapiens
  misc_RNA (1)...(19): siRNA sense strand
gcagaucagcuguauaaac

SEQ ID NO: 375992 - RNA, 19 nt, Homo sapiens
  misc_RNA (1)...(19): siRNA sense strand
gaaauucaggaaguaagaa

SEQ ID NO: 375993 - RNA, 19 nt, Homo sapiens
  misc_RNA (1)...(19): siRNA sense strand
gaauaaucgcuauggaaug

SEQ ID NO: 375994 - RNA, 19 nt, Homo sapiens
  misc_RNA (1)...(19): siRNA sense strand
gccagauauucgaagcuua

SEQ ID NO: 375995 - RNA, 19 nt, Homo sapiens
  misc_RNA (1)...(19): siRNA sense strand
gaaauugauguggaaguga

SEQ ID NO: 375996 - RNA, 19 nt, Homo sapiens
  misc_RNA (1)...(19): siRNA sense strand
gaaugggaacgucuguuga

SEQ ID NO: 375997 - RNA, 19 nt, Homo sapiens
  misc_RNA (1)...(19): siRNA sense strand
aguaagagugacccuauua

SEQ ID NO: 375998 - RNA, 19 nt, Homo sapiens
  misc_RNA (1)...(19): siRNA sense strand
cuauuaugcuucucaagga

SEQ ID NO: 375999 - RNA, 19 nt, Homo sapiens
  misc_RNA (1)...(19): siRNA sense strand
gccaaucaguggaucaagu

SEQ ID NO: 376000 - RNA, 19 nt, Homo sapiens
  misc_RNA (1)...(19): siRNA sense strand
ggccagauauucgaagcuu

SEQ ID NO: 376001 - RNA, 19 nt, Homo sapiens
  misc_RNA (1)...(19): siRNA sense strand
agaaggcccuccugucaca

SEQ ID NO: 376002 - RNA, 19 nt, Homo sapiens
  misc_RNA (1)...(19): siRNA sense strand
gagugacccuauuaugcuu

SEQ ID NO: 376003 - RNA, 19 nt, Homo sapiens
  misc_RNA (1)...(19): siRNA sense strand
uaagagugacccuauuaug

SEQ ID NO: 376004 - RNA, 19 nt, Homo sapiens
  misc_RNA (1)...(19): siRNA sense strand
guaagagugacccuauuau

SEQ ID NO: 376005 - RNA, 19 nt, Homo sapiens
  misc_RNA (1)...(19): siRNA sense strand
aauaaucgcuauggaaugg

SEQ ID NO: 376006 - RNA, 19 nt, Homo sapiens
  misc_RNA (1)...(19): siRNA sense strand
ggaaguaagaaguaagagu

SEQ ID NO: 376007 - RNA, 19 nt, Homo sapiens
  misc_RNA (1)...(19): siRNA sense strand
ccaaucaguggaucaaguu

SEQ ID NO: 376008 - RNA, 19 nt, Homo sapiens
  misc_RNA (1)...(19): siRNA sense strand
cuuacaacauggcagcuuu

SEQ ID NO: 376009 - RNA, 19 nt, Homo sapiens
  misc_RNA (1)...(19): siRNA sense strand
gagaggcgauuucauuccu

SEQ ID NO: 376010 - RNA, 19 nt, Homo sapiens
  misc_RNA (1)...(19): siRNA sense strand
gcacugauuacuacaagag

SEQ ID NO: 376011 - RNA, 19 nt, Homo sapiens
  misc_RNA (1)...(19): siRNA sense strand
cggcagccagcacugauua

SEQ ID NO: 376012 - RNA, 19 nt, Homo sapiens
  misc_RNA (1)...(19): siRNA sense strand
ugagaauaaucgcuaugga

SEQ ID NO: 376013 - RNA, 19 nt, Homo sapiens
  misc_RNA (1)...(19): siRNA sense strand
ugaaagcagaucagcugua

SEQ ID NO: 376014 - RNA, 19 nt, Homo sapiens
  misc_RNA (1)...(19): siRNA sense strand
aaucaguggaucaaguuua

SEQ ID NO: 376015 - RNA, 19 nt, Homo sapiens
  misc_RNA (1)...(19): siRNA sense strand
agaauaaucgcuauggaau

SEQ ID NO: 376016 - RNA, 19 nt, Homo sapiens
  misc_RNA (1)...(19): siRNA sense strand
gggcucacggcuuuacuuu

SEQ ID NO: 376017 - RNA, 19 nt, Homo sapiens
  misc_RNA (1)...(19): siRNA sense strand
aucaguggaucaaguuuaa

SEQ ID NO: 376018 - RNA, 19 nt, Homo sapiens
  misc_RNA (1)...(19): siRNA sense strand
gaggucugccugacuuuau

SEQ ID NO: 376019 - RNA, 19 nt, Homo sapiens
  misc_RNA (1)...(19): siRNA sense strand
uggaagagcugggcuacca

SEQ ID NO: 376020 - RNA, 19 nt, Homo sapiens
  misc_RNA (1)...(19): siRNA sense strand
cagggaggaugggcucaaa

SEQ ID NO: 376021 - RNA, 19 nt, Homo sapiens
  misc_RNA (1)...(19): siRNA sense strand
cagcacugauuacuacaag

SEQ ID NO: 376022 - RNA, 19 nt, Homo sapiens
  misc_RNA (1)...(19): siRNA sense strand
gcagcuuuguggaaauuac

SEQ ID NO: 376023 - RNA, 19 nt, Homo sapiens
  misc_RNA (1)...(19): siRNA sense strand
cgacccaccuuuugaaguu

SEQ ID NO: 376024 - RNA, 19 nt, Homo sapiens
  misc_RNA (1)...(19): siRNA sense strand
gcugguagcaucccguaau

SEQ ID NO: 376025 - RNA, 19 nt, Homo sapiens
  misc_RNA (1)...(19): siRNA sense strand
gcugagaguggauggaaug

SEQ ID NO: 376026 - RNA, 19 nt, Homo sapiens
  misc_RNA (1)...(19): siRNA sense strand
gccuguaaguauaauggaa

SEQ ID NO: 376027 - RNA, 19 nt, Homo sapiens
  misc_RNA (1)...(19): siRNA sense strand
gcugcugccuauuguagau

SEQ ID NO: 376028 - RNA, 19 nt, Homo sapiens
  misc_RNA (1)...(19): siRNA sense strand
cugguagcaucccguaauu

SEQ ID NO: 376029 - RNA, 19 nt, Homo sapiens
  misc_RNA (1)...(19): siRNA sense strand
gaggaugggcucaaauacu

SEQ ID NO: 376030 - RNA, 19 nt, Homo sapiens
  misc_RNA (1)...(19): siRNA sense strand
caggaaguaagaaguaaga

SEQ ID NO: 376031 - RNA, 19 nt, Homo sapiens
  misc_RNA (1)...(19): siRNA sense strand
uuguggaaauuaccuugua

SEQ ID NO: 376032 - RNA, 19 nt, Homo sapiens
  misc_RNA (1)...(19): siRNA sense strand
uggcagcuuuguggaaauu

SEQ ID NO: 376033 - RNA, 19 nt, Homo sapiens
  misc_RNA (1)...(19): siRNA sense strand
gauauucgaagcuuacaac

SEQ ID NO: 376034 - RNA, 19 nt, Homo sapiens
  misc_RNA (1)...(19): siRNA sense strand
gaucgaugcacauguaugc

SEQ ID NO: 376035 - RNA, 19 nt, Homo sapiens
  misc_RNA (1)...(19): siRNA sense strand
gguagcaucccguaauuuu

SEQ ID NO: 376036 - RNA, 19 nt, Homo sapiens
  misc_RNA (1)...(19): siRNA sense strand
aagguuugcugcugccuau

SEQ ID NO: 376037 - RNA, 19 nt, Homo sapiens
  misc_RNA (1)...(19): siRNA sense strand
gacuuuauauggcgauggu

SEQ ID NO: 376038 - RNA, 19 nt, Homo sapiens
  misc_RNA (1)...(19): siRNA sense strand
uaaccagggccagauauuc

SEQ ID NO: 376039 - RNA, 19 nt, Homo sapiens
  misc_RNA (1)...(19): siRNA sense strand
cacagaccaucucaucaca

SEQ ID NO: 376040 - RNA, 19 nt, Homo sapiens
  misc_RNA (1)...(19): siRNA sense strand
aaguaagagugacccuauu

SEQ ID NO: 376041 - RNA, 19 nt, Homo sapiens
  misc_RNA (1)...(19): siRNA sense strand
agaaauucaggaaguaaga

SEQ ID NO: 376042 - RNA, 19 nt, Homo sapiens
  misc_RNA (1)...(19): siRNA sense strand
cucaaauacuacaggauga

SEQ ID NO: 376043 - RNA, 19 nt, Homo sapiens
  misc_RNA (1)...(19): siRNA sense strand
aaaggagguugugcuaaag

SEQ ID NO: 376044 - RNA, 19 nt, Homo sapiens
  misc_RNA (1)...(19): siRNA sense strand
gaaaaggagguugugcuaa

SEQ ID NO: 376045 - RNA, 19 nt, Homo sapiens
  misc_RNA (1)...(19): siRNA sense strand
ugaaguucguggugccaau

SEQ ID NO: 376046 - RNA, 19 nt, Homo sapiens
  misc_RNA (1)...(19): siRNA sense strand
cagccagcacugauuacua

SEQ ID NO: 376047 - RNA, 19 nt, Homo sapiens
  misc_RNA (1)...(19): siRNA sense strand
caaauacuacaggaugaug

SEQ ID NO: 376048 - RNA, 19 nt, Homo sapiens
  misc_RNA (1)...(19): siRNA sense strand
aggucugccugacuuuaua

SEQ ID NO: 376049 - RNA, 19 nt, Homo sapiens
  misc_RNA (1)...(19): siRNA sense strand
ggaggaugggcucaaauac

SEQ ID NO: 376050 - RNA, 19 nt, Homo sapiens
  misc_RNA (1)...(19): siRNA sense strand
ggaagugaggaaggagauu

SEQ ID NO: 376051 - RNA, 19 nt, Homo sapiens
  misc_RNA (1)...(19): siRNA sense strand
acaggauggugaacagcaa

SEQ ID NO: 376052 - RNA, 19 nt, Homo sapiens
  misc_RNA (1)...(19): siRNA sense strand
ucaaggacaggauggugaa

SEQ ID NO: 376053 - RNA, 19 nt, Homo sapiens
  misc_RNA (1)...(19): siRNA sense strand
ggagucaguuaccguacac

SEQ ID NO: 376054 - RNA, 19 nt, Homo sapiens
  misc_RNA (1)...(19): siRNA sense strand
gcugcagacuuaccguuac

SEQ ID NO: 376055 - RNA, 19 nt, Homo sapiens
  misc_RNA (1)...(19): siRNA sense strand
gguuugcugcugccuauug

SEQ ID NO: 376056 - RNA, 19 nt, Homo sapiens
  misc_RNA (1)...(19): siRNA sense strand
gggcugagaguggauggaa

SEQ ID NO: 376057 - RNA, 19 nt, Homo sapiens
  misc_RNA (1)...(19): siRNA sense strand
uguggaaauuaccuuguau

SEQ ID NO: 376058 - RNA, 19 nt, Homo sapiens
  misc_RNA (1)...(19): siRNA sense strand
gcagaaaucuugaguugug

SEQ ID NO: 376059 - RNA, 19 nt, Homo sapiens
  misc_RNA (1)...(19): siRNA sense strand
ggaucaaacugucaaauug

SEQ ID NO: 376060 - RNA, 19 nt, Homo sapiens
  misc_RNA (1)...(19): siRNA sense strand
gaaagucucugugcaccuu

SEQ ID NO: 376061 - RNA, 19 nt, Homo sapiens
  misc_RNA (1)...(19): siRNA sense strand
ggaaugaugguuuguuuga

SEQ ID NO: 376062 - RNA, 19 nt, Homo sapiens
  misc_RNA (1)...(19): siRNA sense strand
gaaggcagcaggaguaaga

SEQ ID NO: 376063 - RNA, 19 nt, Homo sapiens
  misc_RNA (1)...(19): siRNA sense strand
caacgaacauguccucauc

SEQ ID NO: 376064 - RNA, 19 nt, Homo sapiens
  misc_RNA (1)...(19): siRNA sense strand
gcgguugacuguaguuuga

SEQ ID NO: 376065 - RNA, 19 nt, Homo sapiens
  misc_RNA (1)...(19): siRNA sense strand
gaugugacuuggagugaga

SEQ ID NO: 376066 - RNA, 19 nt, Homo sapiens
  misc_RNA (1)...(19): siRNA sense strand
guggaacccuacuaauauu

SEQ ID NO: 376067 - RNA, 19 nt, Homo sapiens
  misc_RNA (1)...(19): siRNA sense strand
aggcagaaaucuugaguug

SEQ ID NO: 376068 - RNA, 19 nt, Homo sapiens
  misc_RNA (1)...(19): siRNA sense strand
ugacuggaaugaugguuug

SEQ ID NO: 376069 - RNA, 19 nt, Homo sapiens
  misc_RNA (1)...(19): siRNA sense strand
gaaacaguggagcaucaua

SEQ ID NO: 376070 - RNA, 19 nt, Homo sapiens
  misc_RNA (1)...(19): siRNA sense strand
gggaucaaacugucaaauu

SEQ ID NO: 376071 - RNA, 19 nt, Homo sapiens
  misc_RNA (1)...(19): siRNA sense strand
aauauuggauccagaugaa

SEQ ID NO: 376072 - RNA, 19 nt, Homo sapiens
  misc_RNA (1)...(19): siRNA sense strand
ccacaucccugguuguuuu

SEQ ID NO: 376073 - RNA, 19 nt, Homo sapiens
  misc_RNA (1)...(19): siRNA sense strand
ggccaugaaaguauuauuu

SEQ ID NO: 376074 - RNA, 19 nt, Homo sapiens
  misc_RNA (1)...(19): siRNA sense strand
gaucaaacugucaaauugu

SEQ ID NO: 376075 - RNA, 19 nt, Homo sapiens
  misc_RNA (1)...(19): siRNA sense strand
gaacccuacuaauauugga

SEQ ID NO: 376076 - RNA, 19 nt, Homo sapiens
  misc_RNA (1)...(19): siRNA sense strand
ggagcaucauacagaguuu

SEQ ID NO: 376077 - RNA, 19 nt, Homo sapiens
  misc_RNA (1)...(19): siRNA sense strand
ggagugagaacaacgaaca

SEQ ID NO: 376078 - RNA, 19 nt, Homo sapiens
  misc_RNA (1)...(19): siRNA sense strand
ggagguguauaguguugau

SEQ ID NO: 376079 - RNA, 19 nt, Homo sapiens
  misc_RNA (1)...(19): siRNA sense strand
gagaauaugggaugugaag

SEQ ID NO: 376080 - RNA, 19 nt, Homo sapiens
  misc_RNA (1)...(19): siRNA sense strand
uagaggccaugaaaguauu

SEQ ID NO: 376081 - RNA, 19 nt, Homo sapiens
  misc_RNA (1)...(19): siRNA sense strand
guaagauucuggaacuuuu

SEQ ID NO: 376082 - RNA, 19 nt, Homo sapiens
  misc_RNA (1)...(19): siRNA sense strand
cuggaaugaugguuuguuu

SEQ ID NO: 376083 - RNA, 19 nt, Homo sapiens
  misc_RNA (1)...(19): siRNA sense strand
caaccaguguuugaacuuc

SEQ ID NO: 376084 - RNA, 19 nt, Homo sapiens
  misc_RNA (1)...(19): siRNA sense strand
aaccagaggugaacagcuu

SEQ ID NO: 376085 - RNA, 19 nt, Homo sapiens
  misc_RNA (1)...(19): siRNA sense strand
caggagguguauaguguug

SEQ ID NO: 376086 - RNA, 19 nt, Homo sapiens
  misc_RNA (1)...(19): siRNA sense strand
gcaagucuauaaagaacac

SEQ ID NO: 376087 - RNA, 19 nt, Homo sapiens
  misc_RNA (1)...(19): siRNA sense strand
gaaugaugguuuguuugau

SEQ ID NO: 376088 - RNA, 19 nt, Homo sapiens
  misc_RNA (1)...(19): siRNA sense strand
gacccugcuugucuuacua

SEQ ID NO: 376089 - RNA, 19 nt, Homo sapiens
  misc_RNA (1)...(19): siRNA sense strand
aaugaugguuuguuugaug

SEQ ID NO: 376090 - RNA, 19 nt, Homo sapiens
  misc_RNA (1)...(19): siRNA sense strand
gaugguuuguuugauguga

SEQ ID NO: 376091 - RNA, 19 nt, Homo sapiens
  misc_RNA (1)...(19): siRNA sense strand
gagcaucauacagaguuua

SEQ ID NO: 376092 - RNA, 19 nt, Homo sapiens
  misc_RNA (1)...(19): siRNA sense strand
aagccugacucucuucuug

SEQ ID NO: 376093 - RNA, 19 nt, Homo sapiens
  misc_RNA (1)...(19): siRNA sense strand
ggacuuaaggaauguacga

SEQ ID NO: 376094 - RNA, 19 nt, Homo sapiens
  misc_RNA (1)...(19): siRNA sense strand
uguggaacccuacuaauau

SEQ ID NO: 376095 - RNA, 19 nt, Homo sapiens
  misc_RNA (1)...(19): siRNA sense strand
gcucaugggaucaaacugu

SEQ ID NO: 376096 - RNA, 19 nt, Homo sapiens
  misc_RNA (1)...(19): siRNA sense strand
gggaugaaacaauaaagau

SEQ ID NO: 376097 - RNA, 19 nt, Homo sapiens
  misc_RNA (1)...(19): siRNA sense strand
ggaugaaacaauaaagauc

SEQ ID NO: 376098 - RNA, 19 nt, Homo sapiens
  misc_RNA (1)...(19): siRNA sense strand
gcuggccucuugcucguau

SEQ ID NO: 376099 - RNA, 19 nt, Homo sapiens
  misc_RNA (1)...(19): siRNA sense strand
ugacuguucuugggaugaa

SEQ ID NO: 376100 - RNA, 19 nt, Homo sapiens
  misc_RNA (1)...(19): siRNA sense strand
cuguggaacccuacuaaua

SEQ ID NO: 376101 - RNA, 19 nt, Homo sapiens
  misc_RNA (1)...(19): siRNA sense strand
uuagaagcuuugacuggaa

SEQ ID NO: 376102 - RNA, 19 nt, Homo sapiens
  misc_RNA (1)...(19): siRNA sense strand
gccugacucucuucuugaa

SEQ ID NO: 376103 - RNA, 19 nt, Homo sapiens
  misc_RNA (1)...(19): siRNA sense strand
cuucugugcuggccucuug

SEQ ID NO: 376104 - RNA, 19 nt, Homo sapiens
  misc_RNA (1)...(19): siRNA sense strand
cuuaaggaauguacgacaa

SEQ ID NO: 376105 - RNA, 19 nt, Homo sapiens
  misc_RNA (1)...(19): siRNA sense strand
cauacagaguuuacuugug

SEQ ID NO: 376106 - RNA, 19 nt, Homo sapiens
  misc_RNA (1)...(19): siRNA sense strand
caucauacagaguuuacuu

SEQ ID NO: 376107 - RNA, 19 nt, Homo sapiens
  misc_RNA (1)...(19): siRNA sense strand
gagccaaaccagaggugaa

SEQ ID NO: 376108 - RNA, 19 nt, Homo sapiens
  misc_RNA (1)...(19): siRNA sense strand
uagaagcuuugacuggaau

SEQ ID NO: 376109 - RNA, 19 nt, Homo sapiens
  misc_RNA (1)...(19): siRNA sense strand
cugagaauaugggauguga

SEQ ID NO: 376110 - RNA, 19 nt, Homo sapiens
  misc_RNA (1)...(19): siRNA sense strand
ugacuuggagugagaacaa

SEQ ID NO: 376111 - RNA, 19 nt, Homo sapiens
  misc_RNA (1)...(19): siRNA sense strand
cucaggagguguauagugu

SEQ ID NO: 376112 - RNA, 19 nt, Homo sapiens
  misc_RNA (1)...(19): siRNA sense strand
uaauauuggauccagauga

SEQ ID NO: 376113 - RNA, 19 nt, Homo sapiens
  misc_RNA (1)...(19): siRNA sense strand
gacaaccaguguuugaacu

SEQ ID NO: 376114 - RNA, 19 nt, Homo sapiens
  misc_RNA (1)...(19): siRNA sense strand
ggcugggacuuaaggaaug

SEQ ID NO: 376115 - RNA, 19 nt, Homo sapiens
  misc_RNA (1)...(19): siRNA sense strand
uugagaggcugggacuuaa

SEQ ID NO: 376116 - RNA, 19 nt, Homo sapiens
  misc_RNA (1)...(19): siRNA sense strand
cagaaaucuugaguuguga

SEQ ID NO: 376117 - RNA, 19 nt, Homo sapiens
  misc_RNA (1)...(19): siRNA sense strand
gcacaucaggcagaaaucu

SEQ ID NO: 376118 - RNA, 19 nt, Homo sapiens
  misc_RNA (1)...(19): siRNA sense strand
ggccacugcaagucuauaa

SEQ ID NO: 376119 - RNA, 19 nt, Homo sapiens
  misc_RNA (1)...(19): siRNA sense strand
caguggagcaucauacaga

SEQ ID NO: 376120 - RNA, 19 nt, Homo sapiens
  misc_RNA (1)...(19): siRNA sense strand
ugugaaggcagcaggagua

SEQ ID NO: 376121 - RNA, 19 nt, Homo sapiens
  misc_RNA (1)...(19): siRNA sense strand
gcucaggagguguauagug

SEQ ID NO: 376122 - RNA, 19 nt, Homo sapiens
  misc_RNA (1)...(19): siRNA sense strand
cacugcaagucuauaaaga

SEQ ID NO: 376123 - RNA, 19 nt, Homo sapiens
  misc_RNA (1)...(19): siRNA sense strand
cagggccacugcaagucua

SEQ ID NO: 376124 - RNA, 19 nt, Homo sapiens
  misc_RNA (1)...(19): siRNA sense strand
uugaaacaguggagcauca

SEQ ID NO: 376125 - RNA, 19 nt, Homo sapiens
  misc_RNA (1)...(19): siRNA sense strand
uuucaaagccugacucucu

SEQ ID NO: 376126 - RNA, 19 nt, Homo sapiens
  misc_RNA (1)...(19): siRNA sense strand
uuugagaggcugggacuua

SEQ ID NO: 376127 - RNA, 19 nt, Homo sapiens
  misc_RNA (1)...(19): siRNA sense strand
uuagaggccaugaaaguau

SEQ ID NO: 376128 - RNA, 19 nt, Homo sapiens
  misc_RNA (1)...(19): siRNA sense strand
gguugacuguaguuugaga

SEQ ID NO: 376129 - RNA, 19 nt, Homo sapiens
  misc_RNA (1)...(19): siRNA sense strand
gaucuaugacccugcuugu

SEQ ID NO: 376130 - RNA, 19 nt, Homo sapiens
  misc_RNA (1)...(19): siRNA sense strand
uguaagauucuggaacuuu

SEQ ID NO: 376131 - RNA, 19 nt, Homo sapiens
  misc_RNA (1)...(19): siRNA sense strand
gccucuugcucguaugauu

SEQ ID NO: 376132 - RNA, 19 nt, Homo sapiens
  misc_RNA (1)...(19): siRNA sense strand
gcuauuaggagggugaaau

SEQ ID NO: 376133 - RNA, 19 nt, Homo sapiens
  misc_RNA (1)...(19): siRNA sense strand
ccacugcaagucuauaaag

SEQ ID NO: 376134 - RNA, 19 nt, Homo sapiens
  misc_RNA (1)...(19): siRNA sense strand
agaugaagcugggcuaagg

SEQ ID NO: 376135 - RNA, 19 nt, Homo sapiens
  misc_RNA (1)...(19): siRNA sense strand
gcucugggacacugccaaa

SEQ ID NO: 376136 - RNA, 19 nt, Homo sapiens
  misc_RNA (1)...(19): siRNA sense strand
guacgacaaccaguguuug

SEQ ID NO: 376137 - RNA, 19 nt, Homo sapiens
  misc_RNA (1)...(19): siRNA sense strand
uucuugggaugaaacaaua

SEQ ID NO: 376138 - RNA, 19 nt, Homo sapiens
  misc_RNA (1)...(19): siRNA sense strand
cuauuaggagggugaaauu

SEQ ID NO: 376139 - RNA, 19 nt, Homo sapiens
  misc_RNA (1)...(19): siRNA sense strand
gguguauaguguugauugg

SEQ ID NO: 376140 - RNA, 19 nt, Homo sapiens
  misc_RNA (1)...(19): siRNA sense strand
ccucuugcucguaugauuu

SEQ ID NO: 376141 - RNA, 19 nt, Homo sapiens
  misc_RNA (1)...(19): siRNA sense strand
aguugugacugguguaaau

SEQ ID NO: 376142 - RNA, 19 nt, Homo sapiens
  misc_RNA (1)...(19): siRNA sense strand
aagucucugugcaccuuua

SEQ ID NO: 376143 - RNA, 19 nt, Homo sapiens
  misc_RNA (1)...(19): siRNA sense strand
guucuugggaugaaacaau

SEQ ID NO: 376144 - RNA, 19 nt, Homo sapiens
  misc_RNA (1)...(19): siRNA sense strand
cugcaagucuauaaagaac

SEQ ID NO: 376145 - RNA, 19 nt, Homo sapiens
  misc_RNA (1)...(19): siRNA sense strand
gcugggacuuaaggaaugu

SEQ ID NO: 376146 - RNA, 19 nt, Homo sapiens
  misc_RNA (1)...(19): siRNA sense strand
ggaacccuacuaauauugg

SEQ ID NO: 376147 - RNA, 19 nt, Homo sapiens
  misc_RNA (1)...(19): siRNA sense strand
gugagaacaacgaacaugu

SEQ ID NO: 376148 - RNA, 19 nt, Homo sapiens
  misc_RNA (1)...(19): siRNA sense strand
cuaugacccugcuugucuu

SEQ ID NO: 376149 - RNA, 19 nt, Homo sapiens
  misc_RNA (1)...(19): siRNA sense strand
gaagcuuugacuggaauga

SEQ ID NO: 376150 - RNA, 19 nt, Homo sapiens
  misc_RNA (1)...(19): siRNA sense strand
guugugacugguguaaaua

SEQ ID NO: 376151 - RNA, 19 nt, Homo sapiens
  misc_RNA (1)...(19): siRNA sense strand
acuguaagauucuggaacu

SEQ ID NO: 376152 - RNA, 19 nt, Homo sapiens
  misc_RNA (1)...(19): siRNA sense strand
gaggcugggacuuaaggaa

SEQ ID NO: 376153 - RNA, 19 nt, Homo sapiens
  misc_RNA (1)...(19): siRNA sense strand
ugacucucuucuugaaaca

SEQ ID NO: 376154 - RNA, 19 nt, Homo sapiens
  misc_RNA (1)...(19): siRNA sense strand
caucaggcagaaaucuuga

SEQ ID NO: 376155 - RNA, 19 nt, Homo sapiens
  misc_RNA (1)...(19): siRNA sense strand
ucuaugacccugcuugucu

SEQ ID NO: 376156 - RNA, 19 nt, Homo sapiens
  misc_RNA (1)...(19): siRNA sense strand
aaacaguggagcaucauac

SEQ ID NO: 376157 - RNA, 19 nt, Homo sapiens
  misc_RNA (1)...(19): siRNA sense strand
uacgacaaccaguguuuga

SEQ ID NO: 376158 - RNA, 19 nt, Homo sapiens
  misc_RNA (1)...(19): siRNA sense strand
ggacaaauguguaaacuuu

SEQ ID NO: 376159 - RNA, 19 nt, Homo sapiens
  misc_RNA (1)...(19): siRNA sense strand
uaagauagcugagauaaug

SEQ ID NO: 376160 - RNA, 19 nt, Homo sapiens
  misc_RNA (1)...(19): siRNA sense strand
guacagaagccaagucuua

SEQ ID NO: 376161 - RNA, 19 nt, Homo sapiens
  misc_RNA (1)...(19): siRNA sense strand
ccucaaagcuaucaaguuu

SEQ ID NO: 376162 - RNA, 19 nt, Homo sapiens
  misc_RNA (1)...(19): siRNA sense strand
gaacauuucugaacugagu

SEQ ID NO: 376163 - RNA, 19 nt, Homo sapiens
  misc_RNA (1)...(19): siRNA sense strand
ggaaagauguuuguagaug

SEQ ID NO: 376164 - RNA, 19 nt, Homo sapiens
  misc_RNA (1)...(19): siRNA sense strand
gugcucagauuggaaauua

SEQ ID NO: 376165 - RNA, 19 nt, Homo sapiens
  misc_RNA (1)...(19): siRNA sense strand
gaaagauguuuguagaugu

SEQ ID NO: 376166 - RNA, 19 nt, Homo sapiens
  misc_RNA (1)...(19): siRNA sense strand
caacuuugcugccucaaug

SEQ ID NO: 376167 - RNA, 19 nt, Homo sapiens
  misc_RNA (1)...(19): siRNA sense strand
gggaugcccuuuacaaguu

SEQ ID NO: 376168 - RNA, 19 nt, Homo sapiens
  misc_RNA (1)...(19): siRNA sense strand
gcagacacuugcaacguuu

SEQ ID NO: 376169 - RNA, 19 nt, Homo sapiens
  misc_RNA (1)...(19): siRNA sense strand
gauaaugauuccacaugaa

SEQ ID NO: 376170 - RNA, 19 nt, Homo sapiens
  misc_RNA (1)...(19): siRNA sense strand
caacagaggcacucgaauu

SEQ ID NO: 376171 - RNA, 19 nt, Homo sapiens
  misc_RNA (1)...(19): siRNA sense strand
gaaagugcccucccuuaug

SEQ ID NO: 376172 - RNA, 19 nt, Homo sapiens
  misc_RNA (1)...(19): siRNA sense strand
gaagauaugccaagcuaug

SEQ ID NO: 376173 - RNA, 19 nt, Homo sapiens
  misc_RNA (1)...(19): siRNA sense strand
gaagaccauugccaacuau

SEQ ID NO: 376174 - RNA, 19 nt, Homo sapiens
  misc_RNA (1)...(19): siRNA sense strand
ugacaaagcauccaaugaa

SEQ ID NO: 376175 - RNA, 19 nt, Homo sapiens
  misc_RNA (1)...(19): siRNA sense strand
gaacugagugcuaugauuc

SEQ ID NO: 376176 - RNA, 19 nt, Homo sapiens
  misc_RNA (1)...(19): siRNA sense strand
gugcuugaaucuaauauug

SEQ ID NO: 376177 - RNA, 19 nt, Homo sapiens
  misc_RNA (1)...(19): siRNA sense strand
gaauugcccuggucguguu

SEQ ID NO: 376178 - RNA, 19 nt, Homo sapiens
  misc_RNA (1)...(19): siRNA sense strand
ccgaagauaugccaagcua

SEQ ID NO: 376179 - RNA, 19 nt, Homo sapiens
  misc_RNA (1)...(19): siRNA sense strand
gaagauaagaaggaaauga

SEQ ID NO: 376180 - RNA, 19 nt, Homo sapiens
  misc_RNA (1)...(19): siRNA sense strand
gcaguacuuuaaagauuug

SEQ ID NO: 376181 - RNA, 19 nt, Homo sapiens
  misc_RNA (1)...(19): siRNA sense strand
ccagaaagcuuuuaacugu

SEQ ID NO: 376182 - RNA, 19 nt, Homo sapiens
  misc_RNA (1)...(19): siRNA sense strand
ccaaugaacauaucuugaa

SEQ ID NO: 376183 - RNA, 19 nt, Homo sapiens
  misc_RNA (1)...(19): siRNA sense strand
ugaagucagugcucagauu

SEQ ID NO: 376184 - RNA, 19 nt, Homo sapiens
  misc_RNA (1)...(19): siRNA sense strand
gaaauuaagauagcugaga

SEQ ID NO: 376185 - RNA, 19 nt, Homo sapiens
  misc_RNA (1)...(19): siRNA sense strand
aaagugcccucccuuaugu

SEQ ID NO: 376186 - RNA, 19 nt, Homo sapiens
  misc_RNA (1)...(19): siRNA sense strand
gauauuagggucugagaga

SEQ ID NO: 376187 - RNA, 19 nt, Homo sapiens
  misc_RNA (1)...(19): siRNA sense strand
ccgcaguacuuuaaagauu

SEQ ID NO: 376188 - RNA, 19 nt, Homo sapiens
  misc_RNA (1)...(19): siRNA sense strand
agaagaccauugccaacua

SEQ ID NO: 376189 - RNA, 19 nt, Homo sapiens
  misc_RNA (1)...(19): siRNA sense strand
ccuacaaacucgcaaguau

SEQ ID NO: 376190 - RNA, 19 nt, Homo sapiens
  misc_RNA (1)...(19): siRNA sense strand
ggagaaaucaaucaguaga

SEQ ID NO: 376191 - RNA, 19 nt, Homo sapiens
  misc_RNA (1)...(19): siRNA sense strand
gaggugcaauuccuacaga

SEQ ID NO: 376192 - RNA, 19 nt, Homo sapiens
  misc_RNA (1)...(19): siRNA sense strand
uacaggaaauggauaaaug

SEQ ID NO: 376193 - RNA, 19 nt, Homo sapiens
  misc_RNA (1)...(19): siRNA sense strand
gcacgauccucuuucuagu

SEQ ID NO: 376194 - RNA, 19 nt, Homo sapiens
  misc_RNA (1)...(19): siRNA sense strand
ggcccgugcuugaaucuaa

SEQ ID NO: 376195 - RNA, 19 nt, Homo sapiens
  misc_RNA (1)...(19): siRNA sense strand
gaagaggacccugggagaa

SEQ ID NO: 376196 - RNA, 19 nt, Homo sapiens
  misc_RNA (1)...(19): siRNA sense strand
gaauauccucgaucucuga

SEQ ID NO: 376197 - RNA, 19 nt, Homo sapiens
  misc_RNA (1)...(19): siRNA sense strand
gggaagacuaccuugauaa

SEQ ID NO: 376198 - RNA, 19 nt, Homo sapiens
  misc_RNA (1)...(19): siRNA sense strand
cgcaguacuuuaaagauuu

SEQ ID NO: 376199 - RNA, 19 nt, Homo sapiens
  misc_RNA (1)...(19): siRNA sense strand
ugaacugagugcuaugauu

SEQ ID NO: 376200 - RNA, 19 nt, Homo sapiens
  misc_RNA (1)...(19): siRNA sense strand
gaagucagugcucagauug

SEQ ID NO: 376201 - RNA, 19 nt, Homo sapiens
  misc_RNA (1)...(19): siRNA sense strand
gagucaaggucucuuaagu

SEQ ID NO: 376202 - RNA, 19 nt, Homo sapiens
  misc_RNA (1)...(19): siRNA sense strand
uuggagaaaucaaucagua

SEQ ID NO: 376203 - RNA, 19 nt, Homo sapiens
  misc_RNA (1)...(19): siRNA sense strand
ggucaauggugcaauuagu

SEQ ID NO: 376204 - RNA, 19 nt, Homo sapiens
  misc_RNA (1)...(19): siRNA sense strand
gcgaggccauguacaacaa

SEQ ID NO: 376205 - RNA, 19 nt, Homo sapiens
  misc_RNA (1)...(19): siRNA sense strand
gagauaaugauuccacaug

SEQ ID NO: 376206 - RNA, 19 nt, Homo sapiens
  misc_RNA (1)...(19): siRNA sense strand
uacaaacucgcaaguauuu

SEQ ID NO: 376207 - RNA, 19 nt, Homo sapiens
  misc_RNA (1)...(19): siRNA sense strand
ggcguucgcugggccuuua

SEQ ID NO: 376208 - RNA, 19 nt, Homo sapiens
  misc_RNA (1)...(19): siRNA sense strand
caguauagauggcuggaau

SEQ ID NO: 376209 - RNA, 19 nt, Homo sapiens
  misc_RNA (1)...(19): siRNA sense strand
gaagaauuccagaaagcuu

SEQ ID NO: 376210 - RNA, 19 nt, Homo sapiens
  misc_RNA (1)...(19): siRNA sense strand
uuacaaauccgacgacugu

SEQ ID NO: 376211 - RNA, 19 nt, Homo sapiens
  misc_RNA (1)...(19): siRNA sense strand
ugaaggaacuuuuggagaa

SEQ ID NO: 376212 - RNA, 19 nt, Homo sapiens
  misc_RNA (1)...(19): siRNA sense strand
ccaggaagauaagaaggaa

SEQ ID NO: 376213 - RNA, 19 nt, Homo sapiens
  misc_RNA (1)...(19): siRNA sense strand
gaccauugccaacuauuug

SEQ ID NO: 376214 - RNA, 19 nt, Homo sapiens
  misc_RNA (1)...(19): siRNA sense strand
agauaaugauuccacauga

SEQ ID NO: 376215 - RNA, 19 nt, Homo sapiens
  misc_RNA (1)...(19): siRNA sense strand
agggaagacuaccuugaua

SEQ ID NO: 376216 - RNA, 19 nt, Homo sapiens
  misc_RNA (1)...(19): siRNA sense strand
ucuuaagucuccaagcuaa

SEQ ID NO: 376217 - RNA, 19 nt, Homo sapiens
  misc_RNA (1)...(19): siRNA sense strand
augaagaccucaaagcuau

SEQ ID NO: 376218 - RNA, 19 nt, Homo sapiens
  misc_RNA (1)...(19): siRNA sense strand
aaaguuggcuauccagagu

SEQ ID NO: 376219 - RNA, 19 nt, Homo sapiens
  misc_RNA (1)...(19): siRNA sense strand
gcugccaucuuaaguaaag

SEQ ID NO: 376220 - RNA, 19 nt, Homo sapiens
  misc_RNA (1)...(19): siRNA sense strand
cgagaacaaguccaaauug

SEQ ID NO: 376221 - RNA, 19 nt, Homo sapiens
  misc_RNA (1)...(19): siRNA sense strand
caacaaccagcucuucuuc

SEQ ID NO: 376222 - RNA, 19 nt, Homo sapiens
  misc_RNA (1)...(19): siRNA sense strand
acagagugguuuacaaauc

SEQ ID NO: 376223 - RNA, 19 nt, Homo sapiens
  misc_RNA (1)...(19): siRNA sense strand
ggaaaugauggaggaauug

SEQ ID NO: 376224 - RNA, 19 nt, Homo sapiens
  misc_RNA (1)...(19): siRNA sense strand
agcaggcgcuuucaguaua

SEQ ID NO: 376225 - RNA, 19 nt, Homo sapiens
  misc_RNA (1)...(19): siRNA sense strand
gaaccagcgaggccaugua

SEQ ID NO: 376226 - RNA, 19 nt, Homo sapiens
  misc_RNA (1)...(19): siRNA sense strand
caaugaacauaucuugaag

SEQ ID NO: 376227 - RNA, 19 nt, Homo sapiens
  misc_RNA (1)...(19): siRNA sense strand
gacaaagcauccaaugaac

SEQ ID NO: 376228 - RNA, 19 nt, Homo sapiens
  misc_RNA (1)...(19): siRNA sense strand
cuacacauccuacggcauu

SEQ ID NO: 376229 - RNA, 19 nt, Homo sapiens
  misc_RNA (1)...(19): siRNA sense strand
gagaaaucaaucaguagaa

SEQ ID NO: 376230 - RNA, 19 nt, Homo sapiens
  misc_RNA (1)...(19): siRNA sense strand
caccgaagccauacagaaa

SEQ ID NO: 376231 - RNA, 19 nt, Homo sapiens
  misc_RNA (1)...(19): siRNA sense strand
gaguuauggugcuauagga

SEQ ID NO: 376232 - RNA, 19 nt, Homo sapiens
  misc_RNA (1)...(19): siRNA sense strand
ggaacagaauauccucgau

SEQ ID NO: 376233 - RNA, 19 nt, Homo sapiens
  misc_RNA (1)...(19): siRNA sense strand
cugcugccaucuuaaguaa

SEQ ID NO: 376234 - RNA, 19 nt, Homo sapiens
  misc_RNA (1)...(19): siRNA sense strand
ucugauuucuucuggcuaa

SEQ ID NO: 376235 - RNA, 19 nt, Homo sapiens
  misc_RNA (1)...(19): siRNA sense strand
aaagauguuuguagaugug

SEQ ID NO: 376236 - RNA, 19 nt, Homo sapiens
  misc_RNA (1)...(19): siRNA sense strand
gcaggcgcuuucaguauag

SEQ ID NO: 376237 - RNA, 19 nt, Homo sapiens
  misc_RNA (1)...(19): siRNA sense strand
ugugauggcuggauaagca

SEQ ID NO: 376238 - RNA, 19 nt, Homo sapiens
  misc_RNA (1)...(19): siRNA sense strand
ucaauggugcaauuaguaa

SEQ ID NO: 376239 - RNA, 19 nt, Homo sapiens
  misc_RNA (1)...(19): siRNA sense strand
gaauuuacacauggauuug

SEQ ID NO: 376240 - RNA, 19 nt, Homo sapiens
  misc_RNA (1)...(19): siRNA sense strand
gaagccagaaugcaucgaa

SEQ ID NO: 376241 - RNA, 19 nt, Homo sapiens
  misc_RNA (1)...(19): siRNA sense strand
gagagaaagaagaccauug

SEQ ID NO: 376242 - RNA, 19 nt, Homo sapiens
  misc_RNA (1)...(19): siRNA sense strand
ugaaugagaaagcgauuga

SEQ ID NO: 376243 - RNA, 19 nt, Homo sapiens
  misc_RNA (1)...(19): siRNA sense strand
caacguuucguggucaaua

SEQ ID NO: 376244 - RNA, 19 nt, Homo sapiens
  misc_RNA (1)...(19): siRNA sense strand
ccacccaauuccacgauga

SEQ ID NO: 376245 - RNA, 19 nt, Homo sapiens
  misc_RNA (1)...(19): siRNA sense strand
gcaauuaguaacuuugaag

SEQ ID NO: 376246 - RNA, 19 nt, Homo sapiens
  misc_RNA (1)...(19): siRNA sense strand
gaaauggauaaaugacaga

SEQ ID NO: 376247 - RNA, 19 nt, Homo sapiens
  misc_RNA (1)...(19): siRNA sense strand
gaaaaggaaagccaaagaa

SEQ ID NO: 376248 - RNA, 19 nt, Homo sapiens
  misc_RNA (1)...(19): siRNA sense strand
aggaaaugauggaggaauu

SEQ ID NO: 376249 - RNA, 19 nt, Homo sapiens
  misc_RNA (1)...(19): siRNA sense strand
uuggaaagauguuuguaga

SEQ ID NO: 376250 - RNA, 19 nt, Homo sapiens
  misc_RNA (1)...(19): siRNA sense strand
ugaaagugcccucccuuau

SEQ ID NO: 376251 - RNA, 19 nt, Homo sapiens
  misc_RNA (1)...(19): siRNA sense strand
gucaaggucucuuaagucu

SEQ ID NO: 376252 - RNA, 19 nt, Homo sapiens
  misc_RNA (1)...(19): siRNA sense strand
gagggaagacuaccuugau

SEQ ID NO: 376253 - RNA, 19 nt, Homo sapiens
  misc_RNA (1)...(19): siRNA sense strand
gaaggaacuuuuggagaaa

SEQ ID NO: 376254 - RNA, 19 nt, Homo sapiens
  misc_RNA (1)...(19): siRNA sense strand
uauccucgaucucugaguu

SEQ ID NO: 376255 - RNA, 19 nt, Homo sapiens
  misc_RNA (1)...(19): siRNA sense strand
caaagcauccaaugaacau

SEQ ID NO: 376256 - RNA, 19 nt, Homo sapiens
  misc_RNA (1)...(19): siRNA sense strand
accagaagcugcccgagaa

SEQ ID NO: 376257 - RNA, 19 nt, Homo sapiens
  misc_RNA (1)...(19): siRNA sense strand
uagggucaauggugcaauu

SEQ ID NO: 376258 - RNA, 19 nt, Homo sapiens
  misc_RNA (1)...(19): siRNA sense strand
cauagaagcugcauauaaa

SEQ ID NO: 376259 - RNA, 19 nt, Homo sapiens
  misc_RNA (1)...(19): siRNA sense strand
ggacuucuuuccauuauuu

SEQ ID NO: 376260 - RNA, 19 nt, Homo sapiens
  misc_RNA (1)...(19): siRNA sense strand
cauauaaagucgcugauua

SEQ ID NO: 376261 - RNA, 19 nt, Homo sapiens
  misc_RNA (1)...(19): siRNA sense strand
ccacaucguucuacacaua

SEQ ID NO: 376262 - RNA, 19 nt, Homo sapiens
  misc_RNA (1)...(19): siRNA sense strand
ggaaccaaaucuuuacuuu

SEQ ID NO: 376263 - RNA, 19 nt, Homo sapiens
  misc_RNA (1)...(19): siRNA sense strand
ggacauacuuucugugaug

SEQ ID NO: 376264 - RNA, 19 nt, Homo sapiens
  misc_RNA (1)...(19): siRNA sense strand
gaagacaccuguaaucaag

SEQ ID NO: 376265 - RNA, 19 nt, Homo sapiens
  misc_RNA (1)...(19): siRNA sense strand
gcaccaugcucacaaauga

SEQ ID NO: 376266 - RNA, 19 nt, Homo sapiens
  misc_RNA (1)...(19): siRNA sense strand
guaaaucacugaaucuugu

SEQ ID NO: 376267 - RNA, 19 nt, Homo sapiens
  misc_RNA (1)...(19): siRNA sense strand
uaaagucgcugauuaugga

SEQ ID NO: 376268 - RNA, 19 nt, Homo sapiens
  misc_RNA (1)...(19): siRNA sense strand
ugaaaucgaucccuuaaau

SEQ ID NO: 376269 - RNA, 19 nt, Homo sapiens
  misc_RNA (1)...(19): siRNA sense strand
caagaauccucacacagua

SEQ ID NO: 376270 - RNA, 19 nt, Homo sapiens
  misc_RNA (1)...(19): siRNA sense strand
ggaaagaguuuggcguuga

SEQ ID NO: 376271 - RNA, 19 nt, Homo sapiens
  misc_RNA (1)...(19): siRNA sense strand
uauaauagauggagucuuc

SEQ ID NO: 376272 - RNA, 19 nt, Homo sapiens
  misc_RNA (1)...(19): siRNA sense strand
gaacuugaccauuauauca

SEQ ID NO: 376273 - RNA, 19 nt, Homo sapiens
  misc_RNA (1)...(19): siRNA sense strand
aagacgaacuugaccauua

SEQ ID NO: 376274 - RNA, 19 nt, Homo sapiens
  misc_RNA (1)...(19): siRNA sense strand
gaaaucgaucccuuaaaua

SEQ ID NO: 376275 - RNA, 19 nt, Homo sapiens
  misc_RNA (1)...(19): siRNA sense strand
gaaaugaaacagaugacua

SEQ ID NO: 376276 - RNA, 19 nt, Homo sapiens
  misc_RNA (1)...(19): siRNA sense strand
gaaagaguuuggcguugaa

SEQ ID NO: 376277 - RNA, 19 nt, Homo sapiens
  misc_RNA (1)...(19): siRNA sense strand
gggauaacaucuacaguau

SEQ ID NO: 376278 - RNA, 19 nt, Homo sapiens
  misc_RNA (1)...(19): siRNA sense strand
gcaagucagugauucaugu

SEQ ID NO: 376279 - RNA, 19 nt, Homo sapiens
  misc_RNA (1)...(19): siRNA sense strand
agucaaaccugauguugua

SEQ ID NO: 376280 - RNA, 19 nt, Homo sapiens
  misc_RNA (1)...(19): siRNA sense strand
gaugagaaguuguuugaca

SEQ ID NO: 376281 - RNA, 19 nt, Homo sapiens
  misc_RNA (1)...(19): siRNA sense strand
gagcaguggcuucuuauuu

SEQ ID NO: 376282 - RNA, 19 nt, Homo sapiens
  misc_RNA (1)...(19): siRNA sense strand
ggagugaaaugaaacagau

SEQ ID NO: 376283 - RNA, 19 nt, Homo sapiens
  misc_RNA (1)...(19): siRNA sense strand
caagguagaugaagaguac

SEQ ID NO: 376284 - RNA, 19 nt, Homo sapiens
  misc_RNA (1)...(19): siRNA sense strand
ggaagauccuccagaagug

SEQ ID NO: 376285 - RNA, 19 nt, Homo sapiens
  misc_RNA (1)...(19): siRNA sense strand
ggacauucauccaauucaa

SEQ ID NO: 376286 - RNA, 19 nt, Homo sapiens
  misc_RNA (1)...(19): siRNA sense strand
gcacaucguugagguccua

SEQ ID NO: 376287 - RNA, 19 nt, Homo sapiens
  misc_RNA (1)...(19): siRNA sense strand
ucacauauaugccaagcuu

SEQ ID NO: 376288 - RNA, 19 nt, Homo sapiens
  misc_RNA (1)...(19): siRNA sense strand
ggauuggacugaucauuca

SEQ ID NO: 376289 - RNA, 19 nt, Homo sapiens
  misc_RNA (1)...(19): siRNA sense strand
gaagauguaaaccuuguaa

SEQ ID NO: 376290 - RNA, 19 nt, Homo sapiens
  misc_RNA (1)...(19): siRNA sense strand
cgcaggagauugugguuua

SEQ ID NO: 376291 - RNA, 19 nt, Homo sapiens
  misc_RNA (1)...(19): siRNA sense strand
caaaccugauguuguagua

SEQ ID NO: 376292 - RNA, 19 nt, Homo sapiens
  misc_RNA (1)...(19): siRNA sense strand
gaacucaagcucuucgaaa

SEQ ID NO: 376293 - RNA, 19 nt, Homo sapiens
  misc_RNA (1)...(19): siRNA sense strand
guacaagaauccucacaca

SEQ ID NO: 376294 - RNA, 19 nt, Homo sapiens
  misc_RNA (1)...(19): siRNA sense strand
gacauucuguacauucuuu

SEQ ID NO: 376295 - RNA, 19 nt, Homo sapiens
  misc_RNA (1)...(19): siRNA sense strand
gagguggccuucauacaga

SEQ ID NO: 376296 - RNA, 19 nt, Homo sapiens
  misc_RNA (1)...(19): siRNA sense strand
uagggaaccuuucggaauu

SEQ ID NO: 376297 - RNA, 19 nt, Homo sapiens
  misc_RNA (1)...(19): siRNA sense strand
caagagcgucgacaucuaa

SEQ ID NO: 376298 - RNA, 19 nt, Homo sapiens
  misc_RNA (1)...(19): siRNA sense strand
ggaagacaccuguaaucaa

SEQ ID NO: 376299 - RNA, 19 nt, Homo sapiens
  misc_RNA (1)...(19): siRNA sense strand
cauacagaaucuugucuuu

SEQ ID NO: 376300 - RNA, 19 nt, Homo sapiens
  misc_RNA (1)...(19): siRNA sense strand
gcagaaaacaaucacauua

SEQ ID NO: 376301 - RNA, 19 nt, Homo sapiens
  misc_RNA (1)...(19): siRNA sense strand
ccaagagcgucgacaucua

SEQ ID NO: 376302 - RNA, 19 nt, Homo sapiens
  misc_RNA (1)...(19): siRNA sense strand
gauguaaaccuuguaaaug

SEQ ID NO: 376303 - RNA, 19 nt, Homo sapiens
  misc_RNA (1)...(19): siRNA sense strand
gaaugugaguggccugugu

SEQ ID NO: 376304 - RNA, 19 nt, Homo sapiens
  misc_RNA (1)...(19): siRNA sense strand
ggacgcaagucagugauuc

SEQ ID NO: 376305 - RNA, 19 nt, Homo sapiens
  misc_RNA (1)...(19): siRNA sense strand
gggcgaccguaucgacaua

SEQ ID NO: 376306 - RNA, 19 nt, Homo sapiens
  misc_RNA (1)...(19): siRNA sense strand
ggacggaauaagaauauga

SEQ ID NO: 376307 - RNA, 19 nt, Homo sapiens
  misc_RNA (1)...(19): siRNA sense strand
gucgacaucuaaagaaauu

SEQ ID NO: 376308 - RNA, 19 nt, Homo sapiens
  misc_RNA (1)...(19): siRNA sense strand
acauagaagcugcauauaa

SEQ ID NO: 376309 - RNA, 19 nt, Homo sapiens
  misc_RNA (1)...(19): siRNA sense strand
ccucagcccuuucgauaug

SEQ ID NO: 376310 - RNA, 19 nt, Homo sapiens
  misc_RNA (1)...(19): siRNA sense strand
ccuacgagcuggagcagaa

SEQ ID NO: 376311 - RNA, 19 nt, Homo sapiens
  misc_RNA (1)...(19): siRNA sense strand
agacgaacuugaccauuau

SEQ ID NO: 376312 - RNA, 19 nt, Homo sapiens
  misc_RNA (1)...(19): siRNA sense strand
ugagacagguggccaaagu

SEQ ID NO: 376313 - RNA, 19 nt, Homo sapiens
  misc_RNA (1)...(19): siRNA sense strand
ugauagugauucagauuug

SEQ ID NO: 376314 - RNA, 19 nt, Homo sapiens
  misc_RNA (1)...(19): siRNA sense strand
cuaacaagguagaugaaga

SEQ ID NO: 376315 - RNA, 19 nt, Homo sapiens
  misc_RNA (1)...(19): siRNA sense strand
gaugaagaguacaagaauc

SEQ ID NO: 376316 - RNA, 19 nt, Homo sapiens
  misc_RNA (1)...(19): siRNA sense strand
ccagucagcuguucuugca

SEQ ID NO: 376317 - RNA, 19 nt, Homo sapiens
  misc_RNA (1)...(19): siRNA sense strand
caaguuugcuguccauguc

SEQ ID NO: 376318 - RNA, 19 nt, Homo sapiens
  misc_RNA (1)...(19): siRNA sense strand
agcaaaccauccuguguua

SEQ ID NO: 376319 - RNA, 19 nt, Homo sapiens
  misc_RNA (1)...(19): siRNA sense strand
uuacauagaagcugcauau

SEQ ID NO: 376320 - RNA, 19 nt, Homo sapiens
  misc_RNA (1)...(19): siRNA sense strand
gaacugcucaggagaagag

SEQ ID NO: 376321 - RNA, 19 nt, Homo sapiens
  misc_RNA (1)...(19): siRNA sense strand
gauccagacugugaugaga

SEQ ID NO: 376322 - RNA, 19 nt, Homo sapiens
  misc_RNA (1)...(19): siRNA sense strand
cuuggaaccucuaaacuau

SEQ ID NO: 376323 - RNA, 19 nt, Homo sapiens
  misc_RNA (1)...(19): siRNA sense strand
gagcgucgacaucuaaaga

SEQ ID NO: 376324 - RNA, 19 nt, Homo sapiens
  misc_RNA (1)...(19): siRNA sense strand
ucacaaaacucaucuacga

SEQ ID NO: 376325 - RNA, 19 nt, Homo sapiens
  misc_RNA (1)...(19): siRNA sense strand
ucucaggccuucucaggaa

SEQ ID NO: 376326 - RNA, 19 nt, Homo sapiens
  misc_RNA (1)...(19): siRNA sense strand
cgccaugucuucagugcua

SEQ ID NO: 376327 - RNA, 19 nt, Homo sapiens
  misc_RNA (1)...(19): siRNA sense strand
uggaaccucuaaacuauau

SEQ ID NO: 376328 - RNA, 19 nt, Homo sapiens
  misc_RNA (1)...(19): siRNA sense strand
guggagaaguucaaacaca

SEQ ID NO: 376329 - RNA, 19 nt, Homo sapiens
  misc_RNA (1)...(19): siRNA sense strand
gcccagagaugaccauggu

SEQ ID NO: 376330 - RNA, 19 nt, Homo sapiens
  misc_RNA (1)...(19): siRNA sense strand
ggugaaaucgaucccuuaa

SEQ ID NO: 376331 - RNA, 19 nt, Homo sapiens
  misc_RNA (1)...(19): siRNA sense strand
agaaauugaugcuggacuu

SEQ ID NO: 376332 - RNA, 19 nt, Homo sapiens
  misc_RNA (1)...(19): siRNA sense strand
ggaggacgcaagucaguga

SEQ ID NO: 376333 - RNA, 19 nt, Homo sapiens
  misc_RNA (1)...(19): siRNA sense strand
gugaugagaaguuguuuga

SEQ ID NO: 376334 - RNA, 19 nt, Homo sapiens
  misc_RNA (1)...(19): siRNA sense strand
gaucaaguuugcuguccau

SEQ ID NO: 376335 - RNA, 19 nt, Homo sapiens
  misc_RNA (1)...(19): siRNA sense strand
gcgucgacaucuaaagaaa

SEQ ID NO: 376336 - RNA, 19 nt, Homo sapiens
  misc_RNA (1)...(19): siRNA sense strand
ugaugaaccucagcccuuu

SEQ ID NO: 376337 - RNA, 19 nt, Homo sapiens
  misc_RNA (1)...(19): siRNA sense strand
gggcaggacaucagcauug

SEQ ID NO: 376338 - RNA, 19 nt, Homo sapiens
  misc_RNA (1)...(19): siRNA sense strand
cgggauaacaucuacagua

SEQ ID NO: 376339 - RNA, 19 nt, Homo sapiens
  misc_RNA (1)...(19): siRNA sense strand
gggugaacguccagaguau

SEQ ID NO: 376340 - RNA, 19 nt, Homo sapiens
  misc_RNA (1)...(19): siRNA sense strand
acaaucacauuaaggacuu

SEQ ID NO: 376341 - RNA, 19 nt, Homo sapiens
  misc_RNA (1)...(19): siRNA sense strand
ggcauggccuaccguaaga

SEQ ID NO: 376342 - RNA, 19 nt, Homo sapiens
  misc_RNA (1)...(19): siRNA sense strand
agacaccuguaaucaagaa

SEQ ID NO: 376343 - RNA, 19 nt, Homo sapiens
  misc_RNA (1)...(19): siRNA sense strand
agcaguggcuucuuauuug

SEQ ID NO: 376344 - RNA, 19 nt, Homo sapiens
  misc_RNA (1)...(19): siRNA sense strand
ggaguggcauuaacagacu

SEQ ID NO: 376345 - RNA, 19 nt, Homo sapiens
  misc_RNA (1)...(19): siRNA sense strand
ugguuuaccuggccaugua

SEQ ID NO: 376346 - RNA, 19 nt, Homo sapiens
  misc_RNA (1)...(19): siRNA sense strand
ucaagaaagccaagacgaa

SEQ ID NO: 376347 - RNA, 19 nt, Homo sapiens
  misc_RNA (1)...(19): siRNA sense strand
gaaccucuaaacuauaugu

SEQ ID NO: 376348 - RNA, 19 nt, Homo sapiens
  misc_RNA (1)...(19): siRNA sense strand
cuucuuauuugcaggaauu

SEQ ID NO: 376349 - RNA, 19 nt, Homo sapiens
  misc_RNA (1)...(19): siRNA sense strand
gcagugcgcauuccuccaa

SEQ ID NO: 376350 - RNA, 19 nt, Homo sapiens
  misc_RNA (1)...(19): siRNA sense strand
ccaugacuuugccgacuaa

SEQ ID NO: 376351 - RNA, 19 nt, Homo sapiens
  misc_RNA (1)...(19): siRNA sense strand
auucagauuugguaggaua

SEQ ID NO: 376352 - RNA, 19 nt, Homo sapiens
  misc_RNA (1)...(19): siRNA sense strand
gcauauaaagucgcugauu

SEQ ID NO: 376353 - RNA, 19 nt, Homo sapiens
  misc_RNA (1)...(19): siRNA sense strand
acacggagaugaccagcau

SEQ ID NO: 376354 - RNA, 19 nt, Homo sapiens
  misc_RNA (1)...(19): siRNA sense strand
gagaggaguggcauuaaca

SEQ ID NO: 376355 - RNA, 19 nt, Homo sapiens
  misc_RNA (1)...(19): siRNA sense strand
caccguaaaucacugaauc

SEQ ID NO: 376356 - RNA, 19 nt, Homo sapiens
  misc_RNA (1)...(19): siRNA sense strand
cgacaucuaaagaaauuga

SEQ ID NO: 376357 - RNA, 19 nt, Homo sapiens
  misc_RNA (1)...(19): siRNA sense strand
gacgaugaccuaccuaaca

SEQ ID NO: 376358 - RNA, 19 nt, Homo sapiens
  misc_RNA (1)...(19): siRNA sense strand
gaacaugcugggaaccuua

SEQ ID NO: 376359 - RNA, 19 nt, Homo sapiens
  misc_RNA (1)...(19): siRNA sense strand
ggaugaaucugccaagcaa

SEQ ID NO: 376360 - RNA, 19 nt, Homo sapiens
  misc_RNA (1)...(19): siRNA sense strand
gaacuucaccucccgauuc

SEQ ID NO: 376361 - RNA, 19 nt, Homo sapiens
  misc_RNA (1)...(19): siRNA sense strand
gcgacaagaugaugaacaa

SEQ ID NO: 376362 - RNA, 19 nt, Homo sapiens
  misc_RNA (1)...(19): siRNA sense strand
ugacugggcugcucuggaa

SEQ ID NO: 376363 - RNA, 19 nt, Homo sapiens
  misc_RNA (1)...(19): siRNA sense strand
gcagugagcccgaccucua

SEQ ID NO: 376364 - RNA, 19 nt, Homo sapiens
  misc_RNA (1)...(19): siRNA sense strand
gaaaagggccugccacaaa

SEQ ID NO: 376365 - RNA, 19 nt, Homo sapiens
  misc_RNA (1)...(19): siRNA sense strand
caaucgagguuccauguau

SEQ ID NO: 376366 - RNA, 19 nt, Homo sapiens
  misc_RNA (1)...(19): siRNA sense strand
gauauccgaucuacaaugg

SEQ ID NO: 376367 - RNA, 19 nt, Homo sapiens
  misc_RNA (1)...(19): siRNA sense strand
gcucauugauucccucaug

SEQ ID NO: 376368 - RNA, 19 nt, Homo sapiens
  misc_RNA (1)...(19): siRNA sense strand
gcaccuaccugaaccucau

SEQ ID NO: 376369 - RNA, 19 nt, Homo sapiens
  misc_RNA (1)...(19): siRNA sense strand
gcuccaagaucugcaguga

SEQ ID NO: 376370 - RNA, 19 nt, Homo sapiens
  misc_RNA (1)...(19): siRNA sense strand
caacaagagcgacaagaug

SEQ ID NO: 376371 - RNA, 19 nt, Homo sapiens
  misc_RNA (1)...(19): siRNA sense strand
acucagggcucauugauuc

SEQ ID NO: 376372 - RNA, 19 nt, Homo sapiens
  misc_RNA (1)...(19): siRNA sense strand
ggucagaaggccauaaaga

SEQ ID NO: 376373 - RNA, 19 nt, Homo sapiens
  misc_RNA (1)...(19): siRNA sense strand
gcagcaugcucaacaacau

SEQ ID NO: 376374 - RNA, 19 nt, Homo sapiens
  misc_RNA (1)...(19): siRNA sense strand
ccugaggucuucuucaaug

SEQ ID NO: 376375 - RNA, 19 nt, Homo sapiens
  misc_RNA (1)...(19): siRNA sense strand
acaagaugaugaacaacaa

SEQ ID NO: 376376 - RNA, 19 nt, Homo sapiens
  misc_RNA (1)...(19): siRNA sense strand
gcaacaagagcgacaagau

SEQ ID NO: 376377 - RNA, 19 nt, Homo sapiens
  misc_RNA (1)...(19): siRNA sense strand
gaccaugcguaacuacuca

SEQ ID NO: 376378 - RNA, 19 nt, Homo sapiens
  misc_RNA (1)...(19): siRNA sense strand
ggcaugagccaguugauug

SEQ ID NO: 376379 - RNA, 19 nt, Homo sapiens
  misc_RNA (1)...(19): siRNA sense strand
uauccgaucuacaauggaa

SEQ ID NO: 376380 - RNA, 19 nt, Homo sapiens
  misc_RNA (1)...(19): siRNA sense strand
gagccucccuccugagcaa

SEQ ID NO: 376381 - RNA, 19 nt, Homo sapiens
  misc_RNA (1)...(19): siRNA sense strand
ggaacaugcugggaaccuu

SEQ ID NO: 376382 - RNA, 19 nt, Homo sapiens
  misc_RNA (1)...(19): siRNA sense strand
ccaagcaacaggucuauca

SEQ ID NO: 376383 - RNA, 19 nt, Homo sapiens
  misc_RNA (1)...(19): siRNA sense strand
gaugaugaacaacaacuau

SEQ ID NO: 376384 - RNA, 19 nt, Homo sapiens
  misc_RNA (1)...(19): siRNA sense strand
caacaugucccgggaagug

SEQ ID NO: 376385 - RNA, 19 nt, Homo sapiens
  misc_RNA (1)...(19): siRNA sense strand
ggcaagagcaagaaagaug

SEQ ID NO: 376386 - RNA, 19 nt, Homo sapiens
  misc_RNA (1)...(19): siRNA sense strand
gucagaaggccauaaagaa

SEQ ID NO: 376387 - RNA, 19 nt, Homo sapiens
  misc_RNA (1)...(19): siRNA sense strand
ccagaaccgcuacagcuuu

SEQ ID NO: 376388 - RNA, 19 nt, Homo sapiens
  misc_RNA (1)...(19): siRNA sense strand
cagcaagguuucgauagga

SEQ ID NO: 376389 - RNA, 19 nt, Homo sapiens
  misc_RNA (1)...(19): siRNA sense strand
gcugaaggaggaacucauu

SEQ ID NO: 376390 - RNA, 19 nt, Homo sapiens
  misc_RNA (1)...(19): siRNA sense strand
ccuauuacauccagcauac

SEQ ID NO: 376391 - RNA, 19 nt, Homo sapiens
  misc_RNA (1)...(19): siRNA sense strand
uggcuuggcugacaauuac

SEQ ID NO: 376392 - RNA, 19 nt, Homo sapiens
  misc_RNA (1)...(19): siRNA sense strand
gacaagaugaugaacaaca

SEQ ID NO: 376393 - RNA, 19 nt, Homo sapiens
  misc_RNA (1)...(19): siRNA sense strand
ccaacagccucaggaacuu

SEQ ID NO: 376394 - RNA, 19 nt, Homo sapiens
  misc_RNA (1)...(19): siRNA sense strand
cggcagaaguccaagucuu

SEQ ID NO: 376395 - RNA, 19 nt, Homo sapiens
  misc_RNA (1)...(19): siRNA sense strand
gccagaagaccacccagaa

SEQ ID NO: 376396 - RNA, 19 nt, Homo sapiens
  misc_RNA (1)...(19): siRNA sense strand
agacagcaagguuucgaua

SEQ ID NO: 376397 - RNA, 19 nt, Homo sapiens
  misc_RNA (1)...(19): siRNA sense strand
gacgacaagucuguggaaa

SEQ ID NO: 376398 - RNA, 19 nt, Homo sapiens
  misc_RNA (1)...(19): siRNA sense strand
gcucccaggaugagaagua

SEQ ID NO: 376399 - RNA, 19 nt, Homo sapiens
  misc_RNA (1)...(19): siRNA sense strand
uaugauggcuuggcugaca

SEQ ID NO: 376400 - RNA, 19 nt, Homo sapiens
  misc_RNA (1)...(19): siRNA sense strand
gaucugcagugaggacauc

SEQ ID NO: 376401 - RNA, 19 nt, Homo sapiens
  misc_RNA (1)...(19): siRNA sense strand
ggauauccgaucuacaaug

SEQ ID NO: 376402 - RNA, 19 nt, Homo sapiens
  misc_RNA (1)...(19): siRNA sense strand
cagcaacuccgaagacauc

SEQ ID NO: 376403 - RNA, 19 nt, Homo sapiens
  misc_RNA (1)...(19): siRNA sense strand
ugaugaacaacaacuauga

SEQ ID NO: 376404 - RNA, 19 nt, Homo sapiens
  misc_RNA (1)...(19): siRNA sense strand
gccagaccaugcguaacua

SEQ ID NO: 376405 - RNA, 19 nt, Homo sapiens
  misc_RNA (1)...(19): siRNA sense strand
agaaggccauaaagaagug

SEQ ID NO: 376406 - RNA, 19 nt, Homo sapiens
  misc_RNA (1)...(19): siRNA sense strand
uaacuacucagggcucauu

SEQ ID NO: 376407 - RNA, 19 nt, Homo sapiens
  misc_RNA (1)...(19): siRNA sense strand
aacaagagcgacaagauga

SEQ ID NO: 376408 - RNA, 19 nt, Homo sapiens
  misc_RNA (1)...(19): siRNA sense strand
ggcugacaauuacaacuau

SEQ ID NO: 376409 - RNA, 19 nt, Homo sapiens
  misc_RNA (1)...(19): siRNA sense strand
accgccagcuggaguauaa

SEQ ID NO: 376410 - RNA, 19 nt, Homo sapiens
  misc_RNA (1)...(19): siRNA sense strand
gcugacaauuacaacuaug

SEQ ID NO: 376411 - RNA, 19 nt, Homo sapiens
  misc_RNA (1)...(19): siRNA sense strand
ccacugacgagcugaagga

SEQ ID NO: 376412 - RNA, 19 nt, Homo sapiens
  misc_RNA (1)...(19): siRNA sense strand
ucagaaggccauaaagaag

SEQ ID NO: 376413 - RNA, 19 nt, Homo sapiens
  misc_RNA (1)...(19): siRNA sense strand
gcagcuacuacuccaaguu

SEQ ID NO: 376414 - RNA, 19 nt, Homo sapiens
  misc_RNA (1)...(19): siRNA sense strand
gaaccgggaacgccgagau

SEQ ID NO: 376415 - RNA, 19 nt, Homo sapiens
  misc_RNA (1)...(19): siRNA sense strand
cuucaccucccgauucuaa

SEQ ID NO: 376416 - RNA, 19 nt, Homo sapiens
  misc_RNA (1)...(19): siRNA sense strand
ugauugggcugaaggaaaa

SEQ ID NO: 376417 - RNA, 19 nt, Homo sapiens
  misc_RNA (1)...(19): siRNA sense strand
cagaaccgcuacagcuuuu

SEQ ID NO: 376418 - RNA, 19 nt, Homo sapiens
  misc_RNA (1)...(19): siRNA sense strand
caagagcgacaagaugaug

SEQ ID NO: 376419 - RNA, 19 nt, Homo sapiens
  misc_RNA (1)...(19): siRNA sense strand
gaaaacugcauguguguuc

SEQ ID NO: 376420 - RNA, 19 nt, Homo sapiens
  misc_RNA (1)...(19): siRNA sense strand
cagaaggccauaaagaagu

SEQ ID NO: 376421 - RNA, 19 nt, Homo sapiens
  misc_RNA (1)...(19): siRNA sense strand
aaucgagguuccauguaug

SEQ ID NO: 376422 - RNA, 19 nt, Homo sapiens
  misc_RNA (1)...(19): siRNA sense strand
ucaacaacaucaucaaccu

SEQ ID NO: 376423 - RNA, 19 nt, Homo sapiens
  misc_RNA (1)...(19): siRNA sense strand
ccaaucgagguuccaugua

SEQ ID NO: 376424 - RNA, 19 nt, Homo sapiens
  misc_RNA (1)...(19): siRNA sense strand
uggcugacaauuacaacua

SEQ ID NO: 376425 - RNA, 19 nt, Homo sapiens
  misc_RNA (1)...(19): siRNA sense strand
gagaaguaccaggccauug

SEQ ID NO: 376426 - RNA, 19 nt, Homo sapiens
  misc_RNA (1)...(19): siRNA sense strand
agcccgaccucuacuguga

SEQ ID NO: 376427 - RNA, 19 nt, Homo sapiens
  misc_RNA (1)...(19): siRNA sense strand
aaaagggccugccacaaau

SEQ ID NO: 376428 - RNA, 19 nt, Homo sapiens
  misc_RNA (1)...(19): siRNA sense strand
cgauggcaauagcaacaug

SEQ ID NO: 376429 - RNA, 19 nt, Homo sapiens
  misc_RNA (1)...(19): siRNA sense strand
ggaacgccgagauccagaa

SEQ ID NO: 376430 - RNA, 19 nt, Homo sapiens
  misc_RNA (1)...(19): siRNA sense strand
gaacuggagccggcacuac

SEQ ID NO: 376431 - RNA, 19 nt, Homo sapiens
  misc_RNA (1)...(19): siRNA sense strand
ggaacuucaccucccgauu

SEQ ID NO: 376432 - RNA, 19 nt, Homo sapiens
  misc_RNA (1)...(19): siRNA sense strand
cagcuacuacuccaaguuc

SEQ ID NO: 376433 - RNA, 19 nt, Homo sapiens
  misc_RNA (1)...(19): siRNA sense strand
gccaacagccucaggaacu

SEQ ID NO: 376434 - RNA, 19 nt, Homo sapiens
  misc_RNA (1)...(19): siRNA sense strand
acagcaagguuucgauagg

SEQ ID NO: 376435 - RNA, 19 nt, Homo sapiens
  misc_RNA (1)...(19): siRNA sense strand
acccugaggucuucuucaa

SEQ ID NO: 376436 - RNA, 19 nt, Homo sapiens
  misc_RNA (1)...(19): siRNA sense strand
gcccaucuccugcaacaag

SEQ ID NO: 376437 - RNA, 19 nt, Homo sapiens
  misc_RNA (1)...(19): siRNA sense strand
ccugcaaucuggcaacucu

SEQ ID NO: 376438 - RNA, 19 nt, Homo sapiens
  misc_RNA (1)...(19): siRNA sense strand
ggggauauccgaucuacaa

SEQ ID NO: 376439 - RNA, 19 nt, Homo sapiens
  misc_RNA (1)...(19): siRNA sense strand
cgucaucauucccuucucu

SEQ ID NO: 376440 - RNA, 19 nt, Homo sapiens
  misc_RNA (1)...(19): siRNA sense strand
gaacgccgagauccagaag

SEQ ID NO: 376441 - RNA, 19 nt, Homo sapiens
  misc_RNA (1)...(19): siRNA sense strand
acagccagauggagaacug

SEQ ID NO: 376442 - RNA, 19 nt, Homo sapiens
  misc_RNA (1)...(19): siRNA sense strand
caggagcaggugaugauga

SEQ ID NO: 376443 - RNA, 19 nt, Homo sapiens
  misc_RNA (1)...(19): siRNA sense strand
ccaaggcugugcaguaccu

SEQ ID NO: 376444 - RNA, 19 nt, Homo sapiens
  misc_RNA (1)...(19): siRNA sense strand
agaaguaccaggccauugg

SEQ ID NO: 376445 - RNA, 19 nt, Homo sapiens
  misc_RNA (1)...(19): siRNA sense strand
gcaugagccaguugauugg

SEQ ID NO: 376446 - RNA, 19 nt, Homo sapiens
  misc_RNA (1)...(19): siRNA sense strand
ugacgacaagucuguggaa

SEQ ID NO: 376447 - RNA, 19 nt, Homo sapiens
  misc_RNA (1)...(19): siRNA sense strand
ccacaggcugcuugaggaa

SEQ ID NO: 376448 - RNA, 19 nt, Homo sapiens
  misc_RNA (1)...(19): siRNA sense strand
ccgcccaucuccugcaaca

SEQ ID NO: 376449 - RNA, 19 nt, Homo sapiens
  misc_RNA (1)...(19): siRNA sense strand
ucaagcggcagaaguccaa

SEQ ID NO: 376450 - RNA, 19 nt, Homo sapiens
  misc_RNA (1)...(19): siRNA sense strand
guggucagaaggccauaaa

SEQ ID NO: 376451 - RNA, 19 nt, Homo sapiens
  misc_RNA (1)...(19): siRNA sense strand
gacagcaagguuucgauag

SEQ ID NO: 376452 - RNA, 19 nt, Homo sapiens
  misc_RNA (1)...(19): siRNA sense strand
gcugugacgacaagucugu

SEQ ID NO: 376453 - RNA, 19 nt, Homo sapiens
  misc_RNA (1)...(19): siRNA sense strand
uggccuauguccagaacug

SEQ ID NO: 376454 - RNA, 19 nt, Homo sapiens
  misc_RNA (1)...(19): siRNA sense strand
ggccgaccgcgucaucauu

SEQ ID NO: 376455 - RNA, 19 nt, Homo sapiens
  misc_RNA (1)...(19): siRNA sense strand
acgccgagauccagaagca

SEQ ID NO: 376456 - RNA, 19 nt, Homo sapiens
  misc_RNA (1)...(19): siRNA sense strand
gaaccacucgccgcucaag

SEQ ID NO: 376457 - RNA, 19 nt, Homo sapiens
  misc_RNA (1)...(19): siRNA sense strand
cgacaagucuguggaaaac

SEQ ID NO: 376458 - RNA, 19 nt, Homo sapiens
  misc_RNA (1)...(19): siRNA sense strand
caacaggacuucauuauuc

SEQ ID NO: 376459 - RNA, 19 nt, Homo sapiens
  misc_RNA (1)...(19): siRNA sense strand
ggaggaagcugagcaagua

SEQ ID NO: 376460 - RNA, 19 nt, Homo sapiens
  misc_RNA (1)...(19): siRNA sense strand
gaauaaaccuucuucucaa

SEQ ID NO: 376461 - RNA, 19 nt, Homo sapiens
  misc_RNA (1)...(19): siRNA sense strand
ggagaaagaaguaguaaga

SEQ ID NO: 376462 - RNA, 19 nt, Homo sapiens
  misc_RNA (1)...(19): siRNA sense strand
gaggauggcugaagaacug

SEQ ID NO: 376463 - RNA, 19 nt, Homo sapiens
  misc_RNA (1)...(19): siRNA sense strand
gaaagaaguaguaagaguu

SEQ ID NO: 376464 - RNA, 19 nt, Homo sapiens
  misc_RNA (1)...(19): siRNA sense strand
gccaaugaauuuaaaguga

SEQ ID NO: 376465 - RNA, 19 nt, Homo sapiens
  misc_RNA (1)...(19): siRNA sense strand
gaaaucagagaacuugaaa

SEQ ID NO: 376466 - RNA, 19 nt, Homo sapiens
  misc_RNA (1)...(19): siRNA sense strand
gaaaccagccaucaaccua

SEQ ID NO: 376467 - RNA, 19 nt, Homo sapiens
  misc_RNA (1)...(19): siRNA sense strand
ggagagacacuuuggagaa

SEQ ID NO: 376468 - RNA, 19 nt, Homo sapiens
  misc_RNA (1)...(19): siRNA sense strand
gcaacaggacuucauuauu

SEQ ID NO: 376469 - RNA, 19 nt, Homo sapiens
  misc_RNA (1)...(19): siRNA sense strand
ggacuucauuauucuguuc

SEQ ID NO: 376470 - RNA, 19 nt, Homo sapiens
  misc_RNA (1)...(19): siRNA sense strand
gggagcaaaugaaaggaaa

SEQ ID NO: 376471 - RNA, 19 nt, Homo sapiens
  misc_RNA (1)...(19): siRNA sense strand
gcaacucugccucugauaa

SEQ ID NO: 376472 - RNA, 19 nt, Homo sapiens
  misc_RNA (1)...(19): siRNA sense strand
gaacucaggcggaaaagua

SEQ ID NO: 376473 - RNA, 19 nt, Homo sapiens
  misc_RNA (1)...(19): siRNA sense strand
ucacagugcugccgagugu

SEQ ID NO: 376474 - RNA, 19 nt, Homo sapiens
  misc_RNA (1)...(19): siRNA sense strand
aaaguaaauugguggaaga

SEQ ID NO: 376475 - RNA, 19 nt, Homo sapiens
  misc_RNA (1)...(19): siRNA sense strand
gugcauggcucugaauuca

SEQ ID NO: 376476 - RNA, 19 nt, Homo sapiens
  misc_RNA (1)...(19): siRNA sense strand
gaauuuaaagugagacgaa

SEQ ID NO: 376477 - RNA, 19 nt, Homo sapiens
  misc_RNA (1)...(19): siRNA sense strand
gcaaguaggagcuuuguac

SEQ ID NO: 376478 - RNA, 19 nt, Homo sapiens
  misc_RNA (1)...(19): siRNA sense strand
gaacaacuauaagcauugc

SEQ ID NO: 376479 - RNA, 19 nt, Homo sapiens
  misc_RNA (1)...(19): siRNA sense strand
gaagaacaacuauaagcau

SEQ ID NO: 376480 - RNA, 19 nt, Homo sapiens
  misc_RNA (1)...(19): siRNA sense strand
ugaauucagucaaacaaca

SEQ ID NO: 376481 - RNA, 19 nt, Homo sapiens
  misc_RNA (1)...(19): siRNA sense strand
agaaagaaguaguaagagu

SEQ ID NO: 376482 - RNA, 19 nt, Homo sapiens
  misc_RNA (1)...(19): siRNA sense strand
uaggagcuuuguacaauga

SEQ ID NO: 376483 - RNA, 19 nt, Homo sapiens
  misc_RNA (1)...(19): siRNA sense strand
agucauggauuuccuccua

SEQ ID NO: 376484 - RNA, 19 nt, Homo sapiens
  misc_RNA (1)...(19): siRNA sense strand
ggauacacccagacaaaug

SEQ ID NO: 376485 - RNA, 19 nt, Homo sapiens
  misc_RNA (1)...(19): siRNA sense strand
ucauggauuuccuccuaua

SEQ ID NO: 376486 - RNA, 19 nt, Homo sapiens
  misc_RNA (1)...(19): siRNA sense strand
ccaccaaugugaugucuac

SEQ ID NO: 376487 - RNA, 19 nt, Homo sapiens
  misc_RNA (1)...(19): siRNA sense strand
gaaucuggagaaagaagua

SEQ ID NO: 376488 - RNA, 19 nt, Homo sapiens
  misc_RNA (1)...(19): siRNA sense strand
guaggagcuuuguacaaug

SEQ ID NO: 376489 - RNA, 19 nt, Homo sapiens
  misc_RNA (1)...(19): siRNA sense strand
uuauaccucugaauucuga

SEQ ID NO: 376490 - RNA, 19 nt, Homo sapiens
  misc_RNA (1)...(19): siRNA sense strand
ccagaaaucagagaacuug

SEQ ID NO: 376491 - RNA, 19 nt, Homo sapiens
  misc_RNA (1)...(19): siRNA sense strand
caugcaaacugaaagcaau

SEQ ID NO: 376492 - RNA, 19 nt, Homo sapiens
  misc_RNA (1)...(19): siRNA sense strand
cagcaacaggacuucauua

SEQ ID NO: 376493 - RNA, 19 nt, Homo sapiens
  misc_RNA (1)...(19): siRNA sense strand
ggagcuuuguacaaugaaa

SEQ ID NO: 376494 - RNA, 19 nt, Homo sapiens
  misc_RNA (1)...(19): siRNA sense strand
ggaagagccaauagacaug

SEQ ID NO: 376495 - RNA, 19 nt, Homo sapiens
  misc_RNA (1)...(19): siRNA sense strand
aguaggagcuuuguacaau

SEQ ID NO: 376496 - RNA, 19 nt, Homo sapiens
  misc_RNA (1)...(19): siRNA sense strand
gcaaacugaaagcaauauu

SEQ ID NO: 376497 - RNA, 19 nt, Homo sapiens
  misc_RNA (1)...(19): siRNA sense strand
caacucugccucugauaau

SEQ ID NO: 376498 - RNA, 19 nt, Homo sapiens
  misc_RNA (1)...(19): siRNA sense strand
ucaugaggauggcugaaga

SEQ ID NO: 376499 - RNA, 19 nt, Homo sapiens
  misc_RNA (1)...(19): siRNA sense strand
gagagacacuuuggagaac

SEQ ID NO: 376500 - RNA, 19 nt, Homo sapiens
  misc_RNA (1)...(19): siRNA sense strand
gaaaggaaaagaaaacgaa

SEQ ID NO: 376501 - RNA, 19 nt, Homo sapiens
  misc_RNA (1)...(19): siRNA sense strand
gaauucagucaaacaacaa

SEQ ID NO: 376502 - RNA, 19 nt, Homo sapiens
  misc_RNA (1)...(19): siRNA sense strand
uaggauacacccagacaaa

SEQ ID NO: 376503 - RNA, 19 nt, Homo sapiens
  misc_RNA (1)...(19): siRNA sense strand
gaacugaaucuggagaaag

SEQ ID NO: 376504 - RNA, 19 nt, Homo sapiens
  misc_RNA (1)...(19): siRNA sense strand
gaaaagaaaacgaagaaca

SEQ ID NO: 376505 - RNA, 19 nt, Homo sapiens
  misc_RNA (1)...(19): siRNA sense strand
gauacacccagacaaaugu

SEQ ID NO: 376506 - RNA, 19 nt, Homo sapiens
  misc_RNA (1)...(19): siRNA sense strand
aacugaaucuggagaaaga

SEQ ID NO: 376507 - RNA, 19 nt, Homo sapiens
  misc_RNA (1)...(19): siRNA sense strand
aaagugggagcaaaugaaa

SEQ ID NO: 376508 - RNA, 19 nt, Homo sapiens
  misc_RNA (1)...(19): siRNA sense strand
agugauggcagguaguuua

SEQ ID NO: 376509 - RNA, 19 nt, Homo sapiens
  misc_RNA (1)...(19): siRNA sense strand
gcaaaugaaaggaaaagaa

SEQ ID NO: 376510 - RNA, 19 nt, Homo sapiens
  misc_RNA (1)...(19): siRNA sense strand
cgaagaacaacuauaagca

SEQ ID NO: 376511 - RNA, 19 nt, Homo sapiens
  misc_RNA (1)...(19): siRNA sense strand
ggagugauggcagguaguu

SEQ ID NO: 376512 - RNA, 19 nt, Homo sapiens
  misc_RNA (1)...(19): siRNA sense strand
aaugugaugucuacagcaa

SEQ ID NO: 376513 - RNA, 19 nt, Homo sapiens
  misc_RNA (1)...(19): siRNA sense strand
guuccuuccugucauuaug

SEQ ID NO: 376514 - RNA, 19 nt, Homo sapiens
  misc_RNA (1)...(19): siRNA sense strand
agaaaucagagaacuugaa

SEQ ID NO: 376515 - RNA, 19 nt, Homo sapiens
  misc_RNA (1)...(19): siRNA sense strand
agaacugaaucuggagaaa

SEQ ID NO: 376516 - RNA, 19 nt, Homo sapiens
  misc_RNA (1)...(19): siRNA sense strand
ggagaacagaauaaaccuu

SEQ ID NO: 376517 - RNA, 19 nt, Homo sapiens
  misc_RNA (1)...(19): siRNA sense strand
gugauggcagguaguuuaa

SEQ ID NO: 376518 - RNA, 19 nt, Homo sapiens
  misc_RNA (1)...(19): siRNA sense strand
aauaaaccuucuucucaag

SEQ ID NO: 376519 - RNA, 19 nt, Homo sapiens
  misc_RNA (1)...(19): siRNA sense strand
gcaugcaaacugaaagcaa

SEQ ID NO: 376520 - RNA, 19 nt, Homo sapiens
  misc_RNA (1)...(19): siRNA sense strand
uugaaaaguuugccaauga

SEQ ID NO: 376521 - RNA, 19 nt, Homo sapiens
  misc_RNA (1)...(19): siRNA sense strand
ccccuugucuuuauaaauu

SEQ ID NO: 376522 - RNA, 19 nt, Homo sapiens
  misc_RNA (1)...(19): siRNA sense strand
ggaagcugagcaaguagga

SEQ ID NO: 376523 - RNA, 19 nt, Homo sapiens
  misc_RNA (1)...(19): siRNA sense strand
guaguaagaguuugguuuu

SEQ ID NO: 376524 - RNA, 19 nt, Homo sapiens
  misc_RNA (1)...(19): siRNA sense strand
gagccaauagacauggauu

SEQ ID NO: 376525 - RNA, 19 nt, Homo sapiens
  misc_RNA (1)...(19): siRNA sense strand
ugugaugucuacagcaaca

SEQ ID NO: 376526 - RNA, 19 nt, Homo sapiens
  misc_RNA (1)...(19): siRNA sense strand
ugaaaaguuugccaaugaa

SEQ ID NO: 376527 - RNA, 19 nt, Homo sapiens
  misc_RNA (1)...(19): siRNA sense strand
ccaaccaugccaccaaugu

SEQ ID NO: 376528 - RNA, 19 nt, Homo sapiens
  misc_RNA (1)...(19): siRNA sense strand
gauggcagguaguuuaacc

SEQ ID NO: 376529 - RNA, 19 nt, Homo sapiens
  misc_RNA (1)...(19): siRNA sense strand
caaguaggagcuuuguaca

SEQ ID NO: 376530 - RNA, 19 nt, Homo sapiens
  misc_RNA (1)...(19): siRNA sense strand
uggaagagccaauagacau

SEQ ID NO: 376531 - RNA, 19 nt, Homo sapiens
  misc_RNA (1)...(19): siRNA sense strand
cugcaacucugccucugau

SEQ ID NO: 376532 - RNA, 19 nt, Homo sapiens
  misc_RNA (1)...(19): siRNA sense strand
gagacacuuuggagaacag

SEQ ID NO: 376533 - RNA, 19 nt, Homo sapiens
  misc_RNA (1)...(19): siRNA sense strand
gcaaccggaggcagagaga

SEQ ID NO: 376534 - RNA, 19 nt, Homo sapiens
  misc_RNA (1)...(19): siRNA sense strand
aaccagccaucaaccuaug

SEQ ID NO: 376535 - RNA, 19 nt, Homo sapiens
  misc_RNA (1)...(19): siRNA sense strand
gagaaagaaguaguaagag

SEQ ID NO: 376536 - RNA, 19 nt, Homo sapiens
  misc_RNA (1)...(19): siRNA sense strand
gagcaaguaggagcuuugu

SEQ ID NO: 376537 - RNA, 19 nt, Homo sapiens
  misc_RNA (1)...(19): siRNA sense strand
aaaccagccaucaaccuau

SEQ ID NO: 376538 - RNA, 19 nt, Homo sapiens
  misc_RNA (1)...(19): siRNA sense strand
gucauggauuuccuccuau

SEQ ID NO: 376539 - RNA, 19 nt, Homo sapiens
  misc_RNA (1)...(19): siRNA sense strand
aguaguaagaguuugguuu

SEQ ID NO: 376540 - RNA, 19 nt, Homo sapiens
  misc_RNA (1)...(19): siRNA sense strand
caaccaugccaccaaugug

SEQ ID NO: 376541 - RNA, 19 nt, Homo sapiens
  misc_RNA (1)...(19): siRNA sense strand
ucuguuccuuccugucauu

SEQ ID NO: 376542 - RNA, 19 nt, Homo sapiens
  misc_RNA (1)...(19): siRNA sense strand
aaccaugccaccaauguga

SEQ ID NO: 376543 - RNA, 19 nt, Homo sapiens
  misc_RNA (1)...(19): siRNA sense strand
agaacaacuauaagcauug

SEQ ID NO: 376544 - RNA, 19 nt, Homo sapiens
  misc_RNA (1)...(19): siRNA sense strand
gaaaacgaagaacaacuau

SEQ ID NO: 376545 - RNA, 19 nt, Homo sapiens
  misc_RNA (1)...(19): siRNA sense strand
agaaaacgaagaacaacua

SEQ ID NO: 376546 - RNA, 19 nt, Homo sapiens
  misc_RNA (1)...(19): siRNA sense strand
ggaaaccagccaucaaccu

SEQ ID NO: 376547 - RNA, 19 nt, Homo sapiens
  misc_RNA (1)...(19): siRNA sense strand
aaaugcaugcaaacugaaa

SEQ ID NO: 376548 - RNA, 19 nt, Homo sapiens
  misc_RNA (1)...(19): siRNA sense strand
cuuuauaccucugaauucu

SEQ ID NO: 376549 - RNA, 19 nt, Homo sapiens
  misc_RNA (1)...(19): siRNA sense strand
aacaggacuucauuauucu

SEQ ID NO: 376550 - RNA, 19 nt, Homo sapiens
  misc_RNA (1)...(19): siRNA sense strand
ggaagcggauggagaagaa

SEQ ID NO: 376551 - RNA, 19 nt, Homo sapiens
  misc_RNA (1)...(19): siRNA sense strand
gaagcgcagucaccugaaa

SEQ ID NO: 376552 - RNA, 19 nt, Homo sapiens
  misc_RNA (1)...(19): siRNA sense strand
gcagugaaguucccuugug

SEQ ID NO: 376553 - RNA, 19 nt, Homo sapiens
  misc_RNA (1)...(19): siRNA sense strand
gcauagaggagaucuguga

SEQ ID NO: 376554 - RNA, 19 nt, Homo sapiens
  misc_RNA (1)...(19): siRNA sense strand
gcagcgaggucaugagcaa

SEQ ID NO: 376555 - RNA, 19 nt, Homo sapiens
  misc_RNA (1)...(19): siRNA sense strand
gcaacauggugucugagaa

SEQ ID NO: 376556 - RNA, 19 nt, Homo sapiens
  misc_RNA (1)...(19): siRNA sense strand
ucacaagccuccugcuguu

SEQ ID NO: 376557 - RNA, 19 nt, Homo sapiens
  misc_RNA (1)...(19): siRNA sense strand
cagaagagcugggcaccuu

SEQ ID NO: 376558 - RNA, 19 nt, Homo sapiens
  misc_RNA (1)...(19): siRNA sense strand
ccaagaagaccaaguagau

SEQ ID NO: 376559 - RNA, 19 nt, Homo sapiens
  misc_RNA (1)...(19): siRNA sense strand
gcacaucagagacaaggaa

SEQ ID NO: 376560 - RNA, 19 nt, Homo sapiens
  misc_RNA (1)...(19): siRNA sense strand
agaaggaggccaagagaaa

SEQ ID NO: 376561 - RNA, 19 nt, Homo sapiens
  misc_RNA (1)...(19): siRNA sense strand
ugagcaacauggugucuga

SEQ ID NO: 376562 - RNA, 19 nt, Homo sapiens
  misc_RNA (1)...(19): siRNA sense strand
guccucaacuucaucaaga

SEQ ID NO: 376563 - RNA, 19 nt, Homo sapiens
  misc_RNA (1)...(19): siRNA sense strand
cuacggcguuuacaccaaa

SEQ ID NO: 376564 - RNA, 19 nt, Homo sapiens
  misc_RNA (1)...(19): siRNA sense strand
gcaccuucguccucaacuu

SEQ ID NO: 376565 - RNA, 19 nt, Homo sapiens
  misc_RNA (1)...(19): siRNA sense strand
gcacaccagcuccucuuga

SEQ ID NO: 376566 - RNA, 19 nt, Homo sapiens
  misc_RNA (1)...(19): siRNA sense strand
agaccaagaagaccaagua

SEQ ID NO: 376567 - RNA, 19 nt, Homo sapiens
  misc_RNA (1)...(19): siRNA sense strand
gcucauugaugggaagaug

SEQ ID NO: 376568 - RNA, 19 nt, Homo sapiens
  misc_RNA (1)...(19): siRNA sense strand
gaaacgagacacagaagac

SEQ ID NO: 376569 - RNA, 19 nt, Homo sapiens
  misc_RNA (1)...(19): siRNA sense strand
agacacagaagaccaagaa

SEQ ID NO: 376570 - RNA, 19 nt, Homo sapiens
  misc_RNA (1)...(19): siRNA sense strand
gcaaacgugccaacuccuu

SEQ ID NO: 376571 - RNA, 19 nt, Homo sapiens
  misc_RNA (1)...(19): siRNA sense strand
gagaaggaggccaagagaa

SEQ ID NO: 376572 - RNA, 19 nt, Homo sapiens
  misc_RNA (1)...(19): siRNA sense strand
uagaggagaucugugacuu

SEQ ID NO: 376573 - RNA, 19 nt, Homo sapiens
  misc_RNA (1)...(19): siRNA sense strand
gaggaggccaaggaaauuu

SEQ ID NO: 376574 - RNA, 19 nt, Homo sapiens
  misc_RNA (1)...(19): siRNA sense strand
cugcuggacucaaagaaga

SEQ ID NO: 376575 - RNA, 19 nt, Homo sapiens
  misc_RNA (1)...(19): siRNA sense strand
acacagaagaccaagaaga

SEQ ID NO: 376576 - RNA, 19 nt, Homo sapiens
  misc_RNA (1)...(19): siRNA sense strand
gagagaaggaggccaagag

SEQ ID NO: 376577 - RNA, 19 nt, Homo sapiens
  misc_RNA (1)...(19): siRNA sense strand
gaagagcugggcaccuuag

SEQ ID NO: 376578 - RNA, 19 nt, Homo sapiens
  misc_RNA (1)...(19): siRNA sense strand
ggacaucaaggaggucuuc

SEQ ID NO: 376579 - RNA, 19 nt, Homo sapiens
  misc_RNA (1)...(19): siRNA sense strand
cgaggaggccaaggaaauu

SEQ ID NO: 376580 - RNA, 19 nt, Homo sapiens
  misc_RNA (1)...(19): siRNA sense strand
cagcuccucuugacucagu

SEQ ID NO: 376581 - RNA, 19 nt, Homo sapiens
  misc_RNA (1)...(19): siRNA sense strand
ugucaggcuuggagaguau

SEQ ID NO: 376582 - RNA, 19 nt, Homo sapiens
  misc_RNA (1)...(19): siRNA sense strand
gagcuggaccuggacauca

SEQ ID NO: 376583 - RNA, 19 nt, Homo sapiens
  misc_RNA (1)...(19): siRNA sense strand
gggagugcauagaggagau

SEQ ID NO: 376584 - RNA, 19 nt, Homo sapiens
  misc_RNA (1)...(19): siRNA sense strand
gugggcuccuucacaacua

SEQ ID NO: 376585 - RNA, 19 nt, Homo sapiens
  misc_RNA (1)...(19): siRNA sense strand
cuucacaacuacggcguuu

SEQ ID NO: 376586 - RNA, 19 nt, Homo sapiens
  misc_RNA (1)...(19): siRNA sense strand
ccuggaagcggauggagaa

SEQ ID NO: 376587 - RNA, 19 nt, Homo sapiens
  misc_RNA (1)...(19): siRNA sense strand
caacauggugucugagaac

SEQ ID NO: 376588 - RNA, 19 nt, Homo sapiens
  misc_RNA (1)...(19): siRNA sense strand
gaaggaggccaagagaaac

SEQ ID NO: 376589 - RNA, 19 nt, Homo sapiens
  misc_RNA (1)...(19): siRNA sense strand
caagaagaccaaguagauc

SEQ ID NO: 376590 - RNA, 19 nt, Homo sapiens
  misc_RNA (1)...(19): siRNA sense strand
ucacaacuacggcguuuac

SEQ ID NO: 376591 - RNA, 19 nt, Homo sapiens
  misc_RNA (1)...(19): siRNA sense strand
gccgcuaccucgacuggau

SEQ ID NO: 376592 - RNA, 19 nt, Homo sapiens
  misc_RNA (1)...(19): siRNA sense strand
ccacagcagccgagagaag

SEQ ID NO: 376593 - RNA, 19 nt, Homo sapiens
  misc_RNA (1)...(19): siRNA sense strand
gugcauagaggagaucugu

SEQ ID NO: 376594 - RNA, 19 nt, Homo sapiens
  misc_RNA (1)...(19): siRNA sense strand
uaccacagcagccgagaga

SEQ ID NO: 376595 - RNA, 19 nt, Homo sapiens
  misc_RNA (1)...(19): siRNA sense strand
ucgaggaggccaaggaaau

SEQ ID NO: 376596 - RNA, 19 nt, Homo sapiens
  misc_RNA (1)...(19): siRNA sense strand
gcugugcgccuggcuacaa

SEQ ID NO: 376597 - RNA, 19 nt, Homo sapiens
  misc_RNA (1)...(19): siRNA sense strand
agagaaggaggccaagaga

SEQ ID NO: 376598 - RNA, 19 nt, Homo sapiens
  misc_RNA (1)...(19): siRNA sense strand
ugaaacgagacacagaaga

SEQ ID NO: 376599 - RNA, 19 nt, Homo sapiens
  misc_RNA (1)...(19): siRNA sense strand
agaagagcugggcaccuua

SEQ ID NO: 376600 - RNA, 19 nt, Homo sapiens
  misc_RNA (1)...(19): siRNA sense strand
ccugaaacgagacacagaa

SEQ ID NO: 376601 - RNA, 19 nt, Homo sapiens
  misc_RNA (1)...(19): siRNA sense strand
ccucaacuucaucaagauu

SEQ ID NO: 376602 - RNA, 19 nt, Homo sapiens
  misc_RNA (1)...(19): siRNA sense strand
gaagauauauuccuccaau

SEQ ID NO: 376603 - RNA, 19 nt, Homo sapiens
  misc_RNA (1)...(19): siRNA sense strand
ggaacaauauugaugaugu

SEQ ID NO: 376604 - RNA, 19 nt, Homo sapiens
  misc_RNA (1)...(19): siRNA sense strand
gugaagaucuugaccaaug

SEQ ID NO: 376605 - RNA, 19 nt, Homo sapiens
  misc_RNA (1)...(19): siRNA sense strand
caaggaauaucuaguacuu

SEQ ID NO: 376606 - RNA, 19 nt, Homo sapiens
  misc_RNA (1)...(19): siRNA sense strand
gaacugguguaaugauaug

SEQ ID NO: 376607 - RNA, 19 nt, Homo sapiens
  misc_RNA (1)...(19): siRNA sense strand
ggcgcuauguguauuauua

SEQ ID NO: 376608 - RNA, 19 nt, Homo sapiens
  misc_RNA (1)...(19): siRNA sense strand
gaucagcauacacaaauua

SEQ ID NO: 376609 - RNA, 19 nt, Homo sapiens
  misc_RNA (1)...(19): siRNA sense strand
guauagagcgugcagauaa

SEQ ID NO: 376610 - RNA, 19 nt, Homo sapiens
  misc_RNA (1)...(19): siRNA sense strand
gggacgaacugguguaaug

SEQ ID NO: 376611 - RNA, 19 nt, Homo sapiens
  misc_RNA (1)...(19): siRNA sense strand
ugacaaggaauaucuagua

SEQ ID NO: 376612 - RNA, 19 nt, Homo sapiens
  misc_RNA (1)...(19): siRNA sense strand
gaagaucagcauacacaaa

SEQ ID NO: 376613 - RNA, 19 nt, Homo sapiens
  misc_RNA (1)...(19): siRNA sense strand
gauagcauuugcaguauag

SEQ ID NO: 376614 - RNA, 19 nt, Homo sapiens
  misc_RNA (1)...(19): siRNA sense strand
gaaugaaccuuuugaugaa

SEQ ID NO: 376615 - RNA, 19 nt, Homo sapiens
  misc_RNA (1)...(19): siRNA sense strand
gacuuagacuugaccuaua

SEQ ID NO: 376616 - RNA, 19 nt, Homo sapiens
  misc_RNA (1)...(19): siRNA sense strand
gaagacaaguucauguacu

SEQ ID NO: 376617 - RNA, 19 nt, Homo sapiens
  misc_RNA (1)...(19): siRNA sense strand
aaacagaacaagaugcuaa

SEQ ID NO: 376618 - RNA, 19 nt, Homo sapiens
  misc_RNA (1)...(19): siRNA sense strand
cacaagaggcccuagauuu

SEQ ID NO: 376619 - RNA, 19 nt, Homo sapiens
  misc_RNA (1)...(19): siRNA sense strand
gggaagacaaguucaugua

SEQ ID NO: 376620 - RNA, 19 nt, Homo sapiens
  misc_RNA (1)...(19): siRNA sense strand
gcacaagaggcccuagauu

SEQ ID NO: 376621 - RNA, 19 nt, Homo sapiens
  misc_RNA (1)...(19): siRNA sense strand
gaucuugaccaauggcuaa

SEQ ID NO: 376622 - RNA, 19 nt, Homo sapiens
  misc_RNA (1)...(19): siRNA sense strand
cagauaaugacaaggaaua

SEQ ID NO: 376623 - RNA, 19 nt, Homo sapiens
  misc_RNA (1)...(19): siRNA sense strand
gaaguaaggaccagagaca

SEQ ID NO: 376624 - RNA, 19 nt, Homo sapiens
  misc_RNA (1)...(19): siRNA sense strand
caccacagcuagaacuuau

SEQ ID NO: 376625 - RNA, 19 nt, Homo sapiens
  misc_RNA (1)...(19): siRNA sense strand
cgauagcauuugcaguaua

SEQ ID NO: 376626 - RNA, 19 nt, Homo sapiens
  misc_RNA (1)...(19): siRNA sense strand
gaguaacuauucccaguca

SEQ ID NO: 376627 - RNA, 19 nt, Homo sapiens
  misc_RNA (1)...(19): siRNA sense strand
uaugacaccgccaaauuua

SEQ ID NO: 376628 - RNA, 19 nt, Homo sapiens
  misc_RNA (1)...(19): siRNA sense strand
aaagagaucguuagcagaa

SEQ ID NO: 376629 - RNA, 19 nt, Homo sapiens
  misc_RNA (1)...(19): siRNA sense strand
gaucuugacaaagcaaaua

SEQ ID NO: 376630 - RNA, 19 nt, Homo sapiens
  misc_RNA (1)...(19): siRNA sense strand
gaaacuauuccaauguuca

SEQ ID NO: 376631 - RNA, 19 nt, Homo sapiens
  misc_RNA (1)...(19): siRNA sense strand
auagcuaccuguuaaagaa

SEQ ID NO: 376632 - RNA, 19 nt, Homo sapiens
  misc_RNA (1)...(19): siRNA sense strand
ggaagucuaugugaucaag

SEQ ID NO: 376633 - RNA, 19 nt, Homo sapiens
  misc_RNA (1)...(19): siRNA sense strand
guuaaagaaucaucuggau

SEQ ID NO: 376634 - RNA, 19 nt, Homo sapiens
  misc_RNA (1)...(19): siRNA sense strand
agcuaaaggugaagauaua

SEQ ID NO: 376635 - RNA, 19 nt, Homo sapiens
  misc_RNA (1)...(19): siRNA sense strand
gauauauuccuccaauuca

SEQ ID NO: 376636 - RNA, 19 nt, Homo sapiens
  misc_RNA (1)...(19): siRNA sense strand
gaacuuaucaaacccuuuu

SEQ ID NO: 376637 - RNA, 19 nt, Homo sapiens
  misc_RNA (1)...(19): siRNA sense strand
gaggauggauucgacuuag

SEQ ID NO: 376638 - RNA, 19 nt, Homo sapiens
  misc_RNA (1)...(19): siRNA sense strand
gacuugaccuauauuuauc

SEQ ID NO: 376639 - RNA, 19 nt, Homo sapiens
  misc_RNA (1)...(19): siRNA sense strand
gacaaggaauaucuaguac

SEQ ID NO: 376640 - RNA, 19 nt, Homo sapiens
  misc_RNA (1)...(19): siRNA sense strand
ggacaaaauguuucacuuu

SEQ ID NO: 376641 - RNA, 19 nt, Homo sapiens
  misc_RNA (1)...(19): siRNA sense strand
guagaguucuuccacaaac

SEQ ID NO: 376642 - RNA, 19 nt, Homo sapiens
  misc_RNA (1)...(19): siRNA sense strand
ggacgaacugguguaauga

SEQ ID NO: 376643 - RNA, 19 nt, Homo sapiens
  misc_RNA (1)...(19): siRNA sense strand
uaagugaagaugacaauca

SEQ ID NO: 376644 - RNA, 19 nt, Homo sapiens
  misc_RNA (1)...(19): siRNA sense strand
guggugauaucaaaguaga

SEQ ID NO: 376645 - RNA, 19 nt, Homo sapiens
  misc_RNA (1)...(19): siRNA sense strand
cagcauacacaaauuacaa

SEQ ID NO: 376646 - RNA, 19 nt, Homo sapiens
  misc_RNA (1)...(19): siRNA sense strand
gauauucugacaccacuga

SEQ ID NO: 376647 - RNA, 19 nt, Homo sapiens
  misc_RNA (1)...(19): siRNA sense strand
ggauucgacuuagacuuga

SEQ ID NO: 376648 - RNA, 19 nt, Homo sapiens
  misc_RNA (1)...(19): siRNA sense strand
gaaggcguauacaggaaca

SEQ ID NO: 376649 - RNA, 19 nt, Homo sapiens
  misc_RNA (1)...(19): siRNA sense strand
acaagaggcccuagauuuc

SEQ ID NO: 376650 - RNA, 19 nt, Homo sapiens
  misc_RNA (1)...(19): siRNA sense strand
acgaacugguguaaugaua

SEQ ID NO: 376651 - RNA, 19 nt, Homo sapiens
  misc_RNA (1)...(19): siRNA sense strand
guauacaggaacaauauug

SEQ ID NO: 376652 - RNA, 19 nt, Homo sapiens
  misc_RNA (1)...(19): siRNA sense strand
cauuauugcuaugggauuu

SEQ ID NO: 376653 - RNA, 19 nt, Homo sapiens
  misc_RNA (1)...(19): siRNA sense strand
agacaaagccaaccgauac

SEQ ID NO: 376654 - RNA, 19 nt, Homo sapiens
  misc_RNA (1)...(19): siRNA sense strand
cacaagaugauguuugaaa

SEQ ID NO: 376655 - RNA, 19 nt, Homo sapiens
  misc_RNA (1)...(19): siRNA sense strand
cgacuuagacuugaccuau

SEQ ID NO: 376656 - RNA, 19 nt, Homo sapiens
  misc_RNA (1)...(19): siRNA sense strand
gcguauacaggaacaauau

SEQ ID NO: 376657 - RNA, 19 nt, Homo sapiens
  misc_RNA (1)...(19): siRNA sense strand
ugacaccacugacucugau

SEQ ID NO: 376658 - RNA, 19 nt, Homo sapiens
  misc_RNA (1)...(19): siRNA sense strand
ugacaaagcaaauaaagac

SEQ ID NO: 376659 - RNA, 19 nt, Homo sapiens
  misc_RNA (1)...(19): siRNA sense strand
cagaggcgcuauguguauu

SEQ ID NO: 376660 - RNA, 19 nt, Homo sapiens
  misc_RNA (1)...(19): siRNA sense strand
gcugaaagacauuaugaca

SEQ ID NO: 376661 - RNA, 19 nt, Homo sapiens
  misc_RNA (1)...(19): siRNA sense strand
ccacaaacagaacaagaug

SEQ ID NO: 376662 - RNA, 19 nt, Homo sapiens
  misc_RNA (1)...(19): siRNA sense strand
uauagagcgugcagauaau

SEQ ID NO: 376663 - RNA, 19 nt, Homo sapiens
  misc_RNA (1)...(19): siRNA sense strand
ucaagaaaucgauagcauu

SEQ ID NO: 376664 - RNA, 19 nt, Homo sapiens
  misc_RNA (1)...(19): siRNA sense strand
aaggagauaucaagaggau

SEQ ID NO: 376665 - RNA, 19 nt, Homo sapiens
  misc_RNA (1)...(19): siRNA sense strand
gauaucaagaggauggauu

SEQ ID NO: 376666 - RNA, 19 nt, Homo sapiens
  misc_RNA (1)...(19): siRNA sense strand
ugacaccgccaaauuuaau

SEQ ID NO: 376667 - RNA, 19 nt, Homo sapiens
  misc_RNA (1)...(19): siRNA sense strand
cagcuaaaggugaagauau

SEQ ID NO: 376668 - RNA, 19 nt, Homo sapiens
  misc_RNA (1)...(19): siRNA sense strand
uuaugacaccgccaaauuu

SEQ ID NO: 376669 - RNA, 19 nt, Homo sapiens
  misc_RNA (1)...(19): siRNA sense strand
caccagauguuagugacaa

SEQ ID NO: 376670 - RNA, 19 nt, Homo sapiens
  misc_RNA (1)...(19): siRNA sense strand
guagaggagccgucaaauc

SEQ ID NO: 376671 - RNA, 19 nt, Homo sapiens
  misc_RNA (1)...(19): siRNA sense strand
gaaaauggaagucuaugug

SEQ ID NO: 376672 - RNA, 19 nt, Homo sapiens
  misc_RNA (1)...(19): siRNA sense strand
ccucagccguuaccugugu

SEQ ID NO: 376673 - RNA, 19 nt, Homo sapiens
  misc_RNA (1)...(19): siRNA sense strand
guucauguacuuugaguuc

SEQ ID NO: 376674 - RNA, 19 nt, Homo sapiens
  misc_RNA (1)...(19): siRNA sense strand
ggaagacaaguucauguac

SEQ ID NO: 376675 - RNA, 19 nt, Homo sapiens
  misc_RNA (1)...(19): siRNA sense strand
ccaccacagcuagaacuua

SEQ ID NO: 376676 - RNA, 19 nt, Homo sapiens
  misc_RNA (1)...(19): siRNA sense strand
guaacuauucccagucaga

SEQ ID NO: 376677 - RNA, 19 nt, Homo sapiens
  misc_RNA (1)...(19): siRNA sense strand
gaaccugaucauuauagau

SEQ ID NO: 376678 - RNA, 19 nt, Homo sapiens
  misc_RNA (1)...(19): siRNA sense strand
aggaauaucuaguacuuac

SEQ ID NO: 376679 - RNA, 19 nt, Homo sapiens
  misc_RNA (1)...(19): siRNA sense strand
gugcagauaaugacaagga

SEQ ID NO: 376680 - RNA, 19 nt, Homo sapiens
  misc_RNA (1)...(19): siRNA sense strand
ucuaugugaucaagaaauc

SEQ ID NO: 376681 - RNA, 19 nt, Homo sapiens
  misc_RNA (1)...(19): siRNA sense strand
uaugggauuuccugcagaa

SEQ ID NO: 376682 - RNA, 19 nt, Homo sapiens
  misc_RNA (1)...(19): siRNA sense strand
gugcugaaagacauuauga

SEQ ID NO: 376683 - RNA, 19 nt, Homo sapiens
  misc_RNA (1)...(19): siRNA sense strand
ugaaccugaucauuauaga

SEQ ID NO: 376684 - RNA, 19 nt, Homo sapiens
  misc_RNA (1)...(19): siRNA sense strand
aaauggaagucuaugugau

SEQ ID NO: 376685 - RNA, 19 nt, Homo sapiens
  misc_RNA (1)...(19): siRNA sense strand
ugaaacuauuccaauguuc

SEQ ID NO: 376686 - RNA, 19 nt, Homo sapiens
  misc_RNA (1)...(19): siRNA sense strand
uucacaagaugauguuuga

SEQ ID NO: 376687 - RNA, 19 nt, Homo sapiens
  misc_RNA (1)...(19): siRNA sense strand
ccacagcuagaacuuauca

SEQ ID NO: 376688 - RNA, 19 nt, Homo sapiens
  misc_RNA (1)...(19): siRNA sense strand
acaggaacaauauugauga

SEQ ID NO: 376689 - RNA, 19 nt, Homo sapiens
  misc_RNA (1)...(19): siRNA sense strand
caggaacaauauugaugau

SEQ ID NO: 376690 - RNA, 19 nt, Homo sapiens
  misc_RNA (1)...(19): siRNA sense strand
aaaaugaucuugacaaagc

SEQ ID NO: 376691 - RNA, 19 nt, Homo sapiens
  misc_RNA (1)...(19): siRNA sense strand
acuuagacuugaccuauau

SEQ ID NO: 376692 - RNA, 19 nt, Homo sapiens
  misc_RNA (1)...(19): siRNA sense strand
guguggugauaucaaagua

SEQ ID NO: 376693 - RNA, 19 nt, Homo sapiens
  misc_RNA (1)...(19): siRNA sense strand
uuaccuguguguggugaua

SEQ ID NO: 376694 - RNA, 19 nt, Homo sapiens
  misc_RNA (1)...(19): siRNA sense strand
gaggcgcuauguguauuau

SEQ ID NO: 376695 - RNA, 19 nt, Homo sapiens
  misc_RNA (1)...(19): siRNA sense strand
ucagaggcgcuauguguau

SEQ ID NO: 376696 - RNA, 19 nt, Homo sapiens
  misc_RNA (1)...(19): siRNA sense strand
aaguagaguucuuccacaa

SEQ ID NO: 376697 - RNA, 19 nt, Homo sapiens
  misc_RNA (1)...(19): siRNA sense strand
uguguguggugauaucaaa

SEQ ID NO: 376698 - RNA, 19 nt, Homo sapiens
  misc_RNA (1)...(19): siRNA sense strand
gaucguuagcagaaacaaa

SEQ ID NO: 376699 - RNA, 19 nt, Homo sapiens
  misc_RNA (1)...(19): siRNA sense strand
acagcuagaacuuaucaaa

SEQ ID NO: 376700 - RNA, 19 nt, Homo sapiens
  misc_RNA (1)...(19): siRNA sense strand
agaaugaaccuuuugauga

SEQ ID NO: 376701 - RNA, 19 nt, Homo sapiens
  misc_RNA (1)...(19): siRNA sense strand
gcuaagugaagaugacaau

SEQ ID NO: 376702 - RNA, 19 nt, Homo sapiens
  misc_RNA (1)...(19): siRNA sense strand
guaagaagcugcaggaugu

SEQ ID NO: 376703 - RNA, 19 nt, Homo sapiens
  misc_RNA (1)...(19): siRNA sense strand
gaagagaucugugagugaa

SEQ ID NO: 376704 - RNA, 19 nt, Homo sapiens
  misc_RNA (1)...(19): siRNA sense strand
agacaaagcugaugugaau

SEQ ID NO: 376705 - RNA, 19 nt, Homo sapiens
  misc_RNA (1)...(19): siRNA sense strand
gaaauacagcuuaugcaua

SEQ ID NO: 376706 - RNA, 19 nt, Homo sapiens
  misc_RNA (1)...(19): siRNA sense strand
ggaaaucuguuaagaagag

SEQ ID NO: 376707 - RNA, 19 nt, Homo sapiens
  misc_RNA (1)...(19): siRNA sense strand
agacauggcuaaaguuaug

SEQ ID NO: 376708 - RNA, 19 nt, Homo sapiens
  misc_RNA (1)...(19): siRNA sense strand
gaaaacaucugaacucgau

SEQ ID NO: 376709 - RNA, 19 nt, Homo sapiens
  misc_RNA (1)...(19): siRNA sense strand
uagaauggcugcguaagaa

SEQ ID NO: 376710 - RNA, 19 nt, Homo sapiens
  misc_RNA (1)...(19): siRNA sense strand
gaugggaaaucuguuaaga

SEQ ID NO: 376711 - RNA, 19 nt, Homo sapiens
  misc_RNA (1)...(19): siRNA sense strand
aaagacauggcuaaaguua

SEQ ID NO: 376712 - RNA, 19 nt, Homo sapiens
  misc_RNA (1)...(19): siRNA sense strand
caaaagacauggcuaaagu

SEQ ID NO: 376713 - RNA, 19 nt, Homo sapiens
  misc_RNA (1)...(19): siRNA sense strand
caaagcugaugugaaugua

SEQ ID NO: 376714 - RNA, 19 nt, Homo sapiens
  misc_RNA (1)...(19): siRNA sense strand
aagcugaugugaauguauu

SEQ ID NO: 376715 - RNA, 19 nt, Homo sapiens
  misc_RNA (1)...(19): siRNA sense strand
ugggaaaucuguuaagaag

SEQ ID NO: 376716 - RNA, 19 nt, Homo sapiens
  misc_RNA (1)...(19): siRNA sense strand
uggcuaaaguuaugauugu

SEQ ID NO: 376717 - RNA, 19 nt, Homo sapiens
  misc_RNA (1)...(19): siRNA sense strand
ugagugaaauacagcuuau

SEQ ID NO: 376718 - RNA, 19 nt, Homo sapiens
  misc_RNA (1)...(19): siRNA sense strand
guuaagaagagaucuguga

SEQ ID NO: 376719 - RNA, 19 nt, Homo sapiens
  misc_RNA (1)...(19): siRNA sense strand
guagaauggcugcguaaga

SEQ ID NO: 376720 - RNA, 19 nt, Homo sapiens
  misc_RNA (1)...(19): siRNA sense strand
gaaaucuguuaagaagaga

SEQ ID NO: 376721 - RNA, 19 nt, Homo sapiens
  misc_RNA (1)...(19): siRNA sense strand
gugagugaaauacagcuua

SEQ ID NO: 376722 - RNA, 19 nt, Homo sapiens
  misc_RNA (1)...(19): siRNA sense strand
gcagacaaagcugauguga

SEQ ID NO: 376723 - RNA, 19 nt, Homo sapiens
  misc_RNA (1)...(19): siRNA sense strand
gaguagaauggcugcguaa

SEQ ID NO: 376724 - RNA, 19 nt, Homo sapiens
  misc_RNA (1)...(19): siRNA sense strand
gcuaaaguuaugauuguca

SEQ ID NO: 376725 - RNA, 19 nt, Homo sapiens
  misc_RNA (1)...(19): siRNA sense strand
acaaagcugaugugaaugu

SEQ ID NO: 376726 - RNA, 19 nt, Homo sapiens
  misc_RNA (1)...(19): siRNA sense strand
ugaaauacagcuuaugcau

SEQ ID NO: 376727 - RNA, 19 nt, Homo sapiens
  misc_RNA (1)...(19): siRNA sense strand
agagaucugugagugaaau

SEQ ID NO: 376728 - RNA, 19 nt, Homo sapiens
  misc_RNA (1)...(19): siRNA sense strand
gagaucugugagugaaaua

SEQ ID NO: 376729 - RNA, 19 nt, Homo sapiens
  misc_RNA (1)...(19): siRNA sense strand
ucggaugggaaaucuguua

SEQ ID NO: 376730 - RNA, 19 nt, Homo sapiens
  misc_RNA (1)...(19): siRNA sense strand
gaucugugagugaaauaca

SEQ ID NO: 376731 - RNA, 19 nt, Homo sapiens
  misc_RNA (1)...(19): siRNA sense strand
agaagagaucugugaguga

SEQ ID NO: 376732 - RNA, 19 nt, Homo sapiens
  misc_RNA (1)...(19): siRNA sense strand
uaagaagagaucugugagu

SEQ ID NO: 376733 - RNA, 19 nt, Homo sapiens
  misc_RNA (1)...(19): siRNA sense strand
cagacaaagcugaugugaa

SEQ ID NO: 376734 - RNA, 19 nt, Homo sapiens
  misc_RNA (1)...(19): siRNA sense strand
gcugaugugaauguauuaa

SEQ ID NO: 376735 - RNA, 19 nt, Homo sapiens
  misc_RNA (1)...(19): siRNA sense strand
gauggagagaguagaaugg

SEQ ID NO: 376736 - RNA, 19 nt, Homo sapiens
  misc_RNA (1)...(19): siRNA sense strand
ucauguuggcaauuuguuu

SEQ ID NO: 376737 - RNA, 19 nt, Homo sapiens
  misc_RNA (1)...(19): siRNA sense strand
uaaagcuaaaucccaguga

SEQ ID NO: 376738 - RNA, 19 nt, Homo sapiens
  misc_RNA (1)...(19): siRNA sense strand
gggaaaucuguuaagaaga

SEQ ID NO: 376739 - RNA, 19 nt, Homo sapiens
  misc_RNA (1)...(19): siRNA sense strand
cgauggagagaguagaaug

SEQ ID NO: 376740 - RNA, 19 nt, Homo sapiens
  misc_RNA (1)...(19): siRNA sense strand
gaaucuggcugaucucaaa

SEQ ID NO: 376741 - RNA, 19 nt, Homo sapiens
  misc_RNA (1)...(19): siRNA sense strand
gaagaaaacuugaaacugu

SEQ ID NO: 376742 - RNA, 19 nt, Homo sapiens
  misc_RNA (1)...(19): siRNA sense strand
gacaguacauggagagauu

SEQ ID NO: 376743 - RNA, 19 nt, Homo sapiens
  misc_RNA (1)...(19): siRNA sense strand
gaucauaagaaucuggaua

SEQ ID NO: 376744 - RNA, 19 nt, Homo sapiens
  misc_RNA (1)...(19): siRNA sense strand
ggaaaugcaacaauccaaa

SEQ ID NO: 376745 - RNA, 19 nt, Homo sapiens
  misc_RNA (1)...(19): siRNA sense strand
gccaugggcacaauuauaa

SEQ ID NO: 376746 - RNA, 19 nt, Homo sapiens
  misc_RNA (1)...(19): siRNA sense strand
gggacaaccuccagaaagu

SEQ ID NO: 376747 - RNA, 19 nt, Homo sapiens
  misc_RNA (1)...(19): siRNA sense strand
auaagaaucuggauaugga

SEQ ID NO: 376748 - RNA, 19 nt, Homo sapiens
  misc_RNA (1)...(19): siRNA sense strand
gaaaugcaacaauccaaau

SEQ ID NO: 376749 - RNA, 19 nt, Homo sapiens
  misc_RNA (1)...(19): siRNA sense strand
gggcacaauuauaaaguug

SEQ ID NO: 376750 - RNA, 19 nt, Homo sapiens
  misc_RNA (1)...(19): siRNA sense strand
gagcacgacugaaaaugua

SEQ ID NO: 376751 - RNA, 19 nt, Homo sapiens
  misc_RNA (1)...(19): siRNA sense strand
cuacgggaaugguuaugaa

SEQ ID NO: 376752 - RNA, 19 nt, Homo sapiens
  misc_RNA (1)...(19): siRNA sense strand
ggccaugggcacaauuaua

SEQ ID NO: 376753 - RNA, 19 nt, Homo sapiens
  misc_RNA (1)...(19): siRNA sense strand
cuguaggaguucuuuauaa

SEQ ID NO: 376754 - RNA, 19 nt, Homo sapiens
  misc_RNA (1)...(19): siRNA sense strand
ggacaaccuccagaaaguu

SEQ ID NO: 376755 - RNA, 19 nt, Homo sapiens
  misc_RNA (1)...(19): siRNA sense strand
guggugagcacgacugaaa

SEQ ID NO: 376756 - RNA, 19 nt, Homo sapiens
  misc_RNA (1)...(19): siRNA sense strand
ccgauuguacaguaaauuu

SEQ ID NO: 376757 - RNA, 19 nt, Homo sapiens
  misc_RNA (1)...(19): siRNA sense strand
ggagagauugacccugcua

SEQ ID NO: 376758 - RNA, 19 nt, Homo sapiens
  misc_RNA (1)...(19): siRNA sense strand
uuaugaaucuggcugaucu

SEQ ID NO: 376759 - RNA, 19 nt, Homo sapiens
  misc_RNA (1)...(19): siRNA sense strand
ccuguaggaguucuuuaua

SEQ ID NO: 376760 - RNA, 19 nt, Homo sapiens
  misc_RNA (1)...(19): siRNA sense strand
agccaccgauuguacagua

SEQ ID NO: 376761 - RNA, 19 nt, Homo sapiens
  misc_RNA (1)...(19): siRNA sense strand
cgggaaugguuaugaaucu

SEQ ID NO: 376762 - RNA, 19 nt, Homo sapiens
  misc_RNA (1)...(19): siRNA sense strand
gaaucuggauauggaugug

SEQ ID NO: 376763 - RNA, 19 nt, Homo sapiens
  misc_RNA (1)...(19): siRNA sense strand
cugaaaauguagcuguuua

SEQ ID NO: 376764 - RNA, 19 nt, Homo sapiens
  misc_RNA (1)...(19): siRNA sense strand
gacaaccuccagaaaguuc

SEQ ID NO: 376765 - RNA, 19 nt, Homo sapiens
  misc_RNA (1)...(19): siRNA sense strand
ugccauacuuugcagaugu

SEQ ID NO: 376766 - RNA, 19 nt, Homo sapiens
  misc_RNA (1)...(19): siRNA sense strand
ugggcacaauuauaaaguu

SEQ ID NO: 376767 - RNA, 19 nt, Homo sapiens
  misc_RNA (1)...(19): siRNA sense strand
gccaccgauuguacaguaa

SEQ ID NO: 376768 - RNA, 19 nt, Homo sapiens
  misc_RNA (1)...(19): siRNA sense strand
gggaaaugcaacaauccaa

SEQ ID NO: 376769 - RNA, 19 nt, Homo sapiens
  misc_RNA (1)...(19): siRNA sense strand
gccauacuuugcagaugug

SEQ ID NO: 376770 - RNA, 19 nt, Homo sapiens
  misc_RNA (1)...(19): siRNA sense strand
gggaaugguuaugaaucug

SEQ ID NO: 376771 - RNA, 19 nt, Homo sapiens
  misc_RNA (1)...(19): siRNA sense strand
uuauaaaguuguggugaca

SEQ ID NO: 376772 - RNA, 19 nt, Homo sapiens
  misc_RNA (1)...(19): siRNA sense strand
caaauggccaugggcacaa

SEQ ID NO: 376773 - RNA, 19 nt, Homo sapiens
  misc_RNA (1)...(19): siRNA sense strand
guauacgaaacugacaaua

SEQ ID NO: 376774 - RNA, 19 nt, Homo sapiens
  misc_RNA (1)...(19): siRNA sense strand
gcuacgggaaugguuauga

SEQ ID NO: 376775 - RNA, 19 nt, Homo sapiens
  misc_RNA (1)...(19): siRNA sense strand
auaaaguuguggugacagu

SEQ ID NO: 376776 - RNA, 19 nt, Homo sapiens
  misc_RNA (1)...(19): siRNA sense strand
ccaccgauuguacaguaaa

SEQ ID NO: 376777 - RNA, 19 nt, Homo sapiens
  misc_RNA (1)...(19): siRNA sense strand
gcgcgagccaccgauugua

SEQ ID NO: 376778 - RNA, 19 nt, Homo sapiens
  misc_RNA (1)...(19): siRNA sense strand
caccgauuguacaguaaau

SEQ ID NO: 376779 - RNA, 19 nt, Homo sapiens
  misc_RNA (1)...(19): siRNA sense strand
uaaaguuguggugacagua

SEQ ID NO: 376780 - RNA, 19 nt, Homo sapiens
  misc_RNA (1)...(19): siRNA sense strand
uuugggaaaugcaacaauc

SEQ ID NO: 376781 - RNA, 19 nt, Homo sapiens
  misc_RNA (1)...(19): siRNA sense strand
ccaugggcacaauuauaaa

SEQ ID NO: 376782 - RNA, 19 nt, Homo sapiens
  misc_RNA (1)...(19): siRNA sense strand
aaaugcaacaauccaaaug

SEQ ID NO: 376783 - RNA, 19 nt, Homo sapiens
  misc_RNA (1)...(19): siRNA sense strand
ggaugugccauacuuugca

SEQ ID NO: 376784 - RNA, 19 nt, Homo sapiens
  misc_RNA (1)...(19): siRNA sense strand
gacauucacuugccaauaa

SEQ ID NO: 376785 - RNA, 19 nt, Homo sapiens
  misc_RNA (1)...(19): siRNA sense strand
ugaagacucugaagaauuu

SEQ ID NO: 376786 - RNA, 19 nt, Homo sapiens
  misc_RNA (1)...(19): siRNA sense strand
acaaugagguuucagauaa

SEQ ID NO: 376787 - RNA, 19 nt, Homo sapiens
  misc_RNA (1)...(19): siRNA sense strand
gagacaggcuacuggauua

SEQ ID NO: 376788 - RNA, 19 nt, Homo sapiens
  misc_RNA (1)...(19): siRNA sense strand
gaaaugugcugaagaugau

SEQ ID NO: 376789 - RNA, 19 nt, Homo sapiens
  misc_RNA (1)...(19): siRNA sense strand
aaacugaagccuacaauuu

SEQ ID NO: 376790 - RNA, 19 nt, Homo sapiens
  misc_RNA (1)...(19): siRNA sense strand
gauagaaauucgugagaug

SEQ ID NO: 376791 - RNA, 19 nt, Homo sapiens
  misc_RNA (1)...(19): siRNA sense strand
caacugagcucaacaaacc

SEQ ID NO: 376792 - RNA, 19 nt, Homo sapiens
  misc_RNA (1)...(19): siRNA sense strand
caacaaacccgccaugauc

SEQ ID NO: 376793 - RNA, 19 nt, Homo sapiens
  misc_RNA (1)...(19): siRNA sense strand
ggacaacaagauagaaauu

SEQ ID NO: 376794 - RNA, 19 nt, Homo sapiens
  misc_RNA (1)...(19): siRNA sense strand
gcaaugagcauguggagau

SEQ ID NO: 376795 - RNA, 19 nt, Homo sapiens
  misc_RNA (1)...(19): siRNA sense strand
uaacauagccuuaauucag

SEQ ID NO: 376796 - RNA, 19 nt, Homo sapiens
  misc_RNA (1)...(19): siRNA sense strand
cuuagaagguuguuugauu

SEQ ID NO: 376797 - RNA, 19 nt, Homo sapiens
  misc_RNA (1)...(19): siRNA sense strand
gcucauacaugccuucuac

SEQ ID NO: 376798 - RNA, 19 nt, Homo sapiens
  misc_RNA (1)...(19): siRNA sense strand
gcuucucacugaugaauuu

SEQ ID NO: 376799 - RNA, 19 nt, Homo sapiens
  misc_RNA (1)...(19): siRNA sense strand
ggagauagcaagagcucua

SEQ ID NO: 376800 - RNA, 19 nt, Homo sapiens
  misc_RNA (1)...(19): siRNA sense strand
gaauuugacaccuauaaug

SEQ ID NO: 376801 - RNA, 19 nt, Homo sapiens
  misc_RNA (1)...(19): siRNA sense strand
gcauaaccaugucaaacug

SEQ ID NO: 376802 - RNA, 19 nt, Homo sapiens
  misc_RNA (1)...(19): siRNA sense strand
gcaggaagcaacaaguauu

SEQ ID NO: 376803 - RNA, 19 nt, Homo sapiens
  misc_RNA (1)...(19): siRNA sense strand
ugauggugaugaugaauuu

SEQ ID NO: 376804 - RNA, 19 nt, Homo sapiens
  misc_RNA (1)...(19): siRNA sense strand
caucauccauggagggaaa

SEQ ID NO: 376805 - RNA, 19 nt, Homo sapiens
  misc_RNA (1)...(19): siRNA sense strand
gcaacaucaucucuuuaga

SEQ ID NO: 376806 - RNA, 19 nt, Homo sapiens
  misc_RNA (1)...(19): siRNA sense strand
gaagccagauauggucauu

SEQ ID NO: 376807 - RNA, 19 nt, Homo sapiens
  misc_RNA (1)...(19): siRNA sense strand
ggacauucacuugccaaua

SEQ ID NO: 376808 - RNA, 19 nt, Homo sapiens
  misc_RNA (1)...(19): siRNA sense strand
caggaagcaacaaguauua

SEQ ID NO: 376809 - RNA, 19 nt, Homo sapiens
  misc_RNA (1)...(19): siRNA sense strand
ggauuccacucccuuugaa

SEQ ID NO: 376810 - RNA, 19 nt, Homo sapiens
  misc_RNA (1)...(19): siRNA sense strand
guugaaaugugcugaagau

SEQ ID NO: 376811 - RNA, 19 nt, Homo sapiens
  misc_RNA (1)...(19): siRNA sense strand
gcuaucagcuugaaaauca

SEQ ID NO: 376812 - RNA, 19 nt, Homo sapiens
  misc_RNA (1)...(19): siRNA sense strand
gccaaccuguacagaauaa

SEQ ID NO: 376813 - RNA, 19 nt, Homo sapiens
  misc_RNA (1)...(19): siRNA sense strand
ugacucaaacuaacaauga

SEQ ID NO: 376814 - RNA, 19 nt, Homo sapiens
  misc_RNA (1)...(19): siRNA sense strand
gcacagcaagauaugguuu

SEQ ID NO: 376815 - RNA, 19 nt, Homo sapiens
  misc_RNA (1)...(19): siRNA sense strand
caaugagcauguggagaua

SEQ ID NO: 376816 - RNA, 19 nt, Homo sapiens
  misc_RNA (1)...(19): siRNA sense strand
gaagagcagacaacauuca

SEQ ID NO: 376817 - RNA, 19 nt, Homo sapiens
  misc_RNA (1)...(19): siRNA sense strand
ugaaaugugcugaagauga

SEQ ID NO: 376818 - RNA, 19 nt, Homo sapiens
  misc_RNA (1)...(19): siRNA sense strand
ggaaaacaccaaacaauga

SEQ ID NO: 376819 - RNA, 19 nt, Homo sapiens
  misc_RNA (1)...(19): siRNA sense strand
ugaagaugaugaagaagau

SEQ ID NO: 376820 - RNA, 19 nt, Homo sapiens
  misc_RNA (1)...(19): siRNA sense strand
cagacaacauucacaaaca

SEQ ID NO: 376821 - RNA, 19 nt, Homo sapiens
  misc_RNA (1)...(19): siRNA sense strand
gugcagaagcaaauaguuu

SEQ ID NO: 376822 - RNA, 19 nt, Homo sapiens
  misc_RNA (1)...(19): siRNA sense strand
cacaaacagucaaacauca

SEQ ID NO: 376823 - RNA, 19 nt, Homo sapiens
  misc_RNA (1)...(19): siRNA sense strand
aaguaugggugcucucuuu

SEQ ID NO: 376824 - RNA, 19 nt, Homo sapiens
  misc_RNA (1)...(19): siRNA sense strand
acacuuggguaccauucua

SEQ ID NO: 376825 - RNA, 19 nt, Homo sapiens
  misc_RNA (1)...(19): siRNA sense strand
gagcagacaacauucacaa

SEQ ID NO: 376826 - RNA, 19 nt, Homo sapiens
  misc_RNA (1)...(19): siRNA sense strand
gaauuugggugugcuacau

SEQ ID NO: 376827 - RNA, 19 nt, Homo sapiens
  misc_RNA (1)...(19): siRNA sense strand
gaggacaacaagauagaaa

SEQ ID NO: 376828 - RNA, 19 nt, Homo sapiens
  misc_RNA (1)...(19): siRNA sense strand
gcaauccugacucaaacua

SEQ ID NO: 376829 - RNA, 19 nt, Homo sapiens
  misc_RNA (1)...(19): siRNA sense strand
ggacaaguuuucuucuuug

SEQ ID NO: 376830 - RNA, 19 nt, Homo sapiens
  misc_RNA (1)...(19): siRNA sense strand
ccagugcaauccugacuca

SEQ ID NO: 376831 - RNA, 19 nt, Homo sapiens
  misc_RNA (1)...(19): siRNA sense strand
cagcaggaagcaacaagua

SEQ ID NO: 376832 - RNA, 19 nt, Homo sapiens
  misc_RNA (1)...(19): siRNA sense strand
gugcugaagaugauacuaa

SEQ ID NO: 376833 - RNA, 19 nt, Homo sapiens
  misc_RNA (1)...(19): siRNA sense strand
gcacagagaaagacuuggu

SEQ ID NO: 376834 - RNA, 19 nt, Homo sapiens
  misc_RNA (1)...(19): siRNA sense strand
gaauuuugauggacaaguu

SEQ ID NO: 376835 - RNA, 19 nt, Homo sapiens
  misc_RNA (1)...(19): siRNA sense strand
ggaagcaacacgggaaaug

SEQ ID NO: 376836 - RNA, 19 nt, Homo sapiens
  misc_RNA (1)...(19): siRNA sense strand
ucugcaacaucaucucuuu

SEQ ID NO: 376837 - RNA, 19 nt, Homo sapiens
  misc_RNA (1)...(19): siRNA sense strand
ccaggcuucucacugauga

SEQ ID NO: 376838 - RNA, 19 nt, Homo sapiens
  misc_RNA (1)...(19): siRNA sense strand
ugacaccuauaaugaagau

SEQ ID NO: 376839 - RNA, 19 nt, Homo sapiens
  misc_RNA (1)...(19): siRNA sense strand
caaugagguuucagauaag

SEQ ID NO: 376840 - RNA, 19 nt, Homo sapiens
  misc_RNA (1)...(19): siRNA sense strand
aaugaaaucccuccguaaa

SEQ ID NO: 376841 - RNA, 19 nt, Homo sapiens
  misc_RNA (1)...(19): siRNA sense strand
gaagaugauacuaaugaag

SEQ ID NO: 376842 - RNA, 19 nt, Homo sapiens
  misc_RNA (1)...(19): siRNA sense strand
gaugguaacagucaguaau

SEQ ID NO: 376843 - RNA, 19 nt, Homo sapiens
  misc_RNA (1)...(19): siRNA sense strand
agcaagauaugguuuggaa

SEQ ID NO: 376844 - RNA, 19 nt, Homo sapiens
  misc_RNA (1)...(19): siRNA sense strand
guaacagucaguaauaaca

SEQ ID NO: 376845 - RNA, 19 nt, Homo sapiens
  misc_RNA (1)...(19): siRNA sense strand
gcagacaacauucacaaac

SEQ ID NO: 376846 - RNA, 19 nt, Homo sapiens
  misc_RNA (1)...(19): siRNA sense strand
cugaagaugauacuaauga

SEQ ID NO: 376847 - RNA, 19 nt, Homo sapiens
  misc_RNA (1)...(19): siRNA sense strand
caaacugaagccuacaauu

SEQ ID NO: 376848 - RNA, 19 nt, Homo sapiens
  misc_RNA (1)...(19): siRNA sense strand
caaugaaaucccuccguaa

SEQ ID NO: 376849 - RNA, 19 nt, Homo sapiens
  misc_RNA (1)...(19): siRNA sense strand
ugagacaggcuacuggauu

SEQ ID NO: 376850 - RNA, 19 nt, Homo sapiens
  misc_RNA (1)...(19): siRNA sense strand
agucaaacaucaacagaag

SEQ ID NO: 376851 - RNA, 19 nt, Homo sapiens
  misc_RNA (1)...(19): siRNA sense strand
ucacaaacagucaaacauc

SEQ ID NO: 376852 - RNA, 19 nt, Homo sapiens
  misc_RNA (1)...(19): siRNA sense strand
ucaugucucuauugccaaa

SEQ ID NO: 376853 - RNA, 19 nt, Homo sapiens
  misc_RNA (1)...(19): siRNA sense strand
ugaugaauuugacaccuau

SEQ ID NO: 376854 - RNA, 19 nt, Homo sapiens
  misc_RNA (1)...(19): siRNA sense strand
guaccauucuauucaacug

SEQ ID NO: 376855 - RNA, 19 nt, Homo sapiens
  misc_RNA (1)...(19): siRNA sense strand
gcauaccaggagacaauaa

SEQ ID NO: 376856 - RNA, 19 nt, Homo sapiens
  misc_RNA (1)...(19): siRNA sense strand
gaagaagaugagucugaga

SEQ ID NO: 376857 - RNA, 19 nt, Homo sapiens
  misc_RNA (1)...(19): siRNA sense strand
ggagacaauaaacaaguug

SEQ ID NO: 376858 - RNA, 19 nt, Homo sapiens
  misc_RNA (1)...(19): siRNA sense strand
gaaagacuugguaggagau

SEQ ID NO: 376859 - RNA, 19 nt, Homo sapiens
  misc_RNA (1)...(19): siRNA sense strand
ugguaacagucaguaauaa

SEQ ID NO: 376860 - RNA, 19 nt, Homo sapiens
  misc_RNA (1)...(19): siRNA sense strand
caacauucacaaacaguca

SEQ ID NO: 376861 - RNA, 19 nt, Homo sapiens
  misc_RNA (1)...(19): siRNA sense strand
augaagagcagacaacauu

SEQ ID NO: 376862 - RNA, 19 nt, Homo sapiens
  misc_RNA (1)...(19): siRNA sense strand
gacauuaagcacagcaaga

SEQ ID NO: 376863 - RNA, 19 nt, Homo sapiens
  misc_RNA (1)...(19): siRNA sense strand
cagaauaaggguugaucuu

SEQ ID NO: 376864 - RNA, 19 nt, Homo sapiens
  misc_RNA (1)...(19): siRNA sense strand
ucaaacaucaacagaagau

SEQ ID NO: 376865 - RNA, 19 nt, Homo sapiens
  misc_RNA (1)...(19): siRNA sense strand
ucaugucuauuguuugcaa

SEQ ID NO: 376866 - RNA, 19 nt, Homo sapiens
  misc_RNA (1)...(19): siRNA sense strand
agcaagagcucuacacacu

SEQ ID NO: 376867 - RNA, 19 nt, Homo sapiens
  misc_RNA (1)...(19): siRNA sense strand
cugccaaccuguacagaau

SEQ ID NO: 376868 - RNA, 19 nt, Homo sapiens
  misc_RNA (1)...(19): siRNA sense strand
ccugguggauuuugaauuu

SEQ ID NO: 376869 - RNA, 19 nt, Homo sapiens
  misc_RNA (1)...(19): siRNA sense strand
ccauuaaugugguguacag

SEQ ID NO: 376870 - RNA, 19 nt, Homo sapiens
  misc_RNA (1)...(19): siRNA sense strand
agagaaagacuugguagga

SEQ ID NO: 376871 - RNA, 19 nt, Homo sapiens
  misc_RNA (1)...(19): siRNA sense strand
uaugggugcucucuuugga

SEQ ID NO: 376872 - RNA, 19 nt, Homo sapiens
  misc_RNA (1)...(19): siRNA sense strand
gugcaauccugacucaaac

SEQ ID NO: 376873 - RNA, 19 nt, Homo sapiens
  misc_RNA (1)...(19): siRNA sense strand
uaucaacacuuggguacca

SEQ ID NO: 376874 - RNA, 19 nt, Homo sapiens
  misc_RNA (1)...(19): siRNA sense strand
acaccuauaaugaagauga

SEQ ID NO: 376875 - RNA, 19 nt, Homo sapiens
  misc_RNA (1)...(19): siRNA sense strand
gaagcaacacgggaaaugg

SEQ ID NO: 376876 - RNA, 19 nt, Homo sapiens
  misc_RNA (1)...(19): siRNA sense strand
acaacaagauagaaauucg

SEQ ID NO: 376877 - RNA, 19 nt, Homo sapiens
  misc_RNA (1)...(19): siRNA sense strand
gacaacaagauagaaauuc

SEQ ID NO: 376878 - RNA, 19 nt, Homo sapiens
  misc_RNA (1)...(19): siRNA sense strand
aaagaaugaucugcaacau

SEQ ID NO: 376879 - RNA, 19 nt, Homo sapiens
  misc_RNA (1)...(19): siRNA sense strand
gacucaaacuaacaaugau

SEQ ID NO: 376880 - RNA, 19 nt, Homo sapiens
  misc_RNA (1)...(19): siRNA sense strand
cacgggaaauggaacuguu

SEQ ID NO: 376881 - RNA, 19 nt, Homo sapiens
  misc_RNA (1)...(19): siRNA sense strand
agacaacauucacaaacag

SEQ ID NO: 376882 - RNA, 19 nt, Homo sapiens
  misc_RNA (1)...(19): siRNA sense strand
aggagacaauaaacaaguu

SEQ ID NO: 376883 - RNA, 19 nt, Homo sapiens
  misc_RNA (1)...(19): siRNA sense strand
ucaacaaacccgccaugau

SEQ ID NO: 376884 - RNA, 19 nt, Homo sapiens
  misc_RNA (1)...(19): siRNA sense strand
gaaaggacaugugaacuua

SEQ ID NO: 376885 - RNA, 19 nt, Homo sapiens
  misc_RNA (1)...(19): siRNA sense strand
gaagaaguaugauguauug

SEQ ID NO: 376886 - RNA, 19 nt, Homo sapiens
  misc_RNA (1)...(19): siRNA sense strand
gaacaggagugcacggaua

SEQ ID NO: 376887 - RNA, 19 nt, Homo sapiens
  misc_RNA (1)...(19): siRNA sense strand
gaagaacgauuauccauuc

SEQ ID NO: 376888 - RNA, 19 nt, Homo sapiens
  misc_RNA (1)...(19): siRNA sense strand
gaaaugacuucuacucgaa

SEQ ID NO: 376889 - RNA, 19 nt, Homo sapiens
  misc_RNA (1)...(19): siRNA sense strand
gaacgauuauccauucaaa

SEQ ID NO: 376890 - RNA, 19 nt, Homo sapiens
  misc_RNA (1)...(19): siRNA sense strand
gcucucagauucaccuuua

SEQ ID NO: 376891 - RNA, 19 nt, Homo sapiens
  misc_RNA (1)...(19): siRNA sense strand
ggagggaacaucuauauuu

SEQ ID NO: 376892 - RNA, 19 nt, Homo sapiens
  misc_RNA (1)...(19): siRNA sense strand
aaacuacgcuuugauauug

SEQ ID NO: 376893 - RNA, 19 nt, Homo sapiens
  misc_RNA (1)...(19): siRNA sense strand
cgaaaucaguguccauaaa

SEQ ID NO: 376894 - RNA, 19 nt, Homo sapiens
  misc_RNA (1)...(19): siRNA sense strand
uguaagaucuccaaagaaa

SEQ ID NO: 376895 - RNA, 19 nt, Homo sapiens
  misc_RNA (1)...(19): siRNA sense strand
gaacacuauccaacaauua

SEQ ID NO: 376896 - RNA, 19 nt, Homo sapiens
  misc_RNA (1)...(19): siRNA sense strand
aaaguaaccuugaugaaga

SEQ ID NO: 376897 - RNA, 19 nt, Homo sapiens
  misc_RNA (1)...(19): siRNA sense strand
ggauauaggauacaucuuu

SEQ ID NO: 376898 - RNA, 19 nt, Homo sapiens
  misc_RNA (1)...(19): siRNA sense strand
acaaagugaucgaaaguuu

SEQ ID NO: 376899 - RNA, 19 nt, Homo sapiens
  misc_RNA (1)...(19): siRNA sense strand
gaaucugcuuguccucuua

SEQ ID NO: 376900 - RNA, 19 nt, Homo sapiens
  misc_RNA (1)...(19): siRNA sense strand
gcaaacuucugaaugacaa

SEQ ID NO: 376901 - RNA, 19 nt, Homo sapiens
  misc_RNA (1)...(19): siRNA sense strand
gagggaacaucuauauuuc

SEQ ID NO: 376902 - RNA, 19 nt, Homo sapiens
  misc_RNA (1)...(19): siRNA sense strand
gaugagaugucguucacuu

SEQ ID NO: 376903 - RNA, 19 nt, Homo sapiens
  misc_RNA (1)...(19): siRNA sense strand
cauaucaucuggacccuuu

SEQ ID NO: 376904 - RNA, 19 nt, Homo sapiens
  misc_RNA (1)...(19): siRNA sense strand
gcucaaagaaccauauaaa

SEQ ID NO: 376905 - RNA, 19 nt, Homo sapiens
  misc_RNA (1)...(19): siRNA sense strand
ggacaugugaacuuauaua

SEQ ID NO: 376906 - RNA, 19 nt, Homo sapiens
  misc_RNA (1)...(19): siRNA sense strand
ucgaagcccuuacaaguuu

SEQ ID NO: 376907 - RNA, 19 nt, Homo sapiens
  misc_RNA (1)...(19): siRNA sense strand
caacuacgcguguaaauuc

SEQ ID NO: 376908 - RNA, 19 nt, Homo sapiens
  misc_RNA (1)...(19): siRNA sense strand
ucacagcgauacaaacuug

SEQ ID NO: 376909 - RNA, 19 nt, Homo sapiens
  misc_RNA (1)...(19): siRNA sense strand
gggaaucuguaucuuuauu

SEQ ID NO: 376910 - RNA, 19 nt, Homo sapiens
  misc_RNA (1)...(19): siRNA sense strand
gaaauaaauucugcauugg

SEQ ID NO: 376911 - RNA, 19 nt, Homo sapiens
  misc_RNA (1)...(19): siRNA sense strand
caagacuguugaagaagua

SEQ ID NO: 376912 - RNA, 19 nt, Homo sapiens
  misc_RNA (1)...(19): siRNA sense strand
gauaccagaucaugucaga

SEQ ID NO: 376913 - RNA, 19 nt, Homo sapiens
  misc_RNA (1)...(19): siRNA sense strand
ugaagcagauggaaguaaa

SEQ ID NO: 376914 - RNA, 19 nt, Homo sapiens
  misc_RNA (1)...(19): siRNA sense strand
gaagaggaguaugauucua

SEQ ID NO: 376915 - RNA, 19 nt, Homo sapiens
  misc_RNA (1)...(19): siRNA sense strand
gaacaucgaaucauggaau

SEQ ID NO: 376916 - RNA, 19 nt, Homo sapiens
  misc_RNA (1)...(19): siRNA sense strand
uuagcaaacuucugaauga

SEQ ID NO: 376917 - RNA, 19 nt, Homo sapiens
  misc_RNA (1)...(19): siRNA sense strand
ggaaaggacaugugaacuu

SEQ ID NO: 376918 - RNA, 19 nt, Homo sapiens
  misc_RNA (1)...(19): siRNA sense strand
gaaaucaguguccauaaau

SEQ ID NO: 376919 - RNA, 19 nt, Homo sapiens
  misc_RNA (1)...(19): siRNA sense strand
cagaagccauugaaaucua

SEQ ID NO: 376920 - RNA, 19 nt, Homo sapiens
  misc_RNA (1)...(19): siRNA sense strand
ccuguaagaucuccaaaga

SEQ ID NO: 376921 - RNA, 19 nt, Homo sapiens
  misc_RNA (1)...(19): siRNA sense strand
ucaaagaagaggaguauga

SEQ ID NO: 376922 - RNA, 19 nt, Homo sapiens
  misc_RNA (1)...(19): siRNA sense strand
aaggacaugugaacuuaua

SEQ ID NO: 376923 - RNA, 19 nt, Homo sapiens
  misc_RNA (1)...(19): siRNA sense strand
guacaucucagaaucuuga

SEQ ID NO: 376924 - RNA, 19 nt, Homo sapiens
  misc_RNA (1)...(19): siRNA sense strand
uauguguccuugacuauuu

SEQ ID NO: 376925 - RNA, 19 nt, Homo sapiens
  misc_RNA (1)...(19): siRNA sense strand
ggugauuucauuucaguua

SEQ ID NO: 376926 - RNA, 19 nt, Homo sapiens
  misc_RNA (1)...(19): siRNA sense strand
gcaaagugaagaauauaga

SEQ ID NO: 376927 - RNA, 19 nt, Homo sapiens
  misc_RNA (1)...(19): siRNA sense strand
ugagaugucguucacuuua

SEQ ID NO: 376928 - RNA, 19 nt, Homo sapiens
  misc_RNA (1)...(19): siRNA sense strand
caaaagaagugcugaagga

SEQ ID NO: 376929 - RNA, 19 nt, Homo sapiens
  misc_RNA (1)...(19): siRNA sense strand
gugaacgccuucugucuga

SEQ ID NO: 376930 - RNA, 19 nt, Homo sapiens
  misc_RNA (1)...(19): siRNA sense strand
guaccaaaguugauaaugc

SEQ ID NO: 376931 - RNA, 19 nt, Homo sapiens
  misc_RNA (1)...(19): siRNA sense strand
ggacuuguaacaucuaaug

SEQ ID NO: 376932 - RNA, 19 nt, Homo sapiens
  misc_RNA (1)...(19): siRNA sense strand
gaucaaagaagaggaguau

SEQ ID NO: 376933 - RNA, 19 nt, Homo sapiens
  misc_RNA (1)...(19): siRNA sense strand
ggaaguauuacaaauggaa

SEQ ID NO: 376934 - RNA, 19 nt, Homo sapiens
  misc_RNA (1)...(19): siRNA sense strand
gagagagcuugguuaacuu

SEQ ID NO: 376935 - RNA, 19 nt, Homo sapiens
  misc_RNA (1)...(19): siRNA sense strand
cagauucaccuuuauuuga

SEQ ID NO: 376936 - RNA, 19 nt, Homo sapiens
  misc_RNA (1)...(19): siRNA sense strand
ugaacacuauccaacaauu

SEQ ID NO: 376937 - RNA, 19 nt, Homo sapiens
  misc_RNA (1)...(19): siRNA sense strand
caaaguugauaaugcuaug

SEQ ID NO: 376938 - RNA, 19 nt, Homo sapiens
  misc_RNA (1)...(19): siRNA sense strand
caacugaucaccuugaauc

SEQ ID NO: 376939 - RNA, 19 nt, Homo sapiens
  misc_RNA (1)...(19): siRNA sense strand
aaacagaagaaccugauuu

SEQ ID NO: 376940 - RNA, 19 nt, Homo sapiens
  misc_RNA (1)...(19): siRNA sense strand
gcuuaaaucagaagaagaa

SEQ ID NO: 376941 - RNA, 19 nt, Homo sapiens
  misc_RNA (1)...(19): siRNA sense strand
caaagcagaaggcaacuug

SEQ ID NO: 376942 - RNA, 19 nt, Homo sapiens
  misc_RNA (1)...(19): siRNA sense strand
agaaguacaucucagaauc

SEQ ID NO: 376943 - RNA, 19 nt, Homo sapiens
  misc_RNA (1)...(19): siRNA sense strand
gagugaaggauauaggaua

SEQ ID NO: 376944 - RNA, 19 nt, Homo sapiens
  misc_RNA (1)...(19): siRNA sense strand
gcagaaacuggcagaaaug

SEQ ID NO: 376945 - RNA, 19 nt, Homo sapiens
  misc_RNA (1)...(19): siRNA sense strand
uaugauguguuccauguau

SEQ ID NO: 376946 - RNA, 19 nt, Homo sapiens
  misc_RNA (1)...(19): siRNA sense strand
ggaguucgcuuguauuacc

SEQ ID NO: 376947 - RNA, 19 nt, Homo sapiens
  misc_RNA (1)...(19): siRNA sense strand
ccugaagaguccauauaaa

SEQ ID NO: 376948 - RNA, 19 nt, Homo sapiens
  misc_RNA (1)...(19): siRNA sense strand
gagaaggaccaacugauca

SEQ ID NO: 376949 - RNA, 19 nt, Homo sapiens
  misc_RNA (1)...(19): siRNA sense strand
agagagagcuugguuaacu

SEQ ID NO: 376950 - RNA, 19 nt, Homo sapiens
  misc_RNA (1)...(19): siRNA sense strand
aaacaaggaagagaaauga

SEQ ID NO: 376951 - RNA, 19 nt, Homo sapiens
  misc_RNA (1)...(19): siRNA sense strand
ggaagcaacccuccuaaac

SEQ ID NO: 376952 - RNA, 19 nt, Homo sapiens
  misc_RNA (1)...(19): siRNA sense strand
uaugaacacuauccaacaa

SEQ ID NO: 376953 - RNA, 19 nt, Homo sapiens
  misc_RNA (1)...(19): siRNA sense strand
caacccagcaguucgauau

SEQ ID NO: 376954 - RNA, 19 nt, Homo sapiens
  misc_RNA (1)...(19): siRNA sense strand
gcuguuauacccauuaaug

SEQ ID NO: 376955 - RNA, 19 nt, Homo sapiens
  misc_RNA (1)...(19): siRNA sense strand
gccuaucuccggcuaaaua

SEQ ID NO: 376956 - RNA, 19 nt, Homo sapiens
  misc_RNA (1)...(19): siRNA sense strand
uugcauggcucucagauuc

SEQ ID NO: 376957 - RNA, 19 nt, Homo sapiens
  misc_RNA (1)...(19): siRNA sense strand
gaguugaccuagaugagau

SEQ ID NO: 376958 - RNA, 19 nt, Homo sapiens
  misc_RNA (1)...(19): siRNA sense strand
caaacaaggaagagaaaug

SEQ ID NO: 376959 - RNA, 19 nt, Homo sapiens
  misc_RNA (1)...(19): siRNA sense strand
gcauggauaccucaaacaa

SEQ ID NO: 376960 - RNA, 19 nt, Homo sapiens
  misc_RNA (1)...(19): siRNA sense strand
ccaggagaguccaaauuuc

SEQ ID NO: 376961 - RNA, 19 nt, Homo sapiens
  misc_RNA (1)...(19): siRNA sense strand
gcagaaggcaacuugacaa

SEQ ID NO: 376962 - RNA, 19 nt, Homo sapiens
  misc_RNA (1)...(19): siRNA sense strand
gaauucucuuggacuugua

SEQ ID NO: 376963 - RNA, 19 nt, Homo sapiens
  misc_RNA (1)...(19): siRNA sense strand
gcagaaguacaucucagaa

SEQ ID NO: 376964 - RNA, 19 nt, Homo sapiens
  misc_RNA (1)...(19): siRNA sense strand
ggcgugcgcucuugagguu

SEQ ID NO: 376965 - RNA, 19 nt, Homo sapiens
  misc_RNA (1)...(19): siRNA sense strand
ggagugcacggauagcaaa

SEQ ID NO: 376966 - RNA, 19 nt, Homo sapiens
  misc_RNA (1)...(19): siRNA sense strand
gaaacuggcagaaaugacu

SEQ ID NO: 376967 - RNA, 19 nt, Homo sapiens
  misc_RNA (1)...(19): siRNA sense strand
agagagagagcuugguuaa

SEQ ID NO: 376968 - RNA, 19 nt, Homo sapiens
  misc_RNA (1)...(19): siRNA sense strand
ucgcuuguauuaccgagua

SEQ ID NO: 376969 - RNA, 19 nt, Homo sapiens
  misc_RNA (1)...(19): siRNA sense strand
gaaacagaagaaccugauu

SEQ ID NO: 376970 - RNA, 19 nt, Homo sapiens
  misc_RNA (1)...(19): siRNA sense strand
gaagaagaacgauuaucca

SEQ ID NO: 376971 - RNA, 19 nt, Homo sapiens
  misc_RNA (1)...(19): siRNA sense strand
cagcuguuauacccauuaa

SEQ ID NO: 376972 - RNA, 19 nt, Homo sapiens
  misc_RNA (1)...(19): siRNA sense strand
ggaaucuguaucuuuauug

SEQ ID NO: 376973 - RNA, 19 nt, Homo sapiens
  misc_RNA (1)...(19): siRNA sense strand
gaaggucugccaacaccaa

SEQ ID NO: 376974 - RNA, 19 nt, Homo sapiens
  misc_RNA (1)...(19): siRNA sense strand
agaggaguaugauucuauu

SEQ ID NO: 376975 - RNA, 19 nt, Homo sapiens
  misc_RNA (1)...(19): siRNA sense strand
gaaucuguaucuuuauugc

SEQ ID NO: 376976 - RNA, 19 nt, Homo sapiens
  misc_RNA (1)...(19): siRNA sense strand
gaaguacaucucagaaucu

SEQ ID NO: 376977 - RNA, 19 nt, Homo sapiens
  misc_RNA (1)...(19): siRNA sense strand
caagugaucaaccuucaga

SEQ ID NO: 376978 - RNA, 19 nt, Homo sapiens
  misc_RNA (1)...(19): siRNA sense strand
acacagagaacaccacgaa

SEQ ID NO: 376979 - RNA, 19 nt, Homo sapiens
  misc_RNA (1)...(19): siRNA sense strand
uguaacaucuaauggacuu

SEQ ID NO: 376980 - RNA, 19 nt, Homo sapiens
  misc_RNA (1)...(19): siRNA sense strand
gaacacgaaugcaaaagca

SEQ ID NO: 376981 - RNA, 19 nt, Homo sapiens
  misc_RNA (1)...(19): siRNA sense strand
gaggaguaugauucuauua

SEQ ID NO: 376982 - RNA, 19 nt, Homo sapiens
  misc_RNA (1)...(19): siRNA sense strand
cuaccucucuuucacuguu

SEQ ID NO: 376983 - RNA, 19 nt, Homo sapiens
  misc_RNA (1)...(19): siRNA sense strand
gaucacagcgauacaaacu

SEQ ID NO: 376984 - RNA, 19 nt, Homo sapiens
  misc_RNA (1)...(19): siRNA sense strand
agacaaaccucaucaacua

SEQ ID NO: 376985 - RNA, 19 nt, Homo sapiens
  misc_RNA (1)...(19): siRNA sense strand
caagagagauguugggauu

SEQ ID NO: 376986 - RNA, 19 nt, Homo sapiens
  misc_RNA (1)...(19): siRNA sense strand
gcaaggaugucauugaaga

SEQ ID NO: 376987 - RNA, 19 nt, Homo sapiens
  misc_RNA (1)...(19): siRNA sense strand
caagaacacuuauguggaa

SEQ ID NO: 376988 - RNA, 19 nt, Homo sapiens
  misc_RNA (1)...(19): siRNA sense strand
gcacagcugucaccucuga

SEQ ID NO: 376989 - RNA, 19 nt, Homo sapiens
  misc_RNA (1)...(19): siRNA sense strand
gaaauccaguuccugcuuu

SEQ ID NO: 376990 - RNA, 19 nt, Homo sapiens
  misc_RNA (1)...(19): siRNA sense strand
gcgaugaccucuauuccua

SEQ ID NO: 376991 - RNA, 19 nt, Homo sapiens
  misc_RNA (1)...(19): siRNA sense strand
ggaagagggugaagaggaa

SEQ ID NO: 376992 - RNA, 19 nt, Homo sapiens
  misc_RNA (1)...(19): siRNA sense strand
gaacagaucaauaugcuau

SEQ ID NO: 376993 - RNA, 19 nt, Homo sapiens
  misc_RNA (1)...(19): siRNA sense strand
gggagaagcuggcggagaa

SEQ ID NO: 376994 - RNA, 19 nt, Homo sapiens
  misc_RNA (1)...(19): siRNA sense strand
ggacucgucuuccauugaa

SEQ ID NO: 376995 - RNA, 19 nt, Homo sapiens
  misc_RNA (1)...(19): siRNA sense strand
ggaaacagcuggugaugac

SEQ ID NO: 376996 - RNA, 19 nt, Homo sapiens
  misc_RNA (1)...(19): siRNA sense strand
aagcuggacuccuucauua

SEQ ID NO: 376997 - RNA, 19 nt, Homo sapiens
  misc_RNA (1)...(19): siRNA sense strand
gaagugugaugacaugaug

SEQ ID NO: 376998 - RNA, 19 nt, Homo sapiens
  misc_RNA (1)...(19): siRNA sense strand
gaaagccgaugccgagaau

SEQ ID NO: 376999 - RNA, 19 nt, Homo sapiens
  misc_RNA (1)...(19): siRNA sense strand
ggagaacggugaagcugaa

SEQ ID NO: 377000 - RNA, 19 nt, Homo sapiens
  misc_RNA (1)...(19): siRNA sense strand
gggaauauccugagaauca

SEQ ID NO: 377001 - RNA, 19 nt, Homo sapiens
  misc_RNA (1)...(19): siRNA sense strand
gggcaaggaugucauugaa

SEQ ID NO: 377002 - RNA, 19 nt, Homo sapiens
  misc_RNA (1)...(19): siRNA sense strand
caugauagaugaccuuuca

SEQ ID NO: 377003 - RNA, 19 nt, Homo sapiens
  misc_RNA (1)...(19): siRNA sense strand
gcuccaugcucucugaaua

SEQ ID NO: 377004 - RNA, 19 nt, Homo sapiens
  misc_RNA (1)...(19): siRNA sense strand
gaaccaccaagaacacuua

SEQ ID NO: 377005 - RNA, 19 nt, Homo sapiens
  misc_RNA (1)...(19): siRNA sense strand
gcagagaaauccuauacag

SEQ ID NO: 377006 - RNA, 19 nt, Homo sapiens
  misc_RNA (1)...(19): siRNA sense strand
gaugacguguuaccuguuu

SEQ ID NO: 377007 - RNA, 19 nt, Homo sapiens
  misc_RNA (1)...(19): siRNA sense strand
ggaacacgaccacuauuaa

SEQ ID NO: 377008 - RNA, 19 nt, Homo sapiens
  misc_RNA (1)...(19): siRNA sense strand
gaagaagaaggaagagaaa

SEQ ID NO: 377009 - RNA, 19 nt, Homo sapiens
  misc_RNA (1)...(19): siRNA sense strand
cacaagaccuguuccgauu

SEQ ID NO: 377010 - RNA, 19 nt, Homo sapiens
  misc_RNA (1)...(19): siRNA sense strand
gcaaacuggaugaggauua

SEQ ID NO: 377011 - RNA, 19 nt, Homo sapiens
  misc_RNA (1)...(19): siRNA sense strand
gcaaagagagcaacaccuu

SEQ ID NO: 377012 - RNA, 19 nt, Homo sapiens
  misc_RNA (1)...(19): siRNA sense strand
gaagauguaccaagagaga

SEQ ID NO: 377013 - RNA, 19 nt, Homo sapiens
  misc_RNA (1)...(19): siRNA sense strand
ggcagugacuacuuugaua

SEQ ID NO: 377014 - RNA, 19 nt, Homo sapiens
  misc_RNA (1)...(19): siRNA sense strand
ggaugaaccugacaugaag

SEQ ID NO: 377015 - RNA, 19 nt, Homo sapiens
  misc_RNA (1)...(19): siRNA sense strand
ugaaggagcugcuggaucu

SEQ ID NO: 377016 - RNA, 19 nt, Homo sapiens
  misc_RNA (1)...(19): siRNA sense strand
ggacauuucucaggaguuc

SEQ ID NO: 377017 - RNA, 19 nt, Homo sapiens
  misc_RNA (1)...(19): siRNA sense strand
gaagagauucgacaggauu

SEQ ID NO: 377018 - RNA, 19 nt, Homo sapiens
  misc_RNA (1)...(19): siRNA sense strand
caacaaagucuucuaccaa

SEQ ID NO: 377019 - RNA, 19 nt, Homo sapiens
  misc_RNA (1)...(19): siRNA sense strand
gaacaugguguacuacuuc

SEQ ID NO: 377020 - RNA, 19 nt, Homo sapiens
  misc_RNA (1)...(19): siRNA sense strand
gggaacacgaccacuauua

SEQ ID NO: 377021 - RNA, 19 nt, Homo sapiens
  misc_RNA (1)...(19): siRNA sense strand
gggaauuucugcacaacaa

SEQ ID NO: 377022 - RNA, 19 nt, Homo sapiens
  misc_RNA (1)...(19): siRNA sense strand
caaccaagaucuuauuacu

SEQ ID NO: 377023 - RNA, 19 nt, Homo sapiens
  misc_RNA (1)...(19): siRNA sense strand
gaugaucagugccugcaaa

SEQ ID NO: 377024 - RNA, 19 nt, Homo sapiens
  misc_RNA (1)...(19): siRNA sense strand
ugaaauuccugcagaugaa

SEQ ID NO: 377025 - RNA, 19 nt, Homo sapiens
  misc_RNA (1)...(19): siRNA sense strand
accaagaucuuauuacuga

SEQ ID NO: 377026 - RNA, 19 nt, Homo sapiens
  misc_RNA (1)...(19): siRNA sense strand
aaacaaggaugagacagaa

SEQ ID NO: 377027 - RNA, 19 nt, Homo sapiens
  misc_RNA (1)...(19): siRNA sense strand
gacgaggccuccuggauga

SEQ ID NO: 377028 - RNA, 19 nt, Homo sapiens
  misc_RNA (1)...(19): siRNA sense strand
ccaagaaggucgccaugau

SEQ ID NO: 377029 - RNA, 19 nt, Homo sapiens
  misc_RNA (1)...(19): siRNA sense strand
gcacacagccgcauguauc

SEQ ID NO: 377030 - RNA, 19 nt, Homo sapiens
  misc_RNA (1)...(19): siRNA sense strand
gaagcucgcucaggacuca

SEQ ID NO: 377031 - RNA, 19 nt, Homo sapiens
  misc_RNA (1)...(19): siRNA sense strand
agaaugagaucaacaacau

SEQ ID NO: 377032 - RNA, 19 nt, Homo sapiens
  misc_RNA (1)...(19): siRNA sense strand
cccaggagcuacugaaauu

SEQ ID NO: 377033 - RNA, 19 nt, Homo sapiens
  misc_RNA (1)...(19): siRNA sense strand
gaaccagcgcuccauguuu

SEQ ID NO: 377034 - RNA, 19 nt, Homo sapiens
  misc_RNA (1)...(19): siRNA sense strand
gagagcgacuccaucuuga

SEQ ID NO: 377035 - RNA, 19 nt, Homo sapiens
  misc_RNA (1)...(19): siRNA sense strand
gaacuccuagcuucucuaa

SEQ ID NO: 377036 - RNA, 19 nt, Homo sapiens
  misc_RNA (1)...(19): siRNA sense strand
ggaaagcacaggcuacaug

SEQ ID NO: 377037 - RNA, 19 nt, Homo sapiens
  misc_RNA (1)...(19): siRNA sense strand
ccaagauccugcucccuuu

SEQ ID NO: 377038 - RNA, 19 nt, Homo sapiens
  misc_RNA (1)...(19): siRNA sense strand
cggaagauaucacaaagug

SEQ ID NO: 377039 - RNA, 19 nt, Homo sapiens
  misc_RNA (1)...(19): siRNA sense strand
gcauagaccgccuaaaugu

SEQ ID NO: 377040 - RNA, 19 nt, Homo sapiens
  misc_RNA (1)...(19): siRNA sense strand
caagaggccuuaaggacau

SEQ ID NO: 377041 - RNA, 19 nt, Homo sapiens
  misc_RNA (1)...(19): siRNA sense strand
cagaacaacugguccuaug

SEQ ID NO: 377042 - RNA, 19 nt, Homo sapiens
  misc_RNA (1)...(19): siRNA sense strand
gaacaucaugaacaacaaa

SEQ ID NO: 377043 - RNA, 19 nt, Homo sapiens
  misc_RNA (1)...(19): siRNA sense strand
uacaacaacuucuucuuug

SEQ ID NO: 377044 - RNA, 19 nt, Homo sapiens
  misc_RNA (1)...(19): siRNA sense strand
gaugaugaauucacacaag

SEQ ID NO: 377045 - RNA, 19 nt, Homo sapiens
  misc_RNA (1)...(19): siRNA sense strand
ucacagagaacaccauuau

SEQ ID NO: 377046 - RNA, 19 nt, Homo sapiens
  misc_RNA (1)...(19): siRNA sense strand
agcacaaccuggccaauua

SEQ ID NO: 377047 - RNA, 19 nt, Homo sapiens
  misc_RNA (1)...(19): siRNA sense strand
cgacaucaccuucuucuuc

SEQ ID NO: 377048 - RNA, 19 nt, Homo sapiens
  misc_RNA (1)...(19): siRNA sense strand
cuacaacaacuucuucuuu

SEQ ID NO: 377049 - RNA, 19 nt, Homo sapiens
  misc_RNA (1)...(19): siRNA sense strand
gaucagugccugcaaagga

SEQ ID NO: 377050 - RNA, 19 nt, Homo sapiens
  misc_RNA (1)...(19): siRNA sense strand
gggagacgcucaagacucu

SEQ ID NO: 377051 - RNA, 19 nt, Homo sapiens
  misc_RNA (1)...(19): siRNA sense strand
guucagcgguccagaaauc

SEQ ID NO: 377052 - RNA, 19 nt, Homo sapiens
  misc_RNA (1)...(19): siRNA sense strand
uggauuaucuuaaggacaa

SEQ ID NO: 377053 - RNA, 19 nt, Homo sapiens
  misc_RNA (1)...(19): siRNA sense strand
agaaacagauggagaagca

SEQ ID NO: 377054 - RNA, 19 nt, Homo sapiens
  misc_RNA (1)...(19): siRNA sense strand
gaacaggagauuaaauucu

SEQ ID NO: 377055 - RNA, 19 nt, Homo sapiens
  misc_RNA (1)...(19): siRNA sense strand
uuaacaaguuugcggagua

SEQ ID NO: 377056 - RNA, 19 nt, Homo sapiens
  misc_RNA (1)...(19): siRNA sense strand
gaacaacaaagucuucuac

SEQ ID NO: 377057 - RNA, 19 nt, Homo sapiens
  misc_RNA (1)...(19): siRNA sense strand
ggaacaucaugaacaacaa

SEQ ID NO: 377058 - RNA, 19 nt, Homo sapiens
  misc_RNA (1)...(19): siRNA sense strand
gaggacaaccugaagaaga

SEQ ID NO: 377059 - RNA, 19 nt, Homo sapiens
  misc_RNA (1)...(19): siRNA sense strand
ggucaacugucuucacauc

SEQ ID NO: 377060 - RNA, 19 nt, Homo sapiens
  misc_RNA (1)...(19): siRNA sense strand
gaacaacugguccuaugga

SEQ ID NO: 377061 - RNA, 19 nt, Homo sapiens
  misc_RNA (1)...(19): siRNA sense strand
gaagggcugcuccagauga

SEQ ID NO: 377062 - RNA, 19 nt, Homo sapiens
  misc_RNA (1)...(19): siRNA sense strand
ggaggaaacagcacaggaa

SEQ ID NO: 377063 - RNA, 19 nt, Homo sapiens
  misc_RNA (1)...(19): siRNA sense strand
agacguauaugaugagcaa

SEQ ID NO: 377064 - RNA, 19 nt, Homo sapiens
  misc_RNA (1)...(19): siRNA sense strand
gagcgaggaugaggaugaa

SEQ ID NO: 377065 - RNA, 19 nt, Homo sapiens
  misc_RNA (1)...(19): siRNA sense strand
gcacugcccugacggaaaa

SEQ ID NO: 377066 - RNA, 19 nt, Homo sapiens
  misc_RNA (1)...(19): siRNA sense strand
aggaagagguggaagagaa

SEQ ID NO: 377067 - RNA, 19 nt, Homo sapiens
  misc_RNA (1)...(19): siRNA sense strand
gggcagucguggccuguuu

SEQ ID NO: 377068 - RNA, 19 nt, Homo sapiens
  misc_RNA (1)...(19): siRNA sense strand
gcacaacaaccuucaccuu

SEQ ID NO: 377069 - RNA, 19 nt, Homo sapiens
  misc_RNA (1)...(19): siRNA sense strand
ggaggaggaugaggaggaa

SEQ ID NO: 377070 - RNA, 19 nt, Homo sapiens
  misc_RNA (1)...(19): siRNA sense strand
gcugguacuucgaguuuga

SEQ ID NO: 377071 - RNA, 19 nt, Homo sapiens
  misc_RNA (1)...(19): siRNA sense strand
gcagagaacggcaaagaag

SEQ ID NO: 377072 - RNA, 19 nt, Homo sapiens
  misc_RNA (1)...(19): siRNA sense strand
guacauggccuaugcugau

SEQ ID NO: 377073 - RNA, 19 nt, Homo sapiens
  misc_RNA (1)...(19): siRNA sense strand
ggaugaggauuaccuguac

SEQ ID NO: 377074 - RNA, 19 nt, Homo sapiens
  misc_RNA (1)...(19): siRNA sense strand
cggaggagcuguucaggau

SEQ ID NO: 377075 - RNA, 19 nt, Homo sapiens
  misc_RNA (1)...(19): siRNA sense strand
gggaauggacgauagagaa

SEQ ID NO: 377076 - RNA, 19 nt, Homo sapiens
  misc_RNA (1)...(19): siRNA sense strand
gguugacgcuuccuucaug

SEQ ID NO: 377077 - RNA, 19 nt, Homo sapiens
  misc_RNA (1)...(19): siRNA sense strand
gaacccaacacuaagcuau

SEQ ID NO: 377078 - RNA, 19 nt, Homo sapiens
  misc_RNA (1)...(19): siRNA sense strand
acacggaccuugucauugg

SEQ ID NO: 377079 - RNA, 19 nt, Homo sapiens
  misc_RNA (1)...(19): siRNA sense strand
gcaccauccuguccucugu

SEQ ID NO: 377080 - RNA, 19 nt, Homo sapiens
  misc_RNA (1)...(19): siRNA sense strand
cccggaagcuggaguuuga

SEQ ID NO: 377081 - RNA, 19 nt, Homo sapiens
  misc_RNA (1)...(19): siRNA sense strand
ggccuaugcugauaucaug

SEQ ID NO: 377082 - RNA, 19 nt, Homo sapiens
  misc_RNA (1)...(19): siRNA sense strand
ucgagaagaugguggagaa

SEQ ID NO: 377083 - RNA, 19 nt, Homo sapiens
  misc_RNA (1)...(19): siRNA sense strand
caaaggguacccagacauu

SEQ ID NO: 377084 - RNA, 19 nt, Homo sapiens
  misc_RNA (1)...(19): siRNA sense strand
ggaggaauauuguaccaaa

SEQ ID NO: 377085 - RNA, 19 nt, Homo sapiens
  misc_RNA (1)...(19): siRNA sense strand
gaucauugcucccaaacug

SEQ ID NO: 377086 - RNA, 19 nt, Homo sapiens
  misc_RNA (1)...(19): siRNA sense strand
gaacagcuguguggacaau

SEQ ID NO: 377087 - RNA, 19 nt, Homo sapiens
  misc_RNA (1)...(19): siRNA sense strand
caaagcgccuggaucauug

SEQ ID NO: 377088 - RNA, 19 nt, Homo sapiens
  misc_RNA (1)...(19): siRNA sense strand
gcucauagcugugguugga

SEQ ID NO: 377089 - RNA, 19 nt, Homo sapiens
  misc_RNA (1)...(19): siRNA sense strand
gaacggagccagagucauc

SEQ ID NO: 377090 - RNA, 19 nt, Homo sapiens
  misc_RNA (1)...(19): siRNA sense strand
ggaacugccuccaauaucu

SEQ ID NO: 377091 - RNA, 19 nt, Homo sapiens
  misc_RNA (1)...(19): siRNA sense strand
ucaauaacauccuaagugu

SEQ ID NO: 377092 - RNA, 19 nt, Homo sapiens
  misc_RNA (1)...(19): siRNA sense strand
caagaaaugucauggaaaa

SEQ ID NO: 377093 - RNA, 19 nt, Homo sapiens
  misc_RNA (1)...(19): siRNA sense strand
gagagcaauuucaauaaca

SEQ ID NO: 377094 - RNA, 19 nt, Homo sapiens
  misc_RNA (1)...(19): siRNA sense strand
ggagcucaaugucguauuc

SEQ ID NO: 377095 - RNA, 19 nt, Homo sapiens
  misc_RNA (1)...(19): siRNA sense strand
uacaagaaaugucauggaa

SEQ ID NO: 377096 - RNA, 19 nt, Homo sapiens
  misc_RNA (1)...(19): siRNA sense strand
guaauucccuaugauaaca

SEQ ID NO: 377097 - RNA, 19 nt, Homo sapiens
  misc_RNA (1)...(19): siRNA sense strand
ccaaagcgccuggaucauu

SEQ ID NO: 377098 - RNA, 19 nt, Homo sapiens
  misc_RNA (1)...(19): siRNA sense strand
ccugagagcaauuucaaua

SEQ ID NO: 377099 - RNA, 19 nt, Homo sapiens
  misc_RNA (1)...(19): siRNA sense strand
ccgcucaucuacagcauuu

SEQ ID NO: 377100 - RNA, 19 nt, Homo sapiens
  misc_RNA (1)...(19): siRNA sense strand
gaugcaacguggaaaucaa

SEQ ID NO: 377101 - RNA, 19 nt, Homo sapiens
  misc_RNA (1)...(19): siRNA sense strand
caacguggaaaucaagaaa

SEQ ID NO: 377102 - RNA, 19 nt, Homo sapiens
  misc_RNA (1)...(19): siRNA sense strand
gcucccaaacuguggauua

SEQ ID NO: 377103 - RNA, 19 nt, Homo sapiens
  misc_RNA (1)...(19): siRNA sense strand
gcaucguaauucccuauga

SEQ ID NO: 377104 - RNA, 19 nt, Homo sapiens
  misc_RNA (1)...(19): siRNA sense strand
gaacugccuccaauaucuu

SEQ ID NO: 377105 - RNA, 19 nt, Homo sapiens
  misc_RNA (1)...(19): siRNA sense strand
caucguaauucccuaugau

SEQ ID NO: 377106 - RNA, 19 nt, Homo sapiens
  misc_RNA (1)...(19): siRNA sense strand
cccaaacuguggauuauag

SEQ ID NO: 377107 - RNA, 19 nt, Homo sapiens
  misc_RNA (1)...(19): siRNA sense strand
uaaguacggugcugaccau

SEQ ID NO: 377108 - RNA, 19 nt, Homo sapiens
  misc_RNA (1)...(19): siRNA sense strand
gcagaacacgcagcuaugu

SEQ ID NO: 377109 - RNA, 19 nt, Homo sapiens
  misc_RNA (1)...(19): siRNA sense strand
ugagagcaauuucaauaac

SEQ ID NO: 377110 - RNA, 19 nt, Homo sapiens
  misc_RNA (1)...(19): siRNA sense strand
cgcaauauucuuaggauuu

SEQ ID NO: 377111 - RNA, 19 nt, Homo sapiens
  misc_RNA (1)...(19): siRNA sense strand
uaagugugguccuaaguac

SEQ ID NO: 377112 - RNA, 19 nt, Homo sapiens
  misc_RNA (1)...(19): siRNA sense strand
ggagccagagucaucguuu

SEQ ID NO: 377113 - RNA, 19 nt, Homo sapiens
  misc_RNA (1)...(19): siRNA sense strand
guaguggugcucauuauag

SEQ ID NO: 377114 - RNA, 19 nt, Homo sapiens
  misc_RNA (1)...(19): siRNA sense strand
gaaauuucuagggcacaua

SEQ ID NO: 377115 - RNA, 19 nt, Homo sapiens
  misc_RNA (1)...(19): siRNA sense strand
cuaagugugguccuaagua

SEQ ID NO: 377116 - RNA, 19 nt, Homo sapiens
  misc_RNA (1)...(19): siRNA sense strand
acguggaaaucaagaaauu

SEQ ID NO: 377117 - RNA, 19 nt, Homo sapiens
  misc_RNA (1)...(19): siRNA sense strand
cauccuaagugugguccua

SEQ ID NO: 377118 - RNA, 19 nt, Homo sapiens
  misc_RNA (1)...(19): siRNA sense strand
ccagagucaucguuuuaua

SEQ ID NO: 377119 - RNA, 19 nt, Homo sapiens
  misc_RNA (1)...(19): siRNA sense strand
uaccaaagcgccuggauca

SEQ ID NO: 377120 - RNA, 19 nt, Homo sapiens
  misc_RNA (1)...(19): siRNA sense strand
gaggaauauuguaccaaag

SEQ ID NO: 377121 - RNA, 19 nt, Homo sapiens
  misc_RNA (1)...(19): siRNA sense strand
aaacaaggcagaaauucca

SEQ ID NO: 377122 - RNA, 19 nt, Homo sapiens
  misc_RNA (1)...(19): siRNA sense strand
gaaauuccagagagcaaag

SEQ ID NO: 377123 - RNA, 19 nt, Homo sapiens
  misc_RNA (1)...(19): siRNA sense strand
cauccucauugugcucaua

SEQ ID NO: 377124 - RNA, 19 nt, Homo sapiens
  misc_RNA (1)...(19): siRNA sense strand
gagcaucguaauucccuau

SEQ ID NO: 377125 - RNA, 19 nt, Homo sapiens
  misc_RNA (1)...(19): siRNA sense strand
ccgcaauauucuuaggauu

SEQ ID NO: 377126 - RNA, 19 nt, Homo sapiens
  misc_RNA (1)...(19): siRNA sense strand
gcaacguggaaaucaagaa

SEQ ID NO: 377127 - RNA, 19 nt, Homo sapiens
  misc_RNA (1)...(19): siRNA sense strand
aaacuguggauuauaggaa

SEQ ID NO: 377128 - RNA, 19 nt, Homo sapiens
  misc_RNA (1)...(19): siRNA sense strand
ucugguugcucucguuguu

SEQ ID NO: 377129 - RNA, 19 nt, Homo sapiens
  misc_RNA (1)...(19): siRNA sense strand
cguaguggugcucauuaua

SEQ ID NO: 377130 - RNA, 19 nt, Homo sapiens
  misc_RNA (1)...(19): siRNA sense strand
aaauuucuagggcacauaa

SEQ ID NO: 377131 - RNA, 19 nt, Homo sapiens
  misc_RNA (1)...(19): siRNA sense strand
gcauacaagaaaugucaug

SEQ ID NO: 377132 - RNA, 19 nt, Homo sapiens
  misc_RNA (1)...(19): siRNA sense strand
uauuuccuguggcggguua

SEQ ID NO: 377133 - RNA, 19 nt, Homo sapiens
  misc_RNA (1)...(19): siRNA sense strand
guacggugcugaccauccu

SEQ ID NO: 377134 - RNA, 19 nt, Homo sapiens
  misc_RNA (1)...(19): siRNA sense strand
gccguaguggugcucauua

SEQ ID NO: 377135 - RNA, 19 nt, Homo sapiens
  misc_RNA (1)...(19): siRNA sense strand
ggaugcaacguggaaauca

SEQ ID NO: 377136 - RNA, 19 nt, Homo sapiens
  misc_RNA (1)...(19): siRNA sense strand
gccgcaauauucuuaggau

SEQ ID NO: 377137 - RNA, 19 nt, Homo sapiens
  misc_RNA (1)...(19): siRNA sense strand
cugagagcaauuucaauaa

SEQ ID NO: 377138 - RNA, 19 nt, Homo sapiens
  misc_RNA (1)...(19): siRNA sense strand
ccguaguggugcucauuau

SEQ ID NO: 377139 - RNA, 19 nt, Homo sapiens
  misc_RNA (1)...(19): siRNA sense strand
gagccagagucaucguuuu

SEQ ID NO: 377140 - RNA, 19 nt, Homo sapiens
  misc_RNA (1)...(19): siRNA sense strand
acaagaaaugucauggaaa

SEQ ID NO: 377141 - RNA, 19 nt, Homo sapiens
  misc_RNA (1)...(19): siRNA sense strand
gauaacauagguacaucuc

SEQ ID NO: 377142 - RNA, 19 nt, Homo sapiens
  misc_RNA (1)...(19): siRNA sense strand
gccgaacgguugcuuuuga

SEQ ID NO: 377143 - RNA, 19 nt, Homo sapiens
  misc_RNA (1)...(19): siRNA sense strand
uggcauacaagaaauguca

SEQ ID NO: 377144 - RNA, 19 nt, Homo sapiens
  misc_RNA (1)...(19): siRNA sense strand
uguggacaaugcaacaguu

SEQ ID NO: 377145 - RNA, 19 nt, Homo sapiens
  misc_RNA (1)...(19): siRNA sense strand
ucaaugucguauucaccuu

SEQ ID NO: 377146 - RNA, 19 nt, Homo sapiens
  misc_RNA (1)...(19): siRNA sense strand
ucguaauucccuaugauaa

SEQ ID NO: 377147 - RNA, 19 nt, Homo sapiens
  misc_RNA (1)...(19): siRNA sense strand
caaacuguggauuauagga

SEQ ID NO: 377148 - RNA, 19 nt, Homo sapiens
  misc_RNA (1)...(19): siRNA sense strand
ggaauguuuguuaaucaca

SEQ ID NO: 377149 - RNA, 19 nt, Homo sapiens
  misc_RNA (1)...(19): siRNA sense strand
ggcuuccucugucaguuug

SEQ ID NO: 377150 - RNA, 19 nt, Homo sapiens
  misc_RNA (1)...(19): siRNA sense strand
gcuauguuccaccaucguu

SEQ ID NO: 377151 - RNA, 19 nt, Homo sapiens
  misc_RNA (1)...(19): siRNA sense strand
guaccugagagcaauuuca

SEQ ID NO: 377152 - RNA, 19 nt, Homo sapiens
  misc_RNA (1)...(19): siRNA sense strand
cguuguuccuguuuccauu

SEQ ID NO: 377153 - RNA, 19 nt, Homo sapiens
  misc_RNA (1)...(19): siRNA sense strand
guggacaaugcaacaguuu

SEQ ID NO: 377154 - RNA, 19 nt, Homo sapiens
  misc_RNA (1)...(19): siRNA sense strand
cgcugugccuccuuaucua

SEQ ID NO: 377155 - RNA, 19 nt, Homo sapiens
  misc_RNA (1)...(19): siRNA sense strand
cagaaauuccagagagcaa

SEQ ID NO: 377156 - RNA, 19 nt, Homo sapiens
  misc_RNA (1)...(19): siRNA sense strand
gagcaauuucaauaacauc

SEQ ID NO: 377157 - RNA, 19 nt, Homo sapiens
  misc_RNA (1)...(19): siRNA sense strand
ugugguaccugagagcaau

SEQ ID NO: 377158 - RNA, 19 nt, Homo sapiens
  misc_RNA (1)...(19): siRNA sense strand
uucaauaacauccuaagug

SEQ ID NO: 377159 - RNA, 19 nt, Homo sapiens
  misc_RNA (1)...(19): siRNA sense strand
uaccugagagcaauuucaa

SEQ ID NO: 377160 - RNA, 19 nt, Homo sapiens
  misc_RNA (1)...(19): siRNA sense strand
gcucucguuguuccuguuu

SEQ ID NO: 377161 - RNA, 19 nt, Homo sapiens
  misc_RNA (1)...(19): siRNA sense strand
cauagguacaucucugguu

SEQ ID NO: 377162 - RNA, 19 nt, Homo sapiens
  misc_RNA (1)...(19): siRNA sense strand
gcugugccuccuuaucuau

SEQ ID NO: 377163 - RNA, 19 nt, Homo sapiens
  misc_RNA (1)...(19): siRNA sense strand
gaucacggcuggcaucuuc

SEQ ID NO: 377164 - RNA, 19 nt, Homo sapiens
  misc_RNA (1)...(19): siRNA sense strand
ccaaguggcugaacaagag

SEQ ID NO: 377165 - RNA, 19 nt, Homo sapiens
  misc_RNA (1)...(19): siRNA sense strand
caagauccguguguucgua

SEQ ID NO: 377166 - RNA, 19 nt, Homo sapiens
  misc_RNA (1)...(19): siRNA sense strand
gaacugcccacaacagaga

SEQ ID NO: 377167 - RNA, 19 nt, Homo sapiens
  misc_RNA (1)...(19): siRNA sense strand
gagagaaaggcgaucauuu

SEQ ID NO: 377168 - RNA, 19 nt, Homo sapiens
  misc_RNA (1)...(19): siRNA sense strand
ccaaggcccuggugaagga

SEQ ID NO: 377169 - RNA, 19 nt, Homo sapiens
  misc_RNA (1)...(19): siRNA sense strand
gaccuucauuccaauacua

SEQ ID NO: 377170 - RNA, 19 nt, Homo sapiens
  misc_RNA (1)...(19): siRNA sense strand
gcaagaagaccauagacau

SEQ ID NO: 377171 - RNA, 19 nt, Homo sapiens
  misc_RNA (1)...(19): siRNA sense strand
ggaauguucuccaucuucu

SEQ ID NO: 377172 - RNA, 19 nt, Homo sapiens
  misc_RNA (1)...(19): siRNA sense strand
ccucagaccuccagucauc

SEQ ID NO: 377173 - RNA, 19 nt, Homo sapiens
  misc_RNA (1)...(19): siRNA sense strand
cgucaucacuuugcccaua

SEQ ID NO: 377174 - RNA, 19 nt, Homo sapiens
  misc_RNA (1)...(19): siRNA sense strand
gcuguggccuucaucauca

SEQ ID NO: 377175 - RNA, 19 nt, Homo sapiens
  misc_RNA (1)...(19): siRNA sense strand
cgacugggauuccaugaag

SEQ ID NO: 377176 - RNA, 19 nt, Homo sapiens
  misc_RNA (1)...(19): siRNA sense strand
gaccagcuguacccacuga

SEQ ID NO: 377177 - RNA, 19 nt, Homo sapiens
  misc_RNA (1)...(19): siRNA sense strand
ggauggaccaggagagaaa

SEQ ID NO: 377178 - RNA, 19 nt, Homo sapiens
  misc_RNA (1)...(19): siRNA sense strand
guccugaccuggaucauca

SEQ ID NO: 377179 - RNA, 19 nt, Homo sapiens
  misc_RNA (1)...(19): siRNA sense strand
ccaagggcuucuucagcua

SEQ ID NO: 377180 - RNA, 19 nt, Homo sapiens
  misc_RNA (1)...(19): siRNA sense strand
aagaggagguggagcaaau

SEQ ID NO: 377181 - RNA, 19 nt, Homo sapiens
  misc_RNA (1)...(19): siRNA sense strand
ccuaugcccucaucaacuu

SEQ ID NO: 377182 - RNA, 19 nt, Homo sapiens
  misc_RNA (1)...(19): siRNA sense strand
caaaggcuauggcaagaac

SEQ ID NO: 377183 - RNA, 19 nt, Homo sapiens
  misc_RNA (1)...(19): siRNA sense strand
guucaacuauggcgugugu

SEQ ID NO: 377184 - RNA, 19 nt, Homo sapiens
  misc_RNA (1)...(19): siRNA sense strand
acaagaagccagagguaaa

SEQ ID NO: 377185 - RNA, 19 nt, Homo sapiens
  misc_RNA (1)...(19): siRNA sense strand
ggagagaaaggcgaucauu

SEQ ID NO: 377186 - RNA, 19 nt, Homo sapiens
  misc_RNA (1)...(19): siRNA sense strand
augaggagauuacgaagaa

SEQ ID NO: 377187 - RNA, 19 nt, Homo sapiens
  misc_RNA (1)...(19): siRNA sense strand
ggcaaaggcuauggcaaga

SEQ ID NO: 377188 - RNA, 19 nt, Homo sapiens
  misc_RNA (1)...(19): siRNA sense strand
gugguuggguucaagaaga

SEQ ID NO: 377189 - RNA, 19 nt, Homo sapiens
  misc_RNA (1)...(19): siRNA sense strand
ccucaaggacccugcuaua

SEQ ID NO: 377190 - RNA, 19 nt, Homo sapiens
  misc_RNA (1)...(19): siRNA sense strand
ggagaccuucauuccaaua

SEQ ID NO: 377191 - RNA, 19 nt, Homo sapiens
  misc_RNA (1)...(19): siRNA sense strand
ggacgaccauuuccuaccu

SEQ ID NO: 377192 - RNA, 19 nt, Homo sapiens
  misc_RNA (1)...(19): siRNA sense strand
caagaagaccauagacauc

SEQ ID NO: 377193 - RNA, 19 nt, Homo sapiens
  misc_RNA (1)...(19): siRNA sense strand
uggaagaccacaucaagaa

SEQ ID NO: 377194 - RNA, 19 nt, Homo sapiens
  misc_RNA (1)...(19): siRNA sense strand
ucacaggccucuccaucuc

SEQ ID NO: 377195 - RNA, 19 nt, Homo sapiens
  misc_RNA (1)...(19): siRNA sense strand
cagaugaggagauuacgaa

SEQ ID NO: 377196 - RNA, 19 nt, Homo sapiens
  misc_RNA (1)...(19): siRNA sense strand
caagagguuugaggacaug

SEQ ID NO: 377197 - RNA, 19 nt, Homo sapiens
  misc_RNA (1)...(19): siRNA sense strand
ucgcugagcucaacaccau

SEQ ID NO: 377198 - RNA, 19 nt, Homo sapiens
  misc_RNA (1)...(19): siRNA sense strand
gugcuguucuuccuuguca

SEQ ID NO: 377199 - RNA, 19 nt, Homo sapiens
  misc_RNA (1)...(19): siRNA sense strand
gacaucuacuggcucuuug

SEQ ID NO: 377200 - RNA, 19 nt, Homo sapiens
  misc_RNA (1)...(19): siRNA sense strand
gcccacauaugagcacuau

SEQ ID NO: 377201 - RNA, 19 nt, Homo sapiens
  misc_RNA (1)...(19): siRNA sense strand
caucaucgcugagcucaac

SEQ ID NO: 377202 - RNA, 19 nt, Homo sapiens
  misc_RNA (1)...(19): siRNA sense strand
ucagccaucuccaccaaug

SEQ ID NO: 377203 - RNA, 19 nt, Homo sapiens
  misc_RNA (1)...(19): siRNA sense strand
uggcugaccugcacuccuu

SEQ ID NO: 377204 - RNA, 19 nt, Homo sapiens
  misc_RNA (1)...(19): siRNA sense strand
ccaagagguuugaggacau

SEQ ID NO: 377205 - RNA, 19 nt, Homo sapiens
  misc_RNA (1)...(19): siRNA sense strand
gagcacaccaagagguuug

SEQ ID NO: 377206 - RNA, 19 nt, Homo sapiens
  misc_RNA (1)...(19): siRNA sense strand
aagaccacaucaagaacua

SEQ ID NO: 377207 - RNA, 19 nt, Homo sapiens
  misc_RNA (1)...(19): siRNA sense strand
gcaccuacuuccucaucuc

SEQ ID NO: 377208 - RNA, 19 nt, Homo sapiens
  misc_RNA (1)...(19): siRNA sense strand
caugaugccuuugaguuca

SEQ ID NO: 377209 - RNA, 19 nt, Homo sapiens
  misc_RNA (1)...(19): siRNA sense strand
caagaagccagagguaaau

SEQ ID NO: 377210 - RNA, 19 nt, Homo sapiens
  misc_RNA (1)...(19): siRNA sense strand
uaacgacauccgcaucauu

SEQ ID NO: 377211 - RNA, 19 nt, Homo sapiens
  misc_RNA (1)...(19): siRNA sense strand
ggucuccuuugccaacuau

SEQ ID NO: 377212 - RNA, 19 nt, Homo sapiens
  misc_RNA (1)...(19): siRNA sense strand
gaugaggagauuacgaaga

SEQ ID NO: 377213 - RNA, 19 nt, Homo sapiens
  misc_RNA (1)...(19): siRNA sense strand
cuacaagaagccagaggua

SEQ ID NO: 377214 - RNA, 19 nt, Homo sapiens
  misc_RNA (1)...(19): siRNA sense strand
guucuuccuugucaucaug

SEQ ID NO: 377215 - RNA, 19 nt, Homo sapiens
  misc_RNA (1)...(19): siRNA sense strand
caggugaggcugaaugaga

SEQ ID NO: 377216 - RNA, 19 nt, Homo sapiens
  misc_RNA (1)...(19): siRNA sense strand
gggcugagcacaccaagag

SEQ ID NO: 377217 - RNA, 19 nt, Homo sapiens
  misc_RNA (1)...(19): siRNA sense strand
ggagguggagcaaaugcaa

SEQ ID NO: 377218 - RNA, 19 nt, Homo sapiens
  misc_RNA (1)...(19): siRNA sense strand
gaagaccacaucaagaacu

SEQ ID NO: 377219 - RNA, 19 nt, Homo sapiens
  misc_RNA (1)...(19): siRNA sense strand
acuacggccucaucaacua

SEQ ID NO: 377220 - RNA, 19 nt, Homo sapiens
  misc_RNA (1)...(19): siRNA sense strand
gcaccagcagcgagaagaa

SEQ ID NO: 377221 - RNA, 19 nt, Homo sapiens
  misc_RNA (1)...(19): siRNA sense strand
ucuaugucaucuacaagaa

SEQ ID NO: 377222 - RNA, 19 nt, Homo sapiens
  misc_RNA (1)...(19): siRNA sense strand
gcaaaggcuauggcaagaa

SEQ ID NO: 377223 - RNA, 19 nt, Homo sapiens
  misc_RNA (1)...(19): siRNA sense strand
ugaugcaggcgcacauuaa

SEQ ID NO: 377224 - RNA, 19 nt, Homo sapiens
  misc_RNA (1)...(19): siRNA sense strand
gaccucagaccuccaguca

SEQ ID NO: 377225 - RNA, 19 nt, Homo sapiens
  misc_RNA (1)...(19): siRNA sense strand
agacaucuacuggcucuuu

SEQ ID NO: 377226 - RNA, 19 nt, Homo sapiens
  misc_RNA (1)...(19): siRNA sense strand
gaagccagagguaaauugg

SEQ ID NO: 377227 - RNA, 19 nt, Homo sapiens
  misc_RNA (1)...(19): siRNA sense strand
ugcaugcccuggccuuuga

SEQ ID NO: 377228 - RNA, 19 nt, Homo sapiens
  misc_RNA (1)...(19): siRNA sense strand
acauuggcauccuccauga

SEQ ID NO: 377229 - RNA, 19 nt, Homo sapiens
  misc_RNA (1)...(19): siRNA sense strand
caacguguccaagaugaug

SEQ ID NO: 377230 - RNA, 19 nt, Homo sapiens
  misc_RNA (1)...(19): siRNA sense strand
augagauugugcuggauua

SEQ ID NO: 377231 - RNA, 19 nt, Homo sapiens
  misc_RNA (1)...(19): siRNA sense strand
gaaugauggcuucaaggau

SEQ ID NO: 377232 - RNA, 19 nt, Homo sapiens
  misc_RNA (1)...(19): siRNA sense strand
gagguuugaggacaugauu

SEQ ID NO: 377233 - RNA, 19 nt, Homo sapiens
  misc_RNA (1)...(19): siRNA sense strand
ucccugacaucaaccagaa

SEQ ID NO: 377234 - RNA, 19 nt, Homo sapiens
  misc_RNA (1)...(19): siRNA sense strand
cagaacugcccacaacaga

SEQ ID NO: 377235 - RNA, 19 nt, Homo sapiens
  misc_RNA (1)...(19): siRNA sense strand
gaaugagauugugcuggau

SEQ ID NO: 377236 - RNA, 19 nt, Homo sapiens
  misc_RNA (1)...(19): siRNA sense strand
gagcaggccaccaccaucu

SEQ ID NO: 377237 - RNA, 19 nt, Homo sapiens
  misc_RNA (1)...(19): siRNA sense strand
gcacauuaaccccguguuu

SEQ ID NO: 377238 - RNA, 19 nt, Homo sapiens
  misc_RNA (1)...(19): siRNA sense strand
gcuacaacacgaucgaugu

SEQ ID NO: 377239 - RNA, 19 nt, Homo sapiens
  misc_RNA (1)...(19): siRNA sense strand
gaucggcuucuucggcaaa

SEQ ID NO: 377240 - RNA, 19 nt, Homo sapiens
  misc_RNA (1)...(19): siRNA sense strand
ucucagccaucuccaccaa

SEQ ID NO: 377241 - RNA, 19 nt, Homo sapiens
  misc_RNA (1)...(19): siRNA sense strand
gauccgaggaaaccaggaa

SEQ ID NO: 377242 - RNA, 19 nt, Homo sapiens
  misc_RNA (1)...(19): siRNA sense strand
gcucucaucgucaucacuu

SEQ ID NO: 377243 - RNA, 19 nt, Homo sapiens
  misc_RNA (1)...(19): siRNA sense strand
gcaaguuccgacugggauu

SEQ ID NO: 377244 - RNA, 19 nt, Homo sapiens
  misc_RNA (1)...(19): siRNA sense strand
ugaacaagaggaagaucaa

SEQ ID NO: 377245 - RNA, 19 nt, Homo sapiens
  misc_RNA (1)...(19): siRNA sense strand
caucauuuccaacuucuuc

SEQ ID NO: 377246 - RNA, 19 nt, Homo sapiens
  misc_RNA (1)...(19): siRNA sense strand
ccuugucucugcugccaaa

SEQ ID NO: 377247 - RNA, 19 nt, Homo sapiens
  misc_RNA (1)...(19): siRNA sense strand
ggaaaacgugcucaccuuu

SEQ ID NO: 377248 - RNA, 19 nt, Homo sapiens
  misc_RNA (1)...(19): siRNA sense strand
gaggagauuacgaagaaca

SEQ ID NO: 377249 - RNA, 19 nt, Homo sapiens
  misc_RNA (1)...(19): siRNA sense strand
gacucaacguguccaagau

SEQ ID NO: 377250 - RNA, 19 nt, Homo sapiens
  misc_RNA (1)...(19): siRNA sense strand
ggagaaugaagcccaacau

SEQ ID NO: 377251 - RNA, 19 nt, Homo sapiens
  misc_RNA (1)...(19): siRNA sense strand
gcagaggcguccagauccu

SEQ ID NO: 377252 - RNA, 19 nt, Homo sapiens
  misc_RNA (1)...(19): siRNA sense strand
gaacaagaggaagaucaag

SEQ ID NO: 377253 - RNA, 19 nt, Homo sapiens
  misc_RNA (1)...(19): siRNA sense strand
ccaacgggcacaccaagug

SEQ ID NO: 377254 - RNA, 19 nt, Homo sapiens
  misc_RNA (1)...(19): siRNA sense strand
ggccaucucagccaccauu

SEQ ID NO: 377255 - RNA, 19 nt, Homo sapiens
  misc_RNA (1)...(19): siRNA sense strand
ccaugaugccuuugaguuc

SEQ ID NO: 377256 - RNA, 19 nt, Homo sapiens
  misc_RNA (1)...(19): siRNA sense strand
cauccucccugacaucaac

SEQ ID NO: 377257 - RNA, 19 nt, Homo sapiens
  misc_RNA (1)...(19): siRNA sense strand
gcaagaggagguggagcaa

SEQ ID NO: 377258 - RNA, 19 nt, Homo sapiens
  misc_RNA (1)...(19): siRNA sense strand
gcuauggcaagaacaagga

SEQ ID NO: 377259 - RNA, 19 nt, Homo sapiens
  misc_RNA (1)...(19): siRNA sense strand
gcaucguccugaccuggau

SEQ ID NO: 377260 - RNA, 19 nt, Homo sapiens
  misc_RNA (1)...(19): siRNA sense strand
ggccucacccuccucauuc

SEQ ID NO: 377261 - RNA, 19 nt, Homo sapiens
  misc_RNA (1)...(19): siRNA sense strand
gcaggccaccaccaucuuc

SEQ ID NO: 377262 - RNA, 19 nt, Homo sapiens
  misc_RNA (1)...(19): siRNA sense strand
cacaguggaagacuacauu

SEQ ID NO: 377263 - RNA, 19 nt, Homo sapiens
  misc_RNA (1)...(19): siRNA sense strand
cuacaagggccuagacuua

SEQ ID NO: 377264 - RNA, 19 nt, Homo sapiens
  misc_RNA (1)...(19): siRNA sense strand
gaagggcacucaccaucug

SEQ ID NO: 377265 - RNA, 19 nt, Homo sapiens
  misc_RNA (1)...(19): siRNA sense strand
ggaggaaggucgggaugaa

SEQ ID NO: 377266 - RNA, 19 nt, Homo sapiens
  misc_RNA (1)...(19): siRNA sense strand
gaucuucuccuuccucauu

SEQ ID NO: 377267 - RNA, 19 nt, Homo sapiens
  misc_RNA (1)...(19): siRNA sense strand
cuagacagguuuaucuuug

SEQ ID NO: 377268 - RNA, 19 nt, Homo sapiens
  misc_RNA (1)...(19): siRNA sense strand
gggcuugcguuccgaguuu

SEQ ID NO: 377269 - RNA, 19 nt, Homo sapiens
  misc_RNA (1)...(19): siRNA sense strand
gcacucaccaucuggaauu

SEQ ID NO: 377270 - RNA, 19 nt, Homo sapiens
  misc_RNA (1)...(19): siRNA sense strand
caaggguacuguucuccua

SEQ ID NO: 377271 - RNA, 19 nt, Homo sapiens
  misc_RNA (1)...(19): siRNA sense strand
ccuauacgcuuccucuuug

SEQ ID NO: 377272 - RNA, 19 nt, Homo sapiens
  misc_RNA (1)...(19): siRNA sense strand
ucaagaacagcuccuauuu

SEQ ID NO: 377273 - RNA, 19 nt, Homo sapiens
  misc_RNA (1)...(19): siRNA sense strand
gaccgcaucuugcuucugu

SEQ ID NO: 377274 - RNA, 19 nt, Homo sapiens
  misc_RNA (1)...(19): siRNA sense strand
gaacguggagcuucagugu

SEQ ID NO: 377275 - RNA, 19 nt, Homo sapiens
  misc_RNA (1)...(19): siRNA sense strand
acaagggccuagacuuaaa

SEQ ID NO: 377276 - RNA, 19 nt, Homo sapiens
  misc_RNA (1)...(19): siRNA sense strand
gccgguaccuucuucuuug

SEQ ID NO: 377277 - RNA, 19 nt, Homo sapiens
  misc_RNA (1)...(19): siRNA sense strand
acagaagacuuauaacuac

SEQ ID NO: 377278 - RNA, 19 nt, Homo sapiens
  misc_RNA (1)...(19): siRNA sense strand
gagaggguguuccgcauag

SEQ ID NO: 377279 - RNA, 19 nt, Homo sapiens
  misc_RNA (1)...(19): siRNA sense strand
ucuccaagcugaucaagau

SEQ ID NO: 377280 - RNA, 19 nt, Homo sapiens
  misc_RNA (1)...(19): siRNA sense strand
ccugguggauuucuucauu

SEQ ID NO: 377281 - RNA, 19 nt, Homo sapiens
  misc_RNA (1)...(19): siRNA sense strand
caacugcuagacagguuua

SEQ ID NO: 377282 - RNA, 19 nt, Homo sapiens
  misc_RNA (1)...(19): siRNA sense strand
gcaucuugcuucuguucaa

SEQ ID NO: 377283 - RNA, 19 nt, Homo sapiens
  misc_RNA (1)...(19): siRNA sense strand
caagaacagcuccuauuuc

SEQ ID NO: 377284 - RNA, 19 nt, Homo sapiens
  misc_RNA (1)...(19): siRNA sense strand
ggaugauuaugaagacaug

SEQ ID NO: 377285 - RNA, 19 nt, Homo sapiens
  misc_RNA (1)...(19): siRNA sense strand
gcugcaggaugauuaugaa

SEQ ID NO: 377286 - RNA, 19 nt, Homo sapiens
  misc_RNA (1)...(19): siRNA sense strand
gcaggaugauuaugaagac

SEQ ID NO: 377287 - RNA, 19 nt, Homo sapiens
  misc_RNA (1)...(19): siRNA sense strand
ccaaguaucacccagaugu

SEQ ID NO: 377288 - RNA, 19 nt, Homo sapiens
  misc_RNA (1)...(19): siRNA sense strand
gcuagacagguuuaucuuu

SEQ ID NO: 377289 - RNA, 19 nt, Homo sapiens
  misc_RNA (1)...(19): siRNA sense strand
gaaguggccaugccugugu

SEQ ID NO: 377290 - RNA, 19 nt, Homo sapiens
  misc_RNA (1)...(19): siRNA sense strand
uagacagguuuaucuuuga

SEQ ID NO: 377291 - RNA, 19 nt, Homo sapiens
  misc_RNA (1)...(19): siRNA sense strand
ggaugaauacgacgaagug

SEQ ID NO: 377292 - RNA, 19 nt, Homo sapiens
  misc_RNA (1)...(19): siRNA sense strand
ucaugguccugguggauuu

SEQ ID NO: 377293 - RNA, 19 nt, Homo sapiens
  misc_RNA (1)...(19): siRNA sense strand
gggugcaacuggaggagaa

SEQ ID NO: 377294 - RNA, 19 nt, Homo sapiens
  misc_RNA (1)...(19): siRNA sense strand
agacagguuuaucuuugaa

SEQ ID NO: 377295 - RNA, 19 nt, Homo sapiens
  misc_RNA (1)...(19): siRNA sense strand
ccacuacagaagacuuaua

SEQ ID NO: 377296 - RNA, 19 nt, Homo sapiens
  misc_RNA (1)...(19): siRNA sense strand
ucaggaacguggagcuuca

SEQ ID NO: 377297 - RNA, 19 nt, Homo sapiens
  misc_RNA (1)...(19): siRNA sense strand
ucauauuccuggagucuca

SEQ ID NO: 377298 - RNA, 19 nt, Homo sapiens
  misc_RNA (1)...(19): siRNA sense strand
ugcaggagcuggugaugga

SEQ ID NO: 377299 - RNA, 19 nt, Homo sapiens
  misc_RNA (1)...(19): siRNA sense strand
gaagacuuauaacuacaac

SEQ ID NO: 377300 - RNA, 19 nt, Homo sapiens
  misc_RNA (1)...(19): siRNA sense strand
cagaagacuuauaacuaca

SEQ ID NO: 377301 - RNA, 19 nt, Homo sapiens
  misc_RNA (1)...(19): siRNA sense strand
gcagacaggccagcucuuc

SEQ ID NO: 377302 - RNA, 19 nt, Homo sapiens
  misc_RNA (1)...(19): siRNA sense strand
aagaacagcuccuauuucc

SEQ ID NO: 377303 - RNA, 19 nt, Homo sapiens
  misc_RNA (1)...(19): siRNA sense strand
gccuauacgcuuccucuuu

SEQ ID NO: 377304 - RNA, 19 nt, Homo sapiens
  misc_RNA (1)...(19): siRNA sense strand
ccaacggucuagaguacau

SEQ ID NO: 377305 - RNA, 19 nt, Homo sapiens
  misc_RNA (1)...(19): siRNA sense strand
ucaagccacccaaguauca

SEQ ID NO: 377306 - RNA, 19 nt, Homo sapiens
  misc_RNA (1)...(19): siRNA sense strand
guucaagccacccaaguau

SEQ ID NO: 377307 - RNA, 19 nt, Homo sapiens
  misc_RNA (1)...(19): siRNA sense strand
cacuacagaagacuuauaa

SEQ ID NO: 377308 - RNA, 19 nt, Homo sapiens
  misc_RNA (1)...(19): siRNA sense strand
ggagcaggaggaauaugaa

SEQ ID NO: 377309 - RNA, 19 nt, Homo sapiens
  misc_RNA (1)...(19): siRNA sense strand
gcucuuugaccgcaucuug

SEQ ID NO: 377310 - RNA, 19 nt, Homo sapiens
  misc_RNA (1)...(19): siRNA sense strand
gcagagggagcuacuucga

SEQ ID NO: 377311 - RNA, 19 nt, Homo sapiens
  misc_RNA (1)...(19): siRNA sense strand
aggaaggucgggaugaaua

SEQ ID NO: 377312 - RNA, 19 nt, Homo sapiens
  misc_RNA (1)...(19): siRNA sense strand
ggucuucauccucauauuc

SEQ ID NO: 377313 - RNA, 19 nt, Homo sapiens
  misc_RNA (1)...(19): siRNA sense strand
uacaagggccuagacuuaa

SEQ ID NO: 377314 - RNA, 19 nt, Homo sapiens
  misc_RNA (1)...(19): siRNA sense strand
gggcccugcugcuuaaaca

SEQ ID NO: 377315 - RNA, 19 nt, Homo sapiens
  misc_RNA (1)...(19): siRNA sense strand
ggccgguaccuucuucuuu

SEQ ID NO: 377316 - RNA, 19 nt, Homo sapiens
  misc_RNA (1)...(19): siRNA sense strand
ccuauuaccugagugacau

SEQ ID NO: 377317 - RNA, 19 nt, Homo sapiens
  misc_RNA (1)...(19): siRNA sense strand
cuacagaagacuuauaacu

SEQ ID NO: 377318 - RNA, 19 nt, Homo sapiens
  misc_RNA (1)...(19): siRNA sense strand
ucauuucccucaucuucau

SEQ ID NO: 377319 - RNA, 19 nt, Homo sapiens
  misc_RNA (1)...(19): siRNA sense strand
caucuggaauucuggaaaa

SEQ ID NO: 377320 - RNA, 19 nt, Homo sapiens
  misc_RNA (1)...(19): siRNA sense strand
ggagcugcaggaugauuau

SEQ ID NO: 377321 - RNA, 19 nt, Homo sapiens
  misc_RNA (1)...(19): siRNA sense strand
ucacgggcauccagaucau

SEQ ID NO: 377322 - RNA, 19 nt, Homo sapiens
  misc_RNA (1)...(19): siRNA sense strand
gaccacccacuacagaaga

SEQ ID NO: 377323 - RNA, 19 nt, Homo sapiens
  misc_RNA (1)...(19): siRNA sense strand
ggaccacccacuacagaag

SEQ ID NO: 377324 - RNA, 19 nt, Homo sapiens
  misc_RNA (1)...(19): siRNA sense strand
ucccucaucuucaucuaug

SEQ ID NO: 377325 - RNA, 19 nt, Homo sapiens
  misc_RNA (1)...(19): siRNA sense strand
gcuauacccaggagaucuu

SEQ ID NO: 377326 - RNA, 19 nt, Homo sapiens
  misc_RNA (1)...(19): siRNA sense strand
cgcuucaucucccgcuaua

SEQ ID NO: 377327 - RNA, 19 nt, Homo sapiens
  misc_RNA (1)...(19): siRNA sense strand
gcaggaggaauaugaagac

SEQ ID NO: 377328 - RNA, 19 nt, Homo sapiens
  misc_RNA (1)...(19): siRNA sense strand
ccaacgcccucacugucau

SEQ ID NO: 377329 - RNA, 19 nt, Homo sapiens
  misc_RNA (1)...(19): siRNA sense strand
gcuucaagguguccaacuc

SEQ ID NO: 377330 - RNA, 19 nt, Homo sapiens
  misc_RNA (1)...(19): siRNA sense strand
gaauaugaagacccagaca

SEQ ID NO: 377331 - RNA, 19 nt, Homo sapiens
  misc_RNA (1)...(19): siRNA sense strand
uggagcaggaggaauauga

SEQ ID NO: 377332 - RNA, 19 nt, Homo sapiens
  misc_RNA (1)...(19): siRNA sense strand
ccucauuucccucaucuuc

SEQ ID NO: 377333 - RNA, 19 nt, Homo sapiens
  misc_RNA (1)...(19): siRNA sense strand
ggcaacagccacagacuac

SEQ ID NO: 377334 - RNA, 19 nt, Homo sapiens
  misc_RNA (1)...(19): siRNA sense strand
gugcagagggagcuacuuc

SEQ ID NO: 377335 - RNA, 19 nt, Homo sapiens
  misc_RNA (1)...(19): siRNA sense strand
ucucucaccucaccuucug

SEQ ID NO: 377336 - RNA, 19 nt, Homo sapiens
  misc_RNA (1)...(19): siRNA sense strand
ggaaggucgggaugaauac

SEQ ID NO: 377337 - RNA, 19 nt, Homo sapiens
  misc_RNA (1)...(19): siRNA sense strand
guuccgaguuucccaucug

SEQ ID NO: 377338 - RNA, 19 nt, Homo sapiens
  misc_RNA (1)...(19): siRNA sense strand
cagagggagcuacuucgaa

SEQ ID NO: 377339 - RNA, 19 nt, Homo sapiens
  misc_RNA (1)...(19): siRNA sense strand
caacagccacagacuacca

SEQ ID NO: 377340 - RNA, 19 nt, Homo sapiens
  misc_RNA (1)...(19): siRNA sense strand
ggagcugccggugccuaua

SEQ ID NO: 377341 - RNA, 19 nt, Homo sapiens
  misc_RNA (1)...(19): siRNA sense strand
gcuggucuucauccucaua

SEQ ID NO: 377342 - RNA, 19 nt, Homo sapiens
  misc_RNA (1)...(19): siRNA sense strand
aagacaugauggaggagaa

SEQ ID NO: 377343 - RNA, 19 nt, Homo sapiens
  misc_RNA (1)...(19): siRNA sense strand
caagggccuagacuuaaau

SEQ ID NO: 377344 - RNA, 19 nt, Homo sapiens
  misc_RNA (1)...(19): siRNA sense strand
agagaggguguuccgcaua

SEQ ID NO: 377345 - RNA, 19 nt, Homo sapiens
  misc_RNA (1)...(19): siRNA sense strand
cugccacccucaugucaga

SEQ ID NO: 377346 - RNA, 19 nt, Homo sapiens
  misc_RNA (1)...(19): siRNA sense strand
gccaacgcccucacuguca

SEQ ID NO: 377347 - RNA, 19 nt, Homo sapiens
  misc_RNA (1)...(19): siRNA sense strand
gaucaugguccugguggau

SEQ ID NO: 377348 - RNA, 19 nt, Homo sapiens
  misc_RNA (1)...(19): siRNA sense strand
caggaccacccacuacaga

SEQ ID NO: 377349 - RNA, 19 nt, Homo sapiens
  misc_RNA (1)...(19): siRNA sense strand
ggaccugcugcugguagua

SEQ ID NO: 377350 - RNA, 19 nt, Homo sapiens
  misc_RNA (1)...(19): siRNA sense strand
gagcaggaggaauaugaag

SEQ ID NO: 377351 - RNA, 19 nt, Homo sapiens
  misc_RNA (1)...(19): siRNA sense strand
acguggagcuucagugucu

SEQ ID NO: 377352 - RNA, 19 nt, Homo sapiens
  misc_RNA (1)...(19): siRNA sense strand
gagcugccggugccuauac

SEQ ID NO: 377353 - RNA, 19 nt, Homo sapiens
  misc_RNA (1)...(19): siRNA sense strand
gaggaaggucgggaugaau

SEQ ID NO: 377354 - RNA, 19 nt, Homo sapiens
  misc_RNA (1)...(19): siRNA sense strand
gaggagcugcaggaugauu

SEQ ID NO: 377355 - RNA, 19 nt, Homo sapiens
  misc_RNA (1)...(19): siRNA sense strand
uguucaagccacccaagua

SEQ ID NO: 377356 - RNA, 19 nt, Homo sapiens
  misc_RNA (1)...(19): siRNA sense strand
cauggccgguaccuucuuc

SEQ ID NO: 377357 - RNA, 19 nt, Homo sapiens
  misc_RNA (1)...(19): siRNA sense strand
gcaaaccugagcgcaagau

SEQ ID NO: 377358 - RNA, 19 nt, Homo sapiens
  misc_RNA (1)...(19): siRNA sense strand
ccuggucgcugugcuugug

SEQ ID NO: 377359 - RNA, 19 nt, Homo sapiens
  misc_RNA (1)...(19): siRNA sense strand
gauccaggaggucaaagag

SEQ ID NO: 377360 - RNA, 19 nt, Homo sapiens
  misc_RNA (1)...(19): siRNA sense strand
ggacauauuuccuacagua

SEQ ID NO: 377361 - RNA, 19 nt, Homo sapiens
  misc_RNA (1)...(19): siRNA sense strand
gaagaucccuuuccuccua

SEQ ID NO: 377362 - RNA, 19 nt, Homo sapiens
  misc_RNA (1)...(19): siRNA sense strand
gaaguaaugggaucuauaa

SEQ ID NO: 377363 - RNA, 19 nt, Homo sapiens
  misc_RNA (1)...(19): siRNA sense strand
gaucaggaauggcaucuug

SEQ ID NO: 377364 - RNA, 19 nt, Homo sapiens
  misc_RNA (1)...(19): siRNA sense strand
caucacggcuucaauuauu

SEQ ID NO: 377365 - RNA, 19 nt, Homo sapiens
  misc_RNA (1)...(19): siRNA sense strand
gagcugagauuggcuaaug

SEQ ID NO: 377366 - RNA, 19 nt, Homo sapiens
  misc_RNA (1)...(19): siRNA sense strand
ggaguuaugucacccauca

SEQ ID NO: 377367 - RNA, 19 nt, Homo sapiens
  misc_RNA (1)...(19): siRNA sense strand
cgacccaccuuuacucuuu

SEQ ID NO: 377368 - RNA, 19 nt, Homo sapiens
  misc_RNA (1)...(19): siRNA sense strand
ggaacaacuuucuuuggaa

SEQ ID NO: 377369 - RNA, 19 nt, Homo sapiens
  misc_RNA (1)...(19): siRNA sense strand
guaaugggaucuauaaagg

SEQ ID NO: 377370 - RNA, 19 nt, Homo sapiens
  misc_RNA (1)...(19): siRNA sense strand
cagcaagacugacuucugu

SEQ ID NO: 377371 - RNA, 19 nt, Homo sapiens
  misc_RNA (1)...(19): siRNA sense strand
ggaaguaaugggaucuaua

SEQ ID NO: 377372 - RNA, 19 nt, Homo sapiens
  misc_RNA (1)...(19): siRNA sense strand
ggaucaagguuauucaaca

SEQ ID NO: 377373 - RNA, 19 nt, Homo sapiens
  misc_RNA (1)...(19): siRNA sense strand
gggagcacauguagaagaa

SEQ ID NO: 377374 - RNA, 19 nt, Homo sapiens
  misc_RNA (1)...(19): siRNA sense strand
gauacaggcuggccagaag

SEQ ID NO: 377375 - RNA, 19 nt, Homo sapiens
  misc_RNA (1)...(19): siRNA sense strand
gagauuaccuuugcuaagc

SEQ ID NO: 377376 - RNA, 19 nt, Homo sapiens
  misc_RNA (1)...(19): siRNA sense strand
ccagggagcacauguagaa

SEQ ID NO: 377377 - RNA, 19 nt, Homo sapiens
  misc_RNA (1)...(19): siRNA sense strand
uaucaggacucccaauauc

SEQ ID NO: 377378 - RNA, 19 nt, Homo sapiens
  misc_RNA (1)...(19): siRNA sense strand
gagcacauguagaagaagu

SEQ ID NO: 377379 - RNA, 19 nt, Homo sapiens
  misc_RNA (1)...(19): siRNA sense strand
agagagagaaacccacuua

SEQ ID NO: 377380 - RNA, 19 nt, Homo sapiens
  misc_RNA (1)...(19): siRNA sense strand
cggcuucaauuauuucuau

SEQ ID NO: 377381 - RNA, 19 nt, Homo sapiens
  misc_RNA (1)...(19): siRNA sense strand
uggaacaacuuucuuugga

SEQ ID NO: 377382 - RNA, 19 nt, Homo sapiens
  misc_RNA (1)...(19): siRNA sense strand
ggaagaugaagaucccuuu

SEQ ID NO: 377383 - RNA, 19 nt, Homo sapiens
  misc_RNA (1)...(19): siRNA sense strand
gcccuaauccugacccuuu

SEQ ID NO: 377384 - RNA, 19 nt, Homo sapiens
  misc_RNA (1)...(19): siRNA sense strand
uaugaaauccucaaaguca

SEQ ID NO: 377385 - RNA, 19 nt, Homo sapiens
  misc_RNA (1)...(19): siRNA sense strand
gagagaaacccacuuacuc

SEQ ID NO: 377386 - RNA, 19 nt, Homo sapiens
  misc_RNA (1)...(19): siRNA sense strand
gaaauucauggcggaagua

SEQ ID NO: 377387 - RNA, 19 nt, Homo sapiens
  misc_RNA (1)...(19): siRNA sense strand
gggaugcuguugaggaaau

SEQ ID NO: 377388 - RNA, 19 nt, Homo sapiens
  misc_RNA (1)...(19): siRNA sense strand
gaucaagguuauucaacag

SEQ ID NO: 377389 - RNA, 19 nt, Homo sapiens
  misc_RNA (1)...(19): siRNA sense strand
cuagcaacauggacauauu

SEQ ID NO: 377390 - RNA, 19 nt, Homo sapiens
  misc_RNA (1)...(19): siRNA sense strand
caccuuuacucuuugauau

SEQ ID NO: 377391 - RNA, 19 nt, Homo sapiens
  misc_RNA (1)...(19): siRNA sense strand
ggaccagggagcacaugua

SEQ ID NO: 377392 - RNA, 19 nt, Homo sapiens
  misc_RNA (1)...(19): siRNA sense strand
uuacugcaacgccuacuua

SEQ ID NO: 377393 - RNA, 19 nt, Homo sapiens
  misc_RNA (1)...(19): siRNA sense strand
augaguuucucuuccauua

SEQ ID NO: 377394 - RNA, 19 nt, Homo sapiens
  misc_RNA (1)...(19): siRNA sense strand
ucuugaaccuucuggauga

SEQ ID NO: 377395 - RNA, 19 nt, Homo sapiens
  misc_RNA (1)...(19): siRNA sense strand
gaugagauuaccuuugcua

SEQ ID NO: 377396 - RNA, 19 nt, Homo sapiens
  misc_RNA (1)...(19): siRNA sense strand
ggaacuacgagaucauuca

SEQ ID NO: 377397 - RNA, 19 nt, Homo sapiens
  misc_RNA (1)...(19): siRNA sense strand
gggcuuccuucauuacuuc

SEQ ID NO: 377398 - RNA, 19 nt, Homo sapiens
  misc_RNA (1)...(19): siRNA sense strand
ucugaaggaucaagguuau

SEQ ID NO: 377399 - RNA, 19 nt, Homo sapiens
  misc_RNA (1)...(19): siRNA sense strand
uuacaucacggcuucaauu

SEQ ID NO: 377400 - RNA, 19 nt, Homo sapiens
  misc_RNA (1)...(19): siRNA sense strand
gagauuggcuaaugauacc

SEQ ID NO: 377401 - RNA, 19 nt, Homo sapiens
  misc_RNA (1)...(19): siRNA sense strand
cugcaacgccuacuuaaau

SEQ ID NO: 377402 - RNA, 19 nt, Homo sapiens
  misc_RNA (1)...(19): siRNA sense strand
ugauggacgugaucugaug

SEQ ID NO: 377403 - RNA, 19 nt, Homo sapiens
  misc_RNA (1)...(19): siRNA sense strand
ccgaugagauuaccuuugc

SEQ ID NO: 377404 - RNA, 19 nt, Homo sapiens
  misc_RNA (1)...(19): siRNA sense strand
gaguuucucuuccauuacu

SEQ ID NO: 377405 - RNA, 19 nt, Homo sapiens
  misc_RNA (1)...(19): siRNA sense strand
ucauacagcggaacacuga

SEQ ID NO: 377406 - RNA, 19 nt, Homo sapiens
  misc_RNA (1)...(19): siRNA sense strand
gcaucaaggccgaacauca

SEQ ID NO: 377407 - RNA, 19 nt, Homo sapiens
  misc_RNA (1)...(19): siRNA sense strand
uagcaacauggacauauuu

SEQ ID NO: 377408 - RNA, 19 nt, Homo sapiens
  misc_RNA (1)...(19): siRNA sense strand
gaagaugaagaucccuuuc

SEQ ID NO: 377409 - RNA, 19 nt, Homo sapiens
  misc_RNA (1)...(19): siRNA sense strand
ccaccuuuacucuuugaua

SEQ ID NO: 377410 - RNA, 19 nt, Homo sapiens
  misc_RNA (1)...(19): siRNA sense strand
uacaucacggcuucaauua

SEQ ID NO: 377411 - RNA, 19 nt, Homo sapiens
  misc_RNA (1)...(19): siRNA sense strand
caucaaggccgaacaucau

SEQ ID NO: 377412 - RNA, 19 nt, Homo sapiens
  misc_RNA (1)...(19): siRNA sense strand
acgcuccgaucaugaguuu

SEQ ID NO: 377413 - RNA, 19 nt, Homo sapiens
  misc_RNA (1)...(19): siRNA sense strand
gaggaacuacgagaucauu

SEQ ID NO: 377414 - RNA, 19 nt, Homo sapiens
  misc_RNA (1)...(19): siRNA sense strand
ucauggaacaacuuucuuu

SEQ ID NO: 377415 - RNA, 19 nt, Homo sapiens
  misc_RNA (1)...(19): siRNA sense strand
ggacuucccaccgaugaga

SEQ ID NO: 377416 - RNA, 19 nt, Homo sapiens
  misc_RNA (1)...(19): siRNA sense strand
caaagaucccagagagaga

SEQ ID NO: 377417 - RNA, 19 nt, Homo sapiens
  misc_RNA (1)...(19): siRNA sense strand
gaucuugaaccuucuggau

SEQ ID NO: 377418 - RNA, 19 nt, Homo sapiens
  misc_RNA (1)...(19): siRNA sense strand
gaugaggaacuacgagauc

SEQ ID NO: 377419 - RNA, 19 nt, Homo sapiens
  misc_RNA (1)...(19): siRNA sense strand
ggagagggcagugucuuca

SEQ ID NO: 377420 - RNA, 19 nt, Homo sapiens
  misc_RNA (1)...(19): siRNA sense strand
gaaggaucaagguuauuca

SEQ ID NO: 377421 - RNA, 19 nt, Homo sapiens
  misc_RNA (1)...(19): siRNA sense strand
cagaacagcacauccaucu

SEQ ID NO: 377422 - RNA, 19 nt, Homo sapiens
  misc_RNA (1)...(19): siRNA sense strand
gaggacuucccaccgauga

SEQ ID NO: 377423 - RNA, 19 nt, Homo sapiens
  misc_RNA (1)...(19): siRNA sense strand
gaugagcccacuagcaaca

SEQ ID NO: 377424 - RNA, 19 nt, Homo sapiens
  misc_RNA (1)...(19): siRNA sense strand
gaccagggagcacauguag

SEQ ID NO: 377425 - RNA, 19 nt, Homo sapiens
  misc_RNA (1)...(19): siRNA sense strand
gacccaccuuuacucuuug

SEQ ID NO: 377426 - RNA, 19 nt, Homo sapiens
  misc_RNA (1)...(19): siRNA sense strand
ccaucacgacccaccuuua

SEQ ID NO: 377427 - RNA, 19 nt, Homo sapiens
  misc_RNA (1)...(19): siRNA sense strand
agaaauucauggcggaagu

SEQ ID NO: 377428 - RNA, 19 nt, Homo sapiens
  misc_RNA (1)...(19): siRNA sense strand
ccgguacccuguccgauca

SEQ ID NO: 377429 - RNA, 19 nt, Homo sapiens
  misc_RNA (1)...(19): siRNA sense strand
ucuugggcuuccuucauua

SEQ ID NO: 377430 - RNA, 19 nt, Homo sapiens
  misc_RNA (1)...(19): siRNA sense strand
ggaucucuuugaccaaucu

SEQ ID NO: 377431 - RNA, 19 nt, Homo sapiens
  misc_RNA (1)...(19): siRNA sense strand
gauuaccuuugcuaagcuu

SEQ ID NO: 377432 - RNA, 19 nt, Homo sapiens
  misc_RNA (1)...(19): siRNA sense strand
ugaaggaucaagguuauuc

SEQ ID NO: 377433 - RNA, 19 nt, Homo sapiens
  misc_RNA (1)...(19): siRNA sense strand
gaacuacgagaucauucag

SEQ ID NO: 377434 - RNA, 19 nt, Homo sapiens
  misc_RNA (1)...(19): siRNA sense strand
cgagagccacgaagcauca

SEQ ID NO: 377435 - RNA, 19 nt, Homo sapiens
  misc_RNA (1)...(19): siRNA sense strand
uuauucaacagcacugaua

SEQ ID NO: 377436 - RNA, 19 nt, Homo sapiens
  misc_RNA (1)...(19): siRNA sense strand
ugcaacgccuacuuaaaug

SEQ ID NO: 377437 - RNA, 19 nt, Homo sapiens
  misc_RNA (1)...(19): siRNA sense strand
gcacauguagaagaagugu

SEQ ID NO: 377438 - RNA, 19 nt, Homo sapiens
  misc_RNA (1)...(19): siRNA sense strand
caacugggaaggagguauc

SEQ ID NO: 377439 - RNA, 19 nt, Homo sapiens
  misc_RNA (1)...(19): siRNA sense strand
gcacuggaguuuuccucuu

SEQ ID NO: 377440 - RNA, 19 nt, Homo sapiens
  misc_RNA (1)...(19): siRNA sense strand
cggccugucuugccagugu

SEQ ID NO: 377441 - RNA, 19 nt, Homo sapiens
  misc_RNA (1)...(19): siRNA sense strand
aagcagggcagccuucaug

SEQ ID NO: 377442 - RNA, 19 nt, Homo sapiens
  misc_RNA (1)...(19): siRNA sense strand
ucaccgcugugcacaccaa

SEQ ID NO: 377443 - RNA, 19 nt, Homo sapiens
  misc_RNA (1)...(19): siRNA sense strand
uuucagccuucucuuccua

SEQ ID NO: 377444 - RNA, 19 nt, Homo sapiens
  misc_RNA (1)...(19): siRNA sense strand
aaacaggauaagagacuga

SEQ ID NO: 377445 - RNA, 19 nt, Homo sapiens
  misc_RNA (1)...(19): siRNA sense strand
cauggaacaacuuucuuug

SEQ ID NO: 377446 - RNA, 19 nt, Homo sapiens
  misc_RNA (1)...(19): siRNA sense strand
acuaucaggacucccaaua

SEQ ID NO: 377447 - RNA, 19 nt, Homo sapiens
  misc_RNA (1)...(19): siRNA sense strand
gcuucuguuucgggaguua

SEQ ID NO: 377448 - RNA, 19 nt, Homo sapiens
  misc_RNA (1)...(19): siRNA sense strand
cggaaguaaugggaucuau

SEQ ID NO: 377449 - RNA, 19 nt, Homo sapiens
  misc_RNA (1)...(19): siRNA sense strand
gcccuguucuccagcaaag

SEQ ID NO: 377450 - RNA, 19 nt, Homo sapiens
  misc_RNA (1)...(19): siRNA sense strand
uugaugagcccacuagcaa

SEQ ID NO: 377451 - RNA, 19 nt, Homo sapiens
  misc_RNA (1)...(19): siRNA sense strand
ugaaauccucaaagucaug

SEQ ID NO: 377452 - RNA, 19 nt, Homo sapiens
  misc_RNA (1)...(19): siRNA sense strand
ggaagccgagagccacgaa

SEQ ID NO: 377453 - RNA, 19 nt, Homo sapiens
  misc_RNA (1)...(19): siRNA sense strand
caacauggacauauuuccu

SEQ ID NO: 377454 - RNA, 19 nt, Homo sapiens
  misc_RNA (1)...(19): siRNA sense strand
cagcagcccauguccuaug

SEQ ID NO: 377455 - RNA, 19 nt, Homo sapiens
  misc_RNA (1)...(19): siRNA sense strand
aaagaucccagagagagaa

SEQ ID NO: 377456 - RNA, 19 nt, Homo sapiens
  misc_RNA (1)...(19): siRNA sense strand
auucauggcggaaguaaug

SEQ ID NO: 377457 - RNA, 19 nt, Homo sapiens
  misc_RNA (1)...(19): siRNA sense strand
ugagauuggcuaaugauac

SEQ ID NO: 377458 - RNA, 19 nt, Homo sapiens
  misc_RNA (1)...(19): siRNA sense strand
gcuccgaucaugaguuucu

SEQ ID NO: 377459 - RNA, 19 nt, Homo sapiens
  misc_RNA (1)...(19): siRNA sense strand
agccaacgcuccgaucaug

SEQ ID NO: 377460 - RNA, 19 nt, Homo sapiens
  misc_RNA (1)...(19): siRNA sense strand
gcaaaguucuugaaugaug

SEQ ID NO: 377461 - RNA, 19 nt, Homo sapiens
  misc_RNA (1)...(19): siRNA sense strand
gaacuggaauugcagauag

SEQ ID NO: 377462 - RNA, 19 nt, Homo sapiens
  misc_RNA (1)...(19): siRNA sense strand
caucugaucuguucacuga

SEQ ID NO: 377463 - RNA, 19 nt, Homo sapiens
  misc_RNA (1)...(19): siRNA sense strand
ugauagaucuuucauguug

SEQ ID NO: 377464 - RNA, 19 nt, Homo sapiens
  misc_RNA (1)...(19): siRNA sense strand
gagagaagcacaaggagua

SEQ ID NO: 377465 - RNA, 19 nt, Homo sapiens
  misc_RNA (1)...(19): siRNA sense strand
gcacaguucugcaaaugga

SEQ ID NO: 377466 - RNA, 19 nt, Homo sapiens
  misc_RNA (1)...(19): siRNA sense strand
gauaggaaaugcccucuuc

SEQ ID NO: 377467 - RNA, 19 nt, Homo sapiens
  misc_RNA (1)...(19): siRNA sense strand
uggcaaaguucuugaauga

SEQ ID NO: 377468 - RNA, 19 nt, Homo sapiens
  misc_RNA (1)...(19): siRNA sense strand
caaauggacuacagcaaga

SEQ ID NO: 377469 - RNA, 19 nt, Homo sapiens
  misc_RNA (1)...(19): siRNA sense strand
gagcauuucugcagcuuug

SEQ ID NO: 377470 - RNA, 19 nt, Homo sapiens
  misc_RNA (1)...(19): siRNA sense strand
ugaaaccacuggcaaaguu

SEQ ID NO: 377471 - RNA, 19 nt, Homo sapiens
  misc_RNA (1)...(19): siRNA sense strand
gggauggguugacuuguuu

SEQ ID NO: 377472 - RNA, 19 nt, Homo sapiens
  misc_RNA (1)...(19): siRNA sense strand
cagcaugccuauucugaaa

SEQ ID NO: 377473 - RNA, 19 nt, Homo sapiens
  misc_RNA (1)...(19): siRNA sense strand
ggacaauggucugaaacuu

SEQ ID NO: 377474 - RNA, 19 nt, Homo sapiens
  misc_RNA (1)...(19): siRNA sense strand
ggaacaauacuaucaccua

SEQ ID NO: 377475 - RNA, 19 nt, Homo sapiens
  misc_RNA (1)...(19): siRNA sense strand
gaaguggaaccgcuuacua

SEQ ID NO: 377476 - RNA, 19 nt, Homo sapiens
  misc_RNA (1)...(19): siRNA sense strand
gaagaaguggaaccgcuua

SEQ ID NO: 377477 - RNA, 19 nt, Homo sapiens
  misc_RNA (1)...(19): siRNA sense strand
gacaauggucugaaacuuu

SEQ ID NO: 377478 - RNA, 19 nt, Homo sapiens
  misc_RNA (1)...(19): siRNA sense strand
cacagacacuccaauggua

SEQ ID NO: 377479 - RNA, 19 nt, Homo sapiens
  misc_RNA (1)...(19): siRNA sense strand
gaagggauggguugacuug

SEQ ID NO: 377480 - RNA, 19 nt, Homo sapiens
  misc_RNA (1)...(19): siRNA sense strand
gaaaguugugggucuaauu

SEQ ID NO: 377481 - RNA, 19 nt, Homo sapiens
  misc_RNA (1)...(19): siRNA sense strand
caaagaaggaacuggaauu

SEQ ID NO: 377482 - RNA, 19 nt, Homo sapiens
  misc_RNA (1)...(19): siRNA sense strand
guacuugggcuucaugcua

SEQ ID NO: 377483 - RNA, 19 nt, Homo sapiens
  misc_RNA (1)...(19): siRNA sense strand
ccaaauugauagaucuuuc

SEQ ID NO: 377484 - RNA, 19 nt, Homo sapiens
  misc_RNA (1)...(19): siRNA sense strand
cacaaggaguauucucuuu

SEQ ID NO: 377485 - RNA, 19 nt, Homo sapiens
  misc_RNA (1)...(19): siRNA sense strand
agaaggaacuggaauugca

SEQ ID NO: 377486 - RNA, 19 nt, Homo sapiens
  misc_RNA (1)...(19): siRNA sense strand
cagccaagcaggagauuaa

SEQ ID NO: 377487 - RNA, 19 nt, Homo sapiens
  misc_RNA (1)...(19): siRNA sense strand
aagcugccaugucaucuaa

SEQ ID NO: 377488 - RNA, 19 nt, Homo sapiens
  misc_RNA (1)...(19): siRNA sense strand
gcacaaggaguauucucuu

SEQ ID NO: 377489 - RNA, 19 nt, Homo sapiens
  misc_RNA (1)...(19): siRNA sense strand
uggaaccgcuuacuacaga

SEQ ID NO: 377490 - RNA, 19 nt, Homo sapiens
  misc_RNA (1)...(19): siRNA sense strand
caaaguucuugaaugaugu

SEQ ID NO: 377491 - RNA, 19 nt, Homo sapiens
  misc_RNA (1)...(19): siRNA sense strand
caaggaguauucucuuucu

SEQ ID NO: 377492 - RNA, 19 nt, Homo sapiens
  misc_RNA (1)...(19): siRNA sense strand
gacaagaccaccacuguuc

SEQ ID NO: 377493 - RNA, 19 nt, Homo sapiens
  misc_RNA (1)...(19): siRNA sense strand
caaaugccacucucuacaa

SEQ ID NO: 377494 - RNA, 19 nt, Homo sapiens
  misc_RNA (1)...(19): siRNA sense strand
agacaguuccagcuucuua

SEQ ID NO: 377495 - RNA, 19 nt, Homo sapiens
  misc_RNA (1)...(19): siRNA sense strand
ggaacuggaauugcagaua

SEQ ID NO: 377496 - RNA, 19 nt, Homo sapiens
  misc_RNA (1)...(19): siRNA sense strand
gaagcugccaugucaucua

SEQ ID NO: 377497 - RNA, 19 nt, Homo sapiens
  misc_RNA (1)...(19): siRNA sense strand
gaucuuucauguuguugau

SEQ ID NO: 377498 - RNA, 19 nt, Homo sapiens
  misc_RNA (1)...(19): siRNA sense strand
ccagauggaacaauacuau

SEQ ID NO: 377499 - RNA, 19 nt, Homo sapiens
  misc_RNA (1)...(19): siRNA sense strand
ggaaaguugugggucuaau

SEQ ID NO: 377500 - RNA, 19 nt, Homo sapiens
  misc_RNA (1)...(19): siRNA sense strand
agaggacaauggucugaaa

SEQ ID NO: 377501 - RNA, 19 nt, Homo sapiens
  misc_RNA (1)...(19): siRNA sense strand
gucaagacccucuaugaga

SEQ ID NO: 377502 - RNA, 19 nt, Homo sapiens
  misc_RNA (1)...(19): siRNA sense strand
gaccuuggagccacacuuu

SEQ ID NO: 377503 - RNA, 19 nt, Homo sapiens
  misc_RNA (1)...(19): siRNA sense strand
guaacagccugccauucau

SEQ ID NO: 377504 - RNA, 19 nt, Homo sapiens
  misc_RNA (1)...(19): siRNA sense strand
aguggaagcugccauguca

SEQ ID NO: 377505 - RNA, 19 nt, Homo sapiens
  misc_RNA (1)...(19): siRNA sense strand
uaacagucauguggagaug

SEQ ID NO: 377506 - RNA, 19 nt, Homo sapiens
  misc_RNA (1)...(19): siRNA sense strand
gaagaugggcauucagcau

SEQ ID NO: 377507 - RNA, 19 nt, Homo sapiens
  misc_RNA (1)...(19): siRNA sense strand
ugcaccagauggaacaaua

SEQ ID NO: 377508 - RNA, 19 nt, Homo sapiens
  misc_RNA (1)...(19): siRNA sense strand
agaaugcucuggcacucuu

SEQ ID NO: 377509 - RNA, 19 nt, Homo sapiens
  misc_RNA (1)...(19): siRNA sense strand
uaguggauauggaauugaa

SEQ ID NO: 377510 - RNA, 19 nt, Homo sapiens
  misc_RNA (1)...(19): siRNA sense strand
cagcuuugguuaugcuuuc

SEQ ID NO: 377511 - RNA, 19 nt, Homo sapiens
  misc_RNA (1)...(19): siRNA sense strand
gauagaucuuucauguugu

SEQ ID NO: 377512 - RNA, 19 nt, Homo sapiens
  misc_RNA (1)...(19): siRNA sense strand
ccuaguggauauggaauug

SEQ ID NO: 377513 - RNA, 19 nt, Homo sapiens
  misc_RNA (1)...(19): siRNA sense strand
gaugcaaaccaaagggaaa

SEQ ID NO: 377514 - RNA, 19 nt, Homo sapiens
  misc_RNA (1)...(19): siRNA sense strand
gcacccaaacugagauugu

SEQ ID NO: 377515 - RNA, 19 nt, Homo sapiens
  misc_RNA (1)...(19): siRNA sense strand
aaagaaggaacuggaauug

SEQ ID NO: 377516 - RNA, 19 nt, Homo sapiens
  misc_RNA (1)...(19): siRNA sense strand
uggguugacuuguuuguuc

SEQ ID NO: 377517 - RNA, 19 nt, Homo sapiens
  misc_RNA (1)...(19): siRNA sense strand
caaaccaaagggaaaguug

SEQ ID NO: 377518 - RNA, 19 nt, Homo sapiens
  misc_RNA (1)...(19): siRNA sense strand
ucacugaauuuuccaaaga

SEQ ID NO: 377519 - RNA, 19 nt, Homo sapiens
  misc_RNA (1)...(19): siRNA sense strand
ccauuucugccacauauga

SEQ ID NO: 377520 - RNA, 19 nt, Homo sapiens
  misc_RNA (1)...(19): siRNA sense strand
gcaaaccaaagggaaaguu

SEQ ID NO: 377521 - RNA, 19 nt, Homo sapiens
  misc_RNA (1)...(19): siRNA sense strand
agcaggagauuaacaguca

SEQ ID NO: 377522 - RNA, 19 nt, Homo sapiens
  misc_RNA (1)...(19): siRNA sense strand
gacuuugcauucaaucugu

SEQ ID NO: 377523 - RNA, 19 nt, Homo sapiens
  misc_RNA (1)...(19): siRNA sense strand
ggaauugcagauaggaaau

SEQ ID NO: 377524 - RNA, 19 nt, Homo sapiens
  misc_RNA (1)...(19): siRNA sense strand
cauuaaugcugacuuugca

SEQ ID NO: 377525 - RNA, 19 nt, Homo sapiens
  misc_RNA (1)...(19): siRNA sense strand
guuccaaaguuuuccauuu

SEQ ID NO: 377526 - RNA, 19 nt, Homo sapiens
  misc_RNA (1)...(19): siRNA sense strand
gaaaccacuggcaaaguuc

SEQ ID NO: 377527 - RNA, 19 nt, Homo sapiens
  misc_RNA (1)...(19): siRNA sense strand
agggauggguugacuuguu

SEQ ID NO: 377528 - RNA, 19 nt, Homo sapiens
  misc_RNA (1)...(19): siRNA sense strand
ugcaucaccugaaggcaaa

SEQ ID NO: 377529 - RNA, 19 nt, Homo sapiens
  misc_RNA (1)...(19): siRNA sense strand
ggaaccgcuuacuacagaa

SEQ ID NO: 377530 - RNA, 19 nt, Homo sapiens
  misc_RNA (1)...(19): siRNA sense strand
uccagcaucugaucuguuc

SEQ ID NO: 377531 - RNA, 19 nt, Homo sapiens
  misc_RNA (1)...(19): siRNA sense strand
gcagcugucccugaaguug

SEQ ID NO: 377532 - RNA, 19 nt, Homo sapiens
  misc_RNA (1)...(19): siRNA sense strand
aguaacagccugccauuca

SEQ ID NO: 377533 - RNA, 19 nt, Homo sapiens
  misc_RNA (1)...(19): siRNA sense strand
gacaguuccagcuucuuaa

SEQ ID NO: 377534 - RNA, 19 nt, Homo sapiens
  misc_RNA (1)...(19): siRNA sense strand
ccaaaugccacucucuaca

SEQ ID NO: 377535 - RNA, 19 nt, Homo sapiens
  misc_RNA (1)...(19): siRNA sense strand
ucacagacacuccaauggu

SEQ ID NO: 377536 - RNA, 19 nt, Homo sapiens
  misc_RNA (1)...(19): siRNA sense strand
gagccacacuuuugaagau

SEQ ID NO: 377537 - RNA, 19 nt, Homo sapiens
  misc_RNA (1)...(19): siRNA sense strand
gcucuggcacucuuuguuc

SEQ ID NO: 377538 - RNA, 19 nt, Homo sapiens
  misc_RNA (1)...(19): siRNA sense strand
gccacucucuacaagaugu

SEQ ID NO: 377539 - RNA, 19 nt, Homo sapiens
  misc_RNA (1)...(19): siRNA sense strand
gcagccaagcaggagauua

SEQ ID NO: 377540 - RNA, 19 nt, Homo sapiens
  misc_RNA (1)...(19): siRNA sense strand
gaauugcagauaggaaaug

SEQ ID NO: 377541 - RNA, 19 nt, Homo sapiens
  misc_RNA (1)...(19): siRNA sense strand
ccaaagaaggaacuggaau

SEQ ID NO: 377542 - RNA, 19 nt, Homo sapiens
  misc_RNA (1)...(19): siRNA sense strand
gagaagcacaaggaguauu

SEQ ID NO: 377543 - RNA, 19 nt, Homo sapiens
  misc_RNA (1)...(19): siRNA sense strand
cagaagacaguuccagcuu

SEQ ID NO: 377544 - RNA, 19 nt, Homo sapiens
  misc_RNA (1)...(19): siRNA sense strand
ccauucaucccaaccaaau

SEQ ID NO: 377545 - RNA, 19 nt, Homo sapiens
  misc_RNA (1)...(19): siRNA sense strand
ucaccugaaggcaaaguaa

SEQ ID NO: 377546 - RNA, 19 nt, Homo sapiens
  misc_RNA (1)...(19): siRNA sense strand
caagaccaccacuguucaa

SEQ ID NO: 377547 - RNA, 19 nt, Homo sapiens
  misc_RNA (1)...(19): siRNA sense strand
guuccagcuucuuaauaga

SEQ ID NO: 377548 - RNA, 19 nt, Homo sapiens
  misc_RNA (1)...(19): siRNA sense strand
aaaguaacagccugccauu

SEQ ID NO: 377549 - RNA, 19 nt, Homo sapiens
  misc_RNA (1)...(19): siRNA sense strand
aaaguugugggucuaauuc

SEQ ID NO: 377550 - RNA, 19 nt, Homo sapiens
  misc_RNA (1)...(19): siRNA sense strand
caguuccagcuucuuaaua

SEQ ID NO: 377551 - RNA, 19 nt, Homo sapiens
  misc_RNA (1)...(19): siRNA sense strand
aaaugccacucucuacaag

SEQ ID NO: 377552 - RNA, 19 nt, Homo sapiens
  misc_RNA (1)...(19): siRNA sense strand
cagaagggauggguugacu

SEQ ID NO: 377553 - RNA, 19 nt, Homo sapiens
  misc_RNA (1)...(19): siRNA sense strand
ccacugugcaucaccugaa

SEQ ID NO: 377554 - RNA, 19 nt, Homo sapiens
  misc_RNA (1)...(19): siRNA sense strand
uagacaagaccaccacugu

SEQ ID NO: 377555 - RNA, 19 nt, Homo sapiens
  misc_RNA (1)...(19): siRNA sense strand
uuccauuucugccacauau

SEQ ID NO: 377556 - RNA, 19 nt, Homo sapiens
  misc_RNA (1)...(19): siRNA sense strand
acagauggagucaguggaa

SEQ ID NO: 377557 - RNA, 19 nt, Homo sapiens
  misc_RNA (1)...(19): siRNA sense strand
ccaaggagggacagaugga

SEQ ID NO: 377558 - RNA, 19 nt, Homo sapiens
  misc_RNA (1)...(19): siRNA sense strand
ucaccuaguggauauggaa

SEQ ID NO: 377559 - RNA, 19 nt, Homo sapiens
  misc_RNA (1)...(19): siRNA sense strand
agacaagaccaccacuguu

SEQ ID NO: 377560 - RNA, 19 nt, Homo sapiens
  misc_RNA (1)...(19): siRNA sense strand
gcagagcccucagcaaaua

SEQ ID NO: 377561 - RNA, 19 nt, Homo sapiens
  misc_RNA (1)...(19): siRNA sense strand
gaagaaauccgacaagaga

SEQ ID NO: 377562 - RNA, 19 nt, Homo sapiens
  misc_RNA (1)...(19): siRNA sense strand
gauaucagauggcaagaaa

SEQ ID NO: 377563 - RNA, 19 nt, Homo sapiens
  misc_RNA (1)...(19): siRNA sense strand
ggaaaggccuccaggugaa

SEQ ID NO: 377564 - RNA, 19 nt, Homo sapiens
  misc_RNA (1)...(19): siRNA sense strand
ggaaucagauagugaggaa

SEQ ID NO: 377565 - RNA, 19 nt, Homo sapiens
  misc_RNA (1)...(19): siRNA sense strand
ccacucaggugucaaagaa

SEQ ID NO: 377566 - RNA, 19 nt, Homo sapiens
  misc_RNA (1)...(19): siRNA sense strand
gcaagaaggagaagaagaa

SEQ ID NO: 377567 - RNA, 19 nt, Homo sapiens
  misc_RNA (1)...(19): siRNA sense strand
gaaaagaccuccacgacuu

SEQ ID NO: 377568 - RNA, 19 nt, Homo sapiens
  misc_RNA (1)...(19): siRNA sense strand
gaucaaagcaacccaaaga

SEQ ID NO: 377569 - RNA, 19 nt, Homo sapiens
  misc_RNA (1)...(19): siRNA sense strand
ugacugagcugcuggaaca

SEQ ID NO: 377570 - RNA, 19 nt, Homo sapiens
  misc_RNA (1)...(19): siRNA sense strand
agacagacguggagguaaa

SEQ ID NO: 377571 - RNA, 19 nt, Homo sapiens
  misc_RNA (1)...(19): siRNA sense strand
gaggaggacucaagaagca

SEQ ID NO: 377572 - RNA, 19 nt, Homo sapiens
  misc_RNA (1)...(19): siRNA sense strand
cagcagagcccucagcaaa

SEQ ID NO: 377573 - RNA, 19 nt, Homo sapiens
  misc_RNA (1)...(19): siRNA sense strand
gcaacaaaccucagagcuu

SEQ ID NO: 377574 - RNA, 19 nt, Homo sapiens
  misc_RNA (1)...(19): siRNA sense strand
aaccaaagauucugaguca

SEQ ID NO: 377575 - RNA, 19 nt, Homo sapiens
  misc_RNA (1)...(19): siRNA sense strand
agagaaagcuggcaagacu

SEQ ID NO: 377576 - RNA, 19 nt, Homo sapiens
  misc_RNA (1)...(19): siRNA sense strand
ggagcaagaagaagaagaa

SEQ ID NO: 377577 - RNA, 19 nt, Homo sapiens
  misc_RNA (1)...(19): siRNA sense strand
gcagaggauucuucaagca

SEQ ID NO: 377578 - RNA, 19 nt, Homo sapiens
  misc_RNA (1)...(19): siRNA sense strand
gaaugcagcucaggugaag

SEQ ID NO: 377579 - RNA, 19 nt, Homo sapiens
  misc_RNA (1)...(19): siRNA sense strand
uauacacacuggcaacaaa

SEQ ID NO: 377580 - RNA, 19 nt, Homo sapiens
  misc_RNA (1)...(19): siRNA sense strand
gagcagagcggccagaagu

SEQ ID NO: 377581 - RNA, 19 nt, Homo sapiens
  misc_RNA (1)...(19): siRNA sense strand
gcagugaggaggaaucaga

SEQ ID NO: 377582 - RNA, 19 nt, Homo sapiens
  misc_RNA (1)...(19): siRNA sense strand
ggaaucagacagugaggaa

SEQ ID NO: 377583 - RNA, 19 nt, Homo sapiens
  misc_RNA (1)...(19): siRNA sense strand
ccagaacaguaccgucuug

SEQ ID NO: 377584 - RNA, 19 nt, Homo sapiens
  misc_RNA (1)...(19): siRNA sense strand
caaagcaaguggugauguc

SEQ ID NO: 377585 - RNA, 19 nt, Homo sapiens
  misc_RNA (1)...(19): siRNA sense strand
ggaccaacaagcucagaaa

SEQ ID NO: 377586 - RNA, 19 nt, Homo sapiens
  misc_RNA (1)...(19): siRNA sense strand
gcagugaggaggagucaga

SEQ ID NO: 377587 - RNA, 19 nt, Homo sapiens
  misc_RNA (1)...(19): siRNA sense strand
cagcaucugugccaucugu

SEQ ID NO: 377588 - RNA, 19 nt, Homo sapiens
  misc_RNA (1)...(19): siRNA sense strand
gcagcgaggagucaucuga

SEQ ID NO: 377589 - RNA, 19 nt, Homo sapiens
  misc_RNA (1)...(19): siRNA sense strand
cagcagagcagacuguaug

SEQ ID NO: 377590 - RNA, 19 nt, Homo sapiens
  misc_RNA (1)...(19): siRNA sense strand
gcaagaagaagaagaagcu

SEQ ID NO: 377591 - RNA, 19 nt, Homo sapiens
  misc_RNA (1)...(19): siRNA sense strand
caaggaguccagucggaua

SEQ ID NO: 377592 - RNA, 19 nt, Homo sapiens
  misc_RNA (1)...(19): siRNA sense strand
gggaagacccaccagauca

SEQ ID NO: 377593 - RNA, 19 nt, Homo sapiens
  misc_RNA (1)...(19): siRNA sense strand
ccagagcaccuucagcaaa

SEQ ID NO: 377594 - RNA, 19 nt, Homo sapiens
  misc_RNA (1)...(19): siRNA sense strand
gaaaaccucaguaaagaaa

SEQ ID NO: 377595 - RNA, 19 nt, Homo sapiens
  misc_RNA (1)...(19): siRNA sense strand
ggaagacgguggccaaccu

SEQ ID NO: 377596 - RNA, 19 nt, Homo sapiens
  misc_RNA (1)...(19): siRNA sense strand
guggugaugucaaggagaa

SEQ ID NO: 377597 - RNA, 19 nt, Homo sapiens
  misc_RNA (1)...(19): siRNA sense strand
guagugaggagucaucaga

SEQ ID NO: 377598 - RNA, 19 nt, Homo sapiens
  misc_RNA (1)...(19): siRNA sense strand
aagaagaaauccgacaaga

SEQ ID NO: 377599 - RNA, 19 nt, Homo sapiens
  misc_RNA (1)...(19): siRNA sense strand
gaagaagaaauccgacaag

SEQ ID NO: 377600 - RNA, 19 nt, Homo sapiens
  misc_RNA (1)...(19): siRNA sense strand
gaacacucccugcaacaag

SEQ ID NO: 377601 - RNA, 19 nt, Homo sapiens
  misc_RNA (1)...(19): siRNA sense strand
gaagguccucgcccagaaa

SEQ ID NO: 377602 - RNA, 19 nt, Homo sapiens
  misc_RNA (1)...(19): siRNA sense strand
ccaucaagcaugaaagaaa

SEQ ID NO: 377603 - RNA, 19 nt, Homo sapiens
  misc_RNA (1)...(19): siRNA sense strand
ccaauucccaggccucaaa

SEQ ID NO: 377604 - RNA, 19 nt, Homo sapiens
  misc_RNA (1)...(19): siRNA sense strand
ugaagguccucgcccagaa

SEQ ID NO: 377605 - RNA, 19 nt, Homo sapiens
  misc_RNA (1)...(19): siRNA sense strand
gaacauccuccaggccaaa

SEQ ID NO: 377606 - RNA, 19 nt, Homo sapiens
  misc_RNA (1)...(19): siRNA sense strand
ggaagaggaggaagaagca

SEQ ID NO: 377607 - RNA, 19 nt, Homo sapiens
  misc_RNA (1)...(19): siRNA sense strand
cgccaaagaugacccagau

SEQ ID NO: 377608 - RNA, 19 nt, Homo sapiens
  misc_RNA (1)...(19): siRNA sense strand
uaacccuucuggacaucua

SEQ ID NO: 377609 - RNA, 19 nt, Homo sapiens
  misc_RNA (1)...(19): siRNA sense strand
gaccaaggccugcccaaag

SEQ ID NO: 377610 - RNA, 19 nt, Homo sapiens
  misc_RNA (1)...(19): siRNA sense strand
ggaguccagucggauauca

SEQ ID NO: 377611 - RNA, 19 nt, Homo sapiens
  misc_RNA (1)...(19): siRNA sense strand
gaaaggccuccaggugaaa

SEQ ID NO: 377612 - RNA, 19 nt, Homo sapiens
  misc_RNA (1)...(19): siRNA sense strand
gcagugaggaaucagauag

SEQ ID NO: 377613 - RNA, 19 nt, Homo sapiens
  misc_RNA (1)...(19): siRNA sense strand
ggaagaugcggcacugcaa

SEQ ID NO: 377614 - RNA, 19 nt, Homo sapiens
  misc_RNA (1)...(19): siRNA sense strand
caaagagcaagaaggagaa

SEQ ID NO: 377615 - RNA, 19 nt, Homo sapiens
  misc_RNA (1)...(19): siRNA sense strand
gcaccacaccucagaaguc

SEQ ID NO: 377616 - RNA, 19 nt, Homo sapiens
  misc_RNA (1)...(19): siRNA sense strand
uaaaacagguggaaaagag

SEQ ID NO: 377617 - RNA, 19 nt, Homo sapiens
  misc_RNA (1)...(19): siRNA sense strand
gugaaaaccucaguaaaga

SEQ ID NO: 377618 - RNA, 19 nt, Homo sapiens
  misc_RNA (1)...(19): siRNA sense strand
gcaggaggaggacucaaga

SEQ ID NO: 377619 - RNA, 19 nt, Homo sapiens
  misc_RNA (1)...(19): siRNA sense strand
caucaagcaugaaagaaaa

SEQ ID NO: 377620 - RNA, 19 nt, Homo sapiens
  misc_RNA (1)...(19): siRNA sense strand
gagcaguagugaggaguca

SEQ ID NO: 377621 - RNA, 19 nt, Homo sapiens
  misc_RNA (1)...(19): siRNA sense strand
agaaggagaagaagaaauc

SEQ ID NO: 377622 - RNA, 19 nt, Homo sapiens
  misc_RNA (1)...(19): siRNA sense strand
aaaaccagcucugaaaauu

SEQ ID NO: 377623 - RNA, 19 nt, Homo sapiens
  misc_RNA (1)...(19): siRNA sense strand
gagaucaaagcaacccaaa

SEQ ID NO: 377624 - RNA, 19 nt, Homo sapiens
  misc_RNA (1)...(19): siRNA sense strand
gcgaggaaucggacaguga

SEQ ID NO: 377625 - RNA, 19 nt, Homo sapiens
  misc_RNA (1)...(19): siRNA sense strand
aaagagagacaaagcaagu

SEQ ID NO: 377626 - RNA, 19 nt, Homo sapiens
  misc_RNA (1)...(19): siRNA sense strand
uggugaagguccugacuga

SEQ ID NO: 377627 - RNA, 19 nt, Homo sapiens
  misc_RNA (1)...(19): siRNA sense strand
ucucuccucucagguuaua

SEQ ID NO: 377628 - RNA, 19 nt, Homo sapiens
  misc_RNA (1)...(19): siRNA sense strand
acucaggugucaaagaaga

SEQ ID NO: 377629 - RNA, 19 nt, Homo sapiens
  misc_RNA (1)...(19): siRNA sense strand
ggaagucucccaggaaguc

SEQ ID NO: 377630 - RNA, 19 nt, Homo sapiens
  misc_RNA (1)...(19): siRNA sense strand
agaaauccgacaagagaaa

SEQ ID NO: 377631 - RNA, 19 nt, Homo sapiens
  misc_RNA (1)...(19): siRNA sense strand
ggaacacucccugcaacaa

SEQ ID NO: 377632 - RNA, 19 nt, Homo sapiens
  misc_RNA (1)...(19): siRNA sense strand
gcgaggagucagacaguga

SEQ ID NO: 377633 - RNA, 19 nt, Homo sapiens
  misc_RNA (1)...(19): siRNA sense strand
auacuacguuggucucaga

SEQ ID NO: 377634 - RNA, 19 nt, Homo sapiens
  misc_RNA (1)...(19): siRNA sense strand
caaggcagagacagagaaa

SEQ ID NO: 377635 - RNA, 19 nt, Homo sapiens
  misc_RNA (1)...(19): siRNA sense strand
gaagacagcagagcagacu

SEQ ID NO: 377636 - RNA, 19 nt, Homo sapiens
  misc_RNA (1)...(19): siRNA sense strand
caagaaggagaagaagaaa

SEQ ID NO: 377637 - RNA, 19 nt, Homo sapiens
  misc_RNA (1)...(19): siRNA sense strand
gaagguggagaucaaagca

SEQ ID NO: 377638 - RNA, 19 nt, Homo sapiens
  misc_RNA (1)...(19): siRNA sense strand
ggacagcagcgacaguucu

SEQ ID NO: 377639 - RNA, 19 nt, Homo sapiens
  misc_RNA (1)...(19): siRNA sense strand
gcagagcggccagaagugu

SEQ ID NO: 377640 - RNA, 19 nt, Homo sapiens
  misc_RNA (1)...(19): siRNA sense strand
gagcagcagcgaggaauca

SEQ ID NO: 377641 - RNA, 19 nt, Homo sapiens
  misc_RNA (1)...(19): siRNA sense strand
aagcagaggucuccaucca

SEQ ID NO: 377642 - RNA, 19 nt, Homo sapiens
  misc_RNA (1)...(19): siRNA sense strand
cagcagaggauucuucaag

SEQ ID NO: 377643 - RNA, 19 nt, Homo sapiens
  misc_RNA (1)...(19): siRNA sense strand
accaaggccugcccaaaga

SEQ ID NO: 377644 - RNA, 19 nt, Homo sapiens
  misc_RNA (1)...(19): siRNA sense strand
gcagagcagcagcgaggaa

SEQ ID NO: 377645 - RNA, 19 nt, Homo sapiens
  misc_RNA (1)...(19): siRNA sense strand
uaucagauggcaagaaaca

SEQ ID NO: 377646 - RNA, 19 nt, Homo sapiens
  misc_RNA (1)...(19): siRNA sense strand
gaagacccaccagaucaga

SEQ ID NO: 377647 - RNA, 19 nt, Homo sapiens
  misc_RNA (1)...(19): siRNA sense strand
cagagcaccuucagcaaaa

SEQ ID NO: 377648 - RNA, 19 nt, Homo sapiens
  misc_RNA (1)...(19): siRNA sense strand
gaaaaguccuuggggaaca

SEQ ID NO: 377649 - RNA, 19 nt, Homo sapiens
  misc_RNA (1)...(19): siRNA sense strand
cccagcaccuccuaggaaa

SEQ ID NO: 377650 - RNA, 19 nt, Homo sapiens
  misc_RNA (1)...(19): siRNA sense strand
ugagacagacguggaggua

SEQ ID NO: 377651 - RNA, 19 nt, Homo sapiens
  misc_RNA (1)...(19): siRNA sense strand
ccaaggacgagccagaaga

SEQ ID NO: 377652 - RNA, 19 nt, Homo sapiens
  misc_RNA (1)...(19): siRNA sense strand
gaggacagcagcgacaguu

SEQ ID NO: 377653 - RNA, 19 nt, Homo sapiens
  misc_RNA (1)...(19): siRNA sense strand
ugagagcagugaggaggaa

SEQ ID NO: 377654 - RNA, 19 nt, Homo sapiens
  misc_RNA (1)...(19): siRNA sense strand
ccagagaccagcagaggau

SEQ ID NO: 377655 - RNA, 19 nt, Homo sapiens
  misc_RNA (1)...(19): siRNA sense strand
gcaaaaccagcucugaaaa

SEQ ID NO: 377656 - RNA, 19 nt, Homo sapiens
  misc_RNA (1)...(19): siRNA sense strand
gaaaagaagaagaaagcaa

SEQ ID NO: 377657 - RNA, 19 nt, Homo sapiens
  misc_RNA (1)...(19): siRNA sense strand
ggacuaaccccagccaauu

SEQ ID NO: 377658 - RNA, 19 nt, Homo sapiens
  misc_RNA (1)...(19): siRNA sense strand
agucucuccucucagguua

SEQ ID NO: 377659 - RNA, 19 nt, Homo sapiens
  misc_RNA (1)...(19): siRNA sense strand
ccaaagggaccaacaagcu

SEQ ID NO: 377660 - RNA, 19 nt, Homo sapiens
  misc_RNA (1)...(19): siRNA sense strand
ggacguggaugacugcaua

SEQ ID NO: 377661 - RNA, 19 nt, Homo sapiens
  misc_RNA (1)...(19): siRNA sense strand
gggccaagauggaguacaa

SEQ ID NO: 377662 - RNA, 19 nt, Homo sapiens
  misc_RNA (1)...(19): siRNA sense strand
gagcagcagugcgaaguga

SEQ ID NO: 377663 - RNA, 19 nt, Homo sapiens
  misc_RNA (1)...(19): siRNA sense strand
gacaacaacaccagcuaua

SEQ ID NO: 377664 - RNA, 19 nt, Homo sapiens
  misc_RNA (1)...(19): siRNA sense strand
gucauuuccuugcuacuga

SEQ ID NO: 377665 - RNA, 19 nt, Homo sapiens
  misc_RNA (1)...(19): siRNA sense strand
gagacaacaacaccagcua

SEQ ID NO: 377666 - RNA, 19 nt, Homo sapiens
  misc_RNA (1)...(19): siRNA sense strand
cgaugucauuuccuugcua

SEQ ID NO: 377667 - RNA, 19 nt, Homo sapiens
  misc_RNA (1)...(19): siRNA sense strand
gcacggcucgaccucaaug

SEQ ID NO: 377668 - RNA, 19 nt, Homo sapiens
  misc_RNA (1)...(19): siRNA sense strand
ccgcagcgcugugucaaca

SEQ ID NO: 377669 - RNA, 19 nt, Homo sapiens
  misc_RNA (1)...(19): siRNA sense strand
gcauucgggcuugcucaua

SEQ ID NO: 377670 - RNA, 19 nt, Homo sapiens
  misc_RNA (1)...(19): siRNA sense strand
cauucgggcuugcucauag

SEQ ID NO: 377671 - RNA, 19 nt, Homo sapiens
  misc_RNA (1)...(19): siRNA sense strand
caacaacaccagcuauagc

SEQ ID NO: 377672 - RNA, 19 nt, Homo sapiens
  misc_RNA (1)...(19): siRNA sense strand
ggugcgaggacguggauga

SEQ ID NO: 377673 - RNA, 19 nt, Homo sapiens
  misc_RNA (1)...(19): siRNA sense strand
ccaagauggaguacaagug

SEQ ID NO: 377674 - RNA, 19 nt, Homo sapiens
  misc_RNA (1)...(19): siRNA sense strand
ccagggccaagauggagua

SEQ ID NO: 377675 - RNA, 19 nt, Homo sapiens
  misc_RNA (1)...(19): siRNA sense strand
gguggcugccgaugucauu

SEQ ID NO: 377676 - RNA, 19 nt, Homo sapiens
  misc_RNA (1)...(19): siRNA sense strand
ccacugcuacccuaacuac

SEQ ID NO: 377677 - RNA, 19 nt, Homo sapiens
  misc_RNA (1)...(19): siRNA sense strand
ccacauuggcaccgacugu

SEQ ID NO: 377678 - RNA, 19 nt, Homo sapiens
  misc_RNA (1)...(19): siRNA sense strand
ucauuuccuugcuacugaa

SEQ ID NO: 377679 - RNA, 19 nt, Homo sapiens
  misc_RNA (1)...(19): siRNA sense strand
agacaacaacaccagcuau

SEQ ID NO: 377680 - RNA, 19 nt, Homo sapiens
  misc_RNA (1)...(19): siRNA sense strand
cugccgaugucauuuccuu

SEQ ID NO: 377681 - RNA, 19 nt, Homo sapiens
  misc_RNA (1)...(19): siRNA sense strand
aaacaggacuucuggauug

SEQ ID NO: 377682 - RNA, 19 nt, Homo sapiens
  misc_RNA (1)...(19): siRNA sense strand
gcccagagguucacccuuu

SEQ ID NO: 377683 - RNA, 19 nt, Homo sapiens
  misc_RNA (1)...(19): siRNA sense strand
gaccacagcucacaaggau

SEQ ID NO: 377684 - RNA, 19 nt, Homo sapiens
  misc_RNA (1)...(19): siRNA sense strand
cacgaacucuugaauggaa

SEQ ID NO: 377685 - RNA, 19 nt, Homo sapiens
  misc_RNA (1)...(19): siRNA sense strand
ugaacgagcucccaaacag

SEQ ID NO: 377686 - RNA, 19 nt, Homo sapiens
  misc_RNA (1)...(19): siRNA sense strand
gacuuuagcuugggagaau

SEQ ID NO: 377687 - RNA, 19 nt, Homo sapiens
  misc_RNA (1)...(19): siRNA sense strand
caaacaggacuucuggauu

SEQ ID NO: 377688 - RNA, 19 nt, Homo sapiens
  misc_RNA (1)...(19): siRNA sense strand
cagcagaaccucucuaguc

SEQ ID NO: 377689 - RNA, 19 nt, Homo sapiens
  misc_RNA (1)...(19): siRNA sense strand
caggauacacgaacucuug

SEQ ID NO: 377690 - RNA, 19 nt, Homo sapiens
  misc_RNA (1)...(19): siRNA sense strand
aaaggugcguuuccugaug

SEQ ID NO: 377691 - RNA, 19 nt, Homo sapiens
  misc_RNA (1)...(19): siRNA sense strand
caggacuucuggauuguug

SEQ ID NO: 377692 - RNA, 19 nt, Homo sapiens
  misc_RNA (1)...(19): siRNA sense strand
cugcagagccuccuuggaa

SEQ ID NO: 377693 - RNA, 19 nt, Homo sapiens
  misc_RNA (1)...(19): siRNA sense strand
gaccaaggcacaggacauu

SEQ ID NO: 377694 - RNA, 19 nt, Homo sapiens
  misc_RNA (1)...(19): siRNA sense strand
ccuaccagcccucuucuaa

SEQ ID NO: 377695 - RNA, 19 nt, Homo sapiens
  misc_RNA (1)...(19): siRNA sense strand
uauacgcucuucccucuuc

SEQ ID NO: 377696 - RNA, 19 nt, Homo sapiens
  misc_RNA (1)...(19): siRNA sense strand
uacacgaacucuugaaugg

SEQ ID NO: 377697 - RNA, 19 nt, Homo sapiens
  misc_RNA (1)...(19): siRNA sense strand
caacaccugcuccgaggaa

SEQ ID NO: 377698 - RNA, 19 nt, Homo sapiens
  misc_RNA (1)...(19): siRNA sense strand
ugaaguggcagcagggauu

SEQ ID NO: 377699 - RNA, 19 nt, Homo sapiens
  misc_RNA (1)...(19): siRNA sense strand
ggaccacagcucacaagga

SEQ ID NO: 377700 - RNA, 19 nt, Homo sapiens
  misc_RNA (1)...(19): siRNA sense strand
uaccagcccucuucuaaac

SEQ ID NO: 377701 - RNA, 19 nt, Homo sapiens
  misc_RNA (1)...(19): siRNA sense strand
gaacaggauacacgaacuc

SEQ ID NO: 377702 - RNA, 19 nt, Homo sapiens
  misc_RNA (1)...(19): siRNA sense strand
ccaaacaggacuucuggau

SEQ ID NO: 377703 - RNA, 19 nt, Homo sapiens
  misc_RNA (1)...(19): siRNA sense strand
ggauucagagccaagauuc

SEQ ID NO: 377704 - RNA, 19 nt, Homo sapiens
  misc_RNA (1)...(19): siRNA sense strand
gggacccacuugccucuca

SEQ ID NO: 377705 - RNA, 19 nt, Homo sapiens
  misc_RNA (1)...(19): siRNA sense strand
gauacacgaacucuugaau

SEQ ID NO: 377706 - RNA, 19 nt, Homo sapiens
  misc_RNA (1)...(19): siRNA sense strand
ucucuaguccucacacuga

SEQ ID NO: 377707 - RNA, 19 nt, Homo sapiens
  misc_RNA (1)...(19): siRNA sense strand
gggauucagagccaagauu

SEQ ID NO: 377708 - RNA, 19 nt, Homo sapiens
  misc_RNA (1)...(19): siRNA sense strand
ggaucccaaugccaucuuc

SEQ ID NO: 377709 - RNA, 19 nt, Homo sapiens
  misc_RNA (1)...(19): siRNA sense strand
uggaacucguggacucuuu

SEQ ID NO: 377710 - RNA, 19 nt, Homo sapiens
  misc_RNA (1)...(19): siRNA sense strand
ggacuucuggauuguugga

SEQ ID NO: 377711 - RNA, 19 nt, Homo sapiens
  misc_RNA (1)...(19): siRNA sense strand
cagccuggauauucuccuu

SEQ ID NO: 377712 - RNA, 19 nt, Homo sapiens
  misc_RNA (1)...(19): siRNA sense strand
gaccuccgaguccucagua

SEQ ID NO: 377713 - RNA, 19 nt, Homo sapiens
  misc_RNA (1)...(19): siRNA sense strand
ggacuuuagcuugggagaa

SEQ ID NO: 377714 - RNA, 19 nt, Homo sapiens
  misc_RNA (1)...(19): siRNA sense strand
cuaccagcccucuucuaaa

SEQ ID NO: 377715 - RNA, 19 nt, Homo sapiens
  misc_RNA (1)...(19): siRNA sense strand
ggauacacgaacucuugaa

SEQ ID NO: 377716 - RNA, 19 nt, Homo sapiens
  misc_RNA (1)...(19): siRNA sense strand
gcugccugcuguggacuuu

SEQ ID NO: 377717 - RNA, 19 nt, Homo sapiens
  misc_RNA (1)...(19): siRNA sense strand
uagcuugggagaauggaaa

SEQ ID NO: 377718 - RNA, 19 nt, Homo sapiens
  misc_RNA (1)...(19): siRNA sense strand
ggaacucguggacucuuuc

SEQ ID NO: 377719 - RNA, 19 nt, Homo sapiens
  misc_RNA (1)...(19): siRNA sense strand
gaaguggcagcagggauuc

SEQ ID NO: 377720 - RNA, 19 nt, Homo sapiens
  misc_RNA (1)...(19): siRNA sense strand
ccaaggcacaggacauucu

SEQ ID NO: 377721 - RNA, 19 nt, Homo sapiens
  misc_RNA (1)...(19): siRNA sense strand
gagccagugcccagagguu

SEQ ID NO: 377722 - RNA, 19 nt, Homo sapiens
  misc_RNA (1)...(19): siRNA sense strand
cccagagguucacccuuug

SEQ ID NO: 377723 - RNA, 19 nt, Homo sapiens
  misc_RNA (1)...(19): siRNA sense strand
ugaacaggauacacgaacu

SEQ ID NO: 377724 - RNA, 19 nt, Homo sapiens
  misc_RNA (1)...(19): siRNA sense strand
gcaggaccacagcucacaa

SEQ ID NO: 377725 - RNA, 19 nt, Homo sapiens
  misc_RNA (1)...(19): siRNA sense strand
acagguccgucuccuccuu

SEQ ID NO: 377726 - RNA, 19 nt, Homo sapiens
  misc_RNA (1)...(19): siRNA sense strand
ggacccacuugccucucau

SEQ ID NO: 377727 - RNA, 19 nt, Homo sapiens
  misc_RNA (1)...(19): siRNA sense strand
gcucacaaggaucccaaug

SEQ ID NO: 377728 - RNA, 19 nt, Homo sapiens
  misc_RNA (1)...(19): siRNA sense strand
gcaaggagcugaacaaguu

SEQ ID NO: 377729 - RNA, 19 nt, Homo sapiens
  misc_RNA (1)...(19): siRNA sense strand
gaagauggcuauucugugu

SEQ ID NO: 377730 - RNA, 19 nt, Homo sapiens
  misc_RNA (1)...(19): siRNA sense strand
gaagaaauaucuagaggau

SEQ ID NO: 377731 - RNA, 19 nt, Homo sapiens
  misc_RNA (1)...(19): siRNA sense strand
uaugaaggcucgagaguua

SEQ ID NO: 377732 - RNA, 19 nt, Homo sapiens
  misc_RNA (1)...(19): siRNA sense strand
cgacacggcugauaacuga

SEQ ID NO: 377733 - RNA, 19 nt, Homo sapiens
  misc_RNA (1)...(19): siRNA sense strand
cggcugauguuguuaaaua

SEQ ID NO: 377734 - RNA, 19 nt, Homo sapiens
  misc_RNA (1)...(19): siRNA sense strand
ggacaggauuaacgaauau

SEQ ID NO: 377735 - RNA, 19 nt, Homo sapiens
  misc_RNA (1)...(19): siRNA sense strand
ggaaacagcaucuucuuga

SEQ ID NO: 377736 - RNA, 19 nt, Homo sapiens
  misc_RNA (1)...(19): siRNA sense strand
uaaagaagaagcugcaaua

SEQ ID NO: 377737 - RNA, 19 nt, Homo sapiens
  misc_RNA (1)...(19): siRNA sense strand
ucagacagcugcagcauga

SEQ ID NO: 377738 - RNA, 19 nt, Homo sapiens
  misc_RNA (1)...(19): siRNA sense strand
agaagaagcugcaauaucu

SEQ ID NO: 377739 - RNA, 19 nt, Homo sapiens
  misc_RNA (1)...(19): siRNA sense strand
aagaaaggcuugacuguug

SEQ ID NO: 377740 - RNA, 19 nt, Homo sapiens
  misc_RNA (1)...(19): siRNA sense strand
ccacagaagccucauauga

SEQ ID NO: 377741 - RNA, 19 nt, Homo sapiens
  misc_RNA (1)...(19): siRNA sense strand
gaaagccgccuaucggaaa

SEQ ID NO: 377742 - RNA, 19 nt, Homo sapiens
  misc_RNA (1)...(19): siRNA sense strand
ggacaguguuggacagcua

SEQ ID NO: 377743 - RNA, 19 nt, Homo sapiens
  misc_RNA (1)...(19): siRNA sense strand
uaacccagguguuugaauu

SEQ ID NO: 377744 - RNA, 19 nt, Homo sapiens
  misc_RNA (1)...(19): siRNA sense strand
agaaauaucuagaggaugu

SEQ ID NO: 377745 - RNA, 19 nt, Homo sapiens
  misc_RNA (1)...(19): siRNA sense strand
cugaggagcuguuaaagaa

SEQ ID NO: 377746 - RNA, 19 nt, Homo sapiens
  misc_RNA (1)...(19): siRNA sense strand
gcucgagaguuauuucgua

SEQ ID NO: 377747 - RNA, 19 nt, Homo sapiens
  misc_RNA (1)...(19): siRNA sense strand
ucaacgagcucuauuugga

SEQ ID NO: 377748 - RNA, 19 nt, Homo sapiens
  misc_RNA (1)...(19): siRNA sense strand
ugaaagaucaguugaaguu

SEQ ID NO: 377749 - RNA, 19 nt, Homo sapiens
  misc_RNA (1)...(19): siRNA sense strand
agacagaacugggcaaaga

SEQ ID NO: 377750 - RNA, 19 nt, Homo sapiens
  misc_RNA (1)...(19): siRNA sense strand
gaacagaagaaauaucuag

SEQ ID NO: 377751 - RNA, 19 nt, Homo sapiens
  misc_RNA (1)...(19): siRNA sense strand
gaaacagcaucuucuugau

SEQ ID NO: 377752 - RNA, 19 nt, Homo sapiens
  misc_RNA (1)...(19): siRNA sense strand
gaaagauggccuccugaaa

SEQ ID NO: 377753 - RNA, 19 nt, Homo sapiens
  misc_RNA (1)...(19): siRNA sense strand
caaagguucugucacucua

SEQ ID NO: 377754 - RNA, 19 nt, Homo sapiens
  misc_RNA (1)...(19): siRNA sense strand
caaaggaaguagaaaugau

SEQ ID NO: 377755 - RNA, 19 nt, Homo sapiens
  misc_RNA (1)...(19): siRNA sense strand
gugcucagauuccauggua

SEQ ID NO: 377756 - RNA, 19 nt, Homo sapiens
  misc_RNA (1)...(19): siRNA sense strand
gcaaagccgccacucguuu

SEQ ID NO: 377757 - RNA, 19 nt, Homo sapiens
  misc_RNA (1)...(19): siRNA sense strand
gaagaaaggcuugacuguu

SEQ ID NO: 377758 - RNA, 19 nt, Homo sapiens
  misc_RNA (1)...(19): siRNA sense strand
caaagacagcccaucauuu

SEQ ID NO: 377759 - RNA, 19 nt, Homo sapiens
  misc_RNA (1)...(19): siRNA sense strand
ggaaaugucccaccugauc

SEQ ID NO: 377760 - RNA, 19 nt, Homo sapiens
  misc_RNA (1)...(19): siRNA sense strand
gauggacacugacgucguu

SEQ ID NO: 377761 - RNA, 19 nt, Homo sapiens
  misc_RNA (1)...(19): siRNA sense strand
guuacugggucaugucaua

SEQ ID NO: 377762 - RNA, 19 nt, Homo sapiens
  misc_RNA (1)...(19): siRNA sense strand
uaacgaauaugugggcaaa

SEQ ID NO: 377763 - RNA, 19 nt, Homo sapiens
  misc_RNA (1)...(19): siRNA sense strand
gcacucagauaccacaaag

SEQ ID NO: 377764 - RNA, 19 nt, Homo sapiens
  misc_RNA (1)...(19): siRNA sense strand
gaagaaggccaacaacaag

SEQ ID NO: 377765 - RNA, 19 nt, Homo sapiens
  misc_RNA (1)...(19): siRNA sense strand
agaaagaacaagcuagaua

SEQ ID NO: 377766 - RNA, 19 nt, Homo sapiens
  misc_RNA (1)...(19): siRNA sense strand
caaagccgccacucguuua

SEQ ID NO: 377767 - RNA, 19 nt, Homo sapiens
  misc_RNA (1)...(19): siRNA sense strand
gcagaaagaacaagcuaga

SEQ ID NO: 377768 - RNA, 19 nt, Homo sapiens
  misc_RNA (1)...(19): siRNA sense strand
gaaagaucaguugaaguua

SEQ ID NO: 377769 - RNA, 19 nt, Homo sapiens
  misc_RNA (1)...(19): siRNA sense strand
gaaguggucaagccaauga

SEQ ID NO: 377770 - RNA, 19 nt, Homo sapiens
  misc_RNA (1)...(19): siRNA sense strand
agaacaagcuagauacaau

SEQ ID NO: 377771 - RNA, 19 nt, Homo sapiens
  misc_RNA (1)...(19): siRNA sense strand
gaacauaaugcugccauga

SEQ ID NO: 377772 - RNA, 19 nt, Homo sapiens
  misc_RNA (1)...(19): siRNA sense strand
gcacaaccaguuacucuau

SEQ ID NO: 377773 - RNA, 19 nt, Homo sapiens
  misc_RNA (1)...(19): siRNA sense strand
ggaagagauuagaaacuca

SEQ ID NO: 377774 - RNA, 19 nt, Homo sapiens
  misc_RNA (1)...(19): siRNA sense strand
gaaagaacaagcuagauac

SEQ ID NO: 377775 - RNA, 19 nt, Homo sapiens
  misc_RNA (1)...(19): siRNA sense strand
gggaaugccagacuucuuu

SEQ ID NO: 377776 - RNA, 19 nt, Homo sapiens
  misc_RNA (1)...(19): siRNA sense strand
uaggugaucuggccucuga

SEQ ID NO: 377777 - RNA, 19 nt, Homo sapiens
  misc_RNA (1)...(19): siRNA sense strand
aacagcaucuucuugauuu

SEQ ID NO: 377778 - RNA, 19 nt, Homo sapiens
  misc_RNA (1)...(19): siRNA sense strand
gaacuggacccucgaaggu

SEQ ID NO: 377779 - RNA, 19 nt, Homo sapiens
  misc_RNA (1)...(19): siRNA sense strand
gaagguuagucugcagaaa

SEQ ID NO: 377780 - RNA, 19 nt, Homo sapiens
  misc_RNA (1)...(19): siRNA sense strand
ggaagucuaucucguccau

SEQ ID NO: 377781 - RNA, 19 nt, Homo sapiens
  misc_RNA (1)...(19): siRNA sense strand
ggaaguagaaaugaugaaa

SEQ ID NO: 377782 - RNA, 19 nt, Homo sapiens
  misc_RNA (1)...(19): siRNA sense strand
acauaaugcugccaugaaa

SEQ ID NO: 377783 - RNA, 19 nt, Homo sapiens
  misc_RNA (1)...(19): siRNA sense strand
gaggagcuguuaaagaaag

SEQ ID NO: 377784 - RNA, 19 nt, Homo sapiens
  misc_RNA (1)...(19): siRNA sense strand
cagcaaagguucugucacu

SEQ ID NO: 377785 - RNA, 19 nt, Homo sapiens
  misc_RNA (1)...(19): siRNA sense strand
uggacaggauuaacgaaua

SEQ ID NO: 377786 - RNA, 19 nt, Homo sapiens
  misc_RNA (1)...(19): siRNA sense strand
uggaacaacugcagaacaa

SEQ ID NO: 377787 - RNA, 19 nt, Homo sapiens
  misc_RNA (1)...(19): siRNA sense strand
ccaaagacagcccaucauu

SEQ ID NO: 377788 - RNA, 19 nt, Homo sapiens
  misc_RNA (1)...(19): siRNA sense strand
gcaagccuuuacucccaua

SEQ ID NO: 377789 - RNA, 19 nt, Homo sapiens
  misc_RNA (1)...(19): siRNA sense strand
gaagaagcugcaauaucua

SEQ ID NO: 377790 - RNA, 19 nt, Homo sapiens
  misc_RNA (1)...(19): siRNA sense strand
ugaagaaggccaacaacaa

SEQ ID NO: 377791 - RNA, 19 nt, Homo sapiens
  misc_RNA (1)...(19): siRNA sense strand
uuaaagagaaccucaauuc

SEQ ID NO: 377792 - RNA, 19 nt, Homo sapiens
  misc_RNA (1)...(19): siRNA sense strand
gaauguacccuugcaacuu

SEQ ID NO: 377793 - RNA, 19 nt, Homo sapiens
  misc_RNA (1)...(19): siRNA sense strand
ggauaacccagguguuuga

SEQ ID NO: 377794 - RNA, 19 nt, Homo sapiens
  misc_RNA (1)...(19): siRNA sense strand
aaucucaccuggccaagaa

SEQ ID NO: 377795 - RNA, 19 nt, Homo sapiens
  misc_RNA (1)...(19): siRNA sense strand
caaccagagccaggaauua

SEQ ID NO: 377796 - RNA, 19 nt, Homo sapiens
  misc_RNA (1)...(19): siRNA sense strand
cagcagcucuggaggaaca

SEQ ID NO: 377797 - RNA, 19 nt, Homo sapiens
  misc_RNA (1)...(19): siRNA sense strand
ccaaaucucagcccgcuuu

SEQ ID NO: 377798 - RNA, 19 nt, Homo sapiens
  misc_RNA (1)...(19): siRNA sense strand
aagaaaaccuggagacuuu

SEQ ID NO: 377799 - RNA, 19 nt, Homo sapiens
  misc_RNA (1)...(19): siRNA sense strand
cacagaagccucauaugaa

SEQ ID NO: 377800 - RNA, 19 nt, Homo sapiens
  misc_RNA (1)...(19): siRNA sense strand
gagaggaauucuacaacca

SEQ ID NO: 377801 - RNA, 19 nt, Homo sapiens
  misc_RNA (1)...(19): siRNA sense strand
uaaaaugucucaagaugga

SEQ ID NO: 377802 - RNA, 19 nt, Homo sapiens
  misc_RNA (1)...(19): siRNA sense strand
ggucaacgagcucuauuug

SEQ ID NO: 377803 - RNA, 19 nt, Homo sapiens
  misc_RNA (1)...(19): siRNA sense strand
gaacaagcuagauacaauc

SEQ ID NO: 377804 - RNA, 19 nt, Homo sapiens
  misc_RNA (1)...(19): siRNA sense strand
gaagacugaggagcuguua

SEQ ID NO: 377805 - RNA, 19 nt, Homo sapiens
  misc_RNA (1)...(19): siRNA sense strand
cgugaacccugagccuuua

SEQ ID NO: 377806 - RNA, 19 nt, Homo sapiens
  misc_RNA (1)...(19): siRNA sense strand
gauuagaaacucaugaugu

SEQ ID NO: 377807 - RNA, 19 nt, Homo sapiens
  misc_RNA (1)...(19): siRNA sense strand
gaggacggcaugaccagua

SEQ ID NO: 377808 - RNA, 19 nt, Homo sapiens
  misc_RNA (1)...(19): siRNA sense strand
ugcaauaucuagagaacuu

SEQ ID NO: 377809 - RNA, 19 nt, Homo sapiens
  misc_RNA (1)...(19): siRNA sense strand
caacuucuccuggaaaugu

SEQ ID NO: 377810 - RNA, 19 nt, Homo sapiens
  misc_RNA (1)...(19): siRNA sense strand
acagaagccucauaugaag

SEQ ID NO: 377811 - RNA, 19 nt, Homo sapiens
  misc_RNA (1)...(19): siRNA sense strand
ccacaaaggaaguagaaau

SEQ ID NO: 377812 - RNA, 19 nt, Homo sapiens
  misc_RNA (1)...(19): siRNA sense strand
caugaaagaucaguugaag

SEQ ID NO: 377813 - RNA, 19 nt, Homo sapiens
  misc_RNA (1)...(19): siRNA sense strand
aaacagcaucuucuugauu

SEQ ID NO: 377814 - RNA, 19 nt, Homo sapiens
  misc_RNA (1)...(19): siRNA sense strand
ggagacgacuaugggagaa

SEQ ID NO: 377815 - RNA, 19 nt, Homo sapiens
  misc_RNA (1)...(19): siRNA sense strand
gaaaggcuugacuguugua

SEQ ID NO: 377816 - RNA, 19 nt, Homo sapiens
  misc_RNA (1)...(19): siRNA sense strand
gaagauggugugcccucua

SEQ ID NO: 377817 - RNA, 19 nt, Homo sapiens
  misc_RNA (1)...(19): siRNA sense strand
gaaggaagagagaauggau

SEQ ID NO: 377818 - RNA, 19 nt, Homo sapiens
  misc_RNA (1)...(19): siRNA sense strand
ccacguggcggaagucuau

SEQ ID NO: 377819 - RNA, 19 nt, Homo sapiens
  misc_RNA (1)...(19): siRNA sense strand
gauggagcaugugcgaauu

SEQ ID NO: 377820 - RNA, 19 nt, Homo sapiens
  misc_RNA (1)...(19): siRNA sense strand
aggcuugacuguuguaaug

SEQ ID NO: 377821 - RNA, 19 nt, Homo sapiens
  misc_RNA (1)...(19): siRNA sense strand
cagaacaagcacucagaua

SEQ ID NO: 377822 - RNA, 19 nt, Homo sapiens
  misc_RNA (1)...(19): siRNA sense strand
caguugaaguuacaagaga

SEQ ID NO: 377823 - RNA, 19 nt, Homo sapiens
  misc_RNA (1)...(19): siRNA sense strand
gagcagacgcgcacagcaa

SEQ ID NO: 377824 - RNA, 19 nt, Homo sapiens
  misc_RNA (1)...(19): siRNA sense strand
gaucuggccucugaagaag

SEQ ID NO: 377825 - RNA, 19 nt, Homo sapiens
  misc_RNA (1)...(19): siRNA sense strand
cgucucggcugauguuguu

SEQ ID NO: 377826 - RNA, 19 nt, Homo sapiens
  misc_RNA (1)...(19): siRNA sense strand
aacaccaucuucugaauga

SEQ ID NO: 377827 - RNA, 19 nt, Homo sapiens
  misc_RNA (1)...(19): siRNA sense strand
agacaacaccaucuucuga

SEQ ID NO: 377828 - RNA, 19 nt, Homo sapiens
  misc_RNA (1)...(19): siRNA sense strand
ggagagagugugcuuauug

SEQ ID NO: 377829 - RNA, 19 nt, Homo sapiens
  misc_RNA (1)...(19): siRNA sense strand
ccaaaccucagaagucuua

SEQ ID NO: 377830 - RNA, 19 nt, Homo sapiens
  misc_RNA (1)...(19): siRNA sense strand
ggauaucaauggcaaacug

SEQ ID NO: 377831 - RNA, 19 nt, Homo sapiens
  misc_RNA (1)...(19): siRNA sense strand
gcaauacugacuauaguga

SEQ ID NO: 377832 - RNA, 19 nt, Homo sapiens
  misc_RNA (1)...(19): siRNA sense strand
uauagugacugcauacaug

SEQ ID NO: 377833 - RNA, 19 nt, Homo sapiens
  misc_RNA (1)...(19): siRNA sense strand
caagugcaauacugacuau

SEQ ID NO: 377834 - RNA, 19 nt, Homo sapiens
  misc_RNA (1)...(19): siRNA sense strand
gaaaggagagagugugcuu

SEQ ID NO: 377835 - RNA, 19 nt, Homo sapiens
  misc_RNA (1)...(19): siRNA sense strand
ugacuauagugacugcaua

SEQ ID NO: 377836 - RNA, 19 nt, Homo sapiens
  misc_RNA (1)...(19): siRNA sense strand
caucugugcuggauauugu

SEQ ID NO: 377837 - RNA, 19 nt, Homo sapiens
  misc_RNA (1)...(19): siRNA sense strand
agucuuaucugguaggauu

SEQ ID NO: 377838 - RNA, 19 nt, Homo sapiens
  misc_RNA (1)...(19): siRNA sense strand
gcaagugcaauacugacua

SEQ ID NO: 377839 - RNA, 19 nt, Homo sapiens
  misc_RNA (1)...(19): siRNA sense strand
caccaucugugcuggauau

SEQ ID NO: 377840 - RNA, 19 nt, Homo sapiens
  misc_RNA (1)...(19): siRNA sense strand
gacaaacuacuguaccaaa

SEQ ID NO: 377841 - RNA, 19 nt, Homo sapiens
  misc_RNA (1)...(19): siRNA sense strand
guaccaaaccucagaaguc

SEQ ID NO: 377842 - RNA, 19 nt, Homo sapiens
  misc_RNA (1)...(19): siRNA sense strand
gagagagugugcuuauugc

SEQ ID NO: 377843 - RNA, 19 nt, Homo sapiens
  misc_RNA (1)...(19): siRNA sense strand
gguaggauuuucugucuaa

SEQ ID NO: 377844 - RNA, 19 nt, Homo sapiens
  misc_RNA (1)...(19): siRNA sense strand
gugcaauacugacuauagu

SEQ ID NO: 377845 - RNA, 19 nt, Homo sapiens
  misc_RNA (1)...(19): siRNA sense strand
uuucugauguccaugcuuu

SEQ ID NO: 377846 - RNA, 19 nt, Homo sapiens
  misc_RNA (1)...(19): siRNA sense strand
gcacauauagagacuucau

SEQ ID NO: 377847 - RNA, 19 nt, Homo sapiens
  misc_RNA (1)...(19): siRNA sense strand
gaagucuuaucugguagga

SEQ ID NO: 377848 - RNA, 19 nt, Homo sapiens
  misc_RNA (1)...(19): siRNA sense strand
caacugaguauacaaugca

SEQ ID NO: 377849 - RNA, 19 nt, Homo sapiens
  misc_RNA (1)...(19): siRNA sense strand
aacuguuucuucccaaaua

SEQ ID NO: 377850 - RNA, 19 nt, Homo sapiens
  misc_RNA (1)...(19): siRNA sense strand
gagugugcuuauugccuaa

SEQ ID NO: 377851 - RNA, 19 nt, Homo sapiens
  misc_RNA (1)...(19): siRNA sense strand
uaccaaaccucagaagucu

SEQ ID NO: 377852 - RNA, 19 nt, Homo sapiens
  misc_RNA (1)...(19): siRNA sense strand
augaagccaucaagacaaa

SEQ ID NO: 377853 - RNA, 19 nt, Homo sapiens
  misc_RNA (1)...(19): siRNA sense strand
gcuuauugccuaaccauca

SEQ ID NO: 377854 - RNA, 19 nt, Homo sapiens
  misc_RNA (1)...(19): siRNA sense strand
caucaacaccaccaucugu

SEQ ID NO: 377855 - RNA, 19 nt, Homo sapiens
  misc_RNA (1)...(19): siRNA sense strand
ugugcuggauauuguauga

SEQ ID NO: 377856 - RNA, 19 nt, Homo sapiens
  misc_RNA (1)...(19): siRNA sense strand
uuccuauccuguugcuuua

SEQ ID NO: 377857 - RNA, 19 nt, Homo sapiens
  misc_RNA (1)...(19): siRNA sense strand
ccauguugcucccuauuuu

SEQ ID NO: 377858 - RNA, 19 nt, Homo sapiens
  misc_RNA (1)...(19): siRNA sense strand
caucaagacaaacuacugu

SEQ ID NO: 377859 - RNA, 19 nt, Homo sapiens
  misc_RNA (1)...(19): siRNA sense strand
acaaacuacuguaccaaac

SEQ ID NO: 377860 - RNA, 19 nt, Homo sapiens
  misc_RNA (1)...(19): siRNA sense strand
ccaacugaguauacaaugc

SEQ ID NO: 377861 - RNA, 19 nt, Homo sapiens
  misc_RNA (1)...(19): siRNA sense strand
gauaucaauggcaaacugu

SEQ ID NO: 377862 - RNA, 19 nt, Homo sapiens
  misc_RNA (1)...(19): siRNA sense strand
cuuauugccuaaccaucaa

SEQ ID NO: 377863 - RNA, 19 nt, Homo sapiens
  misc_RNA (1)...(19): siRNA sense strand
guaaguguggcaagugcaa

SEQ ID NO: 377864 - RNA, 19 nt, Homo sapiens
  misc_RNA (1)...(19): siRNA sense strand
caugaagccaucaagacaa

SEQ ID NO: 377865 - RNA, 19 nt, Homo sapiens
  misc_RNA (1)...(19): siRNA sense strand
gugggcaagcgaugucuuu

SEQ ID NO: 377866 - RNA, 19 nt, Homo sapiens
  misc_RNA (1)...(19): siRNA sense strand
aagacaaacuacuguacca

SEQ ID NO: 377867 - RNA, 19 nt, Homo sapiens
  misc_RNA (1)...(19): siRNA sense strand
uuuccuauccuguugcuuu

SEQ ID NO: 377868 - RNA, 19 nt, Homo sapiens
  misc_RNA (1)...(19): siRNA sense strand
ggaugcccacuccauguug

SEQ ID NO: 377869 - RNA, 19 nt, Homo sapiens
  misc_RNA (1)...(19): siRNA sense strand
ugacacgggauaucaaugg

SEQ ID NO: 377870 - RNA, 19 nt, Homo sapiens
  misc_RNA (1)...(19): siRNA sense strand
uugcacauauagagacuuc

SEQ ID NO: 377871 - RNA, 19 nt, Homo sapiens
  misc_RNA (1)...(19): siRNA sense strand
aaggagagagugugcuuau

SEQ ID NO: 377872 - RNA, 19 nt, Homo sapiens
  misc_RNA (1)...(19): siRNA sense strand
gaagccaucaagacaaacu

SEQ ID NO: 377873 - RNA, 19 nt, Homo sapiens
  misc_RNA (1)...(19): siRNA sense strand
guaugacacgggauaucaa

SEQ ID NO: 377874 - RNA, 19 nt, Homo sapiens
  misc_RNA (1)...(19): siRNA sense strand
aaaggagagagugugcuua

SEQ ID NO: 377875 - RNA, 19 nt, Homo sapiens
  misc_RNA (1)...(19): siRNA sense strand
guauacaaugcacaucgaa

SEQ ID NO: 377876 - RNA, 19 nt, Homo sapiens
  misc_RNA (1)...(19): siRNA sense strand
aaacuacuguaccaaaccu

SEQ ID NO: 377877 - RNA, 19 nt, Homo sapiens
  misc_RNA (1)...(19): siRNA sense strand
acaugaagccaucaagaca

SEQ ID NO: 377878 - RNA, 19 nt, Homo sapiens
  misc_RNA (1)...(19): siRNA sense strand
uauacaaugcacaucgaaa

SEQ ID NO: 377879 - RNA, 19 nt, Homo sapiens
  misc_RNA (1)...(19): siRNA sense strand
auacaugaagccaucaaga

SEQ ID NO: 377880 - RNA, 19 nt, Homo sapiens
  misc_RNA (1)...(19): siRNA sense strand
ccuauccuguugcuuuaag

SEQ ID NO: 377881 - RNA, 19 nt, Homo sapiens
  misc_RNA (1)...(19): siRNA sense strand
uauuguaugacacgggaua

SEQ ID NO: 377882 - RNA, 19 nt, Homo sapiens
  misc_RNA (1)...(19): siRNA sense strand
gaacuuaacuuacauagac

SEQ ID NO: 377883 - RNA, 19 nt, Homo sapiens
  misc_RNA (1)...(19): siRNA sense strand
agaaacaccuggacucuua

SEQ ID NO: 377884 - RNA, 19 nt, Homo sapiens
  misc_RNA (1)...(19): siRNA sense strand
uaacaacgcucauuauuac

SEQ ID NO: 377885 - RNA, 19 nt, Homo sapiens
  misc_RNA (1)...(19): siRNA sense strand
gaagaugucuaugaacuga

SEQ ID NO: 377886 - RNA, 19 nt, Homo sapiens
  misc_RNA (1)...(19): siRNA sense strand
caacacggcugguuucuuc

SEQ ID NO: 377887 - RNA, 19 nt, Homo sapiens
  misc_RNA (1)...(19): siRNA sense strand
gaacaagccucucaucacu

SEQ ID NO: 377888 - RNA, 19 nt, Homo sapiens
  misc_RNA (1)...(19): siRNA sense strand
ggacaaagauaccaaaauu

SEQ ID NO: 377889 - RNA, 19 nt, Homo sapiens
  misc_RNA (1)...(19): siRNA sense strand
ccaaagaacagcacugaua

SEQ ID NO: 377890 - RNA, 19 nt, Homo sapiens
  misc_RNA (1)...(19): siRNA sense strand
gaucuucaccgacuucaua

SEQ ID NO: 377891 - RNA, 19 nt, Homo sapiens
  misc_RNA (1)...(19): siRNA sense strand
guacucuucuauccacuua

SEQ ID NO: 377892 - RNA, 19 nt, Homo sapiens
  misc_RNA (1)...(19): siRNA sense strand
aaugaaaccuugacacuga

SEQ ID NO: 377893 - RNA, 19 nt, Homo sapiens
  misc_RNA (1)...(19): siRNA sense strand
ccaaggauaugcuuucaau

SEQ ID NO: 377894 - RNA, 19 nt, Homo sapiens
  misc_RNA (1)...(19): siRNA sense strand
gaacugauagcaagaaaca

SEQ ID NO: 377895 - RNA, 19 nt, Homo sapiens
  misc_RNA (1)...(19): siRNA sense strand
cauggaagaugucuaugaa

SEQ ID NO: 377896 - RNA, 19 nt, Homo sapiens
  misc_RNA (1)...(19): siRNA sense strand
gcucuggcauauauuguuu

SEQ ID NO: 377897 - RNA, 19 nt, Homo sapiens
  misc_RNA (1)...(19): siRNA sense strand
ugacaguuauugacaaaga

SEQ ID NO: 377898 - RNA, 19 nt, Homo sapiens
  misc_RNA (1)...(19): siRNA sense strand
caacccgugugaagacaua

SEQ ID NO: 377899 - RNA, 19 nt, Homo sapiens
  misc_RNA (1)...(19): siRNA sense strand
ccaggaauaugaagagaau

SEQ ID NO: 377900 - RNA, 19 nt, Homo sapiens
  misc_RNA (1)...(19): siRNA sense strand
gaagcaaggccaaaucuca

SEQ ID NO: 377901 - RNA, 19 nt, Homo sapiens
  misc_RNA (1)...(19): siRNA sense strand
gaaucugggugacagcauu

SEQ ID NO: 377902 - RNA, 19 nt, Homo sapiens
  misc_RNA (1)...(19): siRNA sense strand
uuucuaaucugcccaauau

SEQ ID NO: 377903 - RNA, 19 nt, Homo sapiens
  misc_RNA (1)...(19): siRNA sense strand
ucacacuccuucuacaauu

SEQ ID NO: 377904 - RNA, 19 nt, Homo sapiens
  misc_RNA (1)...(19): siRNA sense strand
gcuggaugcuguuuaccua

SEQ ID NO: 377905 - RNA, 19 nt, Homo sapiens
  misc_RNA (1)...(19): siRNA sense strand
gaggauggcuguguugauc

SEQ ID NO: 377906 - RNA, 19 nt, Homo sapiens
  misc_RNA (1)...(19): siRNA sense strand
agagucaccugcaaggaua

SEQ ID NO: 377907 - RNA, 19 nt, Homo sapiens
  misc_RNA (1)...(19): siRNA sense strand
caccuggacucuuaagaaa

SEQ ID NO: 377908 - RNA, 19 nt, Homo sapiens
  misc_RNA (1)...(19): siRNA sense strand
caaagaacagcacugauau

SEQ ID NO: 377909 - RNA, 19 nt, Homo sapiens
  misc_RNA (1)...(19): siRNA sense strand
ccaaaucucagaagaguau

SEQ ID NO: 377910 - RNA, 19 nt, Homo sapiens
  misc_RNA (1)...(19): siRNA sense strand
uuacuucaguccaaggaua

SEQ ID NO: 377911 - RNA, 19 nt, Homo sapiens
  misc_RNA (1)...(19): siRNA sense strand
ccaagaggauggcuguguu

SEQ ID NO: 377912 - RNA, 19 nt, Homo sapiens
  misc_RNA (1)...(19): siRNA sense strand
gaauaaauaccugacaguu

SEQ ID NO: 377913 - RNA, 19 nt, Homo sapiens
  misc_RNA (1)...(19): siRNA sense strand
ugagaacuauuccaaguca

SEQ ID NO: 377914 - RNA, 19 nt, Homo sapiens
  misc_RNA (1)...(19): siRNA sense strand
guacaacaauggcuuuacu

SEQ ID NO: 377915 - RNA, 19 nt, Homo sapiens
  misc_RNA (1)...(19): siRNA sense strand
uuucaacacuggacuuaaa

SEQ ID NO: 377916 - RNA, 19 nt, Homo sapiens
  misc_RNA (1)...(19): siRNA sense strand
cagaaucuacguaucuaua

SEQ ID NO: 377917 - RNA, 19 nt, Homo sapiens
  misc_RNA (1)...(19): siRNA sense strand
gcuacaaguuccugagaau

SEQ ID NO: 377918 - RNA, 19 nt, Homo sapiens
  misc_RNA (1)...(19): siRNA sense strand
cacugaagcuguacaacaa

SEQ ID NO: 377919 - RNA, 19 nt, Homo sapiens
  misc_RNA (1)...(19): siRNA sense strand
gcaccugaaggaacugaua

SEQ ID NO: 377920 - RNA, 19 nt, Homo sapiens
  misc_RNA (1)...(19): siRNA sense strand
ucacugcccuuccauccaa

SEQ ID NO: 377921 - RNA, 19 nt, Homo sapiens
  misc_RNA (1)...(19): siRNA sense strand
gaaucacacuccuucuaca

SEQ ID NO: 377922 - RNA, 19 nt, Homo sapiens
  misc_RNA (1)...(19): siRNA sense strand
caagcgaguuaucggugua

SEQ ID NO: 377923 - RNA, 19 nt, Homo sapiens
  misc_RNA (1)...(19): siRNA sense strand
gugaagacaugguguguac

SEQ ID NO: 377924 - RNA, 19 nt, Homo sapiens
  misc_RNA (1)...(19): siRNA sense strand
ugacagccauuaugacuac

SEQ ID NO: 377925 - RNA, 19 nt, Homo sapiens
  misc_RNA (1)...(19): siRNA sense strand
cggaauaccaggaacuuaa

SEQ ID NO: 377926 - RNA, 19 nt, Homo sapiens
  misc_RNA (1)...(19): siRNA sense strand
ucagaagaguauaugcaaa

SEQ ID NO: 377927 - RNA, 19 nt, Homo sapiens
  misc_RNA (1)...(19): siRNA sense strand
gcaaguuuggcaucuguaa

SEQ ID NO: 377928 - RNA, 19 nt, Homo sapiens
  misc_RNA (1)...(19): siRNA sense strand
ucuaaucugcccaauauuu

SEQ ID NO: 377929 - RNA, 19 nt, Homo sapiens
  misc_RNA (1)...(19): siRNA sense strand
ggccaaaucucagaagagu

SEQ ID NO: 377930 - RNA, 19 nt, Homo sapiens
  misc_RNA (1)...(19): siRNA sense strand
cuuaagaaacuuccacuuu

SEQ ID NO: 377931 - RNA, 19 nt, Homo sapiens
  misc_RNA (1)...(19): siRNA sense strand
caacaauggcuuuacuuca

SEQ ID NO: 377932 - RNA, 19 nt, Homo sapiens
  misc_RNA (1)...(19): siRNA sense strand
cagggacuaugcaaugaaa

SEQ ID NO: 377933 - RNA, 19 nt, Homo sapiens
  misc_RNA (1)...(19): siRNA sense strand
cauaaugggcuacaaguuc

SEQ ID NO: 377934 - RNA, 19 nt, Homo sapiens
  misc_RNA (1)...(19): siRNA sense strand
ggauguaccugcuccucau

SEQ ID NO: 377935 - RNA, 19 nt, Homo sapiens
  misc_RNA (1)...(19): siRNA sense strand
acagacaacccuuacauga

SEQ ID NO: 377936 - RNA, 19 nt, Homo sapiens
  misc_RNA (1)...(19): siRNA sense strand
gcaaugaaaccuugacacu

SEQ ID NO: 377937 - RNA, 19 nt, Homo sapiens
  misc_RNA (1)...(19): siRNA sense strand
ggauggcuguguugaucuu

SEQ ID NO: 377938 - RNA, 19 nt, Homo sapiens
  misc_RNA (1)...(19): siRNA sense strand
caaaguuuauuccacugau

SEQ ID NO: 377939 - RNA, 19 nt, Homo sapiens
  misc_RNA (1)...(19): siRNA sense strand
gccaauccauuccucuaug

SEQ ID NO: 377940 - RNA, 19 nt, Homo sapiens
  misc_RNA (1)...(19): siRNA sense strand
ugacgucaaucccugugaa

SEQ ID NO: 377941 - RNA, 19 nt, Homo sapiens
  misc_RNA (1)...(19): siRNA sense strand
gaaacaccuggacucuuaa

SEQ ID NO: 377942 - RNA, 19 nt, Homo sapiens
  misc_RNA (1)...(19): siRNA sense strand
caaagcuggaugcuguuua

SEQ ID NO: 377943 - RNA, 19 nt, Homo sapiens
  misc_RNA (1)...(19): siRNA sense strand
ggaaucacacuccuucuac

SEQ ID NO: 377944 - RNA, 19 nt, Homo sapiens
  misc_RNA (1)...(19): siRNA sense strand
cagcaaguuuggcaucugu

SEQ ID NO: 377945 - RNA, 19 nt, Homo sapiens
  misc_RNA (1)...(19): siRNA sense strand
ccugagaacuauuccaagu

SEQ ID NO: 377946 - RNA, 19 nt, Homo sapiens
  misc_RNA (1)...(19): siRNA sense strand
cacacuccuucuacaauuu

SEQ ID NO: 377947 - RNA, 19 nt, Homo sapiens
  misc_RNA (1)...(19): siRNA sense strand
ccugacaguuauugacaaa

SEQ ID NO: 377948 - RNA, 19 nt, Homo sapiens
  misc_RNA (1)...(19): siRNA sense strand
caaagaagcaaggccaaau

SEQ ID NO: 377949 - RNA, 19 nt, Homo sapiens
  misc_RNA (1)...(19): siRNA sense strand
acaagccucucaucacugu

SEQ ID NO: 377950 - RNA, 19 nt, Homo sapiens
  misc_RNA (1)...(19): siRNA sense strand
ugagaauuguggugugguu

SEQ ID NO: 377951 - RNA, 19 nt, Homo sapiens
  misc_RNA (1)...(19): siRNA sense strand
agaugucuaugaacugauu

SEQ ID NO: 377952 - RNA, 19 nt, Homo sapiens
  misc_RNA (1)...(19): siRNA sense strand
ccauuccucuaugcuauuu

SEQ ID NO: 377953 - RNA, 19 nt, Homo sapiens
  misc_RNA (1)...(19): siRNA sense strand
ggaacuuaacuuacauaga

SEQ ID NO: 377954 - RNA, 19 nt, Homo sapiens
  misc_RNA (1)...(19): siRNA sense strand
gaagagaaucugggugaca

SEQ ID NO: 377955 - RNA, 19 nt, Homo sapiens
  misc_RNA (1)...(19): siRNA sense strand
aaacuuccacuuuccuuga

SEQ ID NO: 377956 - RNA, 19 nt, Homo sapiens
  misc_RNA (1)...(19): siRNA sense strand
gaaggaacugauagcaaga

SEQ ID NO: 377957 - RNA, 19 nt, Homo sapiens
  misc_RNA (1)...(19): siRNA sense strand
cuaaaguuccuuggcauuu

SEQ ID NO: 377958 - RNA, 19 nt, Homo sapiens
  misc_RNA (1)...(19): siRNA sense strand
gaacaagaggaugagauca

SEQ ID NO: 377959 - RNA, 19 nt, Homo sapiens
  misc_RNA (1)...(19): siRNA sense strand
cccaauauuuccagaaucu

SEQ ID NO: 377960 - RNA, 19 nt, Homo sapiens
  misc_RNA (1)...(19): siRNA sense strand
ggcagggucuccacaacau

SEQ ID NO: 377961 - RNA, 19 nt, Homo sapiens
  misc_RNA (1)...(19): siRNA sense strand
auaccaggaacuuaacuua

SEQ ID NO: 377962 - RNA, 19 nt, Homo sapiens
  misc_RNA (1)...(19): siRNA sense strand
ggaagaugucuaugaacug

SEQ ID NO: 377963 - RNA, 19 nt, Homo sapiens
  misc_RNA (1)...(19): siRNA sense strand
uggaagaugucuaugaacu

SEQ ID NO: 377964 - RNA, 19 nt, Homo sapiens
  misc_RNA (1)...(19): siRNA sense strand
aaagaacagcacugauauu

SEQ ID NO: 377965 - RNA, 19 nt, Homo sapiens
  misc_RNA (1)...(19): siRNA sense strand
uacaaguuccugagaauug

SEQ ID NO: 377966 - RNA, 19 nt, Homo sapiens
  misc_RNA (1)...(19): siRNA sense strand
caaucccugugaaugcuuu

SEQ ID NO: 377967 - RNA, 19 nt, Homo sapiens
  misc_RNA (1)...(19): siRNA sense strand
ucccugaccugaccaaagu

SEQ ID NO: 377968 - RNA, 19 nt, Homo sapiens
  misc_RNA (1)...(19): siRNA sense strand
cuacaucacaguccgaaau

SEQ ID NO: 377969 - RNA, 19 nt, Homo sapiens
  misc_RNA (1)...(19): siRNA sense strand
gacaguuauugacaaagau

SEQ ID NO: 377970 - RNA, 19 nt, Homo sapiens
  misc_RNA (1)...(19): siRNA sense strand
ccuugacacugaagcugua

SEQ ID NO: 377971 - RNA, 19 nt, Homo sapiens
  misc_RNA (1)...(19): siRNA sense strand
ccaggaacuuaacuuacau

SEQ ID NO: 377972 - RNA, 19 nt, Homo sapiens
  misc_RNA (1)...(19): siRNA sense strand
gcaaggccaaaucucagaa

SEQ ID NO: 377973 - RNA, 19 nt, Homo sapiens
  misc_RNA (1)...(19): siRNA sense strand
auaaguagcuaugccaaag

SEQ ID NO: 377974 - RNA, 19 nt, Homo sapiens
  misc_RNA (1)...(19): siRNA sense strand
ggcuacaaguuccugagaa

SEQ ID NO: 377975 - RNA, 19 nt, Homo sapiens
  misc_RNA (1)...(19): siRNA sense strand
aaagcuggaugcuguuuac

SEQ ID NO: 377976 - RNA, 19 nt, Homo sapiens
  misc_RNA (1)...(19): siRNA sense strand
cuugaguccuugaugugua

SEQ ID NO: 377977 - RNA, 19 nt, Homo sapiens
  misc_RNA (1)...(19): siRNA sense strand
aagccucucaucacuguua

SEQ ID NO: 377978 - RNA, 19 nt, Homo sapiens
  misc_RNA (1)...(19): siRNA sense strand
uauuccaagucaugcauuu

SEQ ID NO: 377979 - RNA, 19 nt, Homo sapiens
  misc_RNA (1)...(19): siRNA sense strand
caaugucuuuguccugcuu

SEQ ID NO: 377980 - RNA, 19 nt, Homo sapiens
  misc_RNA (1)...(19): siRNA sense strand
ccaggauacucauaacaac

SEQ ID NO: 377981 - RNA, 19 nt, Homo sapiens
  misc_RNA (1)...(19): siRNA sense strand
accaggaacuuaacuuaca

SEQ ID NO: 377982 - RNA, 19 nt, Homo sapiens
  misc_RNA (1)...(19): siRNA sense strand
ggaaauagacaccaaaucu

SEQ ID NO: 377983 - RNA, 19 nt, Homo sapiens
  misc_RNA (1)...(19): siRNA sense strand
gaaauagacaccaaaucuu

SEQ ID NO: 377984 - RNA, 19 nt, Homo sapiens
  misc_RNA (1)...(19): siRNA sense strand
gaauccaaguguccucuga

SEQ ID NO: 377985 - RNA, 19 nt, Homo sapiens
  misc_RNA (1)...(19): siRNA sense strand
caacugaggaggaauuugu

SEQ ID NO: 377986 - RNA, 19 nt, Homo sapiens
  misc_RNA (1)...(19): siRNA sense strand
uagaagggauauacaaagu

SEQ ID NO: 377987 - RNA, 19 nt, Homo sapiens
  misc_RNA (1)...(19): siRNA sense strand
ggucaaaguucuagaugcu

SEQ ID NO: 377988 - RNA, 19 nt, Homo sapiens
  misc_RNA (1)...(19): siRNA sense strand
ggaauuuguagaagggaua

SEQ ID NO: 377989 - RNA, 19 nt, Homo sapiens
  misc_RNA (1)...(19): siRNA sense strand
cagaaaggcugcugaugac

SEQ ID NO: 377990 - RNA, 19 nt, Homo sapiens
  misc_RNA (1)...(19): siRNA sense strand
ucaccaaucccaaggaaug

SEQ ID NO: 377991 - RNA, 19 nt, Homo sapiens
  misc_RNA (1)...(19): siRNA sense strand
gugcauguguucagaaagg

SEQ ID NO: 377992 - RNA, 19 nt, Homo sapiens
  misc_RNA (1)...(19): siRNA sense strand
gaggaggaauuuguagaag

SEQ ID NO: 377993 - RNA, 19 nt, Homo sapiens
  misc_RNA (1)...(19): siRNA sense strand
ucacaacugaggaggaauu

SEQ ID NO: 377994 - RNA, 19 nt, Homo sapiens
  misc_RNA (1)...(19): siRNA sense strand
ggauauacaaaguggaaau

SEQ ID NO: 377995 - RNA, 19 nt, Homo sapiens
  misc_RNA (1)...(19): siRNA sense strand
guagaagggauauacaaag

SEQ ID NO: 377996 - RNA, 19 nt, Homo sapiens
  misc_RNA (1)...(19): siRNA sense strand
ugaggaggaauuuguagaa

SEQ ID NO: 377997 - RNA, 19 nt, Homo sapiens
  misc_RNA (1)...(19): siRNA sense strand
cgucaccaaucccaaggaa

SEQ ID NO: 377998 - RNA, 19 nt, Homo sapiens
  misc_RNA (1)...(19): siRNA sense strand
uugcuggacugguauuugu

SEQ ID NO: 377999 - RNA, 19 nt, Homo sapiens
  misc_RNA (1)...(19): siRNA sense strand
cugccuugcuggacuggua

SEQ ID NO: 378000 - RNA, 19 nt, Homo sapiens
  misc_RNA (1)...(19): siRNA sense strand
ccaaguguccucugauggu

SEQ ID NO: 378001 - RNA, 19 nt, Homo sapiens
  misc_RNA (1)...(19): siRNA sense strand
gauggucaaaguucuagau

SEQ ID NO: 378002 - RNA, 19 nt, Homo sapiens
  misc_RNA (1)...(19): siRNA sense strand
ccgugcauguguucagaaa

SEQ ID NO: 378003 - RNA, 19 nt, Homo sapiens
  misc_RNA (1)...(19): siRNA sense strand
ggccgugcauguguucaga

SEQ ID NO: 378004 - RNA, 19 nt, Homo sapiens
  misc_RNA (1)...(19): siRNA sense strand
gcaugcagaggugguauuc

SEQ ID NO: 378005 - RNA, 19 nt, Homo sapiens
  misc_RNA (1)...(19): siRNA sense strand
gacugguauuugugucuga

SEQ ID NO: 378006 - RNA, 19 nt, Homo sapiens
  misc_RNA (1)...(19): siRNA sense strand
gaauuuguagaagggauau

SEQ ID NO: 378007 - RNA, 19 nt, Homo sapiens
  misc_RNA (1)...(19): siRNA sense strand
ccucugauggucaaaguuc

SEQ ID NO: 378008 - RNA, 19 nt, Homo sapiens
  misc_RNA (1)...(19): siRNA sense strand
ucaauguggccgugcaugu

SEQ ID NO: 378009 - RNA, 19 nt, Homo sapiens
  misc_RNA (1)...(19): siRNA sense strand
caauguggccgugcaugug

SEQ ID NO: 378010 - RNA, 19 nt, Homo sapiens
  misc_RNA (1)...(19): siRNA sense strand
gaaauacacuggaaggauu

SEQ ID NO: 378011 - RNA, 19 nt, Homo sapiens
  misc_RNA (1)...(19): siRNA sense strand
ggauaaagcugccaauuuc

SEQ ID NO: 378012 - RNA, 19 nt, Homo sapiens
  misc_RNA (1)...(19): siRNA sense strand
ccaaagaucugggcuauga

SEQ ID NO: 378013 - RNA, 19 nt, Homo sapiens
  misc_RNA (1)...(19): siRNA sense strand
ggaccaaacugcacagaga

SEQ ID NO: 378014 - RNA, 19 nt, Homo sapiens
  misc_RNA (1)...(19): siRNA sense strand
caacagccaucagucuuua

SEQ ID NO: 378015 - RNA, 19 nt, Homo sapiens
  misc_RNA (1)...(19): siRNA sense strand
gauccuaucuuccuucuuc

SEQ ID NO: 378016 - RNA, 19 nt, Homo sapiens
  misc_RNA (1)...(19): siRNA sense strand
cuaagaaccugauggagaa

SEQ ID NO: 378017 - RNA, 19 nt, Homo sapiens
  misc_RNA (1)...(19): siRNA sense strand
gaucugggcuaugacuaua

SEQ ID NO: 378018 - RNA, 19 nt, Homo sapiens
  misc_RNA (1)...(19): siRNA sense strand
ucaagaaguuuauccagaa

SEQ ID NO: 378019 - RNA, 19 nt, Homo sapiens
  misc_RNA (1)...(19): siRNA sense strand
gaaucugguuccauggaua

SEQ ID NO: 378020 - RNA, 19 nt, Homo sapiens
  misc_RNA (1)...(19): siRNA sense strand
agaaacaucuucgauuuga

SEQ ID NO: 378021 - RNA, 19 nt, Homo sapiens
  misc_RNA (1)...(19): siRNA sense strand
gagccugugucuccucuaa

SEQ ID NO: 378022 - RNA, 19 nt, Homo sapiens
  misc_RNA (1)...(19): siRNA sense strand
uaccacagcuuguaucaga

SEQ ID NO: 378023 - RNA, 19 nt, Homo sapiens
  misc_RNA (1)...(19): siRNA sense strand
gacuauagcuaucuacaag

SEQ ID NO: 378024 - RNA, 19 nt, Homo sapiens
  misc_RNA (1)...(19): siRNA sense strand
ggcauagacucuucuuguu

SEQ ID NO: 378025 - RNA, 19 nt, Homo sapiens
  misc_RNA (1)...(19): siRNA sense strand
caaagcagcaugcacaaug

SEQ ID NO: 378026 - RNA, 19 nt, Homo sapiens
  misc_RNA (1)...(19): siRNA sense strand
gcagaaaagugugacauuu

SEQ ID NO: 378027 - RNA, 19 nt, Homo sapiens
  misc_RNA (1)...(19): siRNA sense strand
gcacaucuauaugaaugga

SEQ ID NO: 378028 - RNA, 19 nt, Homo sapiens
  misc_RNA (1)...(19): siRNA sense strand
agagguuccugucagaaua

SEQ ID NO: 378029 - RNA, 19 nt, Homo sapiens
  misc_RNA (1)...(19): siRNA sense strand
gcauagacucuucuuguug

SEQ ID NO: 378030 - RNA, 19 nt, Homo sapiens
  misc_RNA (1)...(19): siRNA sense strand
ccacaaauccuaacuuacu

SEQ ID NO: 378031 - RNA, 19 nt, Homo sapiens
  misc_RNA (1)...(19): siRNA sense strand
gaccuccgcuggccauuuc

SEQ ID NO: 378032 - RNA, 19 nt, Homo sapiens
  misc_RNA (1)...(19): siRNA sense strand
caacgauccuaucuuccuu

SEQ ID NO: 378033 - RNA, 19 nt, Homo sapiens
  misc_RNA (1)...(19): siRNA sense strand
gacauaaccgggaauccua

SEQ ID NO: 378034 - RNA, 19 nt, Homo sapiens
  misc_RNA (1)...(19): siRNA sense strand
cuacaugguuccuuuuaua

SEQ ID NO: 378035 - RNA, 19 nt, Homo sapiens
  misc_RNA (1)...(19): siRNA sense strand
uggauaaagcugccaauuu

SEQ ID NO: 378036 - RNA, 19 nt, Homo sapiens
  misc_RNA (1)...(19): siRNA sense strand
aauccuacaugguuccuuu

SEQ ID NO: 378037 - RNA, 19 nt, Homo sapiens
  misc_RNA (1)...(19): siRNA sense strand
uggcagggcuugugagcuu

SEQ ID NO: 378038 - RNA, 19 nt, Homo sapiens
  misc_RNA (1)...(19): siRNA sense strand
uuauaccacuguacagaaa

SEQ ID NO: 378039 - RNA, 19 nt, Homo sapiens
  misc_RNA (1)...(19): siRNA sense strand
ggaccuauggccaaaugaa

SEQ ID NO: 378040 - RNA, 19 nt, Homo sapiens
  misc_RNA (1)...(19): siRNA sense strand
cuauaugaauggaacaaug

SEQ ID NO: 378041 - RNA, 19 nt, Homo sapiens
  misc_RNA (1)...(19): siRNA sense strand
gcacaaugccuugcacauc

SEQ ID NO: 378042 - RNA, 19 nt, Homo sapiens
  misc_RNA (1)...(19): siRNA sense strand
gaagcugacaggagaugaa

SEQ ID NO: 378043 - RNA, 19 nt, Homo sapiens
  misc_RNA (1)...(19): siRNA sense strand
gacaggagaugaaaacuuc

SEQ ID NO: 378044 - RNA, 19 nt, Homo sapiens
  misc_RNA (1)...(19): siRNA sense strand
acagggaucugccaacgau

SEQ ID NO: 378045 - RNA, 19 nt, Homo sapiens
  misc_RNA (1)...(19): siRNA sense strand
cacaaugccuugcacaucu

SEQ ID NO: 378046 - RNA, 19 nt, Homo sapiens
  misc_RNA (1)...(19): siRNA sense strand
ggauuugcuaguccacuua

SEQ ID NO: 378047 - RNA, 19 nt, Homo sapiens
  misc_RNA (1)...(19): siRNA sense strand
caucauucuucuccucuug

SEQ ID NO: 378048 - RNA, 19 nt, Homo sapiens
  misc_RNA (1)...(19): siRNA sense strand
gaauauccuucuguccaau

SEQ ID NO: 378049 - RNA, 19 nt, Homo sapiens
  misc_RNA (1)...(19): siRNA sense strand
guaucagagccauuuauaa

SEQ ID NO: 378050 - RNA, 19 nt, Homo sapiens
  misc_RNA (1)...(19): siRNA sense strand
ucauggagaaagaggauua

SEQ ID NO: 378051 - RNA, 19 nt, Homo sapiens
  misc_RNA (1)...(19): siRNA sense strand
gucaauggaugcacugcuu

SEQ ID NO: 378052 - RNA, 19 nt, Homo sapiens
  misc_RNA (1)...(19): siRNA sense strand
gucguggccuuccgucuuu

SEQ ID NO: 378053 - RNA, 19 nt, Homo sapiens
  misc_RNA (1)...(19): siRNA sense strand
ccacuugggccucaauuuc

SEQ ID NO: 378054 - RNA, 19 nt, Homo sapiens
  misc_RNA (1)...(19): siRNA sense strand
agacgacucuuggugagaa

SEQ ID NO: 378055 - RNA, 19 nt, Homo sapiens
  misc_RNA (1)...(19): siRNA sense strand
caagaaguuuauccagaag

SEQ ID NO: 378056 - RNA, 19 nt, Homo sapiens
  misc_RNA (1)...(19): siRNA sense strand
gaacaaugucccagguaca

SEQ ID NO: 378057 - RNA, 19 nt, Homo sapiens
  misc_RNA (1)...(19): siRNA sense strand
gaguuugacccaauaugaa

SEQ ID NO: 378058 - RNA, 19 nt, Homo sapiens
  misc_RNA (1)...(19): siRNA sense strand
ggauucaacuguggaaacu

SEQ ID NO: 378059 - RNA, 19 nt, Homo sapiens
  misc_RNA (1)...(19): siRNA sense strand
gccugugucuccucuaaga

SEQ ID NO: 378060 - RNA, 19 nt, Homo sapiens
  misc_RNA (1)...(19): siRNA sense strand
acaaugccuugcacaucua

SEQ ID NO: 378061 - RNA, 19 nt, Homo sapiens
  misc_RNA (1)...(19): siRNA sense strand
gauugucuguagccgauug

SEQ ID NO: 378062 - RNA, 19 nt, Homo sapiens
  misc_RNA (1)...(19): siRNA sense strand
uugucuggaugcauuauua

SEQ ID NO: 378063 - RNA, 19 nt, Homo sapiens
  misc_RNA (1)...(19): siRNA sense strand
gaccuauggccaaaugaaa

SEQ ID NO: 378064 - RNA, 19 nt, Homo sapiens
  misc_RNA (1)...(19): siRNA sense strand
ugaguuugacccaauauga

SEQ ID NO: 378065 - RNA, 19 nt, Homo sapiens
  misc_RNA (1)...(19): siRNA sense strand
caucagucuuuaugcaaug

SEQ ID NO: 378066 - RNA, 19 nt, Homo sapiens
  misc_RNA (1)...(19): siRNA sense strand
gaugcauuauuauguguca

SEQ ID NO: 378067 - RNA, 19 nt, Homo sapiens
  misc_RNA (1)...(19): siRNA sense strand
cgacaucaauauuuaugac

SEQ ID NO: 378068 - RNA, 19 nt, Homo sapiens
  misc_RNA (1)...(19): siRNA sense strand
uugcacaucuauaugaaug

SEQ ID NO: 378069 - RNA, 19 nt, Homo sapiens
  misc_RNA (1)...(19): siRNA sense strand
uguaucagagccauuuaua

SEQ ID NO: 378070 - RNA, 19 nt, Homo sapiens
  misc_RNA (1)...(19): siRNA sense strand
ggcagagguuccugucaga

SEQ ID NO: 378071 - RNA, 19 nt, Homo sapiens
  misc_RNA (1)...(19): siRNA sense strand
cauuaaguccuauuuggaa

SEQ ID NO: 378072 - RNA, 19 nt, Homo sapiens
  misc_RNA (1)...(19): siRNA sense strand
uacauuaaguccuauuugg

SEQ ID NO: 378073 - RNA, 19 nt, Homo sapiens
  misc_RNA (1)...(19): siRNA sense strand
ugccaacgauccuaucuuc

SEQ ID NO: 378074 - RNA, 19 nt, Homo sapiens
  misc_RNA (1)...(19): siRNA sense strand
gaaacaucuucgauuugag

SEQ ID NO: 378075 - RNA, 19 nt, Homo sapiens
  misc_RNA (1)...(19): siRNA sense strand
gauaaagcugccaauuuca

SEQ ID NO: 378076 - RNA, 19 nt, Homo sapiens
  misc_RNA (1)...(19): siRNA sense strand
guacaacagccaucagucu

SEQ ID NO: 378077 - RNA, 19 nt, Homo sapiens
  misc_RNA (1)...(19): siRNA sense strand
ggagagacauugauuuugc

SEQ ID NO: 378078 - RNA, 19 nt, Homo sapiens
  misc_RNA (1)...(19): siRNA sense strand
ggccuuccgucuuuuauaa

SEQ ID NO: 378079 - RNA, 19 nt, Homo sapiens
  misc_RNA (1)...(19): siRNA sense strand
ggacuggcgggaugcagaa

SEQ ID NO: 378080 - RNA, 19 nt, Homo sapiens
  misc_RNA (1)...(19): siRNA sense strand
ggaacaagaaauccagaag

SEQ ID NO: 378081 - RNA, 19 nt, Homo sapiens
  misc_RNA (1)...(19): siRNA sense strand
gcauuuguugacaguauuu

SEQ ID NO: 378082 - RNA, 19 nt, Homo sapiens
  misc_RNA (1)...(19): siRNA sense strand
gccaauuucagcuuuagaa

SEQ ID NO: 378083 - RNA, 19 nt, Homo sapiens
  misc_RNA (1)...(19): siRNA sense strand
ccaucagucuuuaugcaau

SEQ ID NO: 378084 - RNA, 19 nt, Homo sapiens
  misc_RNA (1)...(19): siRNA sense strand
gaaaucuggagagacauug

SEQ ID NO: 378085 - RNA, 19 nt, Homo sapiens
  misc_RNA (1)...(19): siRNA sense strand
uaaguccuauuuggaacaa

SEQ ID NO: 378086 - RNA, 19 nt, Homo sapiens
  misc_RNA (1)...(19): siRNA sense strand
ccccacaaauccuaacuua

SEQ ID NO: 378087 - RNA, 19 nt, Homo sapiens
  misc_RNA (1)...(19): siRNA sense strand
gccugaguuugacccaaua

SEQ ID NO: 378088 - RNA, 19 nt, Homo sapiens
  misc_RNA (1)...(19): siRNA sense strand
gaauuuugccugaguuuga

SEQ ID NO: 378089 - RNA, 19 nt, Homo sapiens
  misc_RNA (1)...(19): siRNA sense strand
ugaaaucuggagagacauu

SEQ ID NO: 378090 - RNA, 19 nt, Homo sapiens
  misc_RNA (1)...(19): siRNA sense strand
gggccucaauuucccuuca

SEQ ID NO: 378091 - RNA, 19 nt, Homo sapiens
  misc_RNA (1)...(19): siRNA sense strand
acaacagccaucagucuuu

SEQ ID NO: 378092 - RNA, 19 nt, Homo sapiens
  misc_RNA (1)...(19): siRNA sense strand
uggcauagacucuucuugu

SEQ ID NO: 378093 - RNA, 19 nt, Homo sapiens
  misc_RNA (1)...(19): siRNA sense strand
gcaucauucuucuccucuu

SEQ ID NO: 378094 - RNA, 19 nt, Homo sapiens
  misc_RNA (1)...(19): siRNA sense strand
ggacauaaccgggaauccu

SEQ ID NO: 378095 - RNA, 19 nt, Homo sapiens
  misc_RNA (1)...(19): siRNA sense strand
gcaacuucaugggauucaa

SEQ ID NO: 378096 - RNA, 19 nt, Homo sapiens
  misc_RNA (1)...(19): siRNA sense strand
guagccgauuggaggagua

SEQ ID NO: 378097 - RNA, 19 nt, Homo sapiens
  misc_RNA (1)...(19): siRNA sense strand
aaacaucuucgauuugagu

SEQ ID NO: 378098 - RNA, 19 nt, Homo sapiens
  misc_RNA (1)...(19): siRNA sense strand
gcuuguaucagagccauuu

SEQ ID NO: 378099 - RNA, 19 nt, Homo sapiens
  misc_RNA (1)...(19): siRNA sense strand
ggauuaccacagcuuguau

SEQ ID NO: 378100 - RNA, 19 nt, Homo sapiens
  misc_RNA (1)...(19): siRNA sense strand
auucagacccagacucuuu

SEQ ID NO: 378101 - RNA, 19 nt, Homo sapiens
  misc_RNA (1)...(19): siRNA sense strand
cagcucagacuaugucauc

SEQ ID NO: 378102 - RNA, 19 nt, Homo sapiens
  misc_RNA (1)...(19): siRNA sense strand
cuacauuaaguccuauuug

SEQ ID NO: 378103 - RNA, 19 nt, Homo sapiens
  misc_RNA (1)...(19): siRNA sense strand
ccgggaauccuacaugguu

SEQ ID NO: 378104 - RNA, 19 nt, Homo sapiens
  misc_RNA (1)...(19): siRNA sense strand
gagguuccugucagaauau

SEQ ID NO: 378105 - RNA, 19 nt, Homo sapiens
  misc_RNA (1)...(19): siRNA sense strand
ugaaucugguuccauggau

SEQ ID NO: 378106 - RNA, 19 nt, Homo sapiens
  misc_RNA (1)...(19): siRNA sense strand
cucuucagcugauguagaa

SEQ ID NO: 378107 - RNA, 19 nt, Homo sapiens
  misc_RNA (1)...(19): siRNA sense strand
aacaagaaauccagaagcu

SEQ ID NO: 378108 - RNA, 19 nt, Homo sapiens
  misc_RNA (1)...(19): siRNA sense strand
uaaccgggaauccuacaug

SEQ ID NO: 378109 - RNA, 19 nt, Homo sapiens
  misc_RNA (1)...(19): siRNA sense strand
cagcugauguagaauuuug

SEQ ID NO: 378110 - RNA, 19 nt, Homo sapiens
  misc_RNA (1)...(19): siRNA sense strand
gaaacacaguggaagguua

SEQ ID NO: 378111 - RNA, 19 nt, Homo sapiens
  misc_RNA (1)...(19): siRNA sense strand
ggacuuaaguaaagaagaa

SEQ ID NO: 378112 - RNA, 19 nt, Homo sapiens
  misc_RNA (1)...(19): siRNA sense strand
gcgcacaacucacccuuua

SEQ ID NO: 378113 - RNA, 19 nt, Homo sapiens
  misc_RNA (1)...(19): siRNA sense strand
gagauacaaugcugauaua

SEQ ID NO: 378114 - RNA, 19 nt, Homo sapiens
  misc_RNA (1)...(19): siRNA sense strand
gggauacacuuaugaaauu

SEQ ID NO: 378115 - RNA, 19 nt, Homo sapiens
  misc_RNA (1)...(19): siRNA sense strand
caauuuggcucaucuauuc

SEQ ID NO: 378116 - RNA, 19 nt, Homo sapiens
  misc_RNA (1)...(19): siRNA sense strand
gaaauucaauggccaaguc

SEQ ID NO: 378117 - RNA, 19 nt, Homo sapiens
  misc_RNA (1)...(19): siRNA sense strand
gaaguugguuuauuugaca

SEQ ID NO: 378118 - RNA, 19 nt, Homo sapiens
  misc_RNA (1)...(19): siRNA sense strand
gcacaacucacccuuuauu

SEQ ID NO: 378119 - RNA, 19 nt, Homo sapiens
  misc_RNA (1)...(19): siRNA sense strand
caggagaucagaagaaaua

SEQ ID NO: 378120 - RNA, 19 nt, Homo sapiens
  misc_RNA (1)...(19): siRNA sense strand
gcugauauauccacauuuc

SEQ ID NO: 378121 - RNA, 19 nt, Homo sapiens
  misc_RNA (1)...(19): siRNA sense strand
gaaguggauuucucucaug

SEQ ID NO: 378122 - RNA, 19 nt, Homo sapiens
  misc_RNA (1)...(19): siRNA sense strand
gauaauugccauagcagua

SEQ ID NO: 378123 - RNA, 19 nt, Homo sapiens
  misc_RNA (1)...(19): siRNA sense strand
caacuuugauuccacucua

SEQ ID NO: 378124 - RNA, 19 nt, Homo sapiens
  misc_RNA (1)...(19): siRNA sense strand
gaaaucuucuggacuuaag

SEQ ID NO: 378125 - RNA, 19 nt, Homo sapiens
  misc_RNA (1)...(19): siRNA sense strand
agaaagacaugcaggaaau

SEQ ID NO: 378126 - RNA, 19 nt, Homo sapiens
  misc_RNA (1)...(19): siRNA sense strand
ggagauacaaugcugauau

SEQ ID NO: 378127 - RNA, 19 nt, Homo sapiens
  misc_RNA (1)...(19): siRNA sense strand
ucaaugcuaugcugaagaa

SEQ ID NO: 378128 - RNA, 19 nt, Homo sapiens
  misc_RNA (1)...(19): siRNA sense strand
cuucacagaugcagucuuu

SEQ ID NO: 378129 - RNA, 19 nt, Homo sapiens
  misc_RNA (1)...(19): siRNA sense strand
gcaacacgccacaauuuga

SEQ ID NO: 378130 - RNA, 19 nt, Homo sapiens
  misc_RNA (1)...(19): siRNA sense strand
gcucagugcuuggaaguug

SEQ ID NO: 378131 - RNA, 19 nt, Homo sapiens
  misc_RNA (1)...(19): siRNA sense strand
caacucacccuuuauuugu

SEQ ID NO: 378132 - RNA, 19 nt, Homo sapiens
  misc_RNA (1)...(19): siRNA sense strand
cuuggaaguugguuuauuu

SEQ ID NO: 378133 - RNA, 19 nt, Homo sapiens
  misc_RNA (1)...(19): siRNA sense strand
gagaaagacaugcaggaaa

SEQ ID NO: 378134 - RNA, 19 nt, Homo sapiens
  misc_RNA (1)...(19): siRNA sense strand
acacagaaauguuuguuac

SEQ ID NO: 378135 - RNA, 19 nt, Homo sapiens
  misc_RNA (1)...(19): siRNA sense strand
ggacauaauagacaauaca

SEQ ID NO: 378136 - RNA, 19 nt, Homo sapiens
  misc_RNA (1)...(19): siRNA sense strand
ggagaggagcugccuguga

SEQ ID NO: 378137 - RNA, 19 nt, Homo sapiens
  misc_RNA (1)...(19): siRNA sense strand
gugacuccuuggaagauua

SEQ ID NO: 378138 - RNA, 19 nt, Homo sapiens
  misc_RNA (1)...(19): siRNA sense strand
ggaaguugguuuauuugac

SEQ ID NO: 378139 - RNA, 19 nt, Homo sapiens
  misc_RNA (1)...(19): siRNA sense strand
gaggaugggccaauuagga

SEQ ID NO: 378140 - RNA, 19 nt, Homo sapiens
  misc_RNA (1)...(19): siRNA sense strand
uaguguaccugagauaauu

SEQ ID NO: 378141 - RNA, 19 nt, Homo sapiens
  misc_RNA (1)...(19): siRNA sense strand
ggagaaagacaugcaggaa

SEQ ID NO: 378142 - RNA, 19 nt, Homo sapiens
  misc_RNA (1)...(19): siRNA sense strand
ugagauaauugccauagca

SEQ ID NO: 378143 - RNA, 19 nt, Homo sapiens
  misc_RNA (1)...(19): siRNA sense strand
ucacagaugcagucuuuga

SEQ ID NO: 378144 - RNA, 19 nt, Homo sapiens
  misc_RNA (1)...(19): siRNA sense strand
cccuugcgcuucuucaaua

SEQ ID NO: 378145 - RNA, 19 nt, Homo sapiens
  misc_RNA (1)...(19): siRNA sense strand
ccagaggguucucauaguc

SEQ ID NO: 378146 - RNA, 19 nt, Homo sapiens
  misc_RNA (1)...(19): siRNA sense strand
uaaucagucuguggucuaa

SEQ ID NO: 378147 - RNA, 19 nt, Homo sapiens
  misc_RNA (1)...(19): siRNA sense strand
gaccagaggguucucauag

SEQ ID NO: 378148 - RNA, 19 nt, Homo sapiens
  misc_RNA (1)...(19): siRNA sense strand
gguaggacaggaaagcuuu

SEQ ID NO: 378149 - RNA, 19 nt, Homo sapiens
  misc_RNA (1)...(19): siRNA sense strand
gcaguauggaugaagcuaa

SEQ ID NO: 378150 - RNA, 19 nt, Homo sapiens
  misc_RNA (1)...(19): siRNA sense strand
ggauacacuuaugaaauuc

SEQ ID NO: 378151 - RNA, 19 nt, Homo sapiens
  misc_RNA (1)...(19): siRNA sense strand
cugcacaccuucacagaug

SEQ ID NO: 378152 - RNA, 19 nt, Homo sapiens
  misc_RNA (1)...(19): siRNA sense strand
gugcuuggaaguugguuua

SEQ ID NO: 378153 - RNA, 19 nt, Homo sapiens
  misc_RNA (1)...(19): siRNA sense strand
ggaaauguggccagaccaa

SEQ ID NO: 378154 - RNA, 19 nt, Homo sapiens
  misc_RNA (1)...(19): siRNA sense strand
gcuuggaaguugguuuauu

SEQ ID NO: 378155 - RNA, 19 nt, Homo sapiens
  misc_RNA (1)...(19): siRNA sense strand
gggacugcuucuuaucuga

SEQ ID NO: 378156 - RNA, 19 nt, Homo sapiens
  misc_RNA (1)...(19): siRNA sense strand
gagaucagaagaaauacug

SEQ ID NO: 378157 - RNA, 19 nt, Homo sapiens
  misc_RNA (1)...(19): siRNA sense strand
guuacugguugcacucauu

SEQ ID NO: 378158 - RNA, 19 nt, Homo sapiens
  misc_RNA (1)...(19): siRNA sense strand
acagaaauguuuguuacug

SEQ ID NO: 378159 - RNA, 19 nt, Homo sapiens
  misc_RNA (1)...(19): siRNA sense strand
cuucuggacuuaaguaaag

SEQ ID NO: 378160 - RNA, 19 nt, Homo sapiens
  misc_RNA (1)...(19): siRNA sense strand
augcuaugcugaagaauau

SEQ ID NO: 378161 - RNA, 19 nt, Homo sapiens
  misc_RNA (1)...(19): siRNA sense strand
uggcaaagcgcacaacuca

SEQ ID NO: 378162 - RNA, 19 nt, Homo sapiens
  misc_RNA (1)...(19): siRNA sense strand
auacaaugcugauauaucc

SEQ ID NO: 378163 - RNA, 19 nt, Homo sapiens
  misc_RNA (1)...(19): siRNA sense strand
gaaagacaugcaggaaaug

SEQ ID NO: 378164 - RNA, 19 nt, Homo sapiens
  misc_RNA (1)...(19): siRNA sense strand
acaacucacccuuuauuug

SEQ ID NO: 378165 - RNA, 19 nt, Homo sapiens
  misc_RNA (1)...(19): siRNA sense strand
guaugacccugcuguucga

SEQ ID NO: 378166 - RNA, 19 nt, Homo sapiens
  misc_RNA (1)...(19): siRNA sense strand
ggugcaacgucuuccugaa

SEQ ID NO: 378167 - RNA, 19 nt, Homo sapiens
  misc_RNA (1)...(19): siRNA sense strand
ccagaauccuaaucagucu

SEQ ID NO: 378168 - RNA, 19 nt, Homo sapiens
  misc_RNA (1)...(19): siRNA sense strand
uaaccagccucuccucacu

SEQ ID NO: 378169 - RNA, 19 nt, Homo sapiens
  misc_RNA (1)...(19): siRNA sense strand
gugccacuguugaggcuuu

SEQ ID NO: 378170 - RNA, 19 nt, Homo sapiens
  misc_RNA (1)...(19): siRNA sense strand
ggcaacacgccacaauuug

SEQ ID NO: 378171 - RNA, 19 nt, Homo sapiens
  misc_RNA (1)...(19): siRNA sense strand
gcuaugcugaagaauauga

SEQ ID NO: 378172 - RNA, 19 nt, Homo sapiens
  misc_RNA (1)...(19): siRNA sense strand
ggacacacuauuacucagu

SEQ ID NO: 378173 - RNA, 19 nt, Homo sapiens
  misc_RNA (1)...(19): siRNA sense strand
gauccagaagcaacuuuga

SEQ ID NO: 378174 - RNA, 19 nt, Homo sapiens
  misc_RNA (1)...(19): siRNA sense strand
gacugcuucuuaucugauu

SEQ ID NO: 378175 - RNA, 19 nt, Homo sapiens
  misc_RNA (1)...(19): siRNA sense strand
caaccugggauacacuuau

SEQ ID NO: 378176 - RNA, 19 nt, Homo sapiens
  misc_RNA (1)...(19): siRNA sense strand
uuugagaagugguaugugu

SEQ ID NO: 378177 - RNA, 19 nt, Homo sapiens
  misc_RNA (1)...(19): siRNA sense strand
gggcucaauucccaagaca

SEQ ID NO: 378178 - RNA, 19 nt, Homo sapiens
  misc_RNA (1)...(19): siRNA sense strand
gaaauguggccagaccaau

SEQ ID NO: 378179 - RNA, 19 nt, Homo sapiens
  misc_RNA (1)...(19): siRNA sense strand
guugaggcuuugagaagug

SEQ ID NO: 378180 - RNA, 19 nt, Homo sapiens
  misc_RNA (1)...(19): siRNA sense strand
ucucugggcuguaucuucu

SEQ ID NO: 378181 - RNA, 19 nt, Homo sapiens
  misc_RNA (1)...(19): siRNA sense strand
aaugcuaugcugaagaaua

SEQ ID NO: 378182 - RNA, 19 nt, Homo sapiens
  misc_RNA (1)...(19): siRNA sense strand
ugagaagugguauguguug

SEQ ID NO: 378183 - RNA, 19 nt, Homo sapiens
  misc_RNA (1)...(19): siRNA sense strand
ggaaaaugccccuauugga

SEQ ID NO: 378184 - RNA, 19 nt, Homo sapiens
  misc_RNA (1)...(19): siRNA sense strand
uaauaagcccaaacucugu

SEQ ID NO: 378185 - RNA, 19 nt, Homo sapiens
  misc_RNA (1)...(19): siRNA sense strand
gccacaauuugagaacauu

SEQ ID NO: 378186 - RNA, 19 nt, Homo sapiens
  misc_RNA (1)...(19): siRNA sense strand
gcucaauucccaagacagu

SEQ ID NO: 378187 - RNA, 19 nt, Homo sapiens
  misc_RNA (1)...(19): siRNA sense strand
caccgaggaugggccaauu

SEQ ID NO: 378188 - RNA, 19 nt, Homo sapiens
  misc_RNA (1)...(19): siRNA sense strand
ccagaagcaacuuugauuc

SEQ ID NO: 378189 - RNA, 19 nt, Homo sapiens
  misc_RNA (1)...(19): siRNA sense strand
cugcacggaugacuugaug

SEQ ID NO: 378190 - RNA, 19 nt, Homo sapiens
  misc_RNA (1)...(19): siRNA sense strand
accaggagaucagaagaaa

SEQ ID NO: 378191 - RNA, 19 nt, Homo sapiens
  misc_RNA (1)...(19): siRNA sense strand
aguaguuggcgcuuuguua

SEQ ID NO: 378192 - RNA, 19 nt, Homo sapiens
  misc_RNA (1)...(19): siRNA sense strand
gaguuuaguguaccugaga

SEQ ID NO: 378193 - RNA, 19 nt, Homo sapiens
  misc_RNA (1)...(19): siRNA sense strand
uaucugcacggaugacuug

SEQ ID NO: 378194 - RNA, 19 nt, Homo sapiens
  misc_RNA (1)...(19): siRNA sense strand
aaguggauuucucucauga

SEQ ID NO: 378195 - RNA, 19 nt, Homo sapiens
  misc_RNA (1)...(19): siRNA sense strand
ugaccagaggguucucaua

SEQ ID NO: 378196 - RNA, 19 nt, Homo sapiens
  misc_RNA (1)...(19): siRNA sense strand
ggacugcuucuuaucugau

SEQ ID NO: 378197 - RNA, 19 nt, Homo sapiens
  misc_RNA (1)...(19): siRNA sense strand
augcugauauauccacauu

SEQ ID NO: 378198 - RNA, 19 nt, Homo sapiens
  misc_RNA (1)...(19): siRNA sense strand
uggcucaucuauuccugaa

SEQ ID NO: 378199 - RNA, 19 nt, Homo sapiens
  misc_RNA (1)...(19): siRNA sense strand
acaauuuggcucaucuauu

SEQ ID NO: 378200 - RNA, 19 nt, Homo sapiens
  misc_RNA (1)...(19): siRNA sense strand
uauuccaacucuacaaaca

SEQ ID NO: 378201 - RNA, 19 nt, Homo sapiens
  misc_RNA (1)...(19): siRNA sense strand
ggucugugacuccuuggaa

SEQ ID NO: 378202 - RNA, 19 nt, Homo sapiens
  misc_RNA (1)...(19): siRNA sense strand
caaacucugucuuuucuca

SEQ ID NO: 378203 - RNA, 19 nt, Homo sapiens
  misc_RNA (1)...(19): siRNA sense strand
ucacugcaacggcaauuuc

SEQ ID NO: 378204 - RNA, 19 nt, Homo sapiens
  misc_RNA (1)...(19): siRNA sense strand
ggcaauuucucaggacaca

SEQ ID NO: 378205 - RNA, 19 nt, Homo sapiens
  misc_RNA (1)...(19): siRNA sense strand
guaguuggcgcuuuguuac

SEQ ID NO: 378206 - RNA, 19 nt, Homo sapiens
  misc_RNA (1)...(19): siRNA sense strand
uagcaguaguuggcgcuuu

SEQ ID NO: 378207 - RNA, 19 nt, Homo sapiens
  misc_RNA (1)...(19): siRNA sense strand
ccagucaccaacacagaaa

SEQ ID NO: 378208 - RNA, 19 nt, Homo sapiens
  misc_RNA (1)...(19): siRNA sense strand
uauauccacauuuccauug

SEQ ID NO: 378209 - RNA, 19 nt, Homo sapiens
  misc_RNA (1)...(19): siRNA sense strand
gaggagauacaaugcugau

SEQ ID NO: 378210 - RNA, 19 nt, Homo sapiens
  misc_RNA (1)...(19): siRNA sense strand
gaagaaagcuauggcaauu

SEQ ID NO: 378211 - RNA, 19 nt, Homo sapiens
  misc_RNA (1)...(19): siRNA sense strand
gcaucugucuggcuguuua

SEQ ID NO: 378212 - RNA, 19 nt, Homo sapiens
  misc_RNA (1)...(19): siRNA sense strand
caucgaaucuugcgaacaa

SEQ ID NO: 378213 - RNA, 19 nt, Homo sapiens
  misc_RNA (1)...(19): siRNA sense strand
gaucaauggucucagaaau

SEQ ID NO: 378214 - RNA, 19 nt, Homo sapiens
  misc_RNA (1)...(19): siRNA sense strand
caaagcgcauggagacuaa

SEQ ID NO: 378215 - RNA, 19 nt, Homo sapiens
  misc_RNA (1)...(19): siRNA sense strand
gaauuugaagccuacauua

SEQ ID NO: 378216 - RNA, 19 nt, Homo sapiens
  misc_RNA (1)...(19): siRNA sense strand
gaacauggaauugugguuu

SEQ ID NO: 378217 - RNA, 19 nt, Homo sapiens
  misc_RNA (1)...(19): siRNA sense strand
ugaaauaguuguccuagca

SEQ ID NO: 378218 - RNA, 19 nt, Homo sapiens
  misc_RNA (1)...(19): siRNA sense strand
ggagugacccugaauguuc

SEQ ID NO: 378219 - RNA, 19 nt, Homo sapiens
  misc_RNA (1)...(19): siRNA sense strand
gaacaugcucauugccuuu

SEQ ID NO: 378220 - RNA, 19 nt, Homo sapiens
  misc_RNA (1)...(19): siRNA sense strand
ggcaauugcugaugcuuug

SEQ ID NO: 378221 - RNA, 19 nt, Homo sapiens
  misc_RNA (1)...(19): siRNA sense strand
ucaauggucucagaaauuc

SEQ ID NO: 378222 - RNA, 19 nt, Homo sapiens
  misc_RNA (1)...(19): siRNA sense strand
gcaaagcgcauggagacua

SEQ ID NO: 378223 - RNA, 19 nt, Homo sapiens
  misc_RNA (1)...(19): siRNA sense strand
cagaauuccuucagagaga

SEQ ID NO: 378224 - RNA, 19 nt, Homo sapiens
  misc_RNA (1)...(19): siRNA sense strand
ccaaagggaggaugugaaa

SEQ ID NO: 378225 - RNA, 19 nt, Homo sapiens
  misc_RNA (1)...(19): siRNA sense strand
gugaagaacaugcucauug

SEQ ID NO: 378226 - RNA, 19 nt, Homo sapiens
  misc_RNA (1)...(19): siRNA sense strand
ggaauuugaagccuacauu

SEQ ID NO: 378227 - RNA, 19 nt, Homo sapiens
  misc_RNA (1)...(19): siRNA sense strand
uaagaaagcccacaaaucc

SEQ ID NO: 378228 - RNA, 19 nt, Homo sapiens
  misc_RNA (1)...(19): siRNA sense strand
gcgaacaacacgauacuug

SEQ ID NO: 378229 - RNA, 19 nt, Homo sapiens
  misc_RNA (1)...(19): siRNA sense strand
aaaggacucugcuaugcuu

SEQ ID NO: 378230 - RNA, 19 nt, Homo sapiens
  misc_RNA (1)...(19): siRNA sense strand
gaauugugguuuucucuuu

SEQ ID NO: 378231 - RNA, 19 nt, Homo sapiens
  misc_RNA (1)...(19): siRNA sense strand
gugacuuugugaaggauua

SEQ ID NO: 378232 - RNA, 19 nt, Homo sapiens
  misc_RNA (1)...(19): siRNA sense strand
gagcuggagugacccugaa

SEQ ID NO: 378233 - RNA, 19 nt, Homo sapiens
  misc_RNA (1)...(19): siRNA sense strand
caugcagccuggaauuuga

SEQ ID NO: 378234 - RNA, 19 nt, Homo sapiens
  misc_RNA (1)...(19): siRNA sense strand
gcagaggggacaugaaaua

SEQ ID NO: 378235 - RNA, 19 nt, Homo sapiens
  misc_RNA (1)...(19): siRNA sense strand
ugaagaacaugcucauugc

SEQ ID NO: 378236 - RNA, 19 nt, Homo sapiens
  misc_RNA (1)...(19): siRNA sense strand
aaagggaggaugugaaaga

SEQ ID NO: 378237 - RNA, 19 nt, Homo sapiens
  misc_RNA (1)...(19): siRNA sense strand
agacguacccugugccauu

SEQ ID NO: 378238 - RNA, 19 nt, Homo sapiens
  misc_RNA (1)...(19): siRNA sense strand
cgugauugguuuccucuug

SEQ ID NO: 378239 - RNA, 19 nt, Homo sapiens
  misc_RNA (1)...(19): siRNA sense strand
gacccugaauguucuggaa

SEQ ID NO: 378240 - RNA, 19 nt, Homo sapiens
  misc_RNA (1)...(19): siRNA sense strand
gaggggacaugaaauaguu

SEQ ID NO: 378241 - RNA, 19 nt, Homo sapiens
  misc_RNA (1)...(19): siRNA sense strand
gugaucagauggacaaugc

SEQ ID NO: 378242 - RNA, 19 nt, Homo sapiens
  misc_RNA (1)...(19): siRNA sense strand
cccacgaccucaccuggua

SEQ ID NO: 378243 - RNA, 19 nt, Homo sapiens
  misc_RNA (1)...(19): siRNA sense strand
gaugacccgugccuuuauc

SEQ ID NO: 378244 - RNA, 19 nt, Homo sapiens
  misc_RNA (1)...(19): siRNA sense strand
ccaggccucucuccucuca

SEQ ID NO: 378245 - RNA, 19 nt, Homo sapiens
  misc_RNA (1)...(19): siRNA sense strand
cuucaucaccuuuaaaugu

SEQ ID NO: 378246 - RNA, 19 nt, Homo sapiens
  misc_RNA (1)...(19): siRNA sense strand
gaucagauggacaaugcaa

SEQ ID NO: 378247 - RNA, 19 nt, Homo sapiens
  misc_RNA (1)...(19): siRNA sense strand
caucaugcccaauaugguu

SEQ ID NO: 378248 - RNA, 19 nt, Homo sapiens
  misc_RNA (1)...(19): siRNA sense strand
gaaauuccagagaagaaag

SEQ ID NO: 378249 - RNA, 19 nt, Homo sapiens
  misc_RNA (1)...(19): siRNA sense strand
uggagaacauggaauugug

SEQ ID NO: 378250 - RNA, 19 nt, Homo sapiens
  misc_RNA (1)...(19): siRNA sense strand
ccuuggacgugauugguuu

SEQ ID NO: 378251 - RNA, 19 nt, Homo sapiens
  misc_RNA (1)...(19): siRNA sense strand
ccgaugacccgugccuuua

SEQ ID NO: 378252 - RNA, 19 nt, Homo sapiens
  misc_RNA (1)...(19): siRNA sense strand
agaaagcuauggcaauugc

SEQ ID NO: 378253 - RNA, 19 nt, Homo sapiens
  misc_RNA (1)...(19): siRNA sense strand
cagaaauuccagagaagaa

SEQ ID NO: 378254 - RNA, 19 nt, Homo sapiens
  misc_RNA (1)...(19): siRNA sense strand
uuugaagccuacauuaaug

SEQ ID NO: 378255 - RNA, 19 nt, Homo sapiens
  misc_RNA (1)...(19): siRNA sense strand
ggaucaauggucucagaaa

SEQ ID NO: 378256 - RNA, 19 nt, Homo sapiens
  misc_RNA (1)...(19): siRNA sense strand
gucuggcuguucccacuua

SEQ ID NO: 378257 - RNA, 19 nt, Homo sapiens
  misc_RNA (1)...(19): siRNA sense strand
guuaagaaagcccacaaau

SEQ ID NO: 378258 - RNA, 19 nt, Homo sapiens
  misc_RNA (1)...(19): siRNA sense strand
gagugacccugaauguucu

SEQ ID NO: 378259 - RNA, 19 nt, Homo sapiens
  misc_RNA (1)...(19): siRNA sense strand
gcacaacaaggagcucaug

SEQ ID NO: 378260 - RNA, 19 nt, Homo sapiens
  misc_RNA (1)...(19): siRNA sense strand
gacguacccugugccauuc

SEQ ID NO: 378261 - RNA, 19 nt, Homo sapiens
  misc_RNA (1)...(19): siRNA sense strand
uuaagaaagcccacaaauc

SEQ ID NO: 378262 - RNA, 19 nt, Homo sapiens
  misc_RNA (1)...(19): siRNA sense strand
gugaugaugcccuuguuug

SEQ ID NO: 378263 - RNA, 19 nt, Homo sapiens
  misc_RNA (1)...(19): siRNA sense strand
acaaauccaagacccauug

SEQ ID NO: 378264 - RNA, 19 nt, Homo sapiens
  misc_RNA (1)...(19): siRNA sense strand
guuagucucgggcauaaug

SEQ ID NO: 378265 - RNA, 19 nt, Homo sapiens
  misc_RNA (1)...(19): siRNA sense strand
gaacccgaccaucgaaucu

SEQ ID NO: 378266 - RNA, 19 nt, Homo sapiens
  misc_RNA (1)...(19): siRNA sense strand
ugggaucaauggucucaga

SEQ ID NO: 378267 - RNA, 19 nt, Homo sapiens
  misc_RNA (1)...(19): siRNA sense strand
agaaagcccacaaauccaa

SEQ ID NO: 378268 - RNA, 19 nt, Homo sapiens
  misc_RNA (1)...(19): siRNA sense strand
caccugacgccucguugua

SEQ ID NO: 378269 - RNA, 19 nt, Homo sapiens
  misc_RNA (1)...(19): siRNA sense strand
ucaacugccuucaccaaaa

SEQ ID NO: 378270 - RNA, 19 nt, Homo sapiens
  misc_RNA (1)...(19): siRNA sense strand
ugaauguucuggaaaugac

SEQ ID NO: 378271 - RNA, 19 nt, Homo sapiens
  misc_RNA (1)...(19): siRNA sense strand
ggugaugaugcccuuguuu

SEQ ID NO: 378272 - RNA, 19 nt, Homo sapiens
  misc_RNA (1)...(19): siRNA sense strand
agaagaaagcuauggcaau

SEQ ID NO: 378273 - RNA, 19 nt, Homo sapiens
  misc_RNA (1)...(19): siRNA sense strand
caacugccuucaccaaaau

SEQ ID NO: 378274 - RNA, 19 nt, Homo sapiens
  misc_RNA (1)...(19): siRNA sense strand
aggccucucuccucucauu

SEQ ID NO: 378275 - RNA, 19 nt, Homo sapiens
  misc_RNA (1)...(19): siRNA sense strand
cuauugagcucugcaucug

SEQ ID NO: 378276 - RNA, 19 nt, Homo sapiens
  misc_RNA (1)...(19): siRNA sense strand
ugugcgacgugguuuauuc

SEQ ID NO: 378277 - RNA, 19 nt, Homo sapiens
  misc_RNA (1)...(19): siRNA sense strand
ccaugcagccuggaauuug

SEQ ID NO: 378278 - RNA, 19 nt, Homo sapiens
  misc_RNA (1)...(19): siRNA sense strand
ucaucaccuuuaaauguug

SEQ ID NO: 378279 - RNA, 19 nt, Homo sapiens
  misc_RNA (1)...(19): siRNA sense strand
uuaaguggcuaccccaaaa

SEQ ID NO: 378280 - RNA, 19 nt, Homo sapiens
  misc_RNA (1)...(19): siRNA sense strand
ggaacccgaccaucgaauc

SEQ ID NO: 378281 - RNA, 19 nt, Homo sapiens
  misc_RNA (1)...(19): siRNA sense strand
gcugggaagauacuguuga

SEQ ID NO: 378282 - RNA, 19 nt, Homo sapiens
  misc_RNA (1)...(19): siRNA sense strand
ggcccaucaugcccaauau

SEQ ID NO: 378283 - RNA, 19 nt, Homo sapiens
  misc_RNA (1)...(19): siRNA sense strand
caaauccaagacccauuga

SEQ ID NO: 378284 - RNA, 19 nt, Homo sapiens
  misc_RNA (1)...(19): siRNA sense strand
gccaugcagccuggaauuu

SEQ ID NO: 378285 - RNA, 19 nt, Homo sapiens
  misc_RNA (1)...(19): siRNA sense strand
gcaccugacgccucguugu

SEQ ID NO: 378286 - RNA, 19 nt, Homo sapiens
  misc_RNA (1)...(19): siRNA sense strand
ucucuccucucauucagau

SEQ ID NO: 378287 - RNA, 19 nt, Homo sapiens
  misc_RNA (1)...(19): siRNA sense strand
uggccuucaucaccuuuaa

SEQ ID NO: 378288 - RNA, 19 nt, Homo sapiens
  misc_RNA (1)...(19): siRNA sense strand
ggguggaguuugugaugag

SEQ ID NO: 378289 - RNA, 19 nt, Homo sapiens
  misc_RNA (1)...(19): siRNA sense strand
ucagaaauuccagagaaga

SEQ ID NO: 378290 - RNA, 19 nt, Homo sapiens
  misc_RNA (1)...(19): siRNA sense strand
caucaccuuuaaauguugu

SEQ ID NO: 378291 - RNA, 19 nt, Homo sapiens
  misc_RNA (1)...(19): siRNA sense strand
uuacaaggagaacaucaug

SEQ ID NO: 378292 - RNA, 19 nt, Homo sapiens
  misc_RNA (1)...(19): siRNA sense strand
agaaauuccagagaagaaa

SEQ ID NO: 378293 - RNA, 19 nt, Homo sapiens
  misc_RNA (1)...(19): siRNA sense strand
ccacuguauucuucuugca

SEQ ID NO: 378294 - RNA, 19 nt, Homo sapiens
  misc_RNA (1)...(19): siRNA sense strand
aaaguuacaaggagaacau

SEQ ID NO: 378295 - RNA, 19 nt, Homo sapiens
  misc_RNA (1)...(19): siRNA sense strand
guucccaugguguuuauga

SEQ ID NO: 378296 - RNA, 19 nt, Homo sapiens
  misc_RNA (1)...(19): siRNA sense strand
ucagauggacaaugcaaag

SEQ ID NO: 378297 - RNA, 19 nt, Homo sapiens
  misc_RNA (1)...(19): siRNA sense strand
gaugaugcccuuguuuggu

SEQ ID NO: 378298 - RNA, 19 nt, Homo sapiens
  misc_RNA (1)...(19): siRNA sense strand
uccacuaucccaggaauuu

SEQ ID NO: 378299 - RNA, 19 nt, Homo sapiens
  misc_RNA (1)...(19): siRNA sense strand
gaguuaagaaagcccacaa

SEQ ID NO: 378300 - RNA, 19 nt, Homo sapiens
  misc_RNA (1)...(19): siRNA sense strand
ccugaauguucuggaaaug

SEQ ID NO: 378301 - RNA, 19 nt, Homo sapiens
  misc_RNA (1)...(19): siRNA sense strand
ggacucugcuaugcuuuug

SEQ ID NO: 378302 - RNA, 19 nt, Homo sapiens
  misc_RNA (1)...(19): siRNA sense strand
cccaugguguuuaugaaag

SEQ ID NO: 378303 - RNA, 19 nt, Homo sapiens
  misc_RNA (1)...(19): siRNA sense strand
cgaugacccgugccuuuau

SEQ ID NO: 378304 - RNA, 19 nt, Homo sapiens
  misc_RNA (1)...(19): siRNA sense strand
ccacuuacugcacaacaag

SEQ ID NO: 378305 - RNA, 19 nt, Homo sapiens
  misc_RNA (1)...(19): siRNA sense strand
cugggaagauacuguugau

SEQ ID NO: 378306 - RNA, 19 nt, Homo sapiens
  misc_RNA (1)...(19): siRNA sense strand
cagcagaggggacaugaaa

SEQ ID NO: 378307 - RNA, 19 nt, Homo sapiens
  misc_RNA (1)...(19): siRNA sense strand
gcugacggacccuuuccuu

SEQ ID NO: 378308 - RNA, 19 nt, Homo sapiens
  misc_RNA (1)...(19): siRNA sense strand
ggaaagaaacaaaggauua

SEQ ID NO: 378309 - RNA, 19 nt, Homo sapiens
  misc_RNA (1)...(19): siRNA sense strand
gaaggucacugaugccaua

SEQ ID NO: 378310 - RNA, 19 nt, Homo sapiens
  misc_RNA (1)...(19): siRNA sense strand
cagcagagauguacagaaa

SEQ ID NO: 378311 - RNA, 19 nt, Homo sapiens
  misc_RNA (1)...(19): siRNA sense strand
gaacuaagcgucuuguaga

SEQ ID NO: 378312 - RNA, 19 nt, Homo sapiens
  misc_RNA (1)...(19): siRNA sense strand
ugaaggagguaucuuuaaa

SEQ ID NO: 378313 - RNA, 19 nt, Homo sapiens
  misc_RNA (1)...(19): siRNA sense strand
gaagacucauguagauauu

SEQ ID NO: 378314 - RNA, 19 nt, Homo sapiens
  misc_RNA (1)...(19): siRNA sense strand
ggagguaucuuuaaaauag

SEQ ID NO: 378315 - RNA, 19 nt, Homo sapiens
  misc_RNA (1)...(19): siRNA sense strand
ggagcacucugaauuuguu

SEQ ID NO: 378316 - RNA, 19 nt, Homo sapiens
  misc_RNA (1)...(19): siRNA sense strand
gccaugaguucuugauauu

SEQ ID NO: 378317 - RNA, 19 nt, Homo sapiens
  misc_RNA (1)...(19): siRNA sense strand
gaggagcacucugaauuug

SEQ ID NO: 378318 - RNA, 19 nt, Homo sapiens
  misc_RNA (1)...(19): siRNA sense strand
gaccggaaguuugcagaua

SEQ ID NO: 378319 - RNA, 19 nt, Homo sapiens
  misc_RNA (1)...(19): siRNA sense strand
gcugaagacucauguagau

SEQ ID NO: 378320 - RNA, 19 nt, Homo sapiens
  misc_RNA (1)...(19): siRNA sense strand
gggcagaucuaguaaaugc

SEQ ID NO: 378321 - RNA, 19 nt, Homo sapiens
  misc_RNA (1)...(19): siRNA sense strand
gaguagacuugguguuuga

SEQ ID NO: 378322 - RNA, 19 nt, Homo sapiens
  misc_RNA (1)...(19): siRNA sense strand
caugaguucuugauauuug

SEQ ID NO: 378323 - RNA, 19 nt, Homo sapiens
  misc_RNA (1)...(19): siRNA sense strand
gaaguuugcagauauagga

SEQ ID NO: 378324 - RNA, 19 nt, Homo sapiens
  misc_RNA (1)...(19): siRNA sense strand
cauuguaggucguggcaua

SEQ ID NO: 378325 - RNA, 19 nt, Homo sapiens
  misc_RNA (1)...(19): siRNA sense strand
ugaaaggccugcaagaagu

SEQ ID NO: 378326 - RNA, 19 nt, Homo sapiens
  misc_RNA (1)...(19): siRNA sense strand
ugagucagguugcagauau

SEQ ID NO: 378327 - RNA, 19 nt, Homo sapiens
  misc_RNA (1)...(19): siRNA sense strand
aaaggaagcacccaaagaa

SEQ ID NO: 378328 - RNA, 19 nt, Homo sapiens
  misc_RNA (1)...(19): siRNA sense strand
cgugcaggcuuucaaguuu

SEQ ID NO: 378329 - RNA, 19 nt, Homo sapiens
  misc_RNA (1)...(19): siRNA sense strand
gaaacaaaggauuauggaa

SEQ ID NO: 378330 - RNA, 19 nt, Homo sapiens
  misc_RNA (1)...(19): siRNA sense strand
guaugaaggagguaucuuu

SEQ ID NO: 378331 - RNA, 19 nt, Homo sapiens
  misc_RNA (1)...(19): siRNA sense strand
gaaggaaagaaacaaagga

SEQ ID NO: 378332 - RNA, 19 nt, Homo sapiens
  misc_RNA (1)...(19): siRNA sense strand
gaaggagaccaaucugugu

SEQ ID NO: 378333 - RNA, 19 nt, Homo sapiens
  misc_RNA (1)...(19): siRNA sense strand
ggaacuaagcgucuuguag

SEQ ID NO: 378334 - RNA, 19 nt, Homo sapiens
  misc_RNA (1)...(19): siRNA sense strand
guagaaggaacuauuaauc

SEQ ID NO: 378335 - RNA, 19 nt, Homo sapiens
  misc_RNA (1)...(19): siRNA sense strand
uaaaggaagcacccaaaga

SEQ ID NO: 378336 - RNA, 19 nt, Homo sapiens
  misc_RNA (1)...(19): siRNA sense strand
ccggaaguuugcagauaua

SEQ ID NO: 378337 - RNA, 19 nt, Homo sapiens
  misc_RNA (1)...(19): siRNA sense strand
uuauacagcuuugccauug

SEQ ID NO: 378338 - RNA, 19 nt, Homo sapiens
  misc_RNA (1)...(19): siRNA sense strand
guacaauagcccacaagaa

SEQ ID NO: 378339 - RNA, 19 nt, Homo sapiens
  misc_RNA (1)...(19): siRNA sense strand
ggaagcaggaggagauaau

SEQ ID NO: 378340 - RNA, 19 nt, Homo sapiens
  misc_RNA (1)...(19): siRNA sense strand
uaugaaggagguaucuuua

SEQ ID NO: 378341 - RNA, 19 nt, Homo sapiens
  misc_RNA (1)...(19): siRNA sense strand
caaaggauuauggaacuaa

SEQ ID NO: 378342 - RNA, 19 nt, Homo sapiens
  misc_RNA (1)...(19): siRNA sense strand
caauagcccacaagaaguu

SEQ ID NO: 378343 - RNA, 19 nt, Homo sapiens
  misc_RNA (1)...(19): siRNA sense strand
gaagugggccugccuuugc

SEQ ID NO: 378344 - RNA, 19 nt, Homo sapiens
  misc_RNA (1)...(19): siRNA sense strand
gauauaggaaacacaguga

SEQ ID NO: 378345 - RNA, 19 nt, Homo sapiens
  misc_RNA (1)...(19): siRNA sense strand
gaccgcgucuucugaguca

SEQ ID NO: 378346 - RNA, 19 nt, Homo sapiens
  misc_RNA (1)...(19): siRNA sense strand
ugaagacucauguagauau

SEQ ID NO: 378347 - RNA, 19 nt, Homo sapiens
  misc_RNA (1)...(19): siRNA sense strand
ggaagcguauuugaguaga

SEQ ID NO: 378348 - RNA, 19 nt, Homo sapiens
  misc_RNA (1)...(19): siRNA sense strand
ugaggagcacucugaauuu

SEQ ID NO: 378349 - RNA, 19 nt, Homo sapiens
  misc_RNA (1)...(19): siRNA sense strand
agaaggaacuauuaaucca

SEQ ID NO: 378350 - RNA, 19 nt, Homo sapiens
  misc_RNA (1)...(19): siRNA sense strand
ugaguagacuugguguuug

SEQ ID NO: 378351 - RNA, 19 nt, Homo sapiens
  misc_RNA (1)...(19): siRNA sense strand
uacaauagcccacaagaag

SEQ ID NO: 378352 - RNA, 19 nt, Homo sapiens
  misc_RNA (1)...(19): siRNA sense strand
aagcaugaaaccagaauuu

SEQ ID NO: 378353 - RNA, 19 nt, Homo sapiens
  misc_RNA (1)...(19): siRNA sense strand
gagucagguugcagauauu

SEQ ID NO: 378354 - RNA, 19 nt, Homo sapiens
  misc_RNA (1)...(19): siRNA sense strand
gugcaggcuuucaaguuug

SEQ ID NO: 378355 - RNA, 19 nt, Homo sapiens
  misc_RNA (1)...(19): siRNA sense strand
accaguggaucuaguguuu

SEQ ID NO: 378356 - RNA, 19 nt, Homo sapiens
  misc_RNA (1)...(19): siRNA sense strand
gcagagauguacagaaaag

SEQ ID NO: 378357 - RNA, 19 nt, Homo sapiens
  misc_RNA (1)...(19): siRNA sense strand
gaaaggccugcaagaagug

SEQ ID NO: 378358 - RNA, 19 nt, Homo sapiens
  misc_RNA (1)...(19): siRNA sense strand
caaucaaauuccaaugcuu

SEQ ID NO: 378359 - RNA, 19 nt, Homo sapiens
  misc_RNA (1)...(19): siRNA sense strand
cugaauuuguuguugguuu

SEQ ID NO: 378360 - RNA, 19 nt, Homo sapiens
  misc_RNA (1)...(19): siRNA sense strand
uuuggaaacuguugagguu

SEQ ID NO: 378361 - RNA, 19 nt, Homo sapiens
  misc_RNA (1)...(19): siRNA sense strand
ggaaacuguugagguucuu

SEQ ID NO: 378362 - RNA, 19 nt, Homo sapiens
  misc_RNA (1)...(19): siRNA sense strand
gugaaaggccugcaagaag

SEQ ID NO: 378363 - RNA, 19 nt, Homo sapiens
  misc_RNA (1)...(19): siRNA sense strand
ugccaugaguucuugauau

SEQ ID NO: 378364 - RNA, 19 nt, Homo sapiens
  misc_RNA (1)...(19): siRNA sense strand
acaaaggauuauggaacua

SEQ ID NO: 378365 - RNA, 19 nt, Homo sapiens
  misc_RNA (1)...(19): siRNA sense strand
gugucuaucugcugauguu

SEQ ID NO: 378366 - RNA, 19 nt, Homo sapiens
  misc_RNA (1)...(19): siRNA sense strand
ggagugccuuauacagcuu

SEQ ID NO: 378367 - RNA, 19 nt, Homo sapiens
  misc_RNA (1)...(19): siRNA sense strand
ucaggagaaugucuuugug

SEQ ID NO: 378368 - RNA, 19 nt, Homo sapiens
  misc_RNA (1)...(19): siRNA sense strand
caaccaaucaaauuccaau

SEQ ID NO: 378369 - RNA, 19 nt, Homo sapiens
  misc_RNA (1)...(19): siRNA sense strand
ggaagcagcagagauguac

SEQ ID NO: 378370 - RNA, 19 nt, Homo sapiens
  misc_RNA (1)...(19): siRNA sense strand
uauaggaaacacagugaaa

SEQ ID NO: 378371 - RNA, 19 nt, Homo sapiens
  misc_RNA (1)...(19): siRNA sense strand
ggaagcacccaaagaacuc

SEQ ID NO: 378372 - RNA, 19 nt, Homo sapiens
  misc_RNA (1)...(19): siRNA sense strand
ccaaucaaauuccaaugcu

SEQ ID NO: 378373 - RNA, 19 nt, Homo sapiens
  misc_RNA (1)...(19): siRNA sense strand
uauaaaggaagcacccaaa

SEQ ID NO: 378374 - RNA, 19 nt, Homo sapiens
  misc_RNA (1)...(19): siRNA sense strand
ugggaagcguauuugagua

SEQ ID NO: 378375 - RNA, 19 nt, Homo sapiens
  misc_RNA (1)...(19): siRNA sense strand
gcacucugaauuuguuguu

SEQ ID NO: 378376 - RNA, 19 nt, Homo sapiens
  misc_RNA (1)...(19): siRNA sense strand
cugaggagcacucugaauu

SEQ ID NO: 378377 - RNA, 19 nt, Homo sapiens
  misc_RNA (1)...(19): siRNA sense strand
gaaggagguaucuuuaaaa

SEQ ID NO: 378378 - RNA, 19 nt, Homo sapiens
  misc_RNA (1)...(19): siRNA sense strand
gugaugaaggaguugauaa

SEQ ID NO: 378379 - RNA, 19 nt, Homo sapiens
  misc_RNA (1)...(19): siRNA sense strand
uguacgacgugcaggcuuu

SEQ ID NO: 378380 - RNA, 19 nt, Homo sapiens
  misc_RNA (1)...(19): siRNA sense strand
ucuaucugcugauguuuca

SEQ ID NO: 378381 - RNA, 19 nt, Homo sapiens
  misc_RNA (1)...(19): siRNA sense strand
cugggcagaucuaguaaau

SEQ ID NO: 378382 - RNA, 19 nt, Homo sapiens
  misc_RNA (1)...(19): siRNA sense strand
ccaaaaugcuggagauucu

SEQ ID NO: 378383 - RNA, 19 nt, Homo sapiens
  misc_RNA (1)...(19): siRNA sense strand
uagagcagcgguuagaaug

SEQ ID NO: 378384 - RNA, 19 nt, Homo sapiens
  misc_RNA (1)...(19): siRNA sense strand
ugauaacucuggcaaaaug

SEQ ID NO: 378385 - RNA, 19 nt, Homo sapiens
  misc_RNA (1)...(19): siRNA sense strand
guugauaacucuggcaaaa

SEQ ID NO: 378386 - RNA, 19 nt, Homo sapiens
  misc_RNA (1)...(19): siRNA sense strand
gggagagugaagagguuua

SEQ ID NO: 378387 - RNA, 19 nt, Homo sapiens
  misc_RNA (1)...(19): siRNA sense strand
cuuguagaaggaacuauua

SEQ ID NO: 378388 - RNA, 19 nt, Homo sapiens
  misc_RNA (1)...(19): siRNA sense strand
uggaugugaugaaggaguu

SEQ ID NO: 378389 - RNA, 19 nt, Homo sapiens
  misc_RNA (1)...(19): siRNA sense strand
ggagagugaagagguuuau

SEQ ID NO: 378390 - RNA, 19 nt, Homo sapiens
  misc_RNA (1)...(19): siRNA sense strand
aacaaaggauuauggaacu

SEQ ID NO: 378391 - RNA, 19 nt, Homo sapiens
  misc_RNA (1)...(19): siRNA sense strand
gggaagcguauuugaguag

SEQ ID NO: 378392 - RNA, 19 nt, Homo sapiens
  misc_RNA (1)...(19): siRNA sense strand
agagguuuauucaggagaa

SEQ ID NO: 378393 - RNA, 19 nt, Homo sapiens
  misc_RNA (1)...(19): siRNA sense strand
agagugaagagguuuauuc

SEQ ID NO: 378394 - RNA, 19 nt, Homo sapiens
  misc_RNA (1)...(19): siRNA sense strand
ccuguuuaaucauugaaga

SEQ ID NO: 378395 - RNA, 19 nt, Homo sapiens
  misc_RNA (1)...(19): siRNA sense strand
gaagcaggaggagauaauc

SEQ ID NO: 378396 - RNA, 19 nt, Homo sapiens
  misc_RNA (1)...(19): siRNA sense strand
agaaacaaaggauuaugga

SEQ ID NO: 378397 - RNA, 19 nt, Homo sapiens
  misc_RNA (1)...(19): siRNA sense strand
gggaggcaaggacaaguug

SEQ ID NO: 378398 - RNA, 19 nt, Homo sapiens
  misc_RNA (1)...(19): siRNA sense strand
aacuaagcgucuuguagaa

SEQ ID NO: 378399 - RNA, 19 nt, Homo sapiens
  misc_RNA (1)...(19): siRNA sense strand
gaagcguauuugaguagac

SEQ ID NO: 378400 - RNA, 19 nt, Homo sapiens
  misc_RNA (1)...(19): siRNA sense strand
gcagcagagauguacagaa

SEQ ID NO: 378401 - RNA, 19 nt, Homo sapiens
  misc_RNA (1)...(19): siRNA sense strand
gauaaucuuggccaacagu

SEQ ID NO: 378402 - RNA, 19 nt, Homo sapiens
  misc_RNA (1)...(19): siRNA sense strand
ccaaugcuuauuagaagga

SEQ ID NO: 378403 - RNA, 19 nt, Homo sapiens
  misc_RNA (1)...(19): siRNA sense strand
gauguugucaccaguggau

SEQ ID NO: 378404 - RNA, 19 nt, Homo sapiens
  misc_RNA (1)...(19): siRNA sense strand
ggauccgccuccacucagu

SEQ ID NO: 378405 - RNA, 19 nt, Homo sapiens
  misc_RNA (1)...(19): siRNA sense strand
uugaguagacuugguguuu

SEQ ID NO: 378406 - RNA, 19 nt, Homo sapiens
  misc_RNA (1)...(19): siRNA sense strand
uuccaaugcuuauuagaag

SEQ ID NO: 378407 - RNA, 19 nt, Homo sapiens
  misc_RNA (1)...(19): siRNA sense strand
guaagcaugaaaccagaau

SEQ ID NO: 378408 - RNA, 19 nt, Homo sapiens
  misc_RNA (1)...(19): siRNA sense strand
ugaagaagcugaacuugca

SEQ ID NO: 378409 - RNA, 19 nt, Homo sapiens
  misc_RNA (1)...(19): siRNA sense strand
ccaacacacugcagacgua

SEQ ID NO: 378410 - RNA, 19 nt, Homo sapiens
  misc_RNA (1)...(19): siRNA sense strand
ucaaugcuaugaccuguga

SEQ ID NO: 378411 - RNA, 19 nt, Homo sapiens
  misc_RNA (1)...(19): siRNA sense strand
ccauugaggucaucauguu

SEQ ID NO: 378412 - RNA, 19 nt, Homo sapiens
  misc_RNA (1)...(19): siRNA sense strand
gaugauaccaggauucaga

SEQ ID NO: 378413 - RNA, 19 nt, Homo sapiens
  misc_RNA (1)...(19): siRNA sense strand
gcaaccaagacuacaagua

SEQ ID NO: 378414 - RNA, 19 nt, Homo sapiens
  misc_RNA (1)...(19): siRNA sense strand
gagcagcagcgcaucauug

SEQ ID NO: 378415 - RNA, 19 nt, Homo sapiens
  misc_RNA (1)...(19): siRNA sense strand
uaucaccucuucagacaug

SEQ ID NO: 378416 - RNA, 19 nt, Homo sapiens
  misc_RNA (1)...(19): siRNA sense strand
gucauuggcuuugcuaaga

SEQ ID NO: 378417 - RNA, 19 nt, Homo sapiens
  misc_RNA (1)...(19): siRNA sense strand
caaccaagacuacaaguac

SEQ ID NO: 378418 - RNA, 19 nt, Homo sapiens
  misc_RNA (1)...(19): siRNA sense strand
ggcuuucacuucaaugcua

SEQ ID NO: 378419 - RNA, 19 nt, Homo sapiens
  misc_RNA (1)...(19): siRNA sense strand
gagugcagcaugaagcuaa

SEQ ID NO: 378420 - RNA, 19 nt, Homo sapiens
  misc_RNA (1)...(19): siRNA sense strand
gccugacccuggagacuuu

SEQ ID NO: 378421 - RNA, 19 nt, Homo sapiens
  misc_RNA (1)...(19): siRNA sense strand
gcgcaucauugccauacug

SEQ ID NO: 378422 - RNA, 19 nt, Homo sapiens
  misc_RNA (1)...(19): siRNA sense strand
acaaguaccgcgucaguga

SEQ ID NO: 378423 - RNA, 19 nt, Homo sapiens
  misc_RNA (1)...(19): siRNA sense strand
ccacuggcuuucacuucaa

SEQ ID NO: 378424 - RNA, 19 nt, Homo sapiens
  misc_RNA (1)...(19): siRNA sense strand
uggcuuugcuaagaugaua

SEQ ID NO: 378425 - RNA, 19 nt, Homo sapiens
  misc_RNA (1)...(19): siRNA sense strand
cagccugagugcagcauga

SEQ ID NO: 378426 - RNA, 19 nt, Homo sapiens
  misc_RNA (1)...(19): siRNA sense strand
cuaagaugauaccaggauu

SEQ ID NO: 378427 - RNA, 19 nt, Homo sapiens
  misc_RNA (1)...(19): siRNA sense strand
gaagcggaaggcacuauuc

SEQ ID NO: 378428 - RNA, 19 nt, Homo sapiens
  misc_RNA (1)...(19): siRNA sense strand
uguaucaccucuucagaca

SEQ ID NO: 378429 - RNA, 19 nt, Homo sapiens
  misc_RNA (1)...(19): siRNA sense strand
gcuaagaugauaccaggau

SEQ ID NO: 378430 - RNA, 19 nt, Homo sapiens
  misc_RNA (1)...(19): siRNA sense strand
ccaagaugauccagaagcu

SEQ ID NO: 378431 - RNA, 19 nt, Homo sapiens
  misc_RNA (1)...(19): siRNA sense strand
gaccugcgcagccucaaug

SEQ ID NO: 378432 - RNA, 19 nt, Homo sapiens
  misc_RNA (1)...(19): siRNA sense strand
ggagggagccauccuucca

SEQ ID NO: 378433 - RNA, 19 nt, Homo sapiens
  misc_RNA (1)...(19): siRNA sense strand
caagugccauugaggucau

SEQ ID NO: 378434 - RNA, 19 nt, Homo sapiens
  misc_RNA (1)...(19): siRNA sense strand
ucagugacgugaccaaagc

SEQ ID NO: 378435 - RNA, 19 nt, Homo sapiens
  misc_RNA (1)...(19): siRNA sense strand
caaacgcuguguggacauc

SEQ ID NO: 378436 - RNA, 19 nt, Homo sapiens
  misc_RNA (1)...(19): siRNA sense strand
cgaaguguuuggcaaugag

SEQ ID NO: 378437 - RNA, 19 nt, Homo sapiens
  misc_RNA (1)...(19): siRNA sense strand
ucgaaguguuuggcaauga

SEQ ID NO: 378438 - RNA, 19 nt, Homo sapiens
  misc_RNA (1)...(19): siRNA sense strand
ccaaugaguccuucaccau

SEQ ID NO: 378439 - RNA, 19 nt, Homo sapiens
  misc_RNA (1)...(19): siRNA sense strand
ggaccuguggcaaccaaga

SEQ ID NO: 378440 - RNA, 19 nt, Homo sapiens
  misc_RNA (1)...(19): siRNA sense strand
caagaugauccagaagcua

SEQ ID NO: 378441 - RNA, 19 nt, Homo sapiens
  misc_RNA (1)...(19): siRNA sense strand
gcuuucacuucaaugcuau

SEQ ID NO: 378442 - RNA, 19 nt, Homo sapiens
  misc_RNA (1)...(19): siRNA sense strand
gaaggaguucauucugaca

SEQ ID NO: 378443 - RNA, 19 nt, Homo sapiens
  misc_RNA (1)...(19): siRNA sense strand
caaucuggaucugagugaa

SEQ ID NO: 378444 - RNA, 19 nt, Homo sapiens
  misc_RNA (1)...(19): siRNA sense strand
augccaagaugauccagaa

SEQ ID NO: 378445 - RNA, 19 nt, Homo sapiens
  misc_RNA (1)...(19): siRNA sense strand
gaaguguuuggcaaugaga

SEQ ID NO: 378446 - RNA, 19 nt, Homo sapiens
  misc_RNA (1)...(19): siRNA sense strand
ggaggaggaggccuugaag

SEQ ID NO: 378447 - RNA, 19 nt, Homo sapiens
  misc_RNA (1)...(19): siRNA sense strand
gcucgaaguguuuggcaau

SEQ ID NO: 378448 - RNA, 19 nt, Homo sapiens
  misc_RNA (1)...(19): siRNA sense strand
gacugaagaagcugaacuu

SEQ ID NO: 378449 - RNA, 19 nt, Homo sapiens
  misc_RNA (1)...(19): siRNA sense strand
gcugaagucaagugccauu

SEQ ID NO: 378450 - RNA, 19 nt, Homo sapiens
  misc_RNA (1)...(19): siRNA sense strand
uaagaugauaccaggauuc

SEQ ID NO: 378451 - RNA, 19 nt, Homo sapiens
  misc_RNA (1)...(19): siRNA sense strand
gcuggacgcccaccauaag

SEQ ID NO: 378452 - RNA, 19 nt, Homo sapiens
  misc_RNA (1)...(19): siRNA sense strand
ggagcagcagcgcaucauu

SEQ ID NO: 378453 - RNA, 19 nt, Homo sapiens
  misc_RNA (1)...(19): siRNA sense strand
augaggaagugcagaggaa

SEQ ID NO: 378454 - RNA, 19 nt, Homo sapiens
  misc_RNA (1)...(19): siRNA sense strand
cagaggaagcgggagauga

SEQ ID NO: 378455 - RNA, 19 nt, Homo sapiens
  misc_RNA (1)...(19): siRNA sense strand
agaggaagcgggagaugau

SEQ ID NO: 378456 - RNA, 19 nt, Homo sapiens
  misc_RNA (1)...(19): siRNA sense strand
ggacugaagaagcugaacu

SEQ ID NO: 378457 - RNA, 19 nt, Homo sapiens
  misc_RNA (1)...(19): siRNA sense strand
ucauuggcuuugcuaagau

SEQ ID NO: 378458 - RNA, 19 nt, Homo sapiens
  misc_RNA (1)...(19): siRNA sense strand
ccagacacacucccagcuu

SEQ ID NO: 378459 - RNA, 19 nt, Homo sapiens
  misc_RNA (1)...(19): siRNA sense strand
gcagcgcaucauugccaua

SEQ ID NO: 378460 - RNA, 19 nt, Homo sapiens
  misc_RNA (1)...(19): siRNA sense strand
ccaaucuggaucugaguga

SEQ ID NO: 378461 - RNA, 19 nt, Homo sapiens
  misc_RNA (1)...(19): siRNA sense strand
gaggagcagcagcgcauca

SEQ ID NO: 378462 - RNA, 19 nt, Homo sapiens
  misc_RNA (1)...(19): siRNA sense strand
guacugcugaagucaagug

SEQ ID NO: 378463 - RNA, 19 nt, Homo sapiens
  misc_RNA (1)...(19): siRNA sense strand
cauuggcuuugcuaagaug

SEQ ID NO: 378464 - RNA, 19 nt, Homo sapiens
  misc_RNA (1)...(19): siRNA sense strand
ggucauuggcuuugcuaag

SEQ ID NO: 378465 - RNA, 19 nt, Homo sapiens
  misc_RNA (1)...(19): siRNA sense strand
cugcucagaucacuguauc

SEQ ID NO: 378466 - RNA, 19 nt, Homo sapiens
  misc_RNA (1)...(19): siRNA sense strand
gcagaggaagcgggagaug

SEQ ID NO: 378467 - RNA, 19 nt, Homo sapiens
  misc_RNA (1)...(19): siRNA sense strand
caccugcucuaugccaaga

SEQ ID NO: 378468 - RNA, 19 nt, Homo sapiens
  misc_RNA (1)...(19): siRNA sense strand
cuacaaguaccgcgucagu

SEQ ID NO: 378469 - RNA, 19 nt, Homo sapiens
  misc_RNA (1)...(19): siRNA sense strand
ccaguucgugugaaugaug

SEQ ID NO: 378470 - RNA, 19 nt, Homo sapiens
  misc_RNA (1)...(19): siRNA sense strand
gaucguacugcugaaguca

SEQ ID NO: 378471 - RNA, 19 nt, Homo sapiens
  misc_RNA (1)...(19): siRNA sense strand
ucaggucgcucuacgaaga

SEQ ID NO: 378472 - RNA, 19 nt, Homo sapiens
  misc_RNA (1)...(19): siRNA sense strand
uagucaagccugagaauua

SEQ ID NO: 378473 - RNA, 19 nt, Homo sapiens
  misc_RNA (1)...(19): siRNA sense strand
guacggcccugaagaagac

SEQ ID NO: 378474 - RNA, 19 nt, Homo sapiens
  misc_RNA (1)...(19): siRNA sense strand
acccaaaugugcagaaaga

SEQ ID NO: 378475 - RNA, 19 nt, Homo sapiens
  misc_RNA (1)...(19): siRNA sense strand
caggucaucuucugcaauc

SEQ ID NO: 378476 - RNA, 19 nt, Homo sapiens
  misc_RNA (1)...(19): siRNA sense strand
ggaagaccacccaaaugug

SEQ ID NO: 378477 - RNA, 19 nt, Homo sapiens
  misc_RNA (1)...(19): siRNA sense strand
ccacccaaaugugcagaaa

SEQ ID NO: 378478 - RNA, 19 nt, Homo sapiens
  misc_RNA (1)...(19): siRNA sense strand
aggcaggcgucgaagagua

SEQ ID NO: 378479 - RNA, 19 nt, Homo sapiens
  misc_RNA (1)...(19): siRNA sense strand
gaagaguacggcccugaag

SEQ ID NO: 378480 - RNA, 19 nt, Homo sapiens
  misc_RNA (1)...(19): siRNA sense strand
uggaagaccacccaaaugu

SEQ ID NO: 378481 - RNA, 19 nt, Homo sapiens
  misc_RNA (1)...(19): siRNA sense strand
gcucuacgaagaucuggaa

SEQ ID NO: 378482 - RNA, 19 nt, Homo sapiens
  misc_RNA (1)...(19): siRNA sense strand
ggagcgcauugcacaucaa

SEQ ID NO: 378483 - RNA, 19 nt, Homo sapiens
  misc_RNA (1)...(19): siRNA sense strand
cuacgaagaucuggaagac

SEQ ID NO: 378484 - RNA, 19 nt, Homo sapiens
  misc_RNA (1)...(19): siRNA sense strand
ccguauggcucaacuucga

SEQ ID NO: 378485 - RNA, 19 nt, Homo sapiens
  misc_RNA (1)...(19): siRNA sense strand
agaguacggcccugaagaa

SEQ ID NO: 378486 - RNA, 19 nt, Homo sapiens
  misc_RNA (1)...(19): siRNA sense strand
cgucaggucgcucuacgaa

SEQ ID NO: 378487 - RNA, 19 nt, Homo sapiens
  misc_RNA (1)...(19): siRNA sense strand
cgaagaguacggcccugaa

SEQ ID NO: 378488 - RNA, 19 nt, Homo sapiens
  misc_RNA (1)...(19): siRNA sense strand
agucaagccugagaauuac

SEQ ID NO: 378489 - RNA, 19 nt, Homo sapiens
  misc_RNA (1)...(19): siRNA sense strand
gcccguauggcucaacuuc

SEQ ID NO: 378490 - RNA, 19 nt, Homo sapiens
  misc_RNA (1)...(19): siRNA sense strand
gugcugcgcucggugaacu

SEQ ID NO: 378491 - RNA, 19 nt, Homo sapiens
  misc_RNA (1)...(19): siRNA sense strand
ucaggucgcucuacgaaga

SEQ ID NO: 378492 - RNA, 19 nt, Homo sapiens
  misc_RNA (1)...(19): siRNA sense strand
uagucaagccugagaauua

SEQ ID NO: 378493 - RNA, 19 nt, Homo sapiens
  misc_RNA (1)...(19): siRNA sense strand
guacggcccugaagaagac

SEQ ID NO: 378494 - RNA, 19 nt, Homo sapiens
  misc_RNA (1)...(19): siRNA sense strand
acccaaaugugcagaaaga

SEQ ID NO: 378495 - RNA, 19 nt, Homo sapiens
  misc_RNA (1)...(19): siRNA sense strand
caggucaucuucugcaauc

SEQ ID NO: 378496 - RNA, 19 nt, Homo sapiens
  misc_RNA (1)...(19): siRNA sense strand
ggaagaccacccaaaugug

SEQ ID NO: 378497 - RNA, 19 nt, Homo sapiens
  misc_RNA (1)...(19): siRNA sense strand
ccacccaaaugugcagaaa

SEQ ID NO: 378498 - RNA, 19 nt, Homo sapiens
  misc_RNA (1)...(19): siRNA sense strand
aggcaggcgucgaagagua

SEQ ID NO: 378499 - RNA, 19 nt, Homo sapiens
  misc_RNA (1)...(19): siRNA sense strand
gaagaguacggcccugaag

SEQ ID NO: 378500 - RNA, 19 nt, Homo sapiens
  misc_RNA (1)...(19): siRNA sense strand
uggaagaccacccaaaugu

SEQ ID NO: 378501 - RNA, 19 nt, Homo sapiens
  misc_RNA (1)...(19): siRNA sense strand
gcucuacgaagaucuggaa

SEQ ID NO: 378502 - RNA, 19 nt, Homo sapiens
  misc_RNA (1)...(19): siRNA sense strand
ggagcgcauugcacaucaa

SEQ ID NO: 378503 - RNA, 19 nt, Homo sapiens
  misc_RNA (1)...(19): siRNA sense strand
cuacgaagaucuggaagac

SEQ ID NO: 378504 - RNA, 19 nt, Homo sapiens
  misc_RNA (1)...(19): siRNA sense strand
ccguauggcucaacuucga

SEQ ID NO: 378505 - RNA, 19 nt, Homo sapiens
  misc_RNA (1)...(19): siRNA sense strand
agaguacggcccugaagaa

SEQ ID NO: 378506 - RNA, 19 nt, Homo sapiens
  misc_RNA (1)...(19): siRNA sense strand
cgucaggucgcucuacgaa

SEQ ID NO: 378507 - RNA, 19 nt, Homo sapiens
  misc_RNA (1)...(19): siRNA sense strand
cgaagaguacggcccugaa

SEQ ID NO: 378508 - RNA, 19 nt, Homo sapiens
  misc_RNA (1)...(19): siRNA sense strand
agucaagccugagaauuac

SEQ ID NO: 378509 - RNA, 19 nt, Homo sapiens
  misc_RNA (1)...(19): siRNA sense strand
gcccguauggcucaacuuc

SEQ ID NO: 378510 - RNA, 19 nt, Homo sapiens
  misc_RNA (1)...(19): siRNA sense strand
gugcugcgcucggugaacu

SEQ ID NO: 378511 - RNA, 19 nt, Homo sapiens
  misc_RNA (1)...(19): siRNA sense strand
gauguugccuggaacuuug

SEQ ID NO: 378512 - RNA, 19 nt, Homo sapiens
  misc_RNA (1)...(19): siRNA sense strand
gaauguggcgucccucuga

SEQ ID NO: 378513 - RNA, 19 nt, Homo sapiens
  misc_RNA (1)...(19): siRNA sense strand
gcaagguacuacuuaucga

SEQ ID NO: 378514 - RNA, 19 nt, Homo sapiens
  misc_RNA (1)...(19): siRNA sense strand
ggagaacgccaagaacgaa

SEQ ID NO: 378515 - RNA, 19 nt, Homo sapiens
  misc_RNA (1)...(19): siRNA sense strand
ugaauucccucaaguacgu

SEQ ID NO: 378516 - RNA, 19 nt, Homo sapiens
  misc_RNA (1)...(19): siRNA sense strand
gcaaccaguuugggcauca

SEQ ID NO: 378517 - RNA, 19 nt, Homo sapiens
  misc_RNA (1)...(19): siRNA sense strand
ucgaagcccugcugucuca

SEQ ID NO: 378518 - RNA, 19 nt, Homo sapiens
  misc_RNA (1)...(19): siRNA sense strand
gguacuacuuaucgagaau

SEQ ID NO: 378519 - RNA, 19 nt, Homo sapiens
  misc_RNA (1)...(19): siRNA sense strand
gggacuacacccagaugaa

SEQ ID NO: 378520 - RNA, 19 nt, Homo sapiens
  misc_RNA (1)...(19): siRNA sense strand
ggacuacacccagaugaac

SEQ ID NO: 378521 - RNA, 19 nt, Homo sapiens
  misc_RNA (1)...(19): siRNA sense strand
ugacaucgagccugacauc

SEQ ID NO: 378522 - RNA, 19 nt, Homo sapiens
  misc_RNA (1)...(19): siRNA sense strand
cgauguugccuggaacuuu

SEQ ID NO: 378523 - RNA, 19 nt, Homo sapiens
  misc_RNA (1)...(19): siRNA sense strand
gggcaagguacuacuuauc

SEQ ID NO: 378524 - RNA, 19 nt, Homo sapiens
  misc_RNA (1)...(19): siRNA sense strand
caucgaagcccugcugucu

SEQ ID NO: 378525 - RNA, 19 nt, Homo sapiens
  misc_RNA (1)...(19): siRNA sense strand
cgccaagaacgaagagauu

SEQ ID NO: 378526 - RNA, 19 nt, Homo sapiens
  misc_RNA (1)...(19): siRNA sense strand
gacgccaccgcgcuuauga

SEQ ID NO: 378527 - RNA, 19 nt, Homo sapiens
  misc_RNA (1)...(19): siRNA sense strand
gccaagaacgaagagauuc

SEQ ID NO: 378528 - RNA, 19 nt, Homo sapiens
  misc_RNA (1)...(19): siRNA sense strand
ccaacuucaugcucuucga

SEQ ID NO: 378529 - RNA, 19 nt, Homo sapiens
  misc_RNA (1)...(19): siRNA sense strand
guucgagcccaacuucaug

SEQ ID NO: 378530 - RNA, 19 nt, Homo sapiens
  misc_RNA (1)...(19): siRNA sense strand
ggcaagguacuacuuaucg

SEQ ID NO: 378531 - RNA, 19 nt, Homo sapiens
  misc_RNA (1)...(19): siRNA sense strand
gaacgacucugaugaugua

SEQ ID NO: 378532 - RNA, 19 nt, Homo sapiens
  misc_RNA (1)...(19): siRNA sense strand
ccacagacccuuccaagua

SEQ ID NO: 378533 - RNA, 19 nt, Homo sapiens
  misc_RNA (1)...(19): siRNA sense strand
ccaaguaaguccaacgaaa

SEQ ID NO: 378534 - RNA, 19 nt, Homo sapiens
  misc_RNA (1)...(19): siRNA sense strand
gauaaacaccugaaauuuc

SEQ ID NO: 378535 - RNA, 19 nt, Homo sapiens
  misc_RNA (1)...(19): siRNA sense strand
ggacaucaccucacacaug

SEQ ID NO: 378536 - RNA, 19 nt, Homo sapiens
  misc_RNA (1)...(19): siRNA sense strand
ccacauggaugauauggau

SEQ ID NO: 378537 - RNA, 19 nt, Homo sapiens
  misc_RNA (1)...(19): siRNA sense strand
ggacugaggucaaaaucua

SEQ ID NO: 378538 - RNA, 19 nt, Homo sapiens
  misc_RNA (1)...(19): siRNA sense strand
gaagauaaacaccugaaau

SEQ ID NO: 378539 - RNA, 19 nt, Homo sapiens
  misc_RNA (1)...(19): siRNA sense strand
gaacgcgccuucugauugg

SEQ ID NO: 378540 - RNA, 19 nt, Homo sapiens
  misc_RNA (1)...(19): siRNA sense strand
cacagacccuuccaaguaa

SEQ ID NO: 378541 - RNA, 19 nt, Homo sapiens
  misc_RNA (1)...(19): siRNA sense strand
ccacaagcaguccagauua

SEQ ID NO: 378542 - RNA, 19 nt, Homo sapiens
  misc_RNA (1)...(19): siRNA sense strand
gaauugcagugauuugcuu

SEQ ID NO: 378543 - RNA, 19 nt, Homo sapiens
  misc_RNA (1)...(19): siRNA sense strand
ucacagccaugaagauaug

SEQ ID NO: 378544 - RNA, 19 nt, Homo sapiens
  misc_RNA (1)...(19): siRNA sense strand
gcuaaacccugacccaucu

SEQ ID NO: 378545 - RNA, 19 nt, Homo sapiens
  misc_RNA (1)...(19): siRNA sense strand
cugaugaacuggucacuga

SEQ ID NO: 378546 - RNA, 19 nt, Homo sapiens
  misc_RNA (1)...(19): siRNA sense strand
gaagauaugcugguuguag

SEQ ID NO: 378547 - RNA, 19 nt, Homo sapiens
  misc_RNA (1)...(19): siRNA sense strand
gaggugauagugugguuua

SEQ ID NO: 378548 - RNA, 19 nt, Homo sapiens
  misc_RNA (1)...(19): siRNA sense strand
uggaugauauggaugauga

SEQ ID NO: 378549 - RNA, 19 nt, Homo sapiens
  misc_RNA (1)...(19): siRNA sense strand
gaaggacaguuaugaaacg

SEQ ID NO: 378550 - RNA, 19 nt, Homo sapiens
  misc_RNA (1)...(19): siRNA sense strand
gggaaggacaguuaugaaa

SEQ ID NO: 378551 - RNA, 19 nt, Homo sapiens
  misc_RNA (1)...(19): siRNA sense strand
caucuucugaggucaauua

SEQ ID NO: 378552 - RNA, 19 nt, Homo sapiens
  misc_RNA (1)...(19): siRNA sense strand
ugauauggaugaugaagau

SEQ ID NO: 378553 - RNA, 19 nt, Homo sapiens
  misc_RNA (1)...(19): siRNA sense strand
ggaguugaauggugcauac

SEQ ID NO: 378554 - RNA, 19 nt, Homo sapiens
  misc_RNA (1)...(19): siRNA sense strand
ugaugaaucugaugaacug

SEQ ID NO: 378555 - RNA, 19 nt, Homo sapiens
  misc_RNA (1)...(19): siRNA sense strand
caaagucagccgugaauuc

SEQ ID NO: 378556 - RNA, 19 nt, Homo sapiens
  misc_RNA (1)...(19): siRNA sense strand
cacaagcaguccagauuau

SEQ ID NO: 378557 - RNA, 19 nt, Homo sapiens
  misc_RNA (1)...(19): siRNA sense strand
ggacagccaggacuccauu

SEQ ID NO: 378558 - RNA, 19 nt, Homo sapiens
  misc_RNA (1)...(19): siRNA sense strand
ugaacgcgccuucugauug

SEQ ID NO: 378559 - RNA, 19 nt, Homo sapiens
  misc_RNA (1)...(19): siRNA sense strand
gaugaacuggucacugauu

SEQ ID NO: 378560 - RNA, 19 nt, Homo sapiens
  misc_RNA (1)...(19): siRNA sense strand
caagcaguccagauuauau

SEQ ID NO: 378561 - RNA, 19 nt, Homo sapiens
  misc_RNA (1)...(19): siRNA sense strand
ggaaagcgaggaguugaau

SEQ ID NO: 378562 - RNA, 19 nt, Homo sapiens
  misc_RNA (1)...(19): siRNA sense strand
uaugauggccgaggugaua

SEQ ID NO: 378563 - RNA, 19 nt, Homo sapiens
  misc_RNA (1)...(19): siRNA sense strand
cgacucugaugauguagau

SEQ ID NO: 378564 - RNA, 19 nt, Homo sapiens
  misc_RNA (1)...(19): siRNA sense strand
cagauuauauaagcggaaa

SEQ ID NO: 378565 - RNA, 19 nt, Homo sapiens
  misc_RNA (1)...(19): siRNA sense strand
aaacgagucagcuggauga

SEQ ID NO: 378566 - RNA, 19 nt, Homo sapiens
  misc_RNA (1)...(19): siRNA sense strand
gugauagugugguuuaugg

SEQ ID NO: 378567 - RNA, 19 nt, Homo sapiens
  misc_RNA (1)...(19): siRNA sense strand
guagaugacacugaugauu

SEQ ID NO: 378568 - RNA, 19 nt, Homo sapiens
  misc_RNA (1)...(19): siRNA sense strand
auaaacaccugaaauuucg

SEQ ID NO: 378569 - RNA, 19 nt, Homo sapiens
  misc_RNA (1)...(19): siRNA sense strand
aagauaugcugguuguaga

SEQ ID NO: 378570 - RNA, 19 nt, Homo sapiens
  misc_RNA (1)...(19): siRNA sense strand
ccaaugaugagagcaauga

SEQ ID NO: 378571 - RNA, 19 nt, Homo sapiens
  misc_RNA (1)...(19): siRNA sense strand
ccaguacccugaugcuaca

SEQ ID NO: 378572 - RNA, 19 nt, Homo sapiens
  misc_RNA (1)...(19): siRNA sense strand
gcagaccugacauccagua

SEQ ID NO: 378573 - RNA, 19 nt, Homo sapiens
  misc_RNA (1)...(19): siRNA sense strand
ccacaguagacacauauga

SEQ ID NO: 378574 - RNA, 19 nt, Homo sapiens
  misc_RNA (1)...(19): siRNA sense strand
caaguaaguccaacgaaag

SEQ ID NO: 378575 - RNA, 19 nt, Homo sapiens
  misc_RNA (1)...(19): siRNA sense strand
ggaaggacaguuaugaaac

SEQ ID NO: 378576 - RNA, 19 nt, Homo sapiens
  misc_RNA (1)...(19): siRNA sense strand
caacaaauacccagaugcu

SEQ ID NO: 378577 - RNA, 19 nt, Homo sapiens
  misc_RNA (1)...(19): siRNA sense strand
ugauguagaugacacugau

SEQ ID NO: 378578 - RNA, 19 nt, Homo sapiens
  misc_RNA (1)...(19): siRNA sense strand
guaaggaagaagauaaaca

SEQ ID NO: 378579 - RNA, 19 nt, Homo sapiens
  misc_RNA (1)...(19): siRNA sense strand
ucaccagucugaugagucu

SEQ ID NO: 378580 - RNA, 19 nt, Homo sapiens
  misc_RNA (1)...(19): siRNA sense strand
gccacaagcaguccagauu

SEQ ID NO: 378581 - RNA, 19 nt, Homo sapiens
  misc_RNA (1)...(19): siRNA sense strand
aagcaguccagauuauaua

SEQ ID NO: 378582 - RNA, 19 nt, Homo sapiens
  misc_RNA (1)...(19): siRNA sense strand
ccgaugugauugauaguca

SEQ ID NO: 378583 - RNA, 19 nt, Homo sapiens
  misc_RNA (1)...(19): siRNA sense strand
uagaugacacugaugauuc

SEQ ID NO: 378584 - RNA, 19 nt, Homo sapiens
  misc_RNA (1)...(19): siRNA sense strand
ccaugaagauaugcugguu

SEQ ID NO: 378585 - RNA, 19 nt, Homo sapiens
  misc_RNA (1)...(19): siRNA sense strand
ugaagaugaugaugaccau

SEQ ID NO: 378586 - RNA, 19 nt, Homo sapiens
  misc_RNA (1)...(19): siRNA sense strand
gccgugggaaggacaguua

SEQ ID NO: 378587 - RNA, 19 nt, Homo sapiens
  misc_RNA (1)...(19): siRNA sense strand
ucucaugaauuagauagug

SEQ ID NO: 378588 - RNA, 19 nt, Homo sapiens
  misc_RNA (1)...(19): siRNA sense strand
gcggaaagccaaugaugag

SEQ ID NO: 378589 - RNA, 19 nt, Homo sapiens
  misc_RNA (1)...(19): siRNA sense strand
uacaacaaauacccagaug

SEQ ID NO: 378590 - RNA, 19 nt, Homo sapiens
  misc_RNA (1)...(19): siRNA sense strand
ugaugaagaugaugaugac

SEQ ID NO: 378591 - RNA, 19 nt, Homo sapiens
  misc_RNA (1)...(19): siRNA sense strand
acaagcaguccagauuaua

SEQ ID NO: 378592 - RNA, 19 nt, Homo sapiens
  misc_RNA (1)...(19): siRNA sense strand
guugaauggugcauacaag

SEQ ID NO: 378593 - RNA, 19 nt, Homo sapiens
  misc_RNA (1)...(19): siRNA sense strand
gaaagcgaggaguugaaug

SEQ ID NO: 378594 - RNA, 19 nt, Homo sapiens
  misc_RNA (1)...(19): siRNA sense strand
aaacaccugaaauuucgua

SEQ ID NO: 378595 - RNA, 19 nt, Homo sapiens
  misc_RNA (1)...(19): siRNA sense strand
uuuauggacugaggucaaa

SEQ ID NO: 378596 - RNA, 19 nt, Homo sapiens
  misc_RNA (1)...(19): siRNA sense strand
gcauuccgaugugauugau

SEQ ID NO: 378597 - RNA, 19 nt, Homo sapiens
  misc_RNA (1)...(19): siRNA sense strand
agaugacacugaugauucu

SEQ ID NO: 378598 - RNA, 19 nt, Homo sapiens
  misc_RNA (1)...(19): siRNA sense strand
augaacuggucacugauuu

SEQ ID NO: 378599 - RNA, 19 nt, Homo sapiens
  misc_RNA (1)...(19): siRNA sense strand
augaagauaugcugguugu

SEQ ID NO: 378600 - RNA, 19 nt, Homo sapiens
  misc_RNA (1)...(19): siRNA sense strand
caucaccucacacauggaa

SEQ ID NO: 378601 - RNA, 19 nt, Homo sapiens
  misc_RNA (1)...(19): siRNA sense strand
ggucaaaaucuaagaaguu

SEQ ID NO: 378602 - RNA, 19 nt, Homo sapiens
  misc_RNA (1)...(19): siRNA sense strand
ccugugccauaccaguuaa

SEQ ID NO: 378603 - RNA, 19 nt, Homo sapiens
  misc_RNA (1)...(19): siRNA sense strand
uauggaugaugaagaugau

SEQ ID NO: 378604 - RNA, 19 nt, Homo sapiens
  misc_RNA (1)...(19): siRNA sense strand
caucaccugugccauacca

SEQ ID NO: 378605 - RNA, 19 nt, Homo sapiens
  misc_RNA (1)...(19): siRNA sense strand
ucgaacgacucugaugaug

SEQ ID NO: 378606 - RNA, 19 nt, Homo sapiens
  misc_RNA (1)...(19): siRNA sense strand
cgaacgacucugaugaugu

SEQ ID NO: 378607 - RNA, 19 nt, Homo sapiens
  misc_RNA (1)...(19): siRNA sense strand
uaaggaagaagauaaacac

SEQ ID NO: 378608 - RNA, 19 nt, Homo sapiens
  misc_RNA (1)...(19): siRNA sense strand
ugugauugauagucaggaa

SEQ ID NO: 378609 - RNA, 19 nt, Homo sapiens
  misc_RNA (1)...(19): siRNA sense strand
gugggaaggacaguuauga

SEQ ID NO: 378610 - RNA, 19 nt, Homo sapiens
  misc_RNA (1)...(19): siRNA sense strand
caucucagaagcagaaucu

SEQ ID NO: 378611 - RNA, 19 nt, Homo sapiens
  misc_RNA (1)...(19): siRNA sense strand
caguuaaacaggcugauuc

SEQ ID NO: 378612 - RNA, 19 nt, Homo sapiens
  misc_RNA (1)...(19): siRNA sense strand
ccaguuaaacaggcugauu

SEQ ID NO: 378613 - RNA, 19 nt, Homo sapiens
  misc_RNA (1)...(19): siRNA sense strand
gagcauuccgaugugauug

SEQ ID NO: 378614 - RNA, 19 nt, Homo sapiens
  misc_RNA (1)...(19): siRNA sense strand
ggugauagugugguuuaug

SEQ ID NO: 378615 - RNA, 19 nt, Homo sapiens
  misc_RNA (1)...(19): siRNA sense strand
acaguagacacauaugaug

SEQ ID NO: 378616 - RNA, 19 nt, Homo sapiens
  misc_RNA (1)...(19): siRNA sense strand
ucuggaaguucugaggaaa

SEQ ID NO: 378617 - RNA, 19 nt, Homo sapiens
  misc_RNA (1)...(19): siRNA sense strand
ugaauuccacagccaugaa

SEQ ID NO: 378618 - RNA, 19 nt, Homo sapiens
  misc_RNA (1)...(19): siRNA sense strand
ugaaacgagucagcuggau

SEQ ID NO: 378619 - RNA, 19 nt, Homo sapiens
  misc_RNA (1)...(19): siRNA sense strand
gaaguuuucacuccaguug

SEQ ID NO: 378620 - RNA, 19 nt, Homo sapiens
  misc_RNA (1)...(19): siRNA sense strand
gauugauagucaggaacuu

SEQ ID NO: 378621 - RNA, 19 nt, Homo sapiens
  misc_RNA (1)...(19): siRNA sense strand
gaccugaacgcgccuucug

SEQ ID NO: 378622 - RNA, 19 nt, Homo sapiens
  misc_RNA (1)...(19): siRNA sense strand
ccgaggugauagugugguu

SEQ ID NO: 378623 - RNA, 19 nt, Homo sapiens
  misc_RNA (1)...(19): siRNA sense strand
acauggaugauauggauga

SEQ ID NO: 378624 - RNA, 19 nt, Homo sapiens
  misc_RNA (1)...(19): siRNA sense strand
aaagcgaggaguugaaugg

SEQ ID NO: 378625 - RNA, 19 nt, Homo sapiens
  misc_RNA (1)...(19): siRNA sense strand
cacaguagacacauaugau

SEQ ID NO: 378626 - RNA, 19 nt, Homo sapiens
  misc_RNA (1)...(19): siRNA sense strand
ugaugauucucaccagucu

SEQ ID NO: 378627 - RNA, 19 nt, Homo sapiens
  misc_RNA (1)...(19): siRNA sense strand
acucugaugauguagauga

SEQ ID NO: 378628 - RNA, 19 nt, Homo sapiens
  misc_RNA (1)...(19): siRNA sense strand
gagaauugcagugauuugc

SEQ ID NO: 378629 - RNA, 19 nt, Homo sapiens
  misc_RNA (1)...(19): siRNA sense strand
gcaguccagauuauauaag

SEQ ID NO: 378630 - RNA, 19 nt, Homo sapiens
  misc_RNA (1)...(19): siRNA sense strand
ugagcauuccgaugugauu

SEQ ID NO: 378631 - RNA, 19 nt, Homo sapiens
  misc_RNA (1)...(19): siRNA sense strand
gaaggagcccugccgaaua

SEQ ID NO: 378632 - RNA, 19 nt, Homo sapiens
  misc_RNA (1)...(19): siRNA sense strand
ggagacaucaggagaagaa

SEQ ID NO: 378633 - RNA, 19 nt, Homo sapiens
  misc_RNA (1)...(19): siRNA sense strand
ccagagagcacggagauaa

SEQ ID NO: 378634 - RNA, 19 nt, Homo sapiens
  misc_RNA (1)...(19): siRNA sense strand
gacaucaggagaagaaauu

SEQ ID NO: 378635 - RNA, 19 nt, Homo sapiens
  misc_RNA (1)...(19): siRNA sense strand
ggaaggagcccugccgaau

SEQ ID NO: 378636 - RNA, 19 nt, Homo sapiens
  misc_RNA (1)...(19): siRNA sense strand
gcucgaaggcucuccaugu

SEQ ID NO: 378637 - RNA, 19 nt, Homo sapiens
  misc_RNA (1)...(19): siRNA sense strand
aaggagcccugccgaauag

SEQ ID NO: 378638 - RNA, 19 nt, Homo sapiens
  misc_RNA (1)...(19): siRNA sense strand
gcaacaagaauggauuuua

SEQ ID NO: 378639 - RNA, 19 nt, Homo sapiens
  misc_RNA (1)...(19): siRNA sense strand
cugccaaacugcaacaaga

SEQ ID NO: 378640 - RNA, 19 nt, Homo sapiens
  misc_RNA (1)...(19): siRNA sense strand
acagagucguagagaguuu

SEQ ID NO: 378641 - RNA, 19 nt, Homo sapiens
  misc_RNA (1)...(19): siRNA sense strand
gcagacagugugagacauc

SEQ ID NO: 378642 - RNA, 19 nt, Homo sapiens
  misc_RNA (1)...(19): siRNA sense strand
caggagacaucaggagaag

SEQ ID NO: 378643 - RNA, 19 nt, Homo sapiens
  misc_RNA (1)...(19): siRNA sense strand
gggacgccaucaguaccua

SEQ ID NO: 378644 - RNA, 19 nt, Homo sapiens
  misc_RNA (1)...(19): siRNA sense strand
ccaaacugcaacaagaaug

SEQ ID NO: 378645 - RNA, 19 nt, Homo sapiens
  misc_RNA (1)...(19): siRNA sense strand
ccaaggcacaggagacauc

SEQ ID NO: 378646 - RNA, 19 nt, Homo sapiens
  misc_RNA (1)...(19): siRNA sense strand
cagcagacagugugagaca

SEQ ID NO: 378647 - RNA, 19 nt, Homo sapiens
  misc_RNA (1)...(19): siRNA sense strand
caaacugcaacaagaaugg

SEQ ID NO: 378648 - RNA, 19 nt, Homo sapiens
  misc_RNA (1)...(19): siRNA sense strand
ggagcccugccgaauagaa

SEQ ID NO: 378649 - RNA, 19 nt, Homo sapiens
  misc_RNA (1)...(19): siRNA sense strand
cagagucguagagaguuua

SEQ ID NO: 378650 - RNA, 19 nt, Homo sapiens
  misc_RNA (1)...(19): siRNA sense strand
gcccagagagcacggagau

SEQ ID NO: 378651 - RNA, 19 nt, Homo sapiens
  misc_RNA (1)...(19): siRNA sense strand
caucaggagaagaaauuuc

SEQ ID NO: 378652 - RNA, 19 nt, Homo sapiens
  misc_RNA (1)...(19): siRNA sense strand
gccaaacugcaacaagaau

SEQ ID NO: 378653 - RNA, 19 nt, Homo sapiens
  misc_RNA (1)...(19): siRNA sense strand
caaagaaucuagaugcaau

SEQ ID NO: 378654 - RNA, 19 nt, Homo sapiens
  misc_RNA (1)...(19): siRNA sense strand
cagaacagauuugagagua

SEQ ID NO: 378655 - RNA, 19 nt, Homo sapiens
  misc_RNA (1)...(19): siRNA sense strand
ggagaagauuccaaagaug

SEQ ID NO: 378656 - RNA, 19 nt, Homo sapiens
  misc_RNA (1)...(19): siRNA sense strand
gaacagauuugagaguagu

SEQ ID NO: 378657 - RNA, 19 nt, Homo sapiens
  misc_RNA (1)...(19): siRNA sense strand
gaaaggagacauguaacaa

SEQ ID NO: 378658 - RNA, 19 nt, Homo sapiens
  misc_RNA (1)...(19): siRNA sense strand
uaacaagaguaacaugugu

SEQ ID NO: 378659 - RNA, 19 nt, Homo sapiens
  misc_RNA (1)...(19): siRNA sense strand
ugagaaaggagacauguaa

SEQ ID NO: 378660 - RNA, 19 nt, Homo sapiens
  misc_RNA (1)...(19): siRNA sense strand
gaacgaauugacaaacaaa

SEQ ID NO: 378661 - RNA, 19 nt, Homo sapiens
  misc_RNA (1)...(19): siRNA sense strand
gagaagauuccaaagaugu

SEQ ID NO: 378662 - RNA, 19 nt, Homo sapiens
  misc_RNA (1)...(19): siRNA sense strand
ggagacauguaacaagagu

SEQ ID NO: 378663 - RNA, 19 nt, Homo sapiens
  misc_RNA (1)...(19): siRNA sense strand
aaggagacauguaacaaga

SEQ ID NO: 378664 - RNA, 19 nt, Homo sapiens
  misc_RNA (1)...(19): siRNA sense strand
gaaucuagaugcaauaacc

SEQ ID NO: 378665 - RNA, 19 nt, Homo sapiens
  misc_RNA (1)...(19): siRNA sense strand
cagaacgaauugacaaaca

SEQ ID NO: 378666 - RNA, 19 nt, Homo sapiens
  misc_RNA (1)...(19): siRNA sense strand
ccacucaccucuucagaac

SEQ ID NO: 378667 - RNA, 19 nt, Homo sapiens
  misc_RNA (1)...(19): siRNA sense strand
gcaaagaaucuagaugcaa

SEQ ID NO: 378668 - RNA, 19 nt, Homo sapiens
  misc_RNA (1)...(19): siRNA sense strand
gacagccacucaccucuuc

SEQ ID NO: 378669 - RNA, 19 nt, Homo sapiens
  misc_RNA (1)...(19): siRNA sense strand
agacauguaacaagaguaa

SEQ ID NO: 378670 - RNA, 19 nt, Homo sapiens
  misc_RNA (1)...(19): siRNA sense strand
aggagaagauuccaaagau

SEQ ID NO: 378671 - RNA, 19 nt, Homo sapiens
  misc_RNA (1)...(19): siRNA sense strand
caaaaguccugauccaguu

SEQ ID NO: 378672 - RNA, 19 nt, Homo sapiens
  misc_RNA (1)...(19): siRNA sense strand
agaacgaauugacaaacaa

SEQ ID NO: 378673 - RNA, 19 nt, Homo sapiens
  misc_RNA (1)...(19): siRNA sense strand
uagaguaccuccagaacag

SEQ ID NO: 378674 - RNA, 19 nt, Homo sapiens
  misc_RNA (1)...(19): siRNA sense strand
aagaguaacaugugugaaa

SEQ ID NO: 378675 - RNA, 19 nt, Homo sapiens
  misc_RNA (1)...(19): siRNA sense strand
guaacaagaguaacaugug

SEQ ID NO: 378676 - RNA, 19 nt, Homo sapiens
  misc_RNA (1)...(19): siRNA sense strand
caaacaaauucgguacauc

SEQ ID NO: 378677 - RNA, 19 nt, Homo sapiens
  misc_RNA (1)...(19): siRNA sense strand
caaagaggcacuggcagaa

SEQ ID NO: 378678 - RNA, 19 nt, Homo sapiens
  misc_RNA (1)...(19): siRNA sense strand
ggcaaagaaucuagaugca

SEQ ID NO: 378679 - RNA, 19 nt, Homo sapiens
  misc_RNA (1)...(19): siRNA sense strand
caggagaagauuccaaaga

SEQ ID NO: 378680 - RNA, 19 nt, Homo sapiens
  misc_RNA (1)...(19): siRNA sense strand
ccacacagacagccacuca

SEQ ID NO: 378681 - RNA, 19 nt, Homo sapiens
  misc_RNA (1)...(19): siRNA sense strand
acaaacaaauucgguacau

SEQ ID NO: 378682 - RNA, 19 nt, Homo sapiens
  misc_RNA (1)...(19): siRNA sense strand
aaccugaaccuuccaaaga

SEQ ID NO: 378683 - RNA, 19 nt, Homo sapiens
  misc_RNA (1)...(19): siRNA sense strand
aaucaucacuggucuuuug

SEQ ID NO: 378684 - RNA, 19 nt, Homo sapiens
  misc_RNA (1)...(19): siRNA sense strand
ucacuggucuuuuggaguu

SEQ ID NO: 378685 - RNA, 19 nt, Homo sapiens
  misc_RNA (1)...(19): siRNA sense strand
ugacaacucaucucauucu

SEQ ID NO: 378686 - RNA, 19 nt, Homo sapiens
  misc_RNA (1)...(19): siRNA sense strand
ccagagcugugcagaugag

SEQ ID NO: 378687 - RNA, 19 nt, Homo sapiens
  misc_RNA (1)...(19): siRNA sense strand
agccagagcugugcagaug

SEQ ID NO: 378688 - RNA, 19 nt, Homo sapiens
  misc_RNA (1)...(19): siRNA sense strand
agaagauuccaaagaugua

SEQ ID NO: 378689 - RNA, 19 nt, Homo sapiens
  misc_RNA (1)...(19): siRNA sense strand
ugagggcucuucggcaaau

SEQ ID NO: 378690 - RNA, 19 nt, Homo sapiens
  misc_RNA (1)...(19): siRNA sense strand
ugcaggacaugacaacuca

SEQ ID NO: 378691 - RNA, 19 nt, Homo sapiens
  misc_RNA (1)...(19): siRNA sense strand
gaagauuccaaagauguag

SEQ ID NO: 378692 - RNA, 19 nt, Homo sapiens
  misc_RNA (1)...(19): siRNA sense strand
guacaaaaguccugaucca

SEQ ID NO: 378693 - RNA, 19 nt, Homo sapiens
  misc_RNA (1)...(19): siRNA sense strand
guaccuccagaacagauuu

SEQ ID NO: 378694 - RNA, 19 nt, Homo sapiens
  misc_RNA (1)...(19): siRNA sense strand
agacuugccuggugaaaau

SEQ ID NO: 378695 - RNA, 19 nt, Homo sapiens
  misc_RNA (1)...(19): siRNA sense strand
ccugaaccuuccaaagaug

SEQ ID NO: 378696 - RNA, 19 nt, Homo sapiens
  misc_RNA (1)...(19): siRNA sense strand
acaagaguaacauguguga

SEQ ID NO: 378697 - RNA, 19 nt, Homo sapiens
  misc_RNA (1)...(19): siRNA sense strand
acucaccucuucagaacga

SEQ ID NO: 378698 - RNA, 19 nt, Homo sapiens
  misc_RNA (1)...(19): siRNA sense strand
gagcugugcagaugaguac

SEQ ID NO: 378699 - RNA, 19 nt, Homo sapiens
  misc_RNA (1)...(19): siRNA sense strand
agaaaggagacauguaaca

SEQ ID NO: 378700 - RNA, 19 nt, Homo sapiens
  misc_RNA (1)...(19): siRNA sense strand
gcagaugaguacaaaaguc

SEQ ID NO: 378701 - RNA, 19 nt, Homo sapiens
  misc_RNA (1)...(19): siRNA sense strand
agaacagauuugagaguag

SEQ ID NO: 378702 - RNA, 19 nt, Homo sapiens
  misc_RNA (1)...(19): siRNA sense strand
agaguaacaugugugaaag

SEQ ID NO: 378703 - RNA, 19 nt, Homo sapiens
  misc_RNA (1)...(19): siRNA sense strand
ugagaguagugaggaacaa

SEQ ID NO: 378704 - RNA, 19 nt, Homo sapiens
  misc_RNA (1)...(19): siRNA sense strand
gacaacucaucucauucug

SEQ ID NO: 378705 - RNA, 19 nt, Homo sapiens
  misc_RNA (1)...(19): siRNA sense strand
aaagaggcacuggcagaaa

SEQ ID NO: 378706 - RNA, 19 nt, Homo sapiens
  misc_RNA (1)...(19): siRNA sense strand
gauucaaugaggagacuug

SEQ ID NO: 378707 - RNA, 19 nt, Homo sapiens
  misc_RNA (1)...(19): siRNA sense strand
caaccugaaccuuccaaag

SEQ ID NO: 378708 - RNA, 19 nt, Homo sapiens
  misc_RNA (1)...(19): siRNA sense strand
gccacucaccucuucagaa

SEQ ID NO: 378709 - RNA, 19 nt, Homo sapiens
  misc_RNA (1)...(19): siRNA sense strand
gacaaacaaauucgguaca

SEQ ID NO: 378710 - RNA, 19 nt, Homo sapiens
  misc_RNA (1)...(19): siRNA sense strand
gggcucuucggcaaaugua

SEQ ID NO: 378711 - RNA, 19 nt, Homo sapiens
  misc_RNA (1)...(19): siRNA sense strand
aaaggagacauguaacaag

SEQ ID NO: 378712 - RNA, 19 nt, Homo sapiens
  misc_RNA (1)...(19): siRNA sense strand
ugauccaguuccugcagaa

SEQ ID NO: 378713 - RNA, 19 nt, Homo sapiens
  misc_RNA (1)...(19): siRNA sense strand
cuccagaacagauuugaga

SEQ ID NO: 378714 - RNA, 19 nt, Homo sapiens
  misc_RNA (1)...(19): siRNA sense strand
aagaggcacuggcagaaaa

SEQ ID NO: 378715 - RNA, 19 nt, Homo sapiens
  misc_RNA (1)...(19): siRNA sense strand
cgaagcugcaggcacagaa

SEQ ID NO: 378716 - RNA, 19 nt, Homo sapiens
  misc_RNA (1)...(19): siRNA sense strand
ccagaacagauuugagagu

SEQ ID NO: 378717 - RNA, 19 nt, Homo sapiens
  misc_RNA (1)...(19): siRNA sense strand
uuccaaagauggcugaaaa

SEQ ID NO: 378718 - RNA, 19 nt, Homo sapiens
  misc_RNA (1)...(19): siRNA sense strand
gagaaaggagacauguaac

SEQ ID NO: 378719 - RNA, 19 nt, Homo sapiens
  misc_RNA (1)...(19): siRNA sense strand
ggagacuugccuggugaaa

SEQ ID NO: 378720 - RNA, 19 nt, Homo sapiens
  misc_RNA (1)...(19): siRNA sense strand
caaaguugcuccaagauga

SEQ ID NO: 378721 - RNA, 19 nt, Homo sapiens
  misc_RNA (1)...(19): siRNA sense strand
ucagagagauggaagaauu

SEQ ID NO: 378722 - RNA, 19 nt, Homo sapiens
  misc_RNA (1)...(19): siRNA sense strand
gaaaggauacccaaaguug

SEQ ID NO: 378723 - RNA, 19 nt, Homo sapiens
  misc_RNA (1)...(19): siRNA sense strand
uggcauagcuggcccauug

SEQ ID NO: 378724 - RNA, 19 nt, Homo sapiens
  misc_RNA (1)...(19): siRNA sense strand
gagaaaggauacccaaagu

SEQ ID NO: 378725 - RNA, 19 nt, Homo sapiens
  misc_RNA (1)...(19): siRNA sense strand
ucagauggcuggagcuuug

SEQ ID NO: 378726 - RNA, 19 nt, Homo sapiens
  misc_RNA (1)...(19): siRNA sense strand
ggaugcagcuguggaaugu

SEQ ID NO: 378727 - RNA, 19 nt, Homo sapiens
  misc_RNA (1)...(19): siRNA sense strand
cgaagcggcuggagaagga

SEQ ID NO: 378728 - RNA, 19 nt, Homo sapiens
  misc_RNA (1)...(19): siRNA sense strand
gggaggcuauacccuagua

SEQ ID NO: 378729 - RNA, 19 nt, Homo sapiens
  misc_RNA (1)...(19): siRNA sense strand
ggacaaagucuggguauac

SEQ ID NO: 378730 - RNA, 19 nt, Homo sapiens
  misc_RNA (1)...(19): siRNA sense strand
ggagaaaggauacccaaag

SEQ ID NO: 378731 - RNA, 19 nt, Homo sapiens
  misc_RNA (1)...(19): siRNA sense strand
uaacucauguuccgccaau

SEQ ID NO: 378732 - RNA, 19 nt, Homo sapiens
  misc_RNA (1)...(19): siRNA sense strand
gggacaaagucuggguaua

SEQ ID NO: 378733 - RNA, 19 nt, Homo sapiens
  misc_RNA (1)...(19): siRNA sense strand
ugucugcacugacgucuga

SEQ ID NO: 378734 - RNA, 19 nt, Homo sapiens
  misc_RNA (1)...(19): siRNA sense strand
ucacaacagugucuuucug

SEQ ID NO: 378735 - RNA, 19 nt, Homo sapiens
  misc_RNA (1)...(19): siRNA sense strand
gcacccagguauaugucuu

SEQ ID NO: 378736 - RNA, 19 nt, Homo sapiens
  misc_RNA (1)...(19): siRNA sense strand
gacggagccuuguguaugg

SEQ ID NO: 378737 - RNA, 19 nt, Homo sapiens
  misc_RNA (1)...(19): siRNA sense strand
ggcuggagcuuugaugcua

SEQ ID NO: 378738 - RNA, 19 nt, Homo sapiens
  misc_RNA (1)...(19): siRNA sense strand
guggaagagucacaaaugg

SEQ ID NO: 378739 - RNA, 19 nt, Homo sapiens
  misc_RNA (1)...(19): siRNA sense strand
cauccauggucccaauuug

SEQ ID NO: 378740 - RNA, 19 nt, Homo sapiens
  misc_RNA (1)...(19): siRNA sense strand
aacagugucuuucugauca

SEQ ID NO: 378741 - RNA, 19 nt, Homo sapiens
  misc_RNA (1)...(19): siRNA sense strand
ggaaugucaccguggagaa

SEQ ID NO: 378742 - RNA, 19 nt, Homo sapiens
  misc_RNA (1)...(19): siRNA sense strand
ccaauggucccggcuugua

SEQ ID NO: 378743 - RNA, 19 nt, Homo sapiens
  misc_RNA (1)...(19): siRNA sense strand
caccauggcccugaguaua

SEQ ID NO: 378744 - RNA, 19 nt, Homo sapiens
  misc_RNA (1)...(19): siRNA sense strand
uggagaaugucaagcugaa

SEQ ID NO: 378745 - RNA, 19 nt, Homo sapiens
  misc_RNA (1)...(19): siRNA sense strand
cuaccacccuggaugacaa

SEQ ID NO: 378746 - RNA, 19 nt, Homo sapiens
  misc_RNA (1)...(19): siRNA sense strand
ggucuucucggcuccauau

SEQ ID NO: 378747 - RNA, 19 nt, Homo sapiens
  misc_RNA (1)...(19): siRNA sense strand
caacagugucuuucugauc

SEQ ID NO: 378748 - RNA, 19 nt, Homo sapiens
  misc_RNA (1)...(19): siRNA sense strand
uagcccacaucuagucuug

SEQ ID NO: 378749 - RNA, 19 nt, Homo sapiens
  misc_RNA (1)...(19): siRNA sense strand
cagagagauggaagaauuu

SEQ ID NO: 378750 - RNA, 19 nt, Homo sapiens
  misc_RNA (1)...(19): siRNA sense strand
gcccacaucuagucuuguc

SEQ ID NO: 378751 - RNA, 19 nt, Homo sapiens
  misc_RNA (1)...(19): siRNA sense strand
gaaugucaccguggagaau

SEQ ID NO: 378752 - RNA, 19 nt, Homo sapiens
  misc_RNA (1)...(19): siRNA sense strand
acccaaaguugcuccaaga

SEQ ID NO: 378753 - RNA, 19 nt, Homo sapiens
  misc_RNA (1)...(19): siRNA sense strand
ccaaaguugcuccaagaug

SEQ ID NO: 378754 - RNA, 19 nt, Homo sapiens
  misc_RNA (1)...(19): siRNA sense strand
ccucauccauggucccaau

SEQ ID NO: 378755 - RNA, 19 nt, Homo sapiens
  misc_RNA (1)...(19): siRNA sense strand
guagacggagccuugugua

SEQ ID NO: 378756 - RNA, 19 nt, Homo sapiens
  misc_RNA (1)...(19): siRNA sense strand
aaaagaaggagaaaggaua

SEQ ID NO: 378757 - RNA, 19 nt, Homo sapiens
  misc_RNA (1)...(19): siRNA sense strand
ggagccuuguguauggaaa

SEQ ID NO: 378758 - RNA, 19 nt, Homo sapiens
  misc_RNA (1)...(19): siRNA sense strand
ccaugggaauguugcugaa

SEQ ID NO: 378759 - RNA, 19 nt, Homo sapiens
  misc_RNA (1)...(19): siRNA sense strand
gcuccaagaugaauuuccu

SEQ ID NO: 378760 - RNA, 19 nt, Homo sapiens
  misc_RNA (1)...(19): siRNA sense strand
ccauggcccugaguauaug

SEQ ID NO: 378761 - RNA, 19 nt, Homo sapiens
  misc_RNA (1)...(19): siRNA sense strand
ugugguggcuggaccugaa

SEQ ID NO: 378762 - RNA, 19 nt, Homo sapiens
  misc_RNA (1)...(19): siRNA sense strand
gcuggucucuggccauugc

SEQ ID NO: 378763 - RNA, 19 nt, Homo sapiens
  misc_RNA (1)...(19): siRNA sense strand
gucccaauuuguacugcua

SEQ ID NO: 378764 - RNA, 19 nt, Homo sapiens
  misc_RNA (1)...(19): siRNA sense strand
agacggagccuuguguaug

SEQ ID NO: 378765 - RNA, 19 nt, Homo sapiens
  misc_RNA (1)...(19): siRNA sense strand
cgggauggcuggcauagcu

SEQ ID NO: 378766 - RNA, 19 nt, Homo sapiens
  misc_RNA (1)...(19): siRNA sense strand
gguauacccuccugaaaag

SEQ ID NO: 378767 - RNA, 19 nt, Homo sapiens
  misc_RNA (1)...(19): siRNA sense strand
ccagggcacccagguauau

SEQ ID NO: 378768 - RNA, 19 nt, Homo sapiens
  misc_RNA (1)...(19): siRNA sense strand
cacaacagugucuuucuga

SEQ ID NO: 378769 - RNA, 19 nt, Homo sapiens
  misc_RNA (1)...(19): siRNA sense strand
gcuggcccauugcucauca

SEQ ID NO: 378770 - RNA, 19 nt, Homo sapiens
  misc_RNA (1)...(19): siRNA sense strand
gaaaagaaggagaaaggau

SEQ ID NO: 378771 - RNA, 19 nt, Homo sapiens
  misc_RNA (1)...(19): siRNA sense strand
uccauggucccaauuugua

SEQ ID NO: 378772 - RNA, 19 nt, Homo sapiens
  misc_RNA (1)...(19): siRNA sense strand
aaaagucccuuggcccuaa

SEQ ID NO: 378773 - RNA, 19 nt, Homo sapiens
  misc_RNA (1)...(19): siRNA sense strand
cacccuggaugacaaugga

SEQ ID NO: 378774 - RNA, 19 nt, Homo sapiens
  misc_RNA (1)...(19): siRNA sense strand
gcgagugguucugggacuu

SEQ ID NO: 378775 - RNA, 19 nt, Homo sapiens
  misc_RNA (1)...(19): siRNA sense strand
agaaaggauacccaaaguu

SEQ ID NO: 378776 - RNA, 19 nt, Homo sapiens
  misc_RNA (1)...(19): siRNA sense strand
ggccauggacacaggaaug

SEQ ID NO: 378777 - RNA, 19 nt, Homo sapiens
  misc_RNA (1)...(19): siRNA sense strand
gguagacggagccuugugu

SEQ ID NO: 378778 - RNA, 19 nt, Homo sapiens
  misc_RNA (1)...(19): siRNA sense strand
cuacgggaaccaugaagga

SEQ ID NO: 378779 - RNA, 19 nt, Homo sapiens
  misc_RNA (1)...(19): siRNA sense strand
ggucacaacagugucuuuc

SEQ ID NO: 378780 - RNA, 19 nt, Homo sapiens
  misc_RNA (1)...(19): siRNA sense strand
cccagaaugugaccagucu

SEQ ID NO: 378781 - RNA, 19 nt, Homo sapiens
  misc_RNA (1)...(19): siRNA sense strand
gacaaagucuggguauacc

SEQ ID NO: 378782 - RNA, 19 nt, Homo sapiens
  misc_RNA (1)...(19): siRNA sense strand
acaacagugucuuucugau

SEQ ID NO: 378783 - RNA, 19 nt, Homo sapiens
  misc_RNA (1)...(19): siRNA sense strand
ggauguccgagacuacuuc

SEQ ID NO: 378784 - RNA, 19 nt, Homo sapiens
  misc_RNA (1)...(19): siRNA sense strand
cuuccaggguaaccaauuc

SEQ ID NO: 378785 - RNA, 19 nt, Homo sapiens
  misc_RNA (1)...(19): siRNA sense strand
aaaguugcuccaagaugaa

SEQ ID NO: 378786 - RNA, 19 nt, Homo sapiens
  misc_RNA (1)...(19): siRNA sense strand
ugacaaagggaggcuauac

SEQ ID NO: 378787 - RNA, 19 nt, Homo sapiens
  misc_RNA (1)...(19): siRNA sense strand
ccaccauggcccugaguau

SEQ ID NO: 378788 - RNA, 19 nt, Homo sapiens
  misc_RNA (1)...(19): siRNA sense strand
uguccgagacuacuucaug

SEQ ID NO: 378789 - RNA, 19 nt, Homo sapiens
  misc_RNA (1)...(19): siRNA sense strand
ggccagcuguugggaacug

SEQ ID NO: 378790 - RNA, 19 nt, Homo sapiens
  misc_RNA (1)...(19): siRNA sense strand
augcagcuguggaauguca

SEQ ID NO: 378791 - RNA, 19 nt, Homo sapiens
  misc_RNA (1)...(19): siRNA sense strand
guugcuccaagaugaauuu

SEQ ID NO: 378792 - RNA, 19 nt, Homo sapiens
  misc_RNA (1)...(19): siRNA sense strand
gucaaggucacaacagugu

SEQ ID NO: 378793 - RNA, 19 nt, Homo sapiens
  misc_RNA (1)...(19): siRNA sense strand
guccagggcacccagguau

SEQ ID NO: 378794 - RNA, 19 nt, Homo sapiens
  misc_RNA (1)...(19): siRNA sense strand
cugaguauaugcgcuguag

SEQ ID NO: 378795 - RNA, 19 nt, Homo sapiens
  misc_RNA (1)...(19): siRNA sense strand
cugcuccucugcccugaga

SEQ ID NO: 378796 - RNA, 19 nt, Homo sapiens
  misc_RNA (1)...(19): siRNA sense strand
gauggaaacucuauuaaag

SEQ ID NO: 378797 - RNA, 19 nt, Homo sapiens
  misc_RNA (1)...(19): siRNA sense strand
gaaccagacugccauggaa

SEQ ID NO: 378798 - RNA, 19 nt, Homo sapiens
  misc_RNA (1)...(19): siRNA sense strand
ggacuggaaugcugaguau

SEQ ID NO: 378799 - RNA, 19 nt, Homo sapiens
  misc_RNA (1)...(19): siRNA sense strand
gacacuaucuggucaggua

SEQ ID NO: 378800 - RNA, 19 nt, Homo sapiens
  misc_RNA (1)...(19): siRNA sense strand
gaucucaucuggacuuugu

SEQ ID NO: 378801 - RNA, 19 nt, Homo sapiens
  misc_RNA (1)...(19): siRNA sense strand
gagaaaagcucaccccaaa

SEQ ID NO: 378802 - RNA, 19 nt, Homo sapiens
  misc_RNA (1)...(19): siRNA sense strand
gcaaagggcugggugagau

SEQ ID NO: 378803 - RNA, 19 nt, Homo sapiens
  misc_RNA (1)...(19): siRNA sense strand
gagagcaguuggugaagaa

SEQ ID NO: 378804 - RNA, 19 nt, Homo sapiens
  misc_RNA (1)...(19): siRNA sense strand
ggacaucaccugcuacuuc

SEQ ID NO: 378805 - RNA, 19 nt, Homo sapiens
  misc_RNA (1)...(19): siRNA sense strand
gaggauggaaacucuauua

SEQ ID NO: 378806 - RNA, 19 nt, Homo sapiens
  misc_RNA (1)...(19): siRNA sense strand
gaacaucagcagcgaagaa

SEQ ID NO: 378807 - RNA, 19 nt, Homo sapiens
  misc_RNA (1)...(19): siRNA sense strand
gggaacagauagagcaaga

SEQ ID NO: 378808 - RNA, 19 nt, Homo sapiens
  misc_RNA (1)...(19): siRNA sense strand
gaagaugccgugauugugu

SEQ ID NO: 378809 - RNA, 19 nt, Homo sapiens
  misc_RNA (1)...(19): siRNA sense strand
gaagaaguauggcauucca

SEQ ID NO: 378810 - RNA, 19 nt, Homo sapiens
  misc_RNA (1)...(19): siRNA sense strand
ggauggaaacucuauuaaa

SEQ ID NO: 378811 - RNA, 19 nt, Homo sapiens
  misc_RNA (1)...(19): siRNA sense strand
gaacgagagcaaagcauga

SEQ ID NO: 378812 - RNA, 19 nt, Homo sapiens
  misc_RNA (1)...(19): siRNA sense strand
auaaagacaucuccugguu

SEQ ID NO: 378813 - RNA, 19 nt, Homo sapiens
  misc_RNA (1)...(19): siRNA sense strand
ggaagacgaugagaaguac

SEQ ID NO: 378814 - RNA, 19 nt, Homo sapiens
  misc_RNA (1)...(19): siRNA sense strand
gaggagcaggucacucuua

SEQ ID NO: 378815 - RNA, 19 nt, Homo sapiens
  misc_RNA (1)...(19): siRNA sense strand
ggagagcaguuggugaaga

SEQ ID NO: 378816 - RNA, 19 nt, Homo sapiens
  misc_RNA (1)...(19): siRNA sense strand
caggagaugccaaagauaa

SEQ ID NO: 378817 - RNA, 19 nt, Homo sapiens
  misc_RNA (1)...(19): siRNA sense strand
aaacagaugagggcacuua

SEQ ID NO: 378818 - RNA, 19 nt, Homo sapiens
  misc_RNA (1)...(19): siRNA sense strand
cgacgaggcugaguacauc

SEQ ID NO: 378819 - RNA, 19 nt, Homo sapiens
  misc_RNA (1)...(19): siRNA sense strand
caaaggagaacgagagcaa

SEQ ID NO: 378820 - RNA, 19 nt, Homo sapiens
  misc_RNA (1)...(19): siRNA sense strand
uggaaacucuauuaaagug

SEQ ID NO: 378821 - RNA, 19 nt, Homo sapiens
  misc_RNA (1)...(19): siRNA sense strand
ucacauauguagagaacca

SEQ ID NO: 378822 - RNA, 19 nt, Homo sapiens
  misc_RNA (1)...(19): siRNA sense strand
acagcaauaucaagaucua

SEQ ID NO: 378823 - RNA, 19 nt, Homo sapiens
  misc_RNA (1)...(19): siRNA sense strand
cgaaagaugaguccaagga

SEQ ID NO: 378824 - RNA, 19 nt, Homo sapiens
  misc_RNA (1)...(19): siRNA sense strand
aaagacaucuccugguucu

SEQ ID NO: 378825 - RNA, 19 nt, Homo sapiens
  misc_RNA (1)...(19): siRNA sense strand
cagcccaggugcaguuuga

SEQ ID NO: 378826 - RNA, 19 nt, Homo sapiens
  misc_RNA (1)...(19): siRNA sense strand
agacugccauggaauuaga

SEQ ID NO: 378827 - RNA, 19 nt, Homo sapiens
  misc_RNA (1)...(19): siRNA sense strand
ggcagaauauugugaaugc

SEQ ID NO: 378828 - RNA, 19 nt, Homo sapiens
  misc_RNA (1)...(19): siRNA sense strand
aaagauguccgauucauag

SEQ ID NO: 378829 - RNA, 19 nt, Homo sapiens
  misc_RNA (1)...(19): siRNA sense strand
gggaagaugccgugauugu

SEQ ID NO: 378830 - RNA, 19 nt, Homo sapiens
  misc_RNA (1)...(19): siRNA sense strand
ccacacagacaaaggagaa

SEQ ID NO: 378831 - RNA, 19 nt, Homo sapiens
  misc_RNA (1)...(19): siRNA sense strand
gggugcccauccucaaaua

SEQ ID NO: 378832 - RNA, 19 nt, Homo sapiens
  misc_RNA (1)...(19): siRNA sense strand
gaacgacgaggcugaguac

SEQ ID NO: 378833 - RNA, 19 nt, Homo sapiens
  misc_RNA (1)...(19): siRNA sense strand
caccaaccaucaucuggaa

SEQ ID NO: 378834 - RNA, 19 nt, Homo sapiens
  misc_RNA (1)...(19): siRNA sense strand
gcaggagaugccaaagaua

SEQ ID NO: 378835 - RNA, 19 nt, Homo sapiens
  misc_RNA (1)...(19): siRNA sense strand
gccacgaucucaugguuuc

SEQ ID NO: 378836 - RNA, 19 nt, Homo sapiens
  misc_RNA (1)...(19): siRNA sense strand
caaggacauucaggucauu

SEQ ID NO: 378837 - RNA, 19 nt, Homo sapiens
  misc_RNA (1)...(19): siRNA sense strand
ggaauucauccuuguucaa

SEQ ID NO: 378838 - RNA, 19 nt, Homo sapiens
  misc_RNA (1)...(19): siRNA sense strand
guucccagcugaccaucaa

SEQ ID NO: 378839 - RNA, 19 nt, Homo sapiens
  misc_RNA (1)...(19): siRNA sense strand
ggaucucagugguguggaa

SEQ ID NO: 378840 - RNA, 19 nt, Homo sapiens
  misc_RNA (1)...(19): siRNA sense strand
ccaauuacagcaauaucaa

SEQ ID NO: 378841 - RNA, 19 nt, Homo sapiens
  misc_RNA (1)...(19): siRNA sense strand
ccagacugccauggaauua

SEQ ID NO: 378842 - RNA, 19 nt, Homo sapiens
  misc_RNA (1)...(19): siRNA sense strand
ucauaguccuguccaacaa

SEQ ID NO: 378843 - RNA, 19 nt, Homo sapiens
  misc_RNA (1)...(19): siRNA sense strand
cagaagcucauguucaaga

SEQ ID NO: 378844 - RNA, 19 nt, Homo sapiens
  misc_RNA (1)...(19): siRNA sense strand
ucagugguguggaaugaug

SEQ ID NO: 378845 - RNA, 19 nt, Homo sapiens
  misc_RNA (1)...(19): siRNA sense strand
gcaauaucaagaucuacaa

SEQ ID NO: 378846 - RNA, 19 nt, Homo sapiens
  misc_RNA (1)...(19): siRNA sense strand
uucagaagcucauguucaa

SEQ ID NO: 378847 - RNA, 19 nt, Homo sapiens
  misc_RNA (1)...(19): siRNA sense strand
ucaagacgguccccaauga

SEQ ID NO: 378848 - RNA, 19 nt, Homo sapiens
  misc_RNA (1)...(19): siRNA sense strand
gugaagaaguauggcauuc

SEQ ID NO: 378849 - RNA, 19 nt, Homo sapiens
  misc_RNA (1)...(19): siRNA sense strand
ugucgucgcugacccugaa

SEQ ID NO: 378850 - RNA, 19 nt, Homo sapiens
  misc_RNA (1)...(19): siRNA sense strand
acagauagagcaagaggaa

SEQ ID NO: 378851 - RNA, 19 nt, Homo sapiens
  misc_RNA (1)...(19): siRNA sense strand
aagcucauguucaagaaug

SEQ ID NO: 378852 - RNA, 19 nt, Homo sapiens
  misc_RNA (1)...(19): siRNA sense strand
ucaaggacauucaggucau

SEQ ID NO: 378853 - RNA, 19 nt, Homo sapiens
  misc_RNA (1)...(19): siRNA sense strand
uuacagcaauaucaagauc

SEQ ID NO: 378854 - RNA, 19 nt, Homo sapiens
  misc_RNA (1)...(19): siRNA sense strand
cugccaagcuccaauuaca

SEQ ID NO: 378855 - RNA, 19 nt, Homo sapiens
  misc_RNA (1)...(19): siRNA sense strand
gugccacgaucucaugguu

SEQ ID NO: 378856 - RNA, 19 nt, Homo sapiens
  misc_RNA (1)...(19): siRNA sense strand
gaguccaaauucuucuuau

SEQ ID NO: 378857 - RNA, 19 nt, Homo sapiens
  misc_RNA (1)...(19): siRNA sense strand
ugccaaagauaaagacauc

SEQ ID NO: 378858 - RNA, 19 nt, Homo sapiens
  misc_RNA (1)...(19): siRNA sense strand
ggaaacucuauuaaaguga

SEQ ID NO: 378859 - RNA, 19 nt, Homo sapiens
  misc_RNA (1)...(19): siRNA sense strand
ggaagaugccgugauugug

SEQ ID NO: 378860 - RNA, 19 nt, Homo sapiens
  misc_RNA (1)...(19): siRNA sense strand
aauccaaggcggcucauuu

SEQ ID NO: 378861 - RNA, 19 nt, Homo sapiens
  misc_RNA (1)...(19): siRNA sense strand
ccuccacccucaccaucua

SEQ ID NO: 378862 - RNA, 19 nt, Homo sapiens
  misc_RNA (1)...(19): siRNA sense strand
gagaugccaaagauaaaga

SEQ ID NO: 378863 - RNA, 19 nt, Homo sapiens
  misc_RNA (1)...(19): siRNA sense strand
ucucagugguguggaauga

SEQ ID NO: 378864 - RNA, 19 nt, Homo sapiens
  misc_RNA (1)...(19): siRNA sense strand
gacauucaggucauuguga

SEQ ID NO: 378865 - RNA, 19 nt, Homo sapiens
  misc_RNA (1)...(19): siRNA sense strand
guggagagcaguuggugaa

SEQ ID NO: 378866 - RNA, 19 nt, Homo sapiens
  misc_RNA (1)...(19): siRNA sense strand
ucgaccagguggagccaua

SEQ ID NO: 378867 - RNA, 19 nt, Homo sapiens
  misc_RNA (1)...(19): siRNA sense strand
aggaagacgaugagaagua

SEQ ID NO: 378868 - RNA, 19 nt, Homo sapiens
  misc_RNA (1)...(19): siRNA sense strand
agaagcucauguucaagaa

SEQ ID NO: 378869 - RNA, 19 nt, Homo sapiens
  misc_RNA (1)...(19): siRNA sense strand
gcaauaugccccaaagcua

SEQ ID NO: 378870 - RNA, 19 nt, Homo sapiens
  misc_RNA (1)...(19): siRNA sense strand
aaacuaaggaucucaucug

SEQ ID NO: 378871 - RNA, 19 nt, Homo sapiens
  misc_RNA (1)...(19): siRNA sense strand
acacaaaggccgagauguc

SEQ ID NO: 378872 - RNA, 19 nt, Homo sapiens
  misc_RNA (1)...(19): siRNA sense strand
ggacauucaggucauugug

SEQ ID NO: 378873 - RNA, 19 nt, Homo sapiens
  misc_RNA (1)...(19): siRNA sense strand
aaucacauauguagagaac

SEQ ID NO: 378874 - RNA, 19 nt, Homo sapiens
  misc_RNA (1)...(19): siRNA sense strand
aaacacaaaggccgagaug

SEQ ID NO: 378875 - RNA, 19 nt, Homo sapiens
  misc_RNA (1)...(19): siRNA sense strand
ggagaacgagagcaaagca

SEQ ID NO: 378876 - RNA, 19 nt, Homo sapiens
  misc_RNA (1)...(19): siRNA sense strand
gcggucaaccuguguggaa

SEQ ID NO: 378877 - RNA, 19 nt, Homo sapiens
  misc_RNA (1)...(19): siRNA sense strand
gugguaugaugccaaggaa

SEQ ID NO: 378878 - RNA, 19 nt, Homo sapiens
  misc_RNA (1)...(19): siRNA sense strand
gaaguauggcauuccaagu

SEQ ID NO: 378879 - RNA, 19 nt, Homo sapiens
  misc_RNA (1)...(19): siRNA sense strand
agcaguuggugaagaagua

SEQ ID NO: 378880 - RNA, 19 nt, Homo sapiens
  misc_RNA (1)...(19): siRNA sense strand
gcaagaggaagacgaugag

SEQ ID NO: 378881 - RNA, 19 nt, Homo sapiens
  misc_RNA (1)...(19): siRNA sense strand
accaugagcuggacaaagg

SEQ ID NO: 378882 - RNA, 19 nt, Homo sapiens
  misc_RNA (1)...(19): siRNA sense strand
caacaacuaccugcagauc

SEQ ID NO: 378883 - RNA, 19 nt, Homo sapiens
  misc_RNA (1)...(19): siRNA sense strand
gaaacacaaaggccgagau

SEQ ID NO: 378884 - RNA, 19 nt, Homo sapiens
  misc_RNA (1)...(19): siRNA sense strand
gccaggagacagaaacgaa

SEQ ID NO: 378885 - RNA, 19 nt, Homo sapiens
  misc_RNA (1)...(19): siRNA sense strand
aagugaaccugaucaagca

SEQ ID NO: 378886 - RNA, 19 nt, Homo sapiens
  misc_RNA (1)...(19): siRNA sense strand
gcugaguacaucugcauug

SEQ ID NO: 378887 - RNA, 19 nt, Homo sapiens
  misc_RNA (1)...(19): siRNA sense strand
caucaucuggaaacacaaa

SEQ ID NO: 378888 - RNA, 19 nt, Homo sapiens
  misc_RNA (1)...(19): siRNA sense strand
gaccauccaccucaaaguc

SEQ ID NO: 378889 - RNA, 19 nt, Homo sapiens
  misc_RNA (1)...(19): siRNA sense strand
agaguccaaauucuucuua

SEQ ID NO: 378890 - RNA, 19 nt, Homo sapiens
  misc_RNA (1)...(19): siRNA sense strand
caaccaucaucuggaaaca

SEQ ID NO: 378891 - RNA, 19 nt, Homo sapiens
  misc_RNA (1)...(19): siRNA sense strand
ggagaugccaaagauaaag

SEQ ID NO: 378892 - RNA, 19 nt, Homo sapiens
  misc_RNA (1)...(19): siRNA sense strand
cuauuaaagugaaccugau

SEQ ID NO: 378893 - RNA, 19 nt, Homo sapiens
  misc_RNA (1)...(19): siRNA sense strand
ggugaagaaguauggcauu

SEQ ID NO: 378894 - RNA, 19 nt, Homo sapiens
  misc_RNA (1)...(19): siRNA sense strand
agauagagcaagaggaaga

SEQ ID NO: 378895 - RNA, 19 nt, Homo sapiens
  misc_RNA (1)...(19): siRNA sense strand
gaucaacuucaaggacauu

SEQ ID NO: 378896 - RNA, 19 nt, Homo sapiens
  misc_RNA (1)...(19): siRNA sense strand
gagcagcuguccaacauga

SEQ ID NO: 378897 - RNA, 19 nt, Homo sapiens
  misc_RNA (1)...(19): siRNA sense strand
cgaaaucuaugacaaguuc

SEQ ID NO: 378898 - RNA, 19 nt, Homo sapiens
  misc_RNA (1)...(19): siRNA sense strand
gcaaggaccucggcuggaa

SEQ ID NO: 378899 - RNA, 19 nt, Homo sapiens
  misc_RNA (1)...(19): siRNA sense strand
gaaccggccuuuccugcuu

SEQ ID NO: 378900 - RNA, 19 nt, Homo sapiens
  misc_RNA (1)...(19): siRNA sense strand
gcaagacuaucgacaugga

SEQ ID NO: 378901 - RNA, 19 nt, Homo sapiens
  misc_RNA (1)...(19): siRNA sense strand
gcaagguccuggcccugua

SEQ ID NO: 378902 - RNA, 19 nt, Homo sapiens
  misc_RNA (1)...(19): siRNA sense strand
guacacacagcauauauau

SEQ ID NO: 378903 - RNA, 19 nt, Homo sapiens
  misc_RNA (1)...(19): siRNA sense strand
gcagaguacacacagcaua

SEQ ID NO: 378904 - RNA, 19 nt, Homo sapiens
  misc_RNA (1)...(19): siRNA sense strand
auugagggcuuucgccuua

SEQ ID NO: 378905 - RNA, 19 nt, Homo sapiens
  misc_RNA (1)...(19): siRNA sense strand
agaaauacagcaacaauuc

SEQ ID NO: 378906 - RNA, 19 nt, Homo sapiens
  misc_RNA (1)...(19): siRNA sense strand
gggcuaccaugccaacuuc

SEQ ID NO: 378907 - RNA, 19 nt, Homo sapiens
  misc_RNA (1)...(19): siRNA sense strand
acaacgaaaucuaugacaa

SEQ ID NO: 378908 - RNA, 19 nt, Homo sapiens
  misc_RNA (1)...(19): siRNA sense strand
caacgaaaucuaugacaag

SEQ ID NO: 378909 - RNA, 19 nt, Homo sapiens
  misc_RNA (1)...(19): siRNA sense strand
cagaaauacagcaacaauu

SEQ ID NO: 378910 - RNA, 19 nt, Homo sapiens
  misc_RNA (1)...(19): siRNA sense strand
ggacuauccaccugcaaga

SEQ ID NO: 378911 - RNA, 19 nt, Homo sapiens
  misc_RNA (1)...(19): siRNA sense strand
gcaacaauuccuggcgaua

SEQ ID NO: 378912 - RNA, 19 nt, Homo sapiens
  misc_RNA (1)...(19): siRNA sense strand
ggaaacccacaacgaaauc

SEQ ID NO: 378913 - RNA, 19 nt, Homo sapiens
  misc_RNA (1)...(19): siRNA sense strand
gacaucaacggguucacua

SEQ ID NO: 378914 - RNA, 19 nt, Homo sapiens
  misc_RNA (1)...(19): siRNA sense strand
ccagaaauacagcaacaau

SEQ ID NO: 378915 - RNA, 19 nt, Homo sapiens
  misc_RNA (1)...(19): siRNA sense strand
gaguacacacagcauauau

SEQ ID NO: 378916 - RNA, 19 nt, Homo sapiens
  misc_RNA (1)...(19): siRNA sense strand
ugcggcagcuguacauuga

SEQ ID NO: 378917 - RNA, 19 nt, Homo sapiens
  misc_RNA (1)...(19): siRNA sense strand
gacaccaacuauugcuuca

SEQ ID NO: 378918 - RNA, 19 nt, Homo sapiens
  misc_RNA (1)...(19): siRNA sense strand
cugcaagacuaucgacaug

SEQ ID NO: 378919 - RNA, 19 nt, Homo sapiens
  misc_RNA (1)...(19): siRNA sense strand
acguggagcuguaccagaa

SEQ ID NO: 378920 - RNA, 19 nt, Homo sapiens
  misc_RNA (1)...(19): siRNA sense strand
uaccagaaauacagcaaca

SEQ ID NO: 378921 - RNA, 19 nt, Homo sapiens
  misc_RNA (1)...(19): siRNA sense strand
gacaaguucaagcagagua

SEQ ID NO: 378922 - RNA, 19 nt, Homo sapiens
  misc_RNA (1)...(19): siRNA sense strand
cagaguacacacagcauau

SEQ ID NO: 378923 - RNA, 19 nt, Homo sapiens
  misc_RNA (1)...(19): siRNA sense strand
cuauccaccugcaagacua

SEQ ID NO: 378924 - RNA, 19 nt, Homo sapiens
  misc_RNA (1)...(19): siRNA sense strand
gcccacugcuccugugaca

SEQ ID NO: 378925 - RNA, 19 nt, Homo sapiens
  misc_RNA (1)...(19): siRNA sense strand
ccagagugguuaucuuuug

SEQ ID NO: 378926 - RNA, 19 nt, Homo sapiens
  misc_RNA (1)...(19): siRNA sense strand
cgccagagugguuaucuuu

SEQ ID NO: 378927 - RNA, 19 nt, Homo sapiens
  misc_RNA (1)...(19): siRNA sense strand
gaggucacccgcgugcuaa

SEQ ID NO: 378928 - RNA, 19 nt, Homo sapiens
  misc_RNA (1)...(19): siRNA sense strand
gaaauacagcaacaauucc

SEQ ID NO: 378929 - RNA, 19 nt, Homo sapiens
  misc_RNA (1)...(19): siRNA sense strand
ccgagaagcgguaccugaa

SEQ ID NO: 378930 - RNA, 19 nt, Homo sapiens
  misc_RNA (1)...(19): siRNA sense strand
gcggccagauccuguccaa

SEQ ID NO: 378931 - RNA, 19 nt, Homo sapiens
  misc_RNA (1)...(19): siRNA sense strand
guggagcuguaccagaaau

SEQ ID NO: 378932 - RNA, 19 nt, Homo sapiens
  misc_RNA (1)...(19): siRNA sense strand
gaccuggccaccauucaug

SEQ ID NO: 378933 - RNA, 19 nt, Homo sapiens
  misc_RNA (1)...(19): siRNA sense strand
caacaauuccuggcgauac

SEQ ID NO: 378934 - RNA, 19 nt, Homo sapiens
  misc_RNA (1)...(19): siRNA sense strand
agaguacacacagcauaua

SEQ ID NO: 378935 - RNA, 19 nt, Homo sapiens
  misc_RNA (1)...(19): siRNA sense strand
gcagcuguccaacaugauc

SEQ ID NO: 378936 - RNA, 19 nt, Homo sapiens
  misc_RNA (1)...(19): siRNA sense strand
gggauaacacacugcaagu

SEQ ID NO: 378937 - RNA, 19 nt, Homo sapiens
  misc_RNA (1)...(19): siRNA sense strand
gcagcuguacauugacuuc

SEQ ID NO: 378938 - RNA, 19 nt, Homo sapiens
  misc_RNA (1)...(19): siRNA sense strand
gugcggcagcuguacauug

SEQ ID NO: 378939 - RNA, 19 nt, Homo sapiens
  misc_RNA (1)...(19): siRNA sense strand
ggacaucaacggguucacu

SEQ ID NO: 378940 - RNA, 19 nt, Homo sapiens
  misc_RNA (1)...(19): siRNA sense strand
aguacacacagcauauaua

SEQ ID NO: 378941 - RNA, 19 nt, Homo sapiens
  misc_RNA (1)...(19): siRNA sense strand
ugacagcagggauaacaca

SEQ ID NO: 378942 - RNA, 19 nt, Homo sapiens
  misc_RNA (1)...(19): siRNA sense strand
gcccuggacaccaacuauu

SEQ ID NO: 378943 - RNA, 19 nt, Homo sapiens
  misc_RNA (1)...(19): siRNA sense strand
aaacccacaacgaaaucua

SEQ ID NO: 378944 - RNA, 19 nt, Homo sapiens
  misc_RNA (1)...(19): siRNA sense strand
uggaaacccacaacgaaau

SEQ ID NO: 378945 - RNA, 19 nt, Homo sapiens
  misc_RNA (1)...(19): siRNA sense strand
gcacagagcugcccgagaa

SEQ ID NO: 378946 - RNA, 19 nt, Homo sapiens
  misc_RNA (1)...(19): siRNA sense strand
agaagcagcugccauauua

SEQ ID NO: 378947 - RNA, 19 nt, Homo sapiens
  misc_RNA (1)...(19): siRNA sense strand
gggagcagcugucggagua

SEQ ID NO: 378948 - RNA, 19 nt, Homo sapiens
  misc_RNA (1)...(19): siRNA sense strand
ggaguggacuuuguucuga

SEQ ID NO: 378949 - RNA, 19 nt, Homo sapiens
  misc_RNA (1)...(19): siRNA sense strand
gaaccuggccaacaagauu

SEQ ID NO: 378950 - RNA, 19 nt, Homo sapiens
  misc_RNA (1)...(19): siRNA sense strand
ggaaugacuucgccgacuu

SEQ ID NO: 378951 - RNA, 19 nt, Homo sapiens
  misc_RNA (1)...(19): siRNA sense strand
ggcccgagaugaccaaauu

SEQ ID NO: 378952 - RNA, 19 nt, Homo sapiens
  misc_RNA (1)...(19): siRNA sense strand
gcaaguacuggcugaauga

SEQ ID NO: 378953 - RNA, 19 nt, Homo sapiens
  misc_RNA (1)...(19): siRNA sense strand
ugaaggaccugaccuaugc

SEQ ID NO: 378954 - RNA, 19 nt, Homo sapiens
  misc_RNA (1)...(19): siRNA sense strand
ugaaguacaucacgcugaa

SEQ ID NO: 378955 - RNA, 19 nt, Homo sapiens
  misc_RNA (1)...(19): siRNA sense strand
agaagaagcagcugccaua

SEQ ID NO: 378956 - RNA, 19 nt, Homo sapiens
  misc_RNA (1)...(19): siRNA sense strand
ugaacgaugucuacgugua

SEQ ID NO: 378957 - RNA, 19 nt, Homo sapiens
  misc_RNA (1)...(19): siRNA sense strand
gcacugacgacuacaucua

SEQ ID NO: 378958 - RNA, 19 nt, Homo sapiens
  misc_RNA (1)...(19): siRNA sense strand
auaagaaccuggccaacaa

SEQ ID NO: 378959 - RNA, 19 nt, Homo sapiens
  misc_RNA (1)...(19): siRNA sense strand
ggagaugagaacccuauuu

SEQ ID NO: 378960 - RNA, 19 nt, Homo sapiens
  misc_RNA (1)...(19): siRNA sense strand
gaacaguguggccaucuga

SEQ ID NO: 378961 - RNA, 19 nt, Homo sapiens
  misc_RNA (1)...(19): siRNA sense strand
gaacuggaaacacggcaaa

SEQ ID NO: 378962 - RNA, 19 nt, Homo sapiens
  misc_RNA (1)...(19): siRNA sense strand
ggacaagcccuucuacaac

SEQ ID NO: 378963 - RNA, 19 nt, Homo sapiens
  misc_RNA (1)...(19): siRNA sense strand
cgagaagccugugaaggaa

SEQ ID NO: 378964 - RNA, 19 nt, Homo sapiens
  misc_RNA (1)...(19): siRNA sense strand
uggacuuuguucugaauua

SEQ ID NO: 378965 - RNA, 19 nt, Homo sapiens
  misc_RNA (1)...(19): siRNA sense strand
gaaugacuucgccgacuuu

SEQ ID NO: 378966 - RNA, 19 nt, Homo sapiens
  misc_RNA (1)...(19): siRNA sense strand
gcauggagagcaaagaaga

SEQ ID NO: 378967 - RNA, 19 nt, Homo sapiens
  misc_RNA (1)...(19): siRNA sense strand
gaaucgagaagcgcaagua

SEQ ID NO: 378968 - RNA, 19 nt, Homo sapiens
  misc_RNA (1)...(19): siRNA sense strand
gcugccauauuacuacuug

SEQ ID NO: 378969 - RNA, 19 nt, Homo sapiens
  misc_RNA (1)...(19): siRNA sense strand
ggauggacgcgcaaaguug

SEQ ID NO: 378970 - RNA, 19 nt, Homo sapiens
  misc_RNA (1)...(19): siRNA sense strand
ccaaagcgauggagaaccu

SEQ ID NO: 378971 - RNA, 19 nt, Homo sapiens
  misc_RNA (1)...(19): siRNA sense strand
ccauccagcucaaccaaau

SEQ ID NO: 378972 - RNA, 19 nt, Homo sapiens
  misc_RNA (1)...(19): siRNA sense strand
aggaagaccugauguuugg

SEQ ID NO: 378973 - RNA, 19 nt, Homo sapiens
  misc_RNA (1)...(19): siRNA sense strand
aagaucagcaacacuauuu

SEQ ID NO: 378974 - RNA, 19 nt, Homo sapiens
  misc_RNA (1)...(19): siRNA sense strand
ccaucugcuugcuguauaa

SEQ ID NO: 378975 - RNA, 19 nt, Homo sapiens
  misc_RNA (1)...(19): siRNA sense strand
gaguggacuuuguucugaa

SEQ ID NO: 378976 - RNA, 19 nt, Homo sapiens
  misc_RNA (1)...(19): siRNA sense strand
gaagaagcagcugccauau

SEQ ID NO: 378977 - RNA, 19 nt, Homo sapiens
  misc_RNA (1)...(19): siRNA sense strand
gggaagccaucaggacguu

SEQ ID NO: 378978 - RNA, 19 nt, Homo sapiens
  misc_RNA (1)...(19): siRNA sense strand
gcaacaccgacguaaagaa

SEQ ID NO: 378979 - RNA, 19 nt, Homo sapiens
  misc_RNA (1)...(19): siRNA sense strand
ucgagaagccugugaagga

SEQ ID NO: 378980 - RNA, 19 nt, Homo sapiens
  misc_RNA (1)...(19): siRNA sense strand
gagaugagaacccuauuuu

SEQ ID NO: 378981 - RNA, 19 nt, Homo sapiens
  misc_RNA (1)...(19): siRNA sense strand
caagaucagcaacacuauu

SEQ ID NO: 378982 - RNA, 19 nt, Homo sapiens
  misc_RNA (1)...(19): siRNA sense strand
gucaagaucagcaacacua

SEQ ID NO: 378983 - RNA, 19 nt, Homo sapiens
  misc_RNA (1)...(19): siRNA sense strand
ggacuuuguucugaauuac

SEQ ID NO: 378984 - RNA, 19 nt, Homo sapiens
  misc_RNA (1)...(19): siRNA sense strand
caucuggugucugagguuu

SEQ ID NO: 378985 - RNA, 19 nt, Homo sapiens
  misc_RNA (1)...(19): siRNA sense strand
gaacgaugucuacguguac

SEQ ID NO: 378986 - RNA, 19 nt, Homo sapiens
  misc_RNA (1)...(19): siRNA sense strand
gggauggacgcgcaaaguu

SEQ ID NO: 378987 - RNA, 19 nt, Homo sapiens
  misc_RNA (1)...(19): siRNA sense strand
gggcauggagagcaaagaa

SEQ ID NO: 378988 - RNA, 19 nt, Homo sapiens
  misc_RNA (1)...(19): siRNA sense strand
gcuaccaguuccugaaugg

SEQ ID NO: 378989 - RNA, 19 nt, Homo sapiens
  misc_RNA (1)...(19): siRNA sense strand
cccgugauauccaguuuga

SEQ ID NO: 378990 - RNA, 19 nt, Homo sapiens
  misc_RNA (1)...(19): siRNA sense strand
caagcaacaccgacguaaa

SEQ ID NO: 378991 - RNA, 19 nt, Homo sapiens
  misc_RNA (1)...(19): siRNA sense strand
caccggcgaugucgagguu

SEQ ID NO: 378992 - RNA, 19 nt, Homo sapiens
  misc_RNA (1)...(19): siRNA sense strand
ggagagcaaagaagacauc

SEQ ID NO: 378993 - RNA, 19 nt, Homo sapiens
  misc_RNA (1)...(19): siRNA sense strand
cccaucugcuugcuguaua

SEQ ID NO: 378994 - RNA, 19 nt, Homo sapiens
  misc_RNA (1)...(19): siRNA sense strand
gaccaaauucacauucuca

SEQ ID NO: 378995 - RNA, 19 nt, Homo sapiens
  misc_RNA (1)...(19): siRNA sense strand
caacaccgacguaaagaac

SEQ ID NO: 378996 - RNA, 19 nt, Homo sapiens
  misc_RNA (1)...(19): siRNA sense strand
ccauugcaaucaacaccaa

SEQ ID NO: 378997 - RNA, 19 nt, Homo sapiens
  misc_RNA (1)...(19): siRNA sense strand
gcaaaguuggcccgagaug

SEQ ID NO: 378998 - RNA, 19 nt, Homo sapiens
  misc_RNA (1)...(19): siRNA sense strand
aagaagacauccccuacua

SEQ ID NO: 378999 - RNA, 19 nt, Homo sapiens
  misc_RNA (1)...(19): siRNA sense strand
cugcgaguguggccucuuu

SEQ ID NO: 379000 - RNA, 19 nt, Homo sapiens
  misc_RNA (1)...(19): siRNA sense strand
ucugcuugcuguauaagaa

SEQ ID NO: 379001 - RNA, 19 nt, Homo sapiens
  misc_RNA (1)...(19): siRNA sense strand
aaauucacauucucaagca

SEQ ID NO: 379002 - RNA, 19 nt, Homo sapiens
  misc_RNA (1)...(19): siRNA sense strand
caaaguuggcccgagauga

SEQ ID NO: 379003 - RNA, 19 nt, Homo sapiens
  misc_RNA (1)...(19): siRNA sense strand
gcugagcgcaacaagaaga

SEQ ID NO: 379004 - RNA, 19 nt, Homo sapiens
  misc_RNA (1)...(19): siRNA sense strand
gaagccaucaggacguuca

SEQ ID NO: 379005 - RNA, 19 nt, Homo sapiens
  misc_RNA (1)...(19): siRNA sense strand
gaguguggccucuuugaca

SEQ ID NO: 379006 - RNA, 19 nt, Homo sapiens
  misc_RNA (1)...(19): siRNA sense strand
gaucagcaacacuauuucu

SEQ ID NO: 379007 - RNA, 19 nt, Homo sapiens
  misc_RNA (1)...(19): siRNA sense strand
cgacguaaagaacuggaaa

SEQ ID NO: 379008 - RNA, 19 nt, Homo sapiens
  misc_RNA (1)...(19): siRNA sense strand
gagaugaccaaauucacau

SEQ ID NO: 379009 - RNA, 19 nt, Homo sapiens
  misc_RNA (1)...(19): siRNA sense strand
cgagaugaccaaauucaca

SEQ ID NO: 379010 - RNA, 19 nt, Homo sapiens
  misc_RNA (1)...(19): siRNA sense strand
uggacaagcccuucuacaa

SEQ ID NO: 379011 - RNA, 19 nt, Homo sapiens
  misc_RNA (1)...(19): siRNA sense strand
cgcaaguacuggcugaaug

SEQ ID NO: 379012 - RNA, 19 nt, Homo sapiens
  misc_RNA (1)...(19): siRNA sense strand
guucaucaaccgcuucaug

SEQ ID NO: 379013 - RNA, 19 nt, Homo sapiens
  misc_RNA (1)...(19): siRNA sense strand
gaccaucacccaccuucug

SEQ ID NO: 379014 - RNA, 19 nt, Homo sapiens
  misc_RNA (1)...(19): siRNA sense strand
gauguuuggcuaccaguuc

SEQ ID NO: 379015 - RNA, 19 nt, Homo sapiens
  misc_RNA (1)...(19): siRNA sense strand
agauccagcuggucagaau

SEQ ID NO: 379016 - RNA, 19 nt, Homo sapiens
  misc_RNA (1)...(19): siRNA sense strand
gccaaaugccacaaggauu

SEQ ID NO: 379017 - RNA, 19 nt, Homo sapiens
  misc_RNA (1)...(19): siRNA sense strand
aagaagcagcugccauauu

SEQ ID NO: 379018 - RNA, 19 nt, Homo sapiens
  misc_RNA (1)...(19): siRNA sense strand
ccaugaaggaccugaccua

SEQ ID NO: 379019 - RNA, 19 nt, Homo sapiens
  misc_RNA (1)...(19): siRNA sense strand
uauaagaaccuggccaaca

SEQ ID NO: 379020 - RNA, 19 nt, Homo sapiens
  misc_RNA (1)...(19): siRNA sense strand
ugacuucgccgacuuugag

SEQ ID NO: 379021 - RNA, 19 nt, Homo sapiens
  misc_RNA (1)...(19): siRNA sense strand
gaugaccaaauucacauuc

SEQ ID NO: 379022 - RNA, 19 nt, Homo sapiens
  misc_RNA (1)...(19): siRNA sense strand
acccggagcugcaggacuu

SEQ ID NO: 379023 - RNA, 19 nt, Homo sapiens
  misc_RNA (1)...(19): siRNA sense strand
guucacggccgagguggua

SEQ ID NO: 379024 - RNA, 19 nt, Homo sapiens
  misc_RNA (1)...(19): siRNA sense strand
gcugguggcacacgugaga

SEQ ID NO: 379025 - RNA, 19 nt, Homo sapiens
  misc_RNA (1)...(19): siRNA sense strand
guucugaauuacuccaaag

SEQ ID NO: 379026 - RNA, 19 nt, Homo sapiens
  misc_RNA (1)...(19): siRNA sense strand
aagcaacaccgacguaaag

SEQ ID NO: 379027 - RNA, 19 nt, Homo sapiens
  misc_RNA (1)...(19): siRNA sense strand
cugagcgggucaugaauca

SEQ ID NO: 379028 - RNA, 19 nt, Homo sapiens
  misc_RNA (1)...(19): siRNA sense strand
gcgaguguggccucuuuga

SEQ ID NO: 379029 - RNA, 19 nt, Homo sapiens
  misc_RNA (1)...(19): siRNA sense strand
aggaagccauggcccgauu

SEQ ID NO: 379030 - RNA, 19 nt, Homo sapiens
  misc_RNA (1)...(19): siRNA sense strand
ucaagcaacaccgacguaa

SEQ ID NO: 379031 - RNA, 19 nt, Homo sapiens
  misc_RNA (1)...(19): siRNA sense strand
cgaacaguguggccaucug

SEQ ID NO: 379032 - RNA, 19 nt, Homo sapiens
  misc_RNA (1)...(19): siRNA sense strand
gcagcugccauauuacuac

SEQ ID NO: 379033 - RNA, 19 nt, Homo sapiens
  misc_RNA (1)...(19): siRNA sense strand
gggcauguacccagaagag

SEQ ID NO: 379034 - RNA, 19 nt, Homo sapiens
  misc_RNA (1)...(19): siRNA sense strand
guccagcaagggaacauuu

SEQ ID NO: 379035 - RNA, 19 nt, Homo sapiens
  misc_RNA (1)...(19): siRNA sense strand
acaccgacguaaagaacug

SEQ ID NO: 379036 - RNA, 19 nt, Homo sapiens
  misc_RNA (1)...(19): siRNA sense strand
ccaaaucccgggagaugag

SEQ ID NO: 379037 - RNA, 19 nt, Homo sapiens
  misc_RNA (1)...(19): siRNA sense strand
ugaccaaauucacauucuc

SEQ ID NO: 379038 - RNA, 19 nt, Homo sapiens
  misc_RNA (1)...(19): siRNA sense strand
ucgagaagcgcaaguacug

SEQ ID NO: 379039 - RNA, 19 nt, Homo sapiens
  misc_RNA (1)...(19): siRNA sense strand
uuucugagcgggucaugaa

SEQ ID NO: 379040 - RNA, 19 nt, Homo sapiens
  misc_RNA (1)...(19): siRNA sense strand
gagcgggucaugaaucacu

SEQ ID NO: 379041 - RNA, 19 nt, Homo sapiens
  misc_RNA (1)...(19): siRNA sense strand
aguguggccucuuugacaa

SEQ ID NO: 379042 - RNA, 19 nt, Homo sapiens
  misc_RNA (1)...(19): siRNA sense strand
ccauugccauccagcucaa

SEQ ID NO: 379043 - RNA, 19 nt, Homo sapiens
  misc_RNA (1)...(19): siRNA sense strand
cggccgaggugguagacau

SEQ ID NO: 379044 - RNA, 19 nt, Homo sapiens
  misc_RNA (1)...(19): siRNA sense strand
gcgcaaguacuggcugaau

SEQ ID NO: 379045 - RNA, 19 nt, Homo sapiens
  misc_RNA (1)...(19): siRNA sense strand
caacuucgcugccacacuu

SEQ ID NO: 379046 - RNA, 19 nt, Homo sapiens
  misc_RNA (1)...(19): siRNA sense strand
gaacgccacuucgucacua

SEQ ID NO: 379047 - RNA, 19 nt, Homo sapiens
  misc_RNA (1)...(19): siRNA sense strand
ggaugguaaugauguguuu

SEQ ID NO: 379048 - RNA, 19 nt, Homo sapiens
  misc_RNA (1)...(19): siRNA sense strand
gguauggcaucaugucaau

SEQ ID NO: 379049 - RNA, 19 nt, Homo sapiens
  misc_RNA (1)...(19): siRNA sense strand
ccagaugccuguccacuac

SEQ ID NO: 379050 - RNA, 19 nt, Homo sapiens
  misc_RNA (1)...(19): siRNA sense strand
ggaggcaggugugcugaug

SEQ ID NO: 379051 - RNA, 19 nt, Homo sapiens
  misc_RNA (1)...(19): siRNA sense strand
agaaggugcugaagcucua

SEQ ID NO: 379052 - RNA, 19 nt, Homo sapiens
  misc_RNA (1)...(19): siRNA sense strand
gaggucaauuacugggaua

SEQ ID NO: 379053 - RNA, 19 nt, Homo sapiens
  misc_RNA (1)...(19): siRNA sense strand
gaaccagcccuuccucauc

SEQ ID NO: 379054 - RNA, 19 nt, Homo sapiens
  misc_RNA (1)...(19): siRNA sense strand
uggaugaggucaauuacug

SEQ ID NO: 379055 - RNA, 19 nt, Homo sapiens
  misc_RNA (1)...(19): siRNA sense strand
gcaagcagcaggagucucu

SEQ ID NO: 379056 - RNA, 19 nt, Homo sapiens
  misc_RNA (1)...(19): siRNA sense strand
ggccggaucuccuucuaca

SEQ ID NO: 379057 - RNA, 19 nt, Homo sapiens
  misc_RNA (1)...(19): siRNA sense strand
ugacacugcuuaacaccau

SEQ ID NO: 379058 - RNA, 19 nt, Homo sapiens
  misc_RNA (1)...(19): siRNA sense strand
ccacuacggcugcaaggaa

SEQ ID NO: 379059 - RNA, 19 nt, Homo sapiens
  misc_RNA (1)...(19): siRNA sense strand
gcaugacacugcuuaacac

SEQ ID NO: 379060 - RNA, 19 nt, Homo sapiens
  misc_RNA (1)...(19): siRNA sense strand
aggcaggugugcugaugua

SEQ ID NO: 379061 - RNA, 19 nt, Homo sapiens
  misc_RNA (1)...(19): siRNA sense strand
gggaugaggagcaggagaa

SEQ ID NO: 379062 - RNA, 19 nt, Homo sapiens
  misc_RNA (1)...(19): siRNA sense strand
cgaaggagaaggugcugaa

SEQ ID NO: 379063 - RNA, 19 nt, Homo sapiens
  misc_RNA (1)...(19): siRNA sense strand
ccagugcuauggcaacauc

SEQ ID NO: 379064 - RNA, 19 nt, Homo sapiens
  misc_RNA (1)...(19): siRNA sense strand
ccaaccuacucuucucaga

SEQ ID NO: 379065 - RNA, 19 nt, Homo sapiens
  misc_RNA (1)...(19): siRNA sense strand
cggaucuccuucuacauga

SEQ ID NO: 379066 - RNA, 19 nt, Homo sapiens
  misc_RNA (1)...(19): siRNA sense strand
gcccaccucugagcaguau

SEQ ID NO: 379067 - RNA, 19 nt, Homo sapiens
  misc_RNA (1)...(19): siRNA sense strand
ccaacagggucgucaucug

SEQ ID NO: 379068 - RNA, 19 nt, Homo sapiens
  misc_RNA (1)...(19): siRNA sense strand
gcaaggaacgccacuucgu

SEQ ID NO: 379069 - RNA, 19 nt, Homo sapiens
  misc_RNA (1)...(19): siRNA sense strand
gugcugaagcucuacaaga

SEQ ID NO: 379070 - RNA, 19 nt, Homo sapiens
  misc_RNA (1)...(19): siRNA sense strand
ccuucuacaugaccaacua

SEQ ID NO: 379071 - RNA, 19 nt, Homo sapiens
  misc_RNA (1)...(19): siRNA sense strand
ccgcguggaugguaaugau

SEQ ID NO: 379072 - RNA, 19 nt, Homo sapiens
  misc_RNA (1)...(19): siRNA sense strand
gcuauggcaacaucaguga

SEQ ID NO: 379073 - RNA, 19 nt, Homo sapiens
  misc_RNA (1)...(19): siRNA sense strand
ucggcggaguuuauagaua

SEQ ID NO: 379074 - RNA, 19 nt, Homo sapiens
  misc_RNA (1)...(19): siRNA sense strand
cgguggaugaggucaauua

SEQ ID NO: 379075 - RNA, 19 nt, Homo sapiens
  misc_RNA (1)...(19): siRNA sense strand
ccaggcagcagcagcaguu

SEQ ID NO: 379076 - RNA, 19 nt, Homo sapiens
  misc_RNA (1)...(19): siRNA sense strand
caggugugcugauguaucg

SEQ ID NO: 379077 - RNA, 19 nt, Homo sapiens
  misc_RNA (1)...(19): siRNA sense strand
cggcaaggccagaucauca

SEQ ID NO: 379078 - RNA, 19 nt, Homo sapiens
  misc_RNA (1)...(19): siRNA sense strand
ggaagcagucccgcaggaa

SEQ ID NO: 379079 - RNA, 19 nt, Homo sapiens
  misc_RNA (1)...(19): siRNA sense strand
ucaauuacugggauaaaca

SEQ ID NO: 379080 - RNA, 19 nt, Homo sapiens
  misc_RNA (1)...(19): siRNA sense strand
gccagaugccuguccacua

SEQ ID NO: 379081 - RNA, 19 nt, Homo sapiens
  misc_RNA (1)...(19): siRNA sense strand
gaccgcauccucuaugagu

SEQ ID NO: 379082 - RNA, 19 nt, Homo sapiens
  misc_RNA (1)...(19): siRNA sense strand
caacgucaucucuggaauc

SEQ ID NO: 379083 - RNA, 19 nt, Homo sapiens
  misc_RNA (1)...(19): siRNA sense strand
ccacuggaucacuucgaua

SEQ ID NO: 379084 - RNA, 19 nt, Homo sapiens
  misc_RNA (1)...(19): siRNA sense strand
agacguguaucaggagaug

SEQ ID NO: 379085 - RNA, 19 nt, Homo sapiens
  misc_RNA (1)...(19): siRNA sense strand
cagcaccagugacgacagu

SEQ ID NO: 379086 - RNA, 19 nt, Homo sapiens
  misc_RNA (1)...(19): siRNA sense strand
cacuggaucacuucgauaa

SEQ ID NO: 379087 - RNA, 19 nt, Homo sapiens
  misc_RNA (1)...(19): siRNA sense strand
ggucaauuacugggauaaa

SEQ ID NO: 379088 - RNA, 19 nt, Homo sapiens
  misc_RNA (1)...(19): siRNA sense strand
ccggaucuccuucuacaug

SEQ ID NO: 379089 - RNA, 19 nt, Homo sapiens
  misc_RNA (1)...(19): siRNA sense strand
gcaccagugacgacaguuc

SEQ ID NO: 379090 - RNA, 19 nt, Homo sapiens
  misc_RNA (1)...(19): siRNA sense strand
gcaggugugcugauguauc

SEQ ID NO: 379091 - RNA, 19 nt, Homo sapiens
  misc_RNA (1)...(19): siRNA sense strand
gcugauguaucgggacuac

SEQ ID NO: 379092 - RNA, 19 nt, Homo sapiens
  misc_RNA (1)...(19): siRNA sense strand
gggccucggcggaguuuau

SEQ ID NO: 379093 - RNA, 19 nt, Homo sapiens
  misc_RNA (1)...(19): siRNA sense strand
ggucgucaucuguuacuuc

SEQ ID NO: 379094 - RNA, 19 nt, Homo sapiens
  misc_RNA (1)...(19): siRNA sense strand
ccaacgucaucucuggaau

SEQ ID NO: 379095 - RNA, 19 nt, Homo sapiens
  misc_RNA (1)...(19): siRNA sense strand
uauacaacgccacaaagga

SEQ ID NO: 379096 - RNA, 19 nt, Homo sapiens
  misc_RNA (1)...(19): siRNA sense strand
guauacaacgccacaaagg

SEQ ID NO: 379097 - RNA, 19 nt, Homo sapiens
  misc_RNA (1)...(19): siRNA sense strand
ggcaaggccagaucaucaa

SEQ ID NO: 379098 - RNA, 19 nt, Homo sapiens
  misc_RNA (1)...(19): siRNA sense strand
ccauggaccgcauccucua

SEQ ID NO: 379099 - RNA, 19 nt, Homo sapiens
  misc_RNA (1)...(19): siRNA sense strand
uggaccgcauccucuauga

SEQ ID NO: 379100 - RNA, 19 nt, Homo sapiens
  misc_RNA (1)...(19): siRNA sense strand
aaugauguguuugccguau

SEQ ID NO: 379101 - RNA, 19 nt, Homo sapiens
  misc_RNA (1)...(19): siRNA sense strand
aggagaaggugcugaagcu

SEQ ID NO: 379102 - RNA, 19 nt, Homo sapiens
  misc_RNA (1)...(19): siRNA sense strand
ggguauggcaucaugucaa

SEQ ID NO: 379103 - RNA, 19 nt, Homo sapiens
  misc_RNA (1)...(19): siRNA sense strand
ggccucggcggaguuuaua

SEQ ID NO: 379104 - RNA, 19 nt, Homo sapiens
  misc_RNA (1)...(19): siRNA sense strand
gcccagugcuauggcaaca

SEQ ID NO: 379105 - RNA, 19 nt, Homo sapiens
  misc_RNA (1)...(19): siRNA sense strand
ugauguguuugccguauac

SEQ ID NO: 379106 - RNA, 19 nt, Homo sapiens
  misc_RNA (1)...(19): siRNA sense strand
ucuccacgcccaccucuga

SEQ ID NO: 379107 - RNA, 19 nt, Homo sapiens
  misc_RNA (1)...(19): siRNA sense strand
gucaauuacugggauaaac

SEQ ID NO: 379108 - RNA, 19 nt, Homo sapiens
  misc_RNA (1)...(19): siRNA sense strand
guaaagcacuucccauuug

SEQ ID NO: 379109 - RNA, 19 nt, Homo sapiens
  misc_RNA (1)...(19): siRNA sense strand
gcacagagaucgacuuggu

SEQ ID NO: 379110 - RNA, 19 nt, Homo sapiens
  misc_RNA (1)...(19): siRNA sense strand
ggacaucacguaugacuuc

SEQ ID NO: 379111 - RNA, 19 nt, Homo sapiens
  misc_RNA (1)...(19): siRNA sense strand
caagagcgcaugcaagauu

SEQ ID NO: 379112 - RNA, 19 nt, Homo sapiens
  misc_RNA (1)...(19): siRNA sense strand
gcgagaagaugacguugug

SEQ ID NO: 379113 - RNA, 19 nt, Homo sapiens
  misc_RNA (1)...(19): siRNA sense strand
uaaagcacuucccauuuga

SEQ ID NO: 379114 - RNA, 19 nt, Homo sapiens
  misc_RNA (1)...(19): siRNA sense strand
gcaaguaccucauguucac

SEQ ID NO: 379115 - RNA, 19 nt, Homo sapiens
  misc_RNA (1)...(19): siRNA sense strand
ggaaguacgucgccauggu

SEQ ID NO: 379116 - RNA, 19 nt, Homo sapiens
  misc_RNA (1)...(19): siRNA sense strand
caugcaagauugaaguaaa

SEQ ID NO: 379117 - RNA, 19 nt, Homo sapiens
  misc_RNA (1)...(19): siRNA sense strand
ccaaugccguggucuccua

SEQ ID NO: 379118 - RNA, 19 nt, Homo sapiens
  misc_RNA (1)...(19): siRNA sense strand
cuggaagccugaagaguuu

SEQ ID NO: 379119 - RNA, 19 nt, Homo sapiens
  misc_RNA (1)...(19): siRNA sense strand
gcaagccgcucuucuacac

SEQ ID NO: 379120 - RNA, 19 nt, Homo sapiens
  misc_RNA (1)...(19): siRNA sense strand
ugaagaguuugacaacaug

SEQ ID NO: 379121 - RNA, 19 nt, Homo sapiens
  misc_RNA (1)...(19): siRNA sense strand
cagaugugguccuguacaa

SEQ ID NO: 379122 - RNA, 19 nt, Homo sapiens
  misc_RNA (1)...(19): siRNA sense strand
uguacgagguguccuucua

SEQ ID NO: 379123 - RNA, 19 nt, Homo sapiens
  misc_RNA (1)...(19): siRNA sense strand
uacaagagcgcaugcaaga

SEQ ID NO: 379124 - RNA, 19 nt, Homo sapiens
  misc_RNA (1)...(19): siRNA sense strand
cugaagaguuugacaacau

SEQ ID NO: 379125 - RNA, 19 nt, Homo sapiens
  misc_RNA (1)...(19): siRNA sense strand
ccaccuuccuccacucaga

SEQ ID NO: 379126 - RNA, 19 nt, Homo sapiens
  misc_RNA (1)...(19): siRNA sense strand
gccguggucuccuaugaug

SEQ ID NO: 379127 - RNA, 19 nt, Homo sapiens
  misc_RNA (1)...(19): siRNA sense strand
ucccagaugugguccugua

SEQ ID NO: 379128 - RNA, 19 nt, Homo sapiens
  misc_RNA (1)...(19): siRNA sense strand
ccuggaagccugaagaguu

SEQ ID NO: 379129 - RNA, 19 nt, Homo sapiens
  misc_RNA (1)...(19): siRNA sense strand
gaucaugaccaccaauguc

SEQ ID NO: 379130 - RNA, 19 nt, Homo sapiens
  misc_RNA (1)...(19): siRNA sense strand
gagcaucuccuggauccuu

SEQ ID NO: 379131 - RNA, 19 nt, Homo sapiens
  misc_RNA (1)...(19): siRNA sense strand
gaugugguccuguacaaca

SEQ ID NO: 379132 - RNA, 19 nt, Homo sapiens
  misc_RNA (1)...(19): siRNA sense strand
guacgagguguccuucuau

SEQ ID NO: 379133 - RNA, 19 nt, Homo sapiens
  misc_RNA (1)...(19): siRNA sense strand
gaagaguuugacaacauga

SEQ ID NO: 379134 - RNA, 19 nt, Homo sapiens
  misc_RNA (1)...(19): siRNA sense strand
ugagugaggacuggaagua

SEQ ID NO: 379135 - RNA, 19 nt, Homo sapiens
  misc_RNA (1)...(19): siRNA sense strand
cagcagccacgccaucauu

SEQ ID NO: 379136 - RNA, 19 nt, Homo sapiens
  misc_RNA (1)...(19): siRNA sense strand
gagcgggagcagaucauga

SEQ ID NO: 379137 - RNA, 19 nt, Homo sapiens
  misc_RNA (1)...(19): siRNA sense strand
ggugaucgaccgccucuuc

SEQ ID NO: 379138 - RNA, 19 nt, Homo sapiens
  misc_RNA (1)...(19): siRNA sense strand
uagccauccuugucuucua

SEQ ID NO: 379139 - RNA, 19 nt, Homo sapiens
  misc_RNA (1)...(19): siRNA sense strand
aguaaagcacuucccauuu

SEQ ID NO: 379140 - RNA, 19 nt, Homo sapiens
  misc_RNA (1)...(19): siRNA sense strand
gaucuuugucuuugucugu

SEQ ID NO: 379141 - RNA, 19 nt, Homo sapiens
  misc_RNA (1)...(19): siRNA sense strand
uggcccagcucaucagugu

SEQ ID NO: 379142 - RNA, 19 nt, Homo sapiens
  misc_RNA (1)...(19): siRNA sense strand
uacgagguguccuucuauu

SEQ ID NO: 379143 - RNA, 19 nt, Homo sapiens
  misc_RNA (1)...(19): siRNA sense strand
gcaugcaagauugaaguaa

SEQ ID NO: 379144 - RNA, 19 nt, Homo sapiens
  misc_RNA (1)...(19): siRNA sense strand
ggaagccugaagaguuuga

SEQ ID NO: 379145 - RNA, 19 nt, Homo sapiens
  misc_RNA (1)...(19): siRNA sense strand
gccgcaagccgcucuucua

SEQ ID NO: 379146 - RNA, 19 nt, Homo sapiens
  misc_RNA (1)...(19): siRNA sense strand
aagagcgcaugcaagauug

SEQ ID NO: 379147 - RNA, 19 nt, Homo sapiens
  misc_RNA (1)...(19): siRNA sense strand
gagguguccuucuauucca

SEQ ID NO: 379148 - RNA, 19 nt, Homo sapiens
  misc_RNA (1)...(19): siRNA sense strand
cuggacgacuucacaccua

SEQ ID NO: 379149 - RNA, 19 nt, Homo sapiens
  misc_RNA (1)...(19): siRNA sense strand
gacaacaugaagaaaguuc

SEQ ID NO: 379150 - RNA, 19 nt, Homo sapiens
  misc_RNA (1)...(19): siRNA sense strand
ccucuggaucuuugucuuu

SEQ ID NO: 379151 - RNA, 19 nt, Homo sapiens
  misc_RNA (1)...(19): siRNA sense strand
uugacaacaugaagaaagu

SEQ ID NO: 379152 - RNA, 19 nt, Homo sapiens
  misc_RNA (1)...(19): siRNA sense strand
cagccucucuuccagaacu

SEQ ID NO: 379153 - RNA, 19 nt, Homo sapiens
  misc_RNA (1)...(19): siRNA sense strand
gcauguacgagguguccuu

SEQ ID NO: 379154 - RNA, 19 nt, Homo sapiens
  misc_RNA (1)...(19): siRNA sense strand
cggcaaguaccucauguuc

SEQ ID NO: 379155 - RNA, 19 nt, Homo sapiens
  misc_RNA (1)...(19): siRNA sense strand
guacgucgccauggugauc

SEQ ID NO: 379156 - RNA, 19 nt, Homo sapiens
  misc_RNA (1)...(19): siRNA sense strand
cuucaucgcagaccacaug

SEQ ID NO: 379157 - RNA, 19 nt, Homo sapiens
  misc_RNA (1)...(19): siRNA sense strand
gaguuugacaacaugaaga

SEQ ID NO: 379158 - RNA, 19 nt, Homo sapiens
  misc_RNA (1)...(19): siRNA sense strand
ccaggagugggaagauuau

SEQ ID NO: 379159 - RNA, 19 nt, Homo sapiens
  misc_RNA (1)...(19): siRNA sense strand
ggcaaguaccucauguuca

SEQ ID NO: 379160 - RNA, 19 nt, Homo sapiens
  misc_RNA (1)...(19): siRNA sense strand
acuuggugcugaagaguga

SEQ ID NO: 379161 - RNA, 19 nt, Homo sapiens
  misc_RNA (1)...(19): siRNA sense strand
gcgcaugcaagauugaagu

SEQ ID NO: 379162 - RNA, 19 nt, Homo sapiens
  misc_RNA (1)...(19): siRNA sense strand
gacaucacguaugacuuca

SEQ ID NO: 379163 - RNA, 19 nt, Homo sapiens
  misc_RNA (1)...(19): siRNA sense strand
ggaccuacgaccgcacaga

SEQ ID NO: 379164 - RNA, 19 nt, Homo sapiens
  misc_RNA (1)...(19): siRNA sense strand
gacuguggcgagaagauga

SEQ ID NO: 379165 - RNA, 19 nt, Homo sapiens
  misc_RNA (1)...(19): siRNA sense strand
cuacguacguggacaucac

SEQ ID NO: 379166 - RNA, 19 nt, Homo sapiens
  misc_RNA (1)...(19): siRNA sense strand
gauccuucccgcuacaaca

SEQ ID NO: 379167 - RNA, 19 nt, Homo sapiens
  misc_RNA (1)...(19): siRNA sense strand
ugcagccucucuuccagaa

SEQ ID NO: 379168 - RNA, 19 nt, Homo sapiens
  misc_RNA (1)...(19): siRNA sense strand
cuggugacaguacagcuua

SEQ ID NO: 379169 - RNA, 19 nt, Homo sapiens
  misc_RNA (1)...(19): siRNA sense strand
ggacgugacuuacgacuuc

SEQ ID NO: 379170 - RNA, 19 nt, Homo sapiens
  misc_RNA (1)...(19): siRNA sense strand
aaacaggaauggacugauu

SEQ ID NO: 379171 - RNA, 19 nt, Homo sapiens
  misc_RNA (1)...(19): siRNA sense strand
caagagcgccugcaagauu

SEQ ID NO: 379172 - RNA, 19 nt, Homo sapiens
  misc_RNA (1)...(19): siRNA sense strand
gaacaaaacccguuacaau

SEQ ID NO: 379173 - RNA, 19 nt, Homo sapiens
  misc_RNA (1)...(19): siRNA sense strand
ggaaguacguggcuauggu

SEQ ID NO: 379174 - RNA, 19 nt, Homo sapiens
  misc_RNA (1)...(19): siRNA sense strand
gcaaguaccucauguucac

SEQ ID NO: 379175 - RNA, 19 nt, Homo sapiens
  misc_RNA (1)...(19): siRNA sense strand
ggaacuccauguacuuugu

SEQ ID NO: 379176 - RNA, 19 nt, Homo sapiens
  misc_RNA (1)...(19): siRNA sense strand
ggacgaccuucugaacaaa

SEQ ID NO: 379177 - RNA, 19 nt, Homo sapiens
  misc_RNA (1)...(19): siRNA sense strand
ccuaugaggugucugucua

SEQ ID NO: 379178 - RNA, 19 nt, Homo sapiens
  misc_RNA (1)...(19): siRNA sense strand
caugaagaaugacgaugaa

SEQ ID NO: 379179 - RNA, 19 nt, Homo sapiens
  misc_RNA (1)...(19): siRNA sense strand
gcaagauugaggugaagua

SEQ ID NO: 379180 - RNA, 19 nt, Homo sapiens
  misc_RNA (1)...(19): siRNA sense strand
agauugaggugaaguacuu

SEQ ID NO: 379181 - RNA, 19 nt, Homo sapiens
  misc_RNA (1)...(19): siRNA sense strand
ugccugacaucgugcuuua

SEQ ID NO: 379182 - RNA, 19 nt, Homo sapiens
  misc_RNA (1)...(19): siRNA sense strand
ccucacagcucaucuccau

SEQ ID NO: 379183 - RNA, 19 nt, Homo sapiens
  misc_RNA (1)...(19): siRNA sense strand
ggacagugaacccacaaga

SEQ ID NO: 379184 - RNA, 19 nt, Homo sapiens
  misc_RNA (1)...(19): siRNA sense strand
cagcauggaugacuuuacu

SEQ ID NO: 379185 - RNA, 19 nt, Homo sapiens
  misc_RNA (1)...(19): siRNA sense strand
gcaagccucuguucuacac

SEQ ID NO: 379186 - RNA, 19 nt, Homo sapiens
  misc_RNA (1)...(19): siRNA sense strand
gaagaaugacgaugaagac

SEQ ID NO: 379187 - RNA, 19 nt, Homo sapiens
  misc_RNA (1)...(19): siRNA sense strand
uggacgaccuucugaacaa

SEQ ID NO: 379188 - RNA, 19 nt, Homo sapiens
  misc_RNA (1)...(19): siRNA sense strand
cccagcacaugaagaauga

SEQ ID NO: 379189 - RNA, 19 nt, Homo sapiens
  misc_RNA (1)...(19): siRNA sense strand
gcaggaggcauuagaaggu

SEQ ID NO: 379190 - RNA, 19 nt, Homo sapiens
  misc_RNA (1)...(19): siRNA sense strand
gcgcaagccucuguucuac

SEQ ID NO: 379191 - RNA, 19 nt, Homo sapiens
  misc_RNA (1)...(19): siRNA sense strand
ccagggagaaggacaguga

SEQ ID NO: 379192 - RNA, 19 nt, Homo sapiens
  misc_RNA (1)...(19): siRNA sense strand
ucacagcucaucuccauca

SEQ ID NO: 379193 - RNA, 19 nt, Homo sapiens
  misc_RNA (1)...(19): siRNA sense strand
ccacagccagcauggauga

SEQ ID NO: 379194 - RNA, 19 nt, Homo sapiens
  misc_RNA (1)...(19): siRNA sense strand
uacaagagcgccugcaaga

SEQ ID NO: 379195 - RNA, 19 nt, Homo sapiens
  misc_RNA (1)...(19): siRNA sense strand
ugaagaaugacgaugaaga

SEQ ID NO: 379196 - RNA, 19 nt, Homo sapiens
  misc_RNA (1)...(19): siRNA sense strand
aagagcgccugcaagauug

SEQ ID NO: 379197 - RNA, 19 nt, Homo sapiens
  misc_RNA (1)...(19): siRNA sense strand
gagcgagagcagaucauga

SEQ ID NO: 379198 - RNA, 19 nt, Homo sapiens
  misc_RNA (1)...(19): siRNA sense strand
cuaccuuccucuucaugaa

SEQ ID NO: 379199 - RNA, 19 nt, Homo sapiens
  misc_RNA (1)...(19): siRNA sense strand
gaucaugaccaccaauguc

SEQ ID NO: 379200 - RNA, 19 nt, Homo sapiens
  misc_RNA (1)...(19): siRNA sense strand
ugucuacaccaacuugaua

SEQ ID NO: 379201 - RNA, 19 nt, Homo sapiens
  misc_RNA (1)...(19): siRNA sense strand
cugcaaagcgcaucugguu

SEQ ID NO: 379202 - RNA, 19 nt, Homo sapiens
  misc_RNA (1)...(19): siRNA sense strand
gcacaugaagaaugacgau

SEQ ID NO: 379203 - RNA, 19 nt, Homo sapiens
  misc_RNA (1)...(19): siRNA sense strand
acacggagauagacauggu

SEQ ID NO: 379204 - RNA, 19 nt, Homo sapiens
  misc_RNA (1)...(19): siRNA sense strand
acaaaacccguuacaauaa

SEQ ID NO: 379205 - RNA, 19 nt, Homo sapiens
  misc_RNA (1)...(19): siRNA sense strand
ccaccaaugucuggcugaa

SEQ ID NO: 379206 - RNA, 19 nt, Homo sapiens
  misc_RNA (1)...(19): siRNA sense strand
ggaugugcaggaggcauua

SEQ ID NO: 379207 - RNA, 19 nt, Homo sapiens
  misc_RNA (1)...(19): siRNA sense strand
ccugcaagauugaggugaa

SEQ ID NO: 379208 - RNA, 19 nt, Homo sapiens
  misc_RNA (1)...(19): siRNA sense strand
ugaaugagcgagagcagau

SEQ ID NO: 379209 - RNA, 19 nt, Homo sapiens
  misc_RNA (1)...(19): siRNA sense strand
ugcacaagcugccuaccuu

SEQ ID NO: 379210 - RNA, 19 nt, Homo sapiens
  misc_RNA (1)...(19): siRNA sense strand
gcccagcacaugaagaaug

SEQ ID NO: 379211 - RNA, 19 nt, Homo sapiens
  misc_RNA (1)...(19): siRNA sense strand
cuacgagggugugaacauc

SEQ ID NO: 379212 - RNA, 19 nt, Homo sapiens
  misc_RNA (1)...(19): siRNA sense strand
acaugaagaaugacgauga

SEQ ID NO: 379213 - RNA, 19 nt, Homo sapiens
  misc_RNA (1)...(19): siRNA sense strand
aacaaaacccguuacaaua

SEQ ID NO: 379214 - RNA, 19 nt, Homo sapiens
  misc_RNA (1)...(19): siRNA sense strand
gaacuccauguacuuugug

SEQ ID NO: 379215 - RNA, 19 nt, Homo sapiens
  misc_RNA (1)...(19): siRNA sense strand
acaucgugcuuuacaacaa

SEQ ID NO: 379216 - RNA, 19 nt, Homo sapiens
  misc_RNA (1)...(19): siRNA sense strand
aacaggaauggacugauua

SEQ ID NO: 379217 - RNA, 19 nt, Homo sapiens
  misc_RNA (1)...(19): siRNA sense strand
cugccuaccuuccucuuca

SEQ ID NO: 379218 - RNA, 19 nt, Homo sapiens
  misc_RNA (1)...(19): siRNA sense strand
gaacugccgcguggccaau

SEQ ID NO: 379219 - RNA, 19 nt, Homo sapiens
  misc_RNA (1)...(19): siRNA sense strand
cagccagcauggaugacuu

SEQ ID NO: 379220 - RNA, 19 nt, Homo sapiens
  misc_RNA (1)...(19): siRNA sense strand
ccucuguucuacaccauca

SEQ ID NO: 379221 - RNA, 19 nt, Homo sapiens
  misc_RNA (1)...(19): siRNA sense strand
ugaaacaggaauggacuga

SEQ ID NO: 379222 - RNA, 19 nt, Homo sapiens
  misc_RNA (1)...(19): siRNA sense strand
gcgucugugugcucaaugu

SEQ ID NO: 379223 - RNA, 19 nt, Homo sapiens
  misc_RNA (1)...(19): siRNA sense strand
cagcgucugugugcucaau

SEQ ID NO: 379224 - RNA, 19 nt, Homo sapiens
  misc_RNA (1)...(19): siRNA sense strand
cagcuuaucagcgugaaug

SEQ ID NO: 379225 - RNA, 19 nt, Homo sapiens
  misc_RNA (1)...(19): siRNA sense strand
gcaucugguugccugacau

SEQ ID NO: 379226 - RNA, 19 nt, Homo sapiens
  misc_RNA (1)...(19): siRNA sense strand
ggcaaguaccucauguuca

SEQ ID NO: 379227 - RNA, 19 nt, Homo sapiens
  misc_RNA (1)...(19): siRNA sense strand
cgacugcggcgagaagaug

SEQ ID NO: 379228 - RNA, 19 nt, Homo sapiens
  misc_RNA (1)...(19): siRNA sense strand
gcugauggacgaccuucug

SEQ ID NO: 379229 - RNA, 19 nt, Homo sapiens
  misc_RNA (1)...(19): siRNA sense strand
gcccacagccagcauggau

SEQ ID NO: 379230 - RNA, 19 nt, Homo sapiens
  misc_RNA (1)...(19): siRNA sense strand
ccacacggagauagacaug

SEQ ID NO: 379231 - RNA, 19 nt, Homo sapiens
  misc_RNA (1)...(19): siRNA sense strand
gauggacgaccuucugaac

SEQ ID NO: 379232 - RNA, 19 nt, Homo sapiens
  misc_RNA (1)...(19): siRNA sense strand
caucgugcuuuacaacaac

SEQ ID NO: 379233 - RNA, 19 nt, Homo sapiens
  misc_RNA (1)...(19): siRNA sense strand
gaaacaggaauggacugau

SEQ ID NO: 379234 - RNA, 19 nt, Homo sapiens
  misc_RNA (1)...(19): siRNA sense strand
gggaacuccauguacuuug

SEQ ID NO: 379235 - RNA, 19 nt, Homo sapiens
  misc_RNA (1)...(19): siRNA sense strand
agauagacaugguccucau

SEQ ID NO: 379236 - RNA, 19 nt, Homo sapiens
  misc_RNA (1)...(19): siRNA sense strand
gcuacgagggugugaacau

SEQ ID NO: 379237 - RNA, 19 nt, Homo sapiens
  misc_RNA (1)...(19): siRNA sense strand
ccagacccaugcagcuucu

SEQ ID NO: 379238 - RNA, 19 nt, Homo sapiens
  misc_RNA (1)...(19): siRNA sense strand
acuuacgacuucaucauca

SEQ ID NO: 379239 - RNA, 19 nt, Homo sapiens
  misc_RNA (1)...(19): siRNA sense strand
uggccauccucgucuucua

SEQ ID NO: 379240 - RNA, 19 nt, Homo sapiens
  misc_RNA (1)...(19): siRNA sense strand
ggaaaguucuccacuguua

SEQ ID NO: 379241 - RNA, 19 nt, Homo sapiens
  misc_RNA (1)...(19): siRNA sense strand
guauucaccuucucuuaua

SEQ ID NO: 379242 - RNA, 19 nt, Homo sapiens
  misc_RNA (1)...(19): siRNA sense strand
gaggacaguucuacuauau

SEQ ID NO: 379243 - RNA, 19 nt, Homo sapiens
  misc_RNA (1)...(19): siRNA sense strand
gagagucuaucaugaaugu

SEQ ID NO: 379244 - RNA, 19 nt, Homo sapiens
  misc_RNA (1)...(19): siRNA sense strand
ggacaguucuacuauaucu

SEQ ID NO: 379245 - RNA, 19 nt, Homo sapiens
  misc_RNA (1)...(19): siRNA sense strand
guacccagcuccuguuaga

SEQ ID NO: 379246 - RNA, 19 nt, Homo sapiens
  misc_RNA (1)...(19): siRNA sense strand
gcuaacggguggaaucuga

SEQ ID NO: 379247 - RNA, 19 nt, Homo sapiens
  misc_RNA (1)...(19): siRNA sense strand
agaaggagcugaaggagau

SEQ ID NO: 379248 - RNA, 19 nt, Homo sapiens
  misc_RNA (1)...(19): siRNA sense strand
ccaaagcuaugauaaccuu

SEQ ID NO: 379249 - RNA, 19 nt, Homo sapiens
  misc_RNA (1)...(19): siRNA sense strand
gaugagccauuccugaaga

SEQ ID NO: 379250 - RNA, 19 nt, Homo sapiens
  misc_RNA (1)...(19): siRNA sense strand
cgaggacaguucuacuaua

SEQ ID NO: 379251 - RNA, 19 nt, Homo sapiens
  misc_RNA (1)...(19): siRNA sense strand
acaaggaaaucauccagaa

SEQ ID NO: 379252 - RNA, 19 nt, Homo sapiens
  misc_RNA (1)...(19): siRNA sense strand
ccuguacacuugugccuua

SEQ ID NO: 379253 - RNA, 19 nt, Homo sapiens
  misc_RNA (1)...(19): siRNA sense strand
ccacaccgccuguaucauu

SEQ ID NO: 379254 - RNA, 19 nt, Homo sapiens
  misc_RNA (1)...(19): siRNA sense strand
aaggagacauucuggauga

SEQ ID NO: 379255 - RNA, 19 nt, Homo sapiens
  misc_RNA (1)...(19): siRNA sense strand
ggaggaagccaagcagaaa

SEQ ID NO: 379256 - RNA, 19 nt, Homo sapiens
  misc_RNA (1)...(19): siRNA sense strand
gacaggagcaggaggguuu

SEQ ID NO: 379257 - RNA, 19 nt, Homo sapiens
  misc_RNA (1)...(19): siRNA sense strand
ggcuggagcugccuuguga

SEQ ID NO: 379258 - RNA, 19 nt, Homo sapiens
  misc_RNA (1)...(19): siRNA sense strand
uaagaaggcucagcgagau

SEQ ID NO: 379259 - RNA, 19 nt, Homo sapiens
  misc_RNA (1)...(19): siRNA sense strand
ucacagagagucuaucaug

SEQ ID NO: 379260 - RNA, 19 nt, Homo sapiens
  misc_RNA (1)...(19): siRNA sense strand
gaaaguucuccacuguuaa

SEQ ID NO: 379261 - RNA, 19 nt, Homo sapiens
  misc_RNA (1)...(19): siRNA sense strand
ggaaggagacauucuggau

SEQ ID NO: 379262 - RNA, 19 nt, Homo sapiens
  misc_RNA (1)...(19): siRNA sense strand
gaauggccaugaagaagag

SEQ ID NO: 379263 - RNA, 19 nt, Homo sapiens
  misc_RNA (1)...(19): siRNA sense strand
cagagagucuaucaugaau

SEQ ID NO: 379264 - RNA, 19 nt, Homo sapiens
  misc_RNA (1)...(19): siRNA sense strand
uaucaugaaugucaaugug

SEQ ID NO: 379265 - RNA, 19 nt, Homo sapiens
  misc_RNA (1)...(19): siRNA sense strand
gaacaagaccaagcugaca

SEQ ID NO: 379266 - RNA, 19 nt, Homo sapiens
  misc_RNA (1)...(19): siRNA sense strand
ccacauagucacauuguca

SEQ ID NO: 379267 - RNA, 19 nt, Homo sapiens
  misc_RNA (1)...(19): siRNA sense strand
cuuuaucccugauguauug

SEQ ID NO: 379268 - RNA, 19 nt, Homo sapiens
  misc_RNA (1)...(19): siRNA sense strand
gggauccugucaaguguug

SEQ ID NO: 379269 - RNA, 19 nt, Homo sapiens
  misc_RNA (1)...(19): siRNA sense strand
uaaacgaggcccugaacaa

SEQ ID NO: 379270 - RNA, 19 nt, Homo sapiens
  misc_RNA (1)...(19): siRNA sense strand
cacagagagucuaucauga

SEQ ID NO: 379271 - RNA, 19 nt, Homo sapiens
  misc_RNA (1)...(19): siRNA sense strand
ucaugaaugucaaugugaa

SEQ ID NO: 379272 - RNA, 19 nt, Homo sapiens
  misc_RNA (1)...(19): siRNA sense strand
gcggcacccuguacacuug

SEQ ID NO: 379273 - RNA, 19 nt, Homo sapiens
  misc_RNA (1)...(19): siRNA sense strand
gaaugucaaugugaaaggu

SEQ ID NO: 379274 - RNA, 19 nt, Homo sapiens
  misc_RNA (1)...(19): siRNA sense strand
acaaugggauccugucaag

SEQ ID NO: 379275 - RNA, 19 nt, Homo sapiens
  misc_RNA (1)...(19): siRNA sense strand
ccagaauggccaugaagaa

SEQ ID NO: 379276 - RNA, 19 nt, Homo sapiens
  misc_RNA (1)...(19): siRNA sense strand
acagagagucuaucaugaa

SEQ ID NO: 379277 - RNA, 19 nt, Homo sapiens
  misc_RNA (1)...(19): siRNA sense strand
ugaaggagaucagggucuu

SEQ ID NO: 379278 - RNA, 19 nt, Homo sapiens
  misc_RNA (1)...(19): siRNA sense strand
gaugacacgccucaccaaa

SEQ ID NO: 379279 - RNA, 19 nt, Homo sapiens
  misc_RNA (1)...(19): siRNA sense strand
guacacuugugccuuacga

SEQ ID NO: 379280 - RNA, 19 nt, Homo sapiens
  misc_RNA (1)...(19): siRNA sense strand
gcguauucaccuucucuua

SEQ ID NO: 379281 - RNA, 19 nt, Homo sapiens
  misc_RNA (1)...(19): siRNA sense strand
gggaggaagccaagcagaa

SEQ ID NO: 379282 - RNA, 19 nt, Homo sapiens
  misc_RNA (1)...(19): siRNA sense strand
ucaggccaauuuacaccua

SEQ ID NO: 379283 - RNA, 19 nt, Homo sapiens
  misc_RNA (1)...(19): siRNA sense strand
ugucaaguguuggaaaguu

SEQ ID NO: 379284 - RNA, 19 nt, Homo sapiens
  misc_RNA (1)...(19): siRNA sense strand
cauccagaauggccaugaa

SEQ ID NO: 379285 - RNA, 19 nt, Homo sapiens
  misc_RNA (1)...(19): siRNA sense strand
ugacacgccucaccaaagc

SEQ ID NO: 379286 - RNA, 19 nt, Homo sapiens
  misc_RNA (1)...(19): siRNA sense strand
gcccuucaaccgccacaua

SEQ ID NO: 379287 - RNA, 19 nt, Homo sapiens
  misc_RNA (1)...(19): siRNA sense strand
guuagaggccuguguccaa

SEQ ID NO: 379288 - RNA, 19 nt, Homo sapiens
  misc_RNA (1)...(19): siRNA sense strand
ugaaggagaaggagcugaa

SEQ ID NO: 379289 - RNA, 19 nt, Homo sapiens
  misc_RNA (1)...(19): siRNA sense strand
acgaggcccugaacaacaa

SEQ ID NO: 379290 - RNA, 19 nt, Homo sapiens
  misc_RNA (1)...(19): siRNA sense strand
aaggaaaucauccagaaug

SEQ ID NO: 379291 - RNA, 19 nt, Homo sapiens
  misc_RNA (1)...(19): siRNA sense strand
cguauucaccuucucuuau

SEQ ID NO: 379292 - RNA, 19 nt, Homo sapiens
  misc_RNA (1)...(19): siRNA sense strand
cgacccauguauaucuaug

SEQ ID NO: 379293 - RNA, 19 nt, Homo sapiens
  misc_RNA (1)...(19): siRNA sense strand
cacaccgccuguaucauug

SEQ ID NO: 379294 - RNA, 19 nt, Homo sapiens
  misc_RNA (1)...(19): siRNA sense strand
ggccuucggaccagaauug

SEQ ID NO: 379295 - RNA, 19 nt, Homo sapiens
  misc_RNA (1)...(19): siRNA sense strand
ucccugauguauuggauug

SEQ ID NO: 379296 - RNA, 19 nt, Homo sapiens
  misc_RNA (1)...(19): siRNA sense strand
gucaaguguuggaaaguuc

SEQ ID NO: 379297 - RNA, 19 nt, Homo sapiens
  misc_RNA (1)...(19): siRNA sense strand
caacaaugggauccuguca

SEQ ID NO: 379298 - RNA, 19 nt, Homo sapiens
  misc_RNA (1)...(19): siRNA sense strand
gagucuaucaugaauguca

SEQ ID NO: 379299 - RNA, 19 nt, Homo sapiens
  misc_RNA (1)...(19): siRNA sense strand
caaggaaaucauccagaau

SEQ ID NO: 379300 - RNA, 19 nt, Homo sapiens
  misc_RNA (1)...(19): siRNA sense strand
uaacggguggaaucugaaa

SEQ ID NO: 379301 - RNA, 19 nt, Homo sapiens
  misc_RNA (1)...(19): siRNA sense strand
agaauggccaugaagaaga

SEQ ID NO: 379302 - RNA, 19 nt, Homo sapiens
  misc_RNA (1)...(19): siRNA sense strand
gucuucaucuacaccagua

SEQ ID NO: 379303 - RNA, 19 nt, Homo sapiens
  misc_RNA (1)...(19): siRNA sense strand
cuacucaggccaauuuaca

SEQ ID NO: 379304 - RNA, 19 nt, Homo sapiens
  misc_RNA (1)...(19): siRNA sense strand
uuaauuacacccugagcaa

SEQ ID NO: 379305 - RNA, 19 nt, Homo sapiens
  misc_RNA (1)...(19): siRNA sense strand
ucuaaacuccagaacaaga

SEQ ID NO: 379306 - RNA, 19 nt, Homo sapiens
  misc_RNA (1)...(19): siRNA sense strand
ccucaccaaagcuaugaua

SEQ ID NO: 379307 - RNA, 19 nt, Homo sapiens
  misc_RNA (1)...(19): siRNA sense strand
gagaggaauuuucuaaacu

SEQ ID NO: 379308 - RNA, 19 nt, Homo sapiens
  misc_RNA (1)...(19): siRNA sense strand
uacgacccauguauaucua

SEQ ID NO: 379309 - RNA, 19 nt, Homo sapiens
  misc_RNA (1)...(19): siRNA sense strand
gugccagucuucaucuaca

SEQ ID NO: 379310 - RNA, 19 nt, Homo sapiens
  misc_RNA (1)...(19): siRNA sense strand
aaugggauccugucaagug

SEQ ID NO: 379311 - RNA, 19 nt, Homo sapiens
  misc_RNA (1)...(19): siRNA sense strand
caccaaagcuaugauaacc

SEQ ID NO: 379312 - RNA, 19 nt, Homo sapiens
  misc_RNA (1)...(19): siRNA sense strand
uggaugagccauuccugaa

SEQ ID NO: 379313 - RNA, 19 nt, Homo sapiens
  misc_RNA (1)...(19): siRNA sense strand
guauaaacgaggcccugaa

SEQ ID NO: 379314 - RNA, 19 nt, Homo sapiens
  misc_RNA (1)...(19): siRNA sense strand
aggcuguacuggcggcuaa

SEQ ID NO: 379315 - RNA, 19 nt, Homo sapiens
  misc_RNA (1)...(19): siRNA sense strand
gccuuacgacccauguaua

SEQ ID NO: 379316 - RNA, 19 nt, Homo sapiens
  misc_RNA (1)...(19): siRNA sense strand
cgauuccuuucugcuagua

SEQ ID NO: 379317 - RNA, 19 nt, Homo sapiens
  misc_RNA (1)...(19): siRNA sense strand
ccgaggacaguucuacuau

SEQ ID NO: 379318 - RNA, 19 nt, Homo sapiens
  misc_RNA (1)...(19): siRNA sense strand
uaauuacacccugagcaaa

SEQ ID NO: 379319 - RNA, 19 nt, Homo sapiens
  misc_RNA (1)...(19): siRNA sense strand
acaguucuacuauaucuca

SEQ ID NO: 379320 - RNA, 19 nt, Homo sapiens
  misc_RNA (1)...(19): siRNA sense strand
ggaugagccauuccugaag

SEQ ID NO: 379321 - RNA, 19 nt, Homo sapiens
  misc_RNA (1)...(19): siRNA sense strand
caaagcuaugauaaccuua

SEQ ID NO: 379322 - RNA, 19 nt, Homo sapiens
  misc_RNA (1)...(19): siRNA sense strand
guuaacccagucuauguug

SEQ ID NO: 379323 - RNA, 19 nt, Homo sapiens
  misc_RNA (1)...(19): siRNA sense strand
gaaggagaucagggucuug

SEQ ID NO: 379324 - RNA, 19 nt, Homo sapiens
  misc_RNA (1)...(19): siRNA sense strand
ugagagaggaauuuucuaa

SEQ ID NO: 379325 - RNA, 19 nt, Homo sapiens
  misc_RNA (1)...(19): siRNA sense strand
ccuuacgacccauguauau

SEQ ID NO: 379326 - RNA, 19 nt, Homo sapiens
  misc_RNA (1)...(19): siRNA sense strand
cguauaagccacucuacag

SEQ ID NO: 379327 - RNA, 19 nt, Homo sapiens
  misc_RNA (1)...(19): siRNA sense strand
auuccuuucugcuaguaua

SEQ ID NO: 379328 - RNA, 19 nt, Homo sapiens
  misc_RNA (1)...(19): siRNA sense strand
aggaaaucauccagaaugg

SEQ ID NO: 379329 - RNA, 19 nt, Homo sapiens
  misc_RNA (1)...(19): siRNA sense strand
cuucggaccagaauugaga

SEQ ID NO: 379330 - RNA, 19 nt, Homo sapiens
  misc_RNA (1)...(19): siRNA sense strand
caugaaugucaaugugaaa

SEQ ID NO: 379331 - RNA, 19 nt, Homo sapiens
  misc_RNA (1)...(19): siRNA sense strand
uuacgacccauguauaucu

SEQ ID NO: 379332 - RNA, 19 nt, Homo sapiens
  misc_RNA (1)...(19): siRNA sense strand
cagaauggccaugaagaag

SEQ ID NO: 379333 - RNA, 19 nt, Homo sapiens
  misc_RNA (1)...(19): siRNA sense strand
gagagaggaauuuucuaaa

SEQ ID NO: 379334 - RNA, 19 nt, Homo sapiens
  misc_RNA (1)...(19): siRNA sense strand
ccugucaaguguuggaaag

SEQ ID NO: 379335 - RNA, 19 nt, Homo sapiens
  misc_RNA (1)...(19): siRNA sense strand
cauagucacauugucaaau

SEQ ID NO: 379336 - RNA, 19 nt, Homo sapiens
  misc_RNA (1)...(19): siRNA sense strand
cagucuauguuggcaaugu

SEQ ID NO: 379337 - RNA, 19 nt, Homo sapiens
  misc_RNA (1)...(19): siRNA sense strand
gagcauagccguuucaauu

SEQ ID NO: 379338 - RNA, 19 nt, Homo sapiens
  misc_RNA (1)...(19): siRNA sense strand
cuucguagcuuucuucaua

SEQ ID NO: 379339 - RNA, 19 nt, Homo sapiens
  misc_RNA (1)...(19): siRNA sense strand
guauagagaugcaaguuga

SEQ ID NO: 379340 - RNA, 19 nt, Homo sapiens
  misc_RNA (1)...(19): siRNA sense strand
gcaccuaauuggccuauug

SEQ ID NO: 379341 - RNA, 19 nt, Homo sapiens
  misc_RNA (1)...(19): siRNA sense strand
gaagauugcuauuguuugg

SEQ ID NO: 379342 - RNA, 19 nt, Homo sapiens
  misc_RNA (1)...(19): siRNA sense strand
gaauuuagaguuaccagua

SEQ ID NO: 379343 - RNA, 19 nt, Homo sapiens
  misc_RNA (1)...(19): siRNA sense strand
gagaaguccuguaaccaaa

SEQ ID NO: 379344 - RNA, 19 nt, Homo sapiens
  misc_RNA (1)...(19): siRNA sense strand
gaagggcauucuccaacua

SEQ ID NO: 379345 - RNA, 19 nt, Homo sapiens
  misc_RNA (1)...(19): siRNA sense strand
gacaauagguggcaacauc

SEQ ID NO: 379346 - RNA, 19 nt, Homo sapiens
  misc_RNA (1)...(19): siRNA sense strand
gaugcaaguugagaauuua

SEQ ID NO: 379347 - RNA, 19 nt, Homo sapiens
  misc_RNA (1)...(19): siRNA sense strand
ccgacaagcuuugauguua

SEQ ID NO: 379348 - RNA, 19 nt, Homo sapiens
  misc_RNA (1)...(19): siRNA sense strand
ggacuaaggccaucaugaa

SEQ ID NO: 379349 - RNA, 19 nt, Homo sapiens
  misc_RNA (1)...(19): siRNA sense strand
ggaucgguauguagcaaua

SEQ ID NO: 379350 - RNA, 19 nt, Homo sapiens
  misc_RNA (1)...(19): siRNA sense strand
gcaauuauaagguagagaa

SEQ ID NO: 379351 - RNA, 19 nt, Homo sapiens
  misc_RNA (1)...(19): siRNA sense strand
gaauguguuuguuuggauu

SEQ ID NO: 379352 - RNA, 19 nt, Homo sapiens
  misc_RNA (1)...(19): siRNA sense strand
gaaucaauccucuggugua

SEQ ID NO: 379353 - RNA, 19 nt, Homo sapiens
  misc_RNA (1)...(19): siRNA sense strand
cuaauuggccuauugguuu

SEQ ID NO: 379354 - RNA, 19 nt, Homo sapiens
  misc_RNA (1)...(19): siRNA sense strand
gacccaaauuucguucuua

SEQ ID NO: 379355 - RNA, 19 nt, Homo sapiens
  misc_RNA (1)...(19): siRNA sense strand
gggagggagcuuaauguua

SEQ ID NO: 379356 - RNA, 19 nt, Homo sapiens
  misc_RNA (1)...(19): siRNA sense strand
gaaaguccuugggauuguu

SEQ ID NO: 379357 - RNA, 19 nt, Homo sapiens
  misc_RNA (1)...(19): siRNA sense strand
ccaaauuucguucuuauug

SEQ ID NO: 379358 - RNA, 19 nt, Homo sapiens
  misc_RNA (1)...(19): siRNA sense strand
ggaauacggccgaggaaga

SEQ ID NO: 379359 - RNA, 19 nt, Homo sapiens
  misc_RNA (1)...(19): siRNA sense strand
ucaugaagauugcuauugu

SEQ ID NO: 379360 - RNA, 19 nt, Homo sapiens
  misc_RNA (1)...(19): siRNA sense strand
gaucauguggugcccauuu

SEQ ID NO: 379361 - RNA, 19 nt, Homo sapiens
  misc_RNA (1)...(19): siRNA sense strand
gaaaagaaacugcacaaug

SEQ ID NO: 379362 - RNA, 19 nt, Homo sapiens
  misc_RNA (1)...(19): siRNA sense strand
gugguuagcgaaaggauua

SEQ ID NO: 379363 - RNA, 19 nt, Homo sapiens
  misc_RNA (1)...(19): siRNA sense strand
ucauaccgcugacgauuau

SEQ ID NO: 379364 - RNA, 19 nt, Homo sapiens
  misc_RNA (1)...(19): siRNA sense strand
gccacuaccuagauauuug

SEQ ID NO: 379365 - RNA, 19 nt, Homo sapiens
  misc_RNA (1)...(19): siRNA sense strand
gcgaaaggauuagcagugu

SEQ ID NO: 379366 - RNA, 19 nt, Homo sapiens
  misc_RNA (1)...(19): siRNA sense strand
agaugcaaguugagaauuu

SEQ ID NO: 379367 - RNA, 19 nt, Homo sapiens
  misc_RNA (1)...(19): siRNA sense strand
cgagaaagccagugacaau

SEQ ID NO: 379368 - RNA, 19 nt, Homo sapiens
  misc_RNA (1)...(19): siRNA sense strand
caacauccuugugaucaug

SEQ ID NO: 379369 - RNA, 19 nt, Homo sapiens
  misc_RNA (1)...(19): siRNA sense strand
gaaaggauuagcagugugu

SEQ ID NO: 379370 - RNA, 19 nt, Homo sapiens
  misc_RNA (1)...(19): siRNA sense strand
gaaagccagugacaaugag

SEQ ID NO: 379371 - RNA, 19 nt, Homo sapiens
  misc_RNA (1)...(19): siRNA sense strand
gcguugcaauuauaaggua

SEQ ID NO: 379372 - RNA, 19 nt, Homo sapiens
  misc_RNA (1)...(19): siRNA sense strand
ggaaccgccuggacuaagu

SEQ ID NO: 379373 - RNA, 19 nt, Homo sapiens
  misc_RNA (1)...(19): siRNA sense strand
cguauugccugaccaucua

SEQ ID NO: 379374 - RNA, 19 nt, Homo sapiens
  misc_RNA (1)...(19): siRNA sense strand
cgauuauggugauuacgua

SEQ ID NO: 379375 - RNA, 19 nt, Homo sapiens
  misc_RNA (1)...(19): siRNA sense strand
gauuaugucuggccacuac

SEQ ID NO: 379376 - RNA, 19 nt, Homo sapiens
  misc_RNA (1)...(19): siRNA sense strand
caaauuucguucuuauugg

SEQ ID NO: 379377 - RNA, 19 nt, Homo sapiens
  misc_RNA (1)...(19): siRNA sense strand
guuaacauuuaucggcaua

SEQ ID NO: 379378 - RNA, 19 nt, Homo sapiens
  misc_RNA (1)...(19): siRNA sense strand
ggcaauuucuauaggugua

SEQ ID NO: 379379 - RNA, 19 nt, Homo sapiens
  misc_RNA (1)...(19): siRNA sense strand
gcucaacgacccaaauuuc

SEQ ID NO: 379380 - RNA, 19 nt, Homo sapiens
  misc_RNA (1)...(19): siRNA sense strand
ugccaccaauuacuucuua

SEQ ID NO: 379381 - RNA, 19 nt, Homo sapiens
  misc_RNA (1)...(19): siRNA sense strand
ucaauccucugguguauac

SEQ ID NO: 379382 - RNA, 19 nt, Homo sapiens
  misc_RNA (1)...(19): siRNA sense strand
uggaaaagcuucugaaugu

SEQ ID NO: 379383 - RNA, 19 nt, Homo sapiens
  misc_RNA (1)...(19): siRNA sense strand
gcacaaugccaccaauuac

SEQ ID NO: 379384 - RNA, 19 nt, Homo sapiens
  misc_RNA (1)...(19): siRNA sense strand
uaauuggccuauugguuug

SEQ ID NO: 379385 - RNA, 19 nt, Homo sapiens
  misc_RNA (1)...(19): siRNA sense strand
gcaacauccuugugaucau

SEQ ID NO: 379386 - RNA, 19 nt, Homo sapiens
  misc_RNA (1)...(19): siRNA sense strand
cgaaaguccuugggauugu

SEQ ID NO: 379387 - RNA, 19 nt, Homo sapiens
  misc_RNA (1)...(19): siRNA sense strand
caugaagauugcuauuguu

SEQ ID NO: 379388 - RNA, 19 nt, Homo sapiens
  misc_RNA (1)...(19): siRNA sense strand
cuaaggccaucaugaagau

SEQ ID NO: 379389 - RNA, 19 nt, Homo sapiens
  misc_RNA (1)...(19): siRNA sense strand
uuaccaauauucugucugu

SEQ ID NO: 379390 - RNA, 19 nt, Homo sapiens
  misc_RNA (1)...(19): siRNA sense strand
gaacgcacgccgaagaaag

SEQ ID NO: 379391 - RNA, 19 nt, Homo sapiens
  misc_RNA (1)...(19): siRNA sense strand
guagcaauacguaauccua

SEQ ID NO: 379392 - RNA, 19 nt, Homo sapiens
  misc_RNA (1)...(19): siRNA sense strand
gggcauucuccaacuauuu

SEQ ID NO: 379393 - RNA, 19 nt, Homo sapiens
  misc_RNA (1)...(19): siRNA sense strand
ggacugagggacgaagaaa

SEQ ID NO: 379394 - RNA, 19 nt, Homo sapiens
  misc_RNA (1)...(19): siRNA sense strand
gcauagccguuucaauucg

SEQ ID NO: 379395 - RNA, 19 nt, Homo sapiens
  misc_RNA (1)...(19): siRNA sense strand
ccaaugaaccggugaucga

SEQ ID NO: 379396 - RNA, 19 nt, Homo sapiens
  misc_RNA (1)...(19): siRNA sense strand
ccaauauucugucuguucu

SEQ ID NO: 379397 - RNA, 19 nt, Homo sapiens
  misc_RNA (1)...(19): siRNA sense strand
cgacgugcgugcucaacga

SEQ ID NO: 379398 - RNA, 19 nt, Homo sapiens
  misc_RNA (1)...(19): siRNA sense strand
agaaagccagugacaauga

SEQ ID NO: 379399 - RNA, 19 nt, Homo sapiens
  misc_RNA (1)...(19): siRNA sense strand
gauuggcuauguuuguuca

SEQ ID NO: 379400 - RNA, 19 nt, Homo sapiens
  misc_RNA (1)...(19): siRNA sense strand
cgacaagcuuugauguuac

SEQ ID NO: 379401 - RNA, 19 nt, Homo sapiens
  misc_RNA (1)...(19): siRNA sense strand
cgacccaaauuucguucuu

SEQ ID NO: 379402 - RNA, 19 nt, Homo sapiens
  misc_RNA (1)...(19): siRNA sense strand
ccagaacgcacgccgaaga

SEQ ID NO: 379403 - RNA, 19 nt, Homo sapiens
  misc_RNA (1)...(19): siRNA sense strand
acaaugagcccgguauaga

SEQ ID NO: 379404 - RNA, 19 nt, Homo sapiens
  misc_RNA (1)...(19): siRNA sense strand
ucaggcagauuccaagagu

SEQ ID NO: 379405 - RNA, 19 nt, Homo sapiens
  misc_RNA (1)...(19): siRNA sense strand
gcacgccgaagaaagaaga

SEQ ID NO: 379406 - RNA, 19 nt, Homo sapiens
  misc_RNA (1)...(19): siRNA sense strand
uuauggugauuacguauug

SEQ ID NO: 379407 - RNA, 19 nt, Homo sapiens
  misc_RNA (1)...(19): siRNA sense strand
gaugguggacgcuucaaau

SEQ ID NO: 379408 - RNA, 19 nt, Homo sapiens
  misc_RNA (1)...(19): siRNA sense strand
aaaagaaacugcacaaugc

SEQ ID NO: 379409 - RNA, 19 nt, Homo sapiens
  misc_RNA (1)...(19): siRNA sense strand
gagaaagccagugacaaug

SEQ ID NO: 379410 - RNA, 19 nt, Homo sapiens
  misc_RNA (1)...(19): siRNA sense strand
ugagaaguccuguaaccaa

SEQ ID NO: 379411 - RNA, 19 nt, Homo sapiens
  misc_RNA (1)...(19): siRNA sense strand
ugcaggcuaucaacaauga

SEQ ID NO: 379412 - RNA, 19 nt, Homo sapiens
  misc_RNA (1)...(19): siRNA sense strand
cugcaaacccuaaccaaga

SEQ ID NO: 379413 - RNA, 19 nt, Homo sapiens
  misc_RNA (1)...(19): siRNA sense strand
agccauugcugauaugcua

SEQ ID NO: 379414 - RNA, 19 nt, Homo sapiens
  misc_RNA (1)...(19): siRNA sense strand
cgaggaaccgccuggacua

SEQ ID NO: 379415 - RNA, 19 nt, Homo sapiens
  misc_RNA (1)...(19): siRNA sense strand
ugacaaugagcccgguaua

SEQ ID NO: 379416 - RNA, 19 nt, Homo sapiens
  misc_RNA (1)...(19): siRNA sense strand
caugcaggcuaucaacaau

SEQ ID NO: 379417 - RNA, 19 nt, Homo sapiens
  misc_RNA (1)...(19): siRNA sense strand
gacaagcuuugauguuacu

SEQ ID NO: 379418 - RNA, 19 nt, Homo sapiens
  misc_RNA (1)...(19): siRNA sense strand
ugaauguguuuguuuggau

SEQ ID NO: 379419 - RNA, 19 nt, Homo sapiens
  misc_RNA (1)...(19): siRNA sense strand
accaaaagcucauggaaaa

SEQ ID NO: 379420 - RNA, 19 nt, Homo sapiens
  misc_RNA (1)...(19): siRNA sense strand
gguggacgcuucaaauucc

SEQ ID NO: 379421 - RNA, 19 nt, Homo sapiens
  misc_RNA (1)...(19): siRNA sense strand
gaggaaccgccuggacuaa

SEQ ID NO: 379422 - RNA, 19 nt, Homo sapiens
  misc_RNA (1)...(19): siRNA sense strand
ugcacaaugccaccaauua

SEQ ID NO: 379423 - RNA, 19 nt, Homo sapiens
  misc_RNA (1)...(19): siRNA sense strand
ggccagcacuuucaaucgu

SEQ ID NO: 379424 - RNA, 19 nt, Homo sapiens
  misc_RNA (1)...(19): siRNA sense strand
caguaaaucccuccagugu

SEQ ID NO: 379425 - RNA, 19 nt, Homo sapiens
  misc_RNA (1)...(19): siRNA sense strand
gguauagagaugcaaguug

SEQ ID NO: 379426 - RNA, 19 nt, Homo sapiens
  misc_RNA (1)...(19): siRNA sense strand
aaucaauccucugguguau

SEQ ID NO: 379427 - RNA, 19 nt, Homo sapiens
  misc_RNA (1)...(19): siRNA sense strand
caacagcguccaucaugca

SEQ ID NO: 379428 - RNA, 19 nt, Homo sapiens
  misc_RNA (1)...(19): siRNA sense strand
cuggauuucuuuagauguu

SEQ ID NO: 379429 - RNA, 19 nt, Homo sapiens
  misc_RNA (1)...(19): siRNA sense strand
ggcauucuccaacuauuug

SEQ ID NO: 379430 - RNA, 19 nt, Homo sapiens
  misc_RNA (1)...(19): siRNA sense strand
cgaagggcauucuccaacu

SEQ ID NO: 379431 - RNA, 19 nt, Homo sapiens
  misc_RNA (1)...(19): siRNA sense strand
gguggcaacauccuuguga

SEQ ID NO: 379432 - RNA, 19 nt, Homo sapiens
  misc_RNA (1)...(19): siRNA sense strand
gcuauaguaacugacauuu

SEQ ID NO: 379433 - RNA, 19 nt, Homo sapiens
  misc_RNA (1)...(19): siRNA sense strand
aaacuggccagcacuuuca

SEQ ID NO: 379434 - RNA, 19 nt, Homo sapiens
  misc_RNA (1)...(19): siRNA sense strand
gagaugcaaguugagaauu

SEQ ID NO: 379435 - RNA, 19 nt, Homo sapiens
  misc_RNA (1)...(19): siRNA sense strand
uggauuggcuauguuuguu

SEQ ID NO: 379436 - RNA, 19 nt, Homo sapiens
  misc_RNA (1)...(19): siRNA sense strand
gaaaagcuucugaaugugu

SEQ ID NO: 379437 - RNA, 19 nt, Homo sapiens
  misc_RNA (1)...(19): siRNA sense strand
ugaguaaacugauuccuaa

SEQ ID NO: 379438 - RNA, 19 nt, Homo sapiens
  misc_RNA (1)...(19): siRNA sense strand
gaccugagcuacuccauga

SEQ ID NO: 379439 - RNA, 19 nt, Homo sapiens
  misc_RNA (1)...(19): siRNA sense strand
cagauuggcuggagaaaug

SEQ ID NO: 379440 - RNA, 19 nt, Homo sapiens
  misc_RNA (1)...(19): siRNA sense strand
gaugauggcuggugcaaag

SEQ ID NO: 379441 - RNA, 19 nt, Homo sapiens
  misc_RNA (1)...(19): siRNA sense strand
gagcagaggugagagugaa

SEQ ID NO: 379442 - RNA, 19 nt, Homo sapiens
  misc_RNA (1)...(19): siRNA sense strand
ggacagcaauggccucuac

SEQ ID NO: 379443 - RNA, 19 nt, Homo sapiens
  misc_RNA (1)...(19): siRNA sense strand
gcaaauauccagcccaucu

SEQ ID NO: 379444 - RNA, 19 nt, Homo sapiens
  misc_RNA (1)...(19): siRNA sense strand
ggacaguaauccucucuac

SEQ ID NO: 379445 - RNA, 19 nt, Homo sapiens
  misc_RNA (1)...(19): siRNA sense strand
guaaacugauuccuaaguc

SEQ ID NO: 379446 - RNA, 19 nt, Homo sapiens
  misc_RNA (1)...(19): siRNA sense strand
gaauacagucgcuuugaga

SEQ ID NO: 379447 - RNA, 19 nt, Homo sapiens
  misc_RNA (1)...(19): siRNA sense strand
ggaauacagucgcuuugag

SEQ ID NO: 379448 - RNA, 19 nt, Homo sapiens
  misc_RNA (1)...(19): siRNA sense strand
aaacggugcugcccuuugu

SEQ ID NO: 379449 - RNA, 19 nt, Homo sapiens
  misc_RNA (1)...(19): siRNA sense strand
ggagcugaguaaacugauu

SEQ ID NO: 379450 - RNA, 19 nt, Homo sapiens
  misc_RNA (1)...(19): siRNA sense strand
caccaucaauccucgcuuu

SEQ ID NO: 379451 - RNA, 19 nt, Homo sapiens
  misc_RNA (1)...(19): siRNA sense strand
caucaauccucgcuuucaa

SEQ ID NO: 379452 - RNA, 19 nt, Homo sapiens
  misc_RNA (1)...(19): siRNA sense strand
gauacccgguggaccugua

SEQ ID NO: 379453 - RNA, 19 nt, Homo sapiens
  misc_RNA (1)...(19): siRNA sense strand
caguaauccucucuacaaa

SEQ ID NO: 379454 - RNA, 19 nt, Homo sapiens
  misc_RNA (1)...(19): siRNA sense strand
acaaccagcuguucuucuu

SEQ ID NO: 379455 - RNA, 19 nt, Homo sapiens
  misc_RNA (1)...(19): siRNA sense strand
gaaagggucacugucaaug

SEQ ID NO: 379456 - RNA, 19 nt, Homo sapiens
  misc_RNA (1)...(19): siRNA sense strand
ccacauuucuuacgaaucc

SEQ ID NO: 379457 - RNA, 19 nt, Homo sapiens
  misc_RNA (1)...(19): siRNA sense strand
ggaaagggucacugucaau

SEQ ID NO: 379458 - RNA, 19 nt, Homo sapiens
  misc_RNA (1)...(19): siRNA sense strand
caagacaccaugcgagaga

SEQ ID NO: 379459 - RNA, 19 nt, Homo sapiens
  misc_RNA (1)...(19): siRNA sense strand
caacugcaguacagcuugu

SEQ ID NO: 379460 - RNA, 19 nt, Homo sapiens
  misc_RNA (1)...(19): siRNA sense strand
gcacaguacccuccaaacu

SEQ ID NO: 379461 - RNA, 19 nt, Homo sapiens
  misc_RNA (1)...(19): siRNA sense strand
acaguaauccucucuacaa

SEQ ID NO: 379462 - RNA, 19 nt, Homo sapiens
  misc_RNA (1)...(19): siRNA sense strand
uauaauagccugucuucca

SEQ ID NO: 379463 - RNA, 19 nt, Homo sapiens
  misc_RNA (1)...(19): siRNA sense strand
ucaaccagacggugacuuu

SEQ ID NO: 379464 - RNA, 19 nt, Homo sapiens
  misc_RNA (1)...(19): siRNA sense strand
ggaccuguacuaccuuaug

SEQ ID NO: 379465 - RNA, 19 nt, Homo sapiens
  misc_RNA (1)...(19): siRNA sense strand
gggcauggacgcugcaaau

SEQ ID NO: 379466 - RNA, 19 nt, Homo sapiens
  misc_RNA (1)...(19): siRNA sense strand
gagcagauuggcuggagaa

SEQ ID NO: 379467 - RNA, 19 nt, Homo sapiens
  misc_RNA (1)...(19): siRNA sense strand
guggaccuguacuaccuua

SEQ ID NO: 379468 - RNA, 19 nt, Homo sapiens
  misc_RNA (1)...(19): siRNA sense strand
gagcacaguacccuccaaa

SEQ ID NO: 379469 - RNA, 19 nt, Homo sapiens
  misc_RNA (1)...(19): siRNA sense strand
gaggugagagugaauugga

SEQ ID NO: 379470 - RNA, 19 nt, Homo sapiens
  misc_RNA (1)...(19): siRNA sense strand
ccagggacaccuacaaugu

SEQ ID NO: 379471 - RNA, 19 nt, Homo sapiens
  misc_RNA (1)...(19): siRNA sense strand
ccagucaccauucagcuuu

SEQ ID NO: 379472 - RNA, 19 nt, Homo sapiens
  misc_RNA (1)...(19): siRNA sense strand
agcaacaacucaacuggaa

SEQ ID NO: 379473 - RNA, 19 nt, Homo sapiens
  misc_RNA (1)...(19): siRNA sense strand
gguccacauuucuuacgaa

SEQ ID NO: 379474 - RNA, 19 nt, Homo sapiens
  misc_RNA (1)...(19): siRNA sense strand
gaccuguacuaccuuaugg

SEQ ID NO: 379475 - RNA, 19 nt, Homo sapiens
  misc_RNA (1)...(19): siRNA sense strand
gggaauacagucgcuuuga

SEQ ID NO: 379476 - RNA, 19 nt, Homo sapiens
  misc_RNA (1)...(19): siRNA sense strand
gcaaccacguccgaaucaa

SEQ ID NO: 379477 - RNA, 19 nt, Homo sapiens
  misc_RNA (1)...(19): siRNA sense strand
ggacuccagcaacguggua

SEQ ID NO: 379478 - RNA, 19 nt, Homo sapiens
  misc_RNA (1)...(19): siRNA sense strand
ucagacgacacauuccaua

SEQ ID NO: 379479 - RNA, 19 nt, Homo sapiens
  misc_RNA (1)...(19): siRNA sense strand
gagcugaguaaacugauuc

SEQ ID NO: 379480 - RNA, 19 nt, Homo sapiens
  misc_RNA (1)...(19): siRNA sense strand
agaagugcauccucucaca

SEQ ID NO: 379481 - RNA, 19 nt, Homo sapiens
  misc_RNA (1)...(19): siRNA sense strand
gcagaggugagagugaauu

SEQ ID NO: 379482 - RNA, 19 nt, Homo sapiens
  misc_RNA (1)...(19): siRNA sense strand
ggacaaccagcuguucuuc

SEQ ID NO: 379483 - RNA, 19 nt, Homo sapiens
  misc_RNA (1)...(19): siRNA sense strand
uggaaagggucacugucaa

SEQ ID NO: 379484 - RNA, 19 nt, Homo sapiens
  misc_RNA (1)...(19): siRNA sense strand
ugguacagcucaucaugga

SEQ ID NO: 379485 - RNA, 19 nt, Homo sapiens
  misc_RNA (1)...(19): siRNA sense strand
uaaacugauuccuaagucu

SEQ ID NO: 379486 - RNA, 19 nt, Homo sapiens
  misc_RNA (1)...(19): siRNA sense strand
caugaaggacgaccuggaa

SEQ ID NO: 379487 - RNA, 19 nt, Homo sapiens
  misc_RNA (1)...(19): siRNA sense strand
gcagacagucccacucucu

SEQ ID NO: 379488 - RNA, 19 nt, Homo sapiens
  misc_RNA (1)...(19): siRNA sense strand
ggagcugauuguggaguug

SEQ ID NO: 379489 - RNA, 19 nt, Homo sapiens
  misc_RNA (1)...(19): siRNA sense strand
ucauggaugcuuauaauag

SEQ ID NO: 379490 - RNA, 19 nt, Homo sapiens
  misc_RNA (1)...(19): siRNA sense strand
ggcccucucugcagcaaau

SEQ ID NO: 379491 - RNA, 19 nt, Homo sapiens
  misc_RNA (1)...(19): siRNA sense strand
gacgacacauuccauacag

SEQ ID NO: 379492 - RNA, 19 nt, Homo sapiens
  misc_RNA (1)...(19): siRNA sense strand
aaauauccagcccaucuuu

SEQ ID NO: 379493 - RNA, 19 nt, Homo sapiens
  misc_RNA (1)...(19): siRNA sense strand
guaauccucucuacaaaag

SEQ ID NO: 379494 - RNA, 19 nt, Homo sapiens
  misc_RNA (1)...(19): siRNA sense strand
gacauggacaguugcauca

SEQ ID NO: 379495 - RNA, 19 nt, Homo sapiens
  misc_RNA (1)...(19): siRNA sense strand
gugcuuggacggcuacuau

SEQ ID NO: 379496 - RNA, 19 nt, Homo sapiens
  misc_RNA (1)...(19): siRNA sense strand
cuacuauggugcucuaugc

SEQ ID NO: 379497 - RNA, 19 nt, Homo sapiens
  misc_RNA (1)...(19): siRNA sense strand
cggcuacuauggugcucua

SEQ ID NO: 379498 - RNA, 19 nt, Homo sapiens
  misc_RNA (1)...(19): siRNA sense strand
aaucuggacucgccugaag

SEQ ID NO: 379499 - RNA, 19 nt, Homo sapiens
  misc_RNA (1)...(19): siRNA sense strand
gcagauuggcuggagaaau

SEQ ID NO: 379500 - RNA, 19 nt, Homo sapiens
  misc_RNA (1)...(19): siRNA sense strand
ucacuucagacgacacauu

SEQ ID NO: 379501 - RNA, 19 nt, Homo sapiens
  misc_RNA (1)...(19): siRNA sense strand
cugccaauguggaguaugu

SEQ ID NO: 379502 - RNA, 19 nt, Homo sapiens
  misc_RNA (1)...(19): siRNA sense strand
guggaaagggucacuguca

SEQ ID NO: 379503 - RNA, 19 nt, Homo sapiens
  misc_RNA (1)...(19): siRNA sense strand
ggguaaggcugaggaucga

SEQ ID NO: 379504 - RNA, 19 nt, Homo sapiens
  misc_RNA (1)...(19): siRNA sense strand
caaauauccagcccaucuu

SEQ ID NO: 379505 - RNA, 19 nt, Homo sapiens
  misc_RNA (1)...(19): siRNA sense strand
gaguuugacuacccuucug

SEQ ID NO: 379506 - RNA, 19 nt, Homo sapiens
  misc_RNA (1)...(19): siRNA sense strand
gcagcacagaguuugacua

SEQ ID NO: 379507 - RNA, 19 nt, Homo sapiens
  misc_RNA (1)...(19): siRNA sense strand
aagggucacugucaaugug

SEQ ID NO: 379508 - RNA, 19 nt, Homo sapiens
  misc_RNA (1)...(19): siRNA sense strand
gcaggaagucacccauucu

SEQ ID NO: 379509 - RNA, 19 nt, Homo sapiens
  misc_RNA (1)...(19): siRNA sense strand
cauggacaguugcaucagu

SEQ ID NO: 379510 - RNA, 19 nt, Homo sapiens
  misc_RNA (1)...(19): siRNA sense strand
gcauggugcaagcaacuga

SEQ ID NO: 379511 - RNA, 19 nt, Homo sapiens
  misc_RNA (1)...(19): siRNA sense strand
cauggaugcuuauaauagc

SEQ ID NO: 379512 - RNA, 19 nt, Homo sapiens
  misc_RNA (1)...(19): siRNA sense strand
cugaguaaacugauuccua

SEQ ID NO: 379513 - RNA, 19 nt, Homo sapiens
  misc_RNA (1)...(19): siRNA sense strand
ugcaggaagucacccauuc

SEQ ID NO: 379514 - RNA, 19 nt, Homo sapiens
  misc_RNA (1)...(19): siRNA sense strand
guccacauuucuuacgaau

SEQ ID NO: 379515 - RNA, 19 nt, Homo sapiens
  misc_RNA (1)...(19): siRNA sense strand
ucaauccucgcuuucaaga

SEQ ID NO: 379516 - RNA, 19 nt, Homo sapiens
  misc_RNA (1)...(19): siRNA sense strand
gaaggagcagcaacaacuc

SEQ ID NO: 379517 - RNA, 19 nt, Homo sapiens
  misc_RNA (1)...(19): siRNA sense strand
ggugcaagcaacugaacuu

SEQ ID NO: 379518 - RNA, 19 nt, Homo sapiens
  misc_RNA (1)...(19): siRNA sense strand
agacagucccacucucuga

SEQ ID NO: 379519 - RNA, 19 nt, Homo sapiens
  misc_RNA (1)...(19): siRNA sense strand
agaaggagcagcaacaacu

SEQ ID NO: 379520 - RNA, 19 nt, Homo sapiens
  misc_RNA (1)...(19): siRNA sense strand
caggagcugaguaaacuga

SEQ ID NO: 379521 - RNA, 19 nt, Homo sapiens
  misc_RNA (1)...(19): siRNA sense strand
cagcacagaguuugacuac

SEQ ID NO: 379522 - RNA, 19 nt, Homo sapiens
  misc_RNA (1)...(19): siRNA sense strand
acggugacuuucuggguuu

SEQ ID NO: 379523 - RNA, 19 nt, Homo sapiens
  misc_RNA (1)...(19): siRNA sense strand
cugagaagagggaggguaa

SEQ ID NO: 379524 - RNA, 19 nt, Homo sapiens
  misc_RNA (1)...(19): siRNA sense strand
ggcucucgguggaaaucua

SEQ ID NO: 379525 - RNA, 19 nt, Homo sapiens
  misc_RNA (1)...(19): siRNA sense strand
gcucugcagugggcaugga

SEQ ID NO: 379526 - RNA, 19 nt, Homo sapiens
  misc_RNA (1)...(19): siRNA sense strand
ggaauccucaccuguccau

SEQ ID NO: 379527 - RNA, 19 nt, Homo sapiens
  misc_RNA (1)...(19): siRNA sense strand
ccagaagugcauccucuca

SEQ ID NO: 379528 - RNA, 19 nt, Homo sapiens
  misc_RNA (1)...(19): siRNA sense strand
ggaguaugucacugucaug

SEQ ID NO: 379529 - RNA, 19 nt, Homo sapiens
  misc_RNA (1)...(19): siRNA sense strand
caucacgaccaccaucaau

SEQ ID NO: 379530 - RNA, 19 nt, Homo sapiens
  misc_RNA (1)...(19): siRNA sense strand
gcaacgugguacagcucau

SEQ ID NO: 379531 - RNA, 19 nt, Homo sapiens
  misc_RNA (1)...(19): siRNA sense strand
gacaguaauccucucuaca

SEQ ID NO: 379532 - RNA, 19 nt, Homo sapiens
  misc_RNA (1)...(19): siRNA sense strand
gagcagcaacaacucaacu

SEQ ID NO: 379533 - RNA, 19 nt, Homo sapiens
  misc_RNA (1)...(19): siRNA sense strand
gccaccaacugcaguacag

SEQ ID NO: 379534 - RNA, 19 nt, Homo sapiens
  misc_RNA (1)...(19): siRNA sense strand
cgagagacaccgggacugu

SEQ ID NO: 379535 - RNA, 19 nt, Homo sapiens
  misc_RNA (1)...(19): siRNA sense strand
ggccagggacaccuacaau

SEQ ID NO: 379536 - RNA, 19 nt, Homo sapiens
  misc_RNA (1)...(19): siRNA sense strand
gagaagagggaggguaagg

SEQ ID NO: 379537 - RNA, 19 nt, Homo sapiens
  misc_RNA (1)...(19): siRNA sense strand
gaacacccauaucucuuua

SEQ ID NO: 379538 - RNA, 19 nt, Homo sapiens
  misc_RNA (1)...(19): siRNA sense strand
caaauaugcucuuggagaa

SEQ ID NO: 379539 - RNA, 19 nt, Homo sapiens
  misc_RNA (1)...(19): siRNA sense strand
ggacacuccuucugugaaa

SEQ ID NO: 379540 - RNA, 19 nt, Homo sapiens
  misc_RNA (1)...(19): siRNA sense strand
gagacugaaucuaugcuua

SEQ ID NO: 379541 - RNA, 19 nt, Homo sapiens
  misc_RNA (1)...(19): siRNA sense strand
caaggaagaaugaaguuua

SEQ ID NO: 379542 - RNA, 19 nt, Homo sapiens
  misc_RNA (1)...(19): siRNA sense strand
gaacuuugguguggucuga

SEQ ID NO: 379543 - RNA, 19 nt, Homo sapiens
  misc_RNA (1)...(19): siRNA sense strand
ccacagaccugaaggaucu

SEQ ID NO: 379544 - RNA, 19 nt, Homo sapiens
  misc_RNA (1)...(19): siRNA sense strand
gagcaauccuuccuuguca

SEQ ID NO: 379545 - RNA, 19 nt, Homo sapiens
  misc_RNA (1)...(19): siRNA sense strand
gaacugguggcacuuauga

SEQ ID NO: 379546 - RNA, 19 nt, Homo sapiens
  misc_RNA (1)...(19): siRNA sense strand
gacaagaagucaaauaugc

SEQ ID NO: 379547 - RNA, 19 nt, Homo sapiens
  misc_RNA (1)...(19): siRNA sense strand
gauggcaacugaacaagga

SEQ ID NO: 379548 - RNA, 19 nt, Homo sapiens
  misc_RNA (1)...(19): siRNA sense strand
gagaagggcuuugcuuuac

SEQ ID NO: 379549 - RNA, 19 nt, Homo sapiens
  misc_RNA (1)...(19): siRNA sense strand
gaacaaggaagaaugaagu

SEQ ID NO: 379550 - RNA, 19 nt, Homo sapiens
  misc_RNA (1)...(19): siRNA sense strand
gaagggcuuugcuuuacuu

SEQ ID NO: 379551 - RNA, 19 nt, Homo sapiens
  misc_RNA (1)...(19): siRNA sense strand
agaaacaccugacccagaa

SEQ ID NO: 379552 - RNA, 19 nt, Homo sapiens
  misc_RNA (1)...(19): siRNA sense strand
aaagucugcuuaugaguuu

SEQ ID NO: 379553 - RNA, 19 nt, Homo sapiens
  misc_RNA (1)...(19): siRNA sense strand
gagaauccuugccuuacuu

SEQ ID NO: 379554 - RNA, 19 nt, Homo sapiens
  misc_RNA (1)...(19): siRNA sense strand
ugauguagcuuauucuuca

SEQ ID NO: 379555 - RNA, 19 nt, Homo sapiens
  misc_RNA (1)...(19): siRNA sense strand
gaagucaaauaugcucuug

SEQ ID NO: 379556 - RNA, 19 nt, Homo sapiens
  misc_RNA (1)...(19): siRNA sense strand
acaagucacucuccaaugu

SEQ ID NO: 379557 - RNA, 19 nt, Homo sapiens
  misc_RNA (1)...(19): siRNA sense strand
ggaacacccauaucucuuu

SEQ ID NO: 379558 - RNA, 19 nt, Homo sapiens
  misc_RNA (1)...(19): siRNA sense strand
uuagaaagcaggcaaauug

SEQ ID NO: 379559 - RNA, 19 nt, Homo sapiens
  misc_RNA (1)...(19): siRNA sense strand
gcacauaaagcgaaugcaa

SEQ ID NO: 379560 - RNA, 19 nt, Homo sapiens
  misc_RNA (1)...(19): siRNA sense strand
gagcauaacuacugaugac

SEQ ID NO: 379561 - RNA, 19 nt, Homo sapiens
  misc_RNA (1)...(19): siRNA sense strand
ugagaagggcuuugcuuua

SEQ ID NO: 379562 - RNA, 19 nt, Homo sapiens
  misc_RNA (1)...(19): siRNA sense strand
ggagaaagacaaaguuaca

SEQ ID NO: 379563 - RNA, 19 nt, Homo sapiens
  misc_RNA (1)...(19): siRNA sense strand
ugacaaaucccaugaucaa

SEQ ID NO: 379564 - RNA, 19 nt, Homo sapiens
  misc_RNA (1)...(19): siRNA sense strand
uguauugccuuaagucaaa

SEQ ID NO: 379565 - RNA, 19 nt, Homo sapiens
  misc_RNA (1)...(19): siRNA sense strand
aagcuuauguugagaaguu

SEQ ID NO: 379566 - RNA, 19 nt, Homo sapiens
  misc_RNA (1)...(19): siRNA sense strand
ggaaggaacacccauaucu

SEQ ID NO: 379567 - RNA, 19 nt, Homo sapiens
  misc_RNA (1)...(19): siRNA sense strand
ggacaagaagucaaauaug

SEQ ID NO: 379568 - RNA, 19 nt, Homo sapiens
  misc_RNA (1)...(19): siRNA sense strand
agaauucgguaaagacauu

SEQ ID NO: 379569 - RNA, 19 nt, Homo sapiens
  misc_RNA (1)...(19): siRNA sense strand
gggacaguaugaccuauug

SEQ ID NO: 379570 - RNA, 19 nt, Homo sapiens
  misc_RNA (1)...(19): siRNA sense strand
gcaauuccuuuggcgcuaa

SEQ ID NO: 379571 - RNA, 19 nt, Homo sapiens
  misc_RNA (1)...(19): siRNA sense strand
ggacgauuguuuggugaaa

SEQ ID NO: 379572 - RNA, 19 nt, Homo sapiens
  misc_RNA (1)...(19): siRNA sense strand
gauaugacucugacaaaug

SEQ ID NO: 379573 - RNA, 19 nt, Homo sapiens
  misc_RNA (1)...(19): siRNA sense strand
gaacuacagaauucgguaa

SEQ ID NO: 379574 - RNA, 19 nt, Homo sapiens
  misc_RNA (1)...(19): siRNA sense strand
gcacaaagcaagcaugcau

SEQ ID NO: 379575 - RNA, 19 nt, Homo sapiens
  misc_RNA (1)...(19): siRNA sense strand
ccauaucucuuuagucagu

SEQ ID NO: 379576 - RNA, 19 nt, Homo sapiens
  misc_RNA (1)...(19): siRNA sense strand
cuacagaauucgguaaaga

SEQ ID NO: 379577 - RNA, 19 nt, Homo sapiens
  misc_RNA (1)...(19): siRNA sense strand
ggaaucuagugaccaacaa

SEQ ID NO: 379578 - RNA, 19 nt, Homo sapiens
  misc_RNA (1)...(19): siRNA sense strand
ugccaaagaagaugauuua

SEQ ID NO: 379579 - RNA, 19 nt, Homo sapiens
  misc_RNA (1)...(19): siRNA sense strand
ccugauugcuuuaguuguu

SEQ ID NO: 379580 - RNA, 19 nt, Homo sapiens
  misc_RNA (1)...(19): siRNA sense strand
agucaaagauggauuacug

SEQ ID NO: 379581 - RNA, 19 nt, Homo sapiens
  misc_RNA (1)...(19): siRNA sense strand
uauaagagcauaacuacug

SEQ ID NO: 379582 - RNA, 19 nt, Homo sapiens
  misc_RNA (1)...(19): siRNA sense strand
ggagaauccuugccuuacu

SEQ ID NO: 379583 - RNA, 19 nt, Homo sapiens
  misc_RNA (1)...(19): siRNA sense strand
ugcaagagguguacaacuu

SEQ ID NO: 379584 - RNA, 19 nt, Homo sapiens
  misc_RNA (1)...(19): siRNA sense strand
ggaucucucuucucaucaa

SEQ ID NO: 379585 - RNA, 19 nt, Homo sapiens
  misc_RNA (1)...(19): siRNA sense strand
acccauaucucuuuaguca

SEQ ID NO: 379586 - RNA, 19 nt, Homo sapiens
  misc_RNA (1)...(19): siRNA sense strand
caagagguguacaacuuca

SEQ ID NO: 379587 - RNA, 19 nt, Homo sapiens
  misc_RNA (1)...(19): siRNA sense strand
agauauagacccugaugua

SEQ ID NO: 379588 - RNA, 19 nt, Homo sapiens
  misc_RNA (1)...(19): siRNA sense strand
caagggaucgccaauggaa

SEQ ID NO: 379589 - RNA, 19 nt, Homo sapiens
  misc_RNA (1)...(19): siRNA sense strand
gacauacuguguacuugga

SEQ ID NO: 379590 - RNA, 19 nt, Homo sapiens
  misc_RNA (1)...(19): siRNA sense strand
ccugcuaccugauugcuuu

SEQ ID NO: 379591 - RNA, 19 nt, Homo sapiens
  misc_RNA (1)...(19): siRNA sense strand
guacuuggaacgccacauu

SEQ ID NO: 379592 - RNA, 19 nt, Homo sapiens
  misc_RNA (1)...(19): siRNA sense strand
agaggugucugucccuaaa

SEQ ID NO: 379593 - RNA, 19 nt, Homo sapiens
  misc_RNA (1)...(19): siRNA sense strand
gaaccuaccaagagcacaa

SEQ ID NO: 379594 - RNA, 19 nt, Homo sapiens
  misc_RNA (1)...(19): siRNA sense strand
ggaaaagucugcuuaugag

SEQ ID NO: 379595 - RNA, 19 nt, Homo sapiens
  misc_RNA (1)...(19): siRNA sense strand
gacugaaucuaugcuuaaa

SEQ ID NO: 379596 - RNA, 19 nt, Homo sapiens
  misc_RNA (1)...(19): siRNA sense strand
cgcuaaagauggcaacuga

SEQ ID NO: 379597 - RNA, 19 nt, Homo sapiens
  misc_RNA (1)...(19): siRNA sense strand
gacacauccuuucaccaaa

SEQ ID NO: 379598 - RNA, 19 nt, Homo sapiens
  misc_RNA (1)...(19): siRNA sense strand
gcaagagguguacaacuuc

SEQ ID NO: 379599 - RNA, 19 nt, Homo sapiens
  misc_RNA (1)...(19): siRNA sense strand
cagggaaucuagugaccaa

SEQ ID NO: 379600 - RNA, 19 nt, Homo sapiens
  misc_RNA (1)...(19): siRNA sense strand
agucaaauaugcucuugga

SEQ ID NO: 379601 - RNA, 19 nt, Homo sapiens
  misc_RNA (1)...(19): siRNA sense strand
uaaaugagggacauacugu

SEQ ID NO: 379602 - RNA, 19 nt, Homo sapiens
  misc_RNA (1)...(19): siRNA sense strand
gccauuaacaauucugaaa

SEQ ID NO: 379603 - RNA, 19 nt, Homo sapiens
  misc_RNA (1)...(19): siRNA sense strand
aagauaagguugauguucu

SEQ ID NO: 379604 - RNA, 19 nt, Homo sapiens
  misc_RNA (1)...(19): siRNA sense strand
gaaggaacacccauaucuc

SEQ ID NO: 379605 - RNA, 19 nt, Homo sapiens
  misc_RNA (1)...(19): siRNA sense strand
caagugggaggacgcaauu

SEQ ID NO: 379606 - RNA, 19 nt, Homo sapiens
  misc_RNA (1)...(19): siRNA sense strand
ugauaugacucugacaaau

SEQ ID NO: 379607 - RNA, 19 nt, Homo sapiens
  misc_RNA (1)...(19): siRNA sense strand
guugagaaguuuuccuaua

SEQ ID NO: 379608 - RNA, 19 nt, Homo sapiens
  misc_RNA (1)...(19): siRNA sense strand
ccaccauccuucccuuaug

SEQ ID NO: 379609 - RNA, 19 nt, Homo sapiens
  misc_RNA (1)...(19): siRNA sense strand
agacugaaucuaugcuuaa

SEQ ID NO: 379610 - RNA, 19 nt, Homo sapiens
  misc_RNA (1)...(19): siRNA sense strand
caauggacaagaagucaaa

SEQ ID NO: 379611 - RNA, 19 nt, Homo sapiens
  misc_RNA (1)...(19): siRNA sense strand
ggggagaacuacagaauuc

SEQ ID NO: 379612 - RNA, 19 nt, Homo sapiens
  misc_RNA (1)...(19): siRNA sense strand
uacaagggaucgccaaugg

SEQ ID NO: 379613 - RNA, 19 nt, Homo sapiens
  misc_RNA (1)...(19): siRNA sense strand
aaggaucucucuucucauc

SEQ ID NO: 379614 - RNA, 19 nt, Homo sapiens
  misc_RNA (1)...(19): siRNA sense strand
agacacauccuuucaccaa

SEQ ID NO: 379615 - RNA, 19 nt, Homo sapiens
  misc_RNA (1)...(19): siRNA sense strand
gauauagacccugauguag

SEQ ID NO: 379616 - RNA, 19 nt, Homo sapiens
  misc_RNA (1)...(19): siRNA sense strand
aaagauggcaacugaacaa

SEQ ID NO: 379617 - RNA, 19 nt, Homo sapiens
  misc_RNA (1)...(19): siRNA sense strand
ucucucuucucaucaauug

SEQ ID NO: 379618 - RNA, 19 nt, Homo sapiens
  misc_RNA (1)...(19): siRNA sense strand
gauguucucaaucaaguug

SEQ ID NO: 379619 - RNA, 19 nt, Homo sapiens
  misc_RNA (1)...(19): siRNA sense strand
acugaugacuggaaggauu

SEQ ID NO: 379620 - RNA, 19 nt, Homo sapiens
  misc_RNA (1)...(19): siRNA sense strand
auaagagcauaacuacuga

SEQ ID NO: 379621 - RNA, 19 nt, Homo sapiens
  misc_RNA (1)...(19): siRNA sense strand
cuaccugauugcuuuaguu

SEQ ID NO: 379622 - RNA, 19 nt, Homo sapiens
  misc_RNA (1)...(19): siRNA sense strand
caaaucccaugaucaagcu

SEQ ID NO: 379623 - RNA, 19 nt, Homo sapiens
  misc_RNA (1)...(19): siRNA sense strand
ggauuacugccaaagaaga

SEQ ID NO: 379624 - RNA, 19 nt, Homo sapiens
  misc_RNA (1)...(19): siRNA sense strand
agugaucaauggacaagaa

SEQ ID NO: 379625 - RNA, 19 nt, Homo sapiens
  misc_RNA (1)...(19): siRNA sense strand
gggaggaccguauguaugg

SEQ ID NO: 379626 - RNA, 19 nt, Homo sapiens
  misc_RNA (1)...(19): siRNA sense strand
aaagaacugguggcacuua

SEQ ID NO: 379627 - RNA, 19 nt, Homo sapiens
  misc_RNA (1)...(19): siRNA sense strand
ccacauuugcggacgauug

SEQ ID NO: 379628 - RNA, 19 nt, Homo sapiens
  misc_RNA (1)...(19): siRNA sense strand
gaaucuagugaccaacaaa

SEQ ID NO: 379629 - RNA, 19 nt, Homo sapiens
  misc_RNA (1)...(19): siRNA sense strand
cgacaagucacucuccaau

SEQ ID NO: 379630 - RNA, 19 nt, Homo sapiens
  misc_RNA (1)...(19): siRNA sense strand
gagaaagacaaaguuacaa

SEQ ID NO: 379631 - RNA, 19 nt, Homo sapiens
  misc_RNA (1)...(19): siRNA sense strand
uaacuacugaugacuggaa

SEQ ID NO: 379632 - RNA, 19 nt, Homo sapiens
  misc_RNA (1)...(19): siRNA sense strand
gaaugcaagagguguacaa

SEQ ID NO: 379633 - RNA, 19 nt, Homo sapiens
  misc_RNA (1)...(19): siRNA sense strand
gggacauacuguguacuug

SEQ ID NO: 379634 - RNA, 19 nt, Homo sapiens
  misc_RNA (1)...(19): siRNA sense strand
caacugaacaaggaagaau

SEQ ID NO: 379635 - RNA, 19 nt, Homo sapiens
  misc_RNA (1)...(19): siRNA sense strand
ccaauuaugauaugacucu

SEQ ID NO: 379636 - RNA, 19 nt, Homo sapiens
  misc_RNA (1)...(19): siRNA sense strand
gagaaguuuuccuauaaga

SEQ ID NO: 379637 - RNA, 19 nt, Homo sapiens
  misc_RNA (1)...(19): siRNA sense strand
gcaacgugcuugucauguu

SEQ ID NO: 379638 - RNA, 19 nt, Homo sapiens
  misc_RNA (1)...(19): siRNA sense strand
caacgugcuugucauguuc

SEQ ID NO: 379639 - RNA, 19 nt, Homo sapiens
  misc_RNA (1)...(19): siRNA sense strand
ccaccaacaucuacaucuu

SEQ ID NO: 379640 - RNA, 19 nt, Homo sapiens
  misc_RNA (1)...(19): siRNA sense strand
gcaaggcugugcucuccau

SEQ ID NO: 379641 - RNA, 19 nt, Homo sapiens
  misc_RNA (1)...(19): siRNA sense strand
gaagacggccaccaacauc

SEQ ID NO: 379642 - RNA, 19 nt, Homo sapiens
  misc_RNA (1)...(19): siRNA sense strand
gcauggugcuggugguugu

SEQ ID NO: 379643 - RNA, 19 nt, Homo sapiens
  misc_RNA (1)...(19): siRNA sense strand
gggacacggugaccaagau

SEQ ID NO: 379644 - RNA, 19 nt, Homo sapiens
  misc_RNA (1)...(19): siRNA sense strand
ugaccaagaucugcguguu

SEQ ID NO: 379645 - RNA, 19 nt, Homo sapiens
  misc_RNA (1)...(19): siRNA sense strand
ggacgcugguggacaucga

SEQ ID NO: 379646 - RNA, 19 nt, Homo sapiens
  misc_RNA (1)...(19): siRNA sense strand
uccaucgacuacuacaaua

SEQ ID NO: 379647 - RNA, 19 nt, Homo sapiens
  misc_RNA (1)...(19): siRNA sense strand
aggccaagcugaucaacau

SEQ ID NO: 379648 - RNA, 19 nt, Homo sapiens
  misc_RNA (1)...(19): siRNA sense strand
cgacuacuacaauauguuc

SEQ ID NO: 379649 - RNA, 19 nt, Homo sapiens
  misc_RNA (1)...(19): siRNA sense strand
caacaucuacaucuucaac

SEQ ID NO: 379650 - RNA, 19 nt, Homo sapiens
  misc_RNA (1)...(19): siRNA sense strand
caucgacuacuacaauaug

SEQ ID NO: 379651 - RNA, 19 nt, Homo sapiens
  misc_RNA (1)...(19): siRNA sense strand
caucuucaaccuggccuua

SEQ ID NO: 379652 - RNA, 19 nt, Homo sapiens
  misc_RNA (1)...(19): siRNA sense strand
gaucugcguguuccucuuc

SEQ ID NO: 379653 - RNA, 19 nt, Homo sapiens
  misc_RNA (1)...(19): siRNA sense strand
ccaagcugaucaacaucug

SEQ ID NO: 379654 - RNA, 19 nt, Homo sapiens
  misc_RNA (1)...(19): siRNA sense strand
gcgccuucgugguguguug

SEQ ID NO: 379655 - RNA, 19 nt, Homo sapiens
  misc_RNA (1)...(19): siRNA sense strand
caucaucaccgugugcuau

SEQ ID NO: 379656 - RNA, 19 nt, Homo sapiens
  misc_RNA (1)...(19): siRNA sense strand
gaccaagaucugcguguuc

SEQ ID NO: 379657 - RNA, 19 nt, Homo sapiens
  misc_RNA (1)...(19): siRNA sense strand
gggcaacgugcuugucaug

SEQ ID NO: 379658 - RNA, 19 nt, Homo sapiens
  misc_RNA (1)...(19): siRNA sense strand
ucaccaugaugaguguuga

SEQ ID NO: 379659 - RNA, 19 nt, Homo sapiens
  misc_RNA (1)...(19): siRNA sense strand
gcaucguccgguacacuaa

SEQ ID NO: 379660 - RNA, 19 nt, Homo sapiens
  misc_RNA (1)...(19): siRNA sense strand
aagcugaucaacaucugua

SEQ ID NO: 379661 - RNA, 19 nt, Homo sapiens
  misc_RNA (1)...(19): siRNA sense strand
ugaagacggccaccaacau

SEQ ID NO: 379662 - RNA, 19 nt, Homo sapiens
  misc_RNA (1)...(19): siRNA sense strand
agacggccaccaacaucua

SEQ ID NO: 379663 - RNA, 19 nt, Homo sapiens
  misc_RNA (1)...(19): siRNA sense strand
cgugugcuauggccucaug

SEQ ID NO: 379664 - RNA, 19 nt, Homo sapiens
  misc_RNA (1)...(19): siRNA sense strand
ggcaucguccgguacacua

SEQ ID NO: 379665 - RNA, 19 nt, Homo sapiens
  misc_RNA (1)...(19): siRNA sense strand
accaacaucuacaucuuca

SEQ ID NO: 379666 - RNA, 19 nt, Homo sapiens
  misc_RNA (1)...(19): siRNA sense strand
acaauauguucaccagcau

SEQ ID NO: 379667 - RNA, 19 nt, Homo sapiens
  misc_RNA (1)...(19): siRNA sense strand
ucuggacgcugguggacau

SEQ ID NO: 379668 - RNA, 19 nt, Homo sapiens
  misc_RNA (1)...(19): siRNA sense strand
gugcccauccucaucauca

SEQ ID NO: 379669 - RNA, 19 nt, Homo sapiens
  misc_RNA (1)...(19): siRNA sense strand
ugucaaggcccuggacuuc

SEQ ID NO: 379670 - RNA, 19 nt, Homo sapiens
  misc_RNA (1)...(19): siRNA sense strand
ugaagacggugaagaauua

SEQ ID NO: 379671 - RNA, 19 nt, Homo sapiens
  misc_RNA (1)...(19): siRNA sense strand
gaauacaacuuccuucuuc

SEQ ID NO: 379672 - RNA, 19 nt, Homo sapiens
  misc_RNA (1)...(19): siRNA sense strand
gacaucaaaugcugaaaua

SEQ ID NO: 379673 - RNA, 19 nt, Homo sapiens
  misc_RNA (1)...(19): siRNA sense strand
gaacagcaaacaaauauug

SEQ ID NO: 379674 - RNA, 19 nt, Homo sapiens
  misc_RNA (1)...(19): siRNA sense strand
ucaagacacugguuuauug

SEQ ID NO: 379675 - RNA, 19 nt, Homo sapiens
  misc_RNA (1)...(19): siRNA sense strand
aaacauuccugcauuagaa

SEQ ID NO: 379676 - RNA, 19 nt, Homo sapiens
  misc_RNA (1)...(19): siRNA sense strand
gaucacuucuuucaaauca

SEQ ID NO: 379677 - RNA, 19 nt, Homo sapiens
  misc_RNA (1)...(19): siRNA sense strand
gcagggagaugaagaagca

SEQ ID NO: 379678 - RNA, 19 nt, Homo sapiens
  misc_RNA (1)...(19): siRNA sense strand
cagcugccaugcaugauua

SEQ ID NO: 379679 - RNA, 19 nt, Homo sapiens
  misc_RNA (1)...(19): siRNA sense strand
gcaucaaacuggcagauau

SEQ ID NO: 379680 - RNA, 19 nt, Homo sapiens
  misc_RNA (1)...(19): siRNA sense strand
gcaaaggucaucuucugua

SEQ ID NO: 379681 - RNA, 19 nt, Homo sapiens
  misc_RNA (1)...(19): siRNA sense strand
uauggaaacucaacaagaa

SEQ ID NO: 379682 - RNA, 19 nt, Homo sapiens
  misc_RNA (1)...(19): siRNA sense strand
ggagagaaaucaggaagga

SEQ ID NO: 379683 - RNA, 19 nt, Homo sapiens
  misc_RNA (1)...(19): siRNA sense strand
caaggcaaaugauguaaau

SEQ ID NO: 379684 - RNA, 19 nt, Homo sapiens
  misc_RNA (1)...(19): siRNA sense strand
ggaaauggaguugaucuuu

SEQ ID NO: 379685 - RNA, 19 nt, Homo sapiens
  misc_RNA (1)...(19): siRNA sense strand
gaacaggaaaugaaacaga

SEQ ID NO: 379686 - RNA, 19 nt, Homo sapiens
  misc_RNA (1)...(19): siRNA sense strand
caaggaugcuaucuaaaug

SEQ ID NO: 379687 - RNA, 19 nt, Homo sapiens
  misc_RNA (1)...(19): siRNA sense strand
gcgaauugcuuauauuucu

SEQ ID NO: 379688 - RNA, 19 nt, Homo sapiens
  misc_RNA (1)...(19): siRNA sense strand
guucgagacuugcauuuga

SEQ ID NO: 379689 - RNA, 19 nt, Homo sapiens
  misc_RNA (1)...(19): siRNA sense strand
uacagaagaugaagaaaug

SEQ ID NO: 379690 - RNA, 19 nt, Homo sapiens
  misc_RNA (1)...(19): siRNA sense strand
agucaaggaugcuaucuaa

SEQ ID NO: 379691 - RNA, 19 nt, Homo sapiens
  misc_RNA (1)...(19): siRNA sense strand
gaaaauggcuaucgagaca

SEQ ID NO: 379692 - RNA, 19 nt, Homo sapiens
  misc_RNA (1)...(19): siRNA sense strand
caaaggucaucuucuguau

SEQ ID NO: 379693 - RNA, 19 nt, Homo sapiens
  misc_RNA (1)...(19): siRNA sense strand
cacaagauauggaaggaaa

SEQ ID NO: 379694 - RNA, 19 nt, Homo sapiens
  misc_RNA (1)...(19): siRNA sense strand
gaacuauuuucgugcauua

SEQ ID NO: 379695 - RNA, 19 nt, Homo sapiens
  misc_RNA (1)...(19): siRNA sense strand
gcaaacaaauauugaacag

SEQ ID NO: 379696 - RNA, 19 nt, Homo sapiens
  misc_RNA (1)...(19): siRNA sense strand
uaacagcuguggacaucaa

SEQ ID NO: 379697 - RNA, 19 nt, Homo sapiens
  misc_RNA (1)...(19): siRNA sense strand
caaaaggccucaccaagaa

SEQ ID NO: 379698 - RNA, 19 nt, Homo sapiens
  misc_RNA (1)...(19): siRNA sense strand
cagaugagauucagguaau

SEQ ID NO: 379699 - RNA, 19 nt, Homo sapiens
  misc_RNA (1)...(19): siRNA sense strand
ugaaaguggugaugaugaa

SEQ ID NO: 379700 - RNA, 19 nt, Homo sapiens
  misc_RNA (1)...(19): siRNA sense strand
cagaagagcugguguuuug

SEQ ID NO: 379701 - RNA, 19 nt, Homo sapiens
  misc_RNA (1)...(19): siRNA sense strand
gcaauauggugucagaucu

SEQ ID NO: 379702 - RNA, 19 nt, Homo sapiens
  misc_RNA (1)...(19): siRNA sense strand
gaaagacagcagaaaauua

SEQ ID NO: 379703 - RNA, 19 nt, Homo sapiens
  misc_RNA (1)...(19): siRNA sense strand
uaaaugaggcucgcaauau

SEQ ID NO: 379704 - RNA, 19 nt, Homo sapiens
  misc_RNA (1)...(19): siRNA sense strand
ccauguaggucucagaaga

SEQ ID NO: 379705 - RNA, 19 nt, Homo sapiens
  misc_RNA (1)...(19): siRNA sense strand
caaacuggcagauauaaau

SEQ ID NO: 379706 - RNA, 19 nt, Homo sapiens
  misc_RNA (1)...(19): siRNA sense strand
gaaggaaaucguagaggaa

SEQ ID NO: 379707 - RNA, 19 nt, Homo sapiens
  misc_RNA (1)...(19): siRNA sense strand
gcagaagaggauaaugaua

SEQ ID NO: 379708 - RNA, 19 nt, Homo sapiens
  misc_RNA (1)...(19): siRNA sense strand
aaaugaggcucgcaauaug

SEQ ID NO: 379709 - RNA, 19 nt, Homo sapiens
  misc_RNA (1)...(19): siRNA sense strand
agacauuccuuaucacaau

SEQ ID NO: 379710 - RNA, 19 nt, Homo sapiens
  misc_RNA (1)...(19): siRNA sense strand
ucuacuggcucucuaacua

SEQ ID NO: 379711 - RNA, 19 nt, Homo sapiens
  misc_RNA (1)...(19): siRNA sense strand
gcagaugagauucagguaa

SEQ ID NO: 379712 - RNA, 19 nt, Homo sapiens
  misc_RNA (1)...(19): siRNA sense strand
caggaaggauucucaguca

SEQ ID NO: 379713 - RNA, 19 nt, Homo sapiens
  misc_RNA (1)...(19): siRNA sense strand
ugaaucagaugguacagau

SEQ ID NO: 379714 - RNA, 19 nt, Homo sapiens
  misc_RNA (1)...(19): siRNA sense strand
gaaaggggauagaaaacuu

SEQ ID NO: 379715 - RNA, 19 nt, Homo sapiens
  misc_RNA (1)...(19): siRNA sense strand
ggauaaugauacugaaagu

SEQ ID NO: 379716 - RNA, 19 nt, Homo sapiens
  misc_RNA (1)...(19): siRNA sense strand
caacuuccuucuucaucuu

SEQ ID NO: 379717 - RNA, 19 nt, Homo sapiens
  misc_RNA (1)...(19): siRNA sense strand
gcacagagugaacagcaaa

SEQ ID NO: 379718 - RNA, 19 nt, Homo sapiens
  misc_RNA (1)...(19): siRNA sense strand
caucaaaugcugaaauaug

SEQ ID NO: 379719 - RNA, 19 nt, Homo sapiens
  misc_RNA (1)...(19): siRNA sense strand
ggacaucaaaugcugaaau

SEQ ID NO: 379720 - RNA, 19 nt, Homo sapiens
  misc_RNA (1)...(19): siRNA sense strand
gaauuuggcauuucaaguc

SEQ ID NO: 379721 - RNA, 19 nt, Homo sapiens
  misc_RNA (1)...(19): siRNA sense strand
guaaagcugaugggaauaa

SEQ ID NO: 379722 - RNA, 19 nt, Homo sapiens
  misc_RNA (1)...(19): siRNA sense strand
gaagaugaagaaauggaaa

SEQ ID NO: 379723 - RNA, 19 nt, Homo sapiens
  misc_RNA (1)...(19): siRNA sense strand
ggcauagaauggaguaaug

SEQ ID NO: 379724 - RNA, 19 nt, Homo sapiens
  misc_RNA (1)...(19): siRNA sense strand
gggcgaauugcuuauauuu

SEQ ID NO: 379725 - RNA, 19 nt, Homo sapiens
  misc_RNA (1)...(19): siRNA sense strand
ucagucagguuauguauac

SEQ ID NO: 379726 - RNA, 19 nt, Homo sapiens
  misc_RNA (1)...(19): siRNA sense strand
gaagaaagacagcagaaaa

SEQ ID NO: 379727 - RNA, 19 nt, Homo sapiens
  misc_RNA (1)...(19): siRNA sense strand
acagauugcugcaguggaa

SEQ ID NO: 379728 - RNA, 19 nt, Homo sapiens
  misc_RNA (1)...(19): siRNA sense strand
gaccgucguugccuuguau

SEQ ID NO: 379729 - RNA, 19 nt, Homo sapiens
  misc_RNA (1)...(19): siRNA sense strand
gauauggaaggaaaucgua

SEQ ID NO: 379730 - RNA, 19 nt, Homo sapiens
  misc_RNA (1)...(19): siRNA sense strand
gugaagaauuagauacaga

SEQ ID NO: 379731 - RNA, 19 nt, Homo sapiens
  misc_RNA (1)...(19): siRNA sense strand
cuucaaacauuccugcauu

SEQ ID NO: 379732 - RNA, 19 nt, Homo sapiens
  misc_RNA (1)...(19): siRNA sense strand
cccauagaauuuccugaua

SEQ ID NO: 379733 - RNA, 19 nt, Homo sapiens
  misc_RNA (1)...(19): siRNA sense strand
ucaaggaugcuaucuaaau

SEQ ID NO: 379734 - RNA, 19 nt, Homo sapiens
  misc_RNA (1)...(19): siRNA sense strand
acaagggacuaaauaggaa

SEQ ID NO: 379735 - RNA, 19 nt, Homo sapiens
  misc_RNA (1)...(19): siRNA sense strand
aaauggaguugaucuuuca

SEQ ID NO: 379736 - RNA, 19 nt, Homo sapiens
  misc_RNA (1)...(19): siRNA sense strand
caucaaacuggcagauaua

SEQ ID NO: 379737 - RNA, 19 nt, Homo sapiens
  misc_RNA (1)...(19): siRNA sense strand
gugaacagcaaacaaauau

SEQ ID NO: 379738 - RNA, 19 nt, Homo sapiens
  misc_RNA (1)...(19): siRNA sense strand
aagcaaaggucaucuucug

SEQ ID NO: 379739 - RNA, 19 nt, Homo sapiens
  misc_RNA (1)...(19): siRNA sense strand
cagaagaggcacagaguga

SEQ ID NO: 379740 - RNA, 19 nt, Homo sapiens
  misc_RNA (1)...(19): siRNA sense strand
auaaguggcuaacagaaga

SEQ ID NO: 379741 - RNA, 19 nt, Homo sapiens
  misc_RNA (1)...(19): siRNA sense strand
gcaaaaggccucaccaaga

SEQ ID NO: 379742 - RNA, 19 nt, Homo sapiens
  misc_RNA (1)...(19): siRNA sense strand
gcccaucaguccauucaug

SEQ ID NO: 379743 - RNA, 19 nt, Homo sapiens
  misc_RNA (1)...(19): siRNA sense strand
gacacugguuuauuggaaa

SEQ ID NO: 379744 - RNA, 19 nt, Homo sapiens
  misc_RNA (1)...(19): siRNA sense strand
aaggucaucuucuguauca

SEQ ID NO: 379745 - RNA, 19 nt, Homo sapiens
  misc_RNA (1)...(19): siRNA sense strand
uuggaucacuucuuucaaa

SEQ ID NO: 379746 - RNA, 19 nt, Homo sapiens
  misc_RNA (1)...(19): siRNA sense strand
ggaaaucguagaggaagaa

SEQ ID NO: 379747 - RNA, 19 nt, Homo sapiens
  misc_RNA (1)...(19): siRNA sense strand
gcaguuugguaucugacaa

SEQ ID NO: 379748 - RNA, 19 nt, Homo sapiens
  misc_RNA (1)...(19): siRNA sense strand
cuaaaugaggcucgcaaua

SEQ ID NO: 379749 - RNA, 19 nt, Homo sapiens
  misc_RNA (1)...(19): siRNA sense strand
aagcagacggcgaauauuu

SEQ ID NO: 379750 - RNA, 19 nt, Homo sapiens
  misc_RNA (1)...(19): siRNA sense strand
ggcaaaugauguaaauagu

SEQ ID NO: 379751 - RNA, 19 nt, Homo sapiens
  misc_RNA (1)...(19): siRNA sense strand
cagcagauccacaaugguu

SEQ ID NO: 379752 - RNA, 19 nt, Homo sapiens
  misc_RNA (1)...(19): siRNA sense strand
ggugauaaguggcuaacag

SEQ ID NO: 379753 - RNA, 19 nt, Homo sapiens
  misc_RNA (1)...(19): siRNA sense strand
gagaagaaagacagcagaa

SEQ ID NO: 379754 - RNA, 19 nt, Homo sapiens
  misc_RNA (1)...(19): siRNA sense strand
aaaaucaggugaagaagaa

SEQ ID NO: 379755 - RNA, 19 nt, Homo sapiens
  misc_RNA (1)...(19): siRNA sense strand
caccuaauacuccagauuu

SEQ ID NO: 379756 - RNA, 19 nt, Homo sapiens
  misc_RNA (1)...(19): siRNA sense strand
caaggugggaucguaauaa

SEQ ID NO: 379757 - RNA, 19 nt, Homo sapiens
  misc_RNA (1)...(19): siRNA sense strand
cuuaaugggugcuuucuca

SEQ ID NO: 379758 - RNA, 19 nt, Homo sapiens
  misc_RNA (1)...(19): siRNA sense strand
uuaauccucucacaccauu

SEQ ID NO: 379759 - RNA, 19 nt, Homo sapiens
  misc_RNA (1)...(19): siRNA sense strand
agaggcagaugaagaggaa

SEQ ID NO: 379760 - RNA, 19 nt, Homo sapiens
  misc_RNA (1)...(19): siRNA sense strand
uaaagcugaugggaauaaa

SEQ ID NO: 379761 - RNA, 19 nt, Homo sapiens
  misc_RNA (1)...(19): siRNA sense strand
gaauucaagcgcuuucguu

SEQ ID NO: 379762 - RNA, 19 nt, Homo sapiens
  misc_RNA (1)...(19): siRNA sense strand
agacacugguuuauuggaa

SEQ ID NO: 379763 - RNA, 19 nt, Homo sapiens
  misc_RNA (1)...(19): siRNA sense strand
cucaggaacuucaggauug

SEQ ID NO: 379764 - RNA, 19 nt, Homo sapiens
  misc_RNA (1)...(19): siRNA sense strand
aaacuuaacaagggacuaa

SEQ ID NO: 379765 - RNA, 19 nt, Homo sapiens
  misc_RNA (1)...(19): siRNA sense strand
aagcagaagaggauaauga

SEQ ID NO: 379766 - RNA, 19 nt, Homo sapiens
  misc_RNA (1)...(19): siRNA sense strand
cgaccuggcugccuuuguc

SEQ ID NO: 379767 - RNA, 19 nt, Homo sapiens
  misc_RNA (1)...(19): siRNA sense strand
ucaaacuuauggaaacuca

SEQ ID NO: 379768 - RNA, 19 nt, Homo sapiens
  misc_RNA (1)...(19): siRNA sense strand
gcaccuaauacuccagauu

SEQ ID NO: 379769 - RNA, 19 nt, Homo sapiens
  misc_RNA (1)...(19): siRNA sense strand
ccauagaauuuccugauac

SEQ ID NO: 379770 - RNA, 19 nt, Homo sapiens
  misc_RNA (1)...(19): siRNA sense strand
gaacagucguuaagaagua

SEQ ID NO: 379771 - RNA, 19 nt, Homo sapiens
  misc_RNA (1)...(19): siRNA sense strand
ggagaaacacuaauucaua

SEQ ID NO: 379772 - RNA, 19 nt, Homo sapiens
  misc_RNA (1)...(19): siRNA sense strand
caaagcauauugugaguaa

SEQ ID NO: 379773 - RNA, 19 nt, Homo sapiens
  misc_RNA (1)...(19): siRNA sense strand
ggaaugagaccuuugaauu

SEQ ID NO: 379774 - RNA, 19 nt, Homo sapiens
  misc_RNA (1)...(19): siRNA sense strand
gaaugagaccuuugaauuu

SEQ ID NO: 379775 - RNA, 19 nt, Homo sapiens
  misc_RNA (1)...(19): siRNA sense strand
ggagaagacuuucagacaa

SEQ ID NO: 379776 - RNA, 19 nt, Homo sapiens
  misc_RNA (1)...(19): siRNA sense strand
ggagauuaaugaagaacua

SEQ ID NO: 379777 - RNA, 19 nt, Homo sapiens
  misc_RNA (1)...(19): siRNA sense strand
guacaaggcuccagguguu

SEQ ID NO: 379778 - RNA, 19 nt, Homo sapiens
  misc_RNA (1)...(19): siRNA sense strand
agaaaugucucuugaaguu

SEQ ID NO: 379779 - RNA, 19 nt, Homo sapiens
  misc_RNA (1)...(19): siRNA sense strand
acaaggaguuucuaaguaa

SEQ ID NO: 379780 - RNA, 19 nt, Homo sapiens
  misc_RNA (1)...(19): siRNA sense strand
ggaagugacuaucaaagug

SEQ ID NO: 379781 - RNA, 19 nt, Homo sapiens
  misc_RNA (1)...(19): siRNA sense strand
ggagugcuaugucuuuaaa

SEQ ID NO: 379782 - RNA, 19 nt, Homo sapiens
  misc_RNA (1)...(19): siRNA sense strand
ugaaaugguucuagaaaug

SEQ ID NO: 379783 - RNA, 19 nt, Homo sapiens
  misc_RNA (1)...(19): siRNA sense strand
cagaggagauuaaugaaga

SEQ ID NO: 379784 - RNA, 19 nt, Homo sapiens
  misc_RNA (1)...(19): siRNA sense strand
acagugggcucacauuuaa

SEQ ID NO: 379785 - RNA, 19 nt, Homo sapiens
  misc_RNA (1)...(19): siRNA sense strand
uaaguaaacccaaagcaua

SEQ ID NO: 379786 - RNA, 19 nt, Homo sapiens
  misc_RNA (1)...(19): siRNA sense strand
ccaagucacugaaaugguu

SEQ ID NO: 379787 - RNA, 19 nt, Homo sapiens
  misc_RNA (1)...(19): siRNA sense strand
ggugagugauucagcuuua

SEQ ID NO: 379788 - RNA, 19 nt, Homo sapiens
  misc_RNA (1)...(19): siRNA sense strand
caaguuggauucaucguau

SEQ ID NO: 379789 - RNA, 19 nt, Homo sapiens
  misc_RNA (1)...(19): siRNA sense strand
gaucuuaugcacuucaaua

SEQ ID NO: 379790 - RNA, 19 nt, Homo sapiens
  misc_RNA (1)...(19): siRNA sense strand
gaaggagugcuaugucuuu

SEQ ID NO: 379791 - RNA, 19 nt, Homo sapiens
  misc_RNA (1)...(19): siRNA sense strand
cauaaucuccuuugacuuu

SEQ ID NO: 379792 - RNA, 19 nt, Homo sapiens
  misc_RNA (1)...(19): siRNA sense strand
gaagagaacaagacauuuc

SEQ ID NO: 379793 - RNA, 19 nt, Homo sapiens
  misc_RNA (1)...(19): siRNA sense strand
gagcugauguuugcagauu

SEQ ID NO: 379794 - RNA, 19 nt, Homo sapiens
  misc_RNA (1)...(19): siRNA sense strand
agaaaucgcugacuuugau

SEQ ID NO: 379795 - RNA, 19 nt, Homo sapiens
  misc_RNA (1)...(19): siRNA sense strand
gaaauuggcauggcuaaau

SEQ ID NO: 379796 - RNA, 19 nt, Homo sapiens
  misc_RNA (1)...(19): siRNA sense strand
aaauuggcauggcuaaaua

SEQ ID NO: 379797 - RNA, 19 nt, Homo sapiens
  misc_RNA (1)...(19): siRNA sense strand
gacagugggcucacauuua

SEQ ID NO: 379798 - RNA, 19 nt, Homo sapiens
  misc_RNA (1)...(19): siRNA sense strand
gauugauccuuauguguuu

SEQ ID NO: 379799 - RNA, 19 nt, Homo sapiens
  misc_RNA (1)...(19): siRNA sense strand
uuccaaagauugauccuua

SEQ ID NO: 379800 - RNA, 19 nt, Homo sapiens
  misc_RNA (1)...(19): siRNA sense strand
gaauuuaguccauacgaaa

SEQ ID NO: 379801 - RNA, 19 nt, Homo sapiens
  misc_RNA (1)...(19): siRNA sense strand
gaauauagaagacagaauc

SEQ ID NO: 379802 - RNA, 19 nt, Homo sapiens
  misc_RNA (1)...(19): siRNA sense strand
cacaauggaggaagaauua

SEQ ID NO: 379803 - RNA, 19 nt, Homo sapiens
  misc_RNA (1)...(19): siRNA sense strand
gggauucucuggugugaug

SEQ ID NO: 379804 - RNA, 19 nt, Homo sapiens
  misc_RNA (1)...(19): siRNA sense strand
uagcagauccugaugaauu

SEQ ID NO: 379805 - RNA, 19 nt, Homo sapiens
  misc_RNA (1)...(19): siRNA sense strand
gaccuacgauuuaguaugg

SEQ ID NO: 379806 - RNA, 19 nt, Homo sapiens
  misc_RNA (1)...(19): siRNA sense strand
agaaagaaaucgcugacuu

SEQ ID NO: 379807 - RNA, 19 nt, Homo sapiens
  misc_RNA (1)...(19): siRNA sense strand
ggaugcagcuguagcagau

SEQ ID NO: 379808 - RNA, 19 nt, Homo sapiens
  misc_RNA (1)...(19): siRNA sense strand
gaugaaggcauuauacgaa

SEQ ID NO: 379809 - RNA, 19 nt, Homo sapiens
  misc_RNA (1)...(19): siRNA sense strand
ucacugaaaugguucuaga

SEQ ID NO: 379810 - RNA, 19 nt, Homo sapiens
  misc_RNA (1)...(19): siRNA sense strand
ggacagugggcucacauuu

SEQ ID NO: 379811 - RNA, 19 nt, Homo sapiens
  misc_RNA (1)...(19): siRNA sense strand
gaagugacuaucaaaguga

SEQ ID NO: 379812 - RNA, 19 nt, Homo sapiens
  misc_RNA (1)...(19): siRNA sense strand
ucaauacucugaacaacau

SEQ ID NO: 379813 - RNA, 19 nt, Homo sapiens
  misc_RNA (1)...(19): siRNA sense strand
cagauuggguugaauuuag

SEQ ID NO: 379814 - RNA, 19 nt, Homo sapiens
  misc_RNA (1)...(19): siRNA sense strand
aacaaggaguuucuaagua

SEQ ID NO: 379815 - RNA, 19 nt, Homo sapiens
  misc_RNA (1)...(19): siRNA sense strand
gagaagacuuucagacaac

SEQ ID NO: 379816 - RNA, 19 nt, Homo sapiens
  misc_RNA (1)...(19): siRNA sense strand
caaggaguuucuaaguaaa

SEQ ID NO: 379817 - RNA, 19 nt, Homo sapiens
  misc_RNA (1)...(19): siRNA sense strand
caacaaggaguuucuaagu

SEQ ID NO: 379818 - RNA, 19 nt, Homo sapiens
  misc_RNA (1)...(19): siRNA sense strand
gcagauuggguugaauuua

SEQ ID NO: 379819 - RNA, 19 nt, Homo sapiens
  misc_RNA (1)...(19): siRNA sense strand
ggccagaggagauuaauga

SEQ ID NO: 379820 - RNA, 19 nt, Homo sapiens
  misc_RNA (1)...(19): siRNA sense strand
caaagaauagugaaggauu

SEQ ID NO: 379821 - RNA, 19 nt, Homo sapiens
  misc_RNA (1)...(19): siRNA sense strand
aaagaauagugaaggauug

SEQ ID NO: 379822 - RNA, 19 nt, Homo sapiens
  misc_RNA (1)...(19): siRNA sense strand
ccaagaauccugauaugga

SEQ ID NO: 379823 - RNA, 19 nt, Homo sapiens
  misc_RNA (1)...(19): siRNA sense strand
caccuuuacugacaucuuu

SEQ ID NO: 379824 - RNA, 19 nt, Homo sapiens
  misc_RNA (1)...(19): siRNA sense strand
gcaaguuggauucaucgua

SEQ ID NO: 379825 - RNA, 19 nt, Homo sapiens
  misc_RNA (1)...(19): siRNA sense strand
gaagaaaaccccuugcauu

SEQ ID NO: 379826 - RNA, 19 nt, Homo sapiens
  misc_RNA (1)...(19): siRNA sense strand
guuaauaggagaaacacua

SEQ ID NO: 379827 - RNA, 19 nt, Homo sapiens
  misc_RNA (1)...(19): siRNA sense strand
aaaugucucuugaaguuug

SEQ ID NO: 379828 - RNA, 19 nt, Homo sapiens
  misc_RNA (1)...(19): siRNA sense strand
gcagaaaagugggcuaaaa

SEQ ID NO: 379829 - RNA, 19 nt, Homo sapiens
  misc_RNA (1)...(19): siRNA sense strand
caagcaaguuggauucauc

SEQ ID NO: 379830 - RNA, 19 nt, Homo sapiens
  misc_RNA (1)...(19): siRNA sense strand
uacaugaucuuaugcacuu

SEQ ID NO: 379831 - RNA, 19 nt, Homo sapiens
  misc_RNA (1)...(19): siRNA sense strand
ugaacuggaugcagcugua

SEQ ID NO: 379832 - RNA, 19 nt, Homo sapiens
  misc_RNA (1)...(19): siRNA sense strand
cuagaaaugucucuugaag

SEQ ID NO: 379833 - RNA, 19 nt, Homo sapiens
  misc_RNA (1)...(19): siRNA sense strand
caaaggcacugaaaaugaa

SEQ ID NO: 379834 - RNA, 19 nt, Homo sapiens
  misc_RNA (1)...(19): siRNA sense strand
gaaagggccagaggagauu

SEQ ID NO: 379835 - RNA, 19 nt, Homo sapiens
  misc_RNA (1)...(19): siRNA sense strand
ggauugugcuaccuacguu

SEQ ID NO: 379836 - RNA, 19 nt, Homo sapiens
  misc_RNA (1)...(19): siRNA sense strand
uaagggagagcaugaagaa

SEQ ID NO: 379837 - RNA, 19 nt, Homo sapiens
  misc_RNA (1)...(19): siRNA sense strand
caacauuuacuguaucuuc

SEQ ID NO: 379838 - RNA, 19 nt, Homo sapiens
  misc_RNA (1)...(19): siRNA sense strand
aaagauugauccuuaugug

SEQ ID NO: 379839 - RNA, 19 nt, Homo sapiens
  misc_RNA (1)...(19): siRNA sense strand
uauaugagccucuggaugu

SEQ ID NO: 379840 - RNA, 19 nt, Homo sapiens
  misc_RNA (1)...(19): siRNA sense strand
gaauuugagcgaauauaug

SEQ ID NO: 379841 - RNA, 19 nt, Homo sapiens
  misc_RNA (1)...(19): siRNA sense strand
gaaaugguucuagaaaugu

SEQ ID NO: 379842 - RNA, 19 nt, Homo sapiens
  misc_RNA (1)...(19): siRNA sense strand
ggaaacugaggaagagaaa

SEQ ID NO: 379843 - RNA, 19 nt, Homo sapiens
  misc_RNA (1)...(19): siRNA sense strand
caacaucaacuucagaaag

SEQ ID NO: 379844 - RNA, 19 nt, Homo sapiens
  misc_RNA (1)...(19): siRNA sense strand
gaacccaaaggcacugaaa

SEQ ID NO: 379845 - RNA, 19 nt, Homo sapiens
  misc_RNA (1)...(19): siRNA sense strand
gcaccaguauucccacaag

SEQ ID NO: 379846 - RNA, 19 nt, Homo sapiens
  misc_RNA (1)...(19): siRNA sense strand
caagggaaacugaggaaga

SEQ ID NO: 379847 - RNA, 19 nt, Homo sapiens
  misc_RNA (1)...(19): siRNA sense strand
aaaugaagaugcuggaagu

SEQ ID NO: 379848 - RNA, 19 nt, Homo sapiens
  misc_RNA (1)...(19): siRNA sense strand
auacuacucugagcaguuu

SEQ ID NO: 379849 - RNA, 19 nt, Homo sapiens
  misc_RNA (1)...(19): siRNA sense strand
gauccuuaccagcacauua

SEQ ID NO: 379850 - RNA, 19 nt, Homo sapiens
  misc_RNA (1)...(19): siRNA sense strand
gaaaugucucuugaaguuu

SEQ ID NO: 379851 - RNA, 19 nt, Homo sapiens
  misc_RNA (1)...(19): siRNA sense strand
gaaaagugggcuaaaauga

SEQ ID NO: 379852 - RNA, 19 nt, Homo sapiens
  misc_RNA (1)...(19): siRNA sense strand
ggaagagaacaagacauuu

SEQ ID NO: 379853 - RNA, 19 nt, Homo sapiens
  misc_RNA (1)...(19): siRNA sense strand
ugaauuuaguccauacgaa

SEQ ID NO: 379854 - RNA, 19 nt, Homo sapiens
  misc_RNA (1)...(19): siRNA sense strand
ccagaccuacgauuuagua

SEQ ID NO: 379855 - RNA, 19 nt, Homo sapiens
  misc_RNA (1)...(19): siRNA sense strand
ggaugccaauuaugucaug

SEQ ID NO: 379856 - RNA, 19 nt, Homo sapiens
  misc_RNA (1)...(19): siRNA sense strand
gaaaucgcugacuuugaua

SEQ ID NO: 379857 - RNA, 19 nt, Homo sapiens
  misc_RNA (1)...(19): siRNA sense strand
gagaacaagacauuucaau

SEQ ID NO: 379858 - RNA, 19 nt, Homo sapiens
  misc_RNA (1)...(19): siRNA sense strand
gauaauggccuuggugagu

SEQ ID NO: 379859 - RNA, 19 nt, Homo sapiens
  misc_RNA (1)...(19): siRNA sense strand
cuagggacagcaacauuua

SEQ ID NO: 379860 - RNA, 19 nt, Homo sapiens
  misc_RNA (1)...(19): siRNA sense strand
gaaggcauuauacgaauca

SEQ ID NO: 379861 - RNA, 19 nt, Homo sapiens
  misc_RNA (1)...(19): siRNA sense strand
aaacugaggaagagaaaga

SEQ ID NO: 379862 - RNA, 19 nt, Homo sapiens
  misc_RNA (1)...(19): siRNA sense strand
gagaaagauugcccaacca

SEQ ID NO: 379863 - RNA, 19 nt, Homo sapiens
  misc_RNA (1)...(19): siRNA sense strand
gcucccgacuuauuuggaa

SEQ ID NO: 379864 - RNA, 19 nt, Homo sapiens
  misc_RNA (1)...(19): siRNA sense strand
caaccaagucacugaaaug

SEQ ID NO: 379865 - RNA, 19 nt, Homo sapiens
  misc_RNA (1)...(19): siRNA sense strand
cauaaacccuguguggaau

SEQ ID NO: 379866 - RNA, 19 nt, Homo sapiens
  misc_RNA (1)...(19): siRNA sense strand
ccaguauucccacaaguuu

SEQ ID NO: 379867 - RNA, 19 nt, Homo sapiens
  misc_RNA (1)...(19): siRNA sense strand
ugaugaauuugagcgaaua

SEQ ID NO: 379868 - RNA, 19 nt, Homo sapiens
  misc_RNA (1)...(19): siRNA sense strand
ggacuccuuugaugaugau

SEQ ID NO: 379869 - RNA, 19 nt, Homo sapiens
  misc_RNA (1)...(19): siRNA sense strand
uguagcagauccugaugaa

SEQ ID NO: 379870 - RNA, 19 nt, Homo sapiens
  misc_RNA (1)...(19): siRNA sense strand
ggaguaaguucaucaaaug

SEQ ID NO: 379871 - RNA, 19 nt, Homo sapiens
  misc_RNA (1)...(19): siRNA sense strand
gaacaaaugcuucgagaug

SEQ ID NO: 379872 - RNA, 19 nt, Homo sapiens
  misc_RNA (1)...(19): siRNA sense strand
agaaggagcugcagaagau

SEQ ID NO: 379873 - RNA, 19 nt, Homo sapiens
  misc_RNA (1)...(19): siRNA sense strand
ccauggaguuuguggaaua

SEQ ID NO: 379874 - RNA, 19 nt, Homo sapiens
  misc_RNA (1)...(19): siRNA sense strand
gaggaggaacccuucauua

SEQ ID NO: 379875 - RNA, 19 nt, Homo sapiens
  misc_RNA (1)...(19): siRNA sense strand
ggaauccuguggccucaaa

SEQ ID NO: 379876 - RNA, 19 nt, Homo sapiens
  misc_RNA (1)...(19): siRNA sense strand
gggaguaaguucaucaaau

SEQ ID NO: 379877 - RNA, 19 nt, Homo sapiens
  misc_RNA (1)...(19): siRNA sense strand
aggcaaagauggcugagua

SEQ ID NO: 379878 - RNA, 19 nt, Homo sapiens
  misc_RNA (1)...(19): siRNA sense strand
ucaagaggcugaaagagau

SEQ ID NO: 379879 - RNA, 19 nt, Homo sapiens
  misc_RNA (1)...(19): siRNA sense strand
ucaagaacauccugaagau

SEQ ID NO: 379880 - RNA, 19 nt, Homo sapiens
  misc_RNA (1)...(19): siRNA sense strand
ccaauggcuucuucuugua

SEQ ID NO: 379881 - RNA, 19 nt, Homo sapiens
  misc_RNA (1)...(19): siRNA sense strand
gaaagaggaacaaaugcuu

SEQ ID NO: 379882 - RNA, 19 nt, Homo sapiens
  misc_RNA (1)...(19): siRNA sense strand
gaacguagggugccagcuu

SEQ ID NO: 379883 - RNA, 19 nt, Homo sapiens
  misc_RNA (1)...(19): siRNA sense strand
ggaggaagaugaggaagag

SEQ ID NO: 379884 - RNA, 19 nt, Homo sapiens
  misc_RNA (1)...(19): siRNA sense strand
ucagggaggucguccuuga

SEQ ID NO: 379885 - RNA, 19 nt, Homo sapiens
  misc_RNA (1)...(19): siRNA sense strand
ggucucagccguccucaaa

SEQ ID NO: 379886 - RNA, 19 nt, Homo sapiens
  misc_RNA (1)...(19): siRNA sense strand
gaucugagcacggacauga

SEQ ID NO: 379887 - RNA, 19 nt, Homo sapiens
  misc_RNA (1)...(19): siRNA sense strand
agaagauccuggacagaaa

SEQ ID NO: 379888 - RNA, 19 nt, Homo sapiens
  misc_RNA (1)...(19): siRNA sense strand
gagaccagauguccaugga

SEQ ID NO: 379889 - RNA, 19 nt, Homo sapiens
  misc_RNA (1)...(19): siRNA sense strand
uguccacgcuugucaacua

SEQ ID NO: 379890 - RNA, 19 nt, Homo sapiens
  misc_RNA (1)...(19): siRNA sense strand
guacugccgcuccaucuuu

SEQ ID NO: 379891 - RNA, 19 nt, Homo sapiens
  misc_RNA (1)...(19): siRNA sense strand
ccucgucgguggagaugua

SEQ ID NO: 379892 - RNA, 19 nt, Homo sapiens
  misc_RNA (1)...(19): siRNA sense strand
ucacaaggcucuggucaag

SEQ ID NO: 379893 - RNA, 19 nt, Homo sapiens
  misc_RNA (1)...(19): siRNA sense strand
ggucuggucugaggagcua

SEQ ID NO: 379894 - RNA, 19 nt, Homo sapiens
  misc_RNA (1)...(19): siRNA sense strand
ugcaacagcuggcagaaga

SEQ ID NO: 379895 - RNA, 19 nt, Homo sapiens
  misc_RNA (1)...(19): siRNA sense strand
ggccggacauugacaagau

SEQ ID NO: 379896 - RNA, 19 nt, Homo sapiens
  misc_RNA (1)...(19): siRNA sense strand
gggacaagcauaagaagga

SEQ ID NO: 379897 - RNA, 19 nt, Homo sapiens
  misc_RNA (1)...(19): siRNA sense strand
ucgagccucuggacaagua

SEQ ID NO: 379898 - RNA, 19 nt, Homo sapiens
  misc_RNA (1)...(19): siRNA sense strand
caaagcaacaggcaaagau

SEQ ID NO: 379899 - RNA, 19 nt, Homo sapiens
  misc_RNA (1)...(19): siRNA sense strand
cccaauggcuucuucuugu

SEQ ID NO: 379900 - RNA, 19 nt, Homo sapiens
  misc_RNA (1)...(19): siRNA sense strand
gacaugacccagccacuga

SEQ ID NO: 379901 - RNA, 19 nt, Homo sapiens
  misc_RNA (1)...(19): siRNA sense strand
gaaugccacugaggagaug

SEQ ID NO: 379902 - RNA, 19 nt, Homo sapiens
  misc_RNA (1)...(19): siRNA sense strand
cagccaaggucuggucuga

SEQ ID NO: 379903 - RNA, 19 nt, Homo sapiens
  misc_RNA (1)...(19): siRNA sense strand
ggagaacacgcagcucuga

SEQ ID NO: 379904 - RNA, 19 nt, Homo sapiens
  misc_RNA (1)...(19): siRNA sense strand
cagaagauccuggacagaa

SEQ ID NO: 379905 - RNA, 19 nt, Homo sapiens
  misc_RNA (1)...(19): siRNA sense strand
gcaaagcaacaggcaaaga

SEQ ID NO: 379906 - RNA, 19 nt, Homo sapiens
  misc_RNA (1)...(19): siRNA sense strand
gagacgcgcuacucaucga

SEQ ID NO: 379907 - RNA, 19 nt, Homo sapiens
  misc_RNA (1)...(19): siRNA sense strand
ggaagaggaggaacagaca

SEQ ID NO: 379908 - RNA, 19 nt, Homo sapiens
  misc_RNA (1)...(19): siRNA sense strand
ggacagaaagcgccauaac

SEQ ID NO: 379909 - RNA, 19 nt, Homo sapiens
  misc_RNA (1)...(19): siRNA sense strand
gggaggagguagggcuuga

SEQ ID NO: 379910 - RNA, 19 nt, Homo sapiens
  misc_RNA (1)...(19): siRNA sense strand
gacagaaagcgccauaaca

SEQ ID NO: 379911 - RNA, 19 nt, Homo sapiens
  misc_RNA (1)...(19): siRNA sense strand
acaggaaggugggcaucua

SEQ ID NO: 379912 - RNA, 19 nt, Homo sapiens
  misc_RNA (1)...(19): siRNA sense strand
ggacuccuccaacuacaug

SEQ ID NO: 379913 - RNA, 19 nt, Homo sapiens
  misc_RNA (1)...(19): siRNA sense strand
ugaacauccuggcucagaa

SEQ ID NO: 379914 - RNA, 19 nt, Homo sapiens
  misc_RNA (1)...(19): siRNA sense strand
ggagguagggcuugagaag

SEQ ID NO: 379915 - RNA, 19 nt, Homo sapiens
  misc_RNA (1)...(19): siRNA sense strand
cagaacgccucccggaaca

SEQ ID NO: 379916 - RNA, 19 nt, Homo sapiens
  misc_RNA (1)...(19): siRNA sense strand
ugaacgagagggagaagaa

SEQ ID NO: 379917 - RNA, 19 nt, Homo sapiens
  misc_RNA (1)...(19): siRNA sense strand
gccguauccuggugaagaa

SEQ ID NO: 379918 - RNA, 19 nt, Homo sapiens
  misc_RNA (1)...(19): siRNA sense strand
ggucugaggagcuauucaa

SEQ ID NO: 379919 - RNA, 19 nt, Homo sapiens
  misc_RNA (1)...(19): siRNA sense strand
gaacagacagaccccaaaa

SEQ ID NO: 379920 - RNA, 19 nt, Homo sapiens
  misc_RNA (1)...(19): siRNA sense strand
gcauaacaccuaucucacu

SEQ ID NO: 379921 - RNA, 19 nt, Homo sapiens
  misc_RNA (1)...(19): siRNA sense strand
gcgccaagggcaagccaua

SEQ ID NO: 379922 - RNA, 19 nt, Homo sapiens
  misc_RNA (1)...(19): siRNA sense strand
gucaagaacauccugaaga

SEQ ID NO: 379923 - RNA, 19 nt, Homo sapiens
  misc_RNA (1)...(19): siRNA sense strand
caacgcgacccgagacuca

SEQ ID NO: 379924 - RNA, 19 nt, Homo sapiens
  misc_RNA (1)...(19): siRNA sense strand
cggcaaagcaacaggcaaa

SEQ ID NO: 379925 - RNA, 19 nt, Homo sapiens
  misc_RNA (1)...(19): siRNA sense strand
caagcuggcuaugaacauc

SEQ ID NO: 379926 - RNA, 19 nt, Homo sapiens
  misc_RNA (1)...(19): siRNA sense strand
gaaagcgccauaacagcau

SEQ ID NO: 379927 - RNA, 19 nt, Homo sapiens
  misc_RNA (1)...(19): siRNA sense strand
agaagaaggagcugcagaa

SEQ ID NO: 379928 - RNA, 19 nt, Homo sapiens
  misc_RNA (1)...(19): siRNA sense strand
gguaucaggaguuccagaa

SEQ ID NO: 379929 - RNA, 19 nt, Homo sapiens
  misc_RNA (1)...(19): siRNA sense strand
caaagauggcugaguacug

SEQ ID NO: 379930 - RNA, 19 nt, Homo sapiens
  misc_RNA (1)...(19): siRNA sense strand
acccacggcuucaccauga

SEQ ID NO: 379931 - RNA, 19 nt, Homo sapiens
  misc_RNA (1)...(19): siRNA sense strand
uucaucaacuccucgcaua

SEQ ID NO: 379932 - RNA, 19 nt, Homo sapiens
  misc_RNA (1)...(19): siRNA sense strand
gguggagacugcgcuggaa

SEQ ID NO: 379933 - RNA, 19 nt, Homo sapiens
  misc_RNA (1)...(19): siRNA sense strand
gaagaaggagcugcagaag

SEQ ID NO: 379934 - RNA, 19 nt, Homo sapiens
  misc_RNA (1)...(19): siRNA sense strand
gcuucgagaugucguccuu

SEQ ID NO: 379935 - RNA, 19 nt, Homo sapiens
  misc_RNA (1)...(19): siRNA sense strand
gcucgaaagaggaacaaau

SEQ ID NO: 379936 - RNA, 19 nt, Homo sapiens
  misc_RNA (1)...(19): siRNA sense strand
ucgcauaacaccuaucuca

SEQ ID NO: 379937 - RNA, 19 nt, Homo sapiens
  misc_RNA (1)...(19): siRNA sense strand
gcucauggacuucaucaac

SEQ ID NO: 379938 - RNA, 19 nt, Homo sapiens
  misc_RNA (1)...(19): siRNA sense strand
ccuguggccucaaauucaa

SEQ ID NO: 379939 - RNA, 19 nt, Homo sapiens
  misc_RNA (1)...(19): siRNA sense strand
cgaagccucggacuacauu

SEQ ID NO: 379940 - RNA, 19 nt, Homo sapiens
  misc_RNA (1)...(19): siRNA sense strand
ugagggacaagcauaagaa

SEQ ID NO: 379941 - RNA, 19 nt, Homo sapiens
  misc_RNA (1)...(19): siRNA sense strand
gaagauccuggacagaaag

SEQ ID NO: 379942 - RNA, 19 nt, Homo sapiens
  misc_RNA (1)...(19): siRNA sense strand
gaacaccuuccugcgcaaa

SEQ ID NO: 379943 - RNA, 19 nt, Homo sapiens
  misc_RNA (1)...(19): siRNA sense strand
acaagauccugcuggagau

SEQ ID NO: 379944 - RNA, 19 nt, Homo sapiens
  misc_RNA (1)...(19): siRNA sense strand
gcggaacugacggagauua

SEQ ID NO: 379945 - RNA, 19 nt, Homo sapiens
  misc_RNA (1)...(19): siRNA sense strand
acaaggcucuggucaagcu

SEQ ID NO: 379946 - RNA, 19 nt, Homo sapiens
  misc_RNA (1)...(19): siRNA sense strand
guagggugccagcuuguug

SEQ ID NO: 379947 - RNA, 19 nt, Homo sapiens
  misc_RNA (1)...(19): siRNA sense strand
gaaccgaggccccuauguu

SEQ ID NO: 379948 - RNA, 19 nt, Homo sapiens
  misc_RNA (1)...(19): siRNA sense strand
caagauccugcuggagaua

SEQ ID NO: 379949 - RNA, 19 nt, Homo sapiens
  misc_RNA (1)...(19): siRNA sense strand
ccaaggccauggagcaacu

SEQ ID NO: 379950 - RNA, 19 nt, Homo sapiens
  misc_RNA (1)...(19): siRNA sense strand
acaaaugcuucgagauguc

SEQ ID NO: 379951 - RNA, 19 nt, Homo sapiens
  misc_RNA (1)...(19): siRNA sense strand
gaacauccuggcucagaac

SEQ ID NO: 379952 - RNA, 19 nt, Homo sapiens
  misc_RNA (1)...(19): siRNA sense strand
cgagaugucguccuuugug

SEQ ID NO: 379953 - RNA, 19 nt, Homo sapiens
  misc_RNA (1)...(19): siRNA sense strand
gcagcggcaugaccgucuu

SEQ ID NO: 379954 - RNA, 19 nt, Homo sapiens
  misc_RNA (1)...(19): siRNA sense strand
aggcggaacugacggagau

SEQ ID NO: 379955 - RNA, 19 nt, Homo sapiens
  misc_RNA (1)...(19): siRNA sense strand
gggaaguucugggcuuugg

SEQ ID NO: 379956 - RNA, 19 nt, Homo sapiens
  misc_RNA (1)...(19): siRNA sense strand
ggacgaggcaaagcgguau

SEQ ID NO: 379957 - RNA, 19 nt, Homo sapiens
  misc_RNA (1)...(19): siRNA sense strand
aagcauacacgaagcugaa

SEQ ID NO: 379958 - RNA, 19 nt, Homo sapiens
  misc_RNA (1)...(19): siRNA sense strand
aagaugagggacaagcaua

SEQ ID NO: 379959 - RNA, 19 nt, Homo sapiens
  misc_RNA (1)...(19): siRNA sense strand
acagaaagcgccauaacag

SEQ ID NO: 379960 - RNA, 19 nt, Homo sapiens
  misc_RNA (1)...(19): siRNA sense strand
gaugcaaacacaacucagu

SEQ ID NO: 379961 - RNA, 19 nt, Homo sapiens
  misc_RNA (1)...(19): siRNA sense strand
uggagcaacugaccaagag

SEQ ID NO: 379962 - RNA, 19 nt, Homo sapiens
  misc_RNA (1)...(19): siRNA sense strand
gaggagguagggcuugaga

SEQ ID NO: 379963 - RNA, 19 nt, Homo sapiens
  misc_RNA (1)...(19): siRNA sense strand
ggaggaacccuucauuacc

SEQ ID NO: 379964 - RNA, 19 nt, Homo sapiens
  misc_RNA (1)...(19): siRNA sense strand
caacauggagguggacaca

SEQ ID NO: 379965 - RNA, 19 nt, Homo sapiens
  misc_RNA (1)...(19): siRNA sense strand
ugaggaggaacccuucauu

SEQ ID NO: 379966 - RNA, 19 nt, Homo sapiens
  misc_RNA (1)...(19): siRNA sense strand
aacaaaugcuucgagaugu

SEQ ID NO: 379967 - RNA, 19 nt, Homo sapiens
  misc_RNA (1)...(19): siRNA sense strand
ggaacaaaugcuucgagau

SEQ ID NO: 379968 - RNA, 19 nt, Homo sapiens
  misc_RNA (1)...(19): siRNA sense strand
gagauguccacgcuuguca

SEQ ID NO: 379969 - RNA, 19 nt, Homo sapiens
  misc_RNA (1)...(19): siRNA sense strand
gauuaaccgucggcacauc

SEQ ID NO: 379970 - RNA, 19 nt, Homo sapiens
  misc_RNA (1)...(19): siRNA sense strand
gagcagaaguggcauauuu

SEQ ID NO: 379971 - RNA, 19 nt, Homo sapiens
  misc_RNA (1)...(19): siRNA sense strand
ggaaaugccuggauguaaa

SEQ ID NO: 379972 - RNA, 19 nt, Homo sapiens
  misc_RNA (1)...(19): siRNA sense strand
ggaagggacucgagacuuu

SEQ ID NO: 379973 - RNA, 19 nt, Homo sapiens
  misc_RNA (1)...(19): siRNA sense strand
gcaagaaucuguucaaggu

SEQ ID NO: 379974 - RNA, 19 nt, Homo sapiens
  misc_RNA (1)...(19): siRNA sense strand
ccaaacaacuuucaagaag

SEQ ID NO: 379975 - RNA, 19 nt, Homo sapiens
  misc_RNA (1)...(19): siRNA sense strand
ggaaauaaaggaaacucua

SEQ ID NO: 379976 - RNA, 19 nt, Homo sapiens
  misc_RNA (1)...(19): siRNA sense strand
ggaaagaccccuccauaua

SEQ ID NO: 379977 - RNA, 19 nt, Homo sapiens
  misc_RNA (1)...(19): siRNA sense strand
ccaaugaauuugacucaga

SEQ ID NO: 379978 - RNA, 19 nt, Homo sapiens
  misc_RNA (1)...(19): siRNA sense strand
gggcacaccugaauuaguc

SEQ ID NO: 379979 - RNA, 19 nt, Homo sapiens
  misc_RNA (1)...(19): siRNA sense strand
caacccaacuuuaccuaga

SEQ ID NO: 379980 - RNA, 19 nt, Homo sapiens
  misc_RNA (1)...(19): siRNA sense strand
gcagauucaucaagcauca

SEQ ID NO: 379981 - RNA, 19 nt, Homo sapiens
  misc_RNA (1)...(19): siRNA sense strand
gaaacucuaagcaguauga

SEQ ID NO: 379982 - RNA, 19 nt, Homo sapiens
  misc_RNA (1)...(19): siRNA sense strand
caaaugaugugggccagaa

SEQ ID NO: 379983 - RNA, 19 nt, Homo sapiens
  misc_RNA (1)...(19): siRNA sense strand
gaacauucucucucagauu

SEQ ID NO: 379984 - RNA, 19 nt, Homo sapiens
  misc_RNA (1)...(19): siRNA sense strand
gugggagcauccaagauua

SEQ ID NO: 379985 - RNA, 19 nt, Homo sapiens
  misc_RNA (1)...(19): siRNA sense strand
cauacuaguuucuuuguuc

SEQ ID NO: 379986 - RNA, 19 nt, Homo sapiens
  misc_RNA (1)...(19): siRNA sense strand
ggagacaaauguuggaaaa

SEQ ID NO: 379987 - RNA, 19 nt, Homo sapiens
  misc_RNA (1)...(19): siRNA sense strand
gaaaagaaguuugcuacga

SEQ ID NO: 379988 - RNA, 19 nt, Homo sapiens
  misc_RNA (1)...(19): siRNA sense strand
gaaagaccccuccauauau

SEQ ID NO: 379989 - RNA, 19 nt, Homo sapiens
  misc_RNA (1)...(19): siRNA sense strand
aaagaaguuugcuacgaaa

SEQ ID NO: 379990 - RNA, 19 nt, Homo sapiens
  misc_RNA (1)...(19): siRNA sense strand
gacacauacuaguuucuuu

SEQ ID NO: 379991 - RNA, 19 nt, Homo sapiens
  misc_RNA (1)...(19): siRNA sense strand
gaaagacucggcugcuuca

SEQ ID NO: 379992 - RNA, 19 nt, Homo sapiens
  misc_RNA (1)...(19): siRNA sense strand
ggucaggaauuacggaaag

SEQ ID NO: 379993 - RNA, 19 nt, Homo sapiens
  misc_RNA (1)...(19): siRNA sense strand
acacaagccucgcagaaca

SEQ ID NO: 379994 - RNA, 19 nt, Homo sapiens
  misc_RNA (1)...(19): siRNA sense strand
aaagguggcucccgaacug

SEQ ID NO: 379995 - RNA, 19 nt, Homo sapiens
  misc_RNA (1)...(19): siRNA sense strand
ccaaauuuguggauguaau

SEQ ID NO: 379996 - RNA, 19 nt, Homo sapiens
  misc_RNA (1)...(19): siRNA sense strand
ucaagaaguugccgcagau

SEQ ID NO: 379997 - RNA, 19 nt, Homo sapiens
  misc_RNA (1)...(19): siRNA sense strand
caagggcacucucaaacca

SEQ ID NO: 379998 - RNA, 19 nt, Homo sapiens
  misc_RNA (1)...(19): siRNA sense strand
uggaaagugugaacuguau

SEQ ID NO: 379999 - RNA, 19 nt, Homo sapiens
  misc_RNA (1)...(19): siRNA sense strand
aacauucucucucagauug

SEQ ID NO: 380000 - RNA, 19 nt, Homo sapiens
  misc_RNA (1)...(19): siRNA sense strand
ccaccuagauuucuuucca

SEQ ID NO: 380001 - RNA, 19 nt, Homo sapiens
  misc_RNA (1)...(19): siRNA sense strand
ugacucagauguggauguu

SEQ ID NO: 380002 - RNA, 19 nt, Homo sapiens
  misc_RNA (1)...(19): siRNA sense strand
caaugaauuugacucagau

SEQ ID NO: 380003 - RNA, 19 nt, Homo sapiens
  misc_RNA (1)...(19): siRNA sense strand
ggagguauaagguaucugu

SEQ ID NO: 380004 - RNA, 19 nt, Homo sapiens
  misc_RNA (1)...(19): siRNA sense strand
gccaaugugugcaagaauc

SEQ ID NO: 380005 - RNA, 19 nt, Homo sapiens
  misc_RNA (1)...(19): siRNA sense strand
ggacacauacuaguuucuu

SEQ ID NO: 380006 - RNA, 19 nt, Homo sapiens
  misc_RNA (1)...(19): siRNA sense strand
gaaguggcauauuuuguug

SEQ ID NO: 380007 - RNA, 19 nt, Homo sapiens
  misc_RNA (1)...(19): siRNA sense strand
cuaaugagaacccaaacaa

SEQ ID NO: 380008 - RNA, 19 nt, Homo sapiens
  misc_RNA (1)...(19): siRNA sense strand
caacacccgcuuccuccua

SEQ ID NO: 380009 - RNA, 19 nt, Homo sapiens
  misc_RNA (1)...(19): siRNA sense strand
ggccuguaaucacuuaaga

SEQ ID NO: 380010 - RNA, 19 nt, Homo sapiens
  misc_RNA (1)...(19): siRNA sense strand
aaaagaaguuugcuacgaa

SEQ ID NO: 380011 - RNA, 19 nt, Homo sapiens
  misc_RNA (1)...(19): siRNA sense strand
gaaguuugcuacgaaagac

SEQ ID NO: 380012 - RNA, 19 nt, Homo sapiens
  misc_RNA (1)...(19): siRNA sense strand
gaaagugugaacuguaucu

SEQ ID NO: 380013 - RNA, 19 nt, Homo sapiens
  misc_RNA (1)...(19): siRNA sense strand
ugagaacccaaacaacuuu

SEQ ID NO: 380014 - RNA, 19 nt, Homo sapiens
  misc_RNA (1)...(19): siRNA sense strand
uguaaucacuuaagaagcu

SEQ ID NO: 380015 - RNA, 19 nt, Homo sapiens
  misc_RNA (1)...(19): siRNA sense strand
gggagcauccaagauuaua

SEQ ID NO: 380016 - RNA, 19 nt, Homo sapiens
  misc_RNA (1)...(19): siRNA sense strand
guaaucacuuaagaagcua

SEQ ID NO: 380017 - RNA, 19 nt, Homo sapiens
  misc_RNA (1)...(19): siRNA sense strand
gaacccaaacaacuuucaa

SEQ ID NO: 380018 - RNA, 19 nt, Homo sapiens
  misc_RNA (1)...(19): siRNA sense strand
cgucuucacugcaaacaag

SEQ ID NO: 380019 - RNA, 19 nt, Homo sapiens
  misc_RNA (1)...(19): siRNA sense strand
gguggaaagugugaacugu

SEQ ID NO: 380020 - RNA, 19 nt, Homo sapiens
  misc_RNA (1)...(19): siRNA sense strand
ucacuuaagaagcuacaaa

SEQ ID NO: 380021 - RNA, 19 nt, Homo sapiens
  misc_RNA (1)...(19): siRNA sense strand
gguauaacaaugugaucaa

SEQ ID NO: 380022 - RNA, 19 nt, Homo sapiens
  misc_RNA (1)...(19): siRNA sense strand
acuugcagaugguuaaauu

SEQ ID NO: 380023 - RNA, 19 nt, Homo sapiens
  misc_RNA (1)...(19): siRNA sense strand
acaggacacauacuaguuu

SEQ ID NO: 380024 - RNA, 19 nt, Homo sapiens
  misc_RNA (1)...(19): siRNA sense strand
gguuacaggacacauacua

SEQ ID NO: 380025 - RNA, 19 nt, Homo sapiens
  misc_RNA (1)...(19): siRNA sense strand
aaagguuacaggacacaua

SEQ ID NO: 380026 - RNA, 19 nt, Homo sapiens
  misc_RNA (1)...(19): siRNA sense strand
ccacagaugggucacuaug

SEQ ID NO: 380027 - RNA, 19 nt, Homo sapiens
  misc_RNA (1)...(19): siRNA sense strand
gaucgugggagcagaagug

SEQ ID NO: 380028 - RNA, 19 nt, Homo sapiens
  misc_RNA (1)...(19): siRNA sense strand
gagcauccaagauuauagu

SEQ ID NO: 380029 - RNA, 19 nt, Homo sapiens
  misc_RNA (1)...(19): siRNA sense strand
gaagggacucgagacuuug

SEQ ID NO: 380030 - RNA, 19 nt, Homo sapiens
  misc_RNA (1)...(19): siRNA sense strand
gcaucaguggcuccaauuu

SEQ ID NO: 380031 - RNA, 19 nt, Homo sapiens
  misc_RNA (1)...(19): siRNA sense strand
ugugaucaacccaacuuua

SEQ ID NO: 380032 - RNA, 19 nt, Homo sapiens
  misc_RNA (1)...(19): siRNA sense strand
caaaccagauaguacucau

SEQ ID NO: 380033 - RNA, 19 nt, Homo sapiens
  misc_RNA (1)...(19): siRNA sense strand
uacaacgucuucacugcaa

SEQ ID NO: 380034 - RNA, 19 nt, Homo sapiens
  misc_RNA (1)...(19): siRNA sense strand
cgaacuggauacacacaag

SEQ ID NO: 380035 - RNA, 19 nt, Homo sapiens
  misc_RNA (1)...(19): siRNA sense strand
ggccagaaauuuuaucuag

SEQ ID NO: 380036 - RNA, 19 nt, Homo sapiens
  misc_RNA (1)...(19): siRNA sense strand
guaucuguguggacuggaa

SEQ ID NO: 380037 - RNA, 19 nt, Homo sapiens
  misc_RNA (1)...(19): siRNA sense strand
acacauacuaguuucuuug

SEQ ID NO: 380038 - RNA, 19 nt, Homo sapiens
  misc_RNA (1)...(19): siRNA sense strand
aaagaccccuccauauauu

SEQ ID NO: 380039 - RNA, 19 nt, Homo sapiens
  misc_RNA (1)...(19): siRNA sense strand
gcuacaaauauuacacuga

SEQ ID NO: 380040 - RNA, 19 nt, Homo sapiens
  misc_RNA (1)...(19): siRNA sense strand
ccaaauggaggaguggaaa

SEQ ID NO: 380041 - RNA, 19 nt, Homo sapiens
  misc_RNA (1)...(19): siRNA sense strand
gcuggaaggagaaccaaug

SEQ ID NO: 380042 - RNA, 19 nt, Homo sapiens
  misc_RNA (1)...(19): siRNA sense strand
auucauggauucauagaca

SEQ ID NO: 380043 - RNA, 19 nt, Homo sapiens
  misc_RNA (1)...(19): siRNA sense strand
acucuaagcaguaugaaau

SEQ ID NO: 380044 - RNA, 19 nt, Homo sapiens
  misc_RNA (1)...(19): siRNA sense strand
aaggaaacucuaagcagua

SEQ ID NO: 380045 - RNA, 19 nt, Homo sapiens
  misc_RNA (1)...(19): siRNA sense strand
caggacacauacuaguuuc

SEQ ID NO: 380046 - RNA, 19 nt, Homo sapiens
  misc_RNA (1)...(19): siRNA sense strand
gaaaugccuggauguaaaa

SEQ ID NO: 380047 - RNA, 19 nt, Homo sapiens
  misc_RNA (1)...(19): siRNA sense strand
ugccaaauuuguggaugua

SEQ ID NO: 380048 - RNA, 19 nt, Homo sapiens
  misc_RNA (1)...(19): siRNA sense strand
gaaagguggcucccgaacu

SEQ ID NO: 380049 - RNA, 19 nt, Homo sapiens
  misc_RNA (1)...(19): siRNA sense strand
guggaaagugugaacugua

SEQ ID NO: 380050 - RNA, 19 nt, Homo sapiens
  misc_RNA (1)...(19): siRNA sense strand
aagcaucaguggcuccaau

SEQ ID NO: 380051 - RNA, 19 nt, Homo sapiens
  misc_RNA (1)...(19): siRNA sense strand
agauaguacucauuccaau

SEQ ID NO: 380052 - RNA, 19 nt, Homo sapiens
  misc_RNA (1)...(19): siRNA sense strand
guucggaaauaaaggaaac

SEQ ID NO: 380053 - RNA, 19 nt, Homo sapiens
  misc_RNA (1)...(19): siRNA sense strand
gagacuuugcggccuguaa

SEQ ID NO: 380054 - RNA, 19 nt, Homo sapiens
  misc_RNA (1)...(19): siRNA sense strand
uggaaaugccuggauguaa

SEQ ID NO: 380055 - RNA, 19 nt, Homo sapiens
  misc_RNA (1)...(19): siRNA sense strand
ccccagcgaugccaaauuu

SEQ ID NO: 380056 - RNA, 19 nt, Homo sapiens
  misc_RNA (1)...(19): siRNA sense strand
caucaguggcuccaauuuc

SEQ ID NO: 380057 - RNA, 19 nt, Homo sapiens
  misc_RNA (1)...(19): siRNA sense strand
cccaaacaacuuucaagaa

SEQ ID NO: 380058 - RNA, 19 nt, Homo sapiens
  misc_RNA (1)...(19): siRNA sense strand
gggacuugcagaugguuaa

SEQ ID NO: 380059 - RNA, 19 nt, Homo sapiens
  misc_RNA (1)...(19): siRNA sense strand
caccugaauuaguccgauu

SEQ ID NO: 380060 - RNA, 19 nt, Homo sapiens
  misc_RNA (1)...(19): siRNA sense strand
acacacaagccucgcagaa

SEQ ID NO: 380061 - RNA, 19 nt, Homo sapiens
  misc_RNA (1)...(19): siRNA sense strand
gcuccaauuucaaaacaaa

SEQ ID NO: 380062 - RNA, 19 nt, Homo sapiens
  misc_RNA (1)...(19): siRNA sense strand
agaaguugccgcagauuca

SEQ ID NO: 380063 - RNA, 19 nt, Homo sapiens
  misc_RNA (1)...(19): siRNA sense strand
guggaaaugccuggaugua

SEQ ID NO: 380064 - RNA, 19 nt, Homo sapiens
  misc_RNA (1)...(19): siRNA sense strand
agauuauaguggagacaaa

SEQ ID NO: 380065 - RNA, 19 nt, Homo sapiens
  misc_RNA (1)...(19): siRNA sense strand
ggacuugcagaugguuaaa

SEQ ID NO: 380066 - RNA, 19 nt, Homo sapiens
  misc_RNA (1)...(19): siRNA sense strand
aggaaacucuaagcaguau

SEQ ID NO: 380067 - RNA, 19 nt, Homo sapiens
  misc_RNA (1)...(19): siRNA sense strand
cguuggagguauaagguau

SEQ ID NO: 380068 - RNA, 19 nt, Homo sapiens
  misc_RNA (1)...(19): siRNA sense strand
gaugugggccagaaauuuu

SEQ ID NO: 380069 - RNA, 19 nt, Homo sapiens
  misc_RNA (1)...(19): siRNA sense strand
ugaugugggccagaaauuu

SEQ ID NO: 380070 - RNA, 19 nt, Homo sapiens
  misc_RNA (1)...(19): siRNA sense strand
gaaaguggcucugaagaua

SEQ ID NO: 380071 - RNA, 19 nt, Homo sapiens
  misc_RNA (1)...(19): siRNA sense strand
gaucuucgcuggacuuaug

SEQ ID NO: 380072 - RNA, 19 nt, Homo sapiens
  misc_RNA (1)...(19): siRNA sense strand
gcuaagaacauucacauaa

SEQ ID NO: 380073 - RNA, 19 nt, Homo sapiens
  misc_RNA (1)...(19): siRNA sense strand
caugauaacugggauuuaa

SEQ ID NO: 380074 - RNA, 19 nt, Homo sapiens
  misc_RNA (1)...(19): siRNA sense strand
caacaacguucucugguau

SEQ ID NO: 380075 - RNA, 19 nt, Homo sapiens
  misc_RNA (1)...(19): siRNA sense strand
ccagaaguaugucuaugua

SEQ ID NO: 380076 - RNA, 19 nt, Homo sapiens
  misc_RNA (1)...(19): siRNA sense strand
ggauuuaacucaacugaag

SEQ ID NO: 380077 - RNA, 19 nt, Homo sapiens
  misc_RNA (1)...(19): siRNA sense strand
ccacaugggaucaguauuu

SEQ ID NO: 380078 - RNA, 19 nt, Homo sapiens
  misc_RNA (1)...(19): siRNA sense strand
ugaagcuacugaacuauaa

SEQ ID NO: 380079 - RNA, 19 nt, Homo sapiens
  misc_RNA (1)...(19): siRNA sense strand
ggacuuauguucuuuucua

SEQ ID NO: 380080 - RNA, 19 nt, Homo sapiens
  misc_RNA (1)...(19): siRNA sense strand
cuaugaagcuacugaacua

SEQ ID NO: 380081 - RNA, 19 nt, Homo sapiens
  misc_RNA (1)...(19): siRNA sense strand
uaacugggauuuaacucaa

SEQ ID NO: 380082 - RNA, 19 nt, Homo sapiens
  misc_RNA (1)...(19): siRNA sense strand
ccaacucccuccugucauu

SEQ ID NO: 380083 - RNA, 19 nt, Homo sapiens
  misc_RNA (1)...(19): siRNA sense strand
gaaugccucucgagaagug

SEQ ID NO: 380084 - RNA, 19 nt, Homo sapiens
  misc_RNA (1)...(19): siRNA sense strand
acaacaacguucucuggua

SEQ ID NO: 380085 - RNA, 19 nt, Homo sapiens
  misc_RNA (1)...(19): siRNA sense strand
uaacucaacugaaggugau

SEQ ID NO: 380086 - RNA, 19 nt, Homo sapiens
  misc_RNA (1)...(19): siRNA sense strand
gcacaagcacuagaaauca

SEQ ID NO: 380087 - RNA, 19 nt, Homo sapiens
  misc_RNA (1)...(19): siRNA sense strand
cuauguagcugauguagca

SEQ ID NO: 380088 - RNA, 19 nt, Homo sapiens
  misc_RNA (1)...(19): siRNA sense strand
gcaccucuguggcuucugu

SEQ ID NO: 380089 - RNA, 19 nt, Homo sapiens
  misc_RNA (1)...(19): siRNA sense strand
guacuucgcauccagaaug

SEQ ID NO: 380090 - RNA, 19 nt, Homo sapiens
  misc_RNA (1)...(19): siRNA sense strand
ucucauaggcaccguauuu

SEQ ID NO: 380091 - RNA, 19 nt, Homo sapiens
  misc_RNA (1)...(19): siRNA sense strand
ugauggaucugaaugaaca

SEQ ID NO: 380092 - RNA, 19 nt, Homo sapiens
  misc_RNA (1)...(19): siRNA sense strand
cagcagaccagaaguaugu

SEQ ID NO: 380093 - RNA, 19 nt, Homo sapiens
  misc_RNA (1)...(19): siRNA sense strand
gugaaugccucucgagaag

SEQ ID NO: 380094 - RNA, 19 nt, Homo sapiens
  misc_RNA (1)...(19): siRNA sense strand
ccugaaaacugccaccuua

SEQ ID NO: 380095 - RNA, 19 nt, Homo sapiens
  misc_RNA (1)...(19): siRNA sense strand
acaaagacaauacugugua

SEQ ID NO: 380096 - RNA, 19 nt, Homo sapiens
  misc_RNA (1)...(19): siRNA sense strand
acaaaacucuguacuguga

SEQ ID NO: 380097 - RNA, 19 nt, Homo sapiens
  misc_RNA (1)...(19): siRNA sense strand
gagauguuccuggcguuua

SEQ ID NO: 380098 - RNA, 19 nt, Homo sapiens
  misc_RNA (1)...(19): siRNA sense strand
caacaauggcucugugcuu

SEQ ID NO: 380099 - RNA, 19 nt, Homo sapiens
  misc_RNA (1)...(19): siRNA sense strand
gaaaacugccaccuuauug

SEQ ID NO: 380100 - RNA, 19 nt, Homo sapiens
  misc_RNA (1)...(19): siRNA sense strand
gaccagaaguaugucuaug

SEQ ID NO: 380101 - RNA, 19 nt, Homo sapiens
  misc_RNA (1)...(19): siRNA sense strand
ggugaaugccucucgagaa

SEQ ID NO: 380102 - RNA, 19 nt, Homo sapiens
  misc_RNA (1)...(19): siRNA sense strand
aaguggcucugaagauauu

SEQ ID NO: 380103 - RNA, 19 nt, Homo sapiens
  misc_RNA (1)...(19): siRNA sense strand
ucacaaaacucuguacugu

SEQ ID NO: 380104 - RNA, 19 nt, Homo sapiens
  misc_RNA (1)...(19): siRNA sense strand
ucgcuggacuuauguucuu

SEQ ID NO: 380105 - RNA, 19 nt, Homo sapiens
  misc_RNA (1)...(19): siRNA sense strand
ccaccagagaccacuauuu

SEQ ID NO: 380106 - RNA, 19 nt, Homo sapiens
  misc_RNA (1)...(19): siRNA sense strand
aaacuuugcgccagaugaa

SEQ ID NO: 380107 - RNA, 19 nt, Homo sapiens
  misc_RNA (1)...(19): siRNA sense strand
gacaaagacaauacugugu

SEQ ID NO: 380108 - RNA, 19 nt, Homo sapiens
  misc_RNA (1)...(19): siRNA sense strand
ugaaaguggcucugaagau

SEQ ID NO: 380109 - RNA, 19 nt, Homo sapiens
  misc_RNA (1)...(19): siRNA sense strand
ggcacaagcacuagaaauc

SEQ ID NO: 380110 - RNA, 19 nt, Homo sapiens
  misc_RNA (1)...(19): siRNA sense strand
ggagauguuccuggcguuu

SEQ ID NO: 380111 - RNA, 19 nt, Homo sapiens
  misc_RNA (1)...(19): siRNA sense strand
gauacaguugggcaccuua

SEQ ID NO: 380112 - RNA, 19 nt, Homo sapiens
  misc_RNA (1)...(19): siRNA sense strand
uuaaagugguggccaaagg

SEQ ID NO: 380113 - RNA, 19 nt, Homo sapiens
  misc_RNA (1)...(19): siRNA sense strand
agaaguggagccaguagaa

SEQ ID NO: 380114 - RNA, 19 nt, Homo sapiens
  misc_RNA (1)...(19): siRNA sense strand
caccguguaugccaacaau

SEQ ID NO: 380115 - RNA, 19 nt, Homo sapiens
  misc_RNA (1)...(19): siRNA sense strand
uaaagugguggccaaagga

SEQ ID NO: 380116 - RNA, 19 nt, Homo sapiens
  misc_RNA (1)...(19): siRNA sense strand
guaugucuauguagcugau

SEQ ID NO: 380117 - RNA, 19 nt, Homo sapiens
  misc_RNA (1)...(19): siRNA sense strand
cuguguaucuuuauguugu

SEQ ID NO: 380118 - RNA, 19 nt, Homo sapiens
  misc_RNA (1)...(19): siRNA sense strand
gagaaguggagccaguaga

SEQ ID NO: 380119 - RNA, 19 nt, Homo sapiens
  misc_RNA (1)...(19): siRNA sense strand
caccagagaccacuauuuu

SEQ ID NO: 380120 - RNA, 19 nt, Homo sapiens
  misc_RNA (1)...(19): siRNA sense strand
cuugauggaucugaaugaa

SEQ ID NO: 380121 - RNA, 19 nt, Homo sapiens
  misc_RNA (1)...(19): siRNA sense strand
ucucagcagaccagaagua

SEQ ID NO: 380122 - RNA, 19 nt, Homo sapiens
  misc_RNA (1)...(19): siRNA sense strand
gggcacaagcacuagaaau

SEQ ID NO: 380123 - RNA, 19 nt, Homo sapiens
  misc_RNA (1)...(19): siRNA sense strand
gaaguaugucuauguagcu

SEQ ID NO: 380124 - RNA, 19 nt, Homo sapiens
  misc_RNA (1)...(19): siRNA sense strand
cccaagggcacaagcacua

SEQ ID NO: 380125 - RNA, 19 nt, Homo sapiens
  misc_RNA (1)...(19): siRNA sense strand
guuccuggcguuuagagaa

SEQ ID NO: 380126 - RNA, 19 nt, Homo sapiens
  misc_RNA (1)...(19): siRNA sense strand
cagcuaagaacauucacau

SEQ ID NO: 380127 - RNA, 19 nt, Homo sapiens
  misc_RNA (1)...(19): siRNA sense strand
uaccaacucccuccuguca

SEQ ID NO: 380128 - RNA, 19 nt, Homo sapiens
  misc_RNA (1)...(19): siRNA sense strand
cuucgcauccagaauguuu

SEQ ID NO: 380129 - RNA, 19 nt, Homo sapiens
  misc_RNA (1)...(19): siRNA sense strand
uaaccugacugucgauccu

SEQ ID NO: 380130 - RNA, 19 nt, Homo sapiens
  misc_RNA (1)...(19): siRNA sense strand
gcccaagggagguuaaagu

SEQ ID NO: 380131 - RNA, 19 nt, Homo sapiens
  misc_RNA (1)...(19): siRNA sense strand
caacucccuccugucauuu

SEQ ID NO: 380132 - RNA, 19 nt, Homo sapiens
  misc_RNA (1)...(19): siRNA sense strand
aaaguggcucugaagauau

SEQ ID NO: 380133 - RNA, 19 nt, Homo sapiens
  misc_RNA (1)...(19): siRNA sense strand
ugguauaccugaaaacuau

SEQ ID NO: 380134 - RNA, 19 nt, Homo sapiens
  misc_RNA (1)...(19): siRNA sense strand
cacaagcacuagaaaucag

SEQ ID NO: 380135 - RNA, 19 nt, Homo sapiens
  misc_RNA (1)...(19): siRNA sense strand
gcaccuuaguggauaaccu

SEQ ID NO: 380136 - RNA, 19 nt, Homo sapiens
  misc_RNA (1)...(19): siRNA sense strand
gggauuuaacucaacugaa

SEQ ID NO: 380137 - RNA, 19 nt, Homo sapiens
  misc_RNA (1)...(19): siRNA sense strand
augaagcuacugaacuaua

SEQ ID NO: 380138 - RNA, 19 nt, Homo sapiens
  misc_RNA (1)...(19): siRNA sense strand
gagccaguagaaccugaaa

SEQ ID NO: 380139 - RNA, 19 nt, Homo sapiens
  misc_RNA (1)...(19): siRNA sense strand
ucauaggcaccguauuuca

SEQ ID NO: 380140 - RNA, 19 nt, Homo sapiens
  misc_RNA (1)...(19): siRNA sense strand
aaacaugauaacugggauu

SEQ ID NO: 380141 - RNA, 19 nt, Homo sapiens
  misc_RNA (1)...(19): siRNA sense strand
agugguggccaaaggauuu

SEQ ID NO: 380142 - RNA, 19 nt, Homo sapiens
  misc_RNA (1)...(19): siRNA sense strand
caagggcacaagcacuaga

SEQ ID NO: 380143 - RNA, 19 nt, Homo sapiens
  misc_RNA (1)...(19): siRNA sense strand
gggcaccucuguggcuucu

SEQ ID NO: 380144 - RNA, 19 nt, Homo sapiens
  misc_RNA (1)...(19): siRNA sense strand
uugggcaccuuaguggaua

SEQ ID NO: 380145 - RNA, 19 nt, Homo sapiens
  misc_RNA (1)...(19): siRNA sense strand
gcagcuaagaacauucaca

SEQ ID NO: 380146 - RNA, 19 nt, Homo sapiens
  misc_RNA (1)...(19): siRNA sense strand
agauguuccuggcguuuag

SEQ ID NO: 380147 - RNA, 19 nt, Homo sapiens
  misc_RNA (1)...(19): siRNA sense strand
uuccuggcguuuagagaaa

SEQ ID NO: 380148 - RNA, 19 nt, Homo sapiens
  misc_RNA (1)...(19): siRNA sense strand
gcacggcccucaccuacua

SEQ ID NO: 380149 - RNA, 19 nt, Homo sapiens
  misc_RNA (1)...(19): siRNA sense strand
gggagacgcugcuguacua

SEQ ID NO: 380150 - RNA, 19 nt, Homo sapiens
  misc_RNA (1)...(19): siRNA sense strand
ucaagaaacugaugaccaa

SEQ ID NO: 380151 - RNA, 19 nt, Homo sapiens
  misc_RNA (1)...(19): siRNA sense strand
gagagcagcuuuguggaaa

SEQ ID NO: 380152 - RNA, 19 nt, Homo sapiens
  misc_RNA (1)...(19): siRNA sense strand
gaugaggaguccaacaaga

SEQ ID NO: 380153 - RNA, 19 nt, Homo sapiens
  misc_RNA (1)...(19): siRNA sense strand
ggacaucucggacuccaaa

SEQ ID NO: 380154 - RNA, 19 nt, Homo sapiens
  misc_RNA (1)...(19): siRNA sense strand
gagagcaccuguggaaguu

SEQ ID NO: 380155 - RNA, 19 nt, Homo sapiens
  misc_RNA (1)...(19): siRNA sense strand
gagcaccuguggaaguuga

SEQ ID NO: 380156 - RNA, 19 nt, Homo sapiens
  misc_RNA (1)...(19): siRNA sense strand
uguacgagcuggcgcagua

SEQ ID NO: 380157 - RNA, 19 nt, Homo sapiens
  misc_RNA (1)...(19): siRNA sense strand
ugacggacaugauucuguu

SEQ ID NO: 380158 - RNA, 19 nt, Homo sapiens
  misc_RNA (1)...(19): siRNA sense strand
cgacgacgaugggaacuug

SEQ ID NO: 380159 - RNA, 19 nt, Homo sapiens
  misc_RNA (1)...(19): siRNA sense strand
cagcggacccugaggagua

SEQ ID NO: 380160 - RNA, 19 nt, Homo sapiens
  misc_RNA (1)...(19): siRNA sense strand
caacaagaagcacccauuc

SEQ ID NO: 380161 - RNA, 19 nt, Homo sapiens
  misc_RNA (1)...(19): siRNA sense strand
gaacuuggaggaggacuuc

SEQ ID NO: 380162 - RNA, 19 nt, Homo sapiens
  misc_RNA (1)...(19): siRNA sense strand
gcgguggacuacaucaaga

SEQ ID NO: 380163 - RNA, 19 nt, Homo sapiens
  misc_RNA (1)...(19): siRNA sense strand
ggcgguggccgaagaagua

SEQ ID NO: 380164 - RNA, 19 nt, Homo sapiens
  misc_RNA (1)...(19): siRNA sense strand
gugcggugguuguggagua

SEQ ID NO: 380165 - RNA, 19 nt, Homo sapiens
  misc_RNA (1)...(19): siRNA sense strand
cgacaacgcccuggugguu

SEQ ID NO: 380166 - RNA, 19 nt, Homo sapiens
  misc_RNA (1)...(19): siRNA sense strand
gaacaccuucuacgacauc

SEQ ID NO: 380167 - RNA, 19 nt, Homo sapiens
  misc_RNA (1)...(19): siRNA sense strand
ccaaccgccuguccaagga

SEQ ID NO: 380168 - RNA, 19 nt, Homo sapiens
  misc_RNA (1)...(19): siRNA sense strand
caccacgccugucaucaug

SEQ ID NO: 380169 - RNA, 19 nt, Homo sapiens
  misc_RNA (1)...(19): siRNA sense strand
gaaccgagcgccaccucau

SEQ ID NO: 380170 - RNA, 19 nt, Homo sapiens
  misc_RNA (1)...(19): siRNA sense strand
gggaccacguggcugugua

SEQ ID NO: 380171 - RNA, 19 nt, Homo sapiens
  misc_RNA (1)...(19): siRNA sense strand
ccaacaagaagcacccauu

SEQ ID NO: 380172 - RNA, 19 nt, Homo sapiens
  misc_RNA (1)...(19): siRNA sense strand
ucaugcaccuggaauugga

SEQ ID NO: 380173 - RNA, 19 nt, Homo sapiens
  misc_RNA (1)...(19): siRNA sense strand
ucaccaaaauucagacauu

SEQ ID NO: 380174 - RNA, 19 nt, Homo sapiens
  misc_RNA (1)...(19): siRNA sense strand
ggcgaggaguccagcauuc

SEQ ID NO: 380175 - RNA, 19 nt, Homo sapiens
  misc_RNA (1)...(19): siRNA sense strand
cgacaaugcccaggacuuc

SEQ ID NO: 380176 - RNA, 19 nt, Homo sapiens
  misc_RNA (1)...(19): siRNA sense strand
gcucaucgugggucuccua

SEQ ID NO: 380177 - RNA, 19 nt, Homo sapiens
  misc_RNA (1)...(19): siRNA sense strand
cgagagcaccuguggaagu

SEQ ID NO: 380178 - RNA, 19 nt, Homo sapiens
  misc_RNA (1)...(19): siRNA sense strand
cgacucugcucucgucaac

SEQ ID NO: 380179 - RNA, 19 nt, Homo sapiens
  misc_RNA (1)...(19): siRNA sense strand
gcaggagacagacguggau

SEQ ID NO: 380180 - RNA, 19 nt, Homo sapiens
  misc_RNA (1)...(19): siRNA sense strand
uagaugcggccaaggugua

SEQ ID NO: 380181 - RNA, 19 nt, Homo sapiens
  misc_RNA (1)...(19): siRNA sense strand
acaaugcccaggacuucua

SEQ ID NO: 380182 - RNA, 19 nt, Homo sapiens
  misc_RNA (1)...(19): siRNA sense strand
ccaacucugugcacaucug

SEQ ID NO: 380183 - RNA, 19 nt, Homo sapiens
  misc_RNA (1)...(19): siRNA sense strand
gaccuacgagcacuucaau

SEQ ID NO: 380184 - RNA, 19 nt, Homo sapiens
  misc_RNA (1)...(19): siRNA sense strand
ggucaaguucgcgguguuu

SEQ ID NO: 380185 - RNA, 19 nt, Homo sapiens
  misc_RNA (1)...(19): siRNA sense strand
ugucagagagagcagcuuu

SEQ ID NO: 380186 - RNA, 19 nt, Homo sapiens
  misc_RNA (1)...(19): siRNA sense strand
gacuacaucaagaaacuga

SEQ ID NO: 380187 - RNA, 19 nt, Homo sapiens
  misc_RNA (1)...(19): siRNA sense strand
ccagggaugugcagaacac

SEQ ID NO: 380188 - RNA, 19 nt, Homo sapiens
  misc_RNA (1)...(19): siRNA sense strand
acaagggcguggccaccaa

SEQ ID NO: 380189 - RNA, 19 nt, Homo sapiens
  misc_RNA (1)...(19): siRNA sense strand
ccaccaaccggaagcugaa

SEQ ID NO: 380190 - RNA, 19 nt, Homo sapiens
  misc_RNA (1)...(19): siRNA sense strand
gguccacaccgacauagau

SEQ ID NO: 380191 - RNA, 19 nt, Homo sapiens
  misc_RNA (1)...(19): siRNA sense strand
gacaacgcccuggugguuu

SEQ ID NO: 380192 - RNA, 19 nt, Homo sapiens
  misc_RNA (1)...(19): siRNA sense strand
agacauugaccuccucugu

SEQ ID NO: 380193 - RNA, 19 nt, Homo sapiens
  misc_RNA (1)...(19): siRNA sense strand
gguggacuacaucaagaaa

SEQ ID NO: 380194 - RNA, 19 nt, Homo sapiens
  misc_RNA (1)...(19): siRNA sense strand
acugguuccucuucagaaa

SEQ ID NO: 380195 - RNA, 19 nt, Homo sapiens
  misc_RNA (1)...(19): siRNA sense strand
uggaaaagaugaagaaaac

SEQ ID NO: 380196 - RNA, 19 nt, Homo sapiens
  misc_RNA (1)...(19): siRNA sense strand
agagagcagcuuuguggaa

SEQ ID NO: 380197 - RNA, 19 nt, Homo sapiens
  misc_RNA (1)...(19): siRNA sense strand
ucgugggucuccuaaccua

SEQ ID NO: 380198 - RNA, 19 nt, Homo sapiens
  misc_RNA (1)...(19): siRNA sense strand
uggacuacaucaagaaacu

SEQ ID NO: 380199 - RNA, 19 nt, Homo sapiens
  misc_RNA (1)...(19): siRNA sense strand
ucagagagagcagcuuugu

SEQ ID NO: 380200 - RNA, 19 nt, Homo sapiens
  misc_RNA (1)...(19): siRNA sense strand
gggaugugcagaacaccuu

SEQ ID NO: 380201 - RNA, 19 nt, Homo sapiens
  misc_RNA (1)...(19): siRNA sense strand
ccacgccugucaucauggu

SEQ ID NO: 380202 - RNA, 19 nt, Homo sapiens
  misc_RNA (1)...(19): siRNA sense strand
ccaccacgccugucaucau

SEQ ID NO: 380203 - RNA, 19 nt, Homo sapiens
  misc_RNA (1)...(19): siRNA sense strand
ccaucgaccaccuguguga

SEQ ID NO: 380204 - RNA, 19 nt, Homo sapiens
  misc_RNA (1)...(19): siRNA sense strand
caucgugggucuccuaacc

SEQ ID NO: 380205 - RNA, 19 nt, Homo sapiens
  misc_RNA (1)...(19): siRNA sense strand
guacccagccaacgacucu

SEQ ID NO: 380206 - RNA, 19 nt, Homo sapiens
  misc_RNA (1)...(19): siRNA sense strand
ccucaugcaccuggaauug

SEQ ID NO: 380207 - RNA, 19 nt, Homo sapiens
  misc_RNA (1)...(19): siRNA sense strand
gggucaaguucgcgguguu

SEQ ID NO: 380208 - RNA, 19 nt, Homo sapiens
  misc_RNA (1)...(19): siRNA sense strand
ggaugaggaguccaacaag

SEQ ID NO: 380209 - RNA, 19 nt, Homo sapiens
  misc_RNA (1)...(19): siRNA sense strand
aagaagaaguccccgaguu

SEQ ID NO: 380210 - RNA, 19 nt, Homo sapiens
  misc_RNA (1)...(19): siRNA sense strand
ggacugcagaggaguuugc

SEQ ID NO: 380211 - RNA, 19 nt, Homo sapiens
  misc_RNA (1)...(19): siRNA sense strand
ggccagggaugugcagaac

SEQ ID NO: 380212 - RNA, 19 nt, Homo sapiens
  misc_RNA (1)...(19): siRNA sense strand
gcgagggcaaggagcugua

SEQ ID NO: 380213 - RNA, 19 nt, Homo sapiens
  misc_RNA (1)...(19): siRNA sense strand
gagcuacgagaaccagaag

SEQ ID NO: 380214 - RNA, 19 nt, Homo sapiens
  misc_RNA (1)...(19): siRNA sense strand
ggaacuuggaggaggacuu

SEQ ID NO: 380215 - RNA, 19 nt, Homo sapiens
  misc_RNA (1)...(19): siRNA sense strand
uuucagaucuccaguauuu

SEQ ID NO: 380216 - RNA, 19 nt, Homo sapiens
  misc_RNA (1)...(19): siRNA sense strand
aaacaggaccucugaagaa

SEQ ID NO: 380217 - RNA, 19 nt, Homo sapiens
  misc_RNA (1)...(19): siRNA sense strand
uuaaggaugucaaggagaa

SEQ ID NO: 380218 - RNA, 19 nt, Homo sapiens
  misc_RNA (1)...(19): siRNA sense strand
uaauuuaucgcgcuuacua

SEQ ID NO: 380219 - RNA, 19 nt, Homo sapiens
  misc_RNA (1)...(19): siRNA sense strand
ugaccgugcucuucacuau

SEQ ID NO: 380220 - RNA, 19 nt, Homo sapiens
  misc_RNA (1)...(19): siRNA sense strand
ggaaguucgugcaguacug

SEQ ID NO: 380221 - RNA, 19 nt, Homo sapiens
  misc_RNA (1)...(19): siRNA sense strand
guucucugcccguaauuua

SEQ ID NO: 380222 - RNA, 19 nt, Homo sapiens
  misc_RNA (1)...(19): siRNA sense strand
cgauuucuaucugugauuu

SEQ ID NO: 380223 - RNA, 19 nt, Homo sapiens
  misc_RNA (1)...(19): siRNA sense strand
ucgggaaguucgugcagua

SEQ ID NO: 380224 - RNA, 19 nt, Homo sapiens
  misc_RNA (1)...(19): siRNA sense strand
caggaccucugaagaagca

SEQ ID NO: 380225 - RNA, 19 nt, Homo sapiens
  misc_RNA (1)...(19): siRNA sense strand
uccaguauuucggauauuu

SEQ ID NO: 380226 - RNA, 19 nt, Homo sapiens
  misc_RNA (1)...(19): siRNA sense strand
ccuccgagccuugcgauuu

SEQ ID NO: 380227 - RNA, 19 nt, Homo sapiens
  misc_RNA (1)...(19): siRNA sense strand
ucuccaguauuucggauau

SEQ ID NO: 380228 - RNA, 19 nt, Homo sapiens
  misc_RNA (1)...(19): siRNA sense strand
gcucuacuccagccucaug

SEQ ID NO: 380229 - RNA, 19 nt, Homo sapiens
  misc_RNA (1)...(19): siRNA sense strand
gccaagccuucgccuucuu

SEQ ID NO: 380230 - RNA, 19 nt, Homo sapiens
  misc_RNA (1)...(19): siRNA sense strand
uuaucgcgcuuacuaugga

SEQ ID NO: 380231 - RNA, 19 nt, Homo sapiens
  misc_RNA (1)...(19): siRNA sense strand
cagcaauuccacuaacaug

SEQ ID NO: 380232 - RNA, 19 nt, Homo sapiens
  misc_RNA (1)...(19): siRNA sense strand
gcagcaauuccacuaacau

SEQ ID NO: 380233 - RNA, 19 nt, Homo sapiens
  misc_RNA (1)...(19): siRNA sense strand
gguacucugugcucuacuc

SEQ ID NO: 380234 - RNA, 19 nt, Homo sapiens
  misc_RNA (1)...(19): siRNA sense strand
gugcagcaauuccacuaac

SEQ ID NO: 380235 - RNA, 19 nt, Homo sapiens
  misc_RNA (1)...(19): siRNA sense strand
cauuuaaggaugucaagga

SEQ ID NO: 380236 - RNA, 19 nt, Homo sapiens
  misc_RNA (1)...(19): siRNA sense strand
cgcuuacuauggagcauuu

SEQ ID NO: 380237 - RNA, 19 nt, Homo sapiens
  misc_RNA (1)...(19): siRNA sense strand
gcugaugaccgugcucuuc

SEQ ID NO: 380238 - RNA, 19 nt, Homo sapiens
  misc_RNA (1)...(19): siRNA sense strand
cuauggagcauuuaaggau

SEQ ID NO: 380239 - RNA, 19 nt, Homo sapiens
  misc_RNA (1)...(19): siRNA sense strand
gcucuucacuauguguucu

SEQ ID NO: 380240 - RNA, 19 nt, Homo sapiens
  misc_RNA (1)...(19): siRNA sense strand
aggagccggugcagcaauu

SEQ ID NO: 380241 - RNA, 19 nt, Homo sapiens
  misc_RNA (1)...(19): siRNA sense strand
uguguucucugcccguaau

SEQ ID NO: 380242 - RNA, 19 nt, Homo sapiens
  misc_RNA (1)...(19): siRNA sense strand
gagcauuuaaggaugucaa

SEQ ID NO: 380243 - RNA, 19 nt, Homo sapiens
  misc_RNA (1)...(19): siRNA sense strand
accgugcucuucacuaugu

SEQ ID NO: 380244 - RNA, 19 nt, Homo sapiens
  misc_RNA (1)...(19): siRNA sense strand
ggugcagcaauuccacuaa

SEQ ID NO: 380245 - RNA, 19 nt, Homo sapiens
  misc_RNA (1)...(19): siRNA sense strand
cuccgagccuugcgauuuc

SEQ ID NO: 380246 - RNA, 19 nt, Homo sapiens
  misc_RNA (1)...(19): siRNA sense strand
gccuucgccuucuucaugu

SEQ ID NO: 380247 - RNA, 19 nt, Homo sapiens
  misc_RNA (1)...(19): siRNA sense strand
gccuugcgauuucuaucug

SEQ ID NO: 380248 - RNA, 19 nt, Homo sapiens
  misc_RNA (1)...(19): siRNA sense strand
aacaggaccucugaagaag

SEQ ID NO: 380249 - RNA, 19 nt, Homo sapiens
  misc_RNA (1)...(19): siRNA sense strand
gaaagacagugcucaguaa

SEQ ID NO: 380250 - RNA, 19 nt, Homo sapiens
  misc_RNA (1)...(19): siRNA sense strand
gaagacaccaccucacuga

SEQ ID NO: 380251 - RNA, 19 nt, Homo sapiens
  misc_RNA (1)...(19): siRNA sense strand
guaaagcaauagagaagau

SEQ ID NO: 380252 - RNA, 19 nt, Homo sapiens
  misc_RNA (1)...(19): siRNA sense strand
caauagagaagaucaaaug

SEQ ID NO: 380253 - RNA, 19 nt, Homo sapiens
  misc_RNA (1)...(19): siRNA sense strand
gugaaacacugaacuuauc

SEQ ID NO: 380254 - RNA, 19 nt, Homo sapiens
  misc_RNA (1)...(19): siRNA sense strand
caucaaccaugccuauuuc

SEQ ID NO: 380255 - RNA, 19 nt, Homo sapiens
  misc_RNA (1)...(19): siRNA sense strand
uauauauccuccugagaaa

SEQ ID NO: 380256 - RNA, 19 nt, Homo sapiens
  misc_RNA (1)...(19): siRNA sense strand
agaaagacagugcucagua

SEQ ID NO: 380257 - RNA, 19 nt, Homo sapiens
  misc_RNA (1)...(19): siRNA sense strand
guacagcaccuucauucug

SEQ ID NO: 380258 - RNA, 19 nt, Homo sapiens
  misc_RNA (1)...(19): siRNA sense strand
ggacuuugcgaauaucaga

SEQ ID NO: 380259 - RNA, 19 nt, Homo sapiens
  misc_RNA (1)...(19): siRNA sense strand
gaauaucagagaccucaga

SEQ ID NO: 380260 - RNA, 19 nt, Homo sapiens
  misc_RNA (1)...(19): siRNA sense strand
ggagcgagaagucaguaaa

SEQ ID NO: 380261 - RNA, 19 nt, Homo sapiens
  misc_RNA (1)...(19): siRNA sense strand
ugaaggagaucagcaguac

SEQ ID NO: 380262 - RNA, 19 nt, Homo sapiens
  misc_RNA (1)...(19): siRNA sense strand
gaguacagcaccuucauuc

SEQ ID NO: 380263 - RNA, 19 nt, Homo sapiens
  misc_RNA (1)...(19): siRNA sense strand
ccaucaaccaugccuauuu

SEQ ID NO: 380264 - RNA, 19 nt, Homo sapiens
  misc_RNA (1)...(19): siRNA sense strand
gaguauucgucaaccaguu

SEQ ID NO: 380265 - RNA, 19 nt, Homo sapiens
  misc_RNA (1)...(19): siRNA sense strand
acugaggacuuugcgaaua

SEQ ID NO: 380266 - RNA, 19 nt, Homo sapiens
  misc_RNA (1)...(19): siRNA sense strand
cugaggacuuugcgaauau

SEQ ID NO: 380267 - RNA, 19 nt, Homo sapiens
  misc_RNA (1)...(19): siRNA sense strand
gcaauagagaagaucaaau

SEQ ID NO: 380268 - RNA, 19 nt, Homo sapiens
  misc_RNA (1)...(19): siRNA sense strand
guagcucgcggcugcagua

SEQ ID NO: 380269 - RNA, 19 nt, Homo sapiens
  misc_RNA (1)...(19): siRNA sense strand
ccgaauugcuucugugaac

SEQ ID NO: 380270 - RNA, 19 nt, Homo sapiens
  misc_RNA (1)...(19): siRNA sense strand
ccaguuauaucagccaagu

SEQ ID NO: 380271 - RNA, 19 nt, Homo sapiens
  misc_RNA (1)...(19): siRNA sense strand
caaccaugccuauuucuac

SEQ ID NO: 380272 - RNA, 19 nt, Homo sapiens
  misc_RNA (1)...(19): siRNA sense strand
gcgccgagauccagauggu

SEQ ID NO: 380273 - RNA, 19 nt, Homo sapiens
  misc_RNA (1)...(19): siRNA sense strand
guacaugaagggccaaugg

SEQ ID NO: 380274 - RNA, 19 nt, Homo sapiens
  misc_RNA (1)...(19): siRNA sense strand
cuagaccccuggauauaua

SEQ ID NO: 380275 - RNA, 19 nt, Homo sapiens
  misc_RNA (1)...(19): siRNA sense strand
gcaccuucauucugcucuu

SEQ ID NO: 380276 - RNA, 19 nt, Homo sapiens
  misc_RNA (1)...(19): siRNA sense strand
auauauauccuccugagaa

SEQ ID NO: 380277 - RNA, 19 nt, Homo sapiens
  misc_RNA (1)...(19): siRNA sense strand
uauauccuccugagaaaga

SEQ ID NO: 380278 - RNA, 19 nt, Homo sapiens
  misc_RNA (1)...(19): siRNA sense strand
cuucagcuccuuccucauu

SEQ ID NO: 380279 - RNA, 19 nt, Homo sapiens
  misc_RNA (1)...(19): siRNA sense strand
ucaguaaagcaauagagaa

SEQ ID NO: 380280 - RNA, 19 nt, Homo sapiens
  misc_RNA (1)...(19): siRNA sense strand
cccgggagcugaaggagau

SEQ ID NO: 380281 - RNA, 19 nt, Homo sapiens
  misc_RNA (1)...(19): siRNA sense strand
auggucaucuuacucauug

SEQ ID NO: 380282 - RNA, 19 nt, Homo sapiens
  misc_RNA (1)...(19): siRNA sense strand
gaccaucgccacguacaug

SEQ ID NO: 380283 - RNA, 19 nt, Homo sapiens
  misc_RNA (1)...(19): siRNA sense strand
aaagacagugcucaguaaa

SEQ ID NO: 380284 - RNA, 19 nt, Homo sapiens
  misc_RNA (1)...(19): siRNA sense strand
aguuauaucagccaaguuu

SEQ ID NO: 380285 - RNA, 19 nt, Homo sapiens
  misc_RNA (1)...(19): siRNA sense strand
ucaaccaugccuauuucua

SEQ ID NO: 380286 - RNA, 19 nt, Homo sapiens
  misc_RNA (1)...(19): siRNA sense strand
gagaaagacagugcucagu

SEQ ID NO: 380287 - RNA, 19 nt, Homo sapiens
  misc_RNA (1)...(19): siRNA sense strand
agacagugcucaguaaagc

SEQ ID NO: 380288 - RNA, 19 nt, Homo sapiens
  misc_RNA (1)...(19): siRNA sense strand
ggccaucaaccaugccuau

SEQ ID NO: 380289 - RNA, 19 nt, Homo sapiens
  misc_RNA (1)...(19): siRNA sense strand
aguauucgucaaccaguua

SEQ ID NO: 380290 - RNA, 19 nt, Homo sapiens
  misc_RNA (1)...(19): siRNA sense strand
cgaguacagcaccuucauu

SEQ ID NO: 380291 - RNA, 19 nt, Homo sapiens
  misc_RNA (1)...(19): siRNA sense strand
ugaaacacugaacuuauca

SEQ ID NO: 380292 - RNA, 19 nt, Homo sapiens
  misc_RNA (1)...(19): siRNA sense strand
caguaaagcaauagagaag

SEQ ID NO: 380293 - RNA, 19 nt, Homo sapiens
  misc_RNA (1)...(19): siRNA sense strand
aaccaugccuauuucuaca

SEQ ID NO: 380294 - RNA, 19 nt, Homo sapiens
  misc_RNA (1)...(19): siRNA sense strand
cggugaccaucgccacgua

SEQ ID NO: 380295 - RNA, 19 nt, Homo sapiens
  misc_RNA (1)...(19): siRNA sense strand
uugcaggccauccgaauug

SEQ ID NO: 380296 - RNA, 19 nt, Homo sapiens
  misc_RNA (1)...(19): siRNA sense strand
gugucuuacugguggauga

SEQ ID NO: 380297 - RNA, 19 nt, Homo sapiens
  misc_RNA (1)...(19): siRNA sense strand
gagcgagaagucaguaaaa

SEQ ID NO: 380298 - RNA, 19 nt, Homo sapiens
  misc_RNA (1)...(19): siRNA sense strand
ucaauucguccgccuccuu

SEQ ID NO: 380299 - RNA, 19 nt, Homo sapiens
  misc_RNA (1)...(19): siRNA sense strand
gucaucagcuuacauauuu

SEQ ID NO: 380300 - RNA, 19 nt, Homo sapiens
  misc_RNA (1)...(19): siRNA sense strand
ggaaaucauucucuggaaa

SEQ ID NO: 380301 - RNA, 19 nt, Homo sapiens
  misc_RNA (1)...(19): siRNA sense strand
gaaggcauaucagagauuu

SEQ ID NO: 380302 - RNA, 19 nt, Homo sapiens
  misc_RNA (1)...(19): siRNA sense strand
uaucagagauuuagacaga

SEQ ID NO: 380303 - RNA, 19 nt, Homo sapiens
  misc_RNA (1)...(19): siRNA sense strand
caaggcagaucucaucauu

SEQ ID NO: 380304 - RNA, 19 nt, Homo sapiens
  misc_RNA (1)...(19): siRNA sense strand
cagcugcgcuucuuucaaa

SEQ ID NO: 380305 - RNA, 19 nt, Homo sapiens
  misc_RNA (1)...(19): siRNA sense strand
gaacaauuccaaacagcua

SEQ ID NO: 380306 - RNA, 19 nt, Homo sapiens
  misc_RNA (1)...(19): siRNA sense strand
caacacagaagacaucaaa

SEQ ID NO: 380307 - RNA, 19 nt, Homo sapiens
  misc_RNA (1)...(19): siRNA sense strand
gcagugugauggccauuga

SEQ ID NO: 380308 - RNA, 19 nt, Homo sapiens
  misc_RNA (1)...(19): siRNA sense strand
ggaaaccugugaaacaaca

SEQ ID NO: 380309 - RNA, 19 nt, Homo sapiens
  misc_RNA (1)...(19): siRNA sense strand
gcaaugcaaucacaggaau

SEQ ID NO: 380310 - RNA, 19 nt, Homo sapiens
  misc_RNA (1)...(19): siRNA sense strand
aggcagaucucaucauuug

SEQ ID NO: 380311 - RNA, 19 nt, Homo sapiens
  misc_RNA (1)...(19): siRNA sense strand
gagcuuaguuccauuaaaa

SEQ ID NO: 380312 - RNA, 19 nt, Homo sapiens
  misc_RNA (1)...(19): siRNA sense strand
ucuauaagcuugccaguca

SEQ ID NO: 380313 - RNA, 19 nt, Homo sapiens
  misc_RNA (1)...(19): siRNA sense strand
uuacauauuugggagcuua

SEQ ID NO: 380314 - RNA, 19 nt, Homo sapiens
  misc_RNA (1)...(19): siRNA sense strand
gcagagaaaucagcaagca

SEQ ID NO: 380315 - RNA, 19 nt, Homo sapiens
  misc_RNA (1)...(19): siRNA sense strand
gugggaaucuugucaaaca

SEQ ID NO: 380316 - RNA, 19 nt, Homo sapiens
  misc_RNA (1)...(19): siRNA sense strand
ccauagcaguauuuguaua

SEQ ID NO: 380317 - RNA, 19 nt, Homo sapiens
  misc_RNA (1)...(19): siRNA sense strand
aaaccggcuuuccguauuu

SEQ ID NO: 380318 - RNA, 19 nt, Homo sapiens
  misc_RNA (1)...(19): siRNA sense strand
caacauggaaucaaaucuu

SEQ ID NO: 380319 - RNA, 19 nt, Homo sapiens
  misc_RNA (1)...(19): siRNA sense strand
gcucuuagcccuugguguu

SEQ ID NO: 380320 - RNA, 19 nt, Homo sapiens
  misc_RNA (1)...(19): siRNA sense strand
ggagcuuaguuccauuaaa

SEQ ID NO: 380321 - RNA, 19 nt, Homo sapiens
  misc_RNA (1)...(19): siRNA sense strand
gcagaucucaucauuugga

SEQ ID NO: 380322 - RNA, 19 nt, Homo sapiens
  misc_RNA (1)...(19): siRNA sense strand
gcccauuucugguuacaau

SEQ ID NO: 380323 - RNA, 19 nt, Homo sapiens
  misc_RNA (1)...(19): siRNA sense strand
uaaugugugucuccuguau

SEQ ID NO: 380324 - RNA, 19 nt, Homo sapiens
  misc_RNA (1)...(19): siRNA sense strand
gauccgcuuugaccaauca

SEQ ID NO: 380325 - RNA, 19 nt, Homo sapiens
  misc_RNA (1)...(19): siRNA sense strand
aagaauggauccgcuuuga

SEQ ID NO: 380326 - RNA, 19 nt, Homo sapiens
  misc_RNA (1)...(19): siRNA sense strand
gcacagacaaggcagaucu

SEQ ID NO: 380327 - RNA, 19 nt, Homo sapiens
  misc_RNA (1)...(19): siRNA sense strand
acacagaagacaucaaaga

SEQ ID NO: 380328 - RNA, 19 nt, Homo sapiens
  misc_RNA (1)...(19): siRNA sense strand
aaagguugcugcuauuucu

SEQ ID NO: 380329 - RNA, 19 nt, Homo sapiens
  misc_RNA (1)...(19): siRNA sense strand
agacugggaagauagauuu

SEQ ID NO: 380330 - RNA, 19 nt, Homo sapiens
  misc_RNA (1)...(19): siRNA sense strand
caugaaggcauaucagaga

SEQ ID NO: 380331 - RNA, 19 nt, Homo sapiens
  misc_RNA (1)...(19): siRNA sense strand
ucacaggaauuacacuuuu

SEQ ID NO: 380332 - RNA, 19 nt, Homo sapiens
  misc_RNA (1)...(19): siRNA sense strand
gaaguccaaggcaucguuu

SEQ ID NO: 380333 - RNA, 19 nt, Homo sapiens
  misc_RNA (1)...(19): siRNA sense strand
gcgcuucuuucaaacacaa

SEQ ID NO: 380334 - RNA, 19 nt, Homo sapiens
  misc_RNA (1)...(19): siRNA sense strand
agccauagcaguauuugua

SEQ ID NO: 380335 - RNA, 19 nt, Homo sapiens
  misc_RNA (1)...(19): siRNA sense strand
ggacaucgagacuauaaaa

SEQ ID NO: 380336 - RNA, 19 nt, Homo sapiens
  misc_RNA (1)...(19): siRNA sense strand
cuuaaagguugcugcuauu

SEQ ID NO: 380337 - RNA, 19 nt, Homo sapiens
  misc_RNA (1)...(19): siRNA sense strand
uuagauccuuggguauaua

SEQ ID NO: 380338 - RNA, 19 nt, Homo sapiens
  misc_RNA (1)...(19): siRNA sense strand
gaaaucauucucuggaaac

SEQ ID NO: 380339 - RNA, 19 nt, Homo sapiens
  misc_RNA (1)...(19): siRNA sense strand
caaagacugggaagauaga

SEQ ID NO: 380340 - RNA, 19 nt, Homo sapiens
  misc_RNA (1)...(19): siRNA sense strand
caucaaagacugggaagau

SEQ ID NO: 380341 - RNA, 19 nt, Homo sapiens
  misc_RNA (1)...(19): siRNA sense strand
uggagcccauuucugguua

SEQ ID NO: 380342 - RNA, 19 nt, Homo sapiens
  misc_RNA (1)...(19): siRNA sense strand
cagugggaaucuugucaaa

SEQ ID NO: 380343 - RNA, 19 nt, Homo sapiens
  misc_RNA (1)...(19): siRNA sense strand
uaaguggugugugcuuguu

SEQ ID NO: 380344 - RNA, 19 nt, Homo sapiens
  misc_RNA (1)...(19): siRNA sense strand
cuggaaaccugugaaacaa

SEQ ID NO: 380345 - RNA, 19 nt, Homo sapiens
  misc_RNA (1)...(19): siRNA sense strand
ucagagauuuagacagaag

SEQ ID NO: 380346 - RNA, 19 nt, Homo sapiens
  misc_RNA (1)...(19): siRNA sense strand
gagugcaugucaucagcuu

SEQ ID NO: 380347 - RNA, 19 nt, Homo sapiens
  misc_RNA (1)...(19): siRNA sense strand
agacaaggcagaucucauc

SEQ ID NO: 380348 - RNA, 19 nt, Homo sapiens
  misc_RNA (1)...(19): siRNA sense strand
ucgaggaccugguguuucu

SEQ ID NO: 380349 - RNA, 19 nt, Homo sapiens
  misc_RNA (1)...(19): siRNA sense strand
ggucugugcccacuucuuc

SEQ ID NO: 380350 - RNA, 19 nt, Homo sapiens
  misc_RNA (1)...(19): siRNA sense strand
caugaacaauuccaaacag

SEQ ID NO: 380351 - RNA, 19 nt, Homo sapiens
  misc_RNA (1)...(19): siRNA sense strand
gguauauauucuucuacga

SEQ ID NO: 380352 - RNA, 19 nt, Homo sapiens
  misc_RNA (1)...(19): siRNA sense strand
aauguccuuugcaguauuu

SEQ ID NO: 380353 - RNA, 19 nt, Homo sapiens
  misc_RNA (1)...(19): siRNA sense strand
ugucaucagcuuacauauu

SEQ ID NO: 380354 - RNA, 19 nt, Homo sapiens
  misc_RNA (1)...(19): siRNA sense strand
uggaaaucauucucuggaa

SEQ ID NO: 380355 - RNA, 19 nt, Homo sapiens
  misc_RNA (1)...(19): siRNA sense strand
gaccugguguuucuacaac

SEQ ID NO: 380356 - RNA, 19 nt, Homo sapiens
  misc_RNA (1)...(19): siRNA sense strand
ggaccugguguuucuacaa

SEQ ID NO: 380357 - RNA, 19 nt, Homo sapiens
  misc_RNA (1)...(19): siRNA sense strand
gccauugagcgguguauug

SEQ ID NO: 380358 - RNA, 19 nt, Homo sapiens
  misc_RNA (1)...(19): siRNA sense strand
caaggcaucguuucugcuu

SEQ ID NO: 380359 - RNA, 19 nt, Homo sapiens
  misc_RNA (1)...(19): siRNA sense strand
gauccuuggguauauauuc

SEQ ID NO: 380360 - RNA, 19 nt, Homo sapiens
  misc_RNA (1)...(19): siRNA sense strand
aaugcaaucacaggaauua

SEQ ID NO: 380361 - RNA, 19 nt, Homo sapiens
  misc_RNA (1)...(19): siRNA sense strand
ccuuggacaucgagacuau

SEQ ID NO: 380362 - RNA, 19 nt, Homo sapiens
  misc_RNA (1)...(19): siRNA sense strand
guauaugcuucugauaaag

SEQ ID NO: 380363 - RNA, 19 nt, Homo sapiens
  misc_RNA (1)...(19): siRNA sense strand
augugugucuccuguauuu

SEQ ID NO: 380364 - RNA, 19 nt, Homo sapiens
  misc_RNA (1)...(19): siRNA sense strand
aucaaagacugggaagaua

SEQ ID NO: 380365 - RNA, 19 nt, Homo sapiens
  misc_RNA (1)...(19): siRNA sense strand
cuacaacacagaagacauc

SEQ ID NO: 380366 - RNA, 19 nt, Homo sapiens
  misc_RNA (1)...(19): siRNA sense strand
caucgagacuauaaaauuc

SEQ ID NO: 380367 - RNA, 19 nt, Homo sapiens
  misc_RNA (1)...(19): siRNA sense strand
ccaaacaugugaaaaugau

SEQ ID NO: 380368 - RNA, 19 nt, Homo sapiens
  misc_RNA (1)...(19): siRNA sense strand
aaauguccuuugcaguauu

SEQ ID NO: 380369 - RNA, 19 nt, Homo sapiens
  misc_RNA (1)...(19): siRNA sense strand
ucaaagacugggaagauag

SEQ ID NO: 380370 - RNA, 19 nt, Homo sapiens
  misc_RNA (1)...(19): siRNA sense strand
uaaagguugcugcuauuuc

SEQ ID NO: 380371 - RNA, 19 nt, Homo sapiens
  misc_RNA (1)...(19): siRNA sense strand
cagaucucaucauuuggaa

SEQ ID NO: 380372 - RNA, 19 nt, Homo sapiens
  misc_RNA (1)...(19): siRNA sense strand
ggaauuacacuuuuaagag

SEQ ID NO: 380373 - RNA, 19 nt, Homo sapiens
  misc_RNA (1)...(19): siRNA sense strand
ccauucucaugaaggcaua

SEQ ID NO: 380374 - RNA, 19 nt, Homo sapiens
  misc_RNA (1)...(19): siRNA sense strand
cauggaaucaaaucuuaga

SEQ ID NO: 380375 - RNA, 19 nt, Homo sapiens
  misc_RNA (1)...(19): siRNA sense strand
cacaggaauuacacuuuua

SEQ ID NO: 380376 - RNA, 19 nt, Homo sapiens
  misc_RNA (1)...(19): siRNA sense strand
gucaccaguugcagagaaa

SEQ ID NO: 380377 - RNA, 19 nt, Homo sapiens
  misc_RNA (1)...(19): siRNA sense strand
cuacgaaaauuacauccaa

SEQ ID NO: 380378 - RNA, 19 nt, Homo sapiens
  misc_RNA (1)...(19): siRNA sense strand
ccaucgccauucucaugaa

SEQ ID NO: 380379 - RNA, 19 nt, Homo sapiens
  misc_RNA (1)...(19): siRNA sense strand
aaagucagcagcacagaca

SEQ ID NO: 380380 - RNA, 19 nt, Homo sapiens
  misc_RNA (1)...(19): siRNA sense strand
cuuagauccuuggguauau

SEQ ID NO: 380381 - RNA, 19 nt, Homo sapiens
  misc_RNA (1)...(19): siRNA sense strand
gauuuagacagaaguccaa

SEQ ID NO: 380382 - RNA, 19 nt, Homo sapiens
  misc_RNA (1)...(19): siRNA sense strand
gaauggcaacauggaauca

SEQ ID NO: 380383 - RNA, 19 nt, Homo sapiens
  misc_RNA (1)...(19): siRNA sense strand
ucuggaaaccugugaaaca

SEQ ID NO: 380384 - RNA, 19 nt, Homo sapiens
  misc_RNA (1)...(19): siRNA sense strand
caugacagugggaaucuug

SEQ ID NO: 380385 - RNA, 19 nt, Homo sapiens
  misc_RNA (1)...(19): siRNA sense strand
gccauagcaguauuuguau

SEQ ID NO: 380386 - RNA, 19 nt, Homo sapiens
  misc_RNA (1)...(19): siRNA sense strand
ucuuagauccuuggguaua

SEQ ID NO: 380387 - RNA, 19 nt, Homo sapiens
  misc_RNA (1)...(19): siRNA sense strand
uagcaguauuuguauaugc

SEQ ID NO: 380388 - RNA, 19 nt, Homo sapiens
  misc_RNA (1)...(19): siRNA sense strand
ugaaggcauaucagagauu

SEQ ID NO: 380389 - RNA, 19 nt, Homo sapiens
  misc_RNA (1)...(19): siRNA sense strand
agucaccaguugcagagaa

SEQ ID NO: 380390 - RNA, 19 nt, Homo sapiens
  misc_RNA (1)...(19): siRNA sense strand
ccaugaacaauuccaaaca

SEQ ID NO: 380391 - RNA, 19 nt, Homo sapiens
  misc_RNA (1)...(19): siRNA sense strand
uuaaagguugcugcuauuu

SEQ ID NO: 380392 - RNA, 19 nt, Homo sapiens
  misc_RNA (1)...(19): siRNA sense strand
gcagcugcgcuucuuucaa

SEQ ID NO: 380393 - RNA, 19 nt, Homo sapiens
  misc_RNA (1)...(19): siRNA sense strand
aaaaccggcuuuccguauu

SEQ ID NO: 380394 - RNA, 19 nt, Homo sapiens
  misc_RNA (1)...(19): siRNA sense strand
guccuuaagaaucucuaua

SEQ ID NO: 380395 - RNA, 19 nt, Homo sapiens
  misc_RNA (1)...(19): siRNA sense strand
gcaaucacaggaauuacac

SEQ ID NO: 380396 - RNA, 19 nt, Homo sapiens
  misc_RNA (1)...(19): siRNA sense strand
gcccauccuuggacaucga

SEQ ID NO: 380397 - RNA, 19 nt, Homo sapiens
  misc_RNA (1)...(19): siRNA sense strand
cuuguuugcuguuuucaua

SEQ ID NO: 380398 - RNA, 19 nt, Homo sapiens
  misc_RNA (1)...(19): siRNA sense strand
gcauaucagagauuuagac

SEQ ID NO: 380399 - RNA, 19 nt, Homo sapiens
  misc_RNA (1)...(19): siRNA sense strand
agaaggagcuggccuagug

SEQ ID NO: 380400 - RNA, 19 nt, Homo sapiens
  misc_RNA (1)...(19): siRNA sense strand
cggaaacucuucacauuug

SEQ ID NO: 380401 - RNA, 19 nt, Homo sapiens
  misc_RNA (1)...(19): siRNA sense strand
caacaaauuugacaacaac

SEQ ID NO: 380402 - RNA, 19 nt, Homo sapiens
  misc_RNA (1)...(19): siRNA sense strand
ccaucuacgucaucuauaa

SEQ ID NO: 380403 - RNA, 19 nt, Homo sapiens
  misc_RNA (1)...(19): siRNA sense strand
caucggaguuuccugguuu

SEQ ID NO: 380404 - RNA, 19 nt, Homo sapiens
  misc_RNA (1)...(19): siRNA sense strand
ucacgggccuggcagauga

SEQ ID NO: 380405 - RNA, 19 nt, Homo sapiens
  misc_RNA (1)...(19): siRNA sense strand
gcaacgacauccagcagau

SEQ ID NO: 380406 - RNA, 19 nt, Homo sapiens
  misc_RNA (1)...(19): siRNA sense strand
caggaaaggugguguggau

SEQ ID NO: 380407 - RNA, 19 nt, Homo sapiens
  misc_RNA (1)...(19): siRNA sense strand
gggagagacuggccuaugg

SEQ ID NO: 380408 - RNA, 19 nt, Homo sapiens
  misc_RNA (1)...(19): siRNA sense strand
ugauugcauuugccaguua

SEQ ID NO: 380409 - RNA, 19 nt, Homo sapiens
  misc_RNA (1)...(19): siRNA sense strand
auucugggcuguuguguuu

SEQ ID NO: 380410 - RNA, 19 nt, Homo sapiens
  misc_RNA (1)...(19): siRNA sense strand
gagagcagcgggauucaug

SEQ ID NO: 380411 - RNA, 19 nt, Homo sapiens
  misc_RNA (1)...(19): siRNA sense strand
ggauuuggaguauugauug

SEQ ID NO: 380412 - RNA, 19 nt, Homo sapiens
  misc_RNA (1)...(19): siRNA sense strand
ggaaaggugguguggauca

SEQ ID NO: 380413 - RNA, 19 nt, Homo sapiens
  misc_RNA (1)...(19): siRNA sense strand
ggaaaggggugaagacauc

SEQ ID NO: 380414 - RNA, 19 nt, Homo sapiens
  misc_RNA (1)...(19): siRNA sense strand
ugaaagaggccacgguaug

SEQ ID NO: 380415 - RNA, 19 nt, Homo sapiens
  misc_RNA (1)...(19): siRNA sense strand
gaaagaggccacgguaugg

SEQ ID NO: 380416 - RNA, 19 nt, Homo sapiens
  misc_RNA (1)...(19): siRNA sense strand
ccaguuacaacaaauuuga

SEQ ID NO: 380417 - RNA, 19 nt, Homo sapiens
  misc_RNA (1)...(19): siRNA sense strand
cgacuucuaccgcuugaaa

SEQ ID NO: 380418 - RNA, 19 nt, Homo sapiens
  misc_RNA (1)...(19): siRNA sense strand
gcacgcagggcucucuuug

SEQ ID NO: 380419 - RNA, 19 nt, Homo sapiens
  misc_RNA (1)...(19): siRNA sense strand
ggguggaauuuacgucuug

SEQ ID NO: 380420 - RNA, 19 nt, Homo sapiens
  misc_RNA (1)...(19): siRNA sense strand
gcagcgggauucaugacau

SEQ ID NO: 380421 - RNA, 19 nt, Homo sapiens
  misc_RNA (1)...(19): siRNA sense strand
gaaaaucugcccauucuuc

SEQ ID NO: 380422 - RNA, 19 nt, Homo sapiens
  misc_RNA (1)...(19): siRNA sense strand
ucaagccacucaccuacga

SEQ ID NO: 380423 - RNA, 19 nt, Homo sapiens
  misc_RNA (1)...(19): siRNA sense strand
ggaaacucuucacauuugg

SEQ ID NO: 380424 - RNA, 19 nt, Homo sapiens
  misc_RNA (1)...(19): siRNA sense strand
gagcuggccuaguguucau

SEQ ID NO: 380425 - RNA, 19 nt, Homo sapiens
  misc_RNA (1)...(19): siRNA sense strand
ccagcagcaucaacuguau

SEQ ID NO: 380426 - RNA, 19 nt, Homo sapiens
  misc_RNA (1)...(19): siRNA sense strand
ggauugaugccgcaacuca

SEQ ID NO: 380427 - RNA, 19 nt, Homo sapiens
  misc_RNA (1)...(19): siRNA sense strand
ugccgcaacucagauauuu

SEQ ID NO: 380428 - RNA, 19 nt, Homo sapiens
  misc_RNA (1)...(19): siRNA sense strand
ggcuggauuuggaguauug

SEQ ID NO: 380429 - RNA, 19 nt, Homo sapiens
  misc_RNA (1)...(19): siRNA sense strand
caaauuugacaacaacugu

SEQ ID NO: 380430 - RNA, 19 nt, Homo sapiens
  misc_RNA (1)...(19): siRNA sense strand
gaguauugauugcauuugc

SEQ ID NO: 380431 - RNA, 19 nt, Homo sapiens
  misc_RNA (1)...(19): siRNA sense strand
accggaaacucuucacauu

SEQ ID NO: 380432 - RNA, 19 nt, Homo sapiens
  misc_RNA (1)...(19): siRNA sense strand
gcuaugcugucauccugau

SEQ ID NO: 380433 - RNA, 19 nt, Homo sapiens
  misc_RNA (1)...(19): siRNA sense strand
ccggaaacucuucacauuu

SEQ ID NO: 380434 - RNA, 19 nt, Homo sapiens
  misc_RNA (1)...(19): siRNA sense strand
gugaagacaucaggaaagg

SEQ ID NO: 380435 - RNA, 19 nt, Homo sapiens
  misc_RNA (1)...(19): siRNA sense strand
caaaggcguuggcuaugcu

SEQ ID NO: 380436 - RNA, 19 nt, Homo sapiens
  misc_RNA (1)...(19): siRNA sense strand
gcccaucuacgucaucuau

SEQ ID NO: 380437 - RNA, 19 nt, Homo sapiens
  misc_RNA (1)...(19): siRNA sense strand
ucaacuguaucaccagcuu

SEQ ID NO: 380438 - RNA, 19 nt, Homo sapiens
  misc_RNA (1)...(19): siRNA sense strand
ggaguuuccugguuuuaug

SEQ ID NO: 380439 - RNA, 19 nt, Homo sapiens
  misc_RNA (1)...(19): siRNA sense strand
cuucaaaggcguuggcuau

SEQ ID NO: 380440 - RNA, 19 nt, Homo sapiens
  misc_RNA (1)...(19): siRNA sense strand
gcauuugccaguuacaaca

SEQ ID NO: 380441 - RNA, 19 nt, Homo sapiens
  misc_RNA (1)...(19): siRNA sense strand
agagggacaucagacaguu

SEQ ID NO: 380442 - RNA, 19 nt, Homo sapiens
  misc_RNA (1)...(19): siRNA sense strand
ucaaaggcguuggcuaugc

SEQ ID NO: 380443 - RNA, 19 nt, Homo sapiens
  misc_RNA (1)...(19): siRNA sense strand
gccacgguauggauugaug

SEQ ID NO: 380444 - RNA, 19 nt, Homo sapiens
  misc_RNA (1)...(19): siRNA sense strand
aaucugcccauucuucaaa

SEQ ID NO: 380445 - RNA, 19 nt, Homo sapiens
  misc_RNA (1)...(19): siRNA sense strand
gggcuggauuuggaguauu

SEQ ID NO: 380446 - RNA, 19 nt, Homo sapiens
  misc_RNA (1)...(19): siRNA sense strand
uacguuggcuucuacuaca

SEQ ID NO: 380447 - RNA, 19 nt, Homo sapiens
  misc_RNA (1)...(19): siRNA sense strand
guacguuggcuucuacuac

SEQ ID NO: 380448 - RNA, 19 nt, Homo sapiens
  misc_RNA (1)...(19): siRNA sense strand
gcaucgcccuguccuccau

SEQ ID NO: 380449 - RNA, 19 nt, Homo sapiens
  misc_RNA (1)...(19): siRNA sense strand
gaaaggugguguggaucac

SEQ ID NO: 380450 - RNA, 19 nt, Homo sapiens
  misc_RNA (1)...(19): siRNA sense strand
cagcgggauucaugacauc

SEQ ID NO: 380451 - RNA, 19 nt, Homo sapiens
  misc_RNA (1)...(19): siRNA sense strand
gggugaagacaucaggaaa

SEQ ID NO: 380452 - RNA, 19 nt, Homo sapiens
  misc_RNA (1)...(19): siRNA sense strand
agacuggccuauggcauca

SEQ ID NO: 380453 - RNA, 19 nt, Homo sapiens
  misc_RNA (1)...(19): siRNA sense strand
gguggaauuuacgucuuga

SEQ ID NO: 380454 - RNA, 19 nt, Homo sapiens
  misc_RNA (1)...(19): siRNA sense strand
gggcugccaccguuuggaa

SEQ ID NO: 380455 - RNA, 19 nt, Homo sapiens
  misc_RNA (1)...(19): siRNA sense strand
gggccuggcagaugacuuc

SEQ ID NO: 380456 - RNA, 19 nt, Homo sapiens
  misc_RNA (1)...(19): siRNA sense strand
ggagcuggccuaguguuca

SEQ ID NO: 380457 - RNA, 19 nt, Homo sapiens
  misc_RNA (1)...(19): siRNA sense strand
gaaggagcuggccuagugu

SEQ ID NO: 380458 - RNA, 19 nt, Homo sapiens
  misc_RNA (1)...(19): siRNA sense strand
ggugaagacaucaggaaag

SEQ ID NO: 380459 - RNA, 19 nt, Homo sapiens
  misc_RNA (1)...(19): siRNA sense strand
gcaaccacaccaaguacuc

SEQ ID NO: 380460 - RNA, 19 nt, Homo sapiens
  misc_RNA (1)...(19): siRNA sense strand
ccaucggaguuuccugguu

SEQ ID NO: 380461 - RNA, 19 nt, Homo sapiens
  misc_RNA (1)...(19): siRNA sense strand
cuucagcacuuuccuucuc

SEQ ID NO: 380462 - RNA, 19 nt, Homo sapiens
  misc_RNA (1)...(19): siRNA sense strand
ggccauuucuacccugucu

SEQ ID NO: 380463 - RNA, 19 nt, Homo sapiens
  misc_RNA (1)...(19): siRNA sense strand
gccuaguguucauccugua

SEQ ID NO: 380464 - RNA, 19 nt, Homo sapiens
  misc_RNA (1)...(19): siRNA sense strand
gaccagcagcaucaacugu

SEQ ID NO: 380465 - RNA, 19 nt, Homo sapiens
  misc_RNA (1)...(19): siRNA sense strand
ucuacgucaucuauaaguu

SEQ ID NO: 380466 - RNA, 19 nt, Homo sapiens
  misc_RNA (1)...(19): siRNA sense strand
gcccuguucugcauaacca

SEQ ID NO: 380467 - RNA, 19 nt, Homo sapiens
  misc_RNA (1)...(19): siRNA sense strand
ggcguuggcuaugcuguca

SEQ ID NO: 380468 - RNA, 19 nt, Homo sapiens
  misc_RNA (1)...(19): siRNA sense strand
ucuucuccauccuugguua

SEQ ID NO: 380469 - RNA, 19 nt, Homo sapiens
  misc_RNA (1)...(19): siRNA sense strand
caguggaccuggccaacgu

SEQ ID NO: 380470 - RNA, 19 nt, Homo sapiens
  misc_RNA (1)...(19): siRNA sense strand
cuacgucaucuauaaguuc

SEQ ID NO: 380471 - RNA, 19 nt, Homo sapiens
  misc_RNA (1)...(19): siRNA sense strand
ggucagcaucaucaacuuc

SEQ ID NO: 380472 - RNA, 19 nt, Homo sapiens
  misc_RNA (1)...(19): siRNA sense strand
uuuauggaguggacagguu

SEQ ID NO: 380473 - RNA, 19 nt, Homo sapiens
  misc_RNA (1)...(19): siRNA sense strand
cuacuacaacgucaucauc

SEQ ID NO: 380474 - RNA, 19 nt, Homo sapiens
  misc_RNA (1)...(19): siRNA sense strand
gauuuggaguauugauugc

SEQ ID NO: 380475 - RNA, 19 nt, Homo sapiens
  misc_RNA (1)...(19): siRNA sense strand
gcucuugcucugucugaug

SEQ ID NO: 380476 - RNA, 19 nt, Homo sapiens
  misc_RNA (1)...(19): siRNA sense strand
ggaguauugauugcauuug

SEQ ID NO: 380477 - RNA, 19 nt, Homo sapiens
  misc_RNA (1)...(19): siRNA sense strand
cggagcugcugguggugaa

SEQ ID NO: 380478 - RNA, 19 nt, Homo sapiens
  misc_RNA (1)...(19): siRNA sense strand
ugaugccgcaacucagaua

SEQ ID NO: 380479 - RNA, 19 nt, Homo sapiens
  misc_RNA (1)...(19): siRNA sense strand
ucucuggguucgccaucuu

SEQ ID NO: 380480 - RNA, 19 nt, Homo sapiens
  misc_RNA (1)...(19): siRNA sense strand
uggaaaaucugcccauucu

SEQ ID NO: 380481 - RNA, 19 nt, Homo sapiens
  misc_RNA (1)...(19): siRNA sense strand
gauugcauuugccaguuac

SEQ ID NO: 380482 - RNA, 19 nt, Homo sapiens
  misc_RNA (1)...(19): siRNA sense strand
gggcaucggugcuuaauuu

SEQ ID NO: 380483 - RNA, 19 nt, Homo sapiens
  misc_RNA (1)...(19): siRNA sense strand
gcagauacuugagccauug

SEQ ID NO: 380484 - RNA, 19 nt, Homo sapiens
  misc_RNA (1)...(19): siRNA sense strand
uaacugcagccaacuauuu

SEQ ID NO: 380485 - RNA, 19 nt, Homo sapiens
  misc_RNA (1)...(19): siRNA sense strand
gaaagccuaugccacuguu

SEQ ID NO: 380486 - RNA, 19 nt, Homo sapiens
  misc_RNA (1)...(19): siRNA sense strand
ugauaaacauccauucaga

SEQ ID NO: 380487 - RNA, 19 nt, Homo sapiens
  misc_RNA (1)...(19): siRNA sense strand
ccauucagaucauauccua

SEQ ID NO: 380488 - RNA, 19 nt, Homo sapiens
  misc_RNA (1)...(19): siRNA sense strand
ugaagaguauccaaaguuc

SEQ ID NO: 380489 - RNA, 19 nt, Homo sapiens
  misc_RNA (1)...(19): siRNA sense strand
guacaauggcgauuauguu

SEQ ID NO: 380490 - RNA, 19 nt, Homo sapiens
  misc_RNA (1)...(19): siRNA sense strand
aaacauccauucagaucau

SEQ ID NO: 380491 - RNA, 19 nt, Homo sapiens
  misc_RNA (1)...(19): siRNA sense strand
ccggaaauuugaagaguau

SEQ ID NO: 380492 - RNA, 19 nt, Homo sapiens
  misc_RNA (1)...(19): siRNA sense strand
uguaacggcuauuugcaaa

SEQ ID NO: 380493 - RNA, 19 nt, Homo sapiens
  misc_RNA (1)...(19): siRNA sense strand
gguaacagauccccguuuu

SEQ ID NO: 380494 - RNA, 19 nt, Homo sapiens
  misc_RNA (1)...(19): siRNA sense strand
caauggcgauuauguucug

SEQ ID NO: 380495 - RNA, 19 nt, Homo sapiens
  misc_RNA (1)...(19): siRNA sense strand
cuacgggcaucggugcuua

SEQ ID NO: 380496 - RNA, 19 nt, Homo sapiens
  misc_RNA (1)...(19): siRNA sense strand
gagccauugugcaguguau

SEQ ID NO: 380497 - RNA, 19 nt, Homo sapiens
  misc_RNA (1)...(19): siRNA sense strand
gcgauuauguucuguaccu

SEQ ID NO: 380498 - RNA, 19 nt, Homo sapiens
  misc_RNA (1)...(19): siRNA sense strand
gauaaacauccauucagau

SEQ ID NO: 380499 - RNA, 19 nt, Homo sapiens
  misc_RNA (1)...(19): siRNA sense strand
ccauguuccucguccacua

SEQ ID NO: 380500 - RNA, 19 nt, Homo sapiens
  misc_RNA (1)...(19): siRNA sense strand
uugcaaagcagauacuuga

SEQ ID NO: 380501 - RNA, 19 nt, Homo sapiens
  misc_RNA (1)...(19): siRNA sense strand
gaagaguauccaaaguuca

SEQ ID NO: 380502 - RNA, 19 nt, Homo sapiens
  misc_RNA (1)...(19): siRNA sense strand
aggagauacuggauacaaa

SEQ ID NO: 380503 - RNA, 19 nt, Homo sapiens
  misc_RNA (1)...(19): siRNA sense strand
ggaaagccuaugccacugu

SEQ ID NO: 380504 - RNA, 19 nt, Homo sapiens
  misc_RNA (1)...(19): siRNA sense strand
agugguaccuccggaaauu

SEQ ID NO: 380505 - RNA, 19 nt, Homo sapiens
  misc_RNA (1)...(19): siRNA sense strand
gguuuuggcuugugguuaa

SEQ ID NO: 380506 - RNA, 19 nt, Homo sapiens
  misc_RNA (1)...(19): siRNA sense strand
ggcaucggugcuuaauuua

SEQ ID NO: 380507 - RNA, 19 nt, Homo sapiens
  misc_RNA (1)...(19): siRNA sense strand
gagcaaaagagcaucauga

SEQ ID NO: 380508 - RNA, 19 nt, Homo sapiens
  misc_RNA (1)...(19): siRNA sense strand
gcuauuugcaaagcagaua

SEQ ID NO: 380509 - RNA, 19 nt, Homo sapiens
  misc_RNA (1)...(19): siRNA sense strand
uccggaaauuugaagagua

SEQ ID NO: 380510 - RNA, 19 nt, Homo sapiens
  misc_RNA (1)...(19): siRNA sense strand
guaccuguaacggcuauuu

SEQ ID NO: 380511 - RNA, 19 nt, Homo sapiens
  misc_RNA (1)...(19): siRNA sense strand
aagagcaucaugaguggua

SEQ ID NO: 380512 - RNA, 19 nt, Homo sapiens
  misc_RNA (1)...(19): siRNA sense strand
guugauaaacauccauuca

SEQ ID NO: 380513 - RNA, 19 nt, Homo sapiens
  misc_RNA (1)...(19): siRNA sense strand
gcugaugacuggguaacag

SEQ ID NO: 380514 - RNA, 19 nt, Homo sapiens
  misc_RNA (1)...(19): siRNA sense strand
uaacggcuauuugcaaagc

SEQ ID NO: 380515 - RNA, 19 nt, Homo sapiens
  misc_RNA (1)...(19): siRNA sense strand
ccuaaggaaucucagaaaa

SEQ ID NO: 380516 - RNA, 19 nt, Homo sapiens
  misc_RNA (1)...(19): siRNA sense strand
ggagauacuggauacaaaa

SEQ ID NO: 380517 - RNA, 19 nt, Homo sapiens
  misc_RNA (1)...(19): siRNA sense strand
auuauguucuguaccugua

SEQ ID NO: 380518 - RNA, 19 nt, Homo sapiens
  misc_RNA (1)...(19): siRNA sense strand
caggagauacuggauacaa

SEQ ID NO: 380519 - RNA, 19 nt, Homo sapiens
  misc_RNA (1)...(19): siRNA sense strand
uaaacauccauucagauca

SEQ ID NO: 380520 - RNA, 19 nt, Homo sapiens
  misc_RNA (1)...(19): siRNA sense strand
uacaauggcgauuauguuc

SEQ ID NO: 380521 - RNA, 19 nt, Homo sapiens
  misc_RNA (1)...(19): siRNA sense strand
gcauccuccuggccauguu

SEQ ID NO: 380522 - RNA, 19 nt, Homo sapiens
  misc_RNA (1)...(19): siRNA sense strand
uugaagaguauccaaaguu

SEQ ID NO: 380523 - RNA, 19 nt, Homo sapiens
  misc_RNA (1)...(19): siRNA sense strand
guaacugcagccaacuauu

SEQ ID NO: 380524 - RNA, 19 nt, Homo sapiens
  misc_RNA (1)...(19): siRNA sense strand
gauacuggauacaaaauac

SEQ ID NO: 380525 - RNA, 19 nt, Homo sapiens
  misc_RNA (1)...(19): siRNA sense strand
auaaacauccauucagauc

SEQ ID NO: 380526 - RNA, 19 nt, Homo sapiens
  misc_RNA (1)...(19): siRNA sense strand
caucggugcuuaauuuacc

SEQ ID NO: 380527 - RNA, 19 nt, Homo sapiens
  misc_RNA (1)...(19): siRNA sense strand
acagauccccguuuucuaa

SEQ ID NO: 380528 - RNA, 19 nt, Homo sapiens
  misc_RNA (1)...(19): siRNA sense strand
cccugccgcucuaccagua

SEQ ID NO: 380529 - RNA, 19 nt, Homo sapiens
  misc_RNA (1)...(19): siRNA sense strand
gaaauuugaagaguaucca

SEQ ID NO: 380530 - RNA, 19 nt, Homo sapiens
  misc_RNA (1)...(19): siRNA sense strand
ugagugguaccuccggaaa

SEQ ID NO: 380531 - RNA, 19 nt, Homo sapiens
  misc_RNA (1)...(19): siRNA sense strand
gaguauccaaaguucagaa

SEQ ID NO: 380532 - RNA, 19 nt, Homo sapiens
  misc_RNA (1)...(19): siRNA sense strand
ggaacaauccgaacagcua

SEQ ID NO: 380533 - RNA, 19 nt, Homo sapiens
  misc_RNA (1)...(19): siRNA sense strand
ggauguaccugcagaaagg

SEQ ID NO: 380534 - RNA, 19 nt, Homo sapiens
  misc_RNA (1)...(19): siRNA sense strand
gagcagguguccccacuua

SEQ ID NO: 380535 - RNA, 19 nt, Homo sapiens
  misc_RNA (1)...(19): siRNA sense strand
gaagaugaccuggcaaaca

SEQ ID NO: 380536 - RNA, 19 nt, Homo sapiens
  misc_RNA (1)...(19): siRNA sense strand
uggcaaacaucaaccaaug

SEQ ID NO: 380537 - RNA, 19 nt, Homo sapiens
  misc_RNA (1)...(19): siRNA sense strand
gcaugucccuguccuccuu

SEQ ID NO: 380538 - RNA, 19 nt, Homo sapiens
  misc_RNA (1)...(19): siRNA sense strand
gaacaauccgaacagcuau

SEQ ID NO: 380539 - RNA, 19 nt, Homo sapiens
  misc_RNA (1)...(19): siRNA sense strand
ugccuaagcuguaucugaa

SEQ ID NO: 380540 - RNA, 19 nt, Homo sapiens
  misc_RNA (1)...(19): siRNA sense strand
aagaugaccuggcaaacau

SEQ ID NO: 380541 - RNA, 19 nt, Homo sapiens
  misc_RNA (1)...(19): siRNA sense strand
cgggaaagcaggaagauga

SEQ ID NO: 380542 - RNA, 19 nt, Homo sapiens
  misc_RNA (1)...(19): siRNA sense strand
gaacgugucccagguacug

SEQ ID NO: 380543 - RNA, 19 nt, Homo sapiens
  misc_RNA (1)...(19): siRNA sense strand
ucucugggcugccggaaga

SEQ ID NO: 380544 - RNA, 19 nt, Homo sapiens
  misc_RNA (1)...(19): siRNA sense strand
ucaaggaacagcaggauuc

SEQ ID NO: 380545 - RNA, 19 nt, Homo sapiens
  misc_RNA (1)...(19): siRNA sense strand
gauuucccaucaaagaaga

SEQ ID NO: 380546 - RNA, 19 nt, Homo sapiens
  misc_RNA (1)...(19): siRNA sense strand
ccacccacuuugaauggaa

SEQ ID NO: 380547 - RNA, 19 nt, Homo sapiens
  misc_RNA (1)...(19): siRNA sense strand
agauccagguggcucauuu

SEQ ID NO: 380548 - RNA, 19 nt, Homo sapiens
  misc_RNA (1)...(19): siRNA sense strand
cgcgggagcucaaggaaca

SEQ ID NO: 380549 - RNA, 19 nt, Homo sapiens
  misc_RNA (1)...(19): siRNA sense strand
gagcuuugugguccuugua

SEQ ID NO: 380550 - RNA, 19 nt, Homo sapiens
  misc_RNA (1)...(19): siRNA sense strand
ccucaacgccauccacuuc

SEQ ID NO: 380551 - RNA, 19 nt, Homo sapiens
  misc_RNA (1)...(19): siRNA sense strand
uaagaacaacaugagcuuu

SEQ ID NO: 380552 - RNA, 19 nt, Homo sapiens
  misc_RNA (1)...(19): siRNA sense strand
guacuggccaaccugaguu

SEQ ID NO: 380553 - RNA, 19 nt, Homo sapiens
  misc_RNA (1)...(19): siRNA sense strand
aagaacaacaugagcuuug

SEQ ID NO: 380554 - RNA, 19 nt, Homo sapiens
  misc_RNA (1)...(19): siRNA sense strand
guaccugcagaaaggauuu

SEQ ID NO: 380555 - RNA, 19 nt, Homo sapiens
  misc_RNA (1)...(19): siRNA sense strand
ggauuucccaucaaagaag

SEQ ID NO: 380556 - RNA, 19 nt, Homo sapiens
  misc_RNA (1)...(19): siRNA sense strand
guacccacccacuuugaau

SEQ ID NO: 380557 - RNA, 19 nt, Homo sapiens
  misc_RNA (1)...(19): siRNA sense strand
ccaagguccggcugccuaa

SEQ ID NO: 380558 - RNA, 19 nt, Homo sapiens
  misc_RNA (1)...(19): siRNA sense strand
aaggauuucccaucaaaga

SEQ ID NO: 380559 - RNA, 19 nt, Homo sapiens
  misc_RNA (1)...(19): siRNA sense strand
ccaccagcauugccauguc

SEQ ID NO: 380560 - RNA, 19 nt, Homo sapiens
  misc_RNA (1)...(19): siRNA sense strand
caggguuucuggaggaaca

SEQ ID NO: 380561 - RNA, 19 nt, Homo sapiens
  misc_RNA (1)...(19): siRNA sense strand
acaauccgaacagcuauuu

SEQ ID NO: 380562 - RNA, 19 nt, Homo sapiens
  misc_RNA (1)...(19): siRNA sense strand
aaguuugacccgagccuua

SEQ ID NO: 380563 - RNA, 19 nt, Homo sapiens
  misc_RNA (1)...(19): siRNA sense strand
cagcugguccugccugcaa

SEQ ID NO: 380564 - RNA, 19 nt, Homo sapiens
  misc_RNA (1)...(19): siRNA sense strand
uaucugaaacaccaaaugg

SEQ ID NO: 380565 - RNA, 19 nt, Homo sapiens
  misc_RNA (1)...(19): siRNA sense strand
ccauccacuuccaggguuu

SEQ ID NO: 380566 - RNA, 19 nt, Homo sapiens
  misc_RNA (1)...(19): siRNA sense strand
uuaagaacaacaugagcuu

SEQ ID NO: 380567 - RNA, 19 nt, Homo sapiens
  misc_RNA (1)...(19): siRNA sense strand
ccacaggccuuccccucuu

SEQ ID NO: 380568 - RNA, 19 nt, Homo sapiens
  misc_RNA (1)...(19): siRNA sense strand
ccuaagcuguaucugaaac

SEQ ID NO: 380569 - RNA, 19 nt, Homo sapiens
  misc_RNA (1)...(19): siRNA sense strand
ccuuguacccacccacuuu

SEQ ID NO: 380570 - RNA, 19 nt, Homo sapiens
  misc_RNA (1)...(19): siRNA sense strand
gcucauuuccccuuuaaga

SEQ ID NO: 380571 - RNA, 19 nt, Homo sapiens
  misc_RNA (1)...(19): siRNA sense strand
ggcccugacuuaaaacuug

SEQ ID NO: 380572 - RNA, 19 nt, Homo sapiens
  misc_RNA (1)...(19): siRNA sense strand
gugcucagaaccacacguu

SEQ ID NO: 380573 - RNA, 19 nt, Homo sapiens
  misc_RNA (1)...(19): siRNA sense strand
gauccagguggcucauuuc

SEQ ID NO: 380574 - RNA, 19 nt, Homo sapiens
  misc_RNA (1)...(19): siRNA sense strand
gcauggagaugaucaguga

SEQ ID NO: 380575 - RNA, 19 nt, Homo sapiens
  misc_RNA (1)...(19): siRNA sense strand
gaacaccaccauuggguua

SEQ ID NO: 380576 - RNA, 19 nt, Homo sapiens
  misc_RNA (1)...(19): siRNA sense strand
ucacugcggugcccaagaa

SEQ ID NO: 380577 - RNA, 19 nt, Homo sapiens
  misc_RNA (1)...(19): siRNA sense strand
agagccaccugaacaagua

SEQ ID NO: 380578 - RNA, 19 nt, Homo sapiens
  misc_RNA (1)...(19): siRNA sense strand
uaauaaugcuugucuuggu

SEQ ID NO: 380579 - RNA, 19 nt, Homo sapiens
  misc_RNA (1)...(19): siRNA sense strand
uguuugccaucaagaaaua

SEQ ID NO: 380580 - RNA, 19 nt, Homo sapiens
  misc_RNA (1)...(19): siRNA sense strand
ggacgagggcgauuucuac

SEQ ID NO: 380581 - RNA, 19 nt, Homo sapiens
  misc_RNA (1)...(19): siRNA sense strand
uaacuguguuugccaucaa

SEQ ID NO: 380582 - RNA, 19 nt, Homo sapiens
  misc_RNA (1)...(19): siRNA sense strand
cgagggcgauuucuacuac

SEQ ID NO: 380583 - RNA, 19 nt, Homo sapiens
  misc_RNA (1)...(19): siRNA sense strand
auacguggcuuuccugaag

SEQ ID NO: 380584 - RNA, 19 nt, Homo sapiens
  misc_RNA (1)...(19): siRNA sense strand
gacgagagccaccugaaca

SEQ ID NO: 380585 - RNA, 19 nt, Homo sapiens
  misc_RNA (1)...(19): siRNA sense strand
ggagggcacauucaacauc

SEQ ID NO: 380586 - RNA, 19 nt, Homo sapiens
  misc_RNA (1)...(19): siRNA sense strand
uagggaaccugaccaucug

SEQ ID NO: 380587 - RNA, 19 nt, Homo sapiens
  misc_RNA (1)...(19): siRNA sense strand
ucaagaaauacguggcuuu

SEQ ID NO: 380588 - RNA, 19 nt, Homo sapiens
  misc_RNA (1)...(19): siRNA sense strand
caacaucgacauccucaac

SEQ ID NO: 380589 - RNA, 19 nt, Homo sapiens
  misc_RNA (1)...(19): siRNA sense strand
ccacgcacuucgaccuaug

SEQ ID NO: 380590 - RNA, 19 nt, Homo sapiens
  misc_RNA (1)...(19): siRNA sense strand
ccuaauaaugcuugucuug

SEQ ID NO: 380591 - RNA, 19 nt, Homo sapiens
  misc_RNA (1)...(19): siRNA sense strand
ggagaugaucagugacuuc

SEQ ID NO: 380592 - RNA, 19 nt, Homo sapiens
  misc_RNA (1)...(19): siRNA sense strand
gcguggacguggacaugga

SEQ ID NO: 380593 - RNA, 19 nt, Homo sapiens
  misc_RNA (1)...(19): siRNA sense strand
gagagccaccugaacaagu

SEQ ID NO: 380594 - RNA, 19 nt, Homo sapiens
  misc_RNA (1)...(19): siRNA sense strand
gggaggccuucaccuacga

SEQ ID NO: 380595 - RNA, 19 nt, Homo sapiens
  misc_RNA (1)...(19): siRNA sense strand
gucuuggucuuguuugguu

SEQ ID NO: 380596 - RNA, 19 nt, Homo sapiens
  misc_RNA (1)...(19): siRNA sense strand
gccaccguguccacuacua

SEQ ID NO: 380597 - RNA, 19 nt, Homo sapiens
  misc_RNA (1)...(19): siRNA sense strand
gcacauucaacaucgacau

SEQ ID NO: 380598 - RNA, 19 nt, Homo sapiens
  misc_RNA (1)...(19): siRNA sense strand
accauuggguuaacugugu

SEQ ID NO: 380599 - RNA, 19 nt, Homo sapiens
  misc_RNA (1)...(19): siRNA sense strand
gagaugaucagugacuucu

SEQ ID NO: 380600 - RNA, 19 nt, Homo sapiens
  misc_RNA (1)...(19): siRNA sense strand
ccuaugauccuuuuccuaa

SEQ ID NO: 380601 - RNA, 19 nt, Homo sapiens
  misc_RNA (1)...(19): siRNA sense strand
ccauuggguuaacuguguu

SEQ ID NO: 380602 - RNA, 19 nt, Homo sapiens
  misc_RNA (1)...(19): siRNA sense strand
ugaggaagcugagguucac

SEQ ID NO: 380603 - RNA, 19 nt, Homo sapiens
  misc_RNA (1)...(19): siRNA sense strand
cuccagaacaccaccauug

SEQ ID NO: 380604 - RNA, 19 nt, Homo sapiens
  misc_RNA (1)...(19): siRNA sense strand
gccacgcacuucgaccuau

SEQ ID NO: 380605 - RNA, 19 nt, Homo sapiens
  misc_RNA (1)...(19): siRNA sense strand
uuagggaaccugaccaucu

SEQ ID NO: 380606 - RNA, 19 nt, Homo sapiens
  misc_RNA (1)...(19): siRNA sense strand
gaagagaaaucacguggaa

SEQ ID NO: 380607 - RNA, 19 nt, Homo sapiens
  misc_RNA (1)...(19): siRNA sense strand
ggaagcacuuuguacagua

SEQ ID NO: 380608 - RNA, 19 nt, Homo sapiens
  misc_RNA (1)...(19): siRNA sense strand
gaagcacuuuguacaguau

SEQ ID NO: 380609 - RNA, 19 nt, Homo sapiens
  misc_RNA (1)...(19): siRNA sense strand
ggcagguccuccaucuuua

SEQ ID NO: 380610 - RNA, 19 nt, Homo sapiens
  misc_RNA (1)...(19): siRNA sense strand
gaggagggaagcaggauaa

SEQ ID NO: 380611 - RNA, 19 nt, Homo sapiens
  misc_RNA (1)...(19): siRNA sense strand
gcagguccuccaucuuuaa

SEQ ID NO: 380612 - RNA, 19 nt, Homo sapiens
  misc_RNA (1)...(19): siRNA sense strand
gguuucaucgccagauuua

SEQ ID NO: 380613 - RNA, 19 nt, Homo sapiens
  misc_RNA (1)...(19): siRNA sense strand
ggaagucgugaacaaacaa

SEQ ID NO: 380614 - RNA, 19 nt, Homo sapiens
  misc_RNA (1)...(19): siRNA sense strand
aaaggcagguccuccaucu

SEQ ID NO: 380615 - RNA, 19 nt, Homo sapiens
  misc_RNA (1)...(19): siRNA sense strand
gagggaagcaggauaacgu

SEQ ID NO: 380616 - RNA, 19 nt, Homo sapiens
  misc_RNA (1)...(19): siRNA sense strand
aggcagguccuccaucuuu

SEQ ID NO: 380617 - RNA, 19 nt, Homo sapiens
  misc_RNA (1)...(19): siRNA sense strand
gguccuccaucuuuaaggu

SEQ ID NO: 380618 - RNA, 19 nt, Homo sapiens
  misc_RNA (1)...(19): siRNA sense strand
ggcuggaagucgugaacaa

SEQ ID NO: 380619 - RNA, 19 nt, Homo sapiens
  misc_RNA (1)...(19): siRNA sense strand
ucgagauccuggaagagaa

SEQ ID NO: 380620 - RNA, 19 nt, Homo sapiens
  misc_RNA (1)...(19): siRNA sense strand
gguggaggcggaugcagaa

SEQ ID NO: 380621 - RNA, 19 nt, Homo sapiens
  misc_RNA (1)...(19): siRNA sense strand
uggaagcacuuuguacagu

SEQ ID NO: 380622 - RNA, 19 nt, Homo sapiens
  misc_RNA (1)...(19): siRNA sense strand
gcuggaagucgugaacaaa

SEQ ID NO: 380623 - RNA, 19 nt, Homo sapiens
  misc_RNA (1)...(19): siRNA sense strand
uggaagucgugaacaaaca

SEQ ID NO: 380624 - RNA, 19 nt, Homo sapiens
  misc_RNA (1)...(19): siRNA sense strand
cgagauccuggaagagaaa

SEQ ID NO: 380625 - RNA, 19 nt, Homo sapiens
  misc_RNA (1)...(19): siRNA sense strand
gauccuggaagagaaauca

SEQ ID NO: 380626 - RNA, 19 nt, Homo sapiens
  misc_RNA (1)...(19): siRNA sense strand
ucacguggaagcacuuugu

SEQ ID NO: 380627 - RNA, 19 nt, Homo sapiens
  misc_RNA (1)...(19): siRNA sense strand
gaagucgugaacaaacaau

SEQ ID NO: 380628 - RNA, 19 nt, Homo sapiens
  misc_RNA (1)...(19): siRNA sense strand
agcacuuuguacaguauua

SEQ ID NO: 380629 - RNA, 19 nt, Homo sapiens
  misc_RNA (1)...(19): siRNA sense strand
ccugggaugacgaggauuu

SEQ ID NO: 380630 - RNA, 19 nt, Homo sapiens
  misc_RNA (1)...(19): siRNA sense strand
ccgguuucaucgccagauu

SEQ ID NO: 380631 - RNA, 19 nt, Homo sapiens
  misc_RNA (1)...(19): siRNA sense strand
gagcugauauuuacucuuu

SEQ ID NO: 380632 - RNA, 19 nt, Homo sapiens
  misc_RNA (1)...(19): siRNA sense strand
ggacaagacucuggaccua

SEQ ID NO: 380633 - RNA, 19 nt, Homo sapiens
  misc_RNA (1)...(19): siRNA sense strand
gaggagcgcuggcagaaug

SEQ ID NO: 380634 - RNA, 19 nt, Homo sapiens
  misc_RNA (1)...(19): siRNA sense strand
ugagggagcuccuagaaga

SEQ ID NO: 380635 - RNA, 19 nt, Homo sapiens
  misc_RNA (1)...(19): siRNA sense strand
caccagagcucuuggacaa

SEQ ID NO: 380636 - RNA, 19 nt, Homo sapiens
  misc_RNA (1)...(19): siRNA sense strand
gcagaauggccaauauaaa

SEQ ID NO: 380637 - RNA, 19 nt, Homo sapiens
  misc_RNA (1)...(19): siRNA sense strand
gugagucccuccacuguga

SEQ ID NO: 380638 - RNA, 19 nt, Homo sapiens
  misc_RNA (1)...(19): siRNA sense strand
cgaccacauuguccgauuu

SEQ ID NO: 380639 - RNA, 19 nt, Homo sapiens
  misc_RNA (1)...(19): siRNA sense strand
gggcacagguggaaaugca

SEQ ID NO: 380640 - RNA, 19 nt, Homo sapiens
  misc_RNA (1)...(19): siRNA sense strand
ggcagaauggccaauauaa

SEQ ID NO: 380641 - RNA, 19 nt, Homo sapiens
  misc_RNA (1)...(19): siRNA sense strand
gaccacauuguccgauuua

SEQ ID NO: 380642 - RNA, 19 nt, Homo sapiens
  misc_RNA (1)...(19): siRNA sense strand
ugggagagcugcuagauac

SEQ ID NO: 380643 - RNA, 19 nt, Homo sapiens
  misc_RNA (1)...(19): siRNA sense strand
cagccugccuguacccuuu

SEQ ID NO: 380644 - RNA, 19 nt, Homo sapiens
  misc_RNA (1)...(19): siRNA sense strand
ccgacgagcugauauuuac

SEQ ID NO: 380645 - RNA, 19 nt, Homo sapiens
  misc_RNA (1)...(19): siRNA sense strand
gcaaggaugccgagacagu

SEQ ID NO: 380646 - RNA, 19 nt, Homo sapiens
  misc_RNA (1)...(19): siRNA sense strand
gcacugacuucugcaaugc

SEQ ID NO: 380647 - RNA, 19 nt, Homo sapiens
  misc_RNA (1)...(19): siRNA sense strand
gaggaggcgucccuacauc

SEQ ID NO: 380648 - RNA, 19 nt, Homo sapiens
  misc_RNA (1)...(19): siRNA sense strand
gcuauccgcugccucuaca

SEQ ID NO: 380649 - RNA, 19 nt, Homo sapiens
  misc_RNA (1)...(19): siRNA sense strand
cgaggucuguggcucaguu

SEQ ID NO: 380650 - RNA, 19 nt, Homo sapiens
  misc_RNA (1)...(19): siRNA sense strand
ccgggcagcugcaaggaaa

SEQ ID NO: 380651 - RNA, 19 nt, Homo sapiens
  misc_RNA (1)...(19): siRNA sense strand
ucuggaaccugacccaaga

SEQ ID NO: 380652 - RNA, 19 nt, Homo sapiens
  misc_RNA (1)...(19): siRNA sense strand
ggcacugacuucugcaaug

SEQ ID NO: 380653 - RNA, 19 nt, Homo sapiens
  misc_RNA (1)...(19): siRNA sense strand
ugagagagcauuguacgaa

SEQ ID NO: 380654 - RNA, 19 nt, Homo sapiens
  misc_RNA (1)...(19): siRNA sense strand
gaaaacugguugccaucaa

SEQ ID NO: 380655 - RNA, 19 nt, Homo sapiens
  misc_RNA (1)...(19): siRNA sense strand
gcugauauuuacucuuugg

SEQ ID NO: 380656 - RNA, 19 nt, Homo sapiens
  misc_RNA (1)...(19): siRNA sense strand
cagaauggccaauauaaac

SEQ ID NO: 380657 - RNA, 19 nt, Homo sapiens
  misc_RNA (1)...(19): siRNA sense strand
cacauuguccgauuuauca

SEQ ID NO: 380658 - RNA, 19 nt, Homo sapiens
  misc_RNA (1)...(19): siRNA sense strand
acaagacucuggaccuaca

SEQ ID NO: 380659 - RNA, 19 nt, Homo sapiens
  misc_RNA (1)...(19): siRNA sense strand
gcaauaccccuaccucuga

SEQ ID NO: 380660 - RNA, 19 nt, Homo sapiens
  misc_RNA (1)...(19): siRNA sense strand
gagaggaggcgucccuaca

SEQ ID NO: 380661 - RNA, 19 nt, Homo sapiens
  misc_RNA (1)...(19): siRNA sense strand
gcugagggagcuccuagaa

SEQ ID NO: 380662 - RNA, 19 nt, Homo sapiens
  misc_RNA (1)...(19): siRNA sense strand
uacccuuucuccuguguaa

SEQ ID NO: 380663 - RNA, 19 nt, Homo sapiens
  misc_RNA (1)...(19): siRNA sense strand
cugagccgcugcccagauu

SEQ ID NO: 380664 - RNA, 19 nt, Homo sapiens
  misc_RNA (1)...(19): siRNA sense strand
aggcagaacugggcaauac

SEQ ID NO: 380665 - RNA, 19 nt, Homo sapiens
  misc_RNA (1)...(19): siRNA sense strand
ccuuccaacuggccuauga

SEQ ID NO: 380666 - RNA, 19 nt, Homo sapiens
  misc_RNA (1)...(19): siRNA sense strand
cuacagcacgaccacauug

SEQ ID NO: 380667 - RNA, 19 nt, Homo sapiens
  misc_RNA (1)...(19): siRNA sense strand
gagccgcugcccagauuug

SEQ ID NO: 380668 - RNA, 19 nt, Homo sapiens
  misc_RNA (1)...(19): siRNA sense strand
ggaugcagacccagaagca

SEQ ID NO: 380669 - RNA, 19 nt, Homo sapiens
  misc_RNA (1)...(19): siRNA sense strand
aagcugagagagcauugua

SEQ ID NO: 380670 - RNA, 19 nt, Homo sapiens
  misc_RNA (1)...(19): siRNA sense strand
ccacuucagcguucagcaa

SEQ ID NO: 380671 - RNA, 19 nt, Homo sapiens
  misc_RNA (1)...(19): siRNA sense strand
ccacauuguccgauuuauc

SEQ ID NO: 380672 - RNA, 19 nt, Homo sapiens
  misc_RNA (1)...(19): siRNA sense strand
gagagcauuguacgaacuu

SEQ ID NO: 380673 - RNA, 19 nt, Homo sapiens
  misc_RNA (1)...(19): siRNA sense strand
gccaauauaaaccagguau

SEQ ID NO: 380674 - RNA, 19 nt, Homo sapiens
  misc_RNA (1)...(19): siRNA sense strand
aggcccagcugccaucaug

SEQ ID NO: 380675 - RNA, 19 nt, Homo sapiens
  misc_RNA (1)...(19): siRNA sense strand
gaauggccaauauaaacca

SEQ ID NO: 380676 - RNA, 19 nt, Homo sapiens
  misc_RNA (1)...(19): siRNA sense strand
gaggcagaacugggcaaua

SEQ ID NO: 380677 - RNA, 19 nt, Homo sapiens
  misc_RNA (1)...(19): siRNA sense strand
gguauugcccaccgagauc

SEQ ID NO: 380678 - RNA, 19 nt, Homo sapiens
  misc_RNA (1)...(19): siRNA sense strand
caagagagccaccccuuuc

SEQ ID NO: 380679 - RNA, 19 nt, Homo sapiens
  misc_RNA (1)...(19): siRNA sense strand
gaggucaugcagugguuug

SEQ ID NO: 380680 - RNA, 19 nt, Homo sapiens
  misc_RNA (1)...(19): siRNA sense strand
gccuggcauuucuccauga

SEQ ID NO: 380681 - RNA, 19 nt, Homo sapiens
  misc_RNA (1)...(19): siRNA sense strand
augcaaggaugccgagaca

SEQ ID NO: 380682 - RNA, 19 nt, Homo sapiens
  misc_RNA (1)...(19): siRNA sense strand
cccuaccucugaugagcua

SEQ ID NO: 380683 - RNA, 19 nt, Homo sapiens
  misc_RNA (1)...(19): siRNA sense strand
gggcuuugggcauuacuuc

SEQ ID NO: 380684 - RNA, 19 nt, Homo sapiens
  misc_RNA (1)...(19): siRNA sense strand
ggacaaagaugaugagagu

SEQ ID NO: 380685 - RNA, 19 nt, Homo sapiens
  misc_RNA (1)...(19): siRNA sense strand
gaacagggauauuguguca

SEQ ID NO: 380686 - RNA, 19 nt, Homo sapiens
  misc_RNA (1)...(19): siRNA sense strand
ugaaagagcugcaggaaau

SEQ ID NO: 380687 - RNA, 19 nt, Homo sapiens
  misc_RNA (1)...(19): siRNA sense strand
acagcaagcucaauuauaa

SEQ ID NO: 380688 - RNA, 19 nt, Homo sapiens
  misc_RNA (1)...(19): siRNA sense strand
aaaggaagguucugaauau

SEQ ID NO: 380689 - RNA, 19 nt, Homo sapiens
  misc_RNA (1)...(19): siRNA sense strand
ggaagguucugaauauaga

SEQ ID NO: 380690 - RNA, 19 nt, Homo sapiens
  misc_RNA (1)...(19): siRNA sense strand
gaaaguggauaaagcaaca

SEQ ID NO: 380691 - RNA, 19 nt, Homo sapiens
  misc_RNA (1)...(19): siRNA sense strand
gaugaugagagucuaauua

SEQ ID NO: 380692 - RNA, 19 nt, Homo sapiens
  misc_RNA (1)...(19): siRNA sense strand
gaguggaaccugucgauua

SEQ ID NO: 380693 - RNA, 19 nt, Homo sapiens
  misc_RNA (1)...(19): siRNA sense strand
aaaggaaaccauuguguua

SEQ ID NO: 380694 - RNA, 19 nt, Homo sapiens
  misc_RNA (1)...(19): siRNA sense strand
uaaaggaagguucugaaua

SEQ ID NO: 380695 - RNA, 19 nt, Homo sapiens
  misc_RNA (1)...(19): siRNA sense strand
ccacagaagucccugaaag

SEQ ID NO: 380696 - RNA, 19 nt, Homo sapiens
  misc_RNA (1)...(19): siRNA sense strand
ggaggaggaugacgaugau

SEQ ID NO: 380697 - RNA, 19 nt, Homo sapiens
  misc_RNA (1)...(19): siRNA sense strand
ggacagcaagcucaauuau

SEQ ID NO: 380698 - RNA, 19 nt, Homo sapiens
  misc_RNA (1)...(19): siRNA sense strand
gaugagagucuaauuaagu

SEQ ID NO: 380699 - RNA, 19 nt, Homo sapiens
  misc_RNA (1)...(19): siRNA sense strand
ggaaauggacaaagaugau

SEQ ID NO: 380700 - RNA, 19 nt, Homo sapiens
  misc_RNA (1)...(19): siRNA sense strand
aguggaaccugucgauuaa

SEQ ID NO: 380701 - RNA, 19 nt, Homo sapiens
  misc_RNA (1)...(19): siRNA sense strand
gacagcaagcucaauuaua

SEQ ID NO: 380702 - RNA, 19 nt, Homo sapiens
  misc_RNA (1)...(19): siRNA sense strand
gcacguaccacaacaaguc

SEQ ID NO: 380703 - RNA, 19 nt, Homo sapiens
  misc_RNA (1)...(19): siRNA sense strand
caaagaugaugagagucua

SEQ ID NO: 380704 - RNA, 19 nt, Homo sapiens
  misc_RNA (1)...(19): siRNA sense strand
aggaaaccauuguguuaaa

SEQ ID NO: 380705 - RNA, 19 nt, Homo sapiens
  misc_RNA (1)...(19): siRNA sense strand
gaaggaguggacagaauga

SEQ ID NO: 380706 - RNA, 19 nt, Homo sapiens
  misc_RNA (1)...(19): siRNA sense strand
ggaaaccauuguguuaaag

SEQ ID NO: 380707 - RNA, 19 nt, Homo sapiens
  misc_RNA (1)...(19): siRNA sense strand
gaaauggacaaagaugaug

SEQ ID NO: 380708 - RNA, 19 nt, Homo sapiens
  misc_RNA (1)...(19): siRNA sense strand
aaggaagguucugaauaua

SEQ ID NO: 380709 - RNA, 19 nt, Homo sapiens
  misc_RNA (1)...(19): siRNA sense strand
ccaaucaccauggaccuua

SEQ ID NO: 380710 - RNA, 19 nt, Homo sapiens
  misc_RNA (1)...(19): siRNA sense strand
ggaccuuacuggagaucug

SEQ ID NO: 380711 - RNA, 19 nt, Homo sapiens
  misc_RNA (1)...(19): siRNA sense strand
ugcaggaaauggacaaaga

SEQ ID NO: 380712 - RNA, 19 nt, Homo sapiens
  misc_RNA (1)...(19): siRNA sense strand
aaagugaacagggauauug

SEQ ID NO: 380713 - RNA, 19 nt, Homo sapiens
  misc_RNA (1)...(19): siRNA sense strand
aagaaggaguggacagaau

SEQ ID NO: 380714 - RNA, 19 nt, Homo sapiens
  misc_RNA (1)...(19): siRNA sense strand
aaaccauuguguuaaagga

SEQ ID NO: 380715 - RNA, 19 nt, Homo sapiens
  misc_RNA (1)...(19): siRNA sense strand
uggaaccugucgauuaaga

SEQ ID NO: 380716 - RNA, 19 nt, Homo sapiens
  misc_RNA (1)...(19): siRNA sense strand
cacaacaaguccuucuuca

SEQ ID NO: 380717 - RNA, 19 nt, Homo sapiens
  misc_RNA (1)...(19): siRNA sense strand
ccacaacaaguccuucuuc

SEQ ID NO: 380718 - RNA, 19 nt, Homo sapiens
  misc_RNA (1)...(19): siRNA sense strand
gcaggaaauggacaaagau

SEQ ID NO: 380719 - RNA, 19 nt, Homo sapiens
  misc_RNA (1)...(19): siRNA sense strand
gaaccugucgauuaagaag

SEQ ID NO: 380720 - RNA, 19 nt, Homo sapiens
  misc_RNA (1)...(19): siRNA sense strand
caccgacgaugacaagcaa

SEQ ID NO: 380721 - RNA, 19 nt, Homo sapiens
  misc_RNA (1)...(19): siRNA sense strand
gaaagagcugcaggaaaug

SEQ ID NO: 380722 - RNA, 19 nt, Homo sapiens
  misc_RNA (1)...(19): siRNA sense strand
cacagaagucccugaaaga

SEQ ID NO: 380723 - RNA, 19 nt, Homo sapiens
  misc_RNA (1)...(19): siRNA sense strand
caaagugaacagggauauu

SEQ ID NO: 380724 - RNA, 19 nt, Homo sapiens
  misc_RNA (1)...(19): siRNA sense strand
guuaaaggaagguucugaa

SEQ ID NO: 380725 - RNA, 19 nt, Homo sapiens
  misc_RNA (1)...(19): siRNA sense strand
ggccugaggaguaugaguu

SEQ ID NO: 380726 - RNA, 19 nt, Homo sapiens
  misc_RNA (1)...(19): siRNA sense strand
ggugaaaguggauaaagca

SEQ ID NO: 380727 - RNA, 19 nt, Homo sapiens
  misc_RNA (1)...(19): siRNA sense strand
ggaaccugucgauuaagaa

SEQ ID NO: 380728 - RNA, 19 nt, Homo sapiens
  misc_RNA (1)...(19): siRNA sense strand
ugaugagagucuaauuaag

SEQ ID NO: 380729 - RNA, 19 nt, Homo sapiens
  misc_RNA (1)...(19): siRNA sense strand
uaagaaggaguggacagaa

SEQ ID NO: 380730 - RNA, 19 nt, Homo sapiens
  misc_RNA (1)...(19): siRNA sense strand
gaaaccauuguguuaaagg

SEQ ID NO: 380731 - RNA, 19 nt, Homo sapiens
  misc_RNA (1)...(19): siRNA sense strand
aaagaugaugagagucuaa

SEQ ID NO: 380732 - RNA, 19 nt, Homo sapiens
  misc_RNA (1)...(19): siRNA sense strand
gggugaaaguggauaaagc

SEQ ID NO: 380733 - RNA, 19 nt, Homo sapiens
  misc_RNA (1)...(19): siRNA sense strand
aaggaaaccauuguguuaa

SEQ ID NO: 380734 - RNA, 19 nt, Homo sapiens
  misc_RNA (1)...(19): siRNA sense strand
uggaggaggaugacgauga

SEQ ID NO: 380735 - RNA, 19 nt, Homo sapiens
  misc_RNA (1)...(19): siRNA sense strand
ggaguggaaccugucgauu

SEQ ID NO: 380736 - RNA, 19 nt, Homo sapiens
  misc_RNA (1)...(19): siRNA sense strand
acaaagaugaugagagucu

SEQ ID NO: 380737 - RNA, 19 nt, Homo sapiens
  misc_RNA (1)...(19): siRNA sense strand
gagagucuaauuaaguaca

SEQ ID NO: 380738 - RNA, 19 nt, Homo sapiens
  misc_RNA (1)...(19): siRNA sense strand
uggacagcaagcucaauua

SEQ ID NO: 380739 - RNA, 19 nt, Homo sapiens
  misc_RNA (1)...(19): siRNA sense strand
agaaggaguggacagaaug

SEQ ID NO: 380740 - RNA, 19 nt, Homo sapiens
  misc_RNA (1)...(19): siRNA sense strand
uuaaaggaagguucugaau

SEQ ID NO: 380741 - RNA, 19 nt, Homo sapiens
  misc_RNA (1)...(19): siRNA sense strand
cgaggcacguaccacaaca

SEQ ID NO: 380742 - RNA, 19 nt, Homo sapiens
  misc_RNA (1)...(19): siRNA sense strand
cuacaggacuggggugaaa

SEQ ID NO: 380743 - RNA, 19 nt, Homo sapiens
  misc_RNA (1)...(19): siRNA sense strand
caggaaauggacaaagaug

SEQ ID NO: 380744 - RNA, 19 nt, Homo sapiens
  misc_RNA (1)...(19): siRNA sense strand
aaauggacaaagaugauga

SEQ ID NO: 380745 - RNA, 19 nt, Homo sapiens
  misc_RNA (1)...(19): siRNA sense strand
gugaacagggauauugugu

SEQ ID NO: 380746 - RNA, 19 nt, Homo sapiens
  misc_RNA (1)...(19): siRNA sense strand
ggaggaugacgaugaugag

SEQ ID NO: 380747 - RNA, 19 nt, Homo sapiens
  misc_RNA (1)...(19): siRNA sense strand
ucaaagugaacagggauau

SEQ ID NO: 380748 - RNA, 19 nt, Homo sapiens
  misc_RNA (1)...(19): siRNA sense strand
uauaagccuccaccacaga

SEQ ID NO: 380749 - RNA, 19 nt, Homo sapiens
  misc_RNA (1)...(19): siRNA sense strand
gguucugaauauagaguca

SEQ ID NO: 380750 - RNA, 19 nt, Homo sapiens
  misc_RNA (1)...(19): siRNA sense strand
gaaggaagguguugauuac

SEQ ID NO: 380751 - RNA, 19 nt, Homo sapiens
  misc_RNA (1)...(19): siRNA sense strand
ggaagguguugauuacaga

SEQ ID NO: 380752 - RNA, 19 nt, Homo sapiens
  misc_RNA (1)...(19): siRNA sense strand
ugaaggaagguguugauua

SEQ ID NO: 380753 - RNA, 19 nt, Homo sapiens
  misc_RNA (1)...(19): siRNA sense strand
uggacgagguguuggauga

SEQ ID NO: 380754 - RNA, 19 nt, Homo sapiens
  misc_RNA (1)...(19): siRNA sense strand
gacccaagccugcccaaug

SEQ ID NO: 380755 - RNA, 19 nt, Homo sapiens
  misc_RNA (1)...(19): siRNA sense strand
ugaaggaccagguguuugu

SEQ ID NO: 380756 - RNA, 19 nt, Homo sapiens
  misc_RNA (1)...(19): siRNA sense strand
gguguugauuacagaguga

SEQ ID NO: 380757 - RNA, 19 nt, Homo sapiens
  misc_RNA (1)...(19): siRNA sense strand
acccaagccugcccaaugu

SEQ ID NO: 380758 - RNA, 19 nt, Homo sapiens
  misc_RNA (1)...(19): siRNA sense strand
gauuacagagugaagaucu

SEQ ID NO: 380759 - RNA, 19 nt, Homo sapiens
  misc_RNA (1)...(19): siRNA sense strand
ccaggaguaugaguuugug

SEQ ID NO: 380760 - RNA, 19 nt, Homo sapiens
  misc_RNA (1)...(19): siRNA sense strand
cgagcgcccaggaguauga

SEQ ID NO: 380761 - RNA, 19 nt, Homo sapiens
  misc_RNA (1)...(19): siRNA sense strand
ucagcggccucaagugucu

SEQ ID NO: 380762 - RNA, 19 nt, Homo sapiens
  misc_RNA (1)...(19): siRNA sense strand
gcccaggaguaugaguuug

SEQ ID NO: 380763 - RNA, 19 nt, Homo sapiens
  misc_RNA (1)...(19): siRNA sense strand
ucugaaggaccagguguuu

SEQ ID NO: 380764 - RNA, 19 nt, Homo sapiens
  misc_RNA (1)...(19): siRNA sense strand
cuacauggugggcagcuau

SEQ ID NO: 380765 - RNA, 19 nt, Homo sapiens
  misc_RNA (1)...(19): siRNA sense strand
ugucagcggccucaagugu

SEQ ID NO: 380766 - RNA, 19 nt, Homo sapiens
  misc_RNA (1)...(19): siRNA sense strand
ggaaauaccugaaauacag

SEQ ID NO: 380767 - RNA, 19 nt, Homo sapiens
  misc_RNA (1)...(19): siRNA sense strand
ggaaaggacuacauugaau

SEQ ID NO: 380768 - RNA, 19 nt, Homo sapiens
  misc_RNA (1)...(19): siRNA sense strand
ugaaagacaucguggagua

SEQ ID NO: 380769 - RNA, 19 nt, Homo sapiens
  misc_RNA (1)...(19): siRNA sense strand
uaacgggucucacguauug

SEQ ID NO: 380770 - RNA, 19 nt, Homo sapiens
  misc_RNA (1)...(19): siRNA sense strand
guugugagaucgagaauaa

SEQ ID NO: 380771 - RNA, 19 nt, Homo sapiens
  misc_RNA (1)...(19): siRNA sense strand
ggagacagguggaaggaau

SEQ ID NO: 380772 - RNA, 19 nt, Homo sapiens
  misc_RNA (1)...(19): siRNA sense strand
gaaaggacuacauugaauu

SEQ ID NO: 380773 - RNA, 19 nt, Homo sapiens
  misc_RNA (1)...(19): siRNA sense strand
ucaaugaccuccaguucuu

SEQ ID NO: 380774 - RNA, 19 nt, Homo sapiens
  misc_RNA (1)...(19): siRNA sense strand
ggagcauucuggaaauauu

SEQ ID NO: 380775 - RNA, 19 nt, Homo sapiens
  misc_RNA (1)...(19): siRNA sense strand
gagcauucuggaaauauua

SEQ ID NO: 380776 - RNA, 19 nt, Homo sapiens
  misc_RNA (1)...(19): siRNA sense strand
gagauguucuucacaaugg

SEQ ID NO: 380777 - RNA, 19 nt, Homo sapiens
  misc_RNA (1)...(19): siRNA sense strand
guuacucucugaccuauau

SEQ ID NO: 380778 - RNA, 19 nt, Homo sapiens
  misc_RNA (1)...(19): siRNA sense strand
gcccuuggcucacucaaug

SEQ ID NO: 380779 - RNA, 19 nt, Homo sapiens
  misc_RNA (1)...(19): siRNA sense strand
gggaggacaucuuuaugga

SEQ ID NO: 380780 - RNA, 19 nt, Homo sapiens
  misc_RNA (1)...(19): siRNA sense strand
gcggagcauucuggaaaua

SEQ ID NO: 380781 - RNA, 19 nt, Homo sapiens
  misc_RNA (1)...(19): siRNA sense strand
gauggucguuacucucuga

SEQ ID NO: 380782 - RNA, 19 nt, Homo sapiens
  misc_RNA (1)...(19): siRNA sense strand
acacugggcuguccaagca

SEQ ID NO: 380783 - RNA, 19 nt, Homo sapiens
  misc_RNA (1)...(19): siRNA sense strand
ugaagugccuggccuacga

SEQ ID NO: 380784 - RNA, 19 nt, Homo sapiens
  misc_RNA (1)...(19): siRNA sense strand
aagacaucguggaguauua

SEQ ID NO: 380785 - RNA, 19 nt, Homo sapiens
  misc_RNA (1)...(19): siRNA sense strand
uggaaggaauggaggauug

SEQ ID NO: 380786 - RNA, 19 nt, Homo sapiens
  misc_RNA (1)...(19): siRNA sense strand
ggagauguucuucacaaug

SEQ ID NO: 380787 - RNA, 19 nt, Homo sapiens
  misc_RNA (1)...(19): siRNA sense strand
cgacccagcagcccagaua

SEQ ID NO: 380788 - RNA, 19 nt, Homo sapiens
  misc_RNA (1)...(19): siRNA sense strand
cagcggagcauucuggaaa

SEQ ID NO: 380789 - RNA, 19 nt, Homo sapiens
  misc_RNA (1)...(19): siRNA sense strand
cugcgacucugcggaaaua

SEQ ID NO: 380790 - RNA, 19 nt, Homo sapiens
  misc_RNA (1)...(19): siRNA sense strand
ggcaagauccucccucugu

SEQ ID NO: 380791 - RNA, 19 nt, Homo sapiens
  misc_RNA (1)...(19): siRNA sense strand
gaaagacaucguggaguau

SEQ ID NO: 380792 - RNA, 19 nt, Homo sapiens
  misc_RNA (1)...(19): siRNA sense strand
caauggaaauggcacuuac

SEQ ID NO: 380793 - RNA, 19 nt, Homo sapiens
  misc_RNA (1)...(19): siRNA sense strand
ccaagauggucguuacucu

SEQ ID NO: 380794 - RNA, 19 nt, Homo sapiens
  misc_RNA (1)...(19): siRNA sense strand
ccagggaggacaucuuuau

SEQ ID NO: 380795 - RNA, 19 nt, Homo sapiens
  misc_RNA (1)...(19): siRNA sense strand
gaccuccaguucuuuagau

SEQ ID NO: 380796 - RNA, 19 nt, Homo sapiens
  misc_RNA (1)...(19): siRNA sense strand
gggagauguucuucacaau

SEQ ID NO: 380797 - RNA, 19 nt, Homo sapiens
  misc_RNA (1)...(19): siRNA sense strand
ggccagggaggacaucuuu

SEQ ID NO: 380798 - RNA, 19 nt, Homo sapiens
  misc_RNA (1)...(19): siRNA sense strand
gaagcaggacagccaacuu

SEQ ID NO: 380799 - RNA, 19 nt, Homo sapiens
  misc_RNA (1)...(19): siRNA sense strand
gauggaaaggacuacauug

SEQ ID NO: 380800 - RNA, 19 nt, Homo sapiens
  misc_RNA (1)...(19): siRNA sense strand
caggacagccaacuucaga

SEQ ID NO: 380801 - RNA, 19 nt, Homo sapiens
  misc_RNA (1)...(19): siRNA sense strand
cgacuucuacccagggaaa

SEQ ID NO: 380802 - RNA, 19 nt, Homo sapiens
  misc_RNA (1)...(19): siRNA sense strand
uggaaaggacuacauugaa

SEQ ID NO: 380803 - RNA, 19 nt, Homo sapiens
  misc_RNA (1)...(19): siRNA sense strand
gcagggaagguuugguugu

SEQ ID NO: 380804 - RNA, 19 nt, Homo sapiens
  misc_RNA (1)...(19): siRNA sense strand
ucucugaccuauaucuaca

SEQ ID NO: 380805 - RNA, 19 nt, Homo sapiens
  misc_RNA (1)...(19): siRNA sense strand
gagaaaagaagaaacugaa

SEQ ID NO: 380806 - RNA, 19 nt, Homo sapiens
  misc_RNA (1)...(19): siRNA sense strand
cagggaagguuugguugug

SEQ ID NO: 380807 - RNA, 19 nt, Homo sapiens
  misc_RNA (1)...(19): siRNA sense strand
gaagugggaggcagaacca

SEQ ID NO: 380808 - RNA, 19 nt, Homo sapiens
  misc_RNA (1)...(19): siRNA sense strand
acaauggaaauggcacuua

SEQ ID NO: 380809 - RNA, 19 nt, Homo sapiens
  misc_RNA (1)...(19): siRNA sense strand
gaauggaggauuggaagca

SEQ ID NO: 380810 - RNA, 19 nt, Homo sapiens
  misc_RNA (1)...(19): siRNA sense strand
guaacgggucucacguauu

SEQ ID NO: 380811 - RNA, 19 nt, Homo sapiens
  misc_RNA (1)...(19): siRNA sense strand
uuauggagacccugaaaga

SEQ ID NO: 380812 - RNA, 19 nt, Homo sapiens
  misc_RNA (1)...(19): siRNA sense strand
aguaacgggucucacguau

SEQ ID NO: 380813 - RNA, 19 nt, Homo sapiens
  misc_RNA (1)...(19): siRNA sense strand
gcggaaauaccugaaauac

SEQ ID NO: 380814 - RNA, 19 nt, Homo sapiens
  misc_RNA (1)...(19): siRNA sense strand
aaaggacuacauugaauuc

SEQ ID NO: 380815 - RNA, 19 nt, Homo sapiens
  misc_RNA (1)...(19): siRNA sense strand
cagaagcagcggagcauuc

SEQ ID NO: 380816 - RNA, 19 nt, Homo sapiens
  misc_RNA (1)...(19): siRNA sense strand
aaugaccuccaguucuuua

SEQ ID NO: 380817 - RNA, 19 nt, Homo sapiens
  misc_RNA (1)...(19): siRNA sense strand
gaaaagaagaaacugaagu

SEQ ID NO: 380818 - RNA, 19 nt, Homo sapiens
  misc_RNA (1)...(19): siRNA sense strand
ggaggcagaaccagucuac

SEQ ID NO: 380819 - RNA, 19 nt, Homo sapiens
  misc_RNA (1)...(19): siRNA sense strand
cagcagcccagauaaccaa

SEQ ID NO: 380820 - RNA, 19 nt, Homo sapiens
  misc_RNA (1)...(19): siRNA sense strand
ugagaucgagaauaacaga

SEQ ID NO: 380821 - RNA, 19 nt, Homo sapiens
  misc_RNA (1)...(19): siRNA sense strand
ggagaaaagaagaaacuga

SEQ ID NO: 380822 - RNA, 19 nt, Homo sapiens
  misc_RNA (1)...(19): siRNA sense strand
uguccaagcauguugaaga

SEQ ID NO: 380823 - RNA, 19 nt, Homo sapiens
  misc_RNA (1)...(19): siRNA sense strand
ggggagauguucuucacaa

SEQ ID NO: 380824 - RNA, 19 nt, Homo sapiens
  misc_RNA (1)...(19): siRNA sense strand
aaagacaucguggaguauu

SEQ ID NO: 380825 - RNA, 19 nt, Homo sapiens
  misc_RNA (1)...(19): siRNA sense strand
cugcggaaauaccugaaau

SEQ ID NO: 380826 - RNA, 19 nt, Homo sapiens
  misc_RNA (1)...(19): siRNA sense strand
ugauggaaaggacuacauu

SEQ ID NO: 380827 - RNA, 19 nt, Homo sapiens
  misc_RNA (1)...(19): siRNA sense strand
caguaacgggucucacgua

SEQ ID NO: 380828 - RNA, 19 nt, Homo sapiens
  misc_RNA (1)...(19): siRNA sense strand
uggagacccugaaagacau

SEQ ID NO: 380829 - RNA, 19 nt, Homo sapiens
  misc_RNA (1)...(19): siRNA sense strand
gcagaagugggaggcagaa

SEQ ID NO: 380830 - RNA, 19 nt, Homo sapiens
  misc_RNA (1)...(19): siRNA sense strand
gaaggaauggaggauugga

SEQ ID NO: 380831 - RNA, 19 nt, Homo sapiens
  misc_RNA (1)...(19): siRNA sense strand
gugccuggccuacgacuuc

SEQ ID NO: 380832 - RNA, 19 nt, Homo sapiens
  misc_RNA (1)...(19): siRNA sense strand
ccagauaaccaagcagaag

SEQ ID NO: 380833 - RNA, 19 nt, Homo sapiens
  misc_RNA (1)...(19): siRNA sense strand
cagcccagauaaccaagca

SEQ ID NO: 380834 - RNA, 19 nt, Homo sapiens
  misc_RNA (1)...(19): siRNA sense strand
ggaagguuugguugugaga

SEQ ID NO: 380835 - RNA, 19 nt, Homo sapiens
  misc_RNA (1)...(19): siRNA sense strand
guccaagcauguugaagac

SEQ ID NO: 380836 - RNA, 19 nt, Homo sapiens
  misc_RNA (1)...(19): siRNA sense strand
cggaaauaccugaaauaca

SEQ ID NO: 380837 - RNA, 19 nt, Homo sapiens
  misc_RNA (1)...(19): siRNA sense strand
gacccagcagcccagauaa

SEQ ID NO: 380838 - RNA, 19 nt, Homo sapiens
  misc_RNA (1)...(19): siRNA sense strand
gauguucuucacaauggaa

SEQ ID NO: 380839 - RNA, 19 nt, Homo sapiens
  misc_RNA (1)...(19): siRNA sense strand
cagauaaccaagcagaagu

SEQ ID NO: 380840 - RNA, 19 nt, Homo sapiens
  misc_RNA (1)...(19): siRNA sense strand
aagcaggacagccaacuuc

SEQ ID NO: 380841 - RNA, 19 nt, Homo sapiens
  misc_RNA (1)...(19): siRNA sense strand
gagacagguggaaggaaug

SEQ ID NO: 380842 - RNA, 19 nt, Homo sapiens
  misc_RNA (1)...(19): siRNA sense strand
cuccaguucuuuagauaca

SEQ ID NO: 380843 - RNA, 19 nt, Homo sapiens
  misc_RNA (1)...(19): siRNA sense strand
ccaugggacucuggagaca

SEQ ID NO: 380844 - RNA, 19 nt, Homo sapiens
  misc_RNA (1)...(19): siRNA sense strand
gccagggaggacaucuuua

SEQ ID NO: 380845 - RNA, 19 nt, Homo sapiens
  misc_RNA (1)...(19): siRNA sense strand
caaugaccuccaguucuuu

SEQ ID NO: 380846 - RNA, 19 nt, Homo sapiens
  misc_RNA (1)...(19): siRNA sense strand
gagaucgagaauaacagaa

SEQ ID NO: 380847 - RNA, 19 nt, Homo sapiens
  misc_RNA (1)...(19): siRNA sense strand
gaacagaucucacagaaac

SEQ ID NO: 380848 - RNA, 19 nt, Homo sapiens
  misc_RNA (1)...(19): siRNA sense strand
gaacauuacucuuccagaa

SEQ ID NO: 380849 - RNA, 19 nt, Homo sapiens
  misc_RNA (1)...(19): siRNA sense strand
gcagaugacugauaaaugu

SEQ ID NO: 380850 - RNA, 19 nt, Homo sapiens
  misc_RNA (1)...(19): siRNA sense strand
gaacaagaaugugagguaa

SEQ ID NO: 380851 - RNA, 19 nt, Homo sapiens
  misc_RNA (1)...(19): siRNA sense strand
cagaagaggugacaguuaa

SEQ ID NO: 380852 - RNA, 19 nt, Homo sapiens
  misc_RNA (1)...(19): siRNA sense strand
aaacagaccuuaaacuuuc

SEQ ID NO: 380853 - RNA, 19 nt, Homo sapiens
  misc_RNA (1)...(19): siRNA sense strand
ccagaaaguuuguaaagaa

SEQ ID NO: 380854 - RNA, 19 nt, Homo sapiens
  misc_RNA (1)...(19): siRNA sense strand
gaaaguaaauuagcaaugg

SEQ ID NO: 380855 - RNA, 19 nt, Homo sapiens
  misc_RNA (1)...(19): siRNA sense strand
cagaacagcuggauuguau

SEQ ID NO: 380856 - RNA, 19 nt, Homo sapiens
  misc_RNA (1)...(19): siRNA sense strand
ggaaagagaucacauuuug

SEQ ID NO: 380857 - RNA, 19 nt, Homo sapiens
  misc_RNA (1)...(19): siRNA sense strand
guaaagagaauguggauga

SEQ ID NO: 380858 - RNA, 19 nt, Homo sapiens
  misc_RNA (1)...(19): siRNA sense strand
gaaccuaacuggacuuugc

SEQ ID NO: 380859 - RNA, 19 nt, Homo sapiens
  misc_RNA (1)...(19): siRNA sense strand
gaacuggcguuaccaucaa

SEQ ID NO: 380860 - RNA, 19 nt, Homo sapiens
  misc_RNA (1)...(19): siRNA sense strand
ggacacuccuugccaaaug

SEQ ID NO: 380861 - RNA, 19 nt, Homo sapiens
  misc_RNA (1)...(19): siRNA sense strand
gauauucgaagaagaagua

SEQ ID NO: 380862 - RNA, 19 nt, Homo sapiens
  misc_RNA (1)...(19): siRNA sense strand
cagaacagaucucacagaa

SEQ ID NO: 380863 - RNA, 19 nt, Homo sapiens
  misc_RNA (1)...(19): siRNA sense strand
gaaggaaagagaucacauu

SEQ ID NO: 380864 - RNA, 19 nt, Homo sapiens
  misc_RNA (1)...(19): siRNA sense strand
gaccuuaaacuuucacuuu

SEQ ID NO: 380865 - RNA, 19 nt, Homo sapiens
  misc_RNA (1)...(19): siRNA sense strand
aaucagaagugacuccuuu

SEQ ID NO: 380866 - RNA, 19 nt, Homo sapiens
  misc_RNA (1)...(19): siRNA sense strand
ggugacaguuaaaggauuu

SEQ ID NO: 380867 - RNA, 19 nt, Homo sapiens
  misc_RNA (1)...(19): siRNA sense strand
gugcaaauguguggaguuu

SEQ ID NO: 380868 - RNA, 19 nt, Homo sapiens
  misc_RNA (1)...(19): siRNA sense strand
gauggagagcugaacauua

SEQ ID NO: 380869 - RNA, 19 nt, Homo sapiens
  misc_RNA (1)...(19): siRNA sense strand
uugagaagcugcaaaguga

SEQ ID NO: 380870 - RNA, 19 nt, Homo sapiens
  misc_RNA (1)...(19): siRNA sense strand
gcacaagcuuacuccagaa

SEQ ID NO: 380871 - RNA, 19 nt, Homo sapiens
  misc_RNA (1)...(19): siRNA sense strand
aaagauggcucagaacaga

SEQ ID NO: 380872 - RNA, 19 nt, Homo sapiens
  misc_RNA (1)...(19): siRNA sense strand
cagcaagaaugcccaagaa

SEQ ID NO: 380873 - RNA, 19 nt, Homo sapiens
  misc_RNA (1)...(19): siRNA sense strand
uacagaaucuugaaucaga

SEQ ID NO: 380874 - RNA, 19 nt, Homo sapiens
  misc_RNA (1)...(19): siRNA sense strand
guacucagcugcagauugc

SEQ ID NO: 380875 - RNA, 19 nt, Homo sapiens
  misc_RNA (1)...(19): siRNA sense strand
gagaaaacuugacuguaua

SEQ ID NO: 380876 - RNA, 19 nt, Homo sapiens
  misc_RNA (1)...(19): siRNA sense strand
ggaauccugcuuucaguuu

SEQ ID NO: 380877 - RNA, 19 nt, Homo sapiens
  misc_RNA (1)...(19): siRNA sense strand
gaaaguuuguaaagaagca

SEQ ID NO: 380878 - RNA, 19 nt, Homo sapiens
  misc_RNA (1)...(19): siRNA sense strand
gaaggcuguucaagcaauu

SEQ ID NO: 380879 - RNA, 19 nt, Homo sapiens
  misc_RNA (1)...(19): siRNA sense strand
guacagacguccaagaaaa

SEQ ID NO: 380880 - RNA, 19 nt, Homo sapiens
  misc_RNA (1)...(19): siRNA sense strand
ucuagaaacugaugaagug

SEQ ID NO: 380881 - RNA, 19 nt, Homo sapiens
  misc_RNA (1)...(19): siRNA sense strand
gagcugaacauuacucuuc

SEQ ID NO: 380882 - RNA, 19 nt, Homo sapiens
  misc_RNA (1)...(19): siRNA sense strand
agagggaucuagaaacuga

SEQ ID NO: 380883 - RNA, 19 nt, Homo sapiens
  misc_RNA (1)...(19): siRNA sense strand
gaugaagugugcaaaugug

SEQ ID NO: 380884 - RNA, 19 nt, Homo sapiens
  misc_RNA (1)...(19): siRNA sense strand
uggaaacgaugauuauguu

SEQ ID NO: 380885 - RNA, 19 nt, Homo sapiens
  misc_RNA (1)...(19): siRNA sense strand
gaaaacagaccuuaaacuu

SEQ ID NO: 380886 - RNA, 19 nt, Homo sapiens
  misc_RNA (1)...(19): siRNA sense strand
ccaauauggugacuugaau

SEQ ID NO: 380887 - RNA, 19 nt, Homo sapiens
  misc_RNA (1)...(19): siRNA sense strand
gcaguuacuuccacucaag

SEQ ID NO: 380888 - RNA, 19 nt, Homo sapiens
  misc_RNA (1)...(19): siRNA sense strand
ccagaagaggugacaguua

SEQ ID NO: 380889 - RNA, 19 nt, Homo sapiens
  misc_RNA (1)...(19): siRNA sense strand
ccauaugcuugugucauua

SEQ ID NO: 380890 - RNA, 19 nt, Homo sapiens
  misc_RNA (1)...(19): siRNA sense strand
cuacacugcuaaacugauu

SEQ ID NO: 380891 - RNA, 19 nt, Homo sapiens
  misc_RNA (1)...(19): siRNA sense strand
uaaagagaauguggaugaa

SEQ ID NO: 380892 - RNA, 19 nt, Homo sapiens
  misc_RNA (1)...(19): siRNA sense strand
uaaagaagcagcucugagu

SEQ ID NO: 380893 - RNA, 19 nt, Homo sapiens
  misc_RNA (1)...(19): siRNA sense strand
gccagaaaguuuguaaaga

SEQ ID NO: 380894 - RNA, 19 nt, Homo sapiens
  misc_RNA (1)...(19): siRNA sense strand
ccagagggaucuagaaacu

SEQ ID NO: 380895 - RNA, 19 nt, Homo sapiens
  misc_RNA (1)...(19): siRNA sense strand
gaguguccgugguuaggua

SEQ ID NO: 380896 - RNA, 19 nt, Homo sapiens
  misc_RNA (1)...(19): siRNA sense strand
gaaccuugcccauaugcuu

SEQ ID NO: 380897 - RNA, 19 nt, Homo sapiens
  misc_RNA (1)...(19): siRNA sense strand
gaaauuggaaacgaugauu

SEQ ID NO: 380898 - RNA, 19 nt, Homo sapiens
  misc_RNA (1)...(19): siRNA sense strand
gcucuggccuugccuucuu

SEQ ID NO: 380899 - RNA, 19 nt, Homo sapiens
  misc_RNA (1)...(19): siRNA sense strand
gagaagcugcaaagugaaa

SEQ ID NO: 380900 - RNA, 19 nt, Homo sapiens
  misc_RNA (1)...(19): siRNA sense strand
ccagagaacaagaauguga

SEQ ID NO: 380901 - RNA, 19 nt, Homo sapiens
  misc_RNA (1)...(19): siRNA sense strand
cucauggacuuuauucuuu

SEQ ID NO: 380902 - RNA, 19 nt, Homo sapiens
  misc_RNA (1)...(19): siRNA sense strand
cauagacccucauggacuu

SEQ ID NO: 380903 - RNA, 19 nt, Homo sapiens
  misc_RNA (1)...(19): siRNA sense strand
gaagaaacgaagaaagauc

SEQ ID NO: 380904 - RNA, 19 nt, Homo sapiens
  misc_RNA (1)...(19): siRNA sense strand
ugacgaaaguaaauuagca

SEQ ID NO: 380905 - RNA, 19 nt, Homo sapiens
  misc_RNA (1)...(19): siRNA sense strand
ggauuugaaccuuuaauuc

SEQ ID NO: 380906 - RNA, 19 nt, Homo sapiens
  misc_RNA (1)...(19): siRNA sense strand
caacggauaauuucacugu

SEQ ID NO: 380907 - RNA, 19 nt, Homo sapiens
  misc_RNA (1)...(19): siRNA sense strand
ccacaauucuuccauagac

SEQ ID NO: 380908 - RNA, 19 nt, Homo sapiens
  misc_RNA (1)...(19): siRNA sense strand
ccaaaugaaaggucugaaa

SEQ ID NO: 380909 - RNA, 19 nt, Homo sapiens
  misc_RNA (1)...(19): siRNA sense strand
gaccagagggaucuagaaa

SEQ ID NO: 380910 - RNA, 19 nt, Homo sapiens
  misc_RNA (1)...(19): siRNA sense strand
ggaacagugucgucagagu

SEQ ID NO: 380911 - RNA, 19 nt, Homo sapiens
  misc_RNA (1)...(19): siRNA sense strand
gcggaacagugucgucaga

SEQ ID NO: 380912 - RNA, 19 nt, Homo sapiens
  misc_RNA (1)...(19): siRNA sense strand
gaaauugagaagcugcaaa

SEQ ID NO: 380913 - RNA, 19 nt, Homo sapiens
  misc_RNA (1)...(19): siRNA sense strand
gcaauggaaccugaagaaa

SEQ ID NO: 380914 - RNA, 19 nt, Homo sapiens
  misc_RNA (1)...(19): siRNA sense strand
ugaaaggucugaaaaugaa

SEQ ID NO: 380915 - RNA, 19 nt, Homo sapiens
  misc_RNA (1)...(19): siRNA sense strand
caacugcccuuuuauaagu

SEQ ID NO: 380916 - RNA, 19 nt, Homo sapiens
  misc_RNA (1)...(19): siRNA sense strand
cugaugaaguggaggaauu

SEQ ID NO: 380917 - RNA, 19 nt, Homo sapiens
  misc_RNA (1)...(19): siRNA sense strand
agagaaaacuugacuguau

SEQ ID NO: 380918 - RNA, 19 nt, Homo sapiens
  misc_RNA (1)...(19): siRNA sense strand
gugguuagguaucaggauu

SEQ ID NO: 380919 - RNA, 19 nt, Homo sapiens
  misc_RNA (1)...(19): siRNA sense strand
gcucagaacagaucucaca

SEQ ID NO: 380920 - RNA, 19 nt, Homo sapiens
  misc_RNA (1)...(19): siRNA sense strand
gaauccugcuuucaguuuc

SEQ ID NO: 380921 - RNA, 19 nt, Homo sapiens
  misc_RNA (1)...(19): siRNA sense strand
cccauaugcuugugucauu

SEQ ID NO: 380922 - RNA, 19 nt, Homo sapiens
  misc_RNA (1)...(19): siRNA sense strand
gggaaucuagugucaaaga

SEQ ID NO: 380923 - RNA, 19 nt, Homo sapiens
  misc_RNA (1)...(19): siRNA sense strand
cagaaaguuuguaaagaag

SEQ ID NO: 380924 - RNA, 19 nt, Homo sapiens
  misc_RNA (1)...(19): siRNA sense strand
caugauauucgaagaagaa

SEQ ID NO: 380925 - RNA, 19 nt, Homo sapiens
  misc_RNA (1)...(19): siRNA sense strand
gagauuugcaggugauguu

SEQ ID NO: 380926 - RNA, 19 nt, Homo sapiens
  misc_RNA (1)...(19): siRNA sense strand
gagacaaagcagaaccuaa

SEQ ID NO: 380927 - RNA, 19 nt, Homo sapiens
  misc_RNA (1)...(19): siRNA sense strand
gagagcuuguugaaggaaa

SEQ ID NO: 380928 - RNA, 19 nt, Homo sapiens
  misc_RNA (1)...(19): siRNA sense strand
cagggaagauaguaguguu

SEQ ID NO: 380929 - RNA, 19 nt, Homo sapiens
  misc_RNA (1)...(19): siRNA sense strand
ggaugaagugugcaaaugu

SEQ ID NO: 380930 - RNA, 19 nt, Homo sapiens
  misc_RNA (1)...(19): siRNA sense strand
gcagauugcccacuuucau

SEQ ID NO: 380931 - RNA, 19 nt, Homo sapiens
  misc_RNA (1)...(19): siRNA sense strand
gcauagcaccaauguuuua

SEQ ID NO: 380932 - RNA, 19 nt, Homo sapiens
  misc_RNA (1)...(19): siRNA sense strand
caaagacauucaugcuucu

SEQ ID NO: 380933 - RNA, 19 nt, Homo sapiens
  misc_RNA (1)...(19): siRNA sense strand
ccgcagguaucaaggaaau

SEQ ID NO: 380934 - RNA, 19 nt, Homo sapiens
  misc_RNA (1)...(19): siRNA sense strand
gcaagaaugcccaagaaaa

SEQ ID NO: 380935 - RNA, 19 nt, Homo sapiens
  misc_RNA (1)...(19): siRNA sense strand
ggccuugccuucuuuaugc

SEQ ID NO: 380936 - RNA, 19 nt, Homo sapiens
  misc_RNA (1)...(19): siRNA sense strand
aaucagaaauugagaagcu

SEQ ID NO: 380937 - RNA, 19 nt, Homo sapiens
  misc_RNA (1)...(19): siRNA sense strand
agaacaagaaugugaggua

SEQ ID NO: 380938 - RNA, 19 nt, Homo sapiens
  misc_RNA (1)...(19): siRNA sense strand
gaaagucaggauuuaccuu

SEQ ID NO: 380939 - RNA, 19 nt, Homo sapiens
  misc_RNA (1)...(19): siRNA sense strand
ucauggacuuuauucuuug

SEQ ID NO: 380940 - RNA, 19 nt, Homo sapiens
  misc_RNA (1)...(19): siRNA sense strand
aguguugcaucuagugaua

SEQ ID NO: 380941 - RNA, 19 nt, Homo sapiens
  misc_RNA (1)...(19): siRNA sense strand
aagagaauguggaugaagu

SEQ ID NO: 380942 - RNA, 19 nt, Homo sapiens
  misc_RNA (1)...(19): siRNA sense strand
aagcagcucugagucaaga

SEQ ID NO: 380943 - RNA, 19 nt, Homo sapiens
  misc_RNA (1)...(19): siRNA sense strand
ccaaagauggcucagaaca

SEQ ID NO: 380944 - RNA, 19 nt, Homo sapiens
  misc_RNA (1)...(19): siRNA sense strand
agaaguggcagaacaccua

SEQ ID NO: 380945 - RNA, 19 nt, Homo sapiens
  misc_RNA (1)...(19): siRNA sense strand
gauaguaguguugcaucua

SEQ ID NO: 380946 - RNA, 19 nt, Homo sapiens
  misc_RNA (1)...(19): siRNA sense strand
cugaagaaacgaagaaaga

SEQ ID NO: 380947 - RNA, 19 nt, Homo sapiens
  misc_RNA (1)...(19): siRNA sense strand
ggaaugaugugacgcucua

SEQ ID NO: 380948 - RNA, 19 nt, Homo sapiens
  misc_RNA (1)...(19): siRNA sense strand
gaucugcgcuucccucuca

SEQ ID NO: 380949 - RNA, 19 nt, Homo sapiens
  misc_RNA (1)...(19): siRNA sense strand
cuacagcuuugccaauaua

SEQ ID NO: 380950 - RNA, 19 nt, Homo sapiens
  misc_RNA (1)...(19): siRNA sense strand
cauacaaacuggucugcua

SEQ ID NO: 380951 - RNA, 19 nt, Homo sapiens
  misc_RNA (1)...(19): siRNA sense strand
gcuaugacauugccaagau

SEQ ID NO: 380952 - RNA, 19 nt, Homo sapiens
  misc_RNA (1)...(19): siRNA sense strand
gugcugcucugcauacaaa

SEQ ID NO: 380953 - RNA, 19 nt, Homo sapiens
  misc_RNA (1)...(19): siRNA sense strand
ggagagacaaacagcauuu

SEQ ID NO: 380954 - RNA, 19 nt, Homo sapiens
  misc_RNA (1)...(19): siRNA sense strand
aaugaaggccgaauuuaua

SEQ ID NO: 380955 - RNA, 19 nt, Homo sapiens
  misc_RNA (1)...(19): siRNA sense strand
caacaccuggauuucauua

SEQ ID NO: 380956 - RNA, 19 nt, Homo sapiens
  misc_RNA (1)...(19): siRNA sense strand
gacagcagcuaugacauug

SEQ ID NO: 380957 - RNA, 19 nt, Homo sapiens
  misc_RNA (1)...(19): siRNA sense strand
ggaugcaaguccugacaga

SEQ ID NO: 380958 - RNA, 19 nt, Homo sapiens
  misc_RNA (1)...(19): siRNA sense strand
aaacuggucugcuacuaca

SEQ ID NO: 380959 - RNA, 19 nt, Homo sapiens
  misc_RNA (1)...(19): siRNA sense strand
gcgcuucccucucaccaau

SEQ ID NO: 380960 - RNA, 19 nt, Homo sapiens
  misc_RNA (1)...(19): siRNA sense strand
ugacagcagcuaugacauu

SEQ ID NO: 380961 - RNA, 19 nt, Homo sapiens
  misc_RNA (1)...(19): siRNA sense strand
ccacaucaucuacagcuuu

SEQ ID NO: 380962 - RNA, 19 nt, Homo sapiens
  misc_RNA (1)...(19): siRNA sense strand
gaaggccgaauuuauaaag

SEQ ID NO: 380963 - RNA, 19 nt, Homo sapiens
  misc_RNA (1)...(19): siRNA sense strand
gcaaccaguggguaggaua

SEQ ID NO: 380964 - RNA, 19 nt, Homo sapiens
  misc_RNA (1)...(19): siRNA sense strand
ggccgaauuuauaaaggaa

SEQ ID NO: 380965 - RNA, 19 nt, Homo sapiens
  misc_RNA (1)...(19): siRNA sense strand
cuaugacauugccaagaua

SEQ ID NO: 380966 - RNA, 19 nt, Homo sapiens
  misc_RNA (1)...(19): siRNA sense strand
cacaucaucuacagcuuug

SEQ ID NO: 380967 - RNA, 19 nt, Homo sapiens
  misc_RNA (1)...(19): siRNA sense strand
ggauuucauuagcaucaug

SEQ ID NO: 380968 - RNA, 19 nt, Homo sapiens
  misc_RNA (1)...(19): siRNA sense strand
gauggaacuuugggucuca

SEQ ID NO: 380969 - RNA, 19 nt, Homo sapiens
  misc_RNA (1)...(19): siRNA sense strand
ucaagucaguaccgccauu

SEQ ID NO: 380970 - RNA, 19 nt, Homo sapiens
  misc_RNA (1)...(19): siRNA sense strand
cuugaccgcuuccucugua

SEQ ID NO: 380971 - RNA, 19 nt, Homo sapiens
  misc_RNA (1)...(19): siRNA sense strand
ucucaaagauuuuccaaga

SEQ ID NO: 380972 - RNA, 19 nt, Homo sapiens
  misc_RNA (1)...(19): siRNA sense strand
acaaacuggucugcuacua

SEQ ID NO: 380973 - RNA, 19 nt, Homo sapiens
  misc_RNA (1)...(19): siRNA sense strand
gcaucaugaccuacgauuu

SEQ ID NO: 380974 - RNA, 19 nt, Homo sapiens
  misc_RNA (1)...(19): siRNA sense strand
ucaacacacucaagaacag

SEQ ID NO: 380975 - RNA, 19 nt, Homo sapiens
  misc_RNA (1)...(19): siRNA sense strand
gagcuucacucuggcuucu

SEQ ID NO: 380976 - RNA, 19 nt, Homo sapiens
  misc_RNA (1)...(19): siRNA sense strand
gcgcacccauggcuuugau

SEQ ID NO: 380977 - RNA, 19 nt, Homo sapiens
  misc_RNA (1)...(19): siRNA sense strand
caucaugaccuacgauuuu

SEQ ID NO: 380978 - RNA, 19 nt, Homo sapiens
  misc_RNA (1)...(19): siRNA sense strand
guacccacaucaucuacag

SEQ ID NO: 380979 - RNA, 19 nt, Homo sapiens
  misc_RNA (1)...(19): siRNA sense strand
gcuucacucuggcuucuuc

SEQ ID NO: 380980 - RNA, 19 nt, Homo sapiens
  misc_RNA (1)...(19): siRNA sense strand
gaccacaggccaucacagu

SEQ ID NO: 380981 - RNA, 19 nt, Homo sapiens
  misc_RNA (1)...(19): siRNA sense strand
uuaccacccuaaucaagga

SEQ ID NO: 380982 - RNA, 19 nt, Homo sapiens
  misc_RNA (1)...(19): siRNA sense strand
gcucagcgcagcacugucu

SEQ ID NO: 380983 - RNA, 19 nt, Homo sapiens
  misc_RNA (1)...(19): siRNA sense strand
ggugugaaggcgucucaaa

SEQ ID NO: 380984 - RNA, 19 nt, Homo sapiens
  misc_RNA (1)...(19): siRNA sense strand
ggacccuugccuacuauga

SEQ ID NO: 380985 - RNA, 19 nt, Homo sapiens
  misc_RNA (1)...(19): siRNA sense strand
ucaccaaugccaucaagga

SEQ ID NO: 380986 - RNA, 19 nt, Homo sapiens
  misc_RNA (1)...(19): siRNA sense strand
gucggaggauggaacuuug

SEQ ID NO: 380987 - RNA, 19 nt, Homo sapiens
  misc_RNA (1)...(19): siRNA sense strand
ggagccacaguccauagaa

SEQ ID NO: 380988 - RNA, 19 nt, Homo sapiens
  misc_RNA (1)...(19): siRNA sense strand
ggaauuccaggccgguuca

SEQ ID NO: 380989 - RNA, 19 nt, Homo sapiens
  misc_RNA (1)...(19): siRNA sense strand
gugaaggcgucucaaacag

SEQ ID NO: 380990 - RNA, 19 nt, Homo sapiens
  misc_RNA (1)...(19): siRNA sense strand
cccaacaccuggauuucau

SEQ ID NO: 380991 - RNA, 19 nt, Homo sapiens
  misc_RNA (1)...(19): siRNA sense strand
acuaugagaucugugacuu

SEQ ID NO: 380992 - RNA, 19 nt, Homo sapiens
  misc_RNA (1)...(19): siRNA sense strand
ugcaaguccugacagauuc

SEQ ID NO: 380993 - RNA, 19 nt, Homo sapiens
  misc_RNA (1)...(19): siRNA sense strand
uauaagcaacgaucacauc

SEQ ID NO: 380994 - RNA, 19 nt, Homo sapiens
  misc_RNA (1)...(19): siRNA sense strand
ucuacagcuuugccaauau

SEQ ID NO: 380995 - RNA, 19 nt, Homo sapiens
  misc_RNA (1)...(19): siRNA sense strand
gaccuacgauuuucaugga

SEQ ID NO: 380996 - RNA, 19 nt, Homo sapiens
  misc_RNA (1)...(19): siRNA sense strand
gcucaacacacucaagaac

SEQ ID NO: 380997 - RNA, 19 nt, Homo sapiens
  misc_RNA (1)...(19): siRNA sense strand
ugaaggccgaauuuauaaa

SEQ ID NO: 380998 - RNA, 19 nt, Homo sapiens
  misc_RNA (1)...(19): siRNA sense strand
ggaagcccagccagggaaa

SEQ ID NO: 380999 - RNA, 19 nt, Homo sapiens
  misc_RNA (1)...(19): siRNA sense strand
augaaggccgaauuuauaa

SEQ ID NO: 381000 - RNA, 19 nt, Homo sapiens
  misc_RNA (1)...(19): siRNA sense strand
ucacucuggcuucuucuga

SEQ ID NO: 381001 - RNA, 19 nt, Homo sapiens
  misc_RNA (1)...(19): siRNA sense strand
caaacuggucugcuacuac

SEQ ID NO: 381002 - RNA, 19 nt, Homo sapiens
  misc_RNA (1)...(19): siRNA sense strand
aucuacagcuuugccaaua

SEQ ID NO: 381003 - RNA, 19 nt, Homo sapiens
  misc_RNA (1)...(19): siRNA sense strand
ggauacgacgaccaggaaa

SEQ ID NO: 381004 - RNA, 19 nt, Homo sapiens
  misc_RNA (1)...(19): siRNA sense strand
gcaaguccugacagauuca

SEQ ID NO: 381005 - RNA, 19 nt, Homo sapiens
  misc_RNA (1)...(19): siRNA sense strand
augcaaguccugacagauu

SEQ ID NO: 381006 - RNA, 19 nt, Homo sapiens
  misc_RNA (1)...(19): siRNA sense strand
aggccgaauuuauaaagga

SEQ ID NO: 381007 - RNA, 19 nt, Homo sapiens
  misc_RNA (1)...(19): siRNA sense strand
ccacccuaaucaaggaaau

SEQ ID NO: 381008 - RNA, 19 nt, Homo sapiens
  misc_RNA (1)...(19): siRNA sense strand
ccaauauaagcaacgauca

SEQ ID NO: 381009 - RNA, 19 nt, Homo sapiens
  misc_RNA (1)...(19): siRNA sense strand
caccuggauuucauuagca

SEQ ID NO: 381010 - RNA, 19 nt, Homo sapiens
  misc_RNA (1)...(19): siRNA sense strand
ugugaaggcgucucaaaca

SEQ ID NO: 381011 - RNA, 19 nt, Homo sapiens
  misc_RNA (1)...(19): siRNA sense strand
ugucggaggauggaacuuu

SEQ ID NO: 381012 - RNA, 19 nt, Homo sapiens
  misc_RNA (1)...(19): siRNA sense strand
cgaccaggaaagcgucaaa

SEQ ID NO: 381013 - RNA, 19 nt, Homo sapiens
  misc_RNA (1)...(19): siRNA sense strand
ccuacuaugagaucuguga

SEQ ID NO: 381014 - RNA, 19 nt, Homo sapiens
  misc_RNA (1)...(19): siRNA sense strand
guuccgaggucaggaggau

SEQ ID NO: 381015 - RNA, 19 nt, Homo sapiens
  misc_RNA (1)...(19): siRNA sense strand
acaccuggauuucauuagc

SEQ ID NO: 381016 - RNA, 19 nt, Homo sapiens
  misc_RNA (1)...(19): siRNA sense strand
ccauugacagcagcuauga

SEQ ID NO: 381017 - RNA, 19 nt, Homo sapiens
  misc_RNA (1)...(19): siRNA sense strand
cggggaaggucaccauuga

SEQ ID NO: 381018 - RNA, 19 nt, Homo sapiens
  misc_RNA (1)...(19): siRNA sense strand
gauacgacgaccaggaaag

SEQ ID NO: 381019 - RNA, 19 nt, Homo sapiens
  misc_RNA (1)...(19): siRNA sense strand
caucuacagcuuugccaau

SEQ ID NO: 381020 - RNA, 19 nt, Homo sapiens
  misc_RNA (1)...(19): siRNA sense strand
ugaaugagauuguuacaca

SEQ ID NO: 381021 - RNA, 19 nt, Homo sapiens
  misc_RNA (1)...(19): siRNA sense strand
gaagauacacaacagcaaa

SEQ ID NO: 381022 - RNA, 19 nt, Homo sapiens
  misc_RNA (1)...(19): siRNA sense strand
uagacaagguucacaauau

SEQ ID NO: 381023 - RNA, 19 nt, Homo sapiens
  misc_RNA (1)...(19): siRNA sense strand
ccugagaucccaagaaaua

SEQ ID NO: 381024 - RNA, 19 nt, Homo sapiens
  misc_RNA (1)...(19): siRNA sense strand
ccuagaaggaggauuauua

SEQ ID NO: 381025 - RNA, 19 nt, Homo sapiens
  misc_RNA (1)...(19): siRNA sense strand
agacaagguucacaauauu

SEQ ID NO: 381026 - RNA, 19 nt, Homo sapiens
  misc_RNA (1)...(19): siRNA sense strand
uggaggaucugacaacaaa

SEQ ID NO: 381027 - RNA, 19 nt, Homo sapiens
  misc_RNA (1)...(19): siRNA sense strand
gagaucccaagaaauauua

SEQ ID NO: 381028 - RNA, 19 nt, Homo sapiens
  misc_RNA (1)...(19): siRNA sense strand
ugccaaaccugcccucuuu

SEQ ID NO: 381029 - RNA, 19 nt, Homo sapiens
  misc_RNA (1)...(19): siRNA sense strand
uaacauuggugacaucagu

SEQ ID NO: 381030 - RNA, 19 nt, Homo sapiens
  misc_RNA (1)...(19): siRNA sense strand
ucagggagacuuuccauuu

SEQ ID NO: 381031 - RNA, 19 nt, Homo sapiens
  misc_RNA (1)...(19): siRNA sense strand
gacauuaugcaacguuaua

SEQ ID NO: 381032 - RNA, 19 nt, Homo sapiens
  misc_RNA (1)...(19): siRNA sense strand
guagacaagguucacaaua

SEQ ID NO: 381033 - RNA, 19 nt, Homo sapiens
  misc_RNA (1)...(19): siRNA sense strand
uguaucagcuguaaagaau

SEQ ID NO: 381034 - RNA, 19 nt, Homo sapiens
  misc_RNA (1)...(19): siRNA sense strand
cagggagacuuuccauuug

SEQ ID NO: 381035 - RNA, 19 nt, Homo sapiens
  misc_RNA (1)...(19): siRNA sense strand
ggaaugguauuggagacaa

SEQ ID NO: 381036 - RNA, 19 nt, Homo sapiens
  misc_RNA (1)...(19): siRNA sense strand
ucaaggcgauccuaaucuu

SEQ ID NO: 381037 - RNA, 19 nt, Homo sapiens
  misc_RNA (1)...(19): siRNA sense strand
gaaugguauuggagacaaa

SEQ ID NO: 381038 - RNA, 19 nt, Homo sapiens
  misc_RNA (1)...(19): siRNA sense strand
cuagaaggaggauuauuaa

SEQ ID NO: 381039 - RNA, 19 nt, Homo sapiens
  misc_RNA (1)...(19): siRNA sense strand
ucugugagcuggauuugau

SEQ ID NO: 381040 - RNA, 19 nt, Homo sapiens
  misc_RNA (1)...(19): siRNA sense strand
uagacauuaugcaacguua

SEQ ID NO: 381041 - RNA, 19 nt, Homo sapiens
  misc_RNA (1)...(19): siRNA sense strand
ucaaguauuuguggaaaca

SEQ ID NO: 381042 - RNA, 19 nt, Homo sapiens
  misc_RNA (1)...(19): siRNA sense strand
guggaaacauuagacaaau

SEQ ID NO: 381043 - RNA, 19 nt, Homo sapiens
  misc_RNA (1)...(19): siRNA sense strand
gaacuuggcauuuuagauc

SEQ ID NO: 381044 - RNA, 19 nt, Homo sapiens
  misc_RNA (1)...(19): siRNA sense strand
uuccugagaucccaagaaa

SEQ ID NO: 381045 - RNA, 19 nt, Homo sapiens
  misc_RNA (1)...(19): siRNA sense strand
ggagacaaauaugaaugag

SEQ ID NO: 381046 - RNA, 19 nt, Homo sapiens
  misc_RNA (1)...(19): siRNA sense strand
ugagaucccaagaaauauu

SEQ ID NO: 381047 - RNA, 19 nt, Homo sapiens
  misc_RNA (1)...(19): siRNA sense strand
ggagacuuuccauuuggua

SEQ ID NO: 381048 - RNA, 19 nt, Homo sapiens
  misc_RNA (1)...(19): siRNA sense strand
gcccuacagugaagauaca

SEQ ID NO: 381049 - RNA, 19 nt, Homo sapiens
  misc_RNA (1)...(19): siRNA sense strand
gagacaaauaugaaugaga

SEQ ID NO: 381050 - RNA, 19 nt, Homo sapiens
  misc_RNA (1)...(19): siRNA sense strand
gauacacaacagcaaauca

SEQ ID NO: 381051 - RNA, 19 nt, Homo sapiens
  misc_RNA (1)...(19): siRNA sense strand
gacaagguucacaauauuc

SEQ ID NO: 381052 - RNA, 19 nt, Homo sapiens
  misc_RNA (1)...(19): siRNA sense strand
ggauuugauuuuccaugua

SEQ ID NO: 381053 - RNA, 19 nt, Homo sapiens
  misc_RNA (1)...(19): siRNA sense strand
gaucugacaacaaacugau

SEQ ID NO: 381054 - RNA, 19 nt, Homo sapiens
  misc_RNA (1)...(19): siRNA sense strand
uguggaaacauuagacaaa

SEQ ID NO: 381055 - RNA, 19 nt, Homo sapiens
  misc_RNA (1)...(19): siRNA sense strand
caaaucaucagggagacuu

SEQ ID NO: 381056 - RNA, 19 nt, Homo sapiens
  misc_RNA (1)...(19): siRNA sense strand
ccaaaccugcccucuuuua

SEQ ID NO: 381057 - RNA, 19 nt, Homo sapiens
  misc_RNA (1)...(19): siRNA sense strand
gggagacuuuccauuuggu

SEQ ID NO: 381058 - RNA, 19 nt, Homo sapiens
  misc_RNA (1)...(19): siRNA sense strand
ucuaccagcccuacaguga

SEQ ID NO: 381059 - RNA, 19 nt, Homo sapiens
  misc_RNA (1)...(19): siRNA sense strand
acacaacagcaaaucauca

SEQ ID NO: 381060 - RNA, 19 nt, Homo sapiens
  misc_RNA (1)...(19): siRNA sense strand
ggaucugacaacaaacuga

SEQ ID NO: 381061 - RNA, 19 nt, Homo sapiens
  misc_RNA (1)...(19): siRNA sense strand
ucugacaacaaacugauuu

SEQ ID NO: 381062 - RNA, 19 nt, Homo sapiens
  misc_RNA (1)...(19): siRNA sense strand
ugacaucaguauaaaagug

SEQ ID NO: 381063 - RNA, 19 nt, Homo sapiens
  misc_RNA (1)...(19): siRNA sense strand
uggagacaaauaugaauga

SEQ ID NO: 381064 - RNA, 19 nt, Homo sapiens
  misc_RNA (1)...(19): siRNA sense strand
uaccagcccuacagugaag

SEQ ID NO: 381065 - RNA, 19 nt, Homo sapiens
  misc_RNA (1)...(19): siRNA sense strand
aauaugaaucuuccugaga

SEQ ID NO: 381066 - RNA, 19 nt, Homo sapiens
  misc_RNA (1)...(19): siRNA sense strand
gagacuuuccauuugguau

SEQ ID NO: 381067 - RNA, 19 nt, Homo sapiens
  misc_RNA (1)...(19): siRNA sense strand
guuuguaauuuccuagaag

SEQ ID NO: 381068 - RNA, 19 nt, Homo sapiens
  misc_RNA (1)...(19): siRNA sense strand
gaggaucugacaacaaacu

SEQ ID NO: 381069 - RNA, 19 nt, Homo sapiens
  misc_RNA (1)...(19): siRNA sense strand
uuggugacaucaguauaaa

SEQ ID NO: 381070 - RNA, 19 nt, Homo sapiens
  misc_RNA (1)...(19): siRNA sense strand
uacacaaauugaugcacaa

SEQ ID NO: 381071 - RNA, 19 nt, Homo sapiens
  misc_RNA (1)...(19): siRNA sense strand
cagugaagauacacaacag

SEQ ID NO: 381072 - RNA, 19 nt, Homo sapiens
  misc_RNA (1)...(19): siRNA sense strand
cuacagugaagauacacaa

SEQ ID NO: 381073 - RNA, 19 nt, Homo sapiens
  misc_RNA (1)...(19): siRNA sense strand
gauccuaaucuucaacaac

SEQ ID NO: 381074 - RNA, 19 nt, Homo sapiens
  misc_RNA (1)...(19): siRNA sense strand
uauuaacauuggugacauc

SEQ ID NO: 381075 - RNA, 19 nt, Homo sapiens
  misc_RNA (1)...(19): siRNA sense strand
guaucagcuguaaagaaua

SEQ ID NO: 381076 - RNA, 19 nt, Homo sapiens
  misc_RNA (1)...(19): siRNA sense strand
cugacaacaaacugauuua

SEQ ID NO: 381077 - RNA, 19 nt, Homo sapiens
  misc_RNA (1)...(19): siRNA sense strand
gauuugauuuuccauguag

SEQ ID NO: 381078 - RNA, 19 nt, Homo sapiens
  misc_RNA (1)...(19): siRNA sense strand
ugaagauacacaacagcaa

SEQ ID NO: 381079 - RNA, 19 nt, Homo sapiens
  misc_RNA (1)...(19): siRNA sense strand
gaggaggacuucaacaauu

SEQ ID NO: 381080 - RNA, 19 nt, Homo sapiens
  misc_RNA (1)...(19): siRNA sense strand
gaagaugacgccacauuaa

SEQ ID NO: 381081 - RNA, 19 nt, Homo sapiens
  misc_RNA (1)...(19): siRNA sense strand
cacauuaacccuuucauuu

SEQ ID NO: 381082 - RNA, 19 nt, Homo sapiens
  misc_RNA (1)...(19): siRNA sense strand
caagagaccaaaucagaaa

SEQ ID NO: 381083 - RNA, 19 nt, Homo sapiens
  misc_RNA (1)...(19): siRNA sense strand
uaacaaacuucacccucaa

SEQ ID NO: 381084 - RNA, 19 nt, Homo sapiens
  misc_RNA (1)...(19): siRNA sense strand
gaccaaagcgauacacuau

SEQ ID NO: 381085 - RNA, 19 nt, Homo sapiens
  misc_RNA (1)...(19): siRNA sense strand
gacgaaaggcuaaucacua

SEQ ID NO: 381086 - RNA, 19 nt, Homo sapiens
  misc_RNA (1)...(19): siRNA sense strand
gcagacugaucuuggaguu

SEQ ID NO: 381087 - RNA, 19 nt, Homo sapiens
  misc_RNA (1)...(19): siRNA sense strand
cagguuguguguaauauug

SEQ ID NO: 381088 - RNA, 19 nt, Homo sapiens
  misc_RNA (1)...(19): siRNA sense strand
ggaccaaagcgauacacua

SEQ ID NO: 381089 - RNA, 19 nt, Homo sapiens
  misc_RNA (1)...(19): siRNA sense strand
ggaagcccauguuuaccaa

SEQ ID NO: 381090 - RNA, 19 nt, Homo sapiens
  misc_RNA (1)...(19): siRNA sense strand
ugaagaugacgccacauua

SEQ ID NO: 381091 - RNA, 19 nt, Homo sapiens
  misc_RNA (1)...(19): siRNA sense strand
gaucuuggaguucaccuuu

SEQ ID NO: 381092 - RNA, 19 nt, Homo sapiens
  misc_RNA (1)...(19): siRNA sense strand
gaaaggcuaaucacuagau

SEQ ID NO: 381093 - RNA, 19 nt, Homo sapiens
  misc_RNA (1)...(19): siRNA sense strand
gcacgggaagcccauguuu

SEQ ID NO: 381094 - RNA, 19 nt, Homo sapiens
  misc_RNA (1)...(19): siRNA sense strand
gcacagaggauagugacaa

SEQ ID NO: 381095 - RNA, 19 nt, Homo sapiens
  misc_RNA (1)...(19): siRNA sense strand
uagacaauaccgagaguua

SEQ ID NO: 381096 - RNA, 19 nt, Homo sapiens
  misc_RNA (1)...(19): siRNA sense strand
uaccacaacucauccauca

SEQ ID NO: 381097 - RNA, 19 nt, Homo sapiens
  misc_RNA (1)...(19): siRNA sense strand
cugaagaccugcuuguuuc

SEQ ID NO: 381098 - RNA, 19 nt, Homo sapiens
  misc_RNA (1)...(19): siRNA sense strand
gaaagagucauaccacaac

SEQ ID NO: 381099 - RNA, 19 nt, Homo sapiens
  misc_RNA (1)...(19): siRNA sense strand
gcacuggcagcaagaagaa

SEQ ID NO: 381100 - RNA, 19 nt, Homo sapiens
  misc_RNA (1)...(19): siRNA sense strand
cagaguaccgaaucuauga

SEQ ID NO: 381101 - RNA, 19 nt, Homo sapiens
  misc_RNA (1)...(19): siRNA sense strand
ggaguucaccuuugaugau

SEQ ID NO: 381102 - RNA, 19 nt, Homo sapiens
  misc_RNA (1)...(19): siRNA sense strand
ucuaugagaugaacaagag

SEQ ID NO: 381103 - RNA, 19 nt, Homo sapiens
  misc_RNA (1)...(19): siRNA sense strand
ccacauuaacccuuucauu

SEQ ID NO: 381104 - RNA, 19 nt, Homo sapiens
  misc_RNA (1)...(19): siRNA sense strand
agacugaucuuggaguuca

SEQ ID NO: 381105 - RNA, 19 nt, Homo sapiens
  misc_RNA (1)...(19): siRNA sense strand
ccugaagaccugcuuguuu

SEQ ID NO: 381106 - RNA, 19 nt, Homo sapiens
  misc_RNA (1)...(19): siRNA sense strand
guaaaccucccgccacuca

SEQ ID NO: 381107 - RNA, 19 nt, Homo sapiens
  misc_RNA (1)...(19): siRNA sense strand
acgaaaggcuaaucacuag

SEQ ID NO: 381108 - RNA, 19 nt, Homo sapiens
  misc_RNA (1)...(19): siRNA sense strand
cgaaagagucauaccacaa

SEQ ID NO: 381109 - RNA, 19 nt, Homo sapiens
  misc_RNA (1)...(19): siRNA sense strand
gcacuuuaccauuagacaa

SEQ ID NO: 381110 - RNA, 19 nt, Homo sapiens
  misc_RNA (1)...(19): siRNA sense strand
ggacgccuuugccacugaa

SEQ ID NO: 381111 - RNA, 19 nt, Homo sapiens
  misc_RNA (1)...(19): siRNA sense strand
gacgccacauuaacccuuu

SEQ ID NO: 381112 - RNA, 19 nt, Homo sapiens
  misc_RNA (1)...(19): siRNA sense strand
ggaacaacagcccguggaa

SEQ ID NO: 381113 - RNA, 19 nt, Homo sapiens
  misc_RNA (1)...(19): siRNA sense strand
ucaagagaccaaaucagaa

SEQ ID NO: 381114 - RNA, 19 nt, Homo sapiens
  misc_RNA (1)...(19): siRNA sense strand
gaguucaccuuugaugauc

SEQ ID NO: 381115 - RNA, 19 nt, Homo sapiens
  misc_RNA (1)...(19): siRNA sense strand
ccucagguuguguguaaua

SEQ ID NO: 381116 - RNA, 19 nt, Homo sapiens
  misc_RNA (1)...(19): siRNA sense strand
aaacuucacccucaacuac

SEQ ID NO: 381117 - RNA, 19 nt, Homo sapiens
  misc_RNA (1)...(19): siRNA sense strand
caaacuucacccucaacua

SEQ ID NO: 381118 - RNA, 19 nt, Homo sapiens
  misc_RNA (1)...(19): siRNA sense strand
gagaguuagucccgagaag

SEQ ID NO: 381119 - RNA, 19 nt, Homo sapiens
  misc_RNA (1)...(19): siRNA sense strand
gacaauaccgagaguuagu

SEQ ID NO: 381120 - RNA, 19 nt, Homo sapiens
  misc_RNA (1)...(19): siRNA sense strand
aggaggacuucaacaauuc

SEQ ID NO: 381121 - RNA, 19 nt, Homo sapiens
  misc_RNA (1)...(19): siRNA sense strand
ggacgaaaggcuaaucacu

SEQ ID NO: 381122 - RNA, 19 nt, Homo sapiens
  misc_RNA (1)...(19): siRNA sense strand
gggugaccgaccuguauua

SEQ ID NO: 381123 - RNA, 19 nt, Homo sapiens
  misc_RNA (1)...(19): siRNA sense strand
cgaggaggacuucaacaau

SEQ ID NO: 381124 - RNA, 19 nt, Homo sapiens
  misc_RNA (1)...(19): siRNA sense strand
gaaaacacgcaauaugaug

SEQ ID NO: 381125 - RNA, 19 nt, Homo sapiens
  misc_RNA (1)...(19): siRNA sense strand
gggacgccuuugccacuga

SEQ ID NO: 381126 - RNA, 19 nt, Homo sapiens
  misc_RNA (1)...(19): siRNA sense strand
ucuuggaguucaccuuuga

SEQ ID NO: 381127 - RNA, 19 nt, Homo sapiens
  misc_RNA (1)...(19): siRNA sense strand
cacgggaagcccauguuua

SEQ ID NO: 381128 - RNA, 19 nt, Homo sapiens
  misc_RNA (1)...(19): siRNA sense strand
cauuaacccuuucauuuug

SEQ ID NO: 381129 - RNA, 19 nt, Homo sapiens
  misc_RNA (1)...(19): siRNA sense strand
gaagaccacagcugcaaac

SEQ ID NO: 381130 - RNA, 19 nt, Homo sapiens
  misc_RNA (1)...(19): siRNA sense strand
gcgcugggaacaaugcaaa

SEQ ID NO: 381131 - RNA, 19 nt, Homo sapiens
  misc_RNA (1)...(19): siRNA sense strand
caaggcaaccaacaaccaa

SEQ ID NO: 381132 - RNA, 19 nt, Homo sapiens
  misc_RNA (1)...(19): siRNA sense strand
gaacccacaaggcaaccaa

SEQ ID NO: 381133 - RNA, 19 nt, Homo sapiens
  misc_RNA (1)...(19): siRNA sense strand
ggauggggcuaacaaacuu

SEQ ID NO: 381134 - RNA, 19 nt, Homo sapiens
  misc_RNA (1)...(19): siRNA sense strand
gcugcaaaccugagucugu

SEQ ID NO: 381135 - RNA, 19 nt, Homo sapiens
  misc_RNA (1)...(19): siRNA sense strand
uagaaaacacgcaauauga

SEQ ID NO: 381136 - RNA, 19 nt, Homo sapiens
  misc_RNA (1)...(19): siRNA sense strand
auaggaggcauacaccaua

SEQ ID NO: 381137 - RNA, 19 nt, Homo sapiens
  misc_RNA (1)...(19): siRNA sense strand
ggacgacgaggaggacuuc

SEQ ID NO: 381138 - RNA, 19 nt, Homo sapiens
  misc_RNA (1)...(19): siRNA sense strand
gacgaggacgaaaggcuaa

SEQ ID NO: 381139 - RNA, 19 nt, Homo sapiens
  misc_RNA (1)...(19): siRNA sense strand
caacaaccaaacggagaaa

SEQ ID NO: 381140 - RNA, 19 nt, Homo sapiens
  misc_RNA (1)...(19): siRNA sense strand
ccaacaaccaaacggagaa

SEQ ID NO: 381141 - RNA, 19 nt, Homo sapiens
  misc_RNA (1)...(19): siRNA sense strand
aagauggaccaaagcgaua

SEQ ID NO: 381142 - RNA, 19 nt, Homo sapiens
  misc_RNA (1)...(19): siRNA sense strand
cucaagagaccaaaucaga

SEQ ID NO: 381143 - RNA, 19 nt, Homo sapiens
  misc_RNA (1)...(19): siRNA sense strand
gauuagaaaacacgcaaua

SEQ ID NO: 381144 - RNA, 19 nt, Homo sapiens
  misc_RNA (1)...(19): siRNA sense strand
ccagaguaccgaaucuaug

SEQ ID NO: 381145 - RNA, 19 nt, Homo sapiens
  misc_RNA (1)...(19): siRNA sense strand
agaccugcuuguuucagaa

SEQ ID NO: 381146 - RNA, 19 nt, Homo sapiens
  misc_RNA (1)...(19): siRNA sense strand
gaggacgaaaggcuaauca

SEQ ID NO: 381147 - RNA, 19 nt, Homo sapiens
  misc_RNA (1)...(19): siRNA sense strand
gccagaguaccgaaucuau

SEQ ID NO: 381148 - RNA, 19 nt, Homo sapiens
  misc_RNA (1)...(19): siRNA sense strand
ccacucaagagaccaaauc

SEQ ID NO: 381149 - RNA, 19 nt, Homo sapiens
  misc_RNA (1)...(19): siRNA sense strand
cgccuuugccacugaauuu

SEQ ID NO: 381150 - RNA, 19 nt, Homo sapiens
  misc_RNA (1)...(19): siRNA sense strand
caacagcccguggaacagu

SEQ ID NO: 381151 - RNA, 19 nt, Homo sapiens
  misc_RNA (1)...(19): siRNA sense strand
ggaggacuucaacaauuca

SEQ ID NO: 381152 - RNA, 19 nt, Homo sapiens
  misc_RNA (1)...(19): siRNA sense strand
gaguaccgaaucuaugaga

SEQ ID NO: 381153 - RNA, 19 nt, Homo sapiens
  misc_RNA (1)...(19): siRNA sense strand
ccacaaggcaaccaacaac

SEQ ID NO: 381154 - RNA, 19 nt, Homo sapiens
  misc_RNA (1)...(19): siRNA sense strand
gggaagcccauguuuacca

SEQ ID NO: 381155 - RNA, 19 nt, Homo sapiens
  misc_RNA (1)...(19): siRNA sense strand
cuucuauucuucuccuuuc

SEQ ID NO: 381156 - RNA, 19 nt, Homo sapiens
  misc_RNA (1)...(19): siRNA sense strand
ucugaugggaggugaguuu

SEQ ID NO: 381157 - RNA, 19 nt, Homo sapiens
  misc_RNA (1)...(19): siRNA sense strand
aagaccugcuuguuucaga

SEQ ID NO: 381158 - RNA, 19 nt, Homo sapiens
  misc_RNA (1)...(19): siRNA sense strand
gguuguguguaauauugga

SEQ ID NO: 381159 - RNA, 19 nt, Homo sapiens
  misc_RNA (1)...(19): siRNA sense strand
ccacaugaccccuucuauu

SEQ ID NO: 381160 - RNA, 19 nt, Homo sapiens
  misc_RNA (1)...(19): siRNA sense strand
gaguuagucccgagaagca

SEQ ID NO: 381161 - RNA, 19 nt, Homo sapiens
  misc_RNA (1)...(19): siRNA sense strand
acagaaggcagacugaucu

SEQ ID NO: 381162 - RNA, 19 nt, Homo sapiens
  misc_RNA (1)...(19): siRNA sense strand
ggaggcauacaccauacau

SEQ ID NO: 381163 - RNA, 19 nt, Homo sapiens
  misc_RNA (1)...(19): siRNA sense strand
gagucuguccagucaggua

SEQ ID NO: 381164 - RNA, 19 nt, Homo sapiens
  misc_RNA (1)...(19): siRNA sense strand
gagccaaugcaggaacuga

SEQ ID NO: 381165 - RNA, 19 nt, Homo sapiens
  misc_RNA (1)...(19): siRNA sense strand
agucauaccacaacucauc

SEQ ID NO: 381166 - RNA, 19 nt, Homo sapiens
  misc_RNA (1)...(19): siRNA sense strand
gccaaugcaggaacugaug

SEQ ID NO: 381167 - RNA, 19 nt, Homo sapiens
  misc_RNA (1)...(19): siRNA sense strand
aacagcccguggaacagua

SEQ ID NO: 381168 - RNA, 19 nt, Homo sapiens
  misc_RNA (1)...(19): siRNA sense strand
aacaacagcccguggaaca

SEQ ID NO: 381169 - RNA, 19 nt, Homo sapiens
  misc_RNA (1)...(19): siRNA sense strand
cuuuagcacuguguuugaa

SEQ ID NO: 381170 - RNA, 19 nt, Homo sapiens
  misc_RNA (1)...(19): siRNA sense strand
aaggcagacugaucuugga

SEQ ID NO: 381171 - RNA, 19 nt, Homo sapiens
  misc_RNA (1)...(19): siRNA sense strand
guacagaaggcagacugau

SEQ ID NO: 381172 - RNA, 19 nt, Homo sapiens
  misc_RNA (1)...(19): siRNA sense strand
ggagagcauuuguauguua

SEQ ID NO: 381173 - RNA, 19 nt, Homo sapiens
  misc_RNA (1)...(19): siRNA sense strand
gacagaagauucaauaaga

SEQ ID NO: 381174 - RNA, 19 nt, Homo sapiens
  misc_RNA (1)...(19): siRNA sense strand
ggaagcacaugaacaagga

SEQ ID NO: 381175 - RNA, 19 nt, Homo sapiens
  misc_RNA (1)...(19): siRNA sense strand
ugacuacgauggagaagaa

SEQ ID NO: 381176 - RNA, 19 nt, Homo sapiens
  misc_RNA (1)...(19): siRNA sense strand
ggaccgaagugacugucua

SEQ ID NO: 381177 - RNA, 19 nt, Homo sapiens
  misc_RNA (1)...(19): siRNA sense strand
ggaagacagugaugaugau

SEQ ID NO: 381178 - RNA, 19 nt, Homo sapiens
  misc_RNA (1)...(19): siRNA sense strand
agaagaauaugauguggaa

SEQ ID NO: 381179 - RNA, 19 nt, Homo sapiens
  misc_RNA (1)...(19): siRNA sense strand
uauggugaaugccaaauuu

SEQ ID NO: 381180 - RNA, 19 nt, Homo sapiens
  misc_RNA (1)...(19): siRNA sense strand
gugagcagccaguauaaua

SEQ ID NO: 381181 - RNA, 19 nt, Homo sapiens
  misc_RNA (1)...(19): siRNA sense strand
gagagcauuuguauguuau

SEQ ID NO: 381182 - RNA, 19 nt, Homo sapiens
  misc_RNA (1)...(19): siRNA sense strand
ggacagaagauucaauaag

SEQ ID NO: 381183 - RNA, 19 nt, Homo sapiens
  misc_RNA (1)...(19): siRNA sense strand
ggauucagaugacuacgau

SEQ ID NO: 381184 - RNA, 19 nt, Homo sapiens
  misc_RNA (1)...(19): siRNA sense strand
gaaggaaugcuuucucagu

SEQ ID NO: 381185 - RNA, 19 nt, Homo sapiens
  misc_RNA (1)...(19): siRNA sense strand
gaugauguugaaccuauua

SEQ ID NO: 381186 - RNA, 19 nt, Homo sapiens
  misc_RNA (1)...(19): siRNA sense strand
agacagugaugaugauguu

SEQ ID NO: 381187 - RNA, 19 nt, Homo sapiens
  misc_RNA (1)...(19): siRNA sense strand
gagauuagaaggaaugcuu

SEQ ID NO: 381188 - RNA, 19 nt, Homo sapiens
  misc_RNA (1)...(19): siRNA sense strand
uaggagagcauuuguaugu

SEQ ID NO: 381189 - RNA, 19 nt, Homo sapiens
  misc_RNA (1)...(19): siRNA sense strand
caggacagaagauucaaua

SEQ ID NO: 381190 - RNA, 19 nt, Homo sapiens
  misc_RNA (1)...(19): siRNA sense strand
guuagauggcucuggauua

SEQ ID NO: 381191 - RNA, 19 nt, Homo sapiens
  misc_RNA (1)...(19): siRNA sense strand
aacaguugcuggacaguuu

SEQ ID NO: 381192 - RNA, 19 nt, Homo sapiens
  misc_RNA (1)...(19): siRNA sense strand
ggagagauuagaaggaaug

SEQ ID NO: 381193 - RNA, 19 nt, Homo sapiens
  misc_RNA (1)...(19): siRNA sense strand
gaggcaauguucacugcaa

SEQ ID NO: 381194 - RNA, 19 nt, Homo sapiens
  misc_RNA (1)...(19): siRNA sense strand
ugccaaauuugaagaagaa

SEQ ID NO: 381195 - RNA, 19 nt, Homo sapiens
  misc_RNA (1)...(19): siRNA sense strand
gagcagccaguauaauaug

SEQ ID NO: 381196 - RNA, 19 nt, Homo sapiens
  misc_RNA (1)...(19): siRNA sense strand
uuagauggcucuggauuag

SEQ ID NO: 381197 - RNA, 19 nt, Homo sapiens
  misc_RNA (1)...(19): siRNA sense strand
uuacaccuaugaagaagga

SEQ ID NO: 381198 - RNA, 19 nt, Homo sapiens
  misc_RNA (1)...(19): siRNA sense strand
aagaaccuguugcugauga

SEQ ID NO: 381199 - RNA, 19 nt, Homo sapiens
  misc_RNA (1)...(19): siRNA sense strand
ggucaggacagaagauuca

SEQ ID NO: 381200 - RNA, 19 nt, Homo sapiens
  misc_RNA (1)...(19): siRNA sense strand
ggacaucccuacauuuuac

SEQ ID NO: 381201 - RNA, 19 nt, Homo sapiens
  misc_RNA (1)...(19): siRNA sense strand
gaagaggaagacagugaug

SEQ ID NO: 381202 - RNA, 19 nt, Homo sapiens
  misc_RNA (1)...(19): siRNA sense strand
gaagaagaaucaaaagaac

SEQ ID NO: 381203 - RNA, 19 nt, Homo sapiens
  misc_RNA (1)...(19): siRNA sense strand
gcacugguacccuuuacau

SEQ ID NO: 381204 - RNA, 19 nt, Homo sapiens
  misc_RNA (1)...(19): siRNA sense strand
gcugagagccgccugucuu

SEQ ID NO: 381205 - RNA, 19 nt, Homo sapiens
  misc_RNA (1)...(19): siRNA sense strand
uuagauuugugccuaguga

SEQ ID NO: 381206 - RNA, 19 nt, Homo sapiens
  misc_RNA (1)...(19): siRNA sense strand
aagccacacuggagagauu

SEQ ID NO: 381207 - RNA, 19 nt, Homo sapiens
  misc_RNA (1)...(19): siRNA sense strand
gaaugccaaauuugaagaa

SEQ ID NO: 381208 - RNA, 19 nt, Homo sapiens
  misc_RNA (1)...(19): siRNA sense strand
ggugaaugccaaauuugaa

SEQ ID NO: 381209 - RNA, 19 nt, Homo sapiens
  misc_RNA (1)...(19): siRNA sense strand
ggaugaggauucagaugac

SEQ ID NO: 381210 - RNA, 19 nt, Homo sapiens
  misc_RNA (1)...(19): siRNA sense strand
gauuugugccuagugauaa

SEQ ID NO: 381211 - RNA, 19 nt, Homo sapiens
  misc_RNA (1)...(19): siRNA sense strand
agauggcucuggauuagga

SEQ ID NO: 381212 - RNA, 19 nt, Homo sapiens
  misc_RNA (1)...(19): siRNA sense strand
gagcauuuguauguuaugg

SEQ ID NO: 381213 - RNA, 19 nt, Homo sapiens
  misc_RNA (1)...(19): siRNA sense strand
cagaagauucaauaagaga

SEQ ID NO: 381214 - RNA, 19 nt, Homo sapiens
  misc_RNA (1)...(19): siRNA sense strand
cuggagagauuagaaggaa

SEQ ID NO: 381215 - RNA, 19 nt, Homo sapiens
  misc_RNA (1)...(19): siRNA sense strand
ucacugcaaugugcgaaug

SEQ ID NO: 381216 - RNA, 19 nt, Homo sapiens
  misc_RNA (1)...(19): siRNA sense strand
guuugaggaugcagauguu

SEQ ID NO: 381217 - RNA, 19 nt, Homo sapiens
  misc_RNA (1)...(19): siRNA sense strand
ucugugagcagccaguaua

SEQ ID NO: 381218 - RNA, 19 nt, Homo sapiens
  misc_RNA (1)...(19): siRNA sense strand
caccuaugaagaaggauua

SEQ ID NO: 381219 - RNA, 19 nt, Homo sapiens
  misc_RNA (1)...(19): siRNA sense strand
ugaagaagaggaagacagu

SEQ ID NO: 381220 - RNA, 19 nt, Homo sapiens
  misc_RNA (1)...(19): siRNA sense strand
ggauaccacaccaacaguu

SEQ ID NO: 381221 - RNA, 19 nt, Homo sapiens
  misc_RNA (1)...(19): siRNA sense strand
acacugaggcugugcugaa

SEQ ID NO: 381222 - RNA, 19 nt, Homo sapiens
  misc_RNA (1)...(19): siRNA sense strand
gcaauguucacugcaaugu

SEQ ID NO: 381223 - RNA, 19 nt, Homo sapiens
  misc_RNA (1)...(19): siRNA sense strand
aagaagaggaagacaguga

SEQ ID NO: 381224 - RNA, 19 nt, Homo sapiens
  misc_RNA (1)...(19): siRNA sense strand
acagaagauucaauaagag

SEQ ID NO: 381225 - RNA, 19 nt, Homo sapiens
  misc_RNA (1)...(19): siRNA sense strand
ggcagcagccagacacuga

SEQ ID NO: 381226 - RNA, 19 nt, Homo sapiens
  misc_RNA (1)...(19): siRNA sense strand
gauguugaaccuauuacug

SEQ ID NO: 381227 - RNA, 19 nt, Homo sapiens
  misc_RNA (1)...(19): siRNA sense strand
ucuaggagagcauuuguau

SEQ ID NO: 381228 - RNA, 19 nt, Homo sapiens
  misc_RNA (1)...(19): siRNA sense strand
aaaagaaccuguugcugau

SEQ ID NO: 381229 - RNA, 19 nt, Homo sapiens
  misc_RNA (1)...(19): siRNA sense strand
ggaugcagauguugaucac

SEQ ID NO: 381230 - RNA, 19 nt, Homo sapiens
  misc_RNA (1)...(19): siRNA sense strand
aaucagcguuggaggcaau

SEQ ID NO: 381231 - RNA, 19 nt, Homo sapiens
  misc_RNA (1)...(19): siRNA sense strand
cagugaugaugauguugaa

SEQ ID NO: 381232 - RNA, 19 nt, Homo sapiens
  misc_RNA (1)...(19): siRNA sense strand
gaagacagugaugaugaug

SEQ ID NO: 381233 - RNA, 19 nt, Homo sapiens
  misc_RNA (1)...(19): siRNA sense strand
gaggaagacagugaugaug

SEQ ID NO: 381234 - RNA, 19 nt, Homo sapiens
  misc_RNA (1)...(19): siRNA sense strand
augaugauguugaaccuau

SEQ ID NO: 381235 - RNA, 19 nt, Homo sapiens
  misc_RNA (1)...(19): siRNA sense strand
agauuugugccuagugaua

SEQ ID NO: 381236 - RNA, 19 nt, Homo sapiens
  misc_RNA (1)...(19): siRNA sense strand
ugagcagccaguauaauau

SEQ ID NO: 381237 - RNA, 19 nt, Homo sapiens
  misc_RNA (1)...(19): siRNA sense strand
cuacgauggagaagaauau

SEQ ID NO: 381238 - RNA, 19 nt, Homo sapiens
  misc_RNA (1)...(19): siRNA sense strand
ccauuaguuuacaugcauu

SEQ ID NO: 381239 - RNA, 19 nt, Homo sapiens
  misc_RNA (1)...(19): siRNA sense strand
gagccgccugucuugguua

SEQ ID NO: 381240 - RNA, 19 nt, Homo sapiens
  misc_RNA (1)...(19): siRNA sense strand
aggaugaggauucagauga

SEQ ID NO: 381241 - RNA, 19 nt, Homo sapiens
  misc_RNA (1)...(19): siRNA sense strand
uguugaaccuauuacugaa

SEQ ID NO: 381242 - RNA, 19 nt, Homo sapiens
  misc_RNA (1)...(19): siRNA sense strand
ugaugauguugaaccuauu

SEQ ID NO: 381243 - RNA, 19 nt, Homo sapiens
  misc_RNA (1)...(19): siRNA sense strand
aggaagacagugaugauga

SEQ ID NO: 381244 - RNA, 19 nt, Homo sapiens
  misc_RNA (1)...(19): siRNA sense strand
gagagccgccugucuuggu

SEQ ID NO: 381245 - RNA, 19 nt, Homo sapiens
  misc_RNA (1)...(19): siRNA sense strand
gguuagauggcucuggauu

SEQ ID NO: 381246 - RNA, 19 nt, Homo sapiens
  misc_RNA (1)...(19): siRNA sense strand
acagugaugaugauguuga

SEQ ID NO: 381247 - RNA, 19 nt, Homo sapiens
  misc_RNA (1)...(19): siRNA sense strand
agaauaugauguggaagca

SEQ ID NO: 381248 - RNA, 19 nt, Homo sapiens
  misc_RNA (1)...(19): siRNA sense strand
cgauggagaagaauaugau

SEQ ID NO: 381249 - RNA, 19 nt, Homo sapiens
  misc_RNA (1)...(19): siRNA sense strand
gaggaugaggauucagaug

SEQ ID NO: 381250 - RNA, 19 nt, Homo sapiens
  misc_RNA (1)...(19): siRNA sense strand
caccauuaguuuacaugca

SEQ ID NO: 381251 - RNA, 19 nt, Homo sapiens
  misc_RNA (1)...(19): siRNA sense strand
gauuagaaggaaugcuuuc

SEQ ID NO: 381252 - RNA, 19 nt, Homo sapiens
  misc_RNA (1)...(19): siRNA sense strand
ccgaagugacugucuagga

SEQ ID NO: 381253 - RNA, 19 nt, Homo sapiens
  misc_RNA (1)...(19): siRNA sense strand
gauggagaagaauaugaug

SEQ ID NO: 381254 - RNA, 19 nt, Homo sapiens
  misc_RNA (1)...(19): siRNA sense strand
gaugaggauucagaugacu

SEQ ID NO: 381255 - RNA, 19 nt, Homo sapiens
  misc_RNA (1)...(19): siRNA sense strand
ugaaugccaaauuugaaga

SEQ ID NO: 381256 - RNA, 19 nt, Homo sapiens
  misc_RNA (1)...(19): siRNA sense strand
uaguuuacaugcauuaucc

SEQ ID NO: 381257 - RNA, 19 nt, Homo sapiens
  misc_RNA (1)...(19): siRNA sense strand
gaauaccccaccauuaguu

SEQ ID NO: 381258 - RNA, 19 nt, Homo sapiens
  misc_RNA (1)...(19): siRNA sense strand
uggagaagaauaugaugug

SEQ ID NO: 381259 - RNA, 19 nt, Homo sapiens
  misc_RNA (1)...(19): siRNA sense strand
gaugaugauguugaaccua

SEQ ID NO: 381260 - RNA, 19 nt, Homo sapiens
  misc_RNA (1)...(19): siRNA sense strand
gcgaaugccaggccuugca

SEQ ID NO: 381261 - RNA, 19 nt, Homo sapiens
  misc_RNA (1)...(19): siRNA sense strand
ugcagauguugaucacuga

SEQ ID NO: 381262 - RNA, 19 nt, Homo sapiens
  misc_RNA (1)...(19): siRNA sense strand
gaugggauggagguggaua

SEQ ID NO: 381263 - RNA, 19 nt, Homo sapiens
  misc_RNA (1)...(19): siRNA sense strand
agagccgccugucuugguu

SEQ ID NO: 381264 - RNA, 19 nt, Homo sapiens
  misc_RNA (1)...(19): siRNA sense strand
ggaaguacauuuacagucu

SEQ ID NO: 381265 - RNA, 19 nt, Homo sapiens
  misc_RNA (1)...(19): siRNA sense strand
cgaccuggcuuacuuaaag

SEQ ID NO: 381266 - RNA, 19 nt, Homo sapiens
  misc_RNA (1)...(19): siRNA sense strand
gggauuauaucugcaagaa

SEQ ID NO: 381267 - RNA, 19 nt, Homo sapiens
  misc_RNA (1)...(19): siRNA sense strand
uccaugaucucgaauauga

SEQ ID NO: 381268 - RNA, 19 nt, Homo sapiens
  misc_RNA (1)...(19): siRNA sense strand
ccaccgaccuggcuuacuu

SEQ ID NO: 381269 - RNA, 19 nt, Homo sapiens
  misc_RNA (1)...(19): siRNA sense strand
gaacuuggucuuguacauu

SEQ ID NO: 381270 - RNA, 19 nt, Homo sapiens
  misc_RNA (1)...(19): siRNA sense strand
uaacugguaucugcuuauu

SEQ ID NO: 381271 - RNA, 19 nt, Homo sapiens
  misc_RNA (1)...(19): siRNA sense strand
cggcagauguccuguaugu

SEQ ID NO: 381272 - RNA, 19 nt, Homo sapiens
  misc_RNA (1)...(19): siRNA sense strand
aagacaaccugaucgauga

SEQ ID NO: 381273 - RNA, 19 nt, Homo sapiens
  misc_RNA (1)...(19): siRNA sense strand
ccacccagaugaagaugaa

SEQ ID NO: 381274 - RNA, 19 nt, Homo sapiens
  misc_RNA (1)...(19): siRNA sense strand
gaugaggaguaucucuuug

SEQ ID NO: 381275 - RNA, 19 nt, Homo sapiens
  misc_RNA (1)...(19): siRNA sense strand
agaagacgguggaugagaa

SEQ ID NO: 381276 - RNA, 19 nt, Homo sapiens
  misc_RNA (1)...(19): siRNA sense strand
guacaacgccacccagaug

SEQ ID NO: 381277 - RNA, 19 nt, Homo sapiens
  misc_RNA (1)...(19): siRNA sense strand
gcuccaugaucucgaauau

SEQ ID NO: 381278 - RNA, 19 nt, Homo sapiens
  misc_RNA (1)...(19): siRNA sense strand
uauaacugguaucugcuua

SEQ ID NO: 381279 - RNA, 19 nt, Homo sapiens
  misc_RNA (1)...(19): siRNA sense strand
ucaagagccucccagacaa

SEQ ID NO: 381280 - RNA, 19 nt, Homo sapiens
  misc_RNA (1)...(19): siRNA sense strand
acaagaagacgguggauga

SEQ ID NO: 381281 - RNA, 19 nt, Homo sapiens
  misc_RNA (1)...(19): siRNA sense strand
gcagauguccuguaugucu

SEQ ID NO: 381282 - RNA, 19 nt, Homo sapiens
  misc_RNA (1)...(19): siRNA sense strand
acugguaucugcuuauuug

SEQ ID NO: 381283 - RNA, 19 nt, Homo sapiens
  misc_RNA (1)...(19): siRNA sense strand
ggaacuuggucuuguacau

SEQ ID NO: 381284 - RNA, 19 nt, Homo sapiens
  misc_RNA (1)...(19): siRNA sense strand
cgugaaagaugaggaguau

SEQ ID NO: 381285 - RNA, 19 nt, Homo sapiens
  misc_RNA (1)...(19): siRNA sense strand
ggcagauccugaugaaaga

SEQ ID NO: 381286 - RNA, 19 nt, Homo sapiens
  misc_RNA (1)...(19): siRNA sense strand
gacggcagauccugaugaa

SEQ ID NO: 381287 - RNA, 19 nt, Homo sapiens
  misc_RNA (1)...(19): siRNA sense strand
agaaggcccuggaggagaa

SEQ ID NO: 381288 - RNA, 19 nt, Homo sapiens
  misc_RNA (1)...(19): siRNA sense strand
agaaggaggugcucaagag

SEQ ID NO: 381289 - RNA, 19 nt, Homo sapiens
  misc_RNA (1)...(19): siRNA sense strand
aaacagaggacaaacaaca

SEQ ID NO: 381290 - RNA, 19 nt, Homo sapiens
  misc_RNA (1)...(19): siRNA sense strand
gaugaaagacaaccugauc

SEQ ID NO: 381291 - RNA, 19 nt, Homo sapiens
  misc_RNA (1)...(19): siRNA sense strand
ggagguguccagccaagaa

SEQ ID NO: 381292 - RNA, 19 nt, Homo sapiens
  misc_RNA (1)...(19): siRNA sense strand
gcaucuacuuugccauuuc

SEQ ID NO: 381293 - RNA, 19 nt, Homo sapiens
  misc_RNA (1)...(19): siRNA sense strand
gcacagagacaaggaccaa

SEQ ID NO: 381294 - RNA, 19 nt, Homo sapiens
  misc_RNA (1)...(19): siRNA sense strand
ggacggcagauccugauga

SEQ ID NO: 381295 - RNA, 19 nt, Homo sapiens
  misc_RNA (1)...(19): siRNA sense strand
gccaacauccgcagcauug

SEQ ID NO: 381296 - RNA, 19 nt, Homo sapiens
  misc_RNA (1)...(19): siRNA sense strand
gcaagaagggagauauugg

SEQ ID NO: 381297 - RNA, 19 nt, Homo sapiens
  misc_RNA (1)...(19): siRNA sense strand
gcacaaacuacccagaagu

SEQ ID NO: 381298 - RNA, 19 nt, Homo sapiens
  misc_RNA (1)...(19): siRNA sense strand
uaaaggugggcacaaacua

SEQ ID NO: 381299 - RNA, 19 nt, Homo sapiens
  misc_RNA (1)...(19): siRNA sense strand
caaaggacgaucucaugga

SEQ ID NO: 381300 - RNA, 19 nt, Homo sapiens
  misc_RNA (1)...(19): siRNA sense strand
gagaaggaggugcucaaga

SEQ ID NO: 381301 - RNA, 19 nt, Homo sapiens
  misc_RNA (1)...(19): siRNA sense strand
gggcacaaacuacccagaa

SEQ ID NO: 381302 - RNA, 19 nt, Homo sapiens
  misc_RNA (1)...(19): siRNA sense strand
ugucuuggaugugcuugua

SEQ ID NO: 381303 - RNA, 19 nt, Homo sapiens
  misc_RNA (1)...(19): siRNA sense strand
gaaagacaaccugaucgau

SEQ ID NO: 381304 - RNA, 19 nt, Homo sapiens
  misc_RNA (1)...(19): siRNA sense strand
acacggaggaggagaagaa

SEQ ID NO: 381305 - RNA, 19 nt, Homo sapiens
  misc_RNA (1)...(19): siRNA sense strand
ugaggaguaucucuuugug

SEQ ID NO: 381306 - RNA, 19 nt, Homo sapiens
  misc_RNA (1)...(19): siRNA sense strand
ucaaccgccuacugaaguu

SEQ ID NO: 381307 - RNA, 19 nt, Homo sapiens
  misc_RNA (1)...(19): siRNA sense strand
ccaagaucaacacccaaua

SEQ ID NO: 381308 - RNA, 19 nt, Homo sapiens
  misc_RNA (1)...(19): siRNA sense strand
ggacuacucggcagauguc

SEQ ID NO: 381309 - RNA, 19 nt, Homo sapiens
  misc_RNA (1)...(19): siRNA sense strand
cggcagauccugaugaaag

SEQ ID NO: 381310 - RNA, 19 nt, Homo sapiens
  misc_RNA (1)...(19): siRNA sense strand
ggagaaaggacggcagauc

SEQ ID NO: 381311 - RNA, 19 nt, Homo sapiens
  misc_RNA (1)...(19): siRNA sense strand
gcagagcccacucgucaag

SEQ ID NO: 381312 - RNA, 19 nt, Homo sapiens
  misc_RNA (1)...(19): siRNA sense strand
cagauguccuguaugucuu

SEQ ID NO: 381313 - RNA, 19 nt, Homo sapiens
  misc_RNA (1)...(19): siRNA sense strand
gaccuguucugccucucaa

SEQ ID NO: 381314 - RNA, 19 nt, Homo sapiens
  misc_RNA (1)...(19): siRNA sense strand
aggcugagaucgccaucaa

SEQ ID NO: 381315 - RNA, 19 nt, Homo sapiens
  misc_RNA (1)...(19): siRNA sense strand
caagaucaacacccaauac

SEQ ID NO: 381316 - RNA, 19 nt, Homo sapiens
  misc_RNA (1)...(19): siRNA sense strand
cuugguggguguucugauu

SEQ ID NO: 381317 - RNA, 19 nt, Homo sapiens
  misc_RNA (1)...(19): siRNA sense strand
aaugugggcuccaugaucu

SEQ ID NO: 381318 - RNA, 19 nt, Homo sapiens
  misc_RNA (1)...(19): siRNA sense strand
ggcacaaacuacccagaag

SEQ ID NO: 381319 - RNA, 19 nt, Homo sapiens
  misc_RNA (1)...(19): siRNA sense strand
ugguggagcuggugcugaa

SEQ ID NO: 381320 - RNA, 19 nt, Homo sapiens
  misc_RNA (1)...(19): siRNA sense strand
ucuccaggaaguacauuua

SEQ ID NO: 381321 - RNA, 19 nt, Homo sapiens
  misc_RNA (1)...(19): siRNA sense strand
acaagacgaccacgcaguu

SEQ ID NO: 381322 - RNA, 19 nt, Homo sapiens
  misc_RNA (1)...(19): siRNA sense strand
ccgcagcauuggcuacuca

SEQ ID NO: 381323 - RNA, 19 nt, Homo sapiens
  misc_RNA (1)...(19): siRNA sense strand
gcaaggucaccaaggacuu

SEQ ID NO: 381324 - RNA, 19 nt, Homo sapiens
  misc_RNA (1)...(19): siRNA sense strand
acuuaaaggugggcacaaa

SEQ ID NO: 381325 - RNA, 19 nt, Homo sapiens
  misc_RNA (1)...(19): siRNA sense strand
gcaguccgaguaccugaug

SEQ ID NO: 381326 - RNA, 19 nt, Homo sapiens
  misc_RNA (1)...(19): siRNA sense strand
ugaaagacaaccugaucga

SEQ ID NO: 381327 - RNA, 19 nt, Homo sapiens
  misc_RNA (1)...(19): siRNA sense strand
gaagacgguggaugagaag

SEQ ID NO: 381328 - RNA, 19 nt, Homo sapiens
  misc_RNA (1)...(19): siRNA sense strand
cagagacaaggaccaacua

SEQ ID NO: 381329 - RNA, 19 nt, Homo sapiens
  misc_RNA (1)...(19): siRNA sense strand
uuucccggcucuuugaauu

SEQ ID NO: 381330 - RNA, 19 nt, Homo sapiens
  misc_RNA (1)...(19): siRNA sense strand
ggcuuaauggucagugaua

SEQ ID NO: 381331 - RNA, 19 nt, Homo sapiens
  misc_RNA (1)...(19): siRNA sense strand
gagguguccagccaagaaa

SEQ ID NO: 381332 - RNA, 19 nt, Homo sapiens
  misc_RNA (1)...(19): siRNA sense strand
uggacacgcugaagaaggu

SEQ ID NO: 381333 - RNA, 19 nt, Homo sapiens
  misc_RNA (1)...(19): siRNA sense strand
gcaacacuaacaccagcaa

SEQ ID NO: 381334 - RNA, 19 nt, Homo sapiens
  misc_RNA (1)...(19): siRNA sense strand
cgucucagccaacuggaaa

SEQ ID NO: 381335 - RNA, 19 nt, Homo sapiens
  misc_RNA (1)...(19): siRNA sense strand
gcaaugugggcuccaugau

SEQ ID NO: 381336 - RNA, 19 nt, Homo sapiens
  misc_RNA (1)...(19): siRNA sense strand
ccggcucuuugaauucuuu

SEQ ID NO: 381337 - RNA, 19 nt, Homo sapiens
  misc_RNA (1)...(19): siRNA sense strand
ugucuucuauaacugguau

SEQ ID NO: 381338 - RNA, 19 nt, Homo sapiens
  misc_RNA (1)...(19): siRNA sense strand
cgcccugccugucuucuau

SEQ ID NO: 381339 - RNA, 19 nt, Homo sapiens
  misc_RNA (1)...(19): siRNA sense strand
cggguuauccggugguuug

SEQ ID NO: 381340 - RNA, 19 nt, Homo sapiens
  misc_RNA (1)...(19): siRNA sense strand
caaugugggcuccaugauc

SEQ ID NO: 381341 - RNA, 19 nt, Homo sapiens
  misc_RNA (1)...(19): siRNA sense strand
ggcaaugugggcuccauga

SEQ ID NO: 381342 - RNA, 19 nt, Homo sapiens
  misc_RNA (1)...(19): siRNA sense strand
uugggaacuuggucuugua

SEQ ID NO: 381343 - RNA, 19 nt, Homo sapiens
  misc_RNA (1)...(19): siRNA sense strand
guacgagcucggacagguu

SEQ ID NO: 381344 - RNA, 19 nt, Homo sapiens
  misc_RNA (1)...(19): siRNA sense strand
gaucucaaucgcgcugaaa

SEQ ID NO: 381345 - RNA, 19 nt, Homo sapiens
  misc_RNA (1)...(19): siRNA sense strand
cacaaacuacccagaagug

SEQ ID NO: 381346 - RNA, 19 nt, Homo sapiens
  misc_RNA (1)...(19): siRNA sense strand
caugaucucgaauaugaau

SEQ ID NO: 381347 - RNA, 19 nt, Homo sapiens
  misc_RNA (1)...(19): siRNA sense strand
ggucuacccaaacaucuca

SEQ ID NO: 381348 - RNA, 19 nt, Homo sapiens
  misc_RNA (1)...(19): siRNA sense strand
gccaagaucaacacccaau

SEQ ID NO: 381349 - RNA, 19 nt, Homo sapiens
  misc_RNA (1)...(19): siRNA sense strand
ucaagcaguacaugcaguu

SEQ ID NO: 381350 - RNA, 19 nt, Homo sapiens
  misc_RNA (1)...(19): siRNA sense strand
acacuaacaccagcaacaa

SEQ ID NO: 381351 - RNA, 19 nt, Homo sapiens
  misc_RNA (1)...(19): siRNA sense strand
ccaggagccagcagacaga

SEQ ID NO: 381352 - RNA, 19 nt, Homo sapiens
  misc_RNA (1)...(19): siRNA sense strand
guaucucuuuguggucgua

SEQ ID NO: 381353 - RNA, 19 nt, Homo sapiens
  misc_RNA (1)...(19): siRNA sense strand
guacauuuacagucucuac

SEQ ID NO: 381354 - RNA, 19 nt, Homo sapiens
  misc_RNA (1)...(19): siRNA sense strand
aguucaagcuggauguguu

SEQ ID NO: 381355 - RNA, 19 nt, Homo sapiens
  misc_RNA (1)...(19): siRNA sense strand
gaccuggcuuacuuaaagg

SEQ ID NO: 381356 - RNA, 19 nt, Homo sapiens
  misc_RNA (1)...(19): siRNA sense strand
agggagauauugggaagga

SEQ ID NO: 381357 - RNA, 19 nt, Homo sapiens
  misc_RNA (1)...(19): siRNA sense strand
cucaagagccucccagaca

SEQ ID NO: 381358 - RNA, 19 nt, Homo sapiens
  misc_RNA (1)...(19): siRNA sense strand
guuauccggugguuugacu

SEQ ID NO: 381359 - RNA, 19 nt, Homo sapiens
  misc_RNA (1)...(19): siRNA sense strand
gcagaguuccaggccaaga

SEQ ID NO: 381360 - RNA, 19 nt, Homo sapiens
  misc_RNA (1)...(19): siRNA sense strand
gccaaaugcaacacuaaca

SEQ ID NO: 381361 - RNA, 19 nt, Homo sapiens
  misc_RNA (1)...(19): siRNA sense strand
aacuuggucuuguacauuc

SEQ ID NO: 381362 - RNA, 19 nt, Homo sapiens
  misc_RNA (1)...(19): siRNA sense strand
caccgaccuggcuuacuua

SEQ ID NO: 381363 - RNA, 19 nt, Homo sapiens
  misc_RNA (1)...(19): siRNA sense strand
ugucgcgccucaucuucuu

SEQ ID NO: 381364 - RNA, 19 nt, Homo sapiens
  misc_RNA (1)...(19): siRNA sense strand
cagcagcuuucccuguuga

SEQ ID NO: 381365 - RNA, 19 nt, Homo sapiens
  misc_RNA (1)...(19): siRNA sense strand
caacugcagcucuccauca

SEQ ID NO: 381366 - RNA, 19 nt, Homo sapiens
  misc_RNA (1)...(19): siRNA sense strand
cugaauggaugcugcagau

SEQ ID NO: 381367 - RNA, 19 nt, Homo sapiens
  misc_RNA (1)...(19): siRNA sense strand
gagagccgccugcuugagu

SEQ ID NO: 381368 - RNA, 19 nt, Homo sapiens
  misc_RNA (1)...(19): siRNA sense strand
uccagcagcuuucccuguu

SEQ ID NO: 381369 - RNA, 19 nt, Homo sapiens
  misc_RNA (1)...(19): siRNA sense strand
ccagcagcuuucccuguug

SEQ ID NO: 381370 - RNA, 19 nt, Homo sapiens
  misc_RNA (1)...(19): siRNA sense strand
cacuguguccggcaacaua

SEQ ID NO: 381371 - RNA, 19 nt, Homo sapiens
  misc_RNA (1)...(19): siRNA sense strand
ccggcaacauacugacuau

SEQ ID NO: 381372 - RNA, 19 nt, Homo sapiens
  misc_RNA (1)...(19): siRNA sense strand
cagcuuucccuguugaugu

SEQ ID NO: 381373 - RNA, 19 nt, Homo sapiens
  misc_RNA (1)...(19): siRNA sense strand
gccgccugcuugaguucua

SEQ ID NO: 381374 - RNA, 19 nt, Homo sapiens
  misc_RNA (1)...(19): siRNA sense strand
agagccgccugcuugaguu

SEQ ID NO: 381375 - RNA, 19 nt, Homo sapiens
  misc_RNA (1)...(19): siRNA sense strand
gcuaugagcucuuauuuca

SEQ ID NO: 381376 - RNA, 19 nt, Homo sapiens
  misc_RNA (1)...(19): siRNA sense strand
ggaaugugaugguuuaguu

SEQ ID NO: 381377 - RNA, 19 nt, Homo sapiens
  misc_RNA (1)...(19): siRNA sense strand
gaagugaucauuccucauu

SEQ ID NO: 381378 - RNA, 19 nt, Homo sapiens
  misc_RNA (1)...(19): siRNA sense strand
uagcugaccuccugacuaa

SEQ ID NO: 381379 - RNA, 19 nt, Homo sapiens
  misc_RNA (1)...(19): siRNA sense strand
ggaccuuacugaaguuauu

SEQ ID NO: 381380 - RNA, 19 nt, Homo sapiens
  misc_RNA (1)...(19): siRNA sense strand
gagugaagcucgccggaaa

SEQ ID NO: 381381 - RNA, 19 nt, Homo sapiens
  misc_RNA (1)...(19): siRNA sense strand
gcaggaaucucuggaggaa

SEQ ID NO: 381382 - RNA, 19 nt, Homo sapiens
  misc_RNA (1)...(19): siRNA sense strand
gaacuccucuuggaauuuc

SEQ ID NO: 381383 - RNA, 19 nt, Homo sapiens
  misc_RNA (1)...(19): siRNA sense strand
guaaacaugcuauuccuaa

SEQ ID NO: 381384 - RNA, 19 nt, Homo sapiens
  misc_RNA (1)...(19): siRNA sense strand
cagcagaacuccucuugga

SEQ ID NO: 381385 - RNA, 19 nt, Homo sapiens
  misc_RNA (1)...(19): siRNA sense strand
acaacuauauccagacuuu

SEQ ID NO: 381386 - RNA, 19 nt, Homo sapiens
  misc_RNA (1)...(19): siRNA sense strand
aaagaaggauggaagaaau

SEQ ID NO: 381387 - RNA, 19 nt, Homo sapiens
  misc_RNA (1)...(19): siRNA sense strand
guggagcucucaagaauau

SEQ ID NO: 381388 - RNA, 19 nt, Homo sapiens
  misc_RNA (1)...(19): siRNA sense strand
ggaacccuguggaaucuuu

SEQ ID NO: 381389 - RNA, 19 nt, Homo sapiens
  misc_RNA (1)...(19): siRNA sense strand
gaacaacacccuugaugca

SEQ ID NO: 381390 - RNA, 19 nt, Homo sapiens
  misc_RNA (1)...(19): siRNA sense strand
ggaacaagaggcccaguuu

SEQ ID NO: 381391 - RNA, 19 nt, Homo sapiens
  misc_RNA (1)...(19): siRNA sense strand
gcuaugaugaccuggauua

SEQ ID NO: 381392 - RNA, 19 nt, Homo sapiens
  misc_RNA (1)...(19): siRNA sense strand
ccagagcagucauucauau

SEQ ID NO: 381393 - RNA, 19 nt, Homo sapiens
  misc_RNA (1)...(19): siRNA sense strand
gaacuguguuugccuucuu

SEQ ID NO: 381394 - RNA, 19 nt, Homo sapiens
  misc_RNA (1)...(19): siRNA sense strand
gagaggagaccacaauaga

SEQ ID NO: 381395 - RNA, 19 nt, Homo sapiens
  misc_RNA (1)...(19): siRNA sense strand
acagcaagcuuguagagaa

SEQ ID NO: 381396 - RNA, 19 nt, Homo sapiens
  misc_RNA (1)...(19): siRNA sense strand
ucgaaaggcucgugauaug

SEQ ID NO: 381397 - RNA, 19 nt, Homo sapiens
  misc_RNA (1)...(19): siRNA sense strand
ggauauacaucucacuucu

SEQ ID NO: 381398 - RNA, 19 nt, Homo sapiens
  misc_RNA (1)...(19): siRNA sense strand
gaggaugaccagcguagua

SEQ ID NO: 381399 - RNA, 19 nt, Homo sapiens
  misc_RNA (1)...(19): siRNA sense strand
gaacaagaggcccaguuug

SEQ ID NO: 381400 - RNA, 19 nt, Homo sapiens
  misc_RNA (1)...(19): siRNA sense strand
gaaaggcucgugauaugga

SEQ ID NO: 381401 - RNA, 19 nt, Homo sapiens
  misc_RNA (1)...(19): siRNA sense strand
gguuaucgcugagaacuug

SEQ ID NO: 381402 - RNA, 19 nt, Homo sapiens
  misc_RNA (1)...(19): siRNA sense strand
gggcgaugcugaccuugaa

SEQ ID NO: 381403 - RNA, 19 nt, Homo sapiens
  misc_RNA (1)...(19): siRNA sense strand
acagucaccuucuauauag

SEQ ID NO: 381404 - RNA, 19 nt, Homo sapiens
  misc_RNA (1)...(19): siRNA sense strand
gguaugaugucugauuaug

SEQ ID NO: 381405 - RNA, 19 nt, Homo sapiens
  misc_RNA (1)...(19): siRNA sense strand
caagacuccugccauccua

SEQ ID NO: 381406 - RNA, 19 nt, Homo sapiens
  misc_RNA (1)...(19): siRNA sense strand
caaacgauacaguggauuu

SEQ ID NO: 381407 - RNA, 19 nt, Homo sapiens
  misc_RNA (1)...(19): siRNA sense strand
ucgggaaugugaugguuua

SEQ ID NO: 381408 - RNA, 19 nt, Homo sapiens
  misc_RNA (1)...(19): siRNA sense strand
gcagaacuccucuuggaau

SEQ ID NO: 381409 - RNA, 19 nt, Homo sapiens
  misc_RNA (1)...(19): siRNA sense strand
cagaacuccucuuggaauu

SEQ ID NO: 381410 - RNA, 19 nt, Homo sapiens
  misc_RNA (1)...(19): siRNA sense strand
agaggcagcucccaauguu

SEQ ID NO: 381411 - RNA, 19 nt, Homo sapiens
  misc_RNA (1)...(19): siRNA sense strand
gaaggcucuuucugccaua

SEQ ID NO: 381412 - RNA, 19 nt, Homo sapiens
  misc_RNA (1)...(19): siRNA sense strand
cacagucaccuucuauaua

SEQ ID NO: 381413 - RNA, 19 nt, Homo sapiens
  misc_RNA (1)...(19): siRNA sense strand
gagagaggagaccacaaua

SEQ ID NO: 381414 - RNA, 19 nt, Homo sapiens
  misc_RNA (1)...(19): siRNA sense strand
gauaacaagauugccauaa

SEQ ID NO: 381415 - RNA, 19 nt, Homo sapiens
  misc_RNA (1)...(19): siRNA sense strand
ugaccaggauaacaagauu

SEQ ID NO: 381416 - RNA, 19 nt, Homo sapiens
  misc_RNA (1)...(19): siRNA sense strand
ggacugggacacccucuga

SEQ ID NO: 381417 - RNA, 19 nt, Homo sapiens
  misc_RNA (1)...(19): siRNA sense strand
ggaaacuucgggaauguga

SEQ ID NO: 381418 - RNA, 19 nt, Homo sapiens
  misc_RNA (1)...(19): siRNA sense strand
ucagggaaccgcucagaaa

SEQ ID NO: 381419 - RNA, 19 nt, Homo sapiens
  misc_RNA (1)...(19): siRNA sense strand
ggaucacagucaccuucua

SEQ ID NO: 381420 - RNA, 19 nt, Homo sapiens
  misc_RNA (1)...(19): siRNA sense strand
ucaggugaaucuaaacaau

SEQ ID NO: 381421 - RNA, 19 nt, Homo sapiens
  misc_RNA (1)...(19): siRNA sense strand
cuucggaacuuaucauauc

SEQ ID NO: 381422 - RNA, 19 nt, Homo sapiens
  misc_RNA (1)...(19): siRNA sense strand
gauauggaccuuacugaag

SEQ ID NO: 381423 - RNA, 19 nt, Homo sapiens
  misc_RNA (1)...(19): siRNA sense strand
gcucaagggcaucccagua

SEQ ID NO: 381424 - RNA, 19 nt, Homo sapiens
  misc_RNA (1)...(19): siRNA sense strand
caggagcuaugaagacaug

SEQ ID NO: 381425 - RNA, 19 nt, Homo sapiens
  misc_RNA (1)...(19): siRNA sense strand
guggagaccucagaugaug

SEQ ID NO: 381426 - RNA, 19 nt, Homo sapiens
  misc_RNA (1)...(19): siRNA sense strand
gaucacagucaccuucuau

SEQ ID NO: 381427 - RNA, 19 nt, Homo sapiens
  misc_RNA (1)...(19): siRNA sense strand
uaacaacuauauccagacu

SEQ ID NO: 381428 - RNA, 19 nt, Homo sapiens
  misc_RNA (1)...(19): siRNA sense strand
aggaaucucuggaggaaga

SEQ ID NO: 381429 - RNA, 19 nt, Homo sapiens
  misc_RNA (1)...(19): siRNA sense strand
gcucugcucugcgucaaga

SEQ ID NO: 381430 - RNA, 19 nt, Homo sapiens
  misc_RNA (1)...(19): siRNA sense strand
cagaggugguucggauaua

SEQ ID NO: 381431 - RNA, 19 nt, Homo sapiens
  misc_RNA (1)...(19): siRNA sense strand
gaggauccagcaaacgaua

SEQ ID NO: 381432 - RNA, 19 nt, Homo sapiens
  misc_RNA (1)...(19): siRNA sense strand
caagaagggcaaagggaaa

SEQ ID NO: 381433 - RNA, 19 nt, Homo sapiens
  misc_RNA (1)...(19): siRNA sense strand
cuuaugggcuagaggauga

SEQ ID NO: 381434 - RNA, 19 nt, Homo sapiens
  misc_RNA (1)...(19): siRNA sense strand
cuucaucaguuucuaacaa

SEQ ID NO: 381435 - RNA, 19 nt, Homo sapiens
  misc_RNA (1)...(19): siRNA sense strand
gaggaagaguuggaugugu

SEQ ID NO: 381436 - RNA, 19 nt, Homo sapiens
  misc_RNA (1)...(19): siRNA sense strand
caagaggcccaguuugaga

SEQ ID NO: 381437 - RNA, 19 nt, Homo sapiens
  misc_RNA (1)...(19): siRNA sense strand
gaguccagcucgaggcuau

SEQ ID NO: 381438 - RNA, 19 nt, Homo sapiens
  misc_RNA (1)...(19): siRNA sense strand
uacaguggauuucccuaaa

SEQ ID NO: 381439 - RNA, 19 nt, Homo sapiens
  misc_RNA (1)...(19): siRNA sense strand
ugaccuggauuaugguaug

SEQ ID NO: 381440 - RNA, 19 nt, Homo sapiens
  misc_RNA (1)...(19): siRNA sense strand
ccacuacccuccugauggu

SEQ ID NO: 381441 - RNA, 19 nt, Homo sapiens
  misc_RNA (1)...(19): siRNA sense strand
cugcaugccuugacagaug

SEQ ID NO: 381442 - RNA, 19 nt, Homo sapiens
  misc_RNA (1)...(19): siRNA sense strand
agaaaguagugaagacugu

SEQ ID NO: 381443 - RNA, 19 nt, Homo sapiens
  misc_RNA (1)...(19): siRNA sense strand
ggaagaguuggauguguug

SEQ ID NO: 381444 - RNA, 19 nt, Homo sapiens
  misc_RNA (1)...(19): siRNA sense strand
gauaguacucucccucuca

SEQ ID NO: 381445 - RNA, 19 nt, Homo sapiens
  misc_RNA (1)...(19): siRNA sense strand
uugagaagcugguguugau

SEQ ID NO: 381446 - RNA, 19 nt, Homo sapiens
  misc_RNA (1)...(19): siRNA sense strand
gaauuucucugaggacacu

SEQ ID NO: 381447 - RNA, 19 nt, Homo sapiens
  misc_RNA (1)...(19): siRNA sense strand
gcaugagcgaggaaguuua

SEQ ID NO: 381448 - RNA, 19 nt, Homo sapiens
  misc_RNA (1)...(19): siRNA sense strand
gagcuaugaagacaugauu

SEQ ID NO: 381449 - RNA, 19 nt, Homo sapiens
  misc_RNA (1)...(19): siRNA sense strand
ggucgugauuuccgcaaga

SEQ ID NO: 381450 - RNA, 19 nt, Homo sapiens
  misc_RNA (1)...(19): siRNA sense strand
gacuuugggucgugauuuc

SEQ ID NO: 381451 - RNA, 19 nt, Homo sapiens
  misc_RNA (1)...(19): siRNA sense strand
ucacagucaccuucuauau

SEQ ID NO: 381452 - RNA, 19 nt, Homo sapiens
  misc_RNA (1)...(19): siRNA sense strand
gggaacaacacccuugaug

SEQ ID NO: 381453 - RNA, 19 nt, Homo sapiens
  misc_RNA (1)...(19): siRNA sense strand
gagaagcugguguugauca

SEQ ID NO: 381454 - RNA, 19 nt, Homo sapiens
  misc_RNA (1)...(19): siRNA sense strand
ucgaggcuaugagcucuua

SEQ ID NO: 381455 - RNA, 19 nt, Homo sapiens
  misc_RNA (1)...(19): siRNA sense strand
gagauugggcagaaggauu

SEQ ID NO: 381456 - RNA, 19 nt, Homo sapiens
  misc_RNA (1)...(19): siRNA sense strand
guaagccacgccauauuga

SEQ ID NO: 381457 - RNA, 19 nt, Homo sapiens
  misc_RNA (1)...(19): siRNA sense strand
ggauaacaagauugccaua

SEQ ID NO: 381458 - RNA, 19 nt, Homo sapiens
  misc_RNA (1)...(19): siRNA sense strand
gaccuuacugaaguuauua

SEQ ID NO: 381459 - RNA, 19 nt, Homo sapiens
  misc_RNA (1)...(19): siRNA sense strand
agcagcagcacuuguauua

SEQ ID NO: 381460 - RNA, 19 nt, Homo sapiens
  misc_RNA (1)...(19): siRNA sense strand
caacaauacugggccacau

SEQ ID NO: 381461 - RNA, 19 nt, Homo sapiens
  misc_RNA (1)...(19): siRNA sense strand
guugggagcgggaaccuaa

SEQ ID NO: 381462 - RNA, 19 nt, Homo sapiens
  misc_RNA (1)...(19): siRNA sense strand
aggaagaguuggauguguu

SEQ ID NO: 381463 - RNA, 19 nt, Homo sapiens
  misc_RNA (1)...(19): siRNA sense strand
gagcagcagcacuuguauu

SEQ ID NO: 381464 - RNA, 19 nt, Homo sapiens
  misc_RNA (1)...(19): siRNA sense strand
ggaaccuaaugaagacugu

SEQ ID NO: 381465 - RNA, 19 nt, Homo sapiens
  misc_RNA (1)...(19): siRNA sense strand
guagacaggauguguaugg

SEQ ID NO: 381466 - RNA, 19 nt, Homo sapiens
  misc_RNA (1)...(19): siRNA sense strand
uguggaugcucgcaacaaa

SEQ ID NO: 381467 - RNA, 19 nt, Homo sapiens
  misc_RNA (1)...(19): siRNA sense strand
gcugaccuccugacuaaug

SEQ ID NO: 381468 - RNA, 19 nt, Homo sapiens
  misc_RNA (1)...(19): siRNA sense strand
ucaagaaaguagugaagac

SEQ ID NO: 381469 - RNA, 19 nt, Homo sapiens
  misc_RNA (1)...(19): siRNA sense strand
aacaagaggcccaguuuga

SEQ ID NO: 381470 - RNA, 19 nt, Homo sapiens
  misc_RNA (1)...(19): siRNA sense strand
gaaugugaugguuuaguug

SEQ ID NO: 381471 - RNA, 19 nt, Homo sapiens
  misc_RNA (1)...(19): siRNA sense strand
gaggaaguuuagcaagcuu

SEQ ID NO: 381472 - RNA, 19 nt, Homo sapiens
  misc_RNA (1)...(19): siRNA sense strand
agacacaggguauugagaa

SEQ ID NO: 381473 - RNA, 19 nt, Homo sapiens
  misc_RNA (1)...(19): siRNA sense strand
gaggagaccacaauagaac

SEQ ID NO: 381474 - RNA, 19 nt, Homo sapiens
  misc_RNA (1)...(19): siRNA sense strand
guacucucccucucauuga

SEQ ID NO: 381475 - RNA, 19 nt, Homo sapiens
  misc_RNA (1)...(19): siRNA sense strand
caaggaagaugccaugaaa

SEQ ID NO: 381476 - RNA, 19 nt, Homo sapiens
  misc_RNA (1)...(19): siRNA sense strand
ggacagaggcugaguuuga

SEQ ID NO: 381477 - RNA, 19 nt, Homo sapiens
  misc_RNA (1)...(19): siRNA sense strand
caacaaaguagaagagcua

SEQ ID NO: 381478 - RNA, 19 nt, Homo sapiens
  misc_RNA (1)...(19): siRNA sense strand
gaagaugccaugaaagcuu

SEQ ID NO: 381479 - RNA, 19 nt, Homo sapiens
  misc_RNA (1)...(19): siRNA sense strand
aagaugccaugaaagcuua

SEQ ID NO: 381480 - RNA, 19 nt, Homo sapiens
  misc_RNA (1)...(19): siRNA sense strand
caagugggaugccuggaau

SEQ ID NO: 381481 - RNA, 19 nt, Homo sapiens
  misc_RNA (1)...(19): siRNA sense strand
ugaaagggacuuccaagga

SEQ ID NO: 381482 - RNA, 19 nt, Homo sapiens
  misc_RNA (1)...(19): siRNA sense strand
caaaguagaagagcuaaag

SEQ ID NO: 381483 - RNA, 19 nt, Homo sapiens
  misc_RNA (1)...(19): siRNA sense strand
guucaucuauggccacuac

SEQ ID NO: 381484 - RNA, 19 nt, Homo sapiens
  misc_RNA (1)...(19): siRNA sense strand
uuaggcaccuuaagaccaa

SEQ ID NO: 381485 - RNA, 19 nt, Homo sapiens
  misc_RNA (1)...(19): siRNA sense strand
ccaaggaagaugccaugaa

SEQ ID NO: 381486 - RNA, 19 nt, Homo sapiens
  misc_RNA (1)...(19): siRNA sense strand
gacagaggcugaguuugag

SEQ ID NO: 381487 - RNA, 19 nt, Homo sapiens
  misc_RNA (1)...(19): siRNA sense strand
caucuauggccacuacaaa

SEQ ID NO: 381488 - RNA, 19 nt, Homo sapiens
  misc_RNA (1)...(19): siRNA sense strand
aguagaagagcuaaagaaa

SEQ ID NO: 381489 - RNA, 19 nt, Homo sapiens
  misc_RNA (1)...(19): siRNA sense strand
ccaagugggaugccuggaa

SEQ ID NO: 381490 - RNA, 19 nt, Homo sapiens
  misc_RNA (1)...(19): siRNA sense strand
gaaagcugcagaggagguu

SEQ ID NO: 381491 - RNA, 19 nt, Homo sapiens
  misc_RNA (1)...(19): siRNA sense strand
guagaagagcuaaagaaaa

SEQ ID NO: 381492 - RNA, 19 nt, Homo sapiens
  misc_RNA (1)...(19): siRNA sense strand
gaugaggagaugcuguuca

SEQ ID NO: 381493 - RNA, 19 nt, Homo sapiens
  misc_RNA (1)...(19): siRNA sense strand
ugggacagaggcugaguuu

SEQ ID NO: 381494 - RNA, 19 nt, Homo sapiens
  misc_RNA (1)...(19): siRNA sense strand
aaaguagaagagcuaaaga

SEQ ID NO: 381495 - RNA, 19 nt, Homo sapiens
  misc_RNA (1)...(19): siRNA sense strand
aaguagaagagcuaaagaa

SEQ ID NO: 381496 - RNA, 19 nt, Homo sapiens
  misc_RNA (1)...(19): siRNA sense strand
gaaagaaacugagauguua

SEQ ID NO: 381497 - RNA, 19 nt, Homo sapiens
  misc_RNA (1)...(19): siRNA sense strand
ggacaucacugaauauuga

SEQ ID NO: 381498 - RNA, 19 nt, Homo sapiens
  misc_RNA (1)...(19): siRNA sense strand
aaacugagcuuguacauga

SEQ ID NO: 381499 - RNA, 19 nt, Homo sapiens
  misc_RNA (1)...(19): siRNA sense strand
gaaacgagauagauacaaa

SEQ ID NO: 381500 - RNA, 19 nt, Homo sapiens
  misc_RNA (1)...(19): siRNA sense strand
gaaguucccugcccuaauu

SEQ ID NO: 381501 - RNA, 19 nt, Homo sapiens
  misc_RNA (1)...(19): siRNA sense strand
gaugugaccugguuugaua

SEQ ID NO: 381502 - RNA, 19 nt, Homo sapiens
  misc_RNA (1)...(19): siRNA sense strand
gggcaaggcugugcuauua

SEQ ID NO: 381503 - RNA, 19 nt, Homo sapiens
  misc_RNA (1)...(19): siRNA sense strand
ggaaauacaucacauauac

SEQ ID NO: 381504 - RNA, 19 nt, Homo sapiens
  misc_RNA (1)...(19): siRNA sense strand
gaaacuaaaucguccaauu

SEQ ID NO: 381505 - RNA, 19 nt, Homo sapiens
  misc_RNA (1)...(19): siRNA sense strand
gaacagaugucgaaagcuu

SEQ ID NO: 381506 - RNA, 19 nt, Homo sapiens
  misc_RNA (1)...(19): siRNA sense strand
ggaaccaaaugaucuguua

SEQ ID NO: 381507 - RNA, 19 nt, Homo sapiens
  misc_RNA (1)...(19): siRNA sense strand
ggucagaggugaauauuga

SEQ ID NO: 381508 - RNA, 19 nt, Homo sapiens
  misc_RNA (1)...(19): siRNA sense strand
gcaaugaagucaccaaaug

SEQ ID NO: 381509 - RNA, 19 nt, Homo sapiens
  misc_RNA (1)...(19): siRNA sense strand
gaaagucagugcugugaaa

SEQ ID NO: 381510 - RNA, 19 nt, Homo sapiens
  misc_RNA (1)...(19): siRNA sense strand
ggacaugaaucuuucuaaa

SEQ ID NO: 381511 - RNA, 19 nt, Homo sapiens
  misc_RNA (1)...(19): siRNA sense strand
gagaucagguuacgaauga

SEQ ID NO: 381512 - RNA, 19 nt, Homo sapiens
  misc_RNA (1)...(19): siRNA sense strand
ggaaagaaccuaaaucuca

SEQ ID NO: 381513 - RNA, 19 nt, Homo sapiens
  misc_RNA (1)...(19): siRNA sense strand
caaauaacccugagacuuu

SEQ ID NO: 381514 - RNA, 19 nt, Homo sapiens
  misc_RNA (1)...(19): siRNA sense strand
caaagaagcuucagagucu

SEQ ID NO: 381515 - RNA, 19 nt, Homo sapiens
  misc_RNA (1)...(19): siRNA sense strand
ugaagaagcugguuuaauc

SEQ ID NO: 381516 - RNA, 19 nt, Homo sapiens
  misc_RNA (1)...(19): siRNA sense strand
gaacacauuugcuaagguu

SEQ ID NO: 381517 - RNA, 19 nt, Homo sapiens
  misc_RNA (1)...(19): siRNA sense strand
cauaagcaguuucccauua

SEQ ID NO: 381518 - RNA, 19 nt, Homo sapiens
  misc_RNA (1)...(19): siRNA sense strand
ggaacuagauccagcacua

SEQ ID NO: 381519 - RNA, 19 nt, Homo sapiens
  misc_RNA (1)...(19): siRNA sense strand
caagaucucucgugucauu

SEQ ID NO: 381520 - RNA, 19 nt, Homo sapiens
  misc_RNA (1)...(19): siRNA sense strand
gaaagaagaugacuguuuu

SEQ ID NO: 381521 - RNA, 19 nt, Homo sapiens
  misc_RNA (1)...(19): siRNA sense strand
ugaaggaacuagaagauaa

SEQ ID NO: 381522 - RNA, 19 nt, Homo sapiens
  misc_RNA (1)...(19): siRNA sense strand
gaucacaucucuguuugua

SEQ ID NO: 381523 - RNA, 19 nt, Homo sapiens
  misc_RNA (1)...(19): siRNA sense strand
cgacagaaccuucauauug

SEQ ID NO: 381524 - RNA, 19 nt, Homo sapiens
  misc_RNA (1)...(19): siRNA sense strand
gagguuggcuucauucauu

SEQ ID NO: 381525 - RNA, 19 nt, Homo sapiens
  misc_RNA (1)...(19): siRNA sense strand
gaacauggaugcucuucug

SEQ ID NO: 381526 - RNA, 19 nt, Homo sapiens
  misc_RNA (1)...(19): siRNA sense strand
guacaacagugucauagaa

SEQ ID NO: 381527 - RNA, 19 nt, Homo sapiens
  misc_RNA (1)...(19): siRNA sense strand
aaacagagcuuugaaguuc

SEQ ID NO: 381528 - RNA, 19 nt, Homo sapiens
  misc_RNA (1)...(19): siRNA sense strand
gcaaaucuccauugacuuu

SEQ ID NO: 381529 - RNA, 19 nt, Homo sapiens
  misc_RNA (1)...(19): siRNA sense strand
gaaaguuggugacaaggaa

SEQ ID NO: 381530 - RNA, 19 nt, Homo sapiens
  misc_RNA (1)...(19): siRNA sense strand
ggaaagaagaugacuguuu

SEQ ID NO: 381531 - RNA, 19 nt, Homo sapiens
  misc_RNA (1)...(19): siRNA sense strand
gagauaaugugacuaugaa

SEQ ID NO: 381532 - RNA, 19 nt, Homo sapiens
  misc_RNA (1)...(19): siRNA sense strand
gaagaagcccuuagaaaug

SEQ ID NO: 381533 - RNA, 19 nt, Homo sapiens
  misc_RNA (1)...(19): siRNA sense strand
gaacuuagaauacaagaug

SEQ ID NO: 381534 - RNA, 19 nt, Homo sapiens
  misc_RNA (1)...(19): siRNA sense strand
ggagaaauuucgaaacaga

SEQ ID NO: 381535 - RNA, 19 nt, Homo sapiens
  misc_RNA (1)...(19): siRNA sense strand
caaaggacaaugugaaaua

SEQ ID NO: 381536 - RNA, 19 nt, Homo sapiens
  misc_RNA (1)...(19): siRNA sense strand
gaccagauaucgagaaaug

SEQ ID NO: 381537 - RNA, 19 nt, Homo sapiens
  misc_RNA (1)...(19): siRNA sense strand
guacacagcugacuugaag

SEQ ID NO: 381538 - RNA, 19 nt, Homo sapiens
  misc_RNA (1)...(19): siRNA sense strand
ucacaucucuguuuguaaa

SEQ ID NO: 381539 - RNA, 19 nt, Homo sapiens
  misc_RNA (1)...(19): siRNA sense strand
gaacaggccaugacugaaa

SEQ ID NO: 381540 - RNA, 19 nt, Homo sapiens
  misc_RNA (1)...(19): siRNA sense strand
gacaagaucuuugguguga

SEQ ID NO: 381541 - RNA, 19 nt, Homo sapiens
  misc_RNA (1)...(19): siRNA sense strand
caacuucccucuuccagaa

SEQ ID NO: 381542 - RNA, 19 nt, Homo sapiens
  misc_RNA (1)...(19): siRNA sense strand
ggacugacuuucuaauuca

SEQ ID NO: 381543 - RNA, 19 nt, Homo sapiens
  misc_RNA (1)...(19): siRNA sense strand
gcauguaaagccuauauua

SEQ ID NO: 381544 - RNA, 19 nt, Homo sapiens
  misc_RNA (1)...(19): siRNA sense strand
ggaaggccuuugcuuauug

SEQ ID NO: 381545 - RNA, 19 nt, Homo sapiens
  misc_RNA (1)...(19): siRNA sense strand
caaaugaucuguuaaagcu

SEQ ID NO: 381546 - RNA, 19 nt, Homo sapiens
  misc_RNA (1)...(19): siRNA sense strand
ugacauacuugaacugaaa

SEQ ID NO: 381547 - RNA, 19 nt, Homo sapiens
  misc_RNA (1)...(19): siRNA sense strand
uaacauggcugaauuuggu

SEQ ID NO: 381548 - RNA, 19 nt, Homo sapiens
  misc_RNA (1)...(19): siRNA sense strand
gacagaaccuucauauugu

SEQ ID NO: 381549 - RNA, 19 nt, Homo sapiens
  misc_RNA (1)...(19): siRNA sense strand
gaaaugccaaguuugauaa

SEQ ID NO: 381550 - RNA, 19 nt, Homo sapiens
  misc_RNA (1)...(19): siRNA sense strand
gagcaaaucuccauugacu

SEQ ID NO: 381551 - RNA, 19 nt, Homo sapiens
  misc_RNA (1)...(19): siRNA sense strand
agacagcucuggaagcaua

SEQ ID NO: 381552 - RNA, 19 nt, Homo sapiens
  misc_RNA (1)...(19): siRNA sense strand
gacauaacauggcugaauu

SEQ ID NO: 381553 - RNA, 19 nt, Homo sapiens
  misc_RNA (1)...(19): siRNA sense strand
gagaugcgcuugguuaaug

SEQ ID NO: 381554 - RNA, 19 nt, Homo sapiens
  misc_RNA (1)...(19): siRNA sense strand
gaagauaacuugcuuuacc

SEQ ID NO: 381555 - RNA, 19 nt, Homo sapiens
  misc_RNA (1)...(19): siRNA sense strand
ucagugagauguugauuga

SEQ ID NO: 381556 - RNA, 19 nt, Homo sapiens
  misc_RNA (1)...(19): siRNA sense strand
aaucauaccucuccuuuau

SEQ ID NO: 381557 - RNA, 19 nt, Homo sapiens
  misc_RNA (1)...(19): siRNA sense strand
gaauauaccuaaucuuggu

SEQ ID NO: 381558 - RNA, 19 nt, Homo sapiens
  misc_RNA (1)...(19): siRNA sense strand
gaacggacuugaacuacau

SEQ ID NO: 381559 - RNA, 19 nt, Homo sapiens
  misc_RNA (1)...(19): siRNA sense strand
gaaauagacagaaugcaaa

SEQ ID NO: 381560 - RNA, 19 nt, Homo sapiens
  misc_RNA (1)...(19): siRNA sense strand
gaaaugaacuccagaucac

SEQ ID NO: 381561 - RNA, 19 nt, Homo sapiens
  misc_RNA (1)...(19): siRNA sense strand
uaacgaagauucugacaag

SEQ ID NO: 381562 - RNA, 19 nt, Homo sapiens
  misc_RNA (1)...(19): siRNA sense strand
ugaagcaagugauuaauga

SEQ ID NO: 381563 - RNA, 19 nt, Homo sapiens
  misc_RNA (1)...(19): siRNA sense strand
gaaggaagcggaugacguu

SEQ ID NO: 381564 - RNA, 19 nt, Homo sapiens
  misc_RNA (1)...(19): siRNA sense strand
gaucauggauugcguacug

SEQ ID NO: 381565 - RNA, 19 nt, Homo sapiens
  misc_RNA (1)...(19): siRNA sense strand
ugacuggacugaugggaua

SEQ ID NO: 381566 - RNA, 19 nt, Homo sapiens
  misc_RNA (1)...(19): siRNA sense strand
gaacuggaagcagcaauua

SEQ ID NO: 381567 - RNA, 19 nt, Homo sapiens
  misc_RNA (1)...(19): siRNA sense strand
ggaaauagaggacaucugu

SEQ ID NO: 381568 - RNA, 19 nt, Homo sapiens
  misc_RNA (1)...(19): siRNA sense strand
uuacaacccucaagacgua

SEQ ID NO: 381569 - RNA, 19 nt, Homo sapiens
  misc_RNA (1)...(19): siRNA sense strand
cagaacaguuugcccauuu

SEQ ID NO: 381570 - RNA, 19 nt, Homo sapiens
  misc_RNA (1)...(19): siRNA sense strand
ccuacgagguuuauaagua

SEQ ID NO: 381571 - RNA, 19 nt, Homo sapiens
  misc_RNA (1)...(19): siRNA sense strand
ggaguuuggugaagagaaa

SEQ ID NO: 381572 - RNA, 19 nt, Homo sapiens
  misc_RNA (1)...(19): siRNA sense strand
cagcaaauuuccauuauuc

SEQ ID NO: 381573 - RNA, 19 nt, Homo sapiens
  misc_RNA (1)...(19): siRNA sense strand
cgaaacugcugaagacuug

SEQ ID NO: 381574 - RNA, 19 nt, Homo sapiens
  misc_RNA (1)...(19): siRNA sense strand
ggaaauagacagaaugcaa

SEQ ID NO: 381575 - RNA, 19 nt, Homo sapiens
  misc_RNA (1)...(19): siRNA sense strand
cauagaaacugagcuugua

SEQ ID NO: 381576 - RNA, 19 nt, Homo sapiens
  misc_RNA (1)...(19): siRNA sense strand
ggaaguagauguguuggau

SEQ ID NO: 381577 - RNA, 19 nt, Homo sapiens
  misc_RNA (1)...(19): siRNA sense strand
gcaaggcugugcuauuaau

SEQ ID NO: 381578 - RNA, 19 nt, Homo sapiens
  misc_RNA (1)...(19): siRNA sense strand
ggaaugaaagcuuuaaguu

SEQ ID NO: 381579 - RNA, 19 nt, Homo sapiens
  misc_RNA (1)...(19): siRNA sense strand
gggaagagauagacaaagu

SEQ ID NO: 381580 - RNA, 19 nt, Homo sapiens
  misc_RNA (1)...(19): siRNA sense strand
uguaaauggugcacaaaua

SEQ ID NO: 381581 - RNA, 19 nt, Homo sapiens
  misc_RNA (1)...(19): siRNA sense strand
cagcaucucuaaagacaaa

SEQ ID NO: 381582 - RNA, 19 nt, Homo sapiens
  misc_RNA (1)...(19): siRNA sense strand
ggaaauacgucgugguuuu

SEQ ID NO: 381583 - RNA, 19 nt, Homo sapiens
  misc_RNA (1)...(19): siRNA sense strand
gacgaugccucgggaaaua

SEQ ID NO: 381584 - RNA, 19 nt, Homo sapiens
  misc_RNA (1)...(19): siRNA sense strand
ccaacuaacugaauuucuu

SEQ ID NO: 381585 - RNA, 19 nt, Homo sapiens
  misc_RNA (1)...(19): siRNA sense strand
ccaagcagcugcccaagga

SEQ ID NO: 381586 - RNA, 19 nt, Homo sapiens
  misc_RNA (1)...(19): siRNA sense strand
gcagaagccaaaccuauaa

SEQ ID NO: 381587 - RNA, 19 nt, Homo sapiens
  misc_RNA (1)...(19): siRNA sense strand
caugaaaggucuagaagau

SEQ ID NO: 381588 - RNA, 19 nt, Homo sapiens
  misc_RNA (1)...(19): siRNA sense strand
caagaucuuuggugugauu

SEQ ID NO: 381589 - RNA, 19 nt, Homo sapiens
  misc_RNA (1)...(19): siRNA sense strand
ggagauggauauucgaauc

SEQ ID NO: 381590 - RNA, 19 nt, Homo sapiens
  misc_RNA (1)...(19): siRNA sense strand
gcagagcgaugcagacaca

SEQ ID NO: 381591 - RNA, 19 nt, Homo sapiens
  misc_RNA (1)...(19): siRNA sense strand
uuacagaacuuacagcaau

SEQ ID NO: 381592 - RNA, 19 nt, Homo sapiens
  misc_RNA (1)...(19): siRNA sense strand
caaauauucuucuggacaa

SEQ ID NO: 381593 - RNA, 19 nt, Homo sapiens
  misc_RNA (1)...(19): siRNA sense strand
aaacagaaaccacuaaaga

SEQ ID NO: 381594 - RNA, 19 nt, Homo sapiens
  misc_RNA (1)...(19): siRNA sense strand
cauuaaaucugucaaguuc

SEQ ID NO: 381595 - RNA, 19 nt, Homo sapiens
  misc_RNA (1)...(19): siRNA sense strand
uggaauacauggccaguaa

SEQ ID NO: 381596 - RNA, 19 nt, Homo sapiens
  misc_RNA (1)...(19): siRNA sense strand
gagcaaagcuguuucagua

SEQ ID NO: 381597 - RNA, 19 nt, Homo sapiens
  misc_RNA (1)...(19): siRNA sense strand
ggaaagaaaugcucaguuu

SEQ ID NO: 381598 - RNA, 19 nt, Homo sapiens
  misc_RNA (1)...(19): siRNA sense strand
gcaaaugaauccaaagaua

SEQ ID NO: 381599 - RNA, 19 nt, Homo sapiens
  misc_RNA (1)...(19): siRNA sense strand
ggaaguugcugguuaauuu

SEQ ID NO: 381600 - RNA, 19 nt, Homo sapiens
  misc_RNA (1)...(19): siRNA sense strand
ggaagaagcugucagagaa

SEQ ID NO: 381601 - RNA, 19 nt, Homo sapiens
  misc_RNA (1)...(19): siRNA sense strand
gaaauuuccuggcuugaua

SEQ ID NO: 381602 - RNA, 19 nt, Homo sapiens
  misc_RNA (1)...(19): siRNA sense strand
cgaggaagcugaagaauuu

SEQ ID NO: 381603 - RNA, 19 nt, Homo sapiens
  misc_RNA (1)...(19): siRNA sense strand
gaaauacacugggaaagua

SEQ ID NO: 381604 - RNA, 19 nt, Homo sapiens
  misc_RNA (1)...(19): siRNA sense strand
gaaaguauauugcagauuc

SEQ ID NO: 381605 - RNA, 19 nt, Homo sapiens
  misc_RNA (1)...(19): siRNA sense strand
gaagauaaccuccucuaua

SEQ ID NO: 381606 - RNA, 19 nt, Homo sapiens
  misc_RNA (1)...(19): siRNA sense strand
ggugaaaucucguuugaua

SEQ ID NO: 381607 - RNA, 19 nt, Homo sapiens
  misc_RNA (1)...(19): siRNA sense strand
uaagugagcccaucaauua

SEQ ID NO: 381608 - RNA, 19 nt, Homo sapiens
  misc_RNA (1)...(19): siRNA sense strand
caugaucgauuuccaauua

SEQ ID NO: 381609 - RNA, 19 nt, Homo sapiens
  misc_RNA (1)...(19): siRNA sense strand
gaaagucggugauaaggaa

SEQ ID NO: 381610 - RNA, 19 nt, Homo sapiens
  misc_RNA (1)...(19): siRNA sense strand
gaagaagccuaugcuauuu

SEQ ID NO: 381611 - RNA, 19 nt, Homo sapiens
  misc_RNA (1)...(19): siRNA sense strand
ugaagagacuguugaguua

SEQ ID NO: 381612 - RNA, 19 nt, Homo sapiens
  misc_RNA (1)...(19): siRNA sense strand
gggaagguguguauauuua

SEQ ID NO: 381613 - RNA, 19 nt, Homo sapiens
  misc_RNA (1)...(19): siRNA sense strand
gaaaucagaucagaaauuc

SEQ ID NO: 381614 - RNA, 19 nt, Homo sapiens
  misc_RNA (1)...(19): siRNA sense strand
caaggaauguugaccauaa

SEQ ID NO: 381615 - RNA, 19 nt, Homo sapiens
  misc_RNA (1)...(19): siRNA sense strand
ggacagaauuugacacaga

SEQ ID NO: 381616 - RNA, 19 nt, Homo sapiens
  misc_RNA (1)...(19): siRNA sense strand
ggacaagccuggagacuuc

SEQ ID NO: 381617 - RNA, 19 nt, Homo sapiens
  misc_RNA (1)...(19): siRNA sense strand
caaaucaccuacugacuuu

SEQ ID NO: 381618 - RNA, 19 nt, Homo sapiens
  misc_RNA (1)...(19): siRNA sense strand
gaaguuggauguaccagaa

SEQ ID NO: 381619 - RNA, 19 nt, Homo sapiens
  misc_RNA (1)...(19): siRNA sense strand
cuaagaagcuuuaucauuc

SEQ ID NO: 381620 - RNA, 19 nt, Homo sapiens
  misc_RNA (1)...(19): siRNA sense strand
gaaauaaaccacacaauag

SEQ ID NO: 381621 - RNA, 19 nt, Homo sapiens
  misc_RNA (1)...(19): siRNA sense strand
aagauaaccuccucuauaa

SEQ ID NO: 381622 - RNA, 19 nt, Homo sapiens
  misc_RNA (1)...(19): siRNA sense strand
gagaucagauaacuaauga

SEQ ID NO: 381623 - RNA, 19 nt, Homo sapiens
  misc_RNA (1)...(19): siRNA sense strand
ggaaauuuguuacguauuc

SEQ ID NO: 381624 - RNA, 19 nt, Homo sapiens
  misc_RNA (1)...(19): siRNA sense strand
gagaugagauggaugaaau

SEQ ID NO: 381625 - RNA, 19 nt, Homo sapiens
  misc_RNA (1)...(19): siRNA sense strand
gguaacaaaucaaauggua

SEQ ID NO: 381626 - RNA, 19 nt, Homo sapiens
  misc_RNA (1)...(19): siRNA sense strand
gauagaaucuccgaguuaa

SEQ ID NO: 381627 - RNA, 19 nt, Homo sapiens
  misc_RNA (1)...(19): siRNA sense strand
ggaggaaauuuguuacgua

SEQ ID NO: 381628 - RNA, 19 nt, Homo sapiens
  misc_RNA (1)...(19): siRNA sense strand
gcacaccuuugaagaagua

SEQ ID NO: 381629 - RNA, 19 nt, Homo sapiens
  misc_RNA (1)...(19): siRNA sense strand
gaguaaacuuccacaauuu

SEQ ID NO: 381630 - RNA, 19 nt, Homo sapiens
  misc_RNA (1)...(19): siRNA sense strand
gaagaucagugacuugugu

SEQ ID NO: 381631 - RNA, 19 nt, Homo sapiens
  misc_RNA (1)...(19): siRNA sense strand
ugaaaggacuugagaauca

SEQ ID NO: 381632 - RNA, 19 nt, Homo sapiens
  misc_RNA (1)...(19): siRNA sense strand
ugacaucucugaaccguaa

SEQ ID NO: 381633 - RNA, 19 nt, Homo sapiens
  misc_RNA (1)...(19): siRNA sense strand
gaugaucucucaauucaga

SEQ ID NO: 381634 - RNA, 19 nt, Homo sapiens
  misc_RNA (1)...(19): siRNA sense strand
ccuaaaggcucaaaucaaa

SEQ ID NO: 381635 - RNA, 19 nt, Homo sapiens
  misc_RNA (1)...(19): siRNA sense strand
gaucuaagcaaguuugaua

SEQ ID NO: 381636 - RNA, 19 nt, Homo sapiens
  misc_RNA (1)...(19): siRNA sense strand
gaagaggcuuuacguaaug

SEQ ID NO: 381637 - RNA, 19 nt, Homo sapiens
  misc_RNA (1)...(19): siRNA sense strand
gcaacaggcuacagauauu

SEQ ID NO: 381638 - RNA, 19 nt, Homo sapiens
  misc_RNA (1)...(19): siRNA sense strand
gaaacgcacugcacaggaa

SEQ ID NO: 381639 - RNA, 19 nt, Homo sapiens
  misc_RNA (1)...(19): siRNA sense strand
ggaacuauuugcuuaaaga

SEQ ID NO: 381640 - RNA, 19 nt, Homo sapiens
  misc_RNA (1)...(19): siRNA sense strand
aaacagaugucguaaacuu

SEQ ID NO: 381641 - RNA, 19 nt, Homo sapiens
  misc_RNA (1)...(19): siRNA sense strand
gcaaagagucauuucagua

SEQ ID NO: 381642 - RNA, 19 nt, Homo sapiens
  misc_RNA (1)...(19): siRNA sense strand
ugaguaaacuuccacaauu

SEQ ID NO: 381643 - RNA, 19 nt, Homo sapiens
  misc_RNA (1)...(19): siRNA sense strand
guuguaagcuucuguuuga

SEQ ID NO: 381644 - RNA, 19 nt, Homo sapiens
  misc_RNA (1)...(19): siRNA sense strand
gauagugaauuaagcauug

SEQ ID NO: 381645 - RNA, 19 nt, Homo sapiens
  misc_RNA (1)...(19): siRNA sense strand
gcagcgagcucaugagaau

SEQ ID NO: 381646 - RNA, 19 nt, Homo sapiens
  misc_RNA (1)...(19): siRNA sense strand
gagaaucaguuacuaagga

SEQ ID NO: 381647 - RNA, 19 nt, Homo sapiens
  misc_RNA (1)...(19): siRNA sense strand
gaacagguacuuauugaga

SEQ ID NO: 381648 - RNA, 19 nt, Homo sapiens
  misc_RNA (1)...(19): siRNA sense strand
gcagauuuaugaagugaaa

SEQ ID NO: 381649 - RNA, 19 nt, Homo sapiens
  misc_RNA (1)...(19): siRNA sense strand
cgaaaggacucuuaaaugg

SEQ ID NO: 381650 - RNA, 19 nt, Homo sapiens
  misc_RNA (1)...(19): siRNA sense strand
ucagagagauuucacaguu

SEQ ID NO: 381651 - RNA, 19 nt, Homo sapiens
  misc_RNA (1)...(19): siRNA sense strand
gacaagaaauugacagaau

SEQ ID NO: 381652 - RNA, 19 nt, Homo sapiens
  misc_RNA (1)...(19): siRNA sense strand
ugacaaaggccaccagaua

SEQ ID NO: 381653 - RNA, 19 nt, Homo sapiens
  misc_RNA (1)...(19): siRNA sense strand
ucagagagcugugaaaguu

SEQ ID NO: 381654 - RNA, 19 nt, Homo sapiens
  misc_RNA (1)...(19): siRNA sense strand
gaacuuaaauuccguuuug

SEQ ID NO: 381655 - RNA, 19 nt, Homo sapiens
  misc_RNA (1)...(19): siRNA sense strand
gacuuuggauugagaaaua

SEQ ID NO: 381656 - RNA, 19 nt, Homo sapiens
  misc_RNA (1)...(19): siRNA sense strand
ggaaucuucuuaacgauga

SEQ ID NO: 381657 - RNA, 19 nt, Homo sapiens
  misc_RNA (1)...(19): siRNA sense strand
ugaauugccuguauuauca

SEQ ID NO: 381658 - RNA, 19 nt, Homo sapiens
  misc_RNA (1)...(19): siRNA sense strand
ugaaguacaucuugcaauu

SEQ ID NO: 381659 - RNA, 19 nt, Homo sapiens
  misc_RNA (1)...(19): siRNA sense strand
gcccaucaauuauuucuuu

SEQ ID NO: 381660 - RNA, 19 nt, Homo sapiens
  misc_RNA (1)...(19): siRNA sense strand
gaggugaaaucucguuuga

SEQ ID NO: 381661 - RNA, 19 nt, Homo sapiens
  misc_RNA (1)...(19): siRNA sense strand
gcagggugguuggguauua

SEQ ID NO: 381662 - RNA, 19 nt, Homo sapiens
  misc_RNA (1)...(19): siRNA sense strand
ggacaccucugauaugcuu

SEQ ID NO: 381663 - RNA, 19 nt, Homo sapiens
  misc_RNA (1)...(19): siRNA sense strand
aaacgucagucauugauuu

SEQ ID NO: 381664 - RNA, 19 nt, Homo sapiens
  misc_RNA (1)...(19): siRNA sense strand
ccaaugauguuucagagaa

SEQ ID NO: 381665 - RNA, 19 nt, Homo sapiens
  misc_RNA (1)...(19): siRNA sense strand
gcaccacuccuuaaacaua

SEQ ID NO: 381666 - RNA, 19 nt, Homo sapiens
  misc_RNA (1)...(19): siRNA sense strand
ccaaagauaaugucagaua

SEQ ID NO: 381667 - RNA, 19 nt, Homo sapiens
  misc_RNA (1)...(19): siRNA sense strand
gaaauugacagaaugcaaa

SEQ ID NO: 381668 - RNA, 19 nt, Homo sapiens
  misc_RNA (1)...(19): siRNA sense strand
gcagacagauuuauaacuc

SEQ ID NO: 381669 - RNA, 19 nt, Homo sapiens
  misc_RNA (1)...(19): siRNA sense strand
cgagaucuuuccagaauuu

SEQ ID NO: 381670 - RNA, 19 nt, Homo sapiens
  misc_RNA (1)...(19): siRNA sense strand
gaagcgcucuuuacuguuc

SEQ ID NO: 381671 - RNA, 19 nt, Homo sapiens
  misc_RNA (1)...(19): siRNA sense strand
ccaaacugcuaaagaauug

SEQ ID NO: 381672 - RNA, 19 nt, Homo sapiens
  misc_RNA (1)...(19): siRNA sense strand
ugacaaacgucuacuuaau

SEQ ID NO: 381673 - RNA, 19 nt, Homo sapiens
  misc_RNA (1)...(19): siRNA sense strand
gaaagaacuugaagauaac

SEQ ID NO: 381674 - RNA, 19 nt, Homo sapiens
  misc_RNA (1)...(19): siRNA sense strand
caaaguagaagauauguug

SEQ ID NO: 381675 - RNA, 19 nt, Homo sapiens
  misc_RNA (1)...(19): siRNA sense strand
ugacacagauuucuuagau

SEQ ID NO: 381676 - RNA, 19 nt, Homo sapiens
  misc_RNA (1)...(19): siRNA sense strand
cgaaagcagucagaagaua

SEQ ID NO: 381677 - RNA, 19 nt, Homo sapiens
  misc_RNA (1)...(19): siRNA sense strand
aaacuggaauguagaacua

SEQ ID NO: 381678 - RNA, 19 nt, Homo sapiens
  misc_RNA (1)...(19): siRNA sense strand
caaaugauauugccacagu

SEQ ID NO: 381679 - RNA, 19 nt, Homo sapiens
  misc_RNA (1)...(19): siRNA sense strand
gaugagcagugguuuaaug

SEQ ID NO: 381680 - RNA, 19 nt, Homo sapiens
  misc_RNA (1)...(19): siRNA sense strand
gaagaugagcagugguuua

SEQ ID NO: 381681 - RNA, 19 nt, Homo sapiens
  misc_RNA (1)...(19): siRNA sense strand
ggauagaaucuccgaguua

SEQ ID NO: 381682 - RNA, 19 nt, Homo sapiens
  misc_RNA (1)...(19): siRNA sense strand
gaagcuguauggauuguau

SEQ ID NO: 381683 - RNA, 19 nt, Homo sapiens
  misc_RNA (1)...(19): siRNA sense strand
ggaccuaugguuccaaaua

SEQ ID NO: 381684 - RNA, 19 nt, Homo sapiens
  misc_RNA (1)...(19): siRNA sense strand
guaaggcugucauaaaugu

SEQ ID NO: 381685 - RNA, 19 nt, Homo sapiens
  misc_RNA (1)...(19): siRNA sense strand
gaagguguguauauuuaug

SEQ ID NO: 381686 - RNA, 19 nt, Homo sapiens
  misc_RNA (1)...(19): siRNA sense strand
aaagguguaucauggaaua

SEQ ID NO: 381687 - RNA, 19 nt, Homo sapiens
  misc_RNA (1)...(19): siRNA sense strand
ucgaguaccugacauauga

SEQ ID NO: 381688 - RNA, 19 nt, Homo sapiens
  misc_RNA (1)...(19): siRNA sense strand
uaagagauaugaaccuuuc

SEQ ID NO: 381689 - RNA, 19 nt, Homo sapiens
  misc_RNA (1)...(19): siRNA sense strand
gaggugacauuucauacaa

SEQ ID NO: 381690 - RNA, 19 nt, Homo sapiens
  misc_RNA (1)...(19): siRNA sense strand
ggaaguaugucagaaguca

SEQ ID NO: 381691 - RNA, 19 nt, Homo sapiens
  misc_RNA (1)...(19): siRNA sense strand
caaaaggacuuaaagauug

SEQ ID NO: 381692 - RNA, 19 nt, Homo sapiens
  misc_RNA (1)...(19): siRNA sense strand
auacagagccgaugaaauu

SEQ ID NO: 381693 - RNA, 19 nt, Homo sapiens
  misc_RNA (1)...(19): siRNA sense strand
uguaggagcacuugaauua

SEQ ID NO: 381694 - RNA, 19 nt, Homo sapiens
  misc_RNA (1)...(19): siRNA sense strand
uaaggaaugugauaucaug

SEQ ID NO: 381695 - RNA, 19 nt, Homo sapiens
  misc_RNA (1)...(19): siRNA sense strand
gaacugauuugaccuucau

SEQ ID NO: 381696 - RNA, 19 nt, Homo sapiens
  misc_RNA (1)...(19): siRNA sense strand
ccacaucgcuacuguuauu

SEQ ID NO: 381697 - RNA, 19 nt, Homo sapiens
  misc_RNA (1)...(19): siRNA sense strand
gugcaggccuucaugauuc

SEQ ID NO: 381698 - RNA, 19 nt, Homo sapiens
  misc_RNA (1)...(19): siRNA sense strand
caucuacacuagucauuau

SEQ ID NO: 381699 - RNA, 19 nt, Homo sapiens
  misc_RNA (1)...(19): siRNA sense strand
uacgguagaugcaucagua

SEQ ID NO: 381700 - RNA, 19 nt, Homo sapiens
  misc_RNA (1)...(19): siRNA sense strand
guccacaucgcuacuguua

SEQ ID NO: 381701 - RNA, 19 nt, Homo sapiens
  misc_RNA (1)...(19): siRNA sense strand
aacauuagcugcagugaca

SEQ ID NO: 381702 - RNA, 19 nt, Homo sapiens
  misc_RNA (1)...(19): siRNA sense strand
ucuaucaucuucuguguca

SEQ ID NO: 381703 - RNA, 19 nt, Homo sapiens
  misc_RNA (1)...(19): siRNA sense strand
caucaucggcguucucuau

SEQ ID NO: 381704 - RNA, 19 nt, Homo sapiens
  misc_RNA (1)...(19): siRNA sense strand
ccacggcuauuccuacauc

SEQ ID NO: 381705 - RNA, 19 nt, Homo sapiens
  misc_RNA (1)...(19): siRNA sense strand
uaucugguccugagaaaga

SEQ ID NO: 381706 - RNA, 19 nt, Homo sapiens
  misc_RNA (1)...(19): siRNA sense strand
caucgcuacuguuauuaug

SEQ ID NO: 381707 - RNA, 19 nt, Homo sapiens
  misc_RNA (1)...(19): siRNA sense strand
gauucucucuaucaucuuc

SEQ ID NO: 381708 - RNA, 19 nt, Homo sapiens
  misc_RNA (1)...(19): siRNA sense strand
ccaucuacacuagucauua

SEQ ID NO: 381709 - RNA, 19 nt, Homo sapiens
  misc_RNA (1)...(19): siRNA sense strand
cagugaagaugcccucaag

SEQ ID NO: 381710 - RNA, 19 nt, Homo sapiens
  misc_RNA (1)...(19): siRNA sense strand
uaucaucuucugugucauu

SEQ ID NO: 381711 - RNA, 19 nt, Homo sapiens
  misc_RNA (1)...(19): siRNA sense strand
aagaugcccucaagacagu

SEQ ID NO: 381712 - RNA, 19 nt, Homo sapiens
  misc_RNA (1)...(19): siRNA sense strand
auugcuggcugguaucuuu

SEQ ID NO: 381713 - RNA, 19 nt, Homo sapiens
  misc_RNA (1)...(19): siRNA sense strand
aucaguaggucuuuggaaa

SEQ ID NO: 381714 - RNA, 19 nt, Homo sapiens
  misc_RNA (1)...(19): siRNA sense strand
ugaagaugcccucaagaca

SEQ ID NO: 381715 - RNA, 19 nt, Homo sapiens
  misc_RNA (1)...(19): siRNA sense strand
caucggcguucucuaucug

SEQ ID NO: 381716 - RNA, 19 nt, Homo sapiens
  misc_RNA (1)...(19): siRNA sense strand
ucuaucugguccugagaaa

SEQ ID NO: 381717 - RNA, 19 nt, Homo sapiens
  misc_RNA (1)...(19): siRNA sense strand
ugguauugcuggcugguau

SEQ ID NO: 381718 - RNA, 19 nt, Homo sapiens
  misc_RNA (1)...(19): siRNA sense strand
caccacggcuauuccuaca

SEQ ID NO: 381719 - RNA, 19 nt, Homo sapiens
  misc_RNA (1)...(19): siRNA sense strand
gcaguaucaccacggcuau

SEQ ID NO: 381720 - RNA, 19 nt, Homo sapiens
  misc_RNA (1)...(19): siRNA sense strand
ucauugcccuccuggucuu

SEQ ID NO: 381721 - RNA, 19 nt, Homo sapiens
  misc_RNA (1)...(19): siRNA sense strand
ccugucauaugccagugaa

SEQ ID NO: 381722 - RNA, 19 nt, Homo sapiens
  misc_RNA (1)...(19): siRNA sense strand
gguagaugcaucaguaggu

SEQ ID NO: 381723 - RNA, 19 nt, Homo sapiens
  misc_RNA (1)...(19): siRNA sense strand
ucucuaucaucuucugugu

SEQ ID NO: 381724 - RNA, 19 nt, Homo sapiens
  misc_RNA (1)...(19): siRNA sense strand
gugaagaugcccucaagac

SEQ ID NO: 381725 - RNA, 19 nt, Homo sapiens
  misc_RNA (1)...(19): siRNA sense strand
uggaucugcuucugcuuca

SEQ ID NO: 381726 - RNA, 19 nt, Homo sapiens
  misc_RNA (1)...(19): siRNA sense strand
ugucauaugccagugaaga

SEQ ID NO: 381727 - RNA, 19 nt, Homo sapiens
  misc_RNA (1)...(19): siRNA sense strand
gcauacagcuggccucaua

SEQ ID NO: 381728 - RNA, 19 nt, Homo sapiens
  misc_RNA (1)...(19): siRNA sense strand
cagcagagcuuauaagauc

SEQ ID NO: 381729 - RNA, 19 nt, Homo sapiens
  misc_RNA (1)...(19): siRNA sense strand
gcaagcagcugaccuacac

SEQ ID NO: 381730 - RNA, 19 nt, Homo sapiens
  misc_RNA (1)...(19): siRNA sense strand
agagagggcugcaguacaa

SEQ ID NO: 381731 - RNA, 19 nt, Homo sapiens
  misc_RNA (1)...(19): siRNA sense strand
gcacagaggaccacuccaa

SEQ ID NO: 381732 - RNA, 19 nt, Homo sapiens
  misc_RNA (1)...(19): siRNA sense strand
gcagggcacucaucaacag

SEQ ID NO: 381733 - RNA, 19 nt, Homo sapiens
  misc_RNA (1)...(19): siRNA sense strand
gcaaggcucaggacucuuc

SEQ ID NO: 381734 - RNA, 19 nt, Homo sapiens
  misc_RNA (1)...(19): siRNA sense strand
ccagagcuuugccaaguuc

SEQ ID NO: 381735 - RNA, 19 nt, Homo sapiens
  misc_RNA (1)...(19): siRNA sense strand
gucaagggccaccacguua

SEQ ID NO: 381736 - RNA, 19 nt, Homo sapiens
  misc_RNA (1)...(19): siRNA sense strand
gcagagcuuauaagaucua

SEQ ID NO: 381737 - RNA, 19 nt, Homo sapiens
  misc_RNA (1)...(19): siRNA sense strand
cagcaaggcucaggacucu

SEQ ID NO: 381738 - RNA, 19 nt, Homo sapiens
  misc_RNA (1)...(19): siRNA sense strand
cagaggaccacuccaaaug

SEQ ID NO: 381739 - RNA, 19 nt, Homo sapiens
  misc_RNA (1)...(19): siRNA sense strand
ggucaagggccaccacguu

SEQ ID NO: 381740 - RNA, 19 nt, Homo sapiens
  misc_RNA (1)...(19): siRNA sense strand
gaucuuugcccaggaauuc

SEQ ID NO: 381741 - RNA, 19 nt, Homo sapiens
  misc_RNA (1)...(19): siRNA sense strand
gaacuaccagcccuguaau

SEQ ID NO: 381742 - RNA, 19 nt, Homo sapiens
  misc_RNA (1)...(19): siRNA sense strand
ccaccacguuagccaagaa

SEQ ID NO: 381743 - RNA, 19 nt, Homo sapiens
  misc_RNA (1)...(19): siRNA sense strand
agaacuaccagcccuguaa

SEQ ID NO: 381744 - RNA, 19 nt, Homo sapiens
  misc_RNA (1)...(19): siRNA sense strand
gagggcugcaguacaagua

SEQ ID NO: 381745 - RNA, 19 nt, Homo sapiens
  misc_RNA (1)...(19): siRNA sense strand
ggcagguucugaaugugaa

SEQ ID NO: 381746 - RNA, 19 nt, Homo sapiens
  misc_RNA (1)...(19): siRNA sense strand
ucuggcagguucugaaugu

SEQ ID NO: 381747 - RNA, 19 nt, Homo sapiens
  misc_RNA (1)...(19): siRNA sense strand
cagcaaauuuggagaugac

SEQ ID NO: 381748 - RNA, 19 nt, Homo sapiens
  misc_RNA (1)...(19): siRNA sense strand
ucagcaaauuuggagauga

SEQ ID NO: 381749 - RNA, 19 nt, Homo sapiens
  misc_RNA (1)...(19): siRNA sense strand
gccaaguucagcaaauuug

SEQ ID NO: 381750 - RNA, 19 nt, Homo sapiens
  misc_RNA (1)...(19): siRNA sense strand
cccucuaacugcucggaua

SEQ ID NO: 381751 - RNA, 19 nt, Homo sapiens
  misc_RNA (1)...(19): siRNA sense strand
cugcgugggugacaugaau

SEQ ID NO: 381752 - RNA, 19 nt, Homo sapiens
  misc_RNA (1)...(19): siRNA sense strand
ucgcucaguucucgaagau

SEQ ID NO: 381753 - RNA, 19 nt, Homo sapiens
  misc_RNA (1)...(19): siRNA sense strand
caaguucagcaaauuugga

SEQ ID NO: 381754 - RNA, 19 nt, Homo sapiens
  misc_RNA (1)...(19): siRNA sense strand
gggcugcaguacaaguauc

SEQ ID NO: 381755 - RNA, 19 nt, Homo sapiens
  misc_RNA (1)...(19): siRNA sense strand
ggccuccucugcugcauac

SEQ ID NO: 381756 - RNA, 19 nt, Homo sapiens
  misc_RNA (1)...(19): siRNA sense strand
ucucgaagaugggcaagca

SEQ ID NO: 381757 - RNA, 19 nt, Homo sapiens
  misc_RNA (1)...(19): siRNA sense strand
ccacaguguaccuaacuuc

SEQ ID NO: 381758 - RNA, 19 nt, Homo sapiens
  misc_RNA (1)...(19): siRNA sense strand
gaaccagggagaggagcaa

SEQ ID NO: 381759 - RNA, 19 nt, Homo sapiens
  misc_RNA (1)...(19): siRNA sense strand
cacagaggaccacuccaaa

SEQ ID NO: 381760 - RNA, 19 nt, Homo sapiens
  misc_RNA (1)...(19): siRNA sense strand
uuccagagcuuugccaagu

SEQ ID NO: 381761 - RNA, 19 nt, Homo sapiens
  misc_RNA (1)...(19): siRNA sense strand
cagagcuuauaagaucuaa

SEQ ID NO: 381762 - RNA, 19 nt, Homo sapiens
  misc_RNA (1)...(19): siRNA sense strand
ccuuccugcucuacaauga

SEQ ID NO: 381763 - RNA, 19 nt, Homo sapiens
  misc_RNA (1)...(19): siRNA sense strand
acagaggaccacuccaaau

SEQ ID NO: 381764 - RNA, 19 nt, Homo sapiens
  misc_RNA (1)...(19): siRNA sense strand
ggaccugcgugggugacau

SEQ ID NO: 381765 - RNA, 19 nt, Homo sapiens
  misc_RNA (1)...(19): siRNA sense strand
ucuaacugcucggauaucu

SEQ ID NO: 381766 - RNA, 19 nt, Homo sapiens
  misc_RNA (1)...(19): siRNA sense strand
gcaaagaacuccacuguca

SEQ ID NO: 381767 - RNA, 19 nt, Homo sapiens
  misc_RNA (1)...(19): siRNA sense strand
gagagaagcugaagcauug

SEQ ID NO: 381768 - RNA, 19 nt, Homo sapiens
  misc_RNA (1)...(19): siRNA sense strand
ggaagcagcuacccgaaua

SEQ ID NO: 381769 - RNA, 19 nt, Homo sapiens
  misc_RNA (1)...(19): siRNA sense strand
gcauggaguugguucauaa

SEQ ID NO: 381770 - RNA, 19 nt, Homo sapiens
  misc_RNA (1)...(19): siRNA sense strand
gugcuaaacugucauuaaa

SEQ ID NO: 381771 - RNA, 19 nt, Homo sapiens
  misc_RNA (1)...(19): siRNA sense strand
guaaagcuuuggacaacua

SEQ ID NO: 381772 - RNA, 19 nt, Homo sapiens
  misc_RNA (1)...(19): siRNA sense strand
ggaagaugaugauguagug

SEQ ID NO: 381773 - RNA, 19 nt, Homo sapiens
  misc_RNA (1)...(19): siRNA sense strand
agaggaagaugaugaugua

SEQ ID NO: 381774 - RNA, 19 nt, Homo sapiens
  misc_RNA (1)...(19): siRNA sense strand
gauguuauguggucaccua

SEQ ID NO: 381775 - RNA, 19 nt, Homo sapiens
  misc_RNA (1)...(19): siRNA sense strand
ggagagauuuggaagacaa

SEQ ID NO: 381776 - RNA, 19 nt, Homo sapiens
  misc_RNA (1)...(19): siRNA sense strand
gagauuggauuuauggaau

SEQ ID NO: 381777 - RNA, 19 nt, Homo sapiens
  misc_RNA (1)...(19): siRNA sense strand
gcuaaacugucauuaaauc

SEQ ID NO: 381778 - RNA, 19 nt, Homo sapiens
  misc_RNA (1)...(19): siRNA sense strand
guagacuucucacaucuuu

SEQ ID NO: 381779 - RNA, 19 nt, Homo sapiens
  misc_RNA (1)...(19): siRNA sense strand
ucacucagauuccgauuug

SEQ ID NO: 381780 - RNA, 19 nt, Homo sapiens
  misc_RNA (1)...(19): siRNA sense strand
gcaguagacuucucacauc

SEQ ID NO: 381781 - RNA, 19 nt, Homo sapiens
  misc_RNA (1)...(19): siRNA sense strand
ggauaaccguagcaauaaa

SEQ ID NO: 381782 - RNA, 19 nt, Homo sapiens
  misc_RNA (1)...(19): siRNA sense strand
ggagagaagcugaagcauu

SEQ ID NO: 381783 - RNA, 19 nt, Homo sapiens
  misc_RNA (1)...(19): siRNA sense strand
gcauuucuguggaggguaa

SEQ ID NO: 381784 - RNA, 19 nt, Homo sapiens
  misc_RNA (1)...(19): siRNA sense strand
gcccuuguauggaauauga

SEQ ID NO: 381785 - RNA, 19 nt, Homo sapiens
  misc_RNA (1)...(19): siRNA sense strand
ggacaacuaagaauaacaa

SEQ ID NO: 381786 - RNA, 19 nt, Homo sapiens
  misc_RNA (1)...(19): siRNA sense strand
gagaaauugucacguauac

SEQ ID NO: 381787 - RNA, 19 nt, Homo sapiens
  misc_RNA (1)...(19): siRNA sense strand
gaacacuugcagaaauuaa

SEQ ID NO: 381788 - RNA, 19 nt, Homo sapiens
  misc_RNA (1)...(19): siRNA sense strand
aaacagaccagaagaagga

SEQ ID NO: 381789 - RNA, 19 nt, Homo sapiens
  misc_RNA (1)...(19): siRNA sense strand
uaaaagaacuccagugcaa

SEQ ID NO: 381790 - RNA, 19 nt, Homo sapiens
  misc_RNA (1)...(19): siRNA sense strand
gggauaaccguagcaauaa

SEQ ID NO: 381791 - RNA, 19 nt, Homo sapiens
  misc_RNA (1)...(19): siRNA sense strand
gaucuaggacgcugcauug

SEQ ID NO: 381792 - RNA, 19 nt, Homo sapiens
  misc_RNA (1)...(19): siRNA sense strand
agacaaagaaggagagauu

SEQ ID NO: 381793 - RNA, 19 nt, Homo sapiens
  misc_RNA (1)...(19): siRNA sense strand
gauaaugcagacuauguuu

SEQ ID NO: 381794 - RNA, 19 nt, Homo sapiens
  misc_RNA (1)...(19): siRNA sense strand
cgacuuuccuccucgagaa

SEQ ID NO: 381795 - RNA, 19 nt, Homo sapiens
  misc_RNA (1)...(19): siRNA sense strand
ugggauaaccguagcaaua

SEQ ID NO: 381796 - RNA, 19 nt, Homo sapiens
  misc_RNA (1)...(19): siRNA sense strand
ugagcugacugaagaagaa

SEQ ID NO: 381797 - RNA, 19 nt, Homo sapiens
  misc_RNA (1)...(19): siRNA sense strand
ccgaacacuugcagaaauu

SEQ ID NO: 381798 - RNA, 19 nt, Homo sapiens
  misc_RNA (1)...(19): siRNA sense strand
cagacuauguuuaugaugu

SEQ ID NO: 381799 - RNA, 19 nt, Homo sapiens
  misc_RNA (1)...(19): siRNA sense strand
gaacuccagugcaaagaac

SEQ ID NO: 381800 - RNA, 19 nt, Homo sapiens
  misc_RNA (1)...(19): siRNA sense strand
gguaccaacugccagcauu

SEQ ID NO: 381801 - RNA, 19 nt, Homo sapiens
  misc_RNA (1)...(19): siRNA sense strand
ggacgaggaccuauuaaac

SEQ ID NO: 381802 - RNA, 19 nt, Homo sapiens
  misc_RNA (1)...(19): siRNA sense strand
gccgaacacuugcagaaau

SEQ ID NO: 381803 - RNA, 19 nt, Homo sapiens
  misc_RNA (1)...(19): siRNA sense strand
gcaaagcuggaaucaguga

SEQ ID NO: 381804 - RNA, 19 nt, Homo sapiens
  misc_RNA (1)...(19): siRNA sense strand
aaauugugcuuugggauaa

SEQ ID NO: 381805 - RNA, 19 nt, Homo sapiens
  misc_RNA (1)...(19): siRNA sense strand
gugguuaguuguuuggauu

SEQ ID NO: 381806 - RNA, 19 nt, Homo sapiens
  misc_RNA (1)...(19): siRNA sense strand
ggaguugguucauaaacag

SEQ ID NO: 381807 - RNA, 19 nt, Homo sapiens
  misc_RNA (1)...(19): siRNA sense strand
ugaagauaaugcagacuau

SEQ ID NO: 381808 - RNA, 19 nt, Homo sapiens
  misc_RNA (1)...(19): siRNA sense strand
caucaguucuucagcuuca

SEQ ID NO: 381809 - RNA, 19 nt, Homo sapiens
  misc_RNA (1)...(19): siRNA sense strand
ucacuggcauccauuguca

SEQ ID NO: 381810 - RNA, 19 nt, Homo sapiens
  misc_RNA (1)...(19): siRNA sense strand
cucaugagcugacugaaga

SEQ ID NO: 381811 - RNA, 19 nt, Homo sapiens
  misc_RNA (1)...(19): siRNA sense strand
gcuccuaaaccaccuauug

SEQ ID NO: 381812 - RNA, 19 nt, Homo sapiens
  misc_RNA (1)...(19): siRNA sense strand
ggagauuggauuuauggaa

SEQ ID NO: 381813 - RNA, 19 nt, Homo sapiens
  misc_RNA (1)...(19): siRNA sense strand
gaagagaaaagaagaagaa

SEQ ID NO: 381814 - RNA, 19 nt, Homo sapiens
  misc_RNA (1)...(19): siRNA sense strand
cgagaaauugucacguaua

SEQ ID NO: 381815 - RNA, 19 nt, Homo sapiens
  misc_RNA (1)...(19): siRNA sense strand
ggugcuaaacugucauuaa

SEQ ID NO: 381816 - RNA, 19 nt, Homo sapiens
  misc_RNA (1)...(19): siRNA sense strand
gaggguaauccugcucuua

SEQ ID NO: 381817 - RNA, 19 nt, Homo sapiens
  misc_RNA (1)...(19): siRNA sense strand
ggacaugcuuucccaucca

SEQ ID NO: 381818 - RNA, 19 nt, Homo sapiens
  misc_RNA (1)...(19): siRNA sense strand
ugauuagcaucucuacuga

SEQ ID NO: 381819 - RNA, 19 nt, Homo sapiens
  misc_RNA (1)...(19): siRNA sense strand
ugaauuaaaggcugaguug

SEQ ID NO: 381820 - RNA, 19 nt, Homo sapiens
  misc_RNA (1)...(19): siRNA sense strand
uggaaucagugagauguuu

SEQ ID NO: 381821 - RNA, 19 nt, Homo sapiens
  misc_RNA (1)...(19): siRNA sense strand
cuaagaauaacaagccuuu

SEQ ID NO: 381822 - RNA, 19 nt, Homo sapiens
  misc_RNA (1)...(19): siRNA sense strand
aggcugaguuggaacguaa

SEQ ID NO: 381823 - RNA, 19 nt, Homo sapiens
  misc_RNA (1)...(19): siRNA sense strand
ggauuggucaucucaguau

SEQ ID NO: 381824 - RNA, 19 nt, Homo sapiens
  misc_RNA (1)...(19): siRNA sense strand
gaaucucaauaaugacaca

SEQ ID NO: 381825 - RNA, 19 nt, Homo sapiens
  misc_RNA (1)...(19): siRNA sense strand
caguagcugugacaucuau

SEQ ID NO: 381826 - RNA, 19 nt, Homo sapiens
  misc_RNA (1)...(19): siRNA sense strand
acgaggaccuauuaaacuu

SEQ ID NO: 381827 - RNA, 19 nt, Homo sapiens
  misc_RNA (1)...(19): siRNA sense strand
aacaaauccugcacucuga

SEQ ID NO: 381828 - RNA, 19 nt, Homo sapiens
  misc_RNA (1)...(19): siRNA sense strand
cucgagaaauugucacgua

SEQ ID NO: 381829 - RNA, 19 nt, Homo sapiens
  misc_RNA (1)...(19): siRNA sense strand
gggacgaggaccuauuaaa

SEQ ID NO: 381830 - RNA, 19 nt, Homo sapiens
  misc_RNA (1)...(19): siRNA sense strand
ggguaauccugcucuuaau

SEQ ID NO: 381831 - RNA, 19 nt, Homo sapiens
  misc_RNA (1)...(19): siRNA sense strand
caaagaaggagagauucaa

SEQ ID NO: 381832 - RNA, 19 nt, Homo sapiens
  misc_RNA (1)...(19): siRNA sense strand
gcgacuggcccaaaucaga

SEQ ID NO: 381833 - RNA, 19 nt, Homo sapiens
  misc_RNA (1)...(19): siRNA sense strand
caauaaugacacagaggua

SEQ ID NO: 381834 - RNA, 19 nt, Homo sapiens
  misc_RNA (1)...(19): siRNA sense strand
gaaaagaagaagaaaggaa

SEQ ID NO: 381835 - RNA, 19 nt, Homo sapiens
  misc_RNA (1)...(19): siRNA sense strand
ccagucagcugugaugucu

SEQ ID NO: 381836 - RNA, 19 nt, Homo sapiens
  misc_RNA (1)...(19): siRNA sense strand
aguuauggcucaacccaaa

SEQ ID NO: 381837 - RNA, 19 nt, Homo sapiens
  misc_RNA (1)...(19): siRNA sense strand
uauugaaccugaagaagag

SEQ ID NO: 381838 - RNA, 19 nt, Homo sapiens
  misc_RNA (1)...(19): siRNA sense strand
gaagauaaugcagacuaug

SEQ ID NO: 381839 - RNA, 19 nt, Homo sapiens
  misc_RNA (1)...(19): siRNA sense strand
caguaaagcuuuggacaac

SEQ ID NO: 381840 - RNA, 19 nt, Homo sapiens
  misc_RNA (1)...(19): siRNA sense strand
gugcaaagaacuccacugu

SEQ ID NO: 381841 - RNA, 19 nt, Homo sapiens
  misc_RNA (1)...(19): siRNA sense strand
gaaaagaagagaaaagaag

SEQ ID NO: 381842 - RNA, 19 nt, Homo sapiens
  misc_RNA (1)...(19): siRNA sense strand
uaaguuucuuugaccauuc

SEQ ID NO: 381843 - RNA, 19 nt, Homo sapiens
  misc_RNA (1)...(19): siRNA sense strand
guaccaacugccagcauuu

SEQ ID NO: 381844 - RNA, 19 nt, Homo sapiens
  misc_RNA (1)...(19): siRNA sense strand
ggaaucagugagauguuug

SEQ ID NO: 381845 - RNA, 19 nt, Homo sapiens
  misc_RNA (1)...(19): siRNA sense strand
ucuauguccuucccuguug

SEQ ID NO: 381846 - RNA, 19 nt, Homo sapiens
  misc_RNA (1)...(19): siRNA sense strand
uguaguggcuccuaaacca

SEQ ID NO: 381847 - RNA, 19 nt, Homo sapiens
  misc_RNA (1)...(19): siRNA sense strand
gggcaucaaggaccaauca

SEQ ID NO: 381848 - RNA, 19 nt, Homo sapiens
  misc_RNA (1)...(19): siRNA sense strand
gaaucagugagauguuuga

SEQ ID NO: 381849 - RNA, 19 nt, Homo sapiens
  misc_RNA (1)...(19): siRNA sense strand
ccugcacucugaggaauuu

SEQ ID NO: 381850 - RNA, 19 nt, Homo sapiens
  misc_RNA (1)...(19): siRNA sense strand
cuauugaaccugaagaaga

SEQ ID NO: 381851 - RNA, 19 nt, Homo sapiens
  misc_RNA (1)...(19): siRNA sense strand
ucgagaaauugucacguau

SEQ ID NO: 381852 - RNA, 19 nt, Homo sapiens
  misc_RNA (1)...(19): siRNA sense strand
caaagcaucgggugguuag

SEQ ID NO: 381853 - RNA, 19 nt, Homo sapiens
  misc_RNA (1)...(19): siRNA sense strand
caucuucuuugacuauagu

SEQ ID NO: 381854 - RNA, 19 nt, Homo sapiens
  misc_RNA (1)...(19): siRNA sense strand
auuaaaggcugaguuggaa

SEQ ID NO: 381855 - RNA, 19 nt, Homo sapiens
  misc_RNA (1)...(19): siRNA sense strand
gaagaaggaagcuguugcu

SEQ ID NO: 381856 - RNA, 19 nt, Homo sapiens
  misc_RNA (1)...(19): siRNA sense strand
ggaggguaauccugcucuu

SEQ ID NO: 381857 - RNA, 19 nt, Homo sapiens
  misc_RNA (1)...(19): siRNA sense strand
caacugccagcauuucugu

SEQ ID NO: 381858 - RNA, 19 nt, Homo sapiens
  misc_RNA (1)...(19): siRNA sense strand
gacgaggaccuauuaaacu

SEQ ID NO: 381859 - RNA, 19 nt, Homo sapiens
  misc_RNA (1)...(19): siRNA sense strand
cuacccgaauaccugcuua

SEQ ID NO: 381860 - RNA, 19 nt, Homo sapiens
  misc_RNA (1)...(19): siRNA sense strand
guguggcccuuguauggaa

SEQ ID NO: 381861 - RNA, 19 nt, Homo sapiens
  misc_RNA (1)...(19): siRNA sense strand
ucaaagcaucgggugguua

SEQ ID NO: 381862 - RNA, 19 nt, Homo sapiens
  misc_RNA (1)...(19): siRNA sense strand
gacuauagugggagagauu

SEQ ID NO: 381863 - RNA, 19 nt, Homo sapiens
  misc_RNA (1)...(19): siRNA sense strand
gaagacaaagaaggagaga

SEQ ID NO: 381864 - RNA, 19 nt, Homo sapiens
  misc_RNA (1)...(19): siRNA sense strand
cgaacacuugcagaaauua

SEQ ID NO: 381865 - RNA, 19 nt, Homo sapiens
  misc_RNA (1)...(19): siRNA sense strand
uggaguugguucauaaaca

SEQ ID NO: 381866 - RNA, 19 nt, Homo sapiens
  misc_RNA (1)...(19): siRNA sense strand
gcaaaguccuauccagaga

SEQ ID NO: 381867 - RNA, 19 nt, Homo sapiens
  misc_RNA (1)...(19): siRNA sense strand
ccugggagcugacuucuug

SEQ ID NO: 381868 - RNA, 19 nt, Homo sapiens
  misc_RNA (1)...(19): siRNA sense strand
ggucagcaccauucaguuu

SEQ ID NO: 381869 - RNA, 19 nt, Homo sapiens
  misc_RNA (1)...(19): siRNA sense strand
ggaaggccuccuccucuuu

SEQ ID NO: 381870 - RNA, 19 nt, Homo sapiens
  misc_RNA (1)...(19): siRNA sense strand
gaaggccuccuccucuuug

SEQ ID NO: 381871 - RNA, 19 nt, Homo sapiens
  misc_RNA (1)...(19): siRNA sense strand
ggccacaguugccugauuc

SEQ ID NO: 381872 - RNA, 19 nt, Homo sapiens
  misc_RNA (1)...(19): siRNA sense strand
ccacgucucuccauugacu

SEQ ID NO: 381873 - RNA, 19 nt, Homo sapiens
  misc_RNA (1)...(19): siRNA sense strand
guccacgucucuccauuga

SEQ ID NO: 381874 - RNA, 19 nt, Homo sapiens
  misc_RNA (1)...(19): siRNA sense strand
gguggaggccguuguguau

SEQ ID NO: 381875 - RNA, 19 nt, Homo sapiens
  misc_RNA (1)...(19): siRNA sense strand
ucuggagucugucaugauu

SEQ ID NO: 381876 - RNA, 19 nt, Homo sapiens
  misc_RNA (1)...(19): siRNA sense strand
guggauaucuuggaaaggu

SEQ ID NO: 381877 - RNA, 19 nt, Homo sapiens
  misc_RNA (1)...(19): siRNA sense strand
ugaggcugcugcucucuga

SEQ ID NO: 381878 - RNA, 19 nt, Homo sapiens
  misc_RNA (1)...(19): siRNA sense strand
caucuggagucugucauga

SEQ ID NO: 381879 - RNA, 19 nt, Homo sapiens
  misc_RNA (1)...(19): siRNA sense strand
ccacugcccgcucagcuaa

SEQ ID NO: 381880 - RNA, 19 nt, Homo sapiens
  misc_RNA (1)...(19): siRNA sense strand
ccuguaccauuguggauau

SEQ ID NO: 381881 - RNA, 19 nt, Homo sapiens
  misc_RNA (1)...(19): siRNA sense strand
guaccauuguggauaucuu

SEQ ID NO: 381882 - RNA, 19 nt, Homo sapiens
  misc_RNA (1)...(19): siRNA sense strand
ccagggcaguccuaagauc

SEQ ID NO: 381883 - RNA, 19 nt, Homo sapiens
  misc_RNA (1)...(19): siRNA sense strand
cauuguggauaucuuggaa

SEQ ID NO: 381884 - RNA, 19 nt, Homo sapiens
  misc_RNA (1)...(19): siRNA sense strand
cagcaagcuuagccuacuu

SEQ ID NO: 381885 - RNA, 19 nt, Homo sapiens
  misc_RNA (1)...(19): siRNA sense strand
cggaaggccuccuccucuu

SEQ ID NO: 381886 - RNA, 19 nt, Homo sapiens
  misc_RNA (1)...(19): siRNA sense strand
caaaguccuauccagagaa

SEQ ID NO: 381887 - RNA, 19 nt, Homo sapiens
  misc_RNA (1)...(19): siRNA sense strand
guacgucuuuguggacauc

SEQ ID NO: 381888 - RNA, 19 nt, Homo sapiens
  misc_RNA (1)...(19): siRNA sense strand
ucagcaccauucaguuugu

SEQ ID NO: 381889 - RNA, 19 nt, Homo sapiens
  misc_RNA (1)...(19): siRNA sense strand
cggccacaguugccugauu

SEQ ID NO: 381890 - RNA, 19 nt, Homo sapiens
  misc_RNA (1)...(19): siRNA sense strand
gauccuggagcaccuggaa

SEQ ID NO: 381891 - RNA, 19 nt, Homo sapiens
  misc_RNA (1)...(19): siRNA sense strand
ggaggccguuguguaucuu

SEQ ID NO: 381892 - RNA, 19 nt, Homo sapiens
  misc_RNA (1)...(19): siRNA sense strand
ccucuuugccuguaccauu

SEQ ID NO: 381893 - RNA, 19 nt, Homo sapiens
  misc_RNA (1)...(19): siRNA sense strand
ccuacccgauggacuucua

SEQ ID NO: 381894 - RNA, 19 nt, Homo sapiens
  misc_RNA (1)...(19): siRNA sense strand
ccgaguaucgugugagugu

SEQ ID NO: 381895 - RNA, 19 nt, Homo sapiens
  misc_RNA (1)...(19): siRNA sense strand
cgccagggcaguccuaaga

SEQ ID NO: 381896 - RNA, 19 nt, Homo sapiens
  misc_RNA (1)...(19): siRNA sense strand
ggagcugaaagccgaguau

SEQ ID NO: 381897 - RNA, 19 nt, Homo sapiens
  misc_RNA (1)...(19): siRNA sense strand
ccagcaagcuuagccuacu

SEQ ID NO: 381898 - RNA, 19 nt, Homo sapiens
  misc_RNA (1)...(19): siRNA sense strand
ugacccauauagcaaaguc

SEQ ID NO: 381899 - RNA, 19 nt, Homo sapiens
  misc_RNA (1)...(19): siRNA sense strand
ccuugggccuuuccuuugu

SEQ ID NO: 381900 - RNA, 19 nt, Homo sapiens
  misc_RNA (1)...(19): siRNA sense strand
guggacauccggauagaca

SEQ ID NO: 381901 - RNA, 19 nt, Homo sapiens
  misc_RNA (1)...(19): siRNA sense strand
gccuuauucugggcacuuu

SEQ ID NO: 381902 - RNA, 19 nt, Homo sapiens
  misc_RNA (1)...(19): siRNA sense strand
gcugaaagccgaguaucgu

SEQ ID NO: 381903 - RNA, 19 nt, Homo sapiens
  misc_RNA (1)...(19): siRNA sense strand
uggaggccguuguguaucu

SEQ ID NO: 381904 - RNA, 19 nt, Homo sapiens
  misc_RNA (1)...(19): siRNA sense strand
aaagccgaguaucguguga

SEQ ID NO: 381905 - RNA, 19 nt, Homo sapiens
  misc_RNA (1)...(19): siRNA sense strand
ggacauccggauagacacu

SEQ ID NO: 381906 - RNA, 19 nt, Homo sapiens
  misc_RNA (1)...(19): siRNA sense strand
cacggaggccgaagugaug

SEQ ID NO: 381907 - RNA, 19 nt, Homo sapiens
  misc_RNA (1)...(19): siRNA sense strand
gccuugggccuuuccuuug

SEQ ID NO: 381908 - RNA, 19 nt, Homo sapiens
  misc_RNA (1)...(19): siRNA sense strand
ggaaagagucccugaaucu

SEQ ID NO: 381909 - RNA, 19 nt, Homo sapiens
  misc_RNA (1)...(19): siRNA sense strand
gcaguaaugucagcgagaa

SEQ ID NO: 381910 - RNA, 19 nt, Homo sapiens
  misc_RNA (1)...(19): siRNA sense strand
cuucacauccucauucuua

SEQ ID NO: 381911 - RNA, 19 nt, Homo sapiens
  misc_RNA (1)...(19): siRNA sense strand
aaacaugggccugcaguaa

SEQ ID NO: 381912 - RNA, 19 nt, Homo sapiens
  misc_RNA (1)...(19): siRNA sense strand
ucacauccucauucuuaua

SEQ ID NO: 381913 - RNA, 19 nt, Homo sapiens
  misc_RNA (1)...(19): siRNA sense strand
ggucucagcccuucacauc

SEQ ID NO: 381914 - RNA, 19 nt, Homo sapiens
  misc_RNA (1)...(19): siRNA sense strand
acaugggccugcaguaaug

SEQ ID NO: 381915 - RNA, 19 nt, Homo sapiens
  misc_RNA (1)...(19): siRNA sense strand
gaacaacgacaccaaaaca

SEQ ID NO: 381916 - RNA, 19 nt, Homo sapiens
  misc_RNA (1)...(19): siRNA sense strand
gaaagagucccugaaucuc

SEQ ID NO: 381917 - RNA, 19 nt, Homo sapiens
  misc_RNA (1)...(19): siRNA sense strand
caucaucuacauccaccua

SEQ ID NO: 381918 - RNA, 19 nt, Homo sapiens
  misc_RNA (1)...(19): siRNA sense strand
cauccucauucuuauacug

SEQ ID NO: 381919 - RNA, 19 nt, Homo sapiens
  misc_RNA (1)...(19): siRNA sense strand
ggucagcggcaucaucuac

SEQ ID NO: 381920 - RNA, 19 nt, Homo sapiens
  misc_RNA (1)...(19): siRNA sense strand
guggaacaacgacaccaaa

SEQ ID NO: 381921 - RNA, 19 nt, Homo sapiens
  misc_RNA (1)...(19): siRNA sense strand
gcccuucacauccucauuc

SEQ ID NO: 381922 - RNA, 19 nt, Homo sapiens
  misc_RNA (1)...(19): siRNA sense strand
ucagcggcaucaucuacau

SEQ ID NO: 381923 - RNA, 19 nt, Homo sapiens
  misc_RNA (1)...(19): siRNA sense strand
ggaaacgguucaccuacaa

SEQ ID NO: 381924 - RNA, 19 nt, Homo sapiens
  misc_RNA (1)...(19): siRNA sense strand
gcccugcgcuauuacuaua

SEQ ID NO: 381925 - RNA, 19 nt, Homo sapiens
  misc_RNA (1)...(19): siRNA sense strand
gggaauucgucaucaaaga

SEQ ID NO: 381926 - RNA, 19 nt, Homo sapiens
  misc_RNA (1)...(19): siRNA sense strand
gggaaacgguucaccuaca

SEQ ID NO: 381927 - RNA, 19 nt, Homo sapiens
  misc_RNA (1)...(19): siRNA sense strand
ccagaugaauuacgacaag

SEQ ID NO: 381928 - RNA, 19 nt, Homo sapiens
  misc_RNA (1)...(19): siRNA sense strand
ucaccuacaaguucaauuu

SEQ ID NO: 381929 - RNA, 19 nt, Homo sapiens
  misc_RNA (1)...(19): siRNA sense strand
ugaagacugucgccucgaa

SEQ ID NO: 381930 - RNA, 19 nt, Homo sapiens
  misc_RNA (1)...(19): siRNA sense strand
aacuggugcuggucaauua

SEQ ID NO: 381931 - RNA, 19 nt, Homo sapiens
  misc_RNA (1)...(19): siRNA sense strand
cccaaagcgucuacaacua

SEQ ID NO: 381932 - RNA, 19 nt, Homo sapiens
  misc_RNA (1)...(19): siRNA sense strand
gcuggucaauuacccauuc

SEQ ID NO: 381933 - RNA, 19 nt, Homo sapiens
  misc_RNA (1)...(19): siRNA sense strand
gcaagccccagaugaauua

SEQ ID NO: 381934 - RNA, 19 nt, Homo sapiens
  misc_RNA (1)...(19): siRNA sense strand
gcgcuggagugaagacugu

SEQ ID NO: 381935 - RNA, 19 nt, Homo sapiens
  misc_RNA (1)...(19): siRNA sense strand
ccaugacccuggugucuuc

SEQ ID NO: 381936 - RNA, 19 nt, Homo sapiens
  misc_RNA (1)...(19): siRNA sense strand
ggucaauuacccauucauu

SEQ ID NO: 381937 - RNA, 19 nt, Homo sapiens
  misc_RNA (1)...(19): siRNA sense strand
ggguuugccuucccggauu

SEQ ID NO: 381938 - RNA, 19 nt, Homo sapiens
  misc_RNA (1)...(19): siRNA sense strand
caaggcgggugagcucuga

SEQ ID NO: 381939 - RNA, 19 nt, Homo sapiens
  misc_RNA (1)...(19): siRNA sense strand
ccuacaaguucaauuucaa

SEQ ID NO: 381940 - RNA, 19 nt, Homo sapiens
  misc_RNA (1)...(19): siRNA sense strand
ggaguaccagggcgucauu

SEQ ID NO: 381941 - RNA, 19 nt, Homo sapiens
  misc_RNA (1)...(19): siRNA sense strand
ccaaagcgucuacaacuac

SEQ ID NO: 381942 - RNA, 19 nt, Homo sapiens
  misc_RNA (1)...(19): siRNA sense strand
gugaugaggaugaggaaga

SEQ ID NO: 381943 - RNA, 19 nt, Homo sapiens
  misc_RNA (1)...(19): siRNA sense strand
ccaccagccugcucuucau

SEQ ID NO: 381944 - RNA, 19 nt, Homo sapiens
  misc_RNA (1)...(19): siRNA sense strand
guagugauggcacgucaga

SEQ ID NO: 381945 - RNA, 19 nt, Homo sapiens
  misc_RNA (1)...(19): siRNA sense strand
ggaugagggugaggacaag

SEQ ID NO: 381946 - RNA, 19 nt, Homo sapiens
  misc_RNA (1)...(19): siRNA sense strand
cguagccgcugcugacaag

SEQ ID NO: 381947 - RNA, 19 nt, Homo sapiens
  misc_RNA (1)...(19): siRNA sense strand
auccagcuguggcacuuua

SEQ ID NO: 381948 - RNA, 19 nt, Homo sapiens
  misc_RNA (1)...(19): siRNA sense strand
ggaauucgucaucaaagac

SEQ ID NO: 381949 - RNA, 19 nt, Homo sapiens
  misc_RNA (1)...(19): siRNA sense strand
gcucuucaucuucaucuuc

SEQ ID NO: 381950 - RNA, 19 nt, Homo sapiens
  misc_RNA (1)...(19): siRNA sense strand
gguuugccuucccggauug

SEQ ID NO: 381951 - RNA, 19 nt, Homo sapiens
  misc_RNA (1)...(19): siRNA sense strand
aaacuggugcuggucaauu

SEQ ID NO: 381952 - RNA, 19 nt, Homo sapiens
  misc_RNA (1)...(19): siRNA sense strand
acaagcgcauucugcacaa

SEQ ID NO: 381953 - RNA, 19 nt, Homo sapiens
  misc_RNA (1)...(19): siRNA sense strand
acaaacuggugcuggucaa

SEQ ID NO: 381954 - RNA, 19 nt, Homo sapiens
  misc_RNA (1)...(19): siRNA sense strand
ccagccugcucuucaucuu

SEQ ID NO: 381955 - RNA, 19 nt, Homo sapiens
  misc_RNA (1)...(19): siRNA sense strand
ccuggugucuuccgagucu

SEQ ID NO: 381956 - RNA, 19 nt, Homo sapiens
  misc_RNA (1)...(19): siRNA sense strand
aauuacccauucauugaug

SEQ ID NO: 381957 - RNA, 19 nt, Homo sapiens
  misc_RNA (1)...(19): siRNA sense strand
gaaacgguucaccuacaag

SEQ ID NO: 381958 - RNA, 19 nt, Homo sapiens
  misc_RNA (1)...(19): siRNA sense strand
gaacaucugcucaacauga

SEQ ID NO: 381959 - RNA, 19 nt, Homo sapiens
  misc_RNA (1)...(19): siRNA sense strand
gcccugcugugaugaauua

SEQ ID NO: 381960 - RNA, 19 nt, Homo sapiens
  misc_RNA (1)...(19): siRNA sense strand
gcacggcuccauauacaua

SEQ ID NO: 381961 - RNA, 19 nt, Homo sapiens
  misc_RNA (1)...(19): siRNA sense strand
gcaaagagggcucccagaa

SEQ ID NO: 381962 - RNA, 19 nt, Homo sapiens
  misc_RNA (1)...(19): siRNA sense strand
gauuauauuuguccagcua

SEQ ID NO: 381963 - RNA, 19 nt, Homo sapiens
  misc_RNA (1)...(19): siRNA sense strand
auacauaccuuccuccuau

SEQ ID NO: 381964 - RNA, 19 nt, Homo sapiens
  misc_RNA (1)...(19): siRNA sense strand
ggauggagguguuaaugau

SEQ ID NO: 381965 - RNA, 19 nt, Homo sapiens
  misc_RNA (1)...(19): siRNA sense strand
gaagcaagaucgcuagaac

SEQ ID NO: 381966 - RNA, 19 nt, Homo sapiens
  misc_RNA (1)...(19): siRNA sense strand
gaaaugcguagaaggaauu

SEQ ID NO: 381967 - RNA, 19 nt, Homo sapiens
  misc_RNA (1)...(19): siRNA sense strand
caagaagauucccggcuuu

SEQ ID NO: 381968 - RNA, 19 nt, Homo sapiens
  misc_RNA (1)...(19): siRNA sense strand
ggaaaugcguagaaggaau

SEQ ID NO: 381969 - RNA, 19 nt, Homo sapiens
  misc_RNA (1)...(19): siRNA sense strand
gcaccuuucuccuuuagug

SEQ ID NO: 381970 - RNA, 19 nt, Homo sapiens
  misc_RNA (1)...(19): siRNA sense strand
aaagagggaugcucacuuc

SEQ ID NO: 381971 - RNA, 19 nt, Homo sapiens
  misc_RNA (1)...(19): siRNA sense strand
gcaacuacuucaagguuuc

SEQ ID NO: 381972 - RNA, 19 nt, Homo sapiens
  misc_RNA (1)...(19): siRNA sense strand
caaugucacuaacuuggaa

SEQ ID NO: 381973 - RNA, 19 nt, Homo sapiens
  misc_RNA (1)...(19): siRNA sense strand
aaacagagagacacugaaa

SEQ ID NO: 381974 - RNA, 19 nt, Homo sapiens
  misc_RNA (1)...(19): siRNA sense strand
guaaacagagagacacuga

SEQ ID NO: 381975 - RNA, 19 nt, Homo sapiens
  misc_RNA (1)...(19): siRNA sense strand
gccaugauccugcucaauu

SEQ ID NO: 381976 - RNA, 19 nt, Homo sapiens
  misc_RNA (1)...(19): siRNA sense strand
ccagcaaugucacuaacuu

SEQ ID NO: 381977 - RNA, 19 nt, Homo sapiens
  misc_RNA (1)...(19): siRNA sense strand
ggcaacuacuucaagguuu

SEQ ID NO: 381978 - RNA, 19 nt, Homo sapiens
  misc_RNA (1)...(19): siRNA sense strand
ccaguuaucacaucuguau

SEQ ID NO: 381979 - RNA, 19 nt, Homo sapiens
  misc_RNA (1)...(19): siRNA sense strand
gaagauucccggcuuugug

SEQ ID NO: 381980 - RNA, 19 nt, Homo sapiens
  misc_RNA (1)...(19): siRNA sense strand
gccggaagcuggcucacuu

SEQ ID NO: 381981 - RNA, 19 nt, Homo sapiens
  misc_RNA (1)...(19): siRNA sense strand
ugaugucccugaccaaguu

SEQ ID NO: 381982 - RNA, 19 nt, Homo sapiens
  misc_RNA (1)...(19): siRNA sense strand
acacaaagaauaucucugu

SEQ ID NO: 381983 - RNA, 19 nt, Homo sapiens
  misc_RNA (1)...(19): siRNA sense strand
guagacagccaccaugaau

SEQ ID NO: 381984 - RNA, 19 nt, Homo sapiens
  misc_RNA (1)...(19): siRNA sense strand
gaacccacagucucaguga

SEQ ID NO: 381985 - RNA, 19 nt, Homo sapiens
  misc_RNA (1)...(19): siRNA sense strand
gagagacacugaaaaggaa

SEQ ID NO: 381986 - RNA, 19 nt, Homo sapiens
  misc_RNA (1)...(19): siRNA sense strand
acaaaucaguguacaaucg

SEQ ID NO: 381987 - RNA, 19 nt, Homo sapiens
  misc_RNA (1)...(19): siRNA sense strand
agacagccaccaugaauau

SEQ ID NO: 381988 - RNA, 19 nt, Homo sapiens
  misc_RNA (1)...(19): siRNA sense strand
aagaauaucucugugucaa

SEQ ID NO: 381989 - RNA, 19 nt, Homo sapiens
  misc_RNA (1)...(19): siRNA sense strand
gcuguuggauggagguguu

SEQ ID NO: 381990 - RNA, 19 nt, Homo sapiens
  misc_RNA (1)...(19): siRNA sense strand
cuauagcccugcugugaug

SEQ ID NO: 381991 - RNA, 19 nt, Homo sapiens
  misc_RNA (1)...(19): siRNA sense strand
ccaugauccugcucaauuc

SEQ ID NO: 381992 - RNA, 19 nt, Homo sapiens
  misc_RNA (1)...(19): siRNA sense strand
uggaacaucugcucaacau

SEQ ID NO: 381993 - RNA, 19 nt, Homo sapiens
  misc_RNA (1)...(19): siRNA sense strand
gggcugauguggcgcucaa

SEQ ID NO: 381994 - RNA, 19 nt, Homo sapiens
  misc_RNA (1)...(19): siRNA sense strand
ugugaugaauuacagcauu

SEQ ID NO: 381995 - RNA, 19 nt, Homo sapiens
  misc_RNA (1)...(19): siRNA sense strand
ggaauucuggaaaucuuug

SEQ ID NO: 381996 - RNA, 19 nt, Homo sapiens
  misc_RNA (1)...(19): siRNA sense strand
uuaauucuccuuccuccua

SEQ ID NO: 381997 - RNA, 19 nt, Homo sapiens
  misc_RNA (1)...(19): siRNA sense strand
ggauaucacuauggagucu

SEQ ID NO: 381998 - RNA, 19 nt, Homo sapiens
  misc_RNA (1)...(19): siRNA sense strand
uucaagguuucgagaguua

SEQ ID NO: 381999 - RNA, 19 nt, Homo sapiens
  misc_RNA (1)...(19): siRNA sense strand
gaaggaauucuggaaaucu

SEQ ID NO: 382000 - RNA, 19 nt, Homo sapiens
  misc_RNA (1)...(19): siRNA sense strand
ggacagggaugaggggaaa

SEQ ID NO: 382001 - RNA, 19 nt, Homo sapiens
  misc_RNA (1)...(19): siRNA sense strand
acaaggaguugguacacau

SEQ ID NO: 382002 - RNA, 19 nt, Homo sapiens
  misc_RNA (1)...(19): siRNA sense strand
agugguccaucgccaguua

SEQ ID NO: 382003 - RNA, 19 nt, Homo sapiens
  misc_RNA (1)...(19): siRNA sense strand
caaagagggaugcucacuu

SEQ ID NO: 382004 - RNA, 19 nt, Homo sapiens
  misc_RNA (1)...(19): siRNA sense strand
gcaaugucacuaacuugga

SEQ ID NO: 382005 - RNA, 19 nt, Homo sapiens
  misc_RNA (1)...(19): siRNA sense strand
gacaaggaguugguacaca

SEQ ID NO: 382006 - RNA, 19 nt, Homo sapiens
  misc_RNA (1)...(19): siRNA sense strand
gacaugcuccuggcaacua

SEQ ID NO: 382007 - RNA, 19 nt, Homo sapiens
  misc_RNA (1)...(19): siRNA sense strand
gggcaccuuucuccuuuag

SEQ ID NO: 382008 - RNA, 19 nt, Homo sapiens
  misc_RNA (1)...(19): siRNA sense strand
gcaucgggauaucacuaug

SEQ ID NO: 382009 - RNA, 19 nt, Homo sapiens
  misc_RNA (1)...(19): siRNA sense strand
cugggcaccuuucuccuuu

SEQ ID NO: 382010 - RNA, 19 nt, Homo sapiens
  misc_RNA (1)...(19): siRNA sense strand
guaacaagggcauggaaca

SEQ ID NO: 382011 - RNA, 19 nt, Homo sapiens
  misc_RNA (1)...(19): siRNA sense strand
cgugaccgaugcuuugguu

SEQ ID NO: 382012 - RNA, 19 nt, Homo sapiens
  misc_RNA (1)...(19): siRNA sense strand
ggagucuggucgugugaag

SEQ ID NO: 382013 - RNA, 19 nt, Homo sapiens
  misc_RNA (1)...(19): siRNA sense strand
aaggaauucuggaaaucuu

SEQ ID NO: 382014 - RNA, 19 nt, Homo sapiens
  misc_RNA (1)...(19): siRNA sense strand
gcauggaacaucugcucaa

SEQ ID NO: 382015 - RNA, 19 nt, Homo sapiens
  misc_RNA (1)...(19): siRNA sense strand
gccaacaccugggcaccuu

SEQ ID NO: 382016 - RNA, 19 nt, Homo sapiens
  misc_RNA (1)...(19): siRNA sense strand
gaccgaugcuuugguuugg

SEQ ID NO: 382017 - RNA, 19 nt, Homo sapiens
  misc_RNA (1)...(19): siRNA sense strand
caacacaaagaauaucucu

SEQ ID NO: 382018 - RNA, 19 nt, Homo sapiens
  misc_RNA (1)...(19): siRNA sense strand
uagacagccaccaugaaua

SEQ ID NO: 382019 - RNA, 19 nt, Homo sapiens
  misc_RNA (1)...(19): siRNA sense strand
agaacacaccuuaccugua

SEQ ID NO: 382020 - RNA, 19 nt, Homo sapiens
  misc_RNA (1)...(19): siRNA sense strand
aagagucccuggugugaag

SEQ ID NO: 382021 - RNA, 19 nt, Homo sapiens
  misc_RNA (1)...(19): siRNA sense strand
caaagagggcucccagaac

SEQ ID NO: 382022 - RNA, 19 nt, Homo sapiens
  misc_RNA (1)...(19): siRNA sense strand
acaagggcauggaacaucu

SEQ ID NO: 382023 - RNA, 19 nt, Homo sapiens
  misc_RNA (1)...(19): siRNA sense strand
ugauguggcgcucaauuga

SEQ ID NO: 382024 - RNA, 19 nt, Homo sapiens
  misc_RNA (1)...(19): siRNA sense strand
uuacagcauucccagcaau

SEQ ID NO: 382025 - RNA, 19 nt, Homo sapiens
  misc_RNA (1)...(19): siRNA sense strand
ugaccgaugcuuugguuug

SEQ ID NO: 382026 - RNA, 19 nt, Homo sapiens
  misc_RNA (1)...(19): siRNA sense strand
acaaagaauaucucugugu

SEQ ID NO: 382027 - RNA, 19 nt, Homo sapiens
  misc_RNA (1)...(19): siRNA sense strand
caagguuucgagaguuaaa

SEQ ID NO: 382028 - RNA, 19 nt, Homo sapiens
  misc_RNA (1)...(19): siRNA sense strand
caaaucaguguacaaucga

SEQ ID NO: 382029 - RNA, 19 nt, Homo sapiens
  misc_RNA (1)...(19): siRNA sense strand
caucgccaguuaucacauc

SEQ ID NO: 382030 - RNA, 19 nt, Homo sapiens
  misc_RNA (1)...(19): siRNA sense strand
gcugaaugcccacgugcuu

SEQ ID NO: 382031 - RNA, 19 nt, Homo sapiens
  misc_RNA (1)...(19): siRNA sense strand
gggaaaugcguagaaggaa

SEQ ID NO: 382032 - RNA, 19 nt, Homo sapiens
  misc_RNA (1)...(19): siRNA sense strand
gcugauguggcgcucaauu

SEQ ID NO: 382033 - RNA, 19 nt, Homo sapiens
  misc_RNA (1)...(19): siRNA sense strand
gauggagguguuaaugaug

SEQ ID NO: 382034 - RNA, 19 nt, Homo sapiens
  misc_RNA (1)...(19): siRNA sense strand
gaagcauucaaggacauaa

SEQ ID NO: 382035 - RNA, 19 nt, Homo sapiens
  misc_RNA (1)...(19): siRNA sense strand
gggugcaaguccuccauca

SEQ ID NO: 382036 - RNA, 19 nt, Homo sapiens
  misc_RNA (1)...(19): siRNA sense strand
gaauauccagccaugacau

SEQ ID NO: 382037 - RNA, 19 nt, Homo sapiens
  misc_RNA (1)...(19): siRNA sense strand
ggaguugguacacaugauc

SEQ ID NO: 382038 - RNA, 19 nt, Homo sapiens
  misc_RNA (1)...(19): siRNA sense strand
accgaggccuccaugauga

SEQ ID NO: 382039 - RNA, 19 nt, Homo sapiens
  misc_RNA (1)...(19): siRNA sense strand
caccgaggccuccaugaug

SEQ ID NO: 382040 - RNA, 19 nt, Homo sapiens
  misc_RNA (1)...(19): siRNA sense strand
gaagugggaauggugaagu

SEQ ID NO: 382041 - RNA, 19 nt, Homo sapiens
  misc_RNA (1)...(19): siRNA sense strand
gcagaccacaagcccaaau

SEQ ID NO: 382042 - RNA, 19 nt, Homo sapiens
  misc_RNA (1)...(19): siRNA sense strand
aacaucugcucaacaugaa

SEQ ID NO: 382043 - RNA, 19 nt, Homo sapiens
  misc_RNA (1)...(19): siRNA sense strand
uaaaagaagcauucaagga

SEQ ID NO: 382044 - RNA, 19 nt, Homo sapiens
  misc_RNA (1)...(19): siRNA sense strand
gaauucuggaaaucuuuga

SEQ ID NO: 382045 - RNA, 19 nt, Homo sapiens
  misc_RNA (1)...(19): siRNA sense strand
cagcugggccaagaagauu

SEQ ID NO: 382046 - RNA, 19 nt, Homo sapiens
  misc_RNA (1)...(19): siRNA sense strand
gaucagcugggccaagaag

SEQ ID NO: 382047 - RNA, 19 nt, Homo sapiens
  misc_RNA (1)...(19): siRNA sense strand
gugcggagacagagaagug

SEQ ID NO: 382048 - RNA, 19 nt, Homo sapiens
  misc_RNA (1)...(19): siRNA sense strand
caccaucuagccuuaauuc

SEQ ID NO: 382049 - RNA, 19 nt, Homo sapiens
  misc_RNA (1)...(19): siRNA sense strand
gaguaacaagggcauggaa

SEQ ID NO: 382050 - RNA, 19 nt, Homo sapiens
  misc_RNA (1)...(19): siRNA sense strand
aaaauguggucccagugua

SEQ ID NO: 382051 - RNA, 19 nt, Homo sapiens
  misc_RNA (1)...(19): siRNA sense strand
cuucaagguuucgagaguu

SEQ ID NO: 382052 - RNA, 19 nt, Homo sapiens
  misc_RNA (1)...(19): siRNA sense strand
gcucaauuccaguauguac

SEQ ID NO: 382053 - RNA, 19 nt, Homo sapiens
  misc_RNA (1)...(19): siRNA sense strand
cugcucaauuccaguaugu

SEQ ID NO: 382054 - RNA, 19 nt, Homo sapiens
  misc_RNA (1)...(19): siRNA sense strand
uggcaacuacuucaagguu

SEQ ID NO: 382055 - RNA, 19 nt, Homo sapiens
  misc_RNA (1)...(19): siRNA sense strand
uaacaagggcauggaacau

SEQ ID NO: 382056 - RNA, 19 nt, Homo sapiens
  misc_RNA (1)...(19): siRNA sense strand
uggcuaaccuccugaugcu

SEQ ID NO: 382057 - RNA, 19 nt, Homo sapiens
  misc_RNA (1)...(19): siRNA sense strand
ccagccaugacauucuaua

SEQ ID NO: 382058 - RNA, 19 nt, Homo sapiens
  misc_RNA (1)...(19): siRNA sense strand
gaacagaucucuuauugaa

SEQ ID NO: 382059 - RNA, 19 nt, Homo sapiens
  misc_RNA (1)...(19): siRNA sense strand
gcagaggucuuauuguaua

SEQ ID NO: 382060 - RNA, 19 nt, Homo sapiens
  misc_RNA (1)...(19): siRNA sense strand
caacagaacagaucucuua

SEQ ID NO: 382061 - RNA, 19 nt, Homo sapiens
  misc_RNA (1)...(19): siRNA sense strand
gaaggcaccagaugaauua

SEQ ID NO: 382062 - RNA, 19 nt, Homo sapiens
  misc_RNA (1)...(19): siRNA sense strand
caucagguaucuacaguua

SEQ ID NO: 382063 - RNA, 19 nt, Homo sapiens
  misc_RNA (1)...(19): siRNA sense strand
cagaacagaucucuuauug

SEQ ID NO: 382064 - RNA, 19 nt, Homo sapiens
  misc_RNA (1)...(19): siRNA sense strand
gaaagcacgucucuacuuc

SEQ ID NO: 382065 - RNA, 19 nt, Homo sapiens
  misc_RNA (1)...(19): siRNA sense strand
ggaaaccaaugcaguguug

SEQ ID NO: 382066 - RNA, 19 nt, Homo sapiens
  misc_RNA (1)...(19): siRNA sense strand
gcacgucucuacuucauca

SEQ ID NO: 382067 - RNA, 19 nt, Homo sapiens
  misc_RNA (1)...(19): siRNA sense strand
ggucauccucguauuauua

SEQ ID NO: 382068 - RNA, 19 nt, Homo sapiens
  misc_RNA (1)...(19): siRNA sense strand
gaugguagaugaugacaca

SEQ ID NO: 382069 - RNA, 19 nt, Homo sapiens
  misc_RNA (1)...(19): siRNA sense strand
cugcagaggucuuauugua

SEQ ID NO: 382070 - RNA, 19 nt, Homo sapiens
  misc_RNA (1)...(19): siRNA sense strand
gaaaucgacuccaggucuu

SEQ ID NO: 382071 - RNA, 19 nt, Homo sapiens
  misc_RNA (1)...(19): siRNA sense strand
ggaacaauauuggagagaa

SEQ ID NO: 382072 - RNA, 19 nt, Homo sapiens
  misc_RNA (1)...(19): siRNA sense strand
ggacuccuuuacucucaua

SEQ ID NO: 382073 - RNA, 19 nt, Homo sapiens
  misc_RNA (1)...(19): siRNA sense strand
gcaaacaggaugagaaauc

SEQ ID NO: 382074 - RNA, 19 nt, Homo sapiens
  misc_RNA (1)...(19): siRNA sense strand
gaacaauauuggagagaag

SEQ ID NO: 382075 - RNA, 19 nt, Homo sapiens
  misc_RNA (1)...(19): siRNA sense strand
uggcaagacuucagggaua

SEQ ID NO: 382076 - RNA, 19 nt, Homo sapiens
  misc_RNA (1)...(19): siRNA sense strand
uaccaaaucugcacaaagu

SEQ ID NO: 382077 - RNA, 19 nt, Homo sapiens
  misc_RNA (1)...(19): siRNA sense strand
gugaugauauugccaugaa

SEQ ID NO: 382078 - RNA, 19 nt, Homo sapiens
  misc_RNA (1)...(19): siRNA sense strand
ucagguaucuacaguuaug

SEQ ID NO: 382079 - RNA, 19 nt, Homo sapiens
  misc_RNA (1)...(19): siRNA sense strand
gagagaaggcaccagauga

SEQ ID NO: 382080 - RNA, 19 nt, Homo sapiens
  misc_RNA (1)...(19): siRNA sense strand
cuguaaacauggacaauuu

SEQ ID NO: 382081 - RNA, 19 nt, Homo sapiens
  misc_RNA (1)...(19): siRNA sense strand
gauuggagccucauucuuc

SEQ ID NO: 382082 - RNA, 19 nt, Homo sapiens
  misc_RNA (1)...(19): siRNA sense strand
uaugauagcaugcccuuaa

SEQ ID NO: 382083 - RNA, 19 nt, Homo sapiens
  misc_RNA (1)...(19): siRNA sense strand
gaagacaagaugcucaugu

SEQ ID NO: 382084 - RNA, 19 nt, Homo sapiens
  misc_RNA (1)...(19): siRNA sense strand
ggagccucauucuucaaua

SEQ ID NO: 382085 - RNA, 19 nt, Homo sapiens
  misc_RNA (1)...(19): siRNA sense strand
caaacuuccugggagagua

SEQ ID NO: 382086 - RNA, 19 nt, Homo sapiens
  misc_RNA (1)...(19): siRNA sense strand
gaugauauugccaugaauu

SEQ ID NO: 382087 - RNA, 19 nt, Homo sapiens
  misc_RNA (1)...(19): siRNA sense strand
gcagcaauuuccugaucaa

SEQ ID NO: 382088 - RNA, 19 nt, Homo sapiens
  misc_RNA (1)...(19): siRNA sense strand
aaacauggacaauuuggaa

SEQ ID NO: 382089 - RNA, 19 nt, Homo sapiens
  misc_RNA (1)...(19): siRNA sense strand
cauuaugauuucccaguuu

SEQ ID NO: 382090 - RNA, 19 nt, Homo sapiens
  misc_RNA (1)...(19): siRNA sense strand
ggagagaaggcaccagaug

SEQ ID NO: 382091 - RNA, 19 nt, Homo sapiens
  misc_RNA (1)...(19): siRNA sense strand
gagccucauucuucaauag

SEQ ID NO: 382092 - RNA, 19 nt, Homo sapiens
  misc_RNA (1)...(19): siRNA sense strand
aagacaagaugcucauguu

SEQ ID NO: 382093 - RNA, 19 nt, Homo sapiens
  misc_RNA (1)...(19): siRNA sense strand
gguggucauccucguauua

SEQ ID NO: 382094 - RNA, 19 nt, Homo sapiens
  misc_RNA (1)...(19): siRNA sense strand
cagcaaacaggaugagaaa

SEQ ID NO: 382095 - RNA, 19 nt, Homo sapiens
  misc_RNA (1)...(19): siRNA sense strand
ucaaacaacagacagcaaa

SEQ ID NO: 382096 - RNA, 19 nt, Homo sapiens
  misc_RNA (1)...(19): siRNA sense strand
acagaucucuuauugaaac

SEQ ID NO: 382097 - RNA, 19 nt, Homo sapiens
  misc_RNA (1)...(19): siRNA sense strand
ccaaaucugcacaaaguga

SEQ ID NO: 382098 - RNA, 19 nt, Homo sapiens
  misc_RNA (1)...(19): siRNA sense strand
ugugaagccuguaaacaug

SEQ ID NO: 382099 - RNA, 19 nt, Homo sapiens
  misc_RNA (1)...(19): siRNA sense strand
gugcuucgauuaucuuugg

SEQ ID NO: 382100 - RNA, 19 nt, Homo sapiens
  misc_RNA (1)...(19): siRNA sense strand
acugguagcuggugcuuug

SEQ ID NO: 382101 - RNA, 19 nt, Homo sapiens
  misc_RNA (1)...(19): siRNA sense strand
caaagugauugugguaugg

SEQ ID NO: 382102 - RNA, 19 nt, Homo sapiens
  misc_RNA (1)...(19): siRNA sense strand
cuuaagauacuccaacauu

SEQ ID NO: 382103 - RNA, 19 nt, Homo sapiens
  misc_RNA (1)...(19): siRNA sense strand
gauagcaugcccuuaagau

SEQ ID NO: 382104 - RNA, 19 nt, Homo sapiens
  misc_RNA (1)...(19): siRNA sense strand
ggcaagacuucagggauau

SEQ ID NO: 382105 - RNA, 19 nt, Homo sapiens
  misc_RNA (1)...(19): siRNA sense strand
cauguugcguagggaaaua

SEQ ID NO: 382106 - RNA, 19 nt, Homo sapiens
  misc_RNA (1)...(19): siRNA sense strand
gaaaccaacaguggcuauu

SEQ ID NO: 382107 - RNA, 19 nt, Homo sapiens
  misc_RNA (1)...(19): siRNA sense strand
caaacaggaugagaaaucg

SEQ ID NO: 382108 - RNA, 19 nt, Homo sapiens
  misc_RNA (1)...(19): siRNA sense strand
ugccacaucugcaaacuuc

SEQ ID NO: 382109 - RNA, 19 nt, Homo sapiens
  misc_RNA (1)...(19): siRNA sense strand
ggcaccagaugaauuaugg

SEQ ID NO: 382110 - RNA, 19 nt, Homo sapiens
  misc_RNA (1)...(19): siRNA sense strand
cugcagcuguccaugcuuu

SEQ ID NO: 382111 - RNA, 19 nt, Homo sapiens
  misc_RNA (1)...(19): siRNA sense strand
ccaaugcaguguugauggu

SEQ ID NO: 382112 - RNA, 19 nt, Homo sapiens
  misc_RNA (1)...(19): siRNA sense strand
uaucuacaguuauggaagu

SEQ ID NO: 382113 - RNA, 19 nt, Homo sapiens
  misc_RNA (1)...(19): siRNA sense strand
ccugugaucuucaaacaac

SEQ ID NO: 382114 - RNA, 19 nt, Homo sapiens
  misc_RNA (1)...(19): siRNA sense strand
aacaguggcuauucuggaa

SEQ ID NO: 382115 - RNA, 19 nt, Homo sapiens
  misc_RNA (1)...(19): siRNA sense strand
agaaagcacgucucuacuu

SEQ ID NO: 382116 - RNA, 19 nt, Homo sapiens
  misc_RNA (1)...(19): siRNA sense strand
caguguugaugguagauga

SEQ ID NO: 382117 - RNA, 19 nt, Homo sapiens
  misc_RNA (1)...(19): siRNA sense strand
caagacuucagggauauuu

SEQ ID NO: 382118 - RNA, 19 nt, Homo sapiens
  misc_RNA (1)...(19): siRNA sense strand
acucaaaacugugaugaua

SEQ ID NO: 382119 - RNA, 19 nt, Homo sapiens
  misc_RNA (1)...(19): siRNA sense strand
cugaucaaauuguaggauu

SEQ ID NO: 382120 - RNA, 19 nt, Homo sapiens
  misc_RNA (1)...(19): siRNA sense strand
agagaaggcaccagaugaa

SEQ ID NO: 382121 - RNA, 19 nt, Homo sapiens
  misc_RNA (1)...(19): siRNA sense strand
agaaggcaccagaugaauu

SEQ ID NO: 382122 - RNA, 19 nt, Homo sapiens
  misc_RNA (1)...(19): siRNA sense strand
guccaugcuuugauagaug

SEQ ID NO: 382123 - RNA, 19 nt, Homo sapiens
  misc_RNA (1)...(19): siRNA sense strand
ggcagcaauuuccugauca

SEQ ID NO: 382124 - RNA, 19 nt, Homo sapiens
  misc_RNA (1)...(19): siRNA sense strand
acuccaacauuaugauuuc

SEQ ID NO: 382125 - RNA, 19 nt, Homo sapiens
  misc_RNA (1)...(19): siRNA sense strand
uuaucaggcuguaccaaau

SEQ ID NO: 382126 - RNA, 19 nt, Homo sapiens
  misc_RNA (1)...(19): siRNA sense strand
uagcaugcccuuaagauac

SEQ ID NO: 382127 - RNA, 19 nt, Homo sapiens
  misc_RNA (1)...(19): siRNA sense strand
aaacuuccugggagaguaa

SEQ ID NO: 382128 - RNA, 19 nt, Homo sapiens
  misc_RNA (1)...(19): siRNA sense strand
uggcagcaauuuccugauc

SEQ ID NO: 382129 - RNA, 19 nt, Homo sapiens
  misc_RNA (1)...(19): siRNA sense strand
gagaaggcaccagaugaau

SEQ ID NO: 382130 - RNA, 19 nt, Homo sapiens
  misc_RNA (1)...(19): siRNA sense strand
gaucuucaaacaacagaca

SEQ ID NO: 382131 - RNA, 19 nt, Homo sapiens
  misc_RNA (1)...(19): siRNA sense strand
acauuaugauuucccaguu

SEQ ID NO: 382132 - RNA, 19 nt, Homo sapiens
  misc_RNA (1)...(19): siRNA sense strand
acagaacagaucucuuauu

SEQ ID NO: 382133 - RNA, 19 nt, Homo sapiens
  misc_RNA (1)...(19): siRNA sense strand
cuccuuuacucucauaaug

SEQ ID NO: 382134 - RNA, 19 nt, Homo sapiens
  misc_RNA (1)...(19): siRNA sense strand
ccucguauuauuacuggua

SEQ ID NO: 382135 - RNA, 19 nt, Homo sapiens
  misc_RNA (1)...(19): siRNA sense strand
aagcacgucucuacuucau

SEQ ID NO: 382136 - RNA, 19 nt, Homo sapiens
  misc_RNA (1)...(19): siRNA sense strand
ugauuucccaguuugguuu

SEQ ID NO: 382137 - RNA, 19 nt, Homo sapiens
  misc_RNA (1)...(19): siRNA sense strand
guaaacauggacaauuugg

SEQ ID NO: 382138 - RNA, 19 nt, Homo sapiens
  misc_RNA (1)...(19): siRNA sense strand
gcaagacuucagggauauu

SEQ ID NO: 382139 - RNA, 19 nt, Homo sapiens
  misc_RNA (1)...(19): siRNA sense strand
ggugaccaguacucuaugg

SEQ ID NO: 382140 - RNA, 19 nt, Homo sapiens
  misc_RNA (1)...(19): siRNA sense strand
augcagacguacaacagaa

SEQ ID NO: 382141 - RNA, 19 nt, Homo sapiens
  misc_RNA (1)...(19): siRNA sense strand
auagcaugcccuuaagaua

SEQ ID NO: 382142 - RNA, 19 nt, Homo sapiens
  misc_RNA (1)...(19): siRNA sense strand
ugaagccuguaaacaugga

SEQ ID NO: 382143 - RNA, 19 nt, Homo sapiens
  misc_RNA (1)...(19): siRNA sense strand
uaucauugccaagcauauu

SEQ ID NO: 382144 - RNA, 19 nt, Homo sapiens
  misc_RNA (1)...(19): siRNA sense strand
uccaugcuuugauagauga

SEQ ID NO: 382145 - RNA, 19 nt, Homo sapiens
  misc_RNA (1)...(19): siRNA sense strand
cuacaguuauggaaguuuu

SEQ ID NO: 382146 - RNA, 19 nt, Homo sapiens
  misc_RNA (1)...(19): siRNA sense strand
ucauaaugcagacguacaa

SEQ ID NO: 382147 - RNA, 19 nt, Homo sapiens
  misc_RNA (1)...(19): siRNA sense strand
agacaagaugcucauguug

SEQ ID NO: 382148 - RNA, 19 nt, Homo sapiens
  misc_RNA (1)...(19): siRNA sense strand
gcagcuguccaugcuuuga

SEQ ID NO: 382149 - RNA, 19 nt, Homo sapiens
  misc_RNA (1)...(19): siRNA sense strand
ccucauucuucaauagcaa

SEQ ID NO: 382150 - RNA, 19 nt, Homo sapiens
  misc_RNA (1)...(19): siRNA sense strand
guaccaaaucugcacaaag

SEQ ID NO: 382151 - RNA, 19 nt, Homo sapiens
  misc_RNA (1)...(19): siRNA sense strand
gcagacguacaacagaaca

SEQ ID NO: 382152 - RNA, 19 nt, Homo sapiens
  misc_RNA (1)...(19): siRNA sense strand
ccaguuugguuuuccauau

SEQ ID NO: 382153 - RNA, 19 nt, Homo sapiens
  misc_RNA (1)...(19): siRNA sense strand
auuaugauuucccaguuug

SEQ ID NO: 382154 - RNA, 19 nt, Homo sapiens
  misc_RNA (1)...(19): siRNA sense strand
gguauggaacaauauugga

SEQ ID NO: 382155 - RNA, 19 nt, Homo sapiens
  misc_RNA (1)...(19): siRNA sense strand
gauuaucuuugguggucau

SEQ ID NO: 382156 - RNA, 19 nt, Homo sapiens
  misc_RNA (1)...(19): siRNA sense strand
gaaaccaaugcaguguuga

SEQ ID NO: 382157 - RNA, 19 nt, Homo sapiens
  misc_RNA (1)...(19): siRNA sense strand
aagauacuccaacauuaug

SEQ ID NO: 382158 - RNA, 19 nt, Homo sapiens
  misc_RNA (1)...(19): siRNA sense strand
ggaaauaucucuucaccuu

SEQ ID NO: 382159 - RNA, 19 nt, Homo sapiens
  misc_RNA (1)...(19): siRNA sense strand
ggaaugaaauugagacaga

SEQ ID NO: 382160 - RNA, 19 nt, Homo sapiens
  misc_RNA (1)...(19): siRNA sense strand
ccagauaccuccgcaauuu

SEQ ID NO: 382161 - RNA, 19 nt, Homo sapiens
  misc_RNA (1)...(19): siRNA sense strand
cuacacaacugcuuugauu

SEQ ID NO: 382162 - RNA, 19 nt, Homo sapiens
  misc_RNA (1)...(19): siRNA sense strand
gacaggugcugccuucuuu

SEQ ID NO: 382163 - RNA, 19 nt, Homo sapiens
  misc_RNA (1)...(19): siRNA sense strand
gacccucgcuugguuauuu

SEQ ID NO: 382164 - RNA, 19 nt, Homo sapiens
  misc_RNA (1)...(19): siRNA sense strand
gagcccaacuucauggaaa

SEQ ID NO: 382165 - RNA, 19 nt, Homo sapiens
  misc_RNA (1)...(19): siRNA sense strand
gggaggaagugcuuaugaa

SEQ ID NO: 382166 - RNA, 19 nt, Homo sapiens
  misc_RNA (1)...(19): siRNA sense strand
gaucgaagccuguaagaag

SEQ ID NO: 382167 - RNA, 19 nt, Homo sapiens
  misc_RNA (1)...(19): siRNA sense strand
guacagaccuggcuuugac

SEQ ID NO: 382168 - RNA, 19 nt, Homo sapiens
  misc_RNA (1)...(19): siRNA sense strand
gagaagaacaguuugaaca

SEQ ID NO: 382169 - RNA, 19 nt, Homo sapiens
  misc_RNA (1)...(19): siRNA sense strand
guaagaagagcauugagaa

SEQ ID NO: 382170 - RNA, 19 nt, Homo sapiens
  misc_RNA (1)...(19): siRNA sense strand
gggacaugguggaugaaua

SEQ ID NO: 382171 - RNA, 19 nt, Homo sapiens
  misc_RNA (1)...(19): siRNA sense strand
ucaucaaucugucacguaa

SEQ ID NO: 382172 - RNA, 19 nt, Homo sapiens
  misc_RNA (1)...(19): siRNA sense strand
augccuaccuguauucuua

SEQ ID NO: 382173 - RNA, 19 nt, Homo sapiens
  misc_RNA (1)...(19): siRNA sense strand
ucagaagccucuccgauag

SEQ ID NO: 382174 - RNA, 19 nt, Homo sapiens
  misc_RNA (1)...(19): siRNA sense strand
gaagaacaguuugaacaac

SEQ ID NO: 382175 - RNA, 19 nt, Homo sapiens
  misc_RNA (1)...(19): siRNA sense strand
gugaggacauugccaugaa

SEQ ID NO: 382176 - RNA, 19 nt, Homo sapiens
  misc_RNA (1)...(19): siRNA sense strand
gccaugaacuuccuugucu

SEQ ID NO: 382177 - RNA, 19 nt, Homo sapiens
  misc_RNA (1)...(19): siRNA sense strand
caacugcuuugauuauucu

SEQ ID NO: 382178 - RNA, 19 nt, Homo sapiens
  misc_RNA (1)...(19): siRNA sense strand
ccagggccuuuccaucuuu

SEQ ID NO: 382179 - RNA, 19 nt, Homo sapiens
  misc_RNA (1)...(19): siRNA sense strand
caucaacugugaggacauu

SEQ ID NO: 382180 - RNA, 19 nt, Homo sapiens
  misc_RNA (1)...(19): siRNA sense strand
augaauacaucaacuguga

SEQ ID NO: 382181 - RNA, 19 nt, Homo sapiens
  misc_RNA (1)...(19): siRNA sense strand
gcucaucgcccacuauuac

SEQ ID NO: 382182 - RNA, 19 nt, Homo sapiens
  misc_RNA (1)...(19): siRNA sense strand
ggacaugguggaugaauac

SEQ ID NO: 382183 - RNA, 19 nt, Homo sapiens
  misc_RNA (1)...(19): siRNA sense strand
acacaaccaugucaucauc

SEQ ID NO: 382184 - RNA, 19 nt, Homo sapiens
  misc_RNA (1)...(19): siRNA sense strand
gggaggaccgcuuggaauu

SEQ ID NO: 382185 - RNA, 19 nt, Homo sapiens
  misc_RNA (1)...(19): siRNA sense strand
gcaaggcggcuggaacuga

SEQ ID NO: 382186 - RNA, 19 nt, Homo sapiens
  misc_RNA (1)...(19): siRNA sense strand
guggugauguugacuuaug

SEQ ID NO: 382187 - RNA, 19 nt, Homo sapiens
  misc_RNA (1)...(19): siRNA sense strand
ucgccaagcugaaucugaa

SEQ ID NO: 382188 - RNA, 19 nt, Homo sapiens
  misc_RNA (1)...(19): siRNA sense strand
gugccaaagccucguguua

SEQ ID NO: 382189 - RNA, 19 nt, Homo sapiens
  misc_RNA (1)...(19): siRNA sense strand
ggacauugccaugaacuuc

SEQ ID NO: 382190 - RNA, 19 nt, Homo sapiens
  misc_RNA (1)...(19): siRNA sense strand
gggagucggugagugaaga

SEQ ID NO: 382191 - RNA, 19 nt, Homo sapiens
  misc_RNA (1)...(19): siRNA sense strand
cuaugacagugaccaguuu

SEQ ID NO: 382192 - RNA, 19 nt, Homo sapiens
  misc_RNA (1)...(19): siRNA sense strand
acacaacugcuuugauuau

SEQ ID NO: 382193 - RNA, 19 nt, Homo sapiens
  misc_RNA (1)...(19): siRNA sense strand
gaagaucgaagccuguaag

SEQ ID NO: 382194 - RNA, 19 nt, Homo sapiens
  misc_RNA (1)...(19): siRNA sense strand
cacaacugcuuugauuauu

SEQ ID NO: 382195 - RNA, 19 nt, Homo sapiens
  misc_RNA (1)...(19): siRNA sense strand
uggagaagcaguuguauuc

SEQ ID NO: 382196 - RNA, 19 nt, Homo sapiens
  misc_RNA (1)...(19): siRNA sense strand
cagcacgagcuaacguuua

SEQ ID NO: 382197 - RNA, 19 nt, Homo sapiens
  misc_RNA (1)...(19): siRNA sense strand
cgguggugauguugacuua

SEQ ID NO: 382198 - RNA, 19 nt, Homo sapiens
  misc_RNA (1)...(19): siRNA sense strand
gcaucaacuucuucgugaa

SEQ ID NO: 382199 - RNA, 19 nt, Homo sapiens
  misc_RNA (1)...(19): siRNA sense strand
caccuucgcccucaucauu

SEQ ID NO: 382200 - RNA, 19 nt, Homo sapiens
  misc_RNA (1)...(19): siRNA sense strand
gaccaagugcuucaaguuc

SEQ ID NO: 382201 - RNA, 19 nt, Homo sapiens
  misc_RNA (1)...(19): siRNA sense strand
guauuaugccuaccuguau

SEQ ID NO: 382202 - RNA, 19 nt, Homo sapiens
  misc_RNA (1)...(19): siRNA sense strand
gcaauuucacucugacugu

SEQ ID NO: 382203 - RNA, 19 nt, Homo sapiens
  misc_RNA (1)...(19): siRNA sense strand
acaacugcuuugauuauuc

SEQ ID NO: 382204 - RNA, 19 nt, Homo sapiens
  misc_RNA (1)...(19): siRNA sense strand
ggacuggcuuucggccuau

SEQ ID NO: 382205 - RNA, 19 nt, Homo sapiens
  misc_RNA (1)...(19): siRNA sense strand
guaagucagauacacagaa

SEQ ID NO: 382206 - RNA, 19 nt, Homo sapiens
  misc_RNA (1)...(19): siRNA sense strand
gaccgagcauuccuacaag

SEQ ID NO: 382207 - RNA, 19 nt, Homo sapiens
  misc_RNA (1)...(19): siRNA sense strand
uauuaugccuaccuguauu

SEQ ID NO: 382208 - RNA, 19 nt, Homo sapiens
  misc_RNA (1)...(19): siRNA sense strand
uuaauaccgugcuggcuau

SEQ ID NO: 382209 - RNA, 19 nt, Homo sapiens
  misc_RNA (1)...(19): siRNA sense strand
agacaucgccugccuuuac

SEQ ID NO: 382210 - RNA, 19 nt, Homo sapiens
  misc_RNA (1)...(19): siRNA sense strand
acuauuaccucaccacucu

SEQ ID NO: 382211 - RNA, 19 nt, Homo sapiens
  misc_RNA (1)...(19): siRNA sense strand
ccugugagcuguccauggu

SEQ ID NO: 382212 - RNA, 19 nt, Homo sapiens
  misc_RNA (1)...(19): siRNA sense strand
gaccuucuguggccugaca

SEQ ID NO: 382213 - RNA, 19 nt, Homo sapiens
  misc_RNA (1)...(19): siRNA sense strand
ggaggaccgcuuggaauug

SEQ ID NO: 382214 - RNA, 19 nt, Homo sapiens
  misc_RNA (1)...(19): siRNA sense strand
uaagucagauacacagaac

SEQ ID NO: 382215 - RNA, 19 nt, Homo sapiens
  misc_RNA (1)...(19): siRNA sense strand
cucagaagccucuccgaua

SEQ ID NO: 382216 - RNA, 19 nt, Homo sapiens
  misc_RNA (1)...(19): siRNA sense strand
gaggccauccuguccauug

SEQ ID NO: 382217 - RNA, 19 nt, Homo sapiens
  misc_RNA (1)...(19): siRNA sense strand
agaccgagcauuccuacaa

SEQ ID NO: 382218 - RNA, 19 nt, Homo sapiens
  misc_RNA (1)...(19): siRNA sense strand
ccuguauucuuaugugaug

SEQ ID NO: 382219 - RNA, 19 nt, Homo sapiens
  misc_RNA (1)...(19): siRNA sense strand
ggugcugccuucuuucaca

SEQ ID NO: 382220 - RNA, 19 nt, Homo sapiens
  misc_RNA (1)...(19): siRNA sense strand
caucaguccuggcucuaca

SEQ ID NO: 382221 - RNA, 19 nt, Homo sapiens
  misc_RNA (1)...(19): siRNA sense strand
agaagaacaguuugaacaa

SEQ ID NO: 382222 - RNA, 19 nt, Homo sapiens
  misc_RNA (1)...(19): siRNA sense strand
gaucauugccacccugaag

SEQ ID NO: 382223 - RNA, 19 nt, Homo sapiens
  misc_RNA (1)...(19): siRNA sense strand
gauacuagugggagagaug

SEQ ID NO: 382224 - RNA, 19 nt, Homo sapiens
  misc_RNA (1)...(19): siRNA sense strand
gacaagaccaagugcuuca

SEQ ID NO: 382225 - RNA, 19 nt, Homo sapiens
  misc_RNA (1)...(19): siRNA sense strand
cuaccuguauucuuaugug

SEQ ID NO: 382226 - RNA, 19 nt, Homo sapiens
  misc_RNA (1)...(19): siRNA sense strand
uuugaacaaccgauucuua

SEQ ID NO: 382227 - RNA, 19 nt, Homo sapiens
  misc_RNA (1)...(19): siRNA sense strand
guucauuuccugcucagaa

SEQ ID NO: 382228 - RNA, 19 nt, Homo sapiens
  misc_RNA (1)...(19): siRNA sense strand
gaggaccgcuuggaauugc

SEQ ID NO: 382229 - RNA, 19 nt, Homo sapiens
  misc_RNA (1)...(19): siRNA sense strand
gcauugagaacgccaagca

SEQ ID NO: 382230 - RNA, 19 nt, Homo sapiens
  misc_RNA (1)...(19): siRNA sense strand
cgccugccuuuacgugaua

SEQ ID NO: 382231 - RNA, 19 nt, Homo sapiens
  misc_RNA (1)...(19): siRNA sense strand
gaggcaggcaagcggauuu

SEQ ID NO: 382232 - RNA, 19 nt, Homo sapiens
  misc_RNA (1)...(19): siRNA sense strand
ccaagugcuucaaguucau

SEQ ID NO: 382233 - RNA, 19 nt, Homo sapiens
  misc_RNA (1)...(19): siRNA sense strand
cucccaagcugccaucaga

SEQ ID NO: 382234 - RNA, 19 nt, Homo sapiens
  misc_RNA (1)...(19): siRNA sense strand
acaaccaugucaucaucaa

SEQ ID NO: 382235 - RNA, 19 nt, Homo sapiens
  misc_RNA (1)...(19): siRNA sense strand
aagcggaaauaucucuuca

SEQ ID NO: 382236 - RNA, 19 nt, Homo sapiens
  misc_RNA (1)...(19): siRNA sense strand
ugaauggccucccuuaccu

SEQ ID NO: 382237 - RNA, 19 nt, Homo sapiens
  misc_RNA (1)...(19): siRNA sense strand
agcacgagcuaacguuuau

SEQ ID NO: 382238 - RNA, 19 nt, Homo sapiens
  misc_RNA (1)...(19): siRNA sense strand
aggaagugcuuaugaacuc

SEQ ID NO: 382239 - RNA, 19 nt, Homo sapiens
  misc_RNA (1)...(19): siRNA sense strand
gaagaggcggcagcugaga

SEQ ID NO: 382240 - RNA, 19 nt, Homo sapiens
  misc_RNA (1)...(19): siRNA sense strand
gcucuucgaagcccuggaa

SEQ ID NO: 382241 - RNA, 19 nt, Homo sapiens
  misc_RNA (1)...(19): siRNA sense strand
ggaagugcuuaugaacucu

SEQ ID NO: 382242 - RNA, 19 nt, Homo sapiens
  misc_RNA (1)...(19): siRNA sense strand
ggaggaagugcuuaugaac

SEQ ID NO: 382243 - RNA, 19 nt, Homo sapiens
  misc_RNA (1)...(19): siRNA sense strand
gcgcuuggaggcaauguuc

SEQ ID NO: 382244 - RNA, 19 nt, Homo sapiens
  misc_RNA (1)...(19): siRNA sense strand
gaccugcuccagcucaaga

SEQ ID NO: 382245 - RNA, 19 nt, Homo sapiens
  misc_RNA (1)...(19): siRNA sense strand
uguaagaagagcauugaga

SEQ ID NO: 382246 - RNA, 19 nt, Homo sapiens
  misc_RNA (1)...(19): siRNA sense strand
agaagccucuccgauagug

SEQ ID NO: 382247 - RNA, 19 nt, Homo sapiens
  misc_RNA (1)...(19): siRNA sense strand
uggauucugugcucuucaa

SEQ ID NO: 382248 - RNA, 19 nt, Homo sapiens
  misc_RNA (1)...(19): siRNA sense strand
gguggauucugugcucuuc

SEQ ID NO: 382249 - RNA, 19 nt, Homo sapiens
  misc_RNA (1)...(19): siRNA sense strand
gugcugccuucuuucacaa

SEQ ID NO: 382250 - RNA, 19 nt, Homo sapiens
  misc_RNA (1)...(19): siRNA sense strand
ugacaggugcugccuucuu

SEQ ID NO: 382251 - RNA, 19 nt, Homo sapiens
  misc_RNA (1)...(19): siRNA sense strand
uacacaacugcuuugauua

SEQ ID NO: 382252 - RNA, 19 nt, Homo sapiens
  misc_RNA (1)...(19): siRNA sense strand
accaagugcuucaaguuca

SEQ ID NO: 382253 - RNA, 19 nt, Homo sapiens
  misc_RNA (1)...(19): siRNA sense strand
aguauuaugccuaccugua

SEQ ID NO: 382254 - RNA, 19 nt, Homo sapiens
  misc_RNA (1)...(19): siRNA sense strand
cgagaucgccaagcugaau

SEQ ID NO: 382255 - RNA, 19 nt, Homo sapiens
  misc_RNA (1)...(19): siRNA sense strand
gaagugcuuaugaacucuu

SEQ ID NO: 382256 - RNA, 19 nt, Homo sapiens
  misc_RNA (1)...(19): siRNA sense strand
gaggaagugcuuaugaacu

SEQ ID NO: 382257 - RNA, 19 nt, Homo sapiens
  misc_RNA (1)...(19): siRNA sense strand
gcggacggauggacacaac

SEQ ID NO: 382258 - RNA, 19 nt, Homo sapiens
  misc_RNA (1)...(19): siRNA sense strand
gaacaagugcuucaucaaa

SEQ ID NO: 382259 - RNA, 19 nt, Homo sapiens
  misc_RNA (1)...(19): siRNA sense strand
gaucccaccuggcagaauu

SEQ ID NO: 382260 - RNA, 19 nt, Homo sapiens
  misc_RNA (1)...(19): siRNA sense strand
ggacaacuucugcuacuuc

SEQ ID NO: 382261 - RNA, 19 nt, Homo sapiens
  misc_RNA (1)...(19): siRNA sense strand
acaaguggaucacggacaa

SEQ ID NO: 382262 - RNA, 19 nt, Homo sapiens
  misc_RNA (1)...(19): siRNA sense strand
ccacauccacccagccuuu

SEQ ID NO: 382263 - RNA, 19 nt, Homo sapiens
  misc_RNA (1)...(19): siRNA sense strand
gccacaaccugucucugaa

SEQ ID NO: 382264 - RNA, 19 nt, Homo sapiens
  misc_RNA (1)...(19): siRNA sense strand
caaagugccucgggagaag

SEQ ID NO: 382265 - RNA, 19 nt, Homo sapiens
  misc_RNA (1)...(19): siRNA sense strand
caaccugucucugaacaag

SEQ ID NO: 382266 - RNA, 19 nt, Homo sapiens
  misc_RNA (1)...(19): siRNA sense strand
ggagcagggugagcuggaa

SEQ ID NO: 382267 - RNA, 19 nt, Homo sapiens
  misc_RNA (1)...(19): siRNA sense strand
ugaagccucccuacucgua

SEQ ID NO: 382268 - RNA, 19 nt, Homo sapiens
  misc_RNA (1)...(19): siRNA sense strand
gagggcaggcugggacaua

SEQ ID NO: 382269 - RNA, 19 nt, Homo sapiens
  misc_RNA (1)...(19): siRNA sense strand
acaagugcuucaucaaagu

SEQ ID NO: 382270 - RNA, 19 nt, Homo sapiens
  misc_RNA (1)...(19): siRNA sense strand
ccaccaauccgcacgugaa

SEQ ID NO: 382271 - RNA, 19 nt, Homo sapiens
  misc_RNA (1)...(19): siRNA sense strand
ucacggacaacuucugcua

SEQ ID NO: 382272 - RNA, 19 nt, Homo sapiens
  misc_RNA (1)...(19): siRNA sense strand
aacaagugcuucaucaaag

SEQ ID NO: 382273 - RNA, 19 nt, Homo sapiens
  misc_RNA (1)...(19): siRNA sense strand
ccaccuggcagaauucaau

SEQ ID NO: 382274 - RNA, 19 nt, Homo sapiens
  misc_RNA (1)...(19): siRNA sense strand
cagcaaggccaccaagauc

SEQ ID NO: 382275 - RNA, 19 nt, Homo sapiens
  misc_RNA (1)...(19): siRNA sense strand
cgccacaaccugucucuga

SEQ ID NO: 382276 - RNA, 19 nt, Homo sapiens
  misc_RNA (1)...(19): siRNA sense strand
ucaaagugccucgggagaa

SEQ ID NO: 382277 - RNA, 19 nt, Homo sapiens
  misc_RNA (1)...(19): siRNA sense strand
ugucggccaucuacaagug

SEQ ID NO: 382278 - RNA, 19 nt, Homo sapiens
  misc_RNA (1)...(19): siRNA sense strand
ccagcaaggccaccaagau

SEQ ID NO: 382279 - RNA, 19 nt, Homo sapiens
  misc_RNA (1)...(19): siRNA sense strand
agaauucaauccgccacaa

SEQ ID NO: 382280 - RNA, 19 nt, Homo sapiens
  misc_RNA (1)...(19): siRNA sense strand
cacaaccugucucugaaca

SEQ ID NO: 382281 - RNA, 19 nt, Homo sapiens
  misc_RNA (1)...(19): siRNA sense strand
gaagccucccuacucguau

SEQ ID NO: 382282 - RNA, 19 nt, Homo sapiens
  misc_RNA (1)...(19): siRNA sense strand
ugacugggaggccaucuuc

SEQ ID NO: 382283 - RNA, 19 nt, Homo sapiens
  misc_RNA (1)...(19): siRNA sense strand
guggaucacggacaacuuc

SEQ ID NO: 382284 - RNA, 19 nt, Homo sapiens
  misc_RNA (1)...(19): siRNA sense strand
caagugcuucaucaaagug

SEQ ID NO: 382285 - RNA, 19 nt, Homo sapiens
  misc_RNA (1)...(19): siRNA sense strand
agggcaggcugggacauaa

SEQ ID NO: 382286 - RNA, 19 nt, Homo sapiens
  misc_RNA (1)...(19): siRNA sense strand
caacaggagucuaaucaag

SEQ ID NO: 382287 - RNA, 19 nt, Homo sapiens
  misc_RNA (1)...(19): siRNA sense strand
ggaccacuuucccuacuuu

SEQ ID NO: 382288 - RNA, 19 nt, Homo sapiens
  misc_RNA (1)...(19): siRNA sense strand
guagugggcccaacaaauu

SEQ ID NO: 382289 - RNA, 19 nt, Homo sapiens
  misc_RNA (1)...(19): siRNA sense strand
gcugggaucaagauuauua

SEQ ID NO: 382290 - RNA, 19 nt, Homo sapiens
  misc_RNA (1)...(19): siRNA sense strand
ggaagcgcaugacuuugaa

SEQ ID NO: 382291 - RNA, 19 nt, Homo sapiens
  misc_RNA (1)...(19): siRNA sense strand
ggaggaaaugccacacuua

SEQ ID NO: 382292 - RNA, 19 nt, Homo sapiens
  misc_RNA (1)...(19): siRNA sense strand
cagcugggaucaagauuau

SEQ ID NO: 382293 - RNA, 19 nt, Homo sapiens
  misc_RNA (1)...(19): siRNA sense strand
ggaucaagauuauuaacca

SEQ ID NO: 382294 - RNA, 19 nt, Homo sapiens
  misc_RNA (1)...(19): siRNA sense strand
gaagaugaagccacugcua

SEQ ID NO: 382295 - RNA, 19 nt, Homo sapiens
  misc_RNA (1)...(19): siRNA sense strand
cggaaaugcuugugauuca

SEQ ID NO: 382296 - RNA, 19 nt, Homo sapiens
  misc_RNA (1)...(19): siRNA sense strand
ggaaaugcuugugauucaa

SEQ ID NO: 382297 - RNA, 19 nt, Homo sapiens
  misc_RNA (1)...(19): siRNA sense strand
caucagaggaggaaccuaa

SEQ ID NO: 382298 - RNA, 19 nt, Homo sapiens
  misc_RNA (1)...(19): siRNA sense strand
gggaggaaaugccacacuu

SEQ ID NO: 382299 - RNA, 19 nt, Homo sapiens
  misc_RNA (1)...(19): siRNA sense strand
ggauagcuccucuuucuuc

SEQ ID NO: 382300 - RNA, 19 nt, Homo sapiens
  misc_RNA (1)...(19): siRNA sense strand
aaagaugaguucugaugga

SEQ ID NO: 382301 - RNA, 19 nt, Homo sapiens
  misc_RNA (1)...(19): siRNA sense strand
agaggaagcgcaugacuuu

SEQ ID NO: 382302 - RNA, 19 nt, Homo sapiens
  misc_RNA (1)...(19): siRNA sense strand
ggaugugaaucuuccuaga

SEQ ID NO: 382303 - RNA, 19 nt, Homo sapiens
  misc_RNA (1)...(19): siRNA sense strand
gcaagauccugcuggacau

SEQ ID NO: 382304 - RNA, 19 nt, Homo sapiens
  misc_RNA (1)...(19): siRNA sense strand
cgcaaaggcuccucaguuc

SEQ ID NO: 382305 - RNA, 19 nt, Homo sapiens
  misc_RNA (1)...(19): siRNA sense strand
cgaaagaugaguucugaug

SEQ ID NO: 382306 - RNA, 19 nt, Homo sapiens
  misc_RNA (1)...(19): siRNA sense strand
caacaaugcuaauauucac

SEQ ID NO: 382307 - RNA, 19 nt, Homo sapiens
  misc_RNA (1)...(19): siRNA sense strand
cccagggucuccacaauug

SEQ ID NO: 382308 - RNA, 19 nt, Homo sapiens
  misc_RNA (1)...(19): siRNA sense strand
uaagacacccauuaaggaa

SEQ ID NO: 382309 - RNA, 19 nt, Homo sapiens
  misc_RNA (1)...(19): siRNA sense strand
gaagugggaggaccuuuua

SEQ ID NO: 382310 - RNA, 19 nt, Homo sapiens
  misc_RNA (1)...(19): siRNA sense strand
ccaacaaugcuaauauuca

SEQ ID NO: 382311 - RNA, 19 nt, Homo sapiens
  misc_RNA (1)...(19): siRNA sense strand
caaaaugccccaagugaaa

SEQ ID NO: 382312 - RNA, 19 nt, Homo sapiens
  misc_RNA (1)...(19): siRNA sense strand
ccagcugggaucaagauua

SEQ ID NO: 382313 - RNA, 19 nt, Homo sapiens
  misc_RNA (1)...(19): siRNA sense strand
caacucuucucccucagau

SEQ ID NO: 382314 - RNA, 19 nt, Homo sapiens
  misc_RNA (1)...(19): siRNA sense strand
cagcaccacucccuugcaa

SEQ ID NO: 382315 - RNA, 19 nt, Homo sapiens
  misc_RNA (1)...(19): siRNA sense strand
ucaaagaggaaucaucuca

SEQ ID NO: 382316 - RNA, 19 nt, Homo sapiens
  misc_RNA (1)...(19): siRNA sense strand
caacaaauucauccucauc

SEQ ID NO: 382317 - RNA, 19 nt, Homo sapiens
  misc_RNA (1)...(19): siRNA sense strand
gagaggaagcgcaugacuu

SEQ ID NO: 382318 - RNA, 19 nt, Homo sapiens
  misc_RNA (1)...(19): siRNA sense strand
gaggaaaugccacacuuag

SEQ ID NO: 382319 - RNA, 19 nt, Homo sapiens
  misc_RNA (1)...(19): siRNA sense strand
gacauuggaccagguguuu

SEQ ID NO: 382320 - RNA, 19 nt, Homo sapiens
  misc_RNA (1)...(19): siRNA sense strand
gcaaaggcuccucaguuca

SEQ ID NO: 382321 - RNA, 19 nt, Homo sapiens
  misc_RNA (1)...(19): siRNA sense strand
ccgcaaaggcuccucaguu

SEQ ID NO: 382322 - RNA, 19 nt, Homo sapiens
  misc_RNA (1)...(19): siRNA sense strand
gauuucagcccaguacaaa

SEQ ID NO: 382323 - RNA, 19 nt, Homo sapiens
  misc_RNA (1)...(19): siRNA sense strand
gcuaauauucacagcauca

SEQ ID NO: 382324 - RNA, 19 nt, Homo sapiens
  misc_RNA (1)...(19): siRNA sense strand
aaagaggaaucaucucacu

SEQ ID NO: 382325 - RNA, 19 nt, Homo sapiens
  misc_RNA (1)...(19): siRNA sense strand
ggagaccugugcagauggu

SEQ ID NO: 382326 - RNA, 19 nt, Homo sapiens
  misc_RNA (1)...(19): siRNA sense strand
ccaggacuccggccucaaa

SEQ ID NO: 382327 - RNA, 19 nt, Homo sapiens
  misc_RNA (1)...(19): siRNA sense strand
cauuggaccagguguuuaa

SEQ ID NO: 382328 - RNA, 19 nt, Homo sapiens
  misc_RNA (1)...(19): siRNA sense strand
gcaccacucccuugcaaag

SEQ ID NO: 382329 - RNA, 19 nt, Homo sapiens
  misc_RNA (1)...(19): siRNA sense strand
gcucagcuacucccaggaa

SEQ ID NO: 382330 - RNA, 19 nt, Homo sapiens
  misc_RNA (1)...(19): siRNA sense strand
ggggauagcuccucuuucu

SEQ ID NO: 382331 - RNA, 19 nt, Homo sapiens
  misc_RNA (1)...(19): siRNA sense strand
aagcagaggccuccaagga

SEQ ID NO: 382332 - RNA, 19 nt, Homo sapiens
  misc_RNA (1)...(19): siRNA sense strand
gggaggaccuuuuaagaca

SEQ ID NO: 382333 - RNA, 19 nt, Homo sapiens
  misc_RNA (1)...(19): siRNA sense strand
uaccacgggucagcucaua

SEQ ID NO: 382334 - RNA, 19 nt, Homo sapiens
  misc_RNA (1)...(19): siRNA sense strand
ccaguggcuucgaaagaug

SEQ ID NO: 382335 - RNA, 19 nt, Homo sapiens
  misc_RNA (1)...(19): siRNA sense strand
cgggagaccugugcagaug

SEQ ID NO: 382336 - RNA, 19 nt, Homo sapiens
  misc_RNA (1)...(19): siRNA sense strand
aaccagcuaugaugccaaa

SEQ ID NO: 382337 - RNA, 19 nt, Homo sapiens
  misc_RNA (1)...(19): siRNA sense strand
aaugacagccucagcaaga

SEQ ID NO: 382338 - RNA, 19 nt, Homo sapiens
  misc_RNA (1)...(19): siRNA sense strand
gcgcacggcggaagaugaa

SEQ ID NO: 382339 - RNA, 19 nt, Homo sapiens
  misc_RNA (1)...(19): siRNA sense strand
gccggaacaugaccaucaa

SEQ ID NO: 382340 - RNA, 19 nt, Homo sapiens
  misc_RNA (1)...(19): siRNA sense strand
cagcagaaacgaccgaauc

SEQ ID NO: 382341 - RNA, 19 nt, Homo sapiens
  misc_RNA (1)...(19): siRNA sense strand
aaagagaguggcaguagug

SEQ ID NO: 382342 - RNA, 19 nt, Homo sapiens
  misc_RNA (1)...(19): siRNA sense strand
ccaguuuauuccugagcua

SEQ ID NO: 382343 - RNA, 19 nt, Homo sapiens
  misc_RNA (1)...(19): siRNA sense strand
ggauuucagcccaguacaa

SEQ ID NO: 382344 - RNA, 19 nt, Homo sapiens
  misc_RNA (1)...(19): siRNA sense strand
uaucaaggaggaagaaauc

SEQ ID NO: 382345 - RNA, 19 nt, Homo sapiens
  misc_RNA (1)...(19): siRNA sense strand
gauagcuccucuuucuucu

SEQ ID NO: 382346 - RNA, 19 nt, Homo sapiens
  misc_RNA (1)...(19): siRNA sense strand
gcagcgacagguuaagguu

SEQ ID NO: 382347 - RNA, 19 nt, Homo sapiens
  misc_RNA (1)...(19): siRNA sense strand
gaggaccacuuucccuacu

SEQ ID NO: 382348 - RNA, 19 nt, Homo sapiens
  misc_RNA (1)...(19): siRNA sense strand
agacaucuauacguggauu

SEQ ID NO: 382349 - RNA, 19 nt, Homo sapiens
  misc_RNA (1)...(19): siRNA sense strand
gaaaagagaguggcaguag

SEQ ID NO: 382350 - RNA, 19 nt, Homo sapiens
  misc_RNA (1)...(19): siRNA sense strand
gaaaugcuugugauucaac

SEQ ID NO: 382351 - RNA, 19 nt, Homo sapiens
  misc_RNA (1)...(19): siRNA sense strand
aggaagcgcaugacuuuga

SEQ ID NO: 382352 - RNA, 19 nt, Homo sapiens
  misc_RNA (1)...(19): siRNA sense strand
gaggaggaaccuaagagau

SEQ ID NO: 382353 - RNA, 19 nt, Homo sapiens
  misc_RNA (1)...(19): siRNA sense strand
acaggagucuaaucaagca

SEQ ID NO: 382354 - RNA, 19 nt, Homo sapiens
  misc_RNA (1)...(19): siRNA sense strand
gcaacucuucucccucaga

SEQ ID NO: 382355 - RNA, 19 nt, Homo sapiens
  misc_RNA (1)...(19): siRNA sense strand
gccaaccgcuacuugacau

SEQ ID NO: 382356 - RNA, 19 nt, Homo sapiens
  misc_RNA (1)...(19): siRNA sense strand
gcaguagugggcccaacaa

SEQ ID NO: 382357 - RNA, 19 nt, Homo sapiens
  misc_RNA (1)...(19): siRNA sense strand
gcagccaaucguucucuga

SEQ ID NO: 382358 - RNA, 19 nt, Homo sapiens
  misc_RNA (1)...(19): siRNA sense strand
caagacccaagaaguccua

SEQ ID NO: 382359 - RNA, 19 nt, Homo sapiens
  misc_RNA (1)...(19): siRNA sense strand
ugaaacaucagaggaggaa

SEQ ID NO: 382360 - RNA, 19 nt, Homo sapiens
  misc_RNA (1)...(19): siRNA sense strand
ccaacaaauucauccucau

SEQ ID NO: 382361 - RNA, 19 nt, Homo sapiens
  misc_RNA (1)...(19): siRNA sense strand
caaaggcuccucaguucag

SEQ ID NO: 382362 - RNA, 19 nt, Homo sapiens
  misc_RNA (1)...(19): siRNA sense strand
gaccacuuucccuacuuua

SEQ ID NO: 382363 - RNA, 19 nt, Homo sapiens
  misc_RNA (1)...(19): siRNA sense strand
gaggagccuucgagaccau

SEQ ID NO: 382364 - RNA, 19 nt, Homo sapiens
  misc_RNA (1)...(19): siRNA sense strand
uucgaaagaugaguucuga

SEQ ID NO: 382365 - RNA, 19 nt, Homo sapiens
  misc_RNA (1)...(19): siRNA sense strand
gcccaacacgcaaguagug

SEQ ID NO: 382366 - RNA, 19 nt, Homo sapiens
  misc_RNA (1)...(19): siRNA sense strand
ccacuuucccuacuuuaag

SEQ ID NO: 382367 - RNA, 19 nt, Homo sapiens
  misc_RNA (1)...(19): siRNA sense strand
gaccagggaaagaggagaa

SEQ ID NO: 382368 - RNA, 19 nt, Homo sapiens
  misc_RNA (1)...(19): siRNA sense strand
caaccgcuacuugacauug

SEQ ID NO: 382369 - RNA, 19 nt, Homo sapiens
  misc_RNA (1)...(19): siRNA sense strand
uagcgagacccaucaaagu

SEQ ID NO: 382370 - RNA, 19 nt, Homo sapiens
  misc_RNA (1)...(19): siRNA sense strand
agacacccauuaaggaaac

SEQ ID NO: 382371 - RNA, 19 nt, Homo sapiens
  misc_RNA (1)...(19): siRNA sense strand
ucucggaaaugcuugugau

SEQ ID NO: 382372 - RNA, 19 nt, Homo sapiens
  misc_RNA (1)...(19): siRNA sense strand
aggaaacgcugcccaucuc

SEQ ID NO: 382373 - RNA, 19 nt, Homo sapiens
  misc_RNA (1)...(19): siRNA sense strand
ccacugggcccugacaaca

SEQ ID NO: 382374 - RNA, 19 nt, Homo sapiens
  misc_RNA (1)...(19): siRNA sense strand
ugaaugacagccucagcaa

SEQ ID NO: 382375 - RNA, 19 nt, Homo sapiens
  misc_RNA (1)...(19): siRNA sense strand
aaacccaaaccagcuauga

SEQ ID NO: 382376 - RNA, 19 nt, Homo sapiens
  misc_RNA (1)...(19): siRNA sense strand
ggaagugggaggaccuuuu

SEQ ID NO: 382377 - RNA, 19 nt, Homo sapiens
  misc_RNA (1)...(19): siRNA sense strand
acaauugcccgagcacuug

SEQ ID NO: 382378 - RNA, 19 nt, Homo sapiens
  misc_RNA (1)...(19): siRNA sense strand
cgggagacgucugccaaug

SEQ ID NO: 382379 - RNA, 19 nt, Homo sapiens
  misc_RNA (1)...(19): siRNA sense strand
gaagcgcaugacuuugaaa

SEQ ID NO: 382380 - RNA, 19 nt, Homo sapiens
  misc_RNA (1)...(19): siRNA sense strand
agcgacagguuaagguuga

SEQ ID NO: 382381 - RNA, 19 nt, Homo sapiens
  misc_RNA (1)...(19): siRNA sense strand
aggcugcacuaucaacaau

SEQ ID NO: 382382 - RNA, 19 nt, Homo sapiens
  misc_RNA (1)...(19): siRNA sense strand
gccaucaacagcacugaga

SEQ ID NO: 382383 - RNA, 19 nt, Homo sapiens
  misc_RNA (1)...(19): siRNA sense strand
ccaacaggagucuaaucaa

SEQ ID NO: 382384 - RNA, 19 nt, Homo sapiens
  misc_RNA (1)...(19): siRNA sense strand
aauauucacagcaucauca

SEQ ID NO: 382385 - RNA, 19 nt, Homo sapiens
  misc_RNA (1)...(19): siRNA sense strand
ggaaucacagcagaaacga

SEQ ID NO: 382386 - RNA, 19 nt, Homo sapiens
  misc_RNA (1)...(19): siRNA sense strand
ggaagaagauccagcagaa

SEQ ID NO: 382387 - RNA, 19 nt, Homo sapiens
  misc_RNA (1)...(19): siRNA sense strand
gcaaauacgucaucugugu

SEQ ID NO: 382388 - RNA, 19 nt, Homo sapiens
  misc_RNA (1)...(19): siRNA sense strand
ccaacaaggucaaaguaua

SEQ ID NO: 382389 - RNA, 19 nt, Homo sapiens
  misc_RNA (1)...(19): siRNA sense strand
gcgcggagcugaccauuga

SEQ ID NO: 382390 - RNA, 19 nt, Homo sapiens
  misc_RNA (1)...(19): siRNA sense strand
ggagacagcugacuucaag

SEQ ID NO: 382391 - RNA, 19 nt, Homo sapiens
  misc_RNA (1)...(19): siRNA sense strand
gcacccagaccgucaauua

SEQ ID NO: 382392 - RNA, 19 nt, Homo sapiens
  misc_RNA (1)...(19): siRNA sense strand
gcaggaggcuggcgaguau

SEQ ID NO: 382393 - RNA, 19 nt, Homo sapiens
  misc_RNA (1)...(19): siRNA sense strand
guauggagaugaagaggua

SEQ ID NO: 382394 - RNA, 19 nt, Homo sapiens
  misc_RNA (1)...(19): siRNA sense strand
ucacagaaauugaccaaga

SEQ ID NO: 382395 - RNA, 19 nt, Homo sapiens
  misc_RNA (1)...(19): siRNA sense strand
caacaagaccaccuacuuu

SEQ ID NO: 382396 - RNA, 19 nt, Homo sapiens
  misc_RNA (1)...(19): siRNA sense strand
gaauggcguuuaccugauu

SEQ ID NO: 382397 - RNA, 19 nt, Homo sapiens
  misc_RNA (1)...(19): siRNA sense strand
ggacggcacuuucgacauc

SEQ ID NO: 382398 - RNA, 19 nt, Homo sapiens
  misc_RNA (1)...(19): siRNA sense strand
gcaacuacaucaucaacau

SEQ ID NO: 382399 - RNA, 19 nt, Homo sapiens
  misc_RNA (1)...(19): siRNA sense strand
gaaccuauaucgucaccau

SEQ ID NO: 382400 - RNA, 19 nt, Homo sapiens
  misc_RNA (1)...(19): siRNA sense strand
caccaucacugacaacaaa

SEQ ID NO: 382401 - RNA, 19 nt, Homo sapiens
  misc_RNA (1)...(19): siRNA sense strand
caaaguggcauccaagauu

SEQ ID NO: 382402 - RNA, 19 nt, Homo sapiens
  misc_RNA (1)...(19): siRNA sense strand
ggagugcuaugucacagaa

SEQ ID NO: 382403 - RNA, 19 nt, Homo sapiens
  misc_RNA (1)...(19): siRNA sense strand
ccaacaagcccaacaaguu

SEQ ID NO: 382404 - RNA, 19 nt, Homo sapiens
  misc_RNA (1)...(19): siRNA sense strand
gaucgaaugugacgacaag

SEQ ID NO: 382405 - RNA, 19 nt, Homo sapiens
  misc_RNA (1)...(19): siRNA sense strand
gacaacaccuacacaguca

SEQ ID NO: 382406 - RNA, 19 nt, Homo sapiens
  misc_RNA (1)...(19): siRNA sense strand
gaagaagacacacauccaa

SEQ ID NO: 382407 - RNA, 19 nt, Homo sapiens
  misc_RNA (1)...(19): siRNA sense strand
gcacaccauuaccuacauu

SEQ ID NO: 382408 - RNA, 19 nt, Homo sapiens
  misc_RNA (1)...(19): siRNA sense strand
gaagguggacguuggcaaa

SEQ ID NO: 382409 - RNA, 19 nt, Homo sapiens
  misc_RNA (1)...(19): siRNA sense strand
uguauggcuucgaguauua

SEQ ID NO: 382410 - RNA, 19 nt, Homo sapiens
  misc_RNA (1)...(19): siRNA sense strand
cugcagaguuuaucauuga

SEQ ID NO: 382411 - RNA, 19 nt, Homo sapiens
  misc_RNA (1)...(19): siRNA sense strand
ucgaguacaucccuuauga

SEQ ID NO: 382412 - RNA, 19 nt, Homo sapiens
  misc_RNA (1)...(19): siRNA sense strand
ugaccuaccugucccaguu

SEQ ID NO: 382413 - RNA, 19 nt, Homo sapiens
  misc_RNA (1)...(19): siRNA sense strand
ggagccaggugacuacgaa

SEQ ID NO: 382414 - RNA, 19 nt, Homo sapiens
  misc_RNA (1)...(19): siRNA sense strand
gcaacgagcaccugaagug

SEQ ID NO: 382415 - RNA, 19 nt, Homo sapiens
  misc_RNA (1)...(19): siRNA sense strand
ccacgugguucccugcuuu

SEQ ID NO: 382416 - RNA, 19 nt, Homo sapiens
  misc_RNA (1)...(19): siRNA sense strand
gcacauaccgcugcagcua

SEQ ID NO: 382417 - RNA, 19 nt, Homo sapiens
  misc_RNA (1)...(19): siRNA sense strand
gcaaggcugagaucucuuu

SEQ ID NO: 382418 - RNA, 19 nt, Homo sapiens
  misc_RNA (1)...(19): siRNA sense strand
aggcuaagaucgaauguga

SEQ ID NO: 382419 - RNA, 19 nt, Homo sapiens
  misc_RNA (1)...(19): siRNA sense strand
cgagacaucaucaguguuu

SEQ ID NO: 382420 - RNA, 19 nt, Homo sapiens
  misc_RNA (1)...(19): siRNA sense strand
ccacagagccaggcaacua

SEQ ID NO: 382421 - RNA, 19 nt, Homo sapiens
  misc_RNA (1)...(19): siRNA sense strand
gaccaggaguucacaguca

SEQ ID NO: 382422 - RNA, 19 nt, Homo sapiens
  misc_RNA (1)...(19): siRNA sense strand
ggaguucacagucaaauca

SEQ ID NO: 382423 - RNA, 19 nt, Homo sapiens
  misc_RNA (1)...(19): siRNA sense strand
caucaucaguguuuguaga

SEQ ID NO: 382424 - RNA, 19 nt, Homo sapiens
  misc_RNA (1)...(19): siRNA sense strand
gcagcuaccucaucuccau

SEQ ID NO: 382425 - RNA, 19 nt, Homo sapiens
  misc_RNA (1)...(19): siRNA sense strand
gaagggcccuacagcaucu

SEQ ID NO: 382426 - RNA, 19 nt, Homo sapiens
  misc_RNA (1)...(19): siRNA sense strand
caacaagcccaacaaguuc

SEQ ID NO: 382427 - RNA, 19 nt, Homo sapiens
  misc_RNA (1)...(19): siRNA sense strand
gacgagcacucugucauga

SEQ ID NO: 382428 - RNA, 19 nt, Homo sapiens
  misc_RNA (1)...(19): siRNA sense strand
ucaaggugcugccuacuca

SEQ ID NO: 382429 - RNA, 19 nt, Homo sapiens
  misc_RNA (1)...(19): siRNA sense strand
gcacgcacaccauuaccua

SEQ ID NO: 382430 - RNA, 19 nt, Homo sapiens
  misc_RNA (1)...(19): siRNA sense strand
aaaguggcauccaagauug

SEQ ID NO: 382431 - RNA, 19 nt, Homo sapiens
  misc_RNA (1)...(19): siRNA sense strand
uaagguuacugugcucuuu

SEQ ID NO: 382432 - RNA, 19 nt, Homo sapiens
  misc_RNA (1)...(19): siRNA sense strand
caacaagccagcagaguuc

SEQ ID NO: 382433 - RNA, 19 nt, Homo sapiens
  misc_RNA (1)...(19): siRNA sense strand
gaaauugaccaagauaagu

SEQ ID NO: 382434 - RNA, 19 nt, Homo sapiens
  misc_RNA (1)...(19): siRNA sense strand
acaccauccucaucaagua

SEQ ID NO: 382435 - RNA, 19 nt, Homo sapiens
  misc_RNA (1)...(19): siRNA sense strand
gcacauguuccguguccua

SEQ ID NO: 382436 - RNA, 19 nt, Homo sapiens
  misc_RNA (1)...(19): siRNA sense strand
cagcugacuucaaggugua

SEQ ID NO: 382437 - RNA, 19 nt, Homo sapiens
  misc_RNA (1)...(19): siRNA sense strand
gaaggcaagccgaagaaga

SEQ ID NO: 382438 - RNA, 19 nt, Homo sapiens
  misc_RNA (1)...(19): siRNA sense strand
aagagcagcuucacaguag

SEQ ID NO: 382439 - RNA, 19 nt, Homo sapiens
  misc_RNA (1)...(19): siRNA sense strand
gaaaaucccugaaauuagc

SEQ ID NO: 382440 - RNA, 19 nt, Homo sapiens
  misc_RNA (1)...(19): siRNA sense strand
caacguugguagucauugu

SEQ ID NO: 382441 - RNA, 19 nt, Homo sapiens
  misc_RNA (1)...(19): siRNA sense strand
ugaagaagcgggcagaguu

SEQ ID NO: 382442 - RNA, 19 nt, Homo sapiens
  misc_RNA (1)...(19): siRNA sense strand
gggcaaauacgucaucugu

SEQ ID NO: 382443 - RNA, 19 nt, Homo sapiens
  misc_RNA (1)...(19): siRNA sense strand
gcgauggcauguacaaagu

SEQ ID NO: 382444 - RNA, 19 nt, Homo sapiens
  misc_RNA (1)...(19): siRNA sense strand
gcaaugacaaugacaccuu

SEQ ID NO: 382445 - RNA, 19 nt, Homo sapiens
  misc_RNA (1)...(19): siRNA sense strand
agacacacauccaagacaa

SEQ ID NO: 382446 - RNA, 19 nt, Homo sapiens
  misc_RNA (1)...(19): siRNA sense strand
ccaggcaacuacaucauca

SEQ ID NO: 382447 - RNA, 19 nt, Homo sapiens
  misc_RNA (1)...(19): siRNA sense strand
gagaggagcgcgugaagca

SEQ ID NO: 382448 - RNA, 19 nt, Homo sapiens
  misc_RNA (1)...(19): siRNA sense strand
cagcugaguucgucgugaa

SEQ ID NO: 382449 - RNA, 19 nt, Homo sapiens
  misc_RNA (1)...(19): siRNA sense strand
gcaucaaacugguguccau

SEQ ID NO: 382450 - RNA, 19 nt, Homo sapiens
  misc_RNA (1)...(19): siRNA sense strand
caucaucaacaucaaguuu

SEQ ID NO: 382451 - RNA, 19 nt, Homo sapiens
  misc_RNA (1)...(19): siRNA sense strand
ccagcaagguggacaucaa

SEQ ID NO: 382452 - RNA, 19 nt, Homo sapiens
  misc_RNA (1)...(19): siRNA sense strand
gagaagggcccuacagcau

SEQ ID NO: 382453 - RNA, 19 nt, Homo sapiens
  misc_RNA (1)...(19): siRNA sense strand
ggacgagcacucugucaug

SEQ ID NO: 382454 - RNA, 19 nt, Homo sapiens
  misc_RNA (1)...(19): siRNA sense strand
aagauguccugcauggaua

SEQ ID NO: 382455 - RNA, 19 nt, Homo sapiens
  misc_RNA (1)...(19): siRNA sense strand
caagauguccugcauggau

SEQ ID NO: 382456 - RNA, 19 nt, Homo sapiens
  misc_RNA (1)...(19): siRNA sense strand
caacaucaacauccucuuc

SEQ ID NO: 382457 - RNA, 19 nt, Homo sapiens
  misc_RNA (1)...(19): siRNA sense strand
ggacccugauccugcacua

SEQ ID NO: 382458 - RNA, 19 nt, Homo sapiens
  misc_RNA (1)...(19): siRNA sense strand
gaagaagcgggcagaguuc

SEQ ID NO: 382459 - RNA, 19 nt, Homo sapiens
  misc_RNA (1)...(19): siRNA sense strand
aaacugaacccgaagaaag

SEQ ID NO: 382460 - RNA, 19 nt, Homo sapiens
  misc_RNA (1)...(19): siRNA sense strand
gcaagcccguuaccaaugc

SEQ ID NO: 382461 - RNA, 19 nt, Homo sapiens
  misc_RNA (1)...(19): siRNA sense strand
caacaaggucaaaguauac

SEQ ID NO: 382462 - RNA, 19 nt, Homo sapiens
  misc_RNA (1)...(19): siRNA sense strand
ccaacaagaccaccuacuu

SEQ ID NO: 382463 - RNA, 19 nt, Homo sapiens
  misc_RNA (1)...(19): siRNA sense strand
caggcaacauggugaagaa

SEQ ID NO: 382464 - RNA, 19 nt, Homo sapiens
  misc_RNA (1)...(19): siRNA sense strand
caacggcaauggcacuuac

SEQ ID NO: 382465 - RNA, 19 nt, Homo sapiens
  misc_RNA (1)...(19): siRNA sense strand
acacacugguggucaaaug

SEQ ID NO: 382466 - RNA, 19 nt, Homo sapiens
  misc_RNA (1)...(19): siRNA sense strand
caaagcaggcaacaacaug

SEQ ID NO: 382467 - RNA, 19 nt, Homo sapiens
  misc_RNA (1)...(19): siRNA sense strand
guacgguggugacgagauc

SEQ ID NO: 382468 - RNA, 19 nt, Homo sapiens
  misc_RNA (1)...(19): siRNA sense strand
gcuaugggccugguauuga

SEQ ID NO: 382469 - RNA, 19 nt, Homo sapiens
  misc_RNA (1)...(19): siRNA sense strand
caaaagugaccgccaauaa

SEQ ID NO: 382470 - RNA, 19 nt, Homo sapiens
  misc_RNA (1)...(19): siRNA sense strand
cacgagacaucaucagugu

SEQ ID NO: 382471 - RNA, 19 nt, Homo sapiens
  misc_RNA (1)...(19): siRNA sense strand
cagcaucucaguacuguau

SEQ ID NO: 382472 - RNA, 19 nt, Homo sapiens
  misc_RNA (1)...(19): siRNA sense strand
gcaaaguggcauccaagau

SEQ ID NO: 382473 - RNA, 19 nt, Homo sapiens
  misc_RNA (1)...(19): siRNA sense strand
cauggucccuggaaccuau

SEQ ID NO: 382474 - RNA, 19 nt, Homo sapiens
  misc_RNA (1)...(19): siRNA sense strand
ggacucauaagguuacugu

SEQ ID NO: 382475 - RNA, 19 nt, Homo sapiens
  misc_RNA (1)...(19): siRNA sense strand
agggagaggugcuggugua

SEQ ID NO: 382476 - RNA, 19 nt, Homo sapiens
  misc_RNA (1)...(19): siRNA sense strand
ccaggaagccggugaagca

SEQ ID NO: 382477 - RNA, 19 nt, Homo sapiens
  misc_RNA (1)...(19): siRNA sense strand
ccaccuacuuugagaucuu

SEQ ID NO: 382478 - RNA, 19 nt, Homo sapiens
  misc_RNA (1)...(19): siRNA sense strand
gcacuuacagcugcuccua

SEQ ID NO: 382479 - RNA, 19 nt, Homo sapiens
  misc_RNA (1)...(19): siRNA sense strand
gcaaagcaggcaacaacau

SEQ ID NO: 382480 - RNA, 19 nt, Homo sapiens
  misc_RNA (1)...(19): siRNA sense strand
gcaguucuauguggauuac

SEQ ID NO: 382481 - RNA, 19 nt, Homo sapiens
  misc_RNA (1)...(19): siRNA sense strand
gaaugaggacggcacuuuc

SEQ ID NO: 382482 - RNA, 19 nt, Homo sapiens
  misc_RNA (1)...(19): siRNA sense strand
gcaggcaaaggcaaaguga

SEQ ID NO: 382483 - RNA, 19 nt, Homo sapiens
  misc_RNA (1)...(19): siRNA sense strand
ggaggugggccaauuccaa

SEQ ID NO: 382484 - RNA, 19 nt, Homo sapiens
  misc_RNA (1)...(19): siRNA sense strand
ucaaccagccagccucuuu

SEQ ID NO: 382485 - RNA, 19 nt, Homo sapiens
  misc_RNA (1)...(19): siRNA sense strand
caggcuuggugucugcuua

SEQ ID NO: 382486 - RNA, 19 nt, Homo sapiens
  misc_RNA (1)...(19): siRNA sense strand
ucaaagagauguuguucua

SEQ ID NO: 382487 - RNA, 19 nt, Homo sapiens
  misc_RNA (1)...(19): siRNA sense strand
gaaugaauaugaagaagug

SEQ ID NO: 382488 - RNA, 19 nt, Homo sapiens
  misc_RNA (1)...(19): siRNA sense strand
ccacuccucugaaugaaua

SEQ ID NO: 382489 - RNA, 19 nt, Homo sapiens
  misc_RNA (1)...(19): siRNA sense strand
gcaaugggcuugugaucug

SEQ ID NO: 382490 - RNA, 19 nt, Homo sapiens
  misc_RNA (1)...(19): siRNA sense strand
gaagaaguguccuaugagu

SEQ ID NO: 382491 - RNA, 19 nt, Homo sapiens
  misc_RNA (1)...(19): siRNA sense strand
gcacuggaccgcugcauuu

SEQ ID NO: 382492 - RNA, 19 nt, Homo sapiens
  misc_RNA (1)...(19): siRNA sense strand
guccuuaccuugccaguuu

SEQ ID NO: 382493 - RNA, 19 nt, Homo sapiens
  misc_RNA (1)...(19): siRNA sense strand
aaagagauguuguucuaug

SEQ ID NO: 382494 - RNA, 19 nt, Homo sapiens
  misc_RNA (1)...(19): siRNA sense strand
ggccaagacuuccgagaga

SEQ ID NO: 382495 - RNA, 19 nt, Homo sapiens
  misc_RNA (1)...(19): siRNA sense strand
ggacacauacuguacuuuc

SEQ ID NO: 382496 - RNA, 19 nt, Homo sapiens
  misc_RNA (1)...(19): siRNA sense strand
ggacaucaaccucuuugga

SEQ ID NO: 382497 - RNA, 19 nt, Homo sapiens
  misc_RNA (1)...(19): siRNA sense strand
ucauugacauccugguuaa

SEQ ID NO: 382498 - RNA, 19 nt, Homo sapiens
  misc_RNA (1)...(19): siRNA sense strand
augaagaaguguccuauga

SEQ ID NO: 382499 - RNA, 19 nt, Homo sapiens
  misc_RNA (1)...(19): siRNA sense strand
ugacacggcugccaauucu

SEQ ID NO: 382500 - RNA, 19 nt, Homo sapiens
  misc_RNA (1)...(19): siRNA sense strand
ggcuuuagcuugccgaugu

SEQ ID NO: 382501 - RNA, 19 nt, Homo sapiens
  misc_RNA (1)...(19): siRNA sense strand
gacaucaaccucuuuggaa

SEQ ID NO: 382502 - RNA, 19 nt, Homo sapiens
  misc_RNA (1)...(19): siRNA sense strand
uaaauccagccgucccuua

SEQ ID NO: 382503 - RNA, 19 nt, Homo sapiens
  misc_RNA (1)...(19): siRNA sense strand
gacacauacuguacuuuca

SEQ ID NO: 382504 - RNA, 19 nt, Homo sapiens
  misc_RNA (1)...(19): siRNA sense strand
ugugguggcuucuuucuuc

SEQ ID NO: 382505 - RNA, 19 nt, Homo sapiens
  misc_RNA (1)...(19): siRNA sense strand
cacauuaccauuccucauu

SEQ ID NO: 382506 - RNA, 19 nt, Homo sapiens
  misc_RNA (1)...(19): siRNA sense strand
gaucgucggaccuuggauu

SEQ ID NO: 382507 - RNA, 19 nt, Homo sapiens
  misc_RNA (1)...(19): siRNA sense strand
caguaacuauuccaaaugg

SEQ ID NO: 382508 - RNA, 19 nt, Homo sapiens
  misc_RNA (1)...(19): siRNA sense strand
acauuaccauuccucauug

SEQ ID NO: 382509 - RNA, 19 nt, Homo sapiens
  misc_RNA (1)...(19): siRNA sense strand
caucugcuaugggcucauu

SEQ ID NO: 382510 - RNA, 19 nt, Homo sapiens
  misc_RNA (1)...(19): siRNA sense strand
cagaaccaccgcacuguga

SEQ ID NO: 382511 - RNA, 19 nt, Homo sapiens
  misc_RNA (1)...(19): siRNA sense strand
gauucuugcucuaguccuu

SEQ ID NO: 382512 - RNA, 19 nt, Homo sapiens
  misc_RNA (1)...(19): siRNA sense strand
gcugguuccuguguaaguu

SEQ ID NO: 382513 - RNA, 19 nt, Homo sapiens
  misc_RNA (1)...(19): siRNA sense strand
agacugaguuacaggcaau

SEQ ID NO: 382514 - RNA, 19 nt, Homo sapiens
  misc_RNA (1)...(19): siRNA sense strand
gauuauccgguuugucauu

SEQ ID NO: 382515 - RNA, 19 nt, Homo sapiens
  misc_RNA (1)...(19): siRNA sense strand
guggcuggauuccggauga

SEQ ID NO: 382516 - RNA, 19 nt, Homo sapiens
  misc_RNA (1)...(19): siRNA sense strand
ugaguuacaggcaauguga

SEQ ID NO: 382517 - RNA, 19 nt, Homo sapiens
  misc_RNA (1)...(19): siRNA sense strand
cgucggaccuuggauucuu

SEQ ID NO: 382518 - RNA, 19 nt, Homo sapiens
  misc_RNA (1)...(19): siRNA sense strand
cugcugugguggcuucuuu

SEQ ID NO: 382519 - RNA, 19 nt, Homo sapiens
  misc_RNA (1)...(19): siRNA sense strand
guaaguuaauucacaucgu

SEQ ID NO: 382520 - RNA, 19 nt, Homo sapiens
  misc_RNA (1)...(19): siRNA sense strand
cuucuugauugguuucauu

SEQ ID NO: 382521 - RNA, 19 nt, Homo sapiens
  misc_RNA (1)...(19): siRNA sense strand
cuacaguaacuauuccaaa

SEQ ID NO: 382522 - RNA, 19 nt, Homo sapiens
  misc_RNA (1)...(19): siRNA sense strand
cgagcucccuggccuucuu

SEQ ID NO: 382523 - RNA, 19 nt, Homo sapiens
  misc_RNA (1)...(19): siRNA sense strand
gcucaaagagauguuguuc

SEQ ID NO: 382524 - RNA, 19 nt, Homo sapiens
  misc_RNA (1)...(19): siRNA sense strand
gcucauugcagccaagauc

SEQ ID NO: 382525 - RNA, 19 nt, Homo sapiens
  misc_RNA (1)...(19): siRNA sense strand
guuccuguguaaguuaauu

SEQ ID NO: 382526 - RNA, 19 nt, Homo sapiens
  misc_RNA (1)...(19): siRNA sense strand
gcaaguacaaaaucauuga

SEQ ID NO: 382527 - RNA, 19 nt, Homo sapiens
  misc_RNA (1)...(19): siRNA sense strand
gaucuggguggcuggauuc

SEQ ID NO: 382528 - RNA, 19 nt, Homo sapiens
  misc_RNA (1)...(19): siRNA sense strand
ggacucagccccaacuaau

SEQ ID NO: 382529 - RNA, 19 nt, Homo sapiens
  misc_RNA (1)...(19): siRNA sense strand
gcacagucaccaccaucug

SEQ ID NO: 382530 - RNA, 19 nt, Homo sapiens
  misc_RNA (1)...(19): siRNA sense strand
caccaucuguuaccugaac

SEQ ID NO: 382531 - RNA, 19 nt, Homo sapiens
  misc_RNA (1)...(19): siRNA sense strand
guuguucuauggcaaguac

SEQ ID NO: 382532 - RNA, 19 nt, Homo sapiens
  misc_RNA (1)...(19): siRNA sense strand
gguggcuucuuucuucauc

SEQ ID NO: 382533 - RNA, 19 nt, Homo sapiens
  misc_RNA (1)...(19): siRNA sense strand
uugccgauguccauuguug

SEQ ID NO: 382534 - RNA, 19 nt, Homo sapiens
  misc_RNA (1)...(19): siRNA sense strand
gcuugccgauguccauugu

SEQ ID NO: 382535 - RNA, 19 nt, Homo sapiens
  misc_RNA (1)...(19): siRNA sense strand
ggcugaagguggccauuac

SEQ ID NO: 382536 - RNA, 19 nt, Homo sapiens
  misc_RNA (1)...(19): siRNA sense strand
ugaucuggguggcuggauu

SEQ ID NO: 382537 - RNA, 19 nt, Homo sapiens
  misc_RNA (1)...(19): siRNA sense strand
acacauacuguacuuucaa

SEQ ID NO: 382538 - RNA, 19 nt, Homo sapiens
  misc_RNA (1)...(19): siRNA sense strand
ucuccacuccucugaauga

SEQ ID NO: 382539 - RNA, 19 nt, Homo sapiens
  misc_RNA (1)...(19): siRNA sense strand
agaaguguccuaugagucu

SEQ ID NO: 382540 - RNA, 19 nt, Homo sapiens
  misc_RNA (1)...(19): siRNA sense strand
cugcagagacugaguuaca

SEQ ID NO: 382541 - RNA, 19 nt, Homo sapiens
  misc_RNA (1)...(19): siRNA sense strand
ccaagacuuccgagagaga

SEQ ID NO: 382542 - RNA, 19 nt, Homo sapiens
  misc_RNA (1)...(19): siRNA sense strand
caaagagauguuguucuau

SEQ ID NO: 382543 - RNA, 19 nt, Homo sapiens
  misc_RNA (1)...(19): siRNA sense strand
cauacuguacuuucaacuu

SEQ ID NO: 382544 - RNA, 19 nt, Homo sapiens
  misc_RNA (1)...(19): siRNA sense strand
cuggaccgcugcauuugug

SEQ ID NO: 382545 - RNA, 19 nt, Homo sapiens
  misc_RNA (1)...(19): siRNA sense strand
aagagauguuguucuaugg

SEQ ID NO: 382546 - RNA, 19 nt, Homo sapiens
  misc_RNA (1)...(19): siRNA sense strand
cuucuccacuccucugaau

SEQ ID NO: 382547 - RNA, 19 nt, Homo sapiens
  misc_RNA (1)...(19): siRNA sense strand
ucuguugguuucccuuuca

SEQ ID NO: 382548 - RNA, 19 nt, Homo sapiens
  misc_RNA (1)...(19): siRNA sense strand
gaaccaccgcacugugagu

SEQ ID NO: 382549 - RNA, 19 nt, Homo sapiens
  misc_RNA (1)...(19): siRNA sense strand
acaguaacuauuccaaaug

SEQ ID NO: 382550 - RNA, 19 nt, Homo sapiens
  misc_RNA (1)...(19): siRNA sense strand
cagucaccaccaucuguua

SEQ ID NO: 382551 - RNA, 19 nt, Homo sapiens
  misc_RNA (1)...(19): siRNA sense strand
gcuucuuucuucaucuguu

SEQ ID NO: 382552 - RNA, 19 nt, Homo sapiens
  misc_RNA (1)...(19): siRNA sense strand
uacuguacuuucaacuuug

SEQ ID NO: 382553 - RNA, 19 nt, Homo sapiens
  misc_RNA (1)...(19): siRNA sense strand
ucccuggccuucuucaaca

SEQ ID NO: 382554 - RNA, 19 nt, Homo sapiens
  misc_RNA (1)...(19): siRNA sense strand
ucacggccacauuaccauu

SEQ ID NO: 382555 - RNA, 19 nt, Homo sapiens
  misc_RNA (1)...(19): siRNA sense strand
uggagagggcccugucuga

SEQ ID NO: 382556 - RNA, 19 nt, Homo sapiens
  misc_RNA (1)...(19): siRNA sense strand
gguggacaucaaccucuuu

SEQ ID NO: 382557 - RNA, 19 nt, Homo sapiens
  misc_RNA (1)...(19): siRNA sense strand
ucugcuggcuacacuguuc

SEQ ID NO: 382558 - RNA, 19 nt, Homo sapiens
  misc_RNA (1)...(19): siRNA sense strand
agagaaagcuggaccauga

SEQ ID NO: 382559 - RNA, 19 nt, Homo sapiens
  misc_RNA (1)...(19): siRNA sense strand
gguccaggcugcccaauuu

SEQ ID NO: 382560 - RNA, 19 nt, Homo sapiens
  misc_RNA (1)...(19): siRNA sense strand
gcaaggagcugcaggaaaa

SEQ ID NO: 382561 - RNA, 19 nt, Homo sapiens
  misc_RNA (1)...(19): siRNA sense strand
ccacugcacuggaauaugu

SEQ ID NO: 382562 - RNA, 19 nt, Homo sapiens
  misc_RNA (1)...(19): siRNA sense strand
gacagaagcuuugguggau

SEQ ID NO: 382563 - RNA, 19 nt, Homo sapiens
  misc_RNA (1)...(19): siRNA sense strand
uggaauaugucuacaaagg

SEQ ID NO: 382564 - RNA, 19 nt, Homo sapiens
  misc_RNA (1)...(19): siRNA sense strand
cagaagcuuugguggauca

SEQ ID NO: 382565 - RNA, 19 nt, Homo sapiens
  misc_RNA (1)...(19): siRNA sense strand
caaccaggcacucaaggaa

SEQ ID NO: 382566 - RNA, 19 nt, Homo sapiens
  misc_RNA (1)...(19): siRNA sense strand
acuggaauaugucuacaaa

SEQ ID NO: 382567 - RNA, 19 nt, Homo sapiens
  misc_RNA (1)...(19): siRNA sense strand
ggaucggaaugguggagaa

SEQ ID NO: 382568 - RNA, 19 nt, Homo sapiens
  misc_RNA (1)...(19): siRNA sense strand
gcacuggaauaugucuaca

SEQ ID NO: 382569 - RNA, 19 nt, Homo sapiens
  misc_RNA (1)...(19): siRNA sense strand
gagcaucgagcuggacaug

SEQ ID NO: 382570 - RNA, 19 nt, Homo sapiens
  misc_RNA (1)...(19): siRNA sense strand
ucggaaugguggagaacuu

SEQ ID NO: 382571 - RNA, 19 nt, Homo sapiens
  misc_RNA (1)...(19): siRNA sense strand
cauugccacugcacuggaa

SEQ ID NO: 382572 - RNA, 19 nt, Homo sapiens
  misc_RNA (1)...(19): siRNA sense strand
ggaaugguggagaacuuca

SEQ ID NO: 382573 - RNA, 19 nt, Homo sapiens
  misc_RNA (1)...(19): siRNA sense strand
gaaugguggagaacuucaa

SEQ ID NO: 382574 - RNA, 19 nt, Homo sapiens
  misc_RNA (1)...(19): siRNA sense strand
accaggcacucaaggaaau

SEQ ID NO: 382575 - RNA, 19 nt, Homo sapiens
  misc_RNA (1)...(19): siRNA sense strand
gaacuucagcucuuccuau

SEQ ID NO: 382576 - RNA, 19 nt, Homo sapiens
  misc_RNA (1)...(19): siRNA sense strand
ggucauggccuacugcuau

SEQ ID NO: 382577 - RNA, 19 nt, Homo sapiens
  misc_RNA (1)...(19): siRNA sense strand
gcugcucuaugccuuugua

SEQ ID NO: 382578 - RNA, 19 nt, Homo sapiens
  misc_RNA (1)...(19): siRNA sense strand
ggauguggaugcugcucuu

SEQ ID NO: 382579 - RNA, 19 nt, Homo sapiens
  misc_RNA (1)...(19): siRNA sense strand
gcugguggcuggcuuucug

SEQ ID NO: 382580 - RNA, 19 nt, Homo sapiens
  misc_RNA (1)...(19): siRNA sense strand
gcaggugcccucuucaaca

SEQ ID NO: 382581 - RNA, 19 nt, Homo sapiens
  misc_RNA (1)...(19): siRNA sense strand
gcucuggccucugcaaagu

SEQ ID NO: 382582 - RNA, 19 nt, Homo sapiens
  misc_RNA (1)...(19): siRNA sense strand
ucauggaccugggcgcuuu

SEQ ID NO: 382583 - RNA, 19 nt, Homo sapiens
  misc_RNA (1)...(19): siRNA sense strand
ccgcaacuguggccgagaa

SEQ ID NO: 382584 - RNA, 19 nt, Homo sapiens
  misc_RNA (1)...(19): siRNA sense strand
ggguagacguggccaaguc

SEQ ID NO: 382585 - RNA, 19 nt, Homo sapiens
  misc_RNA (1)...(19): siRNA sense strand
gcuaaaugacgccgagguu

SEQ ID NO: 382586 - RNA, 19 nt, Homo sapiens
  misc_RNA (1)...(19): siRNA sense strand
caggugcccucuucaacau

SEQ ID NO: 382587 - RNA, 19 nt, Homo sapiens
  misc_RNA (1)...(19): siRNA sense strand
cuggagaacuucagcucuu

SEQ ID NO: 382588 - RNA, 19 nt, Homo sapiens
  misc_RNA (1)...(19): siRNA sense strand
ucaacccgcugcucuaugc

SEQ ID NO: 382589 - RNA, 19 nt, Homo sapiens
  misc_RNA (1)...(19): siRNA sense strand
gauucauccuggucugaga

SEQ ID NO: 382590 - RNA, 19 nt, Homo sapiens
  misc_RNA (1)...(19): siRNA sense strand
ggugcccucuucaacauca

SEQ ID NO: 382591 - RNA, 19 nt, Homo sapiens
  misc_RNA (1)...(19): siRNA sense strand
ccucuacagccuccucuuu

SEQ ID NO: 382592 - RNA, 19 nt, Homo sapiens
  misc_RNA (1)...(19): siRNA sense strand
ccacugccaauacaacuuc

SEQ ID NO: 382593 - RNA, 19 nt, Homo sapiens
  misc_RNA (1)...(19): siRNA sense strand
gaccaccaagugcuaaaug

SEQ ID NO: 382594 - RNA, 19 nt, Homo sapiens
  misc_RNA (1)...(19): siRNA sense strand
ucuucaacaucaacuucua

SEQ ID NO: 382595 - RNA, 19 nt, Homo sapiens
  misc_RNA (1)...(19): siRNA sense strand
gagugaccaccaagugcua

SEQ ID NO: 382596 - RNA, 19 nt, Homo sapiens
  misc_RNA (1)...(19): siRNA sense strand
ugaccgcuaccugaacaua

SEQ ID NO: 382597 - RNA, 19 nt, Homo sapiens
  misc_RNA (1)...(19): siRNA sense strand
ccucaggccugggcuacau

SEQ ID NO: 382598 - RNA, 19 nt, Homo sapiens
  misc_RNA (1)...(19): siRNA sense strand
gucauggccuacugcuaug

SEQ ID NO: 382599 - RNA, 19 nt, Homo sapiens
  misc_RNA (1)...(19): siRNA sense strand
accaccaagugcuaaauga

SEQ ID NO: 382600 - RNA, 19 nt, Homo sapiens
  misc_RNA (1)...(19): siRNA sense strand
cagcucuuccuaugacuau

SEQ ID NO: 382601 - RNA, 19 nt, Homo sapiens
  misc_RNA (1)...(19): siRNA sense strand
cuucagcucuuccuaugac

SEQ ID NO: 382602 - RNA, 19 nt, Homo sapiens
  misc_RNA (1)...(19): siRNA sense strand
aacuucagcucuuccuaug

SEQ ID NO: 382603 - RNA, 19 nt, Homo sapiens
  misc_RNA (1)...(19): siRNA sense strand
gcuuugaccgcuaccugaa

SEQ ID NO: 382604 - RNA, 19 nt, Homo sapiens
  misc_RNA (1)...(19): siRNA sense strand
agaggcagccaucgucuuc

SEQ ID NO: 382605 - RNA, 19 nt, Homo sapiens
  misc_RNA (1)...(19): siRNA sense strand
gggacaagcugaggcugua

SEQ ID NO: 382606 - RNA, 19 nt, Homo sapiens
  misc_RNA (1)...(19): siRNA sense strand
gacgaggccugcuucuguu

SEQ ID NO: 382607 - RNA, 19 nt, Homo sapiens
  misc_RNA (1)...(19): siRNA sense strand
gcgugggccuggagaugua

SEQ ID NO: 382608 - RNA, 19 nt, Homo sapiens
  misc_RNA (1)...(19): siRNA sense strand
guacagcagcgucuucuuc

SEQ ID NO: 382609 - RNA, 19 nt, Homo sapiens
  misc_RNA (1)...(19): siRNA sense strand
cgacgaggccugcuucugu

SEQ ID NO: 382610 - RNA, 19 nt, Homo sapiens
  misc_RNA (1)...(19): siRNA sense strand
guucagcagugccguguag

SEQ ID NO: 382611 - RNA, 19 nt, Homo sapiens
  misc_RNA (1)...(19): siRNA sense strand
gcuguggccucaucuggau

SEQ ID NO: 382612 - RNA, 19 nt, Homo sapiens
  misc_RNA (1)...(19): siRNA sense strand
aagcugaggcuguacauug

SEQ ID NO: 382613 - RNA, 19 nt, Homo sapiens
  misc_RNA (1)...(19): siRNA sense strand
gagcuucgaccgcuacauc

SEQ ID NO: 382614 - RNA, 19 nt, Homo sapiens
  misc_RNA (1)...(19): siRNA sense strand
ucucggagcaccagcagua

SEQ ID NO: 382615 - RNA, 19 nt, Homo sapiens
  misc_RNA (1)...(19): siRNA sense strand
ggcuguacauugagcagaa

SEQ ID NO: 382616 - RNA, 19 nt, Homo sapiens
  misc_RNA (1)...(19): siRNA sense strand
cagaaggcgcuccgcauga

SEQ ID NO: 382617 - RNA, 19 nt, Homo sapiens
  misc_RNA (1)...(19): siRNA sense strand
gcaccuucaugucgcucuu

SEQ ID NO: 382618 - RNA, 19 nt, Homo sapiens
  misc_RNA (1)...(19): siRNA sense strand
gcuguacauugagcagaaa

SEQ ID NO: 382619 - RNA, 19 nt, Homo sapiens
  misc_RNA (1)...(19): siRNA sense strand
agaaggcgcuccgcaugau

SEQ ID NO: 382620 - RNA, 19 nt, Homo sapiens
  misc_RNA (1)...(19): siRNA sense strand
ccggagaacgucuucauca

SEQ ID NO: 382621 - RNA, 19 nt, Homo sapiens
  misc_RNA (1)...(19): siRNA sense strand
guacgugaucggccuguuc

SEQ ID NO: 382622 - RNA, 19 nt, Homo sapiens
  misc_RNA (1)...(19): siRNA sense strand
ucugcuggcugccggagaa

SEQ ID NO: 382623 - RNA, 19 nt, Homo sapiens
  misc_RNA (1)...(19): siRNA sense strand
agcugaggcuguacauuga

SEQ ID NO: 382624 - RNA, 19 nt, Homo sapiens
  misc_RNA (1)...(19): siRNA sense strand
guggccgacucccucauug

SEQ ID NO: 382625 - RNA, 19 nt, Homo sapiens
  misc_RNA (1)...(19): siRNA sense strand
gguggccgacucccucauu

SEQ ID NO: 382626 - RNA, 19 nt, Homo sapiens
  misc_RNA (1)...(19): siRNA sense strand
uccugcaggucaacaugua

SEQ ID NO: 382627 - RNA, 19 nt, Homo sapiens
  misc_RNA (1)...(19): siRNA sense strand
ucucgugccucuacaccau

SEQ ID NO: 382628 - RNA, 19 nt, Homo sapiens
  misc_RNA (1)...(19): siRNA sense strand
cggagaacgucuucaucag

SEQ ID NO: 382629 - RNA, 19 nt, Homo sapiens
  misc_RNA (1)...(19): siRNA sense strand
gcaccagcaguacgugauc

SEQ ID NO: 382630 - RNA, 19 nt, Homo sapiens
  misc_RNA (1)...(19): siRNA sense strand
uccaacagcugccuaaacc

SEQ ID NO: 382631 - RNA, 19 nt, Homo sapiens
  misc_RNA (1)...(19): siRNA sense strand
gcggaaagcuugccucaau

SEQ ID NO: 382632 - RNA, 19 nt, Homo sapiens
  misc_RNA (1)...(19): siRNA sense strand
ccaagaacauccaaagugu

SEQ ID NO: 382633 - RNA, 19 nt, Homo sapiens
  misc_RNA (1)...(19): siRNA sense strand
gaagucauagccacacuca

SEQ ID NO: 382634 - RNA, 19 nt, Homo sapiens
  misc_RNA (1)...(19): siRNA sense strand
aaaagaugcugaacaguga

SEQ ID NO: 382635 - RNA, 19 nt, Homo sapiens
  misc_RNA (1)...(19): siRNA sense strand
aagaacauccaaaguguga

SEQ ID NO: 382636 - RNA, 19 nt, Homo sapiens
  misc_RNA (1)...(19): siRNA sense strand
uagccacacucaagaaugg

SEQ ID NO: 382637 - RNA, 19 nt, Homo sapiens
  misc_RNA (1)...(19): siRNA sense strand
gaacauccaaagugugaac

SEQ ID NO: 382638 - RNA, 19 nt, Homo sapiens
  misc_RNA (1)...(19): siRNA sense strand
cgcccaaaccgaagucaua

SEQ ID NO: 382639 - RNA, 19 nt, Homo sapiens
  misc_RNA (1)...(19): siRNA sense strand
gcugaacagugacaaaucc

SEQ ID NO: 382640 - RNA, 19 nt, Homo sapiens
  misc_RNA (1)...(19): siRNA sense strand
cccaagaacauccaaagug

SEQ ID NO: 382641 - RNA, 19 nt, Homo sapiens
  misc_RNA (1)...(19): siRNA sense strand
cggaaagcuugccucaauc

SEQ ID NO: 382642 - RNA, 19 nt, Homo sapiens
  misc_RNA (1)...(19): siRNA sense strand
uccaaagugugaacgugaa

SEQ ID NO: 382643 - RNA, 19 nt, Homo sapiens
  misc_RNA (1)...(19): siRNA sense strand
ggaauucaccccaagaaca

SEQ ID NO: 382644 - RNA, 19 nt, Homo sapiens
  misc_RNA (1)...(19): siRNA sense strand
agucauagccacacucaag

SEQ ID NO: 382645 - RNA, 19 nt, Homo sapiens
  misc_RNA (1)...(19): siRNA sense strand
gaugcugaacagugacaaa

SEQ ID NO: 382646 - RNA, 19 nt, Homo sapiens
  misc_RNA (1)...(19): siRNA sense strand
aagaaugggcggaaagcuu

SEQ ID NO: 382647 - RNA, 19 nt, Homo sapiens
  misc_RNA (1)...(19): siRNA sense strand
ggaaagcuugccucaaucc

SEQ ID NO: 382648 - RNA, 19 nt, Homo sapiens
  misc_RNA (1)...(19): siRNA sense strand
ucauagccacacucaagaa

SEQ ID NO: 382649 - RNA, 19 nt, Homo sapiens
  misc_RNA (1)...(19): siRNA sense strand
acucaagaaugggcggaaa

SEQ ID NO: 382650 - RNA, 19 nt, Homo sapiens
  misc_RNA (1)...(19): siRNA sense strand
ggaagaagaucaagagaaa

SEQ ID NO: 382651 - RNA, 19 nt, Homo sapiens
  misc_RNA (1)...(19): siRNA sense strand
gaacgacccucuagugaga

SEQ ID NO: 382652 - RNA, 19 nt, Homo sapiens
  misc_RNA (1)...(19): siRNA sense strand
gcaggaaucugaucauaga

SEQ ID NO: 382653 - RNA, 19 nt, Homo sapiens
  misc_RNA (1)...(19): siRNA sense strand
ggaaagaggaugaacuuaa

SEQ ID NO: 382654 - RNA, 19 nt, Homo sapiens
  misc_RNA (1)...(19): siRNA sense strand
acgaagagcucgcuacaua

SEQ ID NO: 382655 - RNA, 19 nt, Homo sapiens
  misc_RNA (1)...(19): siRNA sense strand
ucaaagaccaggauaauaa

SEQ ID NO: 382656 - RNA, 19 nt, Homo sapiens
  misc_RNA (1)...(19): siRNA sense strand
gaaggucucuugcgauugu

SEQ ID NO: 382657 - RNA, 19 nt, Homo sapiens
  misc_RNA (1)...(19): siRNA sense strand
ggaccgguaugaagaaauu

SEQ ID NO: 382658 - RNA, 19 nt, Homo sapiens
  misc_RNA (1)...(19): siRNA sense strand
gaaagaggaugaacuuaac

SEQ ID NO: 382659 - RNA, 19 nt, Homo sapiens
  misc_RNA (1)...(19): siRNA sense strand
ggaagcggcugaagaagga

SEQ ID NO: 382660 - RNA, 19 nt, Homo sapiens
  misc_RNA (1)...(19): siRNA sense strand
ggaaugaccaugaugauga

SEQ ID NO: 382661 - RNA, 19 nt, Homo sapiens
  misc_RNA (1)...(19): siRNA sense strand
gcucaaugguggagaauga

SEQ ID NO: 382662 - RNA, 19 nt, Homo sapiens
  misc_RNA (1)...(19): siRNA sense strand
cagcaacaguggugacaua

SEQ ID NO: 382663 - RNA, 19 nt, Homo sapiens
  misc_RNA (1)...(19): siRNA sense strand
ccaacgaguuuaaagaauu

SEQ ID NO: 382664 - RNA, 19 nt, Homo sapiens
  misc_RNA (1)...(19): siRNA sense strand
cuucaaagauucaaaguug

SEQ ID NO: 382665 - RNA, 19 nt, Homo sapiens
  misc_RNA (1)...(19): siRNA sense strand
cauagaagcugucaccaau

SEQ ID NO: 382666 - RNA, 19 nt, Homo sapiens
  misc_RNA (1)...(19): siRNA sense strand
ggacggcccuggaggaaau

SEQ ID NO: 382667 - RNA, 19 nt, Homo sapiens
  misc_RNA (1)...(19): siRNA sense strand
gaucaggucuuuaucuucu

SEQ ID NO: 382668 - RNA, 19 nt, Homo sapiens
  misc_RNA (1)...(19): siRNA sense strand
gaagaagacagucaaggaa

SEQ ID NO: 382669 - RNA, 19 nt, Homo sapiens
  misc_RNA (1)...(19): siRNA sense strand
gaaagggaccgacgucaug

SEQ ID NO: 382670 - RNA, 19 nt, Homo sapiens
  misc_RNA (1)...(19): siRNA sense strand
guacauuuccugcguguuu

SEQ ID NO: 382671 - RNA, 19 nt, Homo sapiens
  misc_RNA (1)...(19): siRNA sense strand
gaucuuggaagccauuaua

SEQ ID NO: 382672 - RNA, 19 nt, Homo sapiens
  misc_RNA (1)...(19): siRNA sense strand
gcaauguccucaacaccaa

SEQ ID NO: 382673 - RNA, 19 nt, Homo sapiens
  misc_RNA (1)...(19): siRNA sense strand
guggaaaguuguaaaccua

SEQ ID NO: 382674 - RNA, 19 nt, Homo sapiens
  misc_RNA (1)...(19): siRNA sense strand
gaagaggugacuaugauga

SEQ ID NO: 382675 - RNA, 19 nt, Homo sapiens
  misc_RNA (1)...(19): siRNA sense strand
aggccuaucucaacuauaa

SEQ ID NO: 382676 - RNA, 19 nt, Homo sapiens
  misc_RNA (1)...(19): siRNA sense strand
ggaccacugucauucaaga

SEQ ID NO: 382677 - RNA, 19 nt, Homo sapiens
  misc_RNA (1)...(19): siRNA sense strand
gaauguggaccuuguaaga

SEQ ID NO: 382678 - RNA, 19 nt, Homo sapiens
  misc_RNA (1)...(19): siRNA sense strand
gaaggaauuuaaacggaau

SEQ ID NO: 382679 - RNA, 19 nt, Homo sapiens
  misc_RNA (1)...(19): siRNA sense strand
ggcagcagcuucuguacaa

SEQ ID NO: 382680 - RNA, 19 nt, Homo sapiens
  misc_RNA (1)...(19): siRNA sense strand
ggauaaagcacuuguugga

SEQ ID NO: 382681 - RNA, 19 nt, Homo sapiens
  misc_RNA (1)...(19): siRNA sense strand
aacagcagguugaauauuu

SEQ ID NO: 382682 - RNA, 19 nt, Homo sapiens
  misc_RNA (1)...(19): siRNA sense strand
ggaccagccugaucguuuc

SEQ ID NO: 382683 - RNA, 19 nt, Homo sapiens
  misc_RNA (1)...(19): siRNA sense strand
gcucaugccgcuacuuuaa

SEQ ID NO: 382684 - RNA, 19 nt, Homo sapiens
  misc_RNA (1)...(19): siRNA sense strand
cggaagcgcuggcugagaa

SEQ ID NO: 382685 - RNA, 19 nt, Homo sapiens
  misc_RNA (1)...(19): siRNA sense strand
ucaagcugcugaaggaauu

SEQ ID NO: 382686 - RNA, 19 nt, Homo sapiens
  misc_RNA (1)...(19): siRNA sense strand
ggaaagggacugugagagu

SEQ ID NO: 382687 - RNA, 19 nt, Homo sapiens
  misc_RNA (1)...(19): siRNA sense strand
uacaagaggcguuacauuu

SEQ ID NO: 382688 - RNA, 19 nt, Homo sapiens
  misc_RNA (1)...(19): siRNA sense strand
gagaguuuauucacgauuc

SEQ ID NO: 382689 - RNA, 19 nt, Homo sapiens
  misc_RNA (1)...(19): siRNA sense strand
gaccgaaaccggagaguga

SEQ ID NO: 382690 - RNA, 19 nt, Homo sapiens
  misc_RNA (1)...(19): siRNA sense strand
ccacagggacuucggcuuu

SEQ ID NO: 382691 - RNA, 19 nt, Homo sapiens
  misc_RNA (1)...(19): siRNA sense strand
acaaaccacacgaaacuua

SEQ ID NO: 382692 - RNA, 19 nt, Homo sapiens
  misc_RNA (1)...(19): siRNA sense strand
gaggucaacuggaacaagu

SEQ ID NO: 382693 - RNA, 19 nt, Homo sapiens
  misc_RNA (1)...(19): siRNA sense strand
uuaagcgucuguaccagua

SEQ ID NO: 382694 - RNA, 19 nt, Homo sapiens
  misc_RNA (1)...(19): siRNA sense strand
gccgugaggugguggauga

SEQ ID NO: 382695 - RNA, 19 nt, Homo sapiens
  misc_RNA (1)...(19): siRNA sense strand
gaacggagaacgauaaagc

SEQ ID NO: 382696 - RNA, 19 nt, Homo sapiens
  misc_RNA (1)...(19): siRNA sense strand
gcagagggucccagaaaga

SEQ ID NO: 382697 - RNA, 19 nt, Homo sapiens
  misc_RNA (1)...(19): siRNA sense strand
caagagauccacccugaau

SEQ ID NO: 382698 - RNA, 19 nt, Homo sapiens
  misc_RNA (1)...(19): siRNA sense strand
ggaugaagaggaugacuug

SEQ ID NO: 382699 - RNA, 19 nt, Homo sapiens
  misc_RNA (1)...(19): siRNA sense strand
gaugaaguccuaccaguca

SEQ ID NO: 382700 - RNA, 19 nt, Homo sapiens
  misc_RNA (1)...(19): siRNA sense strand
gaagagcucgcuacauagu

SEQ ID NO: 382701 - RNA, 19 nt, Homo sapiens
  misc_RNA (1)...(19): siRNA sense strand
gaaagaagaaaggagaguu

SEQ ID NO: 382702 - RNA, 19 nt, Homo sapiens
  misc_RNA (1)...(19): siRNA sense strand
gaaggacccugggaagaag

SEQ ID NO: 382703 - RNA, 19 nt, Homo sapiens
  misc_RNA (1)...(19): siRNA sense strand
gcugagugcuuccucuaga

SEQ ID NO: 382704 - RNA, 19 nt, Homo sapiens
  misc_RNA (1)...(19): siRNA sense strand
cagcagggacagccucuua

SEQ ID NO: 382705 - RNA, 19 nt, Homo sapiens
  misc_RNA (1)...(19): siRNA sense strand
cugggaagcugcacuauca

SEQ ID NO: 382706 - RNA, 19 nt, Homo sapiens
  misc_RNA (1)...(19): siRNA sense strand
acagucagaugaaguccua

SEQ ID NO: 382707 - RNA, 19 nt, Homo sapiens
  misc_RNA (1)...(19): siRNA sense strand
cagugaggcuccagacauu

SEQ ID NO: 382708 - RNA, 19 nt, Homo sapiens
  misc_RNA (1)...(19): siRNA sense strand
ucaaaguugucaagggauu

SEQ ID NO: 382709 - RNA, 19 nt, Homo sapiens
  misc_RNA (1)...(19): siRNA sense strand
gaaauccgaguggcuauga

SEQ ID NO: 382710 - RNA, 19 nt, Homo sapiens
  misc_RNA (1)...(19): siRNA sense strand
acaaugcagucccauguga

SEQ ID NO: 382711 - RNA, 19 nt, Homo sapiens
  misc_RNA (1)...(19): siRNA sense strand
gaacccaacguguccuuug

SEQ ID NO: 382712 - RNA, 19 nt, Homo sapiens
  misc_RNA (1)...(19): siRNA sense strand
gauaauaacgagcccacaa

SEQ ID NO: 382713 - RNA, 19 nt, Homo sapiens
  misc_RNA (1)...(19): siRNA sense strand
guacaaggaccacguucuu

SEQ ID NO: 382714 - RNA, 19 nt, Homo sapiens
  misc_RNA (1)...(19): siRNA sense strand
ucgaagaggugacuaugau

SEQ ID NO: 382715 - RNA, 19 nt, Homo sapiens
  misc_RNA (1)...(19): siRNA sense strand
guacaagaggcguuacauu

SEQ ID NO: 382716 - RNA, 19 nt, Homo sapiens
  misc_RNA (1)...(19): siRNA sense strand
ugucaccaaucuucgcuua

SEQ ID NO: 382717 - RNA, 19 nt, Homo sapiens
  misc_RNA (1)...(19): siRNA sense strand
caacaguggugacauagcu

SEQ ID NO: 382718 - RNA, 19 nt, Homo sapiens
  misc_RNA (1)...(19): siRNA sense strand
caagacaaaccacacgaaa

SEQ ID NO: 382719 - RNA, 19 nt, Homo sapiens
  misc_RNA (1)...(19): siRNA sense strand
gcacggagucauuccaguu

SEQ ID NO: 382720 - RNA, 19 nt, Homo sapiens
  misc_RNA (1)...(19): siRNA sense strand
uaaccccgcuuagaaauua

SEQ ID NO: 382721 - RNA, 19 nt, Homo sapiens
  misc_RNA (1)...(19): siRNA sense strand
ccaaugacaucagaaccaa

SEQ ID NO: 382722 - RNA, 19 nt, Homo sapiens
  misc_RNA (1)...(19): siRNA sense strand
gaaaguggacggaugaaaa

SEQ ID NO: 382723 - RNA, 19 nt, Homo sapiens
  misc_RNA (1)...(19): siRNA sense strand
ucacaccacugcuuucaag

SEQ ID NO: 382724 - RNA, 19 nt, Homo sapiens
  misc_RNA (1)...(19): siRNA sense strand
ugacgaggaugaagaggau

SEQ ID NO: 382725 - RNA, 19 nt, Homo sapiens
  misc_RNA (1)...(19): siRNA sense strand
ggaccacguucuugugaag

SEQ ID NO: 382726 - RNA, 19 nt, Homo sapiens
  misc_RNA (1)...(19): siRNA sense strand
ggaauucuaaccuugaaau

SEQ ID NO: 382727 - RNA, 19 nt, Homo sapiens
  misc_RNA (1)...(19): siRNA sense strand
gaauuuguggagaagcuua

SEQ ID NO: 382728 - RNA, 19 nt, Homo sapiens
  misc_RNA (1)...(19): siRNA sense strand
ggacaaccuggaggaauuu

SEQ ID NO: 382729 - RNA, 19 nt, Homo sapiens
  misc_RNA (1)...(19): siRNA sense strand
uggacaaccuggaggaauu

SEQ ID NO: 382730 - RNA, 19 nt, Homo sapiens
  misc_RNA (1)...(19): siRNA sense strand
gaggagguccggauggaaa

SEQ ID NO: 382731 - RNA, 19 nt, Homo sapiens
  misc_RNA (1)...(19): siRNA sense strand
caaauacgacauccucaug

SEQ ID NO: 382732 - RNA, 19 nt, Homo sapiens
  misc_RNA (1)...(19): siRNA sense strand
ggucaacuccugccagaug

SEQ ID NO: 382733 - RNA, 19 nt, Homo sapiens
  misc_RNA (1)...(19): siRNA sense strand
ccaacuaccugcugaugag

SEQ ID NO: 382734 - RNA, 19 nt, Homo sapiens
  misc_RNA (1)...(19): siRNA sense strand
uggagaagcuuaaagaaaa

SEQ ID NO: 382735 - RNA, 19 nt, Homo sapiens
  misc_RNA (1)...(19): siRNA sense strand
gggaagaagaucaagagaa

SEQ ID NO: 382736 - RNA, 19 nt, Homo sapiens
  misc_RNA (1)...(19): siRNA sense strand
ccauucauaugaucuuaga

SEQ ID NO: 382737 - RNA, 19 nt, Homo sapiens
  misc_RNA (1)...(19): siRNA sense strand
ucaccaaucuucgcuuaau

SEQ ID NO: 382738 - RNA, 19 nt, Homo sapiens
  misc_RNA (1)...(19): siRNA sense strand
ccacggagacaguguaugu

SEQ ID NO: 382739 - RNA, 19 nt, Homo sapiens
  misc_RNA (1)...(19): siRNA sense strand
gagcccaccuuggacugua

SEQ ID NO: 382740 - RNA, 19 nt, Homo sapiens
  misc_RNA (1)...(19): siRNA sense strand
guggagaagcuuaaagaaa

SEQ ID NO: 382741 - RNA, 19 nt, Homo sapiens
  misc_RNA (1)...(19): siRNA sense strand
ggagaagcuuucggucaug

SEQ ID NO: 382742 - RNA, 19 nt, Homo sapiens
  misc_RNA (1)...(19): siRNA sense strand
guaccaggauaaagcacuu

SEQ ID NO: 382743 - RNA, 19 nt, Homo sapiens
  misc_RNA (1)...(19): siRNA sense strand
ggugaaggguccauuuguc

SEQ ID NO: 382744 - RNA, 19 nt, Homo sapiens
  misc_RNA (1)...(19): siRNA sense strand
ugaacgacccgcugaagaa

SEQ ID NO: 382745 - RNA, 19 nt, Homo sapiens
  misc_RNA (1)...(19): siRNA sense strand
gaaggcguguccaccaagu

SEQ ID NO: 382746 - RNA, 19 nt, Homo sapiens
  misc_RNA (1)...(19): siRNA sense strand
aaaccuacacccauugaaa

SEQ ID NO: 382747 - RNA, 19 nt, Homo sapiens
  misc_RNA (1)...(19): siRNA sense strand
ugggaaagcugagggaaga

SEQ ID NO: 382748 - RNA, 19 nt, Homo sapiens
  misc_RNA (1)...(19): siRNA sense strand
gccaauguccuaccagcua

SEQ ID NO: 382749 - RNA, 19 nt, Homo sapiens
  misc_RNA (1)...(19): siRNA sense strand
ggaggucgguggcaacacu

SEQ ID NO: 382750 - RNA, 19 nt, Homo sapiens
  misc_RNA (1)...(19): siRNA sense strand
gcuacuaccuggccaauaa

SEQ ID NO: 382751 - RNA, 19 nt, Homo sapiens
  misc_RNA (1)...(19): siRNA sense strand
gacggagccugaccucuua

SEQ ID NO: 382752 - RNA, 19 nt, Homo sapiens
  misc_RNA (1)...(19): siRNA sense strand
gaggaugccuucaacuuca

SEQ ID NO: 382753 - RNA, 19 nt, Homo sapiens
  misc_RNA (1)...(19): siRNA sense strand
ggacggagccugaccucuu

SEQ ID NO: 382754 - RNA, 19 nt, Homo sapiens
  misc_RNA (1)...(19): siRNA sense strand
ucauguccaucguguguua

SEQ ID NO: 382755 - RNA, 19 nt, Homo sapiens
  misc_RNA (1)...(19): siRNA sense strand
gggccuggcugggaucuuu

SEQ ID NO: 382756 - RNA, 19 nt, Homo sapiens
  misc_RNA (1)...(19): siRNA sense strand
agaaggagccggaaucaga

SEQ ID NO: 382757 - RNA, 19 nt, Homo sapiens
  misc_RNA (1)...(19): siRNA sense strand
gccuucaacuucaacaauu

SEQ ID NO: 382758 - RNA, 19 nt, Homo sapiens
  misc_RNA (1)...(19): siRNA sense strand
gaaguuugcccgcuacuac

SEQ ID NO: 382759 - RNA, 19 nt, Homo sapiens
  misc_RNA (1)...(19): siRNA sense strand
ggacccuucuucuccauca

SEQ ID NO: 382760 - RNA, 19 nt, Homo sapiens
  misc_RNA (1)...(19): siRNA sense strand
gcaccaugcccuccaccua

SEQ ID NO: 382761 - RNA, 19 nt, Homo sapiens
  misc_RNA (1)...(19): siRNA sense strand
ggaaguggagucaguucuu

SEQ ID NO: 382762 - RNA, 19 nt, Homo sapiens
  misc_RNA (1)...(19): siRNA sense strand
gagccugccucaccugaag

SEQ ID NO: 382763 - RNA, 19 nt, Homo sapiens
  misc_RNA (1)...(19): siRNA sense strand
gcucugacccuggaucuug

SEQ ID NO: 382764 - RNA, 19 nt, Homo sapiens
  misc_RNA (1)...(19): siRNA sense strand
gagccugaccucuuacuuc

SEQ ID NO: 382765 - RNA, 19 nt, Homo sapiens
  misc_RNA (1)...(19): siRNA sense strand
ggagaaggagccggaauca

SEQ ID NO: 382766 - RNA, 19 nt, Homo sapiens
  misc_RNA (1)...(19): siRNA sense strand
cucaggagcuggagaccaa

SEQ ID NO: 382767 - RNA, 19 nt, Homo sapiens
  misc_RNA (1)...(19): siRNA sense strand
cgaggaugccuucaacuuc

SEQ ID NO: 382768 - RNA, 19 nt, Homo sapiens
  misc_RNA (1)...(19): siRNA sense strand
gcucuuugccguuucuaau

SEQ ID NO: 382769 - RNA, 19 nt, Homo sapiens
  misc_RNA (1)...(19): siRNA sense strand
guguuggucuucacaguca

SEQ ID NO: 382770 - RNA, 19 nt, Homo sapiens
  misc_RNA (1)...(19): siRNA sense strand
cuaccuggccaauaaauca

SEQ ID NO: 382771 - RNA, 19 nt, Homo sapiens
  misc_RNA (1)...(19): siRNA sense strand
ggaaucagagccagaugag

SEQ ID NO: 382772 - RNA, 19 nt, Homo sapiens
  misc_RNA (1)...(19): siRNA sense strand
ucaccgccaucccguacuu

SEQ ID NO: 382773 - RNA, 19 nt, Homo sapiens
  misc_RNA (1)...(19): siRNA sense strand
ccuucaacuucaacaauug

SEQ ID NO: 382774 - RNA, 19 nt, Homo sapiens
  misc_RNA (1)...(19): siRNA sense strand
cccuggaacuucuucauca

SEQ ID NO: 382775 - RNA, 19 nt, Homo sapiens
  misc_RNA (1)...(19): siRNA sense strand
gagcuccuccagucugaug

SEQ ID NO: 382776 - RNA, 19 nt, Homo sapiens
  misc_RNA (1)...(19): siRNA sense strand
aggaaaaccuucagucuuc

SEQ ID NO: 382777 - RNA, 19 nt, Homo sapiens
  misc_RNA (1)...(19): siRNA sense strand
ccucaacuccuuccuguac

SEQ ID NO: 382778 - RNA, 19 nt, Homo sapiens
  misc_RNA (1)...(19): siRNA sense strand
ccgaggaugccuucaacuu

SEQ ID NO: 382779 - RNA, 19 nt, Homo sapiens
  misc_RNA (1)...(19): siRNA sense strand
ccauacugcugcucuuugc

SEQ ID NO: 382780 - RNA, 19 nt, Homo sapiens
  misc_RNA (1)...(19): siRNA sense strand
gcugcuuccuccucuucaa

SEQ ID NO: 382781 - RNA, 19 nt, Homo sapiens
  misc_RNA (1)...(19): siRNA sense strand
ccugggaaguggagucagu

SEQ ID NO: 382782 - RNA, 19 nt, Homo sapiens
  misc_RNA (1)...(19): siRNA sense strand
cggaaucagagccagauga

SEQ ID NO: 382783 - RNA, 19 nt, Homo sapiens
  misc_RNA (1)...(19): siRNA sense strand
gcucuucacccuccucaac

SEQ ID NO: 382784 - RNA, 19 nt, Homo sapiens
  misc_RNA (1)...(19): siRNA sense strand
ccucauguccaucgugugu

SEQ ID NO: 382785 - RNA, 19 nt, Homo sapiens
  misc_RNA (1)...(19): siRNA sense strand
ggccauacugcugcucuuu

SEQ ID NO: 382786 - RNA, 19 nt, Homo sapiens
  misc_RNA (1)...(19): siRNA sense strand
cccacaggaugccuacuuc

SEQ ID NO: 382787 - RNA, 19 nt, Homo sapiens
  misc_RNA (1)...(19): siRNA sense strand
ggaaaaccuucagucuuca

SEQ ID NO: 382788 - RNA, 19 nt, Homo sapiens
  misc_RNA (1)...(19): siRNA sense strand
gccauacugcugcucuuug

SEQ ID NO: 382789 - RNA, 19 nt, Homo sapiens
  misc_RNA (1)...(19): siRNA sense strand
gagccucccucuccuuccu

SEQ ID NO: 382790 - RNA, 19 nt, Homo sapiens
  misc_RNA (1)...(19): siRNA sense strand
ggaggaggcagccauaguu

SEQ ID NO: 382791 - RNA, 19 nt, Homo sapiens
  misc_RNA (1)...(19): siRNA sense strand
ggacacagaggucaaugag

SEQ ID NO: 382792 - RNA, 19 nt, Homo sapiens
  misc_RNA (1)...(19): siRNA sense strand
gcugcucucucccaugaug

SEQ ID NO: 382793 - RNA, 19 nt, Homo sapiens
  misc_RNA (1)...(19): siRNA sense strand
gaggaggcagccauaguug

SEQ ID NO: 382794 - RNA, 19 nt, Homo sapiens
  misc_RNA (1)...(19): siRNA sense strand
gaaggccuccugccagaag

SEQ ID NO: 382795 - RNA, 19 nt, Homo sapiens
  misc_RNA (1)...(19): siRNA sense strand
gccgacauuuggacacaga

SEQ ID NO: 382796 - RNA, 19 nt, Homo sapiens
  misc_RNA (1)...(19): siRNA sense strand
acucuaccauggcuacuau

SEQ ID NO: 382797 - RNA, 19 nt, Homo sapiens
  misc_RNA (1)...(19): siRNA sense strand
ggaggcagccauaguugag

SEQ ID NO: 382798 - RNA, 19 nt, Homo sapiens
  misc_RNA (1)...(19): siRNA sense strand
gggcaaguuccaggcauuu

SEQ ID NO: 382799 - RNA, 19 nt, Homo sapiens
  misc_RNA (1)...(19): siRNA sense strand
gcaaguuccaggcauuucu

SEQ ID NO: 382800 - RNA, 19 nt, Homo sapiens
  misc_RNA (1)...(19): siRNA sense strand
caccgccgaguacgaauuu

SEQ ID NO: 382801 - RNA, 19 nt, Homo sapiens
  misc_RNA (1)...(19): siRNA sense strand
agaggaggaggcagccaua

SEQ ID NO: 382802 - RNA, 19 nt, Homo sapiens
  misc_RNA (1)...(19): siRNA sense strand
ccagacgaggugacuguga

SEQ ID NO: 382803 - RNA, 19 nt, Homo sapiens
  misc_RNA (1)...(19): siRNA sense strand
caaauugggugcugcuaua

SEQ ID NO: 382804 - RNA, 19 nt, Homo sapiens
  misc_RNA (1)...(19): siRNA sense strand
gcaaaagucuuccaaguaa

SEQ ID NO: 382805 - RNA, 19 nt, Homo sapiens
  misc_RNA (1)...(19): siRNA sense strand
ucucagacguucagauuua

SEQ ID NO: 382806 - RNA, 19 nt, Homo sapiens
  misc_RNA (1)...(19): siRNA sense strand
acguaaagcugaagaguua

SEQ ID NO: 382807 - RNA, 19 nt, Homo sapiens
  misc_RNA (1)...(19): siRNA sense strand
guccagagcuugacuguga

SEQ ID NO: 382808 - RNA, 19 nt, Homo sapiens
  misc_RNA (1)...(19): siRNA sense strand
ugaagaaggugaagaggaa

SEQ ID NO: 382809 - RNA, 19 nt, Homo sapiens
  misc_RNA (1)...(19): siRNA sense strand
gauaaucucuuccgugucu

SEQ ID NO: 382810 - RNA, 19 nt, Homo sapiens
  misc_RNA (1)...(19): siRNA sense strand
gagcgaaggugugcuuuga

SEQ ID NO: 382811 - RNA, 19 nt, Homo sapiens
  misc_RNA (1)...(19): siRNA sense strand
gagagaaguuaguugaaga

SEQ ID NO: 382812 - RNA, 19 nt, Homo sapiens
  misc_RNA (1)...(19): siRNA sense strand
gaagaagccuuggagaaag

SEQ ID NO: 382813 - RNA, 19 nt, Homo sapiens
  misc_RNA (1)...(19): siRNA sense strand
cgaaacaacugcuccaucu

SEQ ID NO: 382814 - RNA, 19 nt, Homo sapiens
  misc_RNA (1)...(19): siRNA sense strand
ggagagaaguuaguugaag

SEQ ID NO: 382815 - RNA, 19 nt, Homo sapiens
  misc_RNA (1)...(19): siRNA sense strand
ggaauucaguaaagagcuu

SEQ ID NO: 382816 - RNA, 19 nt, Homo sapiens
  misc_RNA (1)...(19): siRNA sense strand
gcgaaggugugcuuugaga

SEQ ID NO: 382817 - RNA, 19 nt, Homo sapiens
  misc_RNA (1)...(19): siRNA sense strand
gaauacauaccaaacaaug

SEQ ID NO: 382818 - RNA, 19 nt, Homo sapiens
  misc_RNA (1)...(19): siRNA sense strand
caaaugaagugugaagaca

SEQ ID NO: 382819 - RNA, 19 nt, Homo sapiens
  misc_RNA (1)...(19): siRNA sense strand
ugaagaagccuuggagaaa

SEQ ID NO: 382820 - RNA, 19 nt, Homo sapiens
  misc_RNA (1)...(19): siRNA sense strand
ccaaagaacccagaauuca

SEQ ID NO: 382821 - RNA, 19 nt, Homo sapiens
  misc_RNA (1)...(19): siRNA sense strand
ccucaucccuucagcauca

SEQ ID NO: 382822 - RNA, 19 nt, Homo sapiens
  misc_RNA (1)...(19): siRNA sense strand
guaaugaaucuaagagaga

SEQ ID NO: 382823 - RNA, 19 nt, Homo sapiens
  misc_RNA (1)...(19): siRNA sense strand
gcccuggaaugcuuacgua

SEQ ID NO: 382824 - RNA, 19 nt, Homo sapiens
  misc_RNA (1)...(19): siRNA sense strand
gaugaaagacaaacugcaa

SEQ ID NO: 382825 - RNA, 19 nt, Homo sapiens
  misc_RNA (1)...(19): siRNA sense strand
gaaaucaagggagaaagaa

SEQ ID NO: 382826 - RNA, 19 nt, Homo sapiens
  misc_RNA (1)...(19): siRNA sense strand
uaagaugcgugaagaaggu

SEQ ID NO: 382827 - RNA, 19 nt, Homo sapiens
  misc_RNA (1)...(19): siRNA sense strand
gaaaagaaaguuacuggaa

SEQ ID NO: 382828 - RNA, 19 nt, Homo sapiens
  misc_RNA (1)...(19): siRNA sense strand
cuaccugcauugccaaauu

SEQ ID NO: 382829 - RNA, 19 nt, Homo sapiens
  misc_RNA (1)...(19): siRNA sense strand
ggagaaagccccaggugua

SEQ ID NO: 382830 - RNA, 19 nt, Homo sapiens
  misc_RNA (1)...(19): siRNA sense strand
uaaagagcuuacuccugua

SEQ ID NO: 382831 - RNA, 19 nt, Homo sapiens
  misc_RNA (1)...(19): siRNA sense strand
ggccauccaccacuuuaua

SEQ ID NO: 382832 - RNA, 19 nt, Homo sapiens
  misc_RNA (1)...(19): siRNA sense strand
uagcagaucaguaugaaga

SEQ ID NO: 382833 - RNA, 19 nt, Homo sapiens
  misc_RNA (1)...(19): siRNA sense strand
caaaaggaauucaguaaag

SEQ ID NO: 382834 - RNA, 19 nt, Homo sapiens
  misc_RNA (1)...(19): siRNA sense strand
ggaaggguggacacgguua

SEQ ID NO: 382835 - RNA, 19 nt, Homo sapiens
  misc_RNA (1)...(19): siRNA sense strand
gcaacaagcagaugaagac

SEQ ID NO: 382836 - RNA, 19 nt, Homo sapiens
  misc_RNA (1)...(19): siRNA sense strand
gaaggguggacacgguuaa

SEQ ID NO: 382837 - RNA, 19 nt, Homo sapiens
  misc_RNA (1)...(19): siRNA sense strand
gaaaacuccuuggaugauu

SEQ ID NO: 382838 - RNA, 19 nt, Homo sapiens
  misc_RNA (1)...(19): siRNA sense strand
cugaugaggccaaugauaa

SEQ ID NO: 382839 - RNA, 19 nt, Homo sapiens
  misc_RNA (1)...(19): siRNA sense strand
gaauucaaagccacaaugu

SEQ ID NO: 382840 - RNA, 19 nt, Homo sapiens
  misc_RNA (1)...(19): siRNA sense strand
acaagcagaugaagacucu

SEQ ID NO: 382841 - RNA, 19 nt, Homo sapiens
  misc_RNA (1)...(19): siRNA sense strand
gcugaugaggccaaugaua

SEQ ID NO: 382842 - RNA, 19 nt, Homo sapiens
  misc_RNA (1)...(19): siRNA sense strand
cauuucaccuggaacuuga

SEQ ID NO: 382843 - RNA, 19 nt, Homo sapiens
  misc_RNA (1)...(19): siRNA sense strand
gaaggagagaaguuaguug

SEQ ID NO: 382844 - RNA, 19 nt, Homo sapiens
  misc_RNA (1)...(19): siRNA sense strand
gaaacuaugccugggucua

SEQ ID NO: 382845 - RNA, 19 nt, Homo sapiens
  misc_RNA (1)...(19): siRNA sense strand
gaaggugugcuuugagaag

SEQ ID NO: 382846 - RNA, 19 nt, Homo sapiens
  misc_RNA (1)...(19): siRNA sense strand
gaaagcugaugaggccaau

SEQ ID NO: 382847 - RNA, 19 nt, Homo sapiens
  misc_RNA (1)...(19): siRNA sense strand
ugacaaccaguaccuuaaa

SEQ ID NO: 382848 - RNA, 19 nt, Homo sapiens
  misc_RNA (1)...(19): siRNA sense strand
gcaaccuacuggccuaucu

SEQ ID NO: 382849 - RNA, 19 nt, Homo sapiens
  misc_RNA (1)...(19): siRNA sense strand
gaauggagaauagagaugu

SEQ ID NO: 382850 - RNA, 19 nt, Homo sapiens
  misc_RNA (1)...(19): siRNA sense strand
ggccaaugauaaucucuuc

SEQ ID NO: 382851 - RNA, 19 nt, Homo sapiens
  misc_RNA (1)...(19): siRNA sense strand
ucacaugggccgacucuca

SEQ ID NO: 382852 - RNA, 19 nt, Homo sapiens
  misc_RNA (1)...(19): siRNA sense strand
agacaaagcgauugaacug

SEQ ID NO: 382853 - RNA, 19 nt, Homo sapiens
  misc_RNA (1)...(19): siRNA sense strand
gugagaacaauaagaauuc

SEQ ID NO: 382854 - RNA, 19 nt, Homo sapiens
  misc_RNA (1)...(19): siRNA sense strand
aaacgaggcagcccuggaa

SEQ ID NO: 382855 - RNA, 19 nt, Homo sapiens
  misc_RNA (1)...(19): siRNA sense strand
uuucagcuguaccaaauga

SEQ ID NO: 382856 - RNA, 19 nt, Homo sapiens
  misc_RNA (1)...(19): siRNA sense strand
gacaaccaguaccuuaaag

SEQ ID NO: 382857 - RNA, 19 nt, Homo sapiens
  misc_RNA (1)...(19): siRNA sense strand
ccugacaaccaguaccuua

SEQ ID NO: 382858 - RNA, 19 nt, Homo sapiens
  misc_RNA (1)...(19): siRNA sense strand
gccaaagaacccagaauuc

SEQ ID NO: 382859 - RNA, 19 nt, Homo sapiens
  misc_RNA (1)...(19): siRNA sense strand
ggaggaaaccaaaaugaaa

SEQ ID NO: 382860 - RNA, 19 nt, Homo sapiens
  misc_RNA (1)...(19): siRNA sense strand
uccagucccuauagaauug

SEQ ID NO: 382861 - RNA, 19 nt, Homo sapiens
  misc_RNA (1)...(19): siRNA sense strand
acaauaagaauuccuugga

SEQ ID NO: 382862 - RNA, 19 nt, Homo sapiens
  misc_RNA (1)...(19): siRNA sense strand
agaaaucaagggagaaaga

SEQ ID NO: 382863 - RNA, 19 nt, Homo sapiens
  misc_RNA (1)...(19): siRNA sense strand
gcagugcagccaaguuuua

SEQ ID NO: 382864 - RNA, 19 nt, Homo sapiens
  misc_RNA (1)...(19): siRNA sense strand
ucagauuuauguagacaag

SEQ ID NO: 382865 - RNA, 19 nt, Homo sapiens
  misc_RNA (1)...(19): siRNA sense strand
ggaauggagaauagagaug

SEQ ID NO: 382866 - RNA, 19 nt, Homo sapiens
  misc_RNA (1)...(19): siRNA sense strand
gaauucaguaaagagcuua

SEQ ID NO: 382867 - RNA, 19 nt, Homo sapiens
  misc_RNA (1)...(19): siRNA sense strand
ccaaguaaugaaucuaaga

SEQ ID NO: 382868 - RNA, 19 nt, Homo sapiens
  misc_RNA (1)...(19): siRNA sense strand
uaccugcauugccaaauug

SEQ ID NO: 382869 - RNA, 19 nt, Homo sapiens
  misc_RNA (1)...(19): siRNA sense strand
gaaaagaugagccagacaa

SEQ ID NO: 382870 - RNA, 19 nt, Homo sapiens
  misc_RNA (1)...(19): siRNA sense strand
guuaaaguguggaggaaac

SEQ ID NO: 382871 - RNA, 19 nt, Homo sapiens
  misc_RNA (1)...(19): siRNA sense strand
uguaccaaaugaaguguga

SEQ ID NO: 382872 - RNA, 19 nt, Homo sapiens
  misc_RNA (1)...(19): siRNA sense strand
ccagaaaucaagggagaaa

SEQ ID NO: 382873 - RNA, 19 nt, Homo sapiens
  misc_RNA (1)...(19): siRNA sense strand
cuggaaugcuuacguaaag

SEQ ID NO: 382874 - RNA, 19 nt, Homo sapiens
  misc_RNA (1)...(19): siRNA sense strand
ggacaacuggccaccaucu

SEQ ID NO: 382875 - RNA, 19 nt, Homo sapiens
  misc_RNA (1)...(19): siRNA sense strand
agaaggcucuggaaaagaa

SEQ ID NO: 382876 - RNA, 19 nt, Homo sapiens
  misc_RNA (1)...(19): siRNA sense strand
guaaagcugaagaguuaau

SEQ ID NO: 382877 - RNA, 19 nt, Homo sapiens
  misc_RNA (1)...(19): siRNA sense strand
gcuuacuccuguagcgaaa

SEQ ID NO: 382878 - RNA, 19 nt, Homo sapiens
  misc_RNA (1)...(19): siRNA sense strand
acaaggccauccaccacuu

SEQ ID NO: 382879 - RNA, 19 nt, Homo sapiens
  misc_RNA (1)...(19): siRNA sense strand
ugaccaggcagaaaucaga

SEQ ID NO: 382880 - RNA, 19 nt, Homo sapiens
  misc_RNA (1)...(19): siRNA sense strand
ucuagcagaucaguaugaa

SEQ ID NO: 382881 - RNA, 19 nt, Homo sapiens
  misc_RNA (1)...(19): siRNA sense strand
ggcaaaagucuuccaagua

SEQ ID NO: 382882 - RNA, 19 nt, Homo sapiens
  misc_RNA (1)...(19): siRNA sense strand
gagaaaacuccuuggauga

SEQ ID NO: 382883 - RNA, 19 nt, Homo sapiens
  misc_RNA (1)...(19): siRNA sense strand
aggcagcccuggaaugcuu

SEQ ID NO: 382884 - RNA, 19 nt, Homo sapiens
  misc_RNA (1)...(19): siRNA sense strand
gggcaaaagucuuccaagu

SEQ ID NO: 382885 - RNA, 19 nt, Homo sapiens
  misc_RNA (1)...(19): siRNA sense strand
aaggagagaaguuaguuga

SEQ ID NO: 382886 - RNA, 19 nt, Homo sapiens
  misc_RNA (1)...(19): siRNA sense strand
ugaagaggaaggugaagga

SEQ ID NO: 382887 - RNA, 19 nt, Homo sapiens
  misc_RNA (1)...(19): siRNA sense strand
caaccaguaccuuaaaguc

SEQ ID NO: 382888 - RNA, 19 nt, Homo sapiens
  misc_RNA (1)...(19): siRNA sense strand
caaccuacuggccuaucua

SEQ ID NO: 382889 - RNA, 19 nt, Homo sapiens
  misc_RNA (1)...(19): siRNA sense strand
gcuaccgucuggacaacug

SEQ ID NO: 382890 - RNA, 19 nt, Homo sapiens
  misc_RNA (1)...(19): siRNA sense strand
caagcuaccgucuggacaa

SEQ ID NO: 382891 - RNA, 19 nt, Homo sapiens
  misc_RNA (1)...(19): siRNA sense strand
acaugucugugagaaguuu

SEQ ID NO: 382892 - RNA, 19 nt, Homo sapiens
  misc_RNA (1)...(19): siRNA sense strand
gaacuugauggagggagaa

SEQ ID NO: 382893 - RNA, 19 nt, Homo sapiens
  misc_RNA (1)...(19): siRNA sense strand
ugaaggagagaaguuaguu

SEQ ID NO: 382894 - RNA, 19 nt, Homo sapiens
  misc_RNA (1)...(19): siRNA sense strand
cuacuggccuaucuaaagc

SEQ ID NO: 382895 - RNA, 19 nt, Homo sapiens
  misc_RNA (1)...(19): siRNA sense strand
aaugaagugugaagacaag

SEQ ID NO: 382896 - RNA, 19 nt, Homo sapiens
  misc_RNA (1)...(19): siRNA sense strand
acuuucagcuguaccaaau

SEQ ID NO: 382897 - RNA, 19 nt, Homo sapiens
  misc_RNA (1)...(19): siRNA sense strand
gaaacaacugcuccaucug

SEQ ID NO: 382898 - RNA, 19 nt, Homo sapiens
  misc_RNA (1)...(19): siRNA sense strand
aagcugaugaggccaauga

SEQ ID NO: 382899 - RNA, 19 nt, Homo sapiens
  misc_RNA (1)...(19): siRNA sense strand
ucgcagugcagccaaguuu

SEQ ID NO: 382900 - RNA, 19 nt, Homo sapiens
  misc_RNA (1)...(19): siRNA sense strand
gcuuuagaauacauaccaa

SEQ ID NO: 382901 - RNA, 19 nt, Homo sapiens
  misc_RNA (1)...(19): siRNA sense strand
caaggccauccaccacuuu

SEQ ID NO: 382902 - RNA, 19 nt, Homo sapiens
  misc_RNA (1)...(19): siRNA sense strand
aagaguuaauccagcaaga

SEQ ID NO: 382903 - RNA, 19 nt, Homo sapiens
  misc_RNA (1)...(19): siRNA sense strand
gcauggagcuggcggagau

SEQ ID NO: 382904 - RNA, 19 nt, Homo sapiens
  misc_RNA (1)...(19): siRNA sense strand
ugacagcuuucgagaguga

SEQ ID NO: 382905 - RNA, 19 nt, Homo sapiens
  misc_RNA (1)...(19): siRNA sense strand
gaucgaggccauccaggaa

SEQ ID NO: 382906 - RNA, 19 nt, Homo sapiens
  misc_RNA (1)...(19): siRNA sense strand
gcaagaugaaggucaaugg

SEQ ID NO: 382907 - RNA, 19 nt, Homo sapiens
  misc_RNA (1)...(19): siRNA sense strand
ggcaaggcgugugcaugga

SEQ ID NO: 382908 - RNA, 19 nt, Homo sapiens
  misc_RNA (1)...(19): siRNA sense strand
gaacguggccuuugugauu

SEQ ID NO: 382909 - RNA, 19 nt, Homo sapiens
  misc_RNA (1)...(19): siRNA sense strand
ggaggaaguuggagaaguu

SEQ ID NO: 382910 - RNA, 19 nt, Homo sapiens
  misc_RNA (1)...(19): siRNA sense strand
ucacaggccucacaguuaa

SEQ ID NO: 382911 - RNA, 19 nt, Homo sapiens
  misc_RNA (1)...(19): siRNA sense strand
gaggaagacuaucugaauu

SEQ ID NO: 382912 - RNA, 19 nt, Homo sapiens
  misc_RNA (1)...(19): siRNA sense strand
gaaggaaguugccaagaag

SEQ ID NO: 382913 - RNA, 19 nt, Homo sapiens
  misc_RNA (1)...(19): siRNA sense strand
gaacaugguggucuccuuu

SEQ ID NO: 382914 - RNA, 19 nt, Homo sapiens
  misc_RNA (1)...(19): siRNA sense strand
ugaagagcauggaggauaa

SEQ ID NO: 382915 - RNA, 19 nt, Homo sapiens
  misc_RNA (1)...(19): siRNA sense strand
gcagaucacuggcgacaag

SEQ ID NO: 382916 - RNA, 19 nt, Homo sapiens
  misc_RNA (1)...(19): siRNA sense strand
gggccuaccucaccauuga

SEQ ID NO: 382917 - RNA, 19 nt, Homo sapiens
  misc_RNA (1)...(19): siRNA sense strand
gauagucaauggcuacuuc

SEQ ID NO: 382918 - RNA, 19 nt, Homo sapiens
  misc_RNA (1)...(19): siRNA sense strand
agaaggaaguugccaagaa

SEQ ID NO: 382919 - RNA, 19 nt, Homo sapiens
  misc_RNA (1)...(19): siRNA sense strand
gaagaucaccuguggaaca

SEQ ID NO: 382920 - RNA, 19 nt, Homo sapiens
  misc_RNA (1)...(19): siRNA sense strand
gagaagaucaccuguggaa

SEQ ID NO: 382921 - RNA, 19 nt, Homo sapiens
  misc_RNA (1)...(19): siRNA sense strand
ggaagacuaucugaauuuc

SEQ ID NO: 382922 - RNA, 19 nt, Homo sapiens
  misc_RNA (1)...(19): siRNA sense strand
cagaggagguggacaugaa

SEQ ID NO: 382923 - RNA, 19 nt, Homo sapiens
  misc_RNA (1)...(19): siRNA sense strand
ggacucugaugccgauuug

SEQ ID NO: 382924 - RNA, 19 nt, Homo sapiens
  misc_RNA (1)...(19): siRNA sense strand
caaagucaccuucgagcua

SEQ ID NO: 382925 - RNA, 19 nt, Homo sapiens
  misc_RNA (1)...(19): siRNA sense strand
gcugaggccucuuucauca

SEQ ID NO: 382926 - RNA, 19 nt, Homo sapiens
  misc_RNA (1)...(19): siRNA sense strand
ggagaagggcugauugaug

SEQ ID NO: 382927 - RNA, 19 nt, Homo sapiens
  misc_RNA (1)...(19): siRNA sense strand
cuaagcaacuggucaaaca

SEQ ID NO: 382928 - RNA, 19 nt, Homo sapiens
  misc_RNA (1)...(19): siRNA sense strand
ggaaugaccaacaucaaug

SEQ ID NO: 382929 - RNA, 19 nt, Homo sapiens
  misc_RNA (1)...(19): siRNA sense strand
ucagaauccuggaagauau

SEQ ID NO: 382930 - RNA, 19 nt, Homo sapiens
  misc_RNA (1)...(19): siRNA sense strand
caauggagauuucacuauc

SEQ ID NO: 382931 - RNA, 19 nt, Homo sapiens
  misc_RNA (1)...(19): siRNA sense strand
gaagcgcccucaccaaguc

SEQ ID NO: 382932 - RNA, 19 nt, Homo sapiens
  misc_RNA (1)...(19): siRNA sense strand
gaaauuagagcagacaaag

SEQ ID NO: 382933 - RNA, 19 nt, Homo sapiens
  misc_RNA (1)...(19): siRNA sense strand
gcaauucuuccaacccuuu

SEQ ID NO: 382934 - RNA, 19 nt, Homo sapiens
  misc_RNA (1)...(19): siRNA sense strand
gaaugaccaacaucaauga

SEQ ID NO: 382935 - RNA, 19 nt, Homo sapiens
  misc_RNA (1)...(19): siRNA sense strand
ggaaauuagagcagacaaa

SEQ ID NO: 382936 - RNA, 19 nt, Homo sapiens
  misc_RNA (1)...(19): siRNA sense strand
gagcauggaggauaaagga

SEQ ID NO: 382937 - RNA, 19 nt, Homo sapiens
  misc_RNA (1)...(19): siRNA sense strand
aaagucaccuucgagcuaa

SEQ ID NO: 382938 - RNA, 19 nt, Homo sapiens
  misc_RNA (1)...(19): siRNA sense strand
gaacauggcccuggagaac

SEQ ID NO: 382939 - RNA, 19 nt, Homo sapiens
  misc_RNA (1)...(19): siRNA sense strand
cuaagaacguggccuuugu

SEQ ID NO: 382940 - RNA, 19 nt, Homo sapiens
  misc_RNA (1)...(19): siRNA sense strand
cagauucccuccucaaugg

SEQ ID NO: 382941 - RNA, 19 nt, Homo sapiens
  misc_RNA (1)...(19): siRNA sense strand
ccaauggcaucgaggucua

SEQ ID NO: 382942 - RNA, 19 nt, Homo sapiens
  misc_RNA (1)...(19): siRNA sense strand
ggugagagcagacccgaaa

SEQ ID NO: 382943 - RNA, 19 nt, Homo sapiens
  misc_RNA (1)...(19): siRNA sense strand
ccuaugacgugaacagaga

SEQ ID NO: 382944 - RNA, 19 nt, Homo sapiens
  misc_RNA (1)...(19): siRNA sense strand
aaagccagaugccacauug

SEQ ID NO: 382945 - RNA, 19 nt, Homo sapiens
  misc_RNA (1)...(19): siRNA sense strand
gcaucgaggucuacaguac

SEQ ID NO: 382946 - RNA, 19 nt, Homo sapiens
  misc_RNA (1)...(19): siRNA sense strand
gugaagagcauggaggaua

SEQ ID NO: 382947 - RNA, 19 nt, Homo sapiens
  misc_RNA (1)...(19): siRNA sense strand
gaaagaggaagacuaucug

SEQ ID NO: 382948 - RNA, 19 nt, Homo sapiens
  misc_RNA (1)...(19): siRNA sense strand
gcacuucuuugcaccucaa

SEQ ID NO: 382949 - RNA, 19 nt, Homo sapiens
  misc_RNA (1)...(19): siRNA sense strand
gcaacuggucaaacacuuu

SEQ ID NO: 382950 - RNA, 19 nt, Homo sapiens
  misc_RNA (1)...(19): siRNA sense strand
ggcaacaaucugaauuaua

SEQ ID NO: 382951 - RNA, 19 nt, Homo sapiens
  misc_RNA (1)...(19): siRNA sense strand
gagcacagaaucccagaga

SEQ ID NO: 382952 - RNA, 19 nt, Homo sapiens
  misc_RNA (1)...(19): siRNA sense strand
gauaaaggaaugaccaaca

SEQ ID NO: 382953 - RNA, 19 nt, Homo sapiens
  misc_RNA (1)...(19): siRNA sense strand
gcagcaaagucaccuucga

SEQ ID NO: 382954 - RNA, 19 nt, Homo sapiens
  misc_RNA (1)...(19): siRNA sense strand
gcaaugcucagauggacuu

SEQ ID NO: 382955 - RNA, 19 nt, Homo sapiens
  misc_RNA (1)...(19): siRNA sense strand
gacuacaucuucgggaauu

SEQ ID NO: 382956 - RNA, 19 nt, Homo sapiens
  misc_RNA (1)...(19): siRNA sense strand
gaacagcuuuaaggcagau

SEQ ID NO: 382957 - RNA, 19 nt, Homo sapiens
  misc_RNA (1)...(19): siRNA sense strand
gcauuuaugaggacucuga

SEQ ID NO: 382958 - RNA, 19 nt, Homo sapiens
  misc_RNA (1)...(19): siRNA sense strand
ccaagaccagaaagacuua

SEQ ID NO: 382959 - RNA, 19 nt, Homo sapiens
  misc_RNA (1)...(19): siRNA sense strand
ugacuccacugaccucaau

SEQ ID NO: 382960 - RNA, 19 nt, Homo sapiens
  misc_RNA (1)...(19): siRNA sense strand
gucacaggccucacaguua

SEQ ID NO: 382961 - RNA, 19 nt, Homo sapiens
  misc_RNA (1)...(19): siRNA sense strand
caacggagaagggcugauu

SEQ ID NO: 382962 - RNA, 19 nt, Homo sapiens
  misc_RNA (1)...(19): siRNA sense strand
uaugaaagaggaagacuau

SEQ ID NO: 382963 - RNA, 19 nt, Homo sapiens
  misc_RNA (1)...(19): siRNA sense strand
uguccuaccugaccagcua

SEQ ID NO: 382964 - RNA, 19 nt, Homo sapiens
  misc_RNA (1)...(19): siRNA sense strand
gaggacaugaacagcuuua

SEQ ID NO: 382965 - RNA, 19 nt, Homo sapiens
  misc_RNA (1)...(19): siRNA sense strand
gcaccuccauugucaucau

SEQ ID NO: 382966 - RNA, 19 nt, Homo sapiens
  misc_RNA (1)...(19): siRNA sense strand
gccaagaagcaguaugaaa

SEQ ID NO: 382967 - RNA, 19 nt, Homo sapiens
  misc_RNA (1)...(19): siRNA sense strand
ggacaugaacagcuuuaag

SEQ ID NO: 382968 - RNA, 19 nt, Homo sapiens
  misc_RNA (1)...(19): siRNA sense strand
acacuuaccagcacuucua

SEQ ID NO: 382969 - RNA, 19 nt, Homo sapiens
  misc_RNA (1)...(19): siRNA sense strand
ggacguuugugaagagcau

SEQ ID NO: 382970 - RNA, 19 nt, Homo sapiens
  misc_RNA (1)...(19): siRNA sense strand
ccaagaagcaguaugaaaa

SEQ ID NO: 382971 - RNA, 19 nt, Homo sapiens
  misc_RNA (1)...(19): siRNA sense strand
uguccacacugacuacauu

SEQ ID NO: 382972 - RNA, 19 nt, Homo sapiens
  misc_RNA (1)...(19): siRNA sense strand
ugaccaagccugaggacaa

SEQ ID NO: 382973 - RNA, 19 nt, Homo sapiens
  misc_RNA (1)...(19): siRNA sense strand
cauggcuggucggaaauua

SEQ ID NO: 382974 - RNA, 19 nt, Homo sapiens
  misc_RNA (1)...(19): siRNA sense strand
gagauuucacuaucaccua

SEQ ID NO: 382975 - RNA, 19 nt, Homo sapiens
  misc_RNA (1)...(19): siRNA sense strand
cauggaggauaaaggaaug

SEQ ID NO: 382976 - RNA, 19 nt, Homo sapiens
  misc_RNA (1)...(19): siRNA sense strand
cuccauggcuggucggaaa

SEQ ID NO: 382977 - RNA, 19 nt, Homo sapiens
  misc_RNA (1)...(19): siRNA sense strand
acgaggagcugcugaagag

SEQ ID NO: 382978 - RNA, 19 nt, Homo sapiens
  misc_RNA (1)...(19): siRNA sense strand
ccaacccuuugacuuuaaa

SEQ ID NO: 382979 - RNA, 19 nt, Homo sapiens
  misc_RNA (1)...(19): siRNA sense strand
ugcccaaccuguacagauu

SEQ ID NO: 382980 - RNA, 19 nt, Homo sapiens
  misc_RNA (1)...(19): siRNA sense strand
uuccaacccuuugacuuua

SEQ ID NO: 382981 - RNA, 19 nt, Homo sapiens
  misc_RNA (1)...(19): siRNA sense strand
caagagaaugugcggaaug

SEQ ID NO: 382982 - RNA, 19 nt, Homo sapiens
  misc_RNA (1)...(19): siRNA sense strand
auaaaggaaugaccaacau

SEQ ID NO: 382983 - RNA, 19 nt, Homo sapiens
  misc_RNA (1)...(19): siRNA sense strand
gaagagcauggaggauaaa

SEQ ID NO: 382984 - RNA, 19 nt, Homo sapiens
  misc_RNA (1)...(19): siRNA sense strand
ugaaagaggaagacuaucu

SEQ ID NO: 382985 - RNA, 19 nt, Homo sapiens
  misc_RNA (1)...(19): siRNA sense strand
guacagauucccuccucaa

SEQ ID NO: 382986 - RNA, 19 nt, Homo sapiens
  misc_RNA (1)...(19): siRNA sense strand
ggagcgggacuacaucuuc

SEQ ID NO: 382987 - RNA, 19 nt, Homo sapiens
  misc_RNA (1)...(19): siRNA sense strand
gacaugaacagcuuuaagg

SEQ ID NO: 382988 - RNA, 19 nt, Homo sapiens
  misc_RNA (1)...(19): siRNA sense strand
ugacggguguggagaugga

SEQ ID NO: 382989 - RNA, 19 nt, Homo sapiens
  misc_RNA (1)...(19): siRNA sense strand
gcauggaggauaaaggaau

SEQ ID NO: 382990 - RNA, 19 nt, Homo sapiens
  misc_RNA (1)...(19): siRNA sense strand
gccaggacguuugugaaga

SEQ ID NO: 382991 - RNA, 19 nt, Homo sapiens
  misc_RNA (1)...(19): siRNA sense strand
agaggaagacuaucugaau

SEQ ID NO: 382992 - RNA, 19 nt, Homo sapiens
  misc_RNA (1)...(19): siRNA sense strand
gggaggaaguuggagaagu

SEQ ID NO: 382993 - RNA, 19 nt, Homo sapiens
  misc_RNA (1)...(19): siRNA sense strand
ccacuucaucauccaaauu

SEQ ID NO: 382994 - RNA, 19 nt, Homo sapiens
  misc_RNA (1)...(19): siRNA sense strand
gcaguugcagggcuucuau

SEQ ID NO: 382995 - RNA, 19 nt, Homo sapiens
  misc_RNA (1)...(19): siRNA sense strand
uggcaacaaucugaauuau

SEQ ID NO: 382996 - RNA, 19 nt, Homo sapiens
  misc_RNA (1)...(19): siRNA sense strand
ggagguuuccuuugaugug

SEQ ID NO: 382997 - RNA, 19 nt, Homo sapiens
  misc_RNA (1)...(19): siRNA sense strand
ccaggacguuugugaagag

SEQ ID NO: 382998 - RNA, 19 nt, Homo sapiens
  misc_RNA (1)...(19): siRNA sense strand
cuuccaacccuuugacuuu

SEQ ID NO: 382999 - RNA, 19 nt, Homo sapiens
  misc_RNA (1)...(19): siRNA sense strand
gaucacuggcgacaagaga

SEQ ID NO: 383000 - RNA, 19 nt, Homo sapiens
  misc_RNA (1)...(19): siRNA sense strand
ggaagcgcccucaccaagu

SEQ ID NO: 383001 - RNA, 19 nt, Homo sapiens
  misc_RNA (1)...(19): siRNA sense strand
aggaagacuaucugaauuu

SEQ ID NO: 383002 - RNA, 19 nt, Homo sapiens
  misc_RNA (1)...(19): siRNA sense strand
cuacuucgugcacuucuuu

SEQ ID NO: 383003 - RNA, 19 nt, Homo sapiens
  misc_RNA (1)...(19): siRNA sense strand
gugcagacacggccaagga

SEQ ID NO: 383004 - RNA, 19 nt, Homo sapiens
  misc_RNA (1)...(19): siRNA sense strand
gaugcccucugcuucaaca

SEQ ID NO: 383005 - RNA, 19 nt, Homo sapiens
  misc_RNA (1)...(19): siRNA sense strand
cauccaaauuccggagaaa

SEQ ID NO: 383006 - RNA, 19 nt, Homo sapiens
  misc_RNA (1)...(19): siRNA sense strand
gaccaagccugaggacaac

SEQ ID NO: 383007 - RNA, 19 nt, Homo sapiens
  misc_RNA (1)...(19): siRNA sense strand
ggacuacaucuucgggaau

SEQ ID NO: 383008 - RNA, 19 nt, Homo sapiens
  misc_RNA (1)...(19): siRNA sense strand
gaaauggagugauaacaaa

SEQ ID NO: 383009 - RNA, 19 nt, Homo sapiens
  misc_RNA (1)...(19): siRNA sense strand
gagguuggcucaugaauuu

SEQ ID NO: 383010 - RNA, 19 nt, Homo sapiens
  misc_RNA (1)...(19): siRNA sense strand
caacaagacugucaccuuu

SEQ ID NO: 383011 - RNA, 19 nt, Homo sapiens
  misc_RNA (1)...(19): siRNA sense strand
gaagagacuuugcuuaaug

SEQ ID NO: 383012 - RNA, 19 nt, Homo sapiens
  misc_RNA (1)...(19): siRNA sense strand
gcacaacaucuacauauua

SEQ ID NO: 383013 - RNA, 19 nt, Homo sapiens
  misc_RNA (1)...(19): siRNA sense strand
agaauaagcuuacguuuga

SEQ ID NO: 383014 - RNA, 19 nt, Homo sapiens
  misc_RNA (1)...(19): siRNA sense strand
ggacgaggcuggaaaugaa

SEQ ID NO: 383015 - RNA, 19 nt, Homo sapiens
  misc_RNA (1)...(19): siRNA sense strand
gaaaugaugaccaaagaua

SEQ ID NO: 383016 - RNA, 19 nt, Homo sapiens
  misc_RNA (1)...(19): siRNA sense strand
gaaaugaauuggcagaaga

SEQ ID NO: 383017 - RNA, 19 nt, Homo sapiens
  misc_RNA (1)...(19): siRNA sense strand
gaacagcccucucauguac

SEQ ID NO: 383018 - RNA, 19 nt, Homo sapiens
  misc_RNA (1)...(19): siRNA sense strand
gauagagauugucagauua

SEQ ID NO: 383019 - RNA, 19 nt, Homo sapiens
  misc_RNA (1)...(19): siRNA sense strand
gcagagaggauacuuuaua

SEQ ID NO: 383020 - RNA, 19 nt, Homo sapiens
  misc_RNA (1)...(19): siRNA sense strand
gcacuucguucacugcaua

SEQ ID NO: 383021 - RNA, 19 nt, Homo sapiens
  misc_RNA (1)...(19): siRNA sense strand
gagaagagacuuugcuuaa

SEQ ID NO: 383022 - RNA, 19 nt, Homo sapiens
  misc_RNA (1)...(19): siRNA sense strand
uaaccaagcugcuagaaga

SEQ ID NO: 383023 - RNA, 19 nt, Homo sapiens
  misc_RNA (1)...(19): siRNA sense strand
gcagaagggaaauuuauua

SEQ ID NO: 383024 - RNA, 19 nt, Homo sapiens
  misc_RNA (1)...(19): siRNA sense strand
gcaccacgcugcagacuug

SEQ ID NO: 383025 - RNA, 19 nt, Homo sapiens
  misc_RNA (1)...(19): siRNA sense strand
caacacagauaacagaaga

SEQ ID NO: 383026 - RNA, 19 nt, Homo sapiens
  misc_RNA (1)...(19): siRNA sense strand
guaagaaugucuacacaga

SEQ ID NO: 383027 - RNA, 19 nt, Homo sapiens
  misc_RNA (1)...(19): siRNA sense strand
ggaagaaccaggaguauau

SEQ ID NO: 383028 - RNA, 19 nt, Homo sapiens
  misc_RNA (1)...(19): siRNA sense strand
ggaaauaacaagccacaaa

SEQ ID NO: 383029 - RNA, 19 nt, Homo sapiens
  misc_RNA (1)...(19): siRNA sense strand
gaggauggaccuuguguua

SEQ ID NO: 383030 - RNA, 19 nt, Homo sapiens
  misc_RNA (1)...(19): siRNA sense strand
gcaaucacauguggaaauu

SEQ ID NO: 383031 - RNA, 19 nt, Homo sapiens
  misc_RNA (1)...(19): siRNA sense strand
ggaauaucauugagagauu

SEQ ID NO: 383032 - RNA, 19 nt, Homo sapiens
  misc_RNA (1)...(19): siRNA sense strand
cagcauaugugaauuccua

SEQ ID NO: 383033 - RNA, 19 nt, Homo sapiens
  misc_RNA (1)...(19): siRNA sense strand
cagagaggauacuuuauaa

SEQ ID NO: 383034 - RNA, 19 nt, Homo sapiens
  misc_RNA (1)...(19): siRNA sense strand
ggauggaccuuguguuaga

SEQ ID NO: 383035 - RNA, 19 nt, Homo sapiens
  misc_RNA (1)...(19): siRNA sense strand
agacaccuauguacuaaua

SEQ ID NO: 383036 - RNA, 19 nt, Homo sapiens
  misc_RNA (1)...(19): siRNA sense strand
uagauaggcugcccaauga

SEQ ID NO: 383037 - RNA, 19 nt, Homo sapiens
  misc_RNA (1)...(19): siRNA sense strand
cuucugggcuuguauauaa

SEQ ID NO: 383038 - RNA, 19 nt, Homo sapiens
  misc_RNA (1)...(19): siRNA sense strand
ggagaagaaugccaugaga

SEQ ID NO: 383039 - RNA, 19 nt, Homo sapiens
  misc_RNA (1)...(19): siRNA sense strand
caagaaagccuacaugcaa

SEQ ID NO: 383040 - RNA, 19 nt, Homo sapiens
  misc_RNA (1)...(19): siRNA sense strand
uaagagaugugguuuguca

SEQ ID NO: 383041 - RNA, 19 nt, Homo sapiens
  misc_RNA (1)...(19): siRNA sense strand
cgaaguagguugcggaaug

SEQ ID NO: 383042 - RNA, 19 nt, Homo sapiens
  misc_RNA (1)...(19): siRNA sense strand
gccaucaacugguagauaa

SEQ ID NO: 383043 - RNA, 19 nt, Homo sapiens
  misc_RNA (1)...(19): siRNA sense strand
ugagaaaccugcaggagaa

SEQ ID NO: 383044 - RNA, 19 nt, Homo sapiens
  misc_RNA (1)...(19): siRNA sense strand
gaggauacuuuauaacaug

SEQ ID NO: 383045 - RNA, 19 nt, Homo sapiens
  misc_RNA (1)...(19): siRNA sense strand
gaaaucgucaugaguauug

SEQ ID NO: 383046 - RNA, 19 nt, Homo sapiens
  misc_RNA (1)...(19): siRNA sense strand
gccaagauguggacaacua

SEQ ID NO: 383047 - RNA, 19 nt, Homo sapiens
  misc_RNA (1)...(19): siRNA sense strand
gagauacuccaguuuauuu

SEQ ID NO: 383048 - RNA, 19 nt, Homo sapiens
  misc_RNA (1)...(19): siRNA sense strand
gaaaggagaagagaauaaa

SEQ ID NO: 383049 - RNA, 19 nt, Homo sapiens
  misc_RNA (1)...(19): siRNA sense strand
cggcagagauugacacauu

SEQ ID NO: 383050 - RNA, 19 nt, Homo sapiens
  misc_RNA (1)...(19): siRNA sense strand
ggaagcauuugccauaguu

SEQ ID NO: 383051 - RNA, 19 nt, Homo sapiens
  misc_RNA (1)...(19): siRNA sense strand
ucaagcagaucuucaaguu

SEQ ID NO: 383052 - RNA, 19 nt, Homo sapiens
  misc_RNA (1)...(19): siRNA sense strand
uggaaagucugaccgaaua

SEQ ID NO: 383053 - RNA, 19 nt, Homo sapiens
  misc_RNA (1)...(19): siRNA sense strand
gauaagaagucagagaaau

SEQ ID NO: 383054 - RNA, 19 nt, Homo sapiens
  misc_RNA (1)...(19): siRNA sense strand
gagaagcucugcauuaagg

SEQ ID NO: 383055 - RNA, 19 nt, Homo sapiens
  misc_RNA (1)...(19): siRNA sense strand
acaaacagaucaaacaaga

SEQ ID NO: 383056 - RNA, 19 nt, Homo sapiens
  misc_RNA (1)...(19): siRNA sense strand
gauaucagcugaaccucuu

SEQ ID NO: 383057 - RNA, 19 nt, Homo sapiens
  misc_RNA (1)...(19): siRNA sense strand
gaaaggaggucuguaacca

SEQ ID NO: 383058 - RNA, 19 nt, Homo sapiens
  misc_RNA (1)...(19): siRNA sense strand
guaaaggacuccaccgaau

SEQ ID NO: 383059 - RNA, 19 nt, Homo sapiens
  misc_RNA (1)...(19): siRNA sense strand
ggagcagcauuucguuuaa

SEQ ID NO: 383060 - RNA, 19 nt, Homo sapiens
  misc_RNA (1)...(19): siRNA sense strand
gaacaaugccucgaaguug

SEQ ID NO: 383061 - RNA, 19 nt, Homo sapiens
  misc_RNA (1)...(19): siRNA sense strand
gaaggcaucuuuggaggaa

SEQ ID NO: 383062 - RNA, 19 nt, Homo sapiens
  misc_RNA (1)...(19): siRNA sense strand
gagcccagauucuuagauu

SEQ ID NO: 383063 - RNA, 19 nt, Homo sapiens
  misc_RNA (1)...(19): siRNA sense strand
uaaggaagcauuugccaua

SEQ ID NO: 383064 - RNA, 19 nt, Homo sapiens
  misc_RNA (1)...(19): siRNA sense strand
aaagaaagacgaugaggua

SEQ ID NO: 383065 - RNA, 19 nt, Homo sapiens
  misc_RNA (1)...(19): siRNA sense strand
ggacgaagagagagccuua

SEQ ID NO: 383066 - RNA, 19 nt, Homo sapiens
  misc_RNA (1)...(19): siRNA sense strand
gggaaaugaugaccaaaga

SEQ ID NO: 383067 - RNA, 19 nt, Homo sapiens
  misc_RNA (1)...(19): siRNA sense strand
cguuugagguuguaaauuu

SEQ ID NO: 383068 - RNA, 19 nt, Homo sapiens
  misc_RNA (1)...(19): siRNA sense strand
gagacaaguuugacaacaa

SEQ ID NO: 383069 - RNA, 19 nt, Homo sapiens
  misc_RNA (1)...(19): siRNA sense strand
agauagagauugucagauu

SEQ ID NO: 383070 - RNA, 19 nt, Homo sapiens
  misc_RNA (1)...(19): siRNA sense strand
cauauuagcccaucaguug

SEQ ID NO: 383071 - RNA, 19 nt, Homo sapiens
  misc_RNA (1)...(19): siRNA sense strand
acacagagaucaagugcaa

SEQ ID NO: 383072 - RNA, 19 nt, Homo sapiens
  misc_RNA (1)...(19): siRNA sense strand
cccaggaacugauauguaa

SEQ ID NO: 383073 - RNA, 19 nt, Homo sapiens
  misc_RNA (1)...(19): siRNA sense strand
gaaaucaaagcaacaguga

SEQ ID NO: 383074 - RNA, 19 nt, Homo sapiens
  misc_RNA (1)...(19): siRNA sense strand
caaaacagcugcuagaaga

SEQ ID NO: 383075 - RNA, 19 nt, Homo sapiens
  misc_RNA (1)...(19): siRNA sense strand
gaaagcaauucccagacuu

SEQ ID NO: 383076 - RNA, 19 nt, Homo sapiens
  misc_RNA (1)...(19): siRNA sense strand
gcaguaacgugaugagauc

SEQ ID NO: 383077 - RNA, 19 nt, Homo sapiens
  misc_RNA (1)...(19): siRNA sense strand
cuaggaaucucauauacuu

SEQ ID NO: 383078 - RNA, 19 nt, Homo sapiens
  misc_RNA (1)...(19): siRNA sense strand
ggcagaaacugaugagaga

SEQ ID NO: 383079 - RNA, 19 nt, Homo sapiens
  misc_RNA (1)...(19): siRNA sense strand
gaacguagcgcuuaucaac

SEQ ID NO: 383080 - RNA, 19 nt, Homo sapiens
  misc_RNA (1)...(19): siRNA sense strand
auacagagguggaaaugaa

SEQ ID NO: 383081 - RNA, 19 nt, Homo sapiens
  misc_RNA (1)...(19): siRNA sense strand
gcaaugacaucuccuccau

SEQ ID NO: 383082 - RNA, 19 nt, Homo sapiens
  misc_RNA (1)...(19): siRNA sense strand
gaaaugaucaaggaaagaa

SEQ ID NO: 383083 - RNA, 19 nt, Homo sapiens
  misc_RNA (1)...(19): siRNA sense strand
ccaaggaacugguggaagu

SEQ ID NO: 383084 - RNA, 19 nt, Homo sapiens
  misc_RNA (1)...(19): siRNA sense strand
gaacagggagcccagauuc

SEQ ID NO: 383085 - RNA, 19 nt, Homo sapiens
  misc_RNA (1)...(19): siRNA sense strand
ccaugaaacuugucacgaa

SEQ ID NO: 383086 - RNA, 19 nt, Homo sapiens
  misc_RNA (1)...(19): siRNA sense strand
gaagagacggaacaggaua

SEQ ID NO: 383087 - RNA, 19 nt, Homo sapiens
  misc_RNA (1)...(19): siRNA sense strand
gcacggaggguaagaaugu

SEQ ID NO: 383088 - RNA, 19 nt, Homo sapiens
  misc_RNA (1)...(19): siRNA sense strand
gcaagagugugagggaauu

SEQ ID NO: 383089 - RNA, 19 nt, Homo sapiens
  misc_RNA (1)...(19): siRNA sense strand
gaaaugaaggguccugguu

SEQ ID NO: 383090 - RNA, 19 nt, Homo sapiens
  misc_RNA (1)...(19): siRNA sense strand
gcccugauccucaaugaua

SEQ ID NO: 383091 - RNA, 19 nt, Homo sapiens
  misc_RNA (1)...(19): siRNA sense strand
caacuacaauuugguaugu

SEQ ID NO: 383092 - RNA, 19 nt, Homo sapiens
  misc_RNA (1)...(19): siRNA sense strand
gagagagccuuaccagcuu

SEQ ID NO: 383093 - RNA, 19 nt, Homo sapiens
  misc_RNA (1)...(19): siRNA sense strand
gaauaucauugagagauug

SEQ ID NO: 383094 - RNA, 19 nt, Homo sapiens
  misc_RNA (1)...(19): siRNA sense strand
gaaucaagcuuugcuacau

SEQ ID NO: 383095 - RNA, 19 nt, Homo sapiens
  misc_RNA (1)...(19): siRNA sense strand
gcggagggaucgacaaaug

SEQ ID NO: 383096 - RNA, 19 nt, Homo sapiens
  misc_RNA (1)...(19): siRNA sense strand
acaaagaacuucagagcau

SEQ ID NO: 383097 - RNA, 19 nt, Homo sapiens
  misc_RNA (1)...(19): siRNA sense strand
ggagugagaagcagaagaa

SEQ ID NO: 383098 - RNA, 19 nt, Homo sapiens
  misc_RNA (1)...(19): siRNA sense strand
ccaagcugcuagaagauuu

SEQ ID NO: 383099 - RNA, 19 nt, Homo sapiens
  misc_RNA (1)...(19): siRNA sense strand
ggaauuaaaggaucagaug

SEQ ID NO: 383100 - RNA, 19 nt, Homo sapiens
  misc_RNA (1)...(19): siRNA sense strand
gcagaaaugaucaaggaaa

SEQ ID NO: 383101 - RNA, 19 nt, Homo sapiens
  misc_RNA (1)...(19): siRNA sense strand
cagcacaucuucaugaaca

SEQ ID NO: 383102 - RNA, 19 nt, Homo sapiens
  misc_RNA (1)...(19): siRNA sense strand
caagaagggccaaguaaug

SEQ ID NO: 383103 - RNA, 19 nt, Homo sapiens
  misc_RNA (1)...(19): siRNA sense strand
gaagaaccaggaguauaua

SEQ ID NO: 383104 - RNA, 19 nt, Homo sapiens
  misc_RNA (1)...(19): siRNA sense strand
ggaggaguauuuaagagau

SEQ ID NO: 383105 - RNA, 19 nt, Homo sapiens
  misc_RNA (1)...(19): siRNA sense strand
uaaaggacuccaccgaaua

SEQ ID NO: 383106 - RNA, 19 nt, Homo sapiens
  misc_RNA (1)...(19): siRNA sense strand
gagaggauacuuuauaaca

SEQ ID NO: 383107 - RNA, 19 nt, Homo sapiens
  misc_RNA (1)...(19): siRNA sense strand
gaagguggcccagcaagaa

SEQ ID NO: 383108 - RNA, 19 nt, Homo sapiens
  misc_RNA (1)...(19): siRNA sense strand
ggagggcacuggagaaaua

SEQ ID NO: 383109 - RNA, 19 nt, Homo sapiens
  misc_RNA (1)...(19): siRNA sense strand
aaacaggacugacagaaua

SEQ ID NO: 383110 - RNA, 19 nt, Homo sapiens
  misc_RNA (1)...(19): siRNA sense strand
ggagaaauaugccaaagga

SEQ ID NO: 383111 - RNA, 19 nt, Homo sapiens
  misc_RNA (1)...(19): siRNA sense strand
caacuccucugguuucuaa

SEQ ID NO: 383112 - RNA, 19 nt, Homo sapiens
  misc_RNA (1)...(19): siRNA sense strand
ucaaguauaucaccaguuu

SEQ ID NO: 383113 - RNA, 19 nt, Homo sapiens
  misc_RNA (1)...(19): siRNA sense strand
ggucucagcuguacucuau

SEQ ID NO: 383114 - RNA, 19 nt, Homo sapiens
  misc_RNA (1)...(19): siRNA sense strand
ggacagcaguaauugcaaa

SEQ ID NO: 383115 - RNA, 19 nt, Homo sapiens
  misc_RNA (1)...(19): siRNA sense strand
gcagugcucugguauguuc

SEQ ID NO: 383116 - RNA, 19 nt, Homo sapiens
  misc_RNA (1)...(19): siRNA sense strand
ucaauucgcuuuacugaca

SEQ ID NO: 383117 - RNA, 19 nt, Homo sapiens
  misc_RNA (1)...(19): siRNA sense strand
gauggcaaaccuaaucuua

SEQ ID NO: 383118 - RNA, 19 nt, Homo sapiens
  misc_RNA (1)...(19): siRNA sense strand
gaugaauggugaucuggaa

SEQ ID NO: 383119 - RNA, 19 nt, Homo sapiens
  misc_RNA (1)...(19): siRNA sense strand
gacccgagguuccaaaugu

SEQ ID NO: 383120 - RNA, 19 nt, Homo sapiens
  misc_RNA (1)...(19): siRNA sense strand
gaaacaggacugacagaau

SEQ ID NO: 383121 - RNA, 19 nt, Homo sapiens
  misc_RNA (1)...(19): siRNA sense strand
gaauggugaucuggaacua

SEQ ID NO: 383122 - RNA, 19 nt, Homo sapiens
  misc_RNA (1)...(19): siRNA sense strand
gacaugcgcuggcguugga

SEQ ID NO: 383123 - RNA, 19 nt, Homo sapiens
  misc_RNA (1)...(19): siRNA sense strand
agacacaacucacaauugg

SEQ ID NO: 383124 - RNA, 19 nt, Homo sapiens
  misc_RNA (1)...(19): siRNA sense strand
cauccuaccuacagucuga

SEQ ID NO: 383125 - RNA, 19 nt, Homo sapiens
  misc_RNA (1)...(19): siRNA sense strand
gaaaauccuucucacuuug

SEQ ID NO: 383126 - RNA, 19 nt, Homo sapiens
  misc_RNA (1)...(19): siRNA sense strand
cagcaguaauugcaaaguu

SEQ ID NO: 383127 - RNA, 19 nt, Homo sapiens
  misc_RNA (1)...(19): siRNA sense strand
ccacagcacacuucaaaug

SEQ ID NO: 383128 - RNA, 19 nt, Homo sapiens
  misc_RNA (1)...(19): siRNA sense strand
ucaaauggauggcgcucaa

SEQ ID NO: 383129 - RNA, 19 nt, Homo sapiens
  misc_RNA (1)...(19): siRNA sense strand
ggagacacaacucacaauu

SEQ ID NO: 383130 - RNA, 19 nt, Homo sapiens
  misc_RNA (1)...(19): siRNA sense strand
acaagacugucccugaauu

SEQ ID NO: 383131 - RNA, 19 nt, Homo sapiens
  misc_RNA (1)...(19): siRNA sense strand
gcuguacucuaucaggaaa

SEQ ID NO: 383132 - RNA, 19 nt, Homo sapiens
  misc_RNA (1)...(19): siRNA sense strand
agcaguaauugcaaaguua

SEQ ID NO: 383133 - RNA, 19 nt, Homo sapiens
  misc_RNA (1)...(19): siRNA sense strand
gagacacaacucacaauug

SEQ ID NO: 383134 - RNA, 19 nt, Homo sapiens
  misc_RNA (1)...(19): siRNA sense strand
ugaaaauccuucucacuuu

SEQ ID NO: 383135 - RNA, 19 nt, Homo sapiens
  misc_RNA (1)...(19): siRNA sense strand
uggcaaaccuaaucuuauc

SEQ ID NO: 383136 - RNA, 19 nt, Homo sapiens
  misc_RNA (1)...(19): siRNA sense strand
aguaguagcucacauggau

SEQ ID NO: 383137 - RNA, 19 nt, Homo sapiens
  misc_RNA (1)...(19): siRNA sense strand
ggccacagcacacuucaaa

SEQ ID NO: 383138 - RNA, 19 nt, Homo sapiens
  misc_RNA (1)...(19): siRNA sense strand
ccacaucaauggacaaagc

SEQ ID NO: 383139 - RNA, 19 nt, Homo sapiens
  misc_RNA (1)...(19): siRNA sense strand
caagacugucccugaauuu

SEQ ID NO: 383140 - RNA, 19 nt, Homo sapiens
  misc_RNA (1)...(19): siRNA sense strand
gguauguucuggcugagau

SEQ ID NO: 383141 - RNA, 19 nt, Homo sapiens
  misc_RNA (1)...(19): siRNA sense strand
ccuacagucugaaaucaug

SEQ ID NO: 383142 - RNA, 19 nt, Homo sapiens
  misc_RNA (1)...(19): siRNA sense strand
caaguccucuggcuacucu

SEQ ID NO: 383143 - RNA, 19 nt, Homo sapiens
  misc_RNA (1)...(19): siRNA sense strand
gcaguaauugcaaaguuau

SEQ ID NO: 383144 - RNA, 19 nt, Homo sapiens
  misc_RNA (1)...(19): siRNA sense strand
gcaaaccuaaucuuaucuu

SEQ ID NO: 383145 - RNA, 19 nt, Homo sapiens
  misc_RNA (1)...(19): siRNA sense strand
gcuccucuccuaagucaaa

SEQ ID NO: 383146 - RNA, 19 nt, Homo sapiens
  misc_RNA (1)...(19): siRNA sense strand
gcuccuaggccucaugcua

SEQ ID NO: 383147 - RNA, 19 nt, Homo sapiens
  misc_RNA (1)...(19): siRNA sense strand
caaaccuaaucuuaucuuc

SEQ ID NO: 383148 - RNA, 19 nt, Homo sapiens
  misc_RNA (1)...(19): siRNA sense strand
acacaacucacaauugguu

SEQ ID NO: 383149 - RNA, 19 nt, Homo sapiens
  misc_RNA (1)...(19): siRNA sense strand
ccacuaacguacuaucacu

SEQ ID NO: 383150 - RNA, 19 nt, Homo sapiens
  misc_RNA (1)...(19): siRNA sense strand
ucacauggauggcaaaccu

SEQ ID NO: 383151 - RNA, 19 nt, Homo sapiens
  misc_RNA (1)...(19): siRNA sense strand
gcuagaggcuuuuaucaca

SEQ ID NO: 383152 - RNA, 19 nt, Homo sapiens
  misc_RNA (1)...(19): siRNA sense strand
cagcacacuucaaauggau

SEQ ID NO: 383153 - RNA, 19 nt, Homo sapiens
  misc_RNA (1)...(19): siRNA sense strand
ucucagcuguacucuauca

SEQ ID NO: 383154 - RNA, 19 nt, Homo sapiens
  misc_RNA (1)...(19): siRNA sense strand
caaaucaagauggagaauu

SEQ ID NO: 383155 - RNA, 19 nt, Homo sapiens
  misc_RNA (1)...(19): siRNA sense strand
ggaaagagaaaauggcaaa

SEQ ID NO: 383156 - RNA, 19 nt, Homo sapiens
  misc_RNA (1)...(19): siRNA sense strand
caagugcaaucgccuuacu

SEQ ID NO: 383157 - RNA, 19 nt, Homo sapiens
  misc_RNA (1)...(19): siRNA sense strand
cgaccuagcccucuaacca

SEQ ID NO: 383158 - RNA, 19 nt, Homo sapiens
  misc_RNA (1)...(19): siRNA sense strand
cacuaucugugucaaguau

SEQ ID NO: 383159 - RNA, 19 nt, Homo sapiens
  misc_RNA (1)...(19): siRNA sense strand
agucugaaaucauguuaca

SEQ ID NO: 383160 - RNA, 19 nt, Homo sapiens
  misc_RNA (1)...(19): siRNA sense strand
gcaggagggcacuggagaa

SEQ ID NO: 383161 - RNA, 19 nt, Homo sapiens
  misc_RNA (1)...(19): siRNA sense strand
cuaucugugucaaguauau

SEQ ID NO: 383162 - RNA, 19 nt, Homo sapiens
  misc_RNA (1)...(19): siRNA sense strand
ggucuuuucugcuucuuuu

SEQ ID NO: 383163 - RNA, 19 nt, Homo sapiens
  misc_RNA (1)...(19): siRNA sense strand
acagcacacuucaaaugga

SEQ ID NO: 383164 - RNA, 19 nt, Homo sapiens
  misc_RNA (1)...(19): siRNA sense strand
aaccuaaucuuaucuucca

SEQ ID NO: 383165 - RNA, 19 nt, Homo sapiens
  misc_RNA (1)...(19): siRNA sense strand
guauaucaccaguuucaca

SEQ ID NO: 383166 - RNA, 19 nt, Homo sapiens
  misc_RNA (1)...(19): siRNA sense strand
aguuauugcuccucuccua

SEQ ID NO: 383167 - RNA, 19 nt, Homo sapiens
  misc_RNA (1)...(19): siRNA sense strand
gcgcuggcguuggaugaug

SEQ ID NO: 383168 - RNA, 19 nt, Homo sapiens
  misc_RNA (1)...(19): siRNA sense strand
ccacuggcuugucuuugca

SEQ ID NO: 383169 - RNA, 19 nt, Homo sapiens
  misc_RNA (1)...(19): siRNA sense strand
cgccuuacuugccauacaa

SEQ ID NO: 383170 - RNA, 19 nt, Homo sapiens
  misc_RNA (1)...(19): siRNA sense strand
ccagaccaguguggauuuc

SEQ ID NO: 383171 - RNA, 19 nt, Homo sapiens
  misc_RNA (1)...(19): siRNA sense strand
ugaaacaggacugacagaa

SEQ ID NO: 383172 - RNA, 19 nt, Homo sapiens
  misc_RNA (1)...(19): siRNA sense strand
uguauuccuuucagcaaug

SEQ ID NO: 383173 - RNA, 19 nt, Homo sapiens
  misc_RNA (1)...(19): siRNA sense strand
caacucacaauugguuaug

SEQ ID NO: 383174 - RNA, 19 nt, Homo sapiens
  misc_RNA (1)...(19): siRNA sense strand
ucuccuaagucaaagauac

SEQ ID NO: 383175 - RNA, 19 nt, Homo sapiens
  misc_RNA (1)...(19): siRNA sense strand
uucuucaucuuuccacuaa

SEQ ID NO: 383176 - RNA, 19 nt, Homo sapiens
  misc_RNA (1)...(19): siRNA sense strand
uaccuacagucugaaauca

SEQ ID NO: 383177 - RNA, 19 nt, Homo sapiens
  misc_RNA (1)...(19): siRNA sense strand
guacuaucacuccauuaca

SEQ ID NO: 383178 - RNA, 19 nt, Homo sapiens
  misc_RNA (1)...(19): siRNA sense strand
uugcagugcucugguaugu

SEQ ID NO: 383179 - RNA, 19 nt, Homo sapiens
  misc_RNA (1)...(19): siRNA sense strand
caggagggcacuggagaaa

SEQ ID NO: 383180 - RNA, 19 nt, Homo sapiens
  misc_RNA (1)...(19): siRNA sense strand
gagaaaauggcaaacucua

SEQ ID NO: 383181 - RNA, 19 nt, Homo sapiens
  misc_RNA (1)...(19): siRNA sense strand
cacccgaccuagcccucua

SEQ ID NO: 383182 - RNA, 19 nt, Homo sapiens
  misc_RNA (1)...(19): siRNA sense strand
aguggugacuguccaagug

SEQ ID NO: 383183 - RNA, 19 nt, Homo sapiens
  misc_RNA (1)...(19): siRNA sense strand
guuauugcuccucuccuaa

SEQ ID NO: 383184 - RNA, 19 nt, Homo sapiens
  misc_RNA (1)...(19): siRNA sense strand
ucuuugcagugcucuggua

SEQ ID NO: 383185 - RNA, 19 nt, Homo sapiens
  misc_RNA (1)...(19): siRNA sense strand
gagguuccaaaugugaaua

SEQ ID NO: 383186 - RNA, 19 nt, Homo sapiens
  misc_RNA (1)...(19): siRNA sense strand
ggcguuggaugauguuggu

SEQ ID NO: 383187 - RNA, 19 nt, Homo sapiens
  misc_RNA (1)...(19): siRNA sense strand
auggugaucuggaacuaga

SEQ ID NO: 383188 - RNA, 19 nt, Homo sapiens
  misc_RNA (1)...(19): siRNA sense strand
aaguauaucaccaguuuca

SEQ ID NO: 383189 - RNA, 19 nt, Homo sapiens
  misc_RNA (1)...(19): siRNA sense strand
cuaaucuuaucuuccaagu

SEQ ID NO: 383190 - RNA, 19 nt, Homo sapiens
  misc_RNA (1)...(19): siRNA sense strand
gacugucccugaauuucca

SEQ ID NO: 383191 - RNA, 19 nt, Homo sapiens
  misc_RNA (1)...(19): siRNA sense strand
ucacuccauuacaccauca

SEQ ID NO: 383192 - RNA, 19 nt, Homo sapiens
  misc_RNA (1)...(19): siRNA sense strand
ucacagcugcauucuccuu

SEQ ID NO: 383193 - RNA, 19 nt, Homo sapiens
  misc_RNA (1)...(19): siRNA sense strand
aaauccuucucacuuugaa

SEQ ID NO: 383194 - RNA, 19 nt, Homo sapiens
  misc_RNA (1)...(19): siRNA sense strand
aacguacuaucacuccauu

SEQ ID NO: 383195 - RNA, 19 nt, Homo sapiens
  misc_RNA (1)...(19): siRNA sense strand
caaauggauggcgcucaaa

SEQ ID NO: 383196 - RNA, 19 nt, Homo sapiens
  misc_RNA (1)...(19): siRNA sense strand
gauggccacagcacacuuc

SEQ ID NO: 383197 - RNA, 19 nt, Homo sapiens
  misc_RNA (1)...(19): siRNA sense strand
guuccaaaugugaauauca

SEQ ID NO: 383198 - RNA, 19 nt, Homo sapiens
  misc_RNA (1)...(19): siRNA sense strand
uugcuccucuccuaaguca

SEQ ID NO: 383199 - RNA, 19 nt, Homo sapiens
  misc_RNA (1)...(19): siRNA sense strand
cuaccuacagucugaaauc

SEQ ID NO: 383200 - RNA, 19 nt, Homo sapiens
  misc_RNA (1)...(19): siRNA sense strand
guuggaugauguuggucuu

SEQ ID NO: 383201 - RNA, 19 nt, Homo sapiens
  misc_RNA (1)...(19): siRNA sense strand
ucuuuccacuaacguacua

SEQ ID NO: 383202 - RNA, 19 nt, Homo sapiens
  misc_RNA (1)...(19): siRNA sense strand
uguacucuaucaggaaaga

SEQ ID NO: 383203 - RNA, 19 nt, Homo sapiens
  misc_RNA (1)...(19): siRNA sense strand
ggauggcaaaccuaaucuu

SEQ ID NO: 383204 - RNA, 19 nt, Homo sapiens
  misc_RNA (1)...(19): siRNA sense strand
guuguccacuggcuugucu

SEQ ID NO: 383205 - RNA, 19 nt, Homo sapiens
  misc_RNA (1)...(19): siRNA sense strand
gaaaguuuauccuggcaua

SEQ ID NO: 383206 - RNA, 19 nt, Homo sapiens
  misc_RNA (1)...(19): siRNA sense strand
caauaaugguguucgaaua

SEQ ID NO: 383207 - RNA, 19 nt, Homo sapiens
  misc_RNA (1)...(19): siRNA sense strand
ggacaguacucugcucaaa

SEQ ID NO: 383208 - RNA, 19 nt, Homo sapiens
  misc_RNA (1)...(19): siRNA sense strand
guauaaagguccuauuaag

SEQ ID NO: 383209 - RNA, 19 nt, Homo sapiens
  misc_RNA (1)...(19): siRNA sense strand
gcagggccaugggcuaaua

SEQ ID NO: 383210 - RNA, 19 nt, Homo sapiens
  misc_RNA (1)...(19): siRNA sense strand
gccaugggcuaauauaugu

SEQ ID NO: 383211 - RNA, 19 nt, Homo sapiens
  misc_RNA (1)...(19): siRNA sense strand
cgagugacccuacugcaua

SEQ ID NO: 383212 - RNA, 19 nt, Homo sapiens
  misc_RNA (1)...(19): siRNA sense strand
ggagaaaccuuaucaaaac

SEQ ID NO: 383213 - RNA, 19 nt, Homo sapiens
  misc_RNA (1)...(19): siRNA sense strand
acaguacucugcucaaaga

SEQ ID NO: 383214 - RNA, 19 nt, Homo sapiens
  misc_RNA (1)...(19): siRNA sense strand
guacucugcucaaagaagu

SEQ ID NO: 383215 - RNA, 19 nt, Homo sapiens
  misc_RNA (1)...(19): siRNA sense strand
caggagaaaccuuaucaaa

SEQ ID NO: 383216 - RNA, 19 nt, Homo sapiens
  misc_RNA (1)...(19): siRNA sense strand
agaaugcuaucaauaaugg

SEQ ID NO: 383217 - RNA, 19 nt, Homo sapiens
  misc_RNA (1)...(19): siRNA sense strand
uaaagguccuauuaagaag

SEQ ID NO: 383218 - RNA, 19 nt, Homo sapiens
  misc_RNA (1)...(19): siRNA sense strand
gcuggcaagucuuccaaug

SEQ ID NO: 383219 - RNA, 19 nt, Homo sapiens
  misc_RNA (1)...(19): siRNA sense strand
ggccaugggcuaauauaug

SEQ ID NO: 383220 - RNA, 19 nt, Homo sapiens
  misc_RNA (1)...(19): siRNA sense strand
uauaugugcuggcaagucu

SEQ ID NO: 383221 - RNA, 19 nt, Homo sapiens
  misc_RNA (1)...(19): siRNA sense strand
gcaagucuuccaaugagau

SEQ ID NO: 383222 - RNA, 19 nt, Homo sapiens
  misc_RNA (1)...(19): siRNA sense strand
uggcaagucuuccaaugag

SEQ ID NO: 383223 - RNA, 19 nt, Homo sapiens
  misc_RNA (1)...(19): siRNA sense strand
gaacucuauugcccuugca

SEQ ID NO: 383224 - RNA, 19 nt, Homo sapiens
  misc_RNA (1)...(19): siRNA sense strand
uggcuggucugauuucuac

SEQ ID NO: 383225 - RNA, 19 nt, Homo sapiens
  misc_RNA (1)...(19): siRNA sense strand
ggcaagucuuccaaugaga

SEQ ID NO: 383226 - RNA, 19 nt, Homo sapiens
  misc_RNA (1)...(19): siRNA sense strand
gagugacccuacugcauac

SEQ ID NO: 383227 - RNA, 19 nt, Homo sapiens
  misc_RNA (1)...(19): siRNA sense strand
gaauaucuggaagagguuu

SEQ ID NO: 383228 - RNA, 19 nt, Homo sapiens
  misc_RNA (1)...(19): siRNA sense strand
guucgaauaucuggaagag

SEQ ID NO: 383229 - RNA, 19 nt, Homo sapiens
  misc_RNA (1)...(19): siRNA sense strand
ucaauaaugguguucgaau

SEQ ID NO: 383230 - RNA, 19 nt, Homo sapiens
  misc_RNA (1)...(19): siRNA sense strand
uaucaauaaugguguucga

SEQ ID NO: 383231 - RNA, 19 nt, Homo sapiens
  misc_RNA (1)...(19): siRNA sense strand
uaaugguguucgaauaucu

SEQ ID NO: 383232 - RNA, 19 nt, Homo sapiens
  misc_RNA (1)...(19): siRNA sense strand
gguguucgaauaucuggaa

SEQ ID NO: 383233 - RNA, 19 nt, Homo sapiens
  misc_RNA (1)...(19): siRNA sense strand
gccaggagaaaccuuauca

SEQ ID NO: 383234 - RNA, 19 nt, Homo sapiens
  misc_RNA (1)...(19): siRNA sense strand
cuauugcccuugcagaaag

SEQ ID NO: 383235 - RNA, 19 nt, Homo sapiens
  misc_RNA (1)...(19): siRNA sense strand
gagaaaccuuaucaaaaca

SEQ ID NO: 383236 - RNA, 19 nt, Homo sapiens
  misc_RNA (1)...(19): siRNA sense strand
guucuacauuaagccaauu

SEQ ID NO: 383237 - RNA, 19 nt, Homo sapiens
  misc_RNA (1)...(19): siRNA sense strand
gacaguacucugcucaaag

SEQ ID NO: 383238 - RNA, 19 nt, Homo sapiens
  misc_RNA (1)...(19): siRNA sense strand
gauugugggccaggagaaa

SEQ ID NO: 383239 - RNA, 19 nt, Homo sapiens
  misc_RNA (1)...(19): siRNA sense strand
gggccaugggcuaauauau

SEQ ID NO: 383240 - RNA, 19 nt, Homo sapiens
  misc_RNA (1)...(19): siRNA sense strand
aaacuuggaacucuauugc

SEQ ID NO: 383241 - RNA, 19 nt, Homo sapiens
  misc_RNA (1)...(19): siRNA sense strand
cgacagcgauaccuccuua

SEQ ID NO: 383242 - RNA, 19 nt, Homo sapiens
  misc_RNA (1)...(19): siRNA sense strand
gagcaaagaugaagaagcu

SEQ ID NO: 383243 - RNA, 19 nt, Homo sapiens
  misc_RNA (1)...(19): siRNA sense strand
gaagagcgaggaugaagau

SEQ ID NO: 383244 - RNA, 19 nt, Homo sapiens
  misc_RNA (1)...(19): siRNA sense strand
gaaacuguacugcaaacaa

SEQ ID NO: 383245 - RNA, 19 nt, Homo sapiens
  misc_RNA (1)...(19): siRNA sense strand
gaaccaaagagcaaagaug

SEQ ID NO: 383246 - RNA, 19 nt, Homo sapiens
  misc_RNA (1)...(19): siRNA sense strand
aaacuguacugcaaacaag

SEQ ID NO: 383247 - RNA, 19 nt, Homo sapiens
  misc_RNA (1)...(19): siRNA sense strand
gcaaacaagacuaccaaca

SEQ ID NO: 383248 - RNA, 19 nt, Homo sapiens
  misc_RNA (1)...(19): siRNA sense strand
gaacgacuccaucuuccau

SEQ ID NO: 383249 - RNA, 19 nt, Homo sapiens
  misc_RNA (1)...(19): siRNA sense strand
gcaagggugacuacgagaa

SEQ ID NO: 383250 - RNA, 19 nt, Homo sapiens
  misc_RNA (1)...(19): siRNA sense strand
caaacaagacuaccaacag

SEQ ID NO: 383251 - RNA, 19 nt, Homo sapiens
  misc_RNA (1)...(19): siRNA sense strand
aaagagcaaagaugaagaa

SEQ ID NO: 383252 - RNA, 19 nt, Homo sapiens
  misc_RNA (1)...(19): siRNA sense strand
gcagaucguggccauggaa

SEQ ID NO: 383253 - RNA, 19 nt, Homo sapiens
  misc_RNA (1)...(19): siRNA sense strand
aaccaaagagcaaagauga

SEQ ID NO: 383254 - RNA, 19 nt, Homo sapiens
  misc_RNA (1)...(19): siRNA sense strand
ccaaagagcaaagaugaag

SEQ ID NO: 383255 - RNA, 19 nt, Homo sapiens
  misc_RNA (1)...(19): siRNA sense strand
caaagagcaaagaugaaga

SEQ ID NO: 383256 - RNA, 19 nt, Homo sapiens
  misc_RNA (1)...(19): siRNA sense strand
cgucgaagccuugccgaaa

SEQ ID NO: 383257 - RNA, 19 nt, Homo sapiens
  misc_RNA (1)...(19): siRNA sense strand
caugcagaguuccuacuuc

SEQ ID NO: 383258 - RNA, 19 nt, Homo sapiens
  misc_RNA (1)...(19): siRNA sense strand
gucgaagccuugccgaaag

SEQ ID NO: 383259 - RNA, 19 nt, Homo sapiens
  misc_RNA (1)...(19): siRNA sense strand
gacuccaucuuccaugaca

SEQ ID NO: 383260 - RNA, 19 nt, Homo sapiens
  misc_RNA (1)...(19): siRNA sense strand
guacugcaaacaagacuac

SEQ ID NO: 383261 - RNA, 19 nt, Homo sapiens
  misc_RNA (1)...(19): siRNA sense strand
ggaugaagauggggacaug

SEQ ID NO: 383262 - RNA, 19 nt, Homo sapiens
  misc_RNA (1)...(19): siRNA sense strand
gcggcugcauggagaagau

SEQ ID NO: 383263 - RNA, 19 nt, Homo sapiens
  misc_RNA (1)...(19): siRNA sense strand
acgcaagggcgacgaauuc

SEQ ID NO: 383264 - RNA, 19 nt, Homo sapiens
  misc_RNA (1)...(19): siRNA sense strand
acgacuccaucuuccauga

SEQ ID NO: 383265 - RNA, 19 nt, Homo sapiens
  misc_RNA (1)...(19): siRNA sense strand
ugaagagcgaggaugaaga

SEQ ID NO: 383266 - RNA, 19 nt, Homo sapiens
  misc_RNA (1)...(19): siRNA sense strand
caagggugacuacgagaag

SEQ ID NO: 383267 - RNA, 19 nt, Homo sapiens
  misc_RNA (1)...(19): siRNA sense strand
agcgauaccuccuuaacca

SEQ ID NO: 383268 - RNA, 19 nt, Homo sapiens
  misc_RNA (1)...(19): siRNA sense strand
uuucagaaccaaagagcaa

SEQ ID NO: 383269 - RNA, 19 nt, Homo sapiens
  misc_RNA (1)...(19): siRNA sense strand
ccagaaggcgucaauguug

SEQ ID NO: 383270 - RNA, 19 nt, Homo sapiens
  misc_RNA (1)...(19): siRNA sense strand
gggaaucucgugacauuug

SEQ ID NO: 383271 - RNA, 19 nt, Homo sapiens
  misc_RNA (1)...(19): siRNA sense strand
ggccacagccugagcaaga

SEQ ID NO: 383272 - RNA, 19 nt, Homo sapiens
  misc_RNA (1)...(19): siRNA sense strand
uugggaaucucgugacauu

SEQ ID NO: 383273 - RNA, 19 nt, Homo sapiens
  misc_RNA (1)...(19): siRNA sense strand
gcuccgaccaggacaacua

SEQ ID NO: 383274 - RNA, 19 nt, Homo sapiens
  misc_RNA (1)...(19): siRNA sense strand
ggaaucucgugacauuugg

SEQ ID NO: 383275 - RNA, 19 nt, Homo sapiens
  misc_RNA (1)...(19): siRNA sense strand
ggacaacuacugcgugacu

SEQ ID NO: 383276 - RNA, 19 nt, Homo sapiens
  misc_RNA (1)...(19): siRNA sense strand
agagcuuucugugcaauuu

SEQ ID NO: 383277 - RNA, 19 nt, Homo sapiens
  misc_RNA (1)...(19): siRNA sense strand
cccagaaggcgucaauguu

SEQ ID NO: 383278 - RNA, 19 nt, Homo sapiens
  misc_RNA (1)...(19): siRNA sense strand
gcuugaaccagaagagcaa

SEQ ID NO: 383279 - RNA, 19 nt, Homo sapiens
  misc_RNA (1)...(19): siRNA sense strand
cauugggaaucucgugaca

SEQ ID NO: 383280 - RNA, 19 nt, Homo sapiens
  misc_RNA (1)...(19): siRNA sense strand
ggagucagcugcaaauauu

SEQ ID NO: 383281 - RNA, 19 nt, Homo sapiens
  misc_RNA (1)...(19): siRNA sense strand
gaagagagcucagccacaa

SEQ ID NO: 383282 - RNA, 19 nt, Homo sapiens
  misc_RNA (1)...(19): siRNA sense strand
gaagauaugagguguuuga

SEQ ID NO: 383283 - RNA, 19 nt, Homo sapiens
  misc_RNA (1)...(19): siRNA sense strand
caaauauucucuucuguuc

SEQ ID NO: 383284 - RNA, 19 nt, Homo sapiens
  misc_RNA (1)...(19): siRNA sense strand
gagagaaacacaaagcuuu

SEQ ID NO: 383285 - RNA, 19 nt, Homo sapiens
  misc_RNA (1)...(19): siRNA sense strand
gcaaauauucucuucuguu

SEQ ID NO: 383286 - RNA, 19 nt, Homo sapiens
  misc_RNA (1)...(19): siRNA sense strand
gggaaacacugucauguac

SEQ ID NO: 383287 - RNA, 19 nt, Homo sapiens
  misc_RNA (1)...(19): siRNA sense strand
gcagauccacucauuaaau

SEQ ID NO: 383288 - RNA, 19 nt, Homo sapiens
  misc_RNA (1)...(19): siRNA sense strand
caaagagucacacagauga

SEQ ID NO: 383289 - RNA, 19 nt, Homo sapiens
  misc_RNA (1)...(19): siRNA sense strand
ccagggauccuuacaagaa

SEQ ID NO: 383290 - RNA, 19 nt, Homo sapiens
  misc_RNA (1)...(19): siRNA sense strand
acacagagauugagaacgu

SEQ ID NO: 383291 - RNA, 19 nt, Homo sapiens
  misc_RNA (1)...(19): siRNA sense strand
ucacggaaguugagucugu

SEQ ID NO: 383292 - RNA, 19 nt, Homo sapiens
  misc_RNA (1)...(19): siRNA sense strand
gaacuucuguaacaucacu

SEQ ID NO: 383293 - RNA, 19 nt, Homo sapiens
  misc_RNA (1)...(19): siRNA sense strand
gcaaucugacucugaauga

SEQ ID NO: 383294 - RNA, 19 nt, Homo sapiens
  misc_RNA (1)...(19): siRNA sense strand
gaaaguccuaccuaugaaa

SEQ ID NO: 383295 - RNA, 19 nt, Homo sapiens
  misc_RNA (1)...(19): siRNA sense strand
acagcaaccucacaacuga

SEQ ID NO: 383296 - RNA, 19 nt, Homo sapiens
  misc_RNA (1)...(19): siRNA sense strand
uggaagauaugagguguuu

SEQ ID NO: 383297 - RNA, 19 nt, Homo sapiens
  misc_RNA (1)...(19): siRNA sense strand
gcccaucaguggaagauau

SEQ ID NO: 383298 - RNA, 19 nt, Homo sapiens
  misc_RNA (1)...(19): siRNA sense strand
cagauaaaccaaaggaauu

SEQ ID NO: 383299 - RNA, 19 nt, Homo sapiens
  misc_RNA (1)...(19): siRNA sense strand
cagauccacucauuaaauc

SEQ ID NO: 383300 - RNA, 19 nt, Homo sapiens
  misc_RNA (1)...(19): siRNA sense strand
ugaaaguccuaccuaugaa

SEQ ID NO: 383301 - RNA, 19 nt, Homo sapiens
  misc_RNA (1)...(19): siRNA sense strand
gacuagacaucaccaagug

SEQ ID NO: 383302 - RNA, 19 nt, Homo sapiens
  misc_RNA (1)...(19): siRNA sense strand
cggcagauccacucauuaa

SEQ ID NO: 383303 - RNA, 19 nt, Homo sapiens
  misc_RNA (1)...(19): siRNA sense strand
acacauccaucauuagcaa

SEQ ID NO: 383304 - RNA, 19 nt, Homo sapiens
  misc_RNA (1)...(19): siRNA sense strand
gagaacgucaucuggauug

SEQ ID NO: 383305 - RNA, 19 nt, Homo sapiens
  misc_RNA (1)...(19): siRNA sense strand
cuaaacaucucaguagaca

SEQ ID NO: 383306 - RNA, 19 nt, Homo sapiens
  misc_RNA (1)...(19): siRNA sense strand
gaaacacugucauguacac

SEQ ID NO: 383307 - RNA, 19 nt, Homo sapiens
  misc_RNA (1)...(19): siRNA sense strand
gggaaucacaccucaaugu

SEQ ID NO: 383308 - RNA, 19 nt, Homo sapiens
  misc_RNA (1)...(19): siRNA sense strand
ccaaagagucacacagaug

SEQ ID NO: 383309 - RNA, 19 nt, Homo sapiens
  misc_RNA (1)...(19): siRNA sense strand
cugaaaguccuaccuauga

SEQ ID NO: 383310 - RNA, 19 nt, Homo sapiens
  misc_RNA (1)...(19): siRNA sense strand
ccagauaaaccaaaggaau

SEQ ID NO: 383311 - RNA, 19 nt, Homo sapiens
  misc_RNA (1)...(19): siRNA sense strand
caacagaaugaucuugaga

SEQ ID NO: 383312 - RNA, 19 nt, Homo sapiens
  misc_RNA (1)...(19): siRNA sense strand
gaccugagagaaacacaaa

SEQ ID NO: 383313 - RNA, 19 nt, Homo sapiens
  misc_RNA (1)...(19): siRNA sense strand
gaugcaggauccuacaaag

SEQ ID NO: 383314 - RNA, 19 nt, Homo sapiens
  misc_RNA (1)...(19): siRNA sense strand
gcagaaggaagcuguugug

SEQ ID NO: 383315 - RNA, 19 nt, Homo sapiens
  misc_RNA (1)...(19): siRNA sense strand
cuacaaagcccagauaaac

SEQ ID NO: 383316 - RNA, 19 nt, Homo sapiens
  misc_RNA (1)...(19): siRNA sense strand
acagaccucucuccucuuc

SEQ ID NO: 383317 - RNA, 19 nt, Homo sapiens
  misc_RNA (1)...(19): siRNA sense strand
ggaaguugagucugugguu

SEQ ID NO: 383318 - RNA, 19 nt, Homo sapiens
  misc_RNA (1)...(19): siRNA sense strand
aaacaucucaguagacaca

SEQ ID NO: 383319 - RNA, 19 nt, Homo sapiens
  misc_RNA (1)...(19): siRNA sense strand
gagcucagccacaaucuac

SEQ ID NO: 383320 - RNA, 19 nt, Homo sapiens
  misc_RNA (1)...(19): siRNA sense strand
cacaaucuacugcuccaua

SEQ ID NO: 383321 - RNA, 19 nt, Homo sapiens
  misc_RNA (1)...(19): siRNA sense strand
ccagucacccugccacuug

SEQ ID NO: 383322 - RNA, 19 nt, Homo sapiens
  misc_RNA (1)...(19): siRNA sense strand
ggaaucacaccucaauguc

SEQ ID NO: 383323 - RNA, 19 nt, Homo sapiens
  misc_RNA (1)...(19): siRNA sense strand
cugcaaauauucucuucug

SEQ ID NO: 383324 - RNA, 19 nt, Homo sapiens
  misc_RNA (1)...(19): siRNA sense strand
caccaaagagucacacaga

SEQ ID NO: 383325 - RNA, 19 nt, Homo sapiens
  misc_RNA (1)...(19): siRNA sense strand
ucacaacugaggaggauga

SEQ ID NO: 383326 - RNA, 19 nt, Homo sapiens
  misc_RNA (1)...(19): siRNA sense strand
gccacacgcuauacucugu

SEQ ID NO: 383327 - RNA, 19 nt, Homo sapiens
  misc_RNA (1)...(19): siRNA sense strand
ggacugcucccugaagauc

SEQ ID NO: 383328 - RNA, 19 nt, Homo sapiens
  misc_RNA (1)...(19): siRNA sense strand
ggauuggguuguuccugau

SEQ ID NO: 383329 - RNA, 19 nt, Homo sapiens
  misc_RNA (1)...(19): siRNA sense strand
caggaguucccaccaguuu

SEQ ID NO: 383330 - RNA, 19 nt, Homo sapiens
  misc_RNA (1)...(19): siRNA sense strand
gaaucacaccucaaugucu

SEQ ID NO: 383331 - RNA, 19 nt, Homo sapiens
  misc_RNA (1)...(19): siRNA sense strand
gguuguuccugaugguuug

SEQ ID NO: 383332 - RNA, 19 nt, Homo sapiens
  misc_RNA (1)...(19): siRNA sense strand
cagcuggccacacgcuaua

SEQ ID NO: 383333 - RNA, 19 nt, Homo sapiens
  misc_RNA (1)...(19): siRNA sense strand
caccguguaugcacaagug

SEQ ID NO: 383334 - RNA, 19 nt, Homo sapiens
  misc_RNA (1)...(19): siRNA sense strand
gacagcaaccucacaacug

SEQ ID NO: 383335 - RNA, 19 nt, Homo sapiens
  misc_RNA (1)...(19): siRNA sense strand
ggaggaauucacccuguuc

SEQ ID NO: 383336 - RNA, 19 nt, Homo sapiens
  misc_RNA (1)...(19): siRNA sense strand
cacaacagaaugaucuuga

SEQ ID NO: 383337 - RNA, 19 nt, Homo sapiens
  misc_RNA (1)...(19): siRNA sense strand
ucauggagaagcagugaaa

SEQ ID NO: 383338 - RNA, 19 nt, Homo sapiens
  misc_RNA (1)...(19): siRNA sense strand
ucacccuguucgucuauga

SEQ ID NO: 383339 - RNA, 19 nt, Homo sapiens
  misc_RNA (1)...(19): siRNA sense strand
gggccaagcagacuaugau

SEQ ID NO: 383340 - RNA, 19 nt, Homo sapiens
  misc_RNA (1)...(19): siRNA sense strand
gaggagucagcugcaaaua

SEQ ID NO: 383341 - RNA, 19 nt, Homo sapiens
  misc_RNA (1)...(19): siRNA sense strand
ggaaacacugucauguaca

SEQ ID NO: 383342 - RNA, 19 nt, Homo sapiens
  misc_RNA (1)...(19): siRNA sense strand
ucuguaacaucacucuaau

SEQ ID NO: 383343 - RNA, 19 nt, Homo sapiens
  misc_RNA (1)...(19): siRNA sense strand
acccagaccugccauacau

SEQ ID NO: 383344 - RNA, 19 nt, Homo sapiens
  misc_RNA (1)...(19): siRNA sense strand
ggaguucccaccaguuucu

SEQ ID NO: 383345 - RNA, 19 nt, Homo sapiens
  misc_RNA (1)...(19): siRNA sense strand
aacggcagauccacucauu

SEQ ID NO: 383346 - RNA, 19 nt, Homo sapiens
  misc_RNA (1)...(19): siRNA sense strand
guuuaacacauccaucauu

SEQ ID NO: 383347 - RNA, 19 nt, Homo sapiens
  misc_RNA (1)...(19): siRNA sense strand
cgacuagacaucaccaagu

SEQ ID NO: 383348 - RNA, 19 nt, Homo sapiens
  misc_RNA (1)...(19): siRNA sense strand
ugagagaaacacaaagcuu

SEQ ID NO: 383349 - RNA, 19 nt, Homo sapiens
  misc_RNA (1)...(19): siRNA sense strand
gcaggaguucccaccaguu

SEQ ID NO: 383350 - RNA, 19 nt, Homo sapiens
  misc_RNA (1)...(19): siRNA sense strand
uaacacauccaucauuagc

SEQ ID NO: 383351 - RNA, 19 nt, Homo sapiens
  misc_RNA (1)...(19): siRNA sense strand
cugugaaggugucugagaa

SEQ ID NO: 383352 - RNA, 19 nt, Homo sapiens
  misc_RNA (1)...(19): siRNA sense strand
caaucugacucugaaugau

SEQ ID NO: 383353 - RNA, 19 nt, Homo sapiens
  misc_RNA (1)...(19): siRNA sense strand
cuacugcuccauacggaaa

SEQ ID NO: 383354 - RNA, 19 nt, Homo sapiens
  misc_RNA (1)...(19): siRNA sense strand
gaucuucagcuggugcauu

SEQ ID NO: 383355 - RNA, 19 nt, Homo sapiens
  misc_RNA (1)...(19): siRNA sense strand
ccuacaaagcccagauaaa

SEQ ID NO: 383356 - RNA, 19 nt, Homo sapiens
  misc_RNA (1)...(19): siRNA sense strand
uuucgcacgucccaaagaa

SEQ ID NO: 383357 - RNA, 19 nt, Homo sapiens
  misc_RNA (1)...(19): siRNA sense strand
guagacacagagauugaga

SEQ ID NO: 383358 - RNA, 19 nt, Homo sapiens
  misc_RNA (1)...(19): siRNA sense strand
ggaccugagagaaacacaa

SEQ ID NO: 383359 - RNA, 19 nt, Homo sapiens
  misc_RNA (1)...(19): siRNA sense strand
caguagacacagagauuga

SEQ ID NO: 383360 - RNA, 19 nt, Homo sapiens
  misc_RNA (1)...(19): siRNA sense strand
cccaccaguuucuuucuga

SEQ ID NO: 383361 - RNA, 19 nt, Homo sapiens
  misc_RNA (1)...(19): siRNA sense strand
cagaggagucagcugcaaa

SEQ ID NO: 383362 - RNA, 19 nt, Homo sapiens
  misc_RNA (1)...(19): siRNA sense strand
acaaucuacugcuccauac

SEQ ID NO: 383363 - RNA, 19 nt, Homo sapiens
  misc_RNA (1)...(19): siRNA sense strand
cuccauaugucacggaagu

SEQ ID NO: 383364 - RNA, 19 nt, Homo sapiens
  misc_RNA (1)...(19): siRNA sense strand
cacaagcccaucaguggaa

SEQ ID NO: 383365 - RNA, 19 nt, Homo sapiens
  misc_RNA (1)...(19): siRNA sense strand
cccuaaacaucucaguaga

SEQ ID NO: 383366 - RNA, 19 nt, Homo sapiens
  misc_RNA (1)...(19): siRNA sense strand
gacaucaccaaguggaguu

SEQ ID NO: 383367 - RNA, 19 nt, Homo sapiens
  misc_RNA (1)...(19): siRNA sense strand
ggggaaacacugucaugua

SEQ ID NO: 383368 - RNA, 19 nt, Homo sapiens
  misc_RNA (1)...(19): siRNA sense strand
gcccagauaaaccaaagga

SEQ ID NO: 383369 - RNA, 19 nt, Homo sapiens
  misc_RNA (1)...(19): siRNA sense strand
ugaaugaugcaggauccua

SEQ ID NO: 383370 - RNA, 19 nt, Homo sapiens
  misc_RNA (1)...(19): siRNA sense strand
ggcagauccacucauuaaa

SEQ ID NO: 383371 - RNA, 19 nt, Homo sapiens
  misc_RNA (1)...(19): siRNA sense strand
uugagaacgucaucuggau

SEQ ID NO: 383372 - RNA, 19 nt, Homo sapiens
  misc_RNA (1)...(19): siRNA sense strand
ugagaacgucaucuggauu

SEQ ID NO: 383373 - RNA, 19 nt, Homo sapiens
  misc_RNA (1)...(19): siRNA sense strand
aucuucagcuggugcauuu

SEQ ID NO: 383374 - RNA, 19 nt, Homo sapiens
  misc_RNA (1)...(19): siRNA sense strand
ccugaaaguccuaccuaug

SEQ ID NO: 383375 - RNA, 19 nt, Homo sapiens
  misc_RNA (1)...(19): siRNA sense strand
gagauuccugaaaguccua

SEQ ID NO: 383376 - RNA, 19 nt, Homo sapiens
  misc_RNA (1)...(19): siRNA sense strand
acaacagaaugaucuugag

SEQ ID NO: 383377 - RNA, 19 nt, Homo sapiens
  misc_RNA (1)...(19): siRNA sense strand
ccacaacagaaugaucuug

SEQ ID NO: 383378 - RNA, 19 nt, Homo sapiens
  misc_RNA (1)...(19): siRNA sense strand
gcucagccacaaucuacug

SEQ ID NO: 383379 - RNA, 19 nt, Homo sapiens
  misc_RNA (1)...(19): siRNA sense strand
ccauaugucacggaaguug

SEQ ID NO: 383380 - RNA, 19 nt, Homo sapiens
  misc_RNA (1)...(19): siRNA sense strand
gaacggcccuucaaaugug

SEQ ID NO: 383381 - RNA, 19 nt, Homo sapiens
  misc_RNA (1)...(19): siRNA sense strand
gcaaggaccgcaugagcua

SEQ ID NO: 383382 - RNA, 19 nt, Homo sapiens
  misc_RNA (1)...(19): siRNA sense strand
caaagguacuggugagguu

SEQ ID NO: 383383 - RNA, 19 nt, Homo sapiens
  misc_RNA (1)...(19): siRNA sense strand
caacagaacggcccuucaa

SEQ ID NO: 383384 - RNA, 19 nt, Homo sapiens
  misc_RNA (1)...(19): siRNA sense strand
gaaccaugccugcgagaug

SEQ ID NO: 383385 - RNA, 19 nt, Homo sapiens
  misc_RNA (1)...(19): siRNA sense strand
gagcucggcuuauauuucg

SEQ ID NO: 383386 - RNA, 19 nt, Homo sapiens
  misc_RNA (1)...(19): siRNA sense strand
caagugcacucaacagaac

SEQ ID NO: 383387 - RNA, 19 nt, Homo sapiens
  misc_RNA (1)...(19): siRNA sense strand
ggaagcgcauccggaagaa

SEQ ID NO: 383388 - RNA, 19 nt, Homo sapiens
  misc_RNA (1)...(19): siRNA sense strand
cagaacggcccuucaaaug

SEQ ID NO: 383389 - RNA, 19 nt, Homo sapiens
  misc_RNA (1)...(19): siRNA sense strand
ucaaaugugagaaauguga

SEQ ID NO: 383390 - RNA, 19 nt, Homo sapiens
  misc_RNA (1)...(19): siRNA sense strand
ucacguguguggcaagaug

SEQ ID NO: 383391 - RNA, 19 nt, Homo sapiens
  misc_RNA (1)...(19): siRNA sense strand
gggaagcgcauccggaaga

SEQ ID NO: 383392 - RNA, 19 nt, Homo sapiens
  misc_RNA (1)...(19): siRNA sense strand
cggaucaccucaacaguca

SEQ ID NO: 383393 - RNA, 19 nt, Homo sapiens
  misc_RNA (1)...(19): siRNA sense strand
ccucaacagucacgucaga

SEQ ID NO: 383394 - RNA, 19 nt, Homo sapiens
  misc_RNA (1)...(19): siRNA sense strand
cuucaaaugugagaaaugu

SEQ ID NO: 383395 - RNA, 19 nt, Homo sapiens
  misc_RNA (1)...(19): siRNA sense strand
gcuccagucccgcuucuuu

SEQ ID NO: 383396 - RNA, 19 nt, Homo sapiens
  misc_RNA (1)...(19): siRNA sense strand
gacaagugcacucaacaga

SEQ ID NO: 383397 - RNA, 19 nt, Homo sapiens
  misc_RNA (1)...(19): siRNA sense strand
ucugugagcucugcaacaa

SEQ ID NO: 383398 - RNA, 19 nt, Homo sapiens
  misc_RNA (1)...(19): siRNA sense strand
gcgccaaggaguucaagaa

SEQ ID NO: 383399 - RNA, 19 nt, Homo sapiens
  misc_RNA (1)...(19): siRNA sense strand
ggugagguuuguccaaugg

SEQ ID NO: 383400 - RNA, 19 nt, Homo sapiens
  misc_RNA (1)...(19): siRNA sense strand
ugacggcgcugugcacaag

SEQ ID NO: 383401 - RNA, 19 nt, Homo sapiens
  misc_RNA (1)...(19): siRNA sense strand
caacagucacgucagacaa

SEQ ID NO: 383402 - RNA, 19 nt, Homo sapiens
  misc_RNA (1)...(19): siRNA sense strand
aggagaaagugccauguca

SEQ ID NO: 383403 - RNA, 19 nt, Homo sapiens
  misc_RNA (1)...(19): siRNA sense strand
agaagaagacaaagagcaa

SEQ ID NO: 383404 - RNA, 19 nt, Homo sapiens
  misc_RNA (1)...(19): siRNA sense strand
agaaaugugaggcagcuuu

SEQ ID NO: 383405 - RNA, 19 nt, Homo sapiens
  misc_RNA (1)...(19): siRNA sense strand
cgucugccuuggagaagaa

SEQ ID NO: 383406 - RNA, 19 nt, Homo sapiens
  misc_RNA (1)...(19): siRNA sense strand
caagaacggcuacaaucuc

SEQ ID NO: 383407 - RNA, 19 nt, Homo sapiens
  misc_RNA (1)...(19): siRNA sense strand
ucagacaagugcacucaac

SEQ ID NO: 383408 - RNA, 19 nt, Homo sapiens
  misc_RNA (1)...(19): siRNA sense strand
gagcucugcaacaaaggua

SEQ ID NO: 383409 - RNA, 19 nt, Homo sapiens
  misc_RNA (1)...(19): siRNA sense strand
ugugagcucugcaacaaag

SEQ ID NO: 383410 - RNA, 19 nt, Homo sapiens
  misc_RNA (1)...(19): siRNA sense strand
ucaagaacggcuacaaucu

SEQ ID NO: 383411 - RNA, 19 nt, Homo sapiens
  misc_RNA (1)...(19): siRNA sense strand
acagaacggcccuucaaau

SEQ ID NO: 383412 - RNA, 19 nt, Homo sapiens
  misc_RNA (1)...(19): siRNA sense strand
cuaugaagaugccgaccau

SEQ ID NO: 383413 - RNA, 19 nt, Homo sapiens
  misc_RNA (1)...(19): siRNA sense strand
cuacaacugcucccacugu

SEQ ID NO: 383414 - RNA, 19 nt, Homo sapiens
  misc_RNA (1)...(19): siRNA sense strand
agaacggcccuucaaaugu

SEQ ID NO: 383415 - RNA, 19 nt, Homo sapiens
  misc_RNA (1)...(19): siRNA sense strand
acaagugcacucaacagaa

SEQ ID NO: 383416 - RNA, 19 nt, Homo sapiens
  misc_RNA (1)...(19): siRNA sense strand
gaggagaaagugccauguc

SEQ ID NO: 383417 - RNA, 19 nt, Homo sapiens
  misc_RNA (1)...(19): siRNA sense strand
gcccuucaaaugugagaaa

SEQ ID NO: 383418 - RNA, 19 nt, Homo sapiens
  misc_RNA (1)...(19): siRNA sense strand
ccaggguccucaccauguc

SEQ ID NO: 383419 - RNA, 19 nt, Homo sapiens
  misc_RNA (1)...(19): siRNA sense strand
gagcuccagucccgcuucu

SEQ ID NO: 383420 - RNA, 19 nt, Homo sapiens
  misc_RNA (1)...(19): siRNA sense strand
gccaggguccucaccaugu

SEQ ID NO: 383421 - RNA, 19 nt, Homo sapiens
  misc_RNA (1)...(19): siRNA sense strand
ugagcucggcuuauauuuc

SEQ ID NO: 383422 - RNA, 19 nt, Homo sapiens
  misc_RNA (1)...(19): siRNA sense strand
aaccaugccugcgagaugu

SEQ ID NO: 383423 - RNA, 19 nt, Homo sapiens
  misc_RNA (1)...(19): siRNA sense strand
ccuuggagaagaagacaaa

SEQ ID NO: 383424 - RNA, 19 nt, Homo sapiens
  misc_RNA (1)...(19): siRNA sense strand
caaaugccauagaugaauu

SEQ ID NO: 383425 - RNA, 19 nt, Homo sapiens
  misc_RNA (1)...(19): siRNA sense strand
gacaaucaauccacaagug

SEQ ID NO: 383426 - RNA, 19 nt, Homo sapiens
  misc_RNA (1)...(19): siRNA sense strand
cagcagucuuugugauuua

SEQ ID NO: 383427 - RNA, 19 nt, Homo sapiens
  misc_RNA (1)...(19): siRNA sense strand
gagcaauguugagguguuu

SEQ ID NO: 383428 - RNA, 19 nt, Homo sapiens
  misc_RNA (1)...(19): siRNA sense strand
cuacaaaugccauagauga

SEQ ID NO: 383429 - RNA, 19 nt, Homo sapiens
  misc_RNA (1)...(19): siRNA sense strand
ggaugaaacucugagcaau

SEQ ID NO: 383430 - RNA, 19 nt, Homo sapiens
  misc_RNA (1)...(19): siRNA sense strand
gacaaugccacuacaaaug

SEQ ID NO: 383431 - RNA, 19 nt, Homo sapiens
  misc_RNA (1)...(19): siRNA sense strand
gaaacucugagcaauguug

SEQ ID NO: 383432 - RNA, 19 nt, Homo sapiens
  misc_RNA (1)...(19): siRNA sense strand
gaaugugauuuccaagaca

SEQ ID NO: 383433 - RNA, 19 nt, Homo sapiens
  misc_RNA (1)...(19): siRNA sense strand
uagaugaauugaaggaaug

SEQ ID NO: 383434 - RNA, 19 nt, Homo sapiens
  misc_RNA (1)...(19): siRNA sense strand
gagaaugugauuuccaaga

SEQ ID NO: 383435 - RNA, 19 nt, Homo sapiens
  misc_RNA (1)...(19): siRNA sense strand
ugagguguuuaugcaauua

SEQ ID NO: 383436 - RNA, 19 nt, Homo sapiens
  misc_RNA (1)...(19): siRNA sense strand
gaugaaacucugagcaaug

SEQ ID NO: 383437 - RNA, 19 nt, Homo sapiens
  misc_RNA (1)...(19): siRNA sense strand
ugccauagaugaauugaag

SEQ ID NO: 383438 - RNA, 19 nt, Homo sapiens
  misc_RNA (1)...(19): siRNA sense strand
ugacagcagucuuugugau

SEQ ID NO: 383439 - RNA, 19 nt, Homo sapiens
  misc_RNA (1)...(19): siRNA sense strand
cgacaaugccacuacaaau

SEQ ID NO: 383440 - RNA, 19 nt, Homo sapiens
  misc_RNA (1)...(19): siRNA sense strand
gaaggaauguuuucuuaac

SEQ ID NO: 383441 - RNA, 19 nt, Homo sapiens
  misc_RNA (1)...(19): siRNA sense strand
gacagcagucuuugugauu

SEQ ID NO: 383442 - RNA, 19 nt, Homo sapiens
  misc_RNA (1)...(19): siRNA sense strand
acagcagucuuugugauuu

SEQ ID NO: 383443 - RNA, 19 nt, Homo sapiens
  misc_RNA (1)...(19): siRNA sense strand
gcaauguugagguguuuau

SEQ ID NO: 383444 - RNA, 19 nt, Homo sapiens
  misc_RNA (1)...(19): siRNA sense strand
guugagguguuuaugcaau

SEQ ID NO: 383445 - RNA, 19 nt, Homo sapiens
  misc_RNA (1)...(19): siRNA sense strand
ugagcaauguugagguguu

SEQ ID NO: 383446 - RNA, 19 nt, Homo sapiens
  misc_RNA (1)...(19): siRNA sense strand
uaaccaaacggaugaaacu

SEQ ID NO: 383447 - RNA, 19 nt, Homo sapiens
  misc_RNA (1)...(19): siRNA sense strand
ucaauccacaagugucuaa

SEQ ID NO: 383448 - RNA, 19 nt, Homo sapiens
  misc_RNA (1)...(19): siRNA sense strand
ccacuacaaaugccauaga

SEQ ID NO: 383449 - RNA, 19 nt, Homo sapiens
  misc_RNA (1)...(19): siRNA sense strand
aaugugauuuccaagacaa

SEQ ID NO: 383450 - RNA, 19 nt, Homo sapiens
  misc_RNA (1)...(19): siRNA sense strand
agaaugugauuuccaagac

SEQ ID NO: 383451 - RNA, 19 nt, Homo sapiens
  misc_RNA (1)...(19): siRNA sense strand
agacgacaaugccacuaca

SEQ ID NO: 383452 - RNA, 19 nt, Homo sapiens
  misc_RNA (1)...(19): siRNA sense strand
augaaacucugagcaaugu

SEQ ID NO: 383453 - RNA, 19 nt, Homo sapiens
  misc_RNA (1)...(19): siRNA sense strand
cacuacaaaugccauagau

SEQ ID NO: 383454 - RNA, 19 nt, Homo sapiens
  misc_RNA (1)...(19): siRNA sense strand
auauaugacagcagucuuu

SEQ ID NO: 383455 - RNA, 19 nt, Homo sapiens
  misc_RNA (1)...(19): siRNA sense strand
uaugacagcagucuuugug

SEQ ID NO: 383456 - RNA, 19 nt, Homo sapiens
  misc_RNA (1)...(19): siRNA sense strand
caagacaaucaauccacaa

SEQ ID NO: 383457 - RNA, 19 nt, Homo sapiens
  misc_RNA (1)...(19): siRNA sense strand
gagguguuuaugcaauuaa

SEQ ID NO: 383458 - RNA, 19 nt, Homo sapiens
  misc_RNA (1)...(19): siRNA sense strand
uacaaaugccauagaugaa

SEQ ID NO: 383459 - RNA, 19 nt, Homo sapiens
  misc_RNA (1)...(19): siRNA sense strand
ccauagaugaauugaagga

SEQ ID NO: 383460 - RNA, 19 nt, Homo sapiens
  misc_RNA (1)...(19): siRNA sense strand
acaaaugccauagaugaau

SEQ ID NO: 383461 - RNA, 19 nt, Homo sapiens
  misc_RNA (1)...(19): siRNA sense strand
ggaauguuuucuuaaccaa

SEQ ID NO: 383462 - RNA, 19 nt, Homo sapiens
  misc_RNA (1)...(19): siRNA sense strand
uugagguguuuaugcaauu

SEQ ID NO: 383463 - RNA, 19 nt, Homo sapiens
  misc_RNA (1)...(19): siRNA sense strand
cggaugaaacucugagcaa

SEQ ID NO: 383464 - RNA, 19 nt, Homo sapiens
  misc_RNA (1)...(19): siRNA sense strand
cuaagacugaauacaaaga

SEQ ID NO: 383465 - RNA, 19 nt, Homo sapiens
  misc_RNA (1)...(19): siRNA sense strand
gacugaauacaaagaacuu

SEQ ID NO: 383466 - RNA, 19 nt, Homo sapiens
  misc_RNA (1)...(19): siRNA sense strand
uauuggagaaugugauuuc

SEQ ID NO: 383467 - RNA, 19 nt, Homo sapiens
  misc_RNA (1)...(19): siRNA sense strand
ggaagaagcuuuagaagug

SEQ ID NO: 383468 - RNA, 19 nt, Homo sapiens
  misc_RNA (1)...(19): siRNA sense strand
aagaagcucuguaugaaua

SEQ ID NO: 383469 - RNA, 19 nt, Homo sapiens
  misc_RNA (1)...(19): siRNA sense strand
ggaagaaguggaagaaauu

SEQ ID NO: 383470 - RNA, 19 nt, Homo sapiens
  misc_RNA (1)...(19): siRNA sense strand
ugaagaagcucuguaugaa

SEQ ID NO: 383471 - RNA, 19 nt, Homo sapiens
  misc_RNA (1)...(19): siRNA sense strand
uagaugagcuggagaguuc

SEQ ID NO: 383472 - RNA, 19 nt, Homo sapiens
  misc_RNA (1)...(19): siRNA sense strand
caaaaugggucaacauauu

SEQ ID NO: 383473 - RNA, 19 nt, Homo sapiens
  misc_RNA (1)...(19): siRNA sense strand
uaggaagacuuggguauuu

SEQ ID NO: 383474 - RNA, 19 nt, Homo sapiens
  misc_RNA (1)...(19): siRNA sense strand
ggaccuugcuggaggcuau

SEQ ID NO: 383475 - RNA, 19 nt, Homo sapiens
  misc_RNA (1)...(19): siRNA sense strand
gagaaacccaaaccuguaa

SEQ ID NO: 383476 - RNA, 19 nt, Homo sapiens
  misc_RNA (1)...(19): siRNA sense strand
gaaguggaagaaauuguuu

SEQ ID NO: 383477 - RNA, 19 nt, Homo sapiens
  misc_RNA (1)...(19): siRNA sense strand
gaccaacaauguggauuug

SEQ ID NO: 383478 - RNA, 19 nt, Homo sapiens
  misc_RNA (1)...(19): siRNA sense strand
ggaagacuuggguauuuaa

SEQ ID NO: 383479 - RNA, 19 nt, Homo sapiens
  misc_RNA (1)...(19): siRNA sense strand
gaaguggaacgacaggaaa

SEQ ID NO: 383480 - RNA, 19 nt, Homo sapiens
  misc_RNA (1)...(19): siRNA sense strand
gaagaagcucuguaugaau

SEQ ID NO: 383481 - RNA, 19 nt, Homo sapiens
  misc_RNA (1)...(19): siRNA sense strand
uggaagaaguggaagaaau

SEQ ID NO: 383482 - RNA, 19 nt, Homo sapiens
  misc_RNA (1)...(19): siRNA sense strand
gcuggaaacugcccugagu

SEQ ID NO: 383483 - RNA, 19 nt, Homo sapiens
  misc_RNA (1)...(19): siRNA sense strand
gcagauagagacauaugga

SEQ ID NO: 383484 - RNA, 19 nt, Homo sapiens
  misc_RNA (1)...(19): siRNA sense strand
aggaagacuuggguauuua

SEQ ID NO: 383485 - RNA, 19 nt, Homo sapiens
  misc_RNA (1)...(19): siRNA sense strand
ucacagagcacuacaggau

SEQ ID NO: 383486 - RNA, 19 nt, Homo sapiens
  misc_RNA (1)...(19): siRNA sense strand
ugagaaacccaaaccugua

SEQ ID NO: 383487 - RNA, 19 nt, Homo sapiens
  misc_RNA (1)...(19): siRNA sense strand
gaagaaguggaagaaauug

SEQ ID NO: 383488 - RNA, 19 nt, Homo sapiens
  misc_RNA (1)...(19): siRNA sense strand
gcuggaggcuauacuucuu

SEQ ID NO: 383489 - RNA, 19 nt, Homo sapiens
  misc_RNA (1)...(19): siRNA sense strand
guagauuuacuguuuguga

SEQ ID NO: 383490 - RNA, 19 nt, Homo sapiens
  misc_RNA (1)...(19): siRNA sense strand
gaagacuuggguauuuaaa

SEQ ID NO: 383491 - RNA, 19 nt, Homo sapiens
  misc_RNA (1)...(19): siRNA sense strand
ggcuauacuucuucucuug

SEQ ID NO: 383492 - RNA, 19 nt, Homo sapiens
  misc_RNA (1)...(19): siRNA sense strand
guauuuaaaccaugucaga

SEQ ID NO: 383493 - RNA, 19 nt, Homo sapiens
  misc_RNA (1)...(19): siRNA sense strand
caacuugaccaacaaugug

SEQ ID NO: 383494 - RNA, 19 nt, Homo sapiens
  misc_RNA (1)...(19): siRNA sense strand
ugugaaaguuguguagauu

SEQ ID NO: 383495 - RNA, 19 nt, Homo sapiens
  misc_RNA (1)...(19): siRNA sense strand
ugaagcugauggugaaugu

SEQ ID NO: 383496 - RNA, 19 nt, Homo sapiens
  misc_RNA (1)...(19): siRNA sense strand
gagaugcuaggaagacuug

SEQ ID NO: 383497 - RNA, 19 nt, Homo sapiens
  misc_RNA (1)...(19): siRNA sense strand
gaagaucccacuguugaca

SEQ ID NO: 383498 - RNA, 19 nt, Homo sapiens
  misc_RNA (1)...(19): siRNA sense strand
cuucuucucuugcuuguca

SEQ ID NO: 383499 - RNA, 19 nt, Homo sapiens
  misc_RNA (1)...(19): siRNA sense strand
ugaccaacaauguggauuu

SEQ ID NO: 383500 - RNA, 19 nt, Homo sapiens
  misc_RNA (1)...(19): siRNA sense strand
gaagaagauuuuccuaguc

SEQ ID NO: 383501 - RNA, 19 nt, Homo sapiens
  misc_RNA (1)...(19): siRNA sense strand
uugaagaagcucuguauga

SEQ ID NO: 383502 - RNA, 19 nt, Homo sapiens
  misc_RNA (1)...(19): siRNA sense strand
agaaaugcaacuugagaaa

SEQ ID NO: 383503 - RNA, 19 nt, Homo sapiens
  misc_RNA (1)...(19): siRNA sense strand
ggagauauaccaaaaggaa

SEQ ID NO: 383504 - RNA, 19 nt, Homo sapiens
  misc_RNA (1)...(19): siRNA sense strand
acaaggagguugagaucag

SEQ ID NO: 383505 - RNA, 19 nt, Homo sapiens
  misc_RNA (1)...(19): siRNA sense strand
guacuccacucagaaagag

SEQ ID NO: 383506 - RNA, 19 nt, Homo sapiens
  misc_RNA (1)...(19): siRNA sense strand
cacugcagauagagacaua

SEQ ID NO: 383507 - RNA, 19 nt, Homo sapiens
  misc_RNA (1)...(19): siRNA sense strand
agaacuggaagaagcuuua

SEQ ID NO: 383508 - RNA, 19 nt, Homo sapiens
  misc_RNA (1)...(19): siRNA sense strand
gugaaaguuguguagauuu

SEQ ID NO: 383509 - RNA, 19 nt, Homo sapiens
  misc_RNA (1)...(19): siRNA sense strand
gaaaugcaacuugagaaac

SEQ ID NO: 383510 - RNA, 19 nt, Homo sapiens
  misc_RNA (1)...(19): siRNA sense strand
uugaagaucccacuguuga

SEQ ID NO: 383511 - RNA, 19 nt, Homo sapiens
  misc_RNA (1)...(19): siRNA sense strand
gagcuugagaugcuaggaa

SEQ ID NO: 383512 - RNA, 19 nt, Homo sapiens
  misc_RNA (1)...(19): siRNA sense strand
caauuagaaaugcaacuug

SEQ ID NO: 383513 - RNA, 19 nt, Homo sapiens
  misc_RNA (1)...(19): siRNA sense strand
ugacaaggagguugagauc

SEQ ID NO: 383514 - RNA, 19 nt, Homo sapiens
  misc_RNA (1)...(19): siRNA sense strand
gcuaggaagacuuggguau

SEQ ID NO: 383515 - RNA, 19 nt, Homo sapiens
  misc_RNA (1)...(19): siRNA sense strand
guaagaccaccaaauaucg

SEQ ID NO: 383516 - RNA, 19 nt, Homo sapiens
  misc_RNA (1)...(19): siRNA sense strand
gaaaauggagauauaccaa

SEQ ID NO: 383517 - RNA, 19 nt, Homo sapiens
  misc_RNA (1)...(19): siRNA sense strand
agaaguggaagaaauuguu

SEQ ID NO: 383518 - RNA, 19 nt, Homo sapiens
  misc_RNA (1)...(19): siRNA sense strand
gaagauuuuccuagucuaa

SEQ ID NO: 383519 - RNA, 19 nt, Homo sapiens
  misc_RNA (1)...(19): siRNA sense strand
gguacuccacucagaaaga

SEQ ID NO: 383520 - RNA, 19 nt, Homo sapiens
  misc_RNA (1)...(19): siRNA sense strand
ccaauuagaaaugcaacuu

SEQ ID NO: 383521 - RNA, 19 nt, Homo sapiens
  misc_RNA (1)...(19): siRNA sense strand
acaggaaaaugaacaaaga

SEQ ID NO: 383522 - RNA, 19 nt, Homo sapiens
  misc_RNA (1)...(19): siRNA sense strand
uguaagaccaccaaauauc

SEQ ID NO: 383523 - RNA, 19 nt, Homo sapiens
  misc_RNA (1)...(19): siRNA sense strand
gagcacuacaggaugcauu

SEQ ID NO: 383524 - RNA, 19 nt, Homo sapiens
  misc_RNA (1)...(19): siRNA sense strand
uuagaaaugcaacuugaga

SEQ ID NO: 383525 - RNA, 19 nt, Homo sapiens
  misc_RNA (1)...(19): siRNA sense strand
agagacauauggaccacau

SEQ ID NO: 383526 - RNA, 19 nt, Homo sapiens
  misc_RNA (1)...(19): siRNA sense strand
guguaagaccaccaaauau

SEQ ID NO: 383527 - RNA, 19 nt, Homo sapiens
  misc_RNA (1)...(19): siRNA sense strand
ggaaaaugaacaaagaaga

SEQ ID NO: 383528 - RNA, 19 nt, Homo sapiens
  misc_RNA (1)...(19): siRNA sense strand
guguagauuuacuguuugu

SEQ ID NO: 383529 - RNA, 19 nt, Homo sapiens
  misc_RNA (1)...(19): siRNA sense strand
auauuucacuggcaccuau

SEQ ID NO: 383530 - RNA, 19 nt, Homo sapiens
  misc_RNA (1)...(19): siRNA sense strand
caauguggauuuggacaac

SEQ ID NO: 383531 - RNA, 19 nt, Homo sapiens
  misc_RNA (1)...(19): siRNA sense strand
uagaaaugcaacuugagaa

SEQ ID NO: 383532 - RNA, 19 nt, Homo sapiens
  misc_RNA (1)...(19): siRNA sense strand
gaacuggaagaagcuuuag

SEQ ID NO: 383533 - RNA, 19 nt, Homo sapiens
  misc_RNA (1)...(19): siRNA sense strand
aaagcugacucgagaacag

SEQ ID NO: 383534 - RNA, 19 nt, Homo sapiens
  misc_RNA (1)...(19): siRNA sense strand
ggaagaacuggaagaagcu

SEQ ID NO: 383535 - RNA, 19 nt, Homo sapiens
  misc_RNA (1)...(19): siRNA sense strand
uggaagaagcuuuagaagu

SEQ ID NO: 383536 - RNA, 19 nt, Homo sapiens
  misc_RNA (1)...(19): siRNA sense strand
agaaguggaacgacaggaa

SEQ ID NO: 383537 - RNA, 19 nt, Homo sapiens
  misc_RNA (1)...(19): siRNA sense strand
gaggcuauacuucuucucu

SEQ ID NO: 383538 - RNA, 19 nt, Homo sapiens
  misc_RNA (1)...(19): siRNA sense strand
cuaggaagacuuggguauu

SEQ ID NO: 383539 - RNA, 19 nt, Homo sapiens
  misc_RNA (1)...(19): siRNA sense strand
gcaacuugagaaacccaaa

SEQ ID NO: 383540 - RNA, 19 nt, Homo sapiens
  misc_RNA (1)...(19): siRNA sense strand
ggagguugagaucaggaaa

SEQ ID NO: 383541 - RNA, 19 nt, Homo sapiens
  misc_RNA (1)...(19): siRNA sense strand
gaaaguuguguagauuuac

SEQ ID NO: 383542 - RNA, 19 nt, Homo sapiens
  misc_RNA (1)...(19): siRNA sense strand
aaaugcaacuugagaaacc

SEQ ID NO: 383543 - RNA, 19 nt, Homo sapiens
  misc_RNA (1)...(19): siRNA sense strand
cuuugaagaucccacuguu

SEQ ID NO: 383544 - RNA, 19 nt, Homo sapiens
  misc_RNA (1)...(19): siRNA sense strand
gaagaacuggaagaagcuu

SEQ ID NO: 383545 - RNA, 19 nt, Homo sapiens
  misc_RNA (1)...(19): siRNA sense strand
uuccuagucuaagagaaua

SEQ ID NO: 383546 - RNA, 19 nt, Homo sapiens
  misc_RNA (1)...(19): siRNA sense strand
uguguagauuuacuguuug

SEQ ID NO: 383547 - RNA, 19 nt, Homo sapiens
  misc_RNA (1)...(19): siRNA sense strand
caggguacaacucuuugaa

SEQ ID NO: 383548 - RNA, 19 nt, Homo sapiens
  misc_RNA (1)...(19): siRNA sense strand
uggcucagcauaaagauag

SEQ ID NO: 383549 - RNA, 19 nt, Homo sapiens
  misc_RNA (1)...(19): siRNA sense strand
gaguucugaucucccuguu

SEQ ID NO: 383550 - RNA, 19 nt, Homo sapiens
  misc_RNA (1)...(19): siRNA sense strand
gagcuggagaguucugauc

SEQ ID NO: 383551 - RNA, 19 nt, Homo sapiens
  misc_RNA (1)...(19): siRNA sense strand
caacuucaggguacaacuc

SEQ ID NO: 383552 - RNA, 19 nt, Homo sapiens
  misc_RNA (1)...(19): siRNA sense strand
cuucaggguacaacucuuu

SEQ ID NO: 383553 - RNA, 19 nt, Homo sapiens
  misc_RNA (1)...(19): siRNA sense strand
acaggaagaacuggaagaa

SEQ ID NO: 383554 - RNA, 19 nt, Homo sapiens
  misc_RNA (1)...(19): siRNA sense strand
agacuuggguauuuaaacc

SEQ ID NO: 383555 - RNA, 19 nt, Homo sapiens
  misc_RNA (1)...(19): siRNA sense strand
ucacuggcaccuauucaca

SEQ ID NO: 383556 - RNA, 19 nt, Homo sapiens
  misc_RNA (1)...(19): siRNA sense strand
acuggaagaagcuuuagaa

SEQ ID NO: 383557 - RNA, 19 nt, Homo sapiens
  misc_RNA (1)...(19): siRNA sense strand
cugugaaaguuguguagau

SEQ ID NO: 383558 - RNA, 19 nt, Homo sapiens
  misc_RNA (1)...(19): siRNA sense strand
gcuuuuggcucagcauaaa

SEQ ID NO: 383559 - RNA, 19 nt, Homo sapiens
  misc_RNA (1)...(19): siRNA sense strand
ucagaaagagcaacuucag

SEQ ID NO: 383560 - RNA, 19 nt, Homo sapiens
  misc_RNA (1)...(19): siRNA sense strand
gaaacccaaaccuguaaaa

SEQ ID NO: 383561 - RNA, 19 nt, Homo sapiens
  misc_RNA (1)...(19): siRNA sense strand
gaacaagguugcagaaguu

SEQ ID NO: 383562 - RNA, 19 nt, Homo sapiens
  misc_RNA (1)...(19): siRNA sense strand
gaagacauguaaggaauuu

SEQ ID NO: 383563 - RNA, 19 nt, Homo sapiens
  misc_RNA (1)...(19): siRNA sense strand
gagauacuccugagaauaa

SEQ ID NO: 383564 - RNA, 19 nt, Homo sapiens
  misc_RNA (1)...(19): siRNA sense strand
guaaggaauuugcauaaga

SEQ ID NO: 383565 - RNA, 19 nt, Homo sapiens
  misc_RNA (1)...(19): siRNA sense strand
gaaagccaguuggaaagua

SEQ ID NO: 383566 - RNA, 19 nt, Homo sapiens
  misc_RNA (1)...(19): siRNA sense strand
gagaguauaugaaguagca

SEQ ID NO: 383567 - RNA, 19 nt, Homo sapiens
  misc_RNA (1)...(19): siRNA sense strand
acaaguaccuccaaugaga

SEQ ID NO: 383568 - RNA, 19 nt, Homo sapiens
  misc_RNA (1)...(19): siRNA sense strand
gggaagacauguaaggaau

SEQ ID NO: 383569 - RNA, 19 nt, Homo sapiens
  misc_RNA (1)...(19): siRNA sense strand
ucgaaacucugacagcaua

SEQ ID NO: 383570 - RNA, 19 nt, Homo sapiens
  misc_RNA (1)...(19): siRNA sense strand
uggaggagcuuuauuugug

SEQ ID NO: 383571 - RNA, 19 nt, Homo sapiens
  misc_RNA (1)...(19): siRNA sense strand
caagggaccuggauuuggu

SEQ ID NO: 383572 - RNA, 19 nt, Homo sapiens
  misc_RNA (1)...(19): siRNA sense strand
gacaaacuuuucacucuua

SEQ ID NO: 383573 - RNA, 19 nt, Homo sapiens
  misc_RNA (1)...(19): siRNA sense strand
ugaacaagguugcagaagu

SEQ ID NO: 383574 - RNA, 19 nt, Homo sapiens
  misc_RNA (1)...(19): siRNA sense strand
uuacaaguaccuccaauga

SEQ ID NO: 383575 - RNA, 19 nt, Homo sapiens
  misc_RNA (1)...(19): siRNA sense strand
gcucaaggcuggcaaaauc

SEQ ID NO: 383576 - RNA, 19 nt, Homo sapiens
  misc_RNA (1)...(19): siRNA sense strand
caauuacuaugaggauuug

SEQ ID NO: 383577 - RNA, 19 nt, Homo sapiens
  misc_RNA (1)...(19): siRNA sense strand
ggaagacauguaaggaauu

SEQ ID NO: 383578 - RNA, 19 nt, Homo sapiens
  misc_RNA (1)...(19): siRNA sense strand
gagaauaacccugauacuc

SEQ ID NO: 383579 - RNA, 19 nt, Homo sapiens
  misc_RNA (1)...(19): siRNA sense strand
auucaggucugcacuacua

SEQ ID NO: 383580 - RNA, 19 nt, Homo sapiens
  misc_RNA (1)...(19): siRNA sense strand
cagagauacuccugagaau

SEQ ID NO: 383581 - RNA, 19 nt, Homo sapiens
  misc_RNA (1)...(19): siRNA sense strand
ccaaugagaguauaugaag

SEQ ID NO: 383582 - RNA, 19 nt, Homo sapiens
  misc_RNA (1)...(19): siRNA sense strand
gauacuccauuugauuuca

SEQ ID NO: 383583 - RNA, 19 nt, Homo sapiens
  misc_RNA (1)...(19): siRNA sense strand
uaacccugauacuccauuu

SEQ ID NO: 383584 - RNA, 19 nt, Homo sapiens
  misc_RNA (1)...(19): siRNA sense strand
ggaccuggauuugguguac

SEQ ID NO: 383585 - RNA, 19 nt, Homo sapiens
  misc_RNA (1)...(19): siRNA sense strand
gacaauuacuaugaggauu

SEQ ID NO: 383586 - RNA, 19 nt, Homo sapiens
  misc_RNA (1)...(19): siRNA sense strand
gcccaucucugcuaugaac

SEQ ID NO: 383587 - RNA, 19 nt, Homo sapiens
  misc_RNA (1)...(19): siRNA sense strand
aaagccaguuggaaaguau

SEQ ID NO: 383588 - RNA, 19 nt, Homo sapiens
  misc_RNA (1)...(19): siRNA sense strand
uaaggaauuugcauaagac

SEQ ID NO: 383589 - RNA, 19 nt, Homo sapiens
  misc_RNA (1)...(19): siRNA sense strand
guuggaaaguaucacauuc

SEQ ID NO: 383590 - RNA, 19 nt, Homo sapiens
  misc_RNA (1)...(19): siRNA sense strand
uaugaggauuugacagcua

SEQ ID NO: 383591 - RNA, 19 nt, Homo sapiens
  misc_RNA (1)...(19): siRNA sense strand
cauguaaggaauuugcaua

SEQ ID NO: 383592 - RNA, 19 nt, Homo sapiens
  misc_RNA (1)...(19): siRNA sense strand
uguacaagcaggccuuuaa

SEQ ID NO: 383593 - RNA, 19 nt, Homo sapiens
  misc_RNA (1)...(19): siRNA sense strand
acagagauacuccugagaa

SEQ ID NO: 383594 - RNA, 19 nt, Homo sapiens
  misc_RNA (1)...(19): siRNA sense strand
caagguugcagaaguuuua

SEQ ID NO: 383595 - RNA, 19 nt, Homo sapiens
  misc_RNA (1)...(19): siRNA sense strand
caaugagaguauaugaagu

SEQ ID NO: 383596 - RNA, 19 nt, Homo sapiens
  misc_RNA (1)...(19): siRNA sense strand
uaagacagcuaugcaaaau

SEQ ID NO: 383597 - RNA, 19 nt, Homo sapiens
  misc_RNA (1)...(19): siRNA sense strand
agagauacuccugagaaua

SEQ ID NO: 383598 - RNA, 19 nt, Homo sapiens
  misc_RNA (1)...(19): siRNA sense strand
gcuggaggagcuuuauuug

SEQ ID NO: 383599 - RNA, 19 nt, Homo sapiens
  misc_RNA (1)...(19): siRNA sense strand
ccaaugguucaaauaaaug

SEQ ID NO: 383600 - RNA, 19 nt, Homo sapiens
  misc_RNA (1)...(19): siRNA sense strand
ccugauacuccauuugauu

SEQ ID NO: 383601 - RNA, 19 nt, Homo sapiens
  misc_RNA (1)...(19): siRNA sense strand
cugauacuccauuugauuu

SEQ ID NO: 383602 - RNA, 19 nt, Homo sapiens
  misc_RNA (1)...(19): siRNA sense strand
ugagccagcuggaggucuu

SEQ ID NO: 383603 - RNA, 19 nt, Homo sapiens
  misc_RNA (1)...(19): siRNA sense strand
uauaaucgaaagccaguug

SEQ ID NO: 383604 - RNA, 19 nt, Homo sapiens
  misc_RNA (1)...(19): siRNA sense strand
gcagaaguuuuacaaguac

SEQ ID NO: 383605 - RNA, 19 nt, Homo sapiens
  misc_RNA (1)...(19): siRNA sense strand
guaccuccaaugagaguau

SEQ ID NO: 383606 - RNA, 19 nt, Homo sapiens
  misc_RNA (1)...(19): siRNA sense strand
auaagaggauagaggcaau

SEQ ID NO: 383607 - RNA, 19 nt, Homo sapiens
  misc_RNA (1)...(19): siRNA sense strand
ugcagaaguuuuacaagua

SEQ ID NO: 383608 - RNA, 19 nt, Homo sapiens
  misc_RNA (1)...(19): siRNA sense strand
ugacaauuacuaugaggau

SEQ ID NO: 383609 - RNA, 19 nt, Homo sapiens
  misc_RNA (1)...(19): siRNA sense strand
ucucugcuaugaacaaggu

SEQ ID NO: 383610 - RNA, 19 nt, Homo sapiens
  misc_RNA (1)...(19): siRNA sense strand
cacccugcaugcuucgaaa

SEQ ID NO: 383611 - RNA, 19 nt, Homo sapiens
  misc_RNA (1)...(19): siRNA sense strand
ugacaaacuuuucacucuu

SEQ ID NO: 383612 - RNA, 19 nt, Homo sapiens
  misc_RNA (1)...(19): siRNA sense strand
uggauuugguguacaagca

SEQ ID NO: 383613 - RNA, 19 nt, Homo sapiens
  misc_RNA (1)...(19): siRNA sense strand
uguaaggaauuugcauaag

SEQ ID NO: 383614 - RNA, 19 nt, Homo sapiens
  misc_RNA (1)...(19): siRNA sense strand
gcacuacuacacccugcau

SEQ ID NO: 383615 - RNA, 19 nt, Homo sapiens
  misc_RNA (1)...(19): siRNA sense strand
uugcccaucucugcuauga

SEQ ID NO: 383616 - RNA, 19 nt, Homo sapiens
  misc_RNA (1)...(19): siRNA sense strand
agacagcuaugcaaaaugg

SEQ ID NO: 383617 - RNA, 19 nt, Homo sapiens
  misc_RNA (1)...(19): siRNA sense strand
uggaaaguaucacauucag

SEQ ID NO: 383618 - RNA, 19 nt, Homo sapiens
  misc_RNA (1)...(19): siRNA sense strand
uaccuccaaugagaguaua

SEQ ID NO: 383619 - RNA, 19 nt, Homo sapiens
  misc_RNA (1)...(19): siRNA sense strand
ccugagaauaacccugaua

SEQ ID NO: 383620 - RNA, 19 nt, Homo sapiens
  misc_RNA (1)...(19): siRNA sense strand
gcaagacguugguggagua

SEQ ID NO: 383621 - RNA, 19 nt, Homo sapiens
  misc_RNA (1)...(19): siRNA sense strand
ccaaggagcugguggagau

SEQ ID NO: 383622 - RNA, 19 nt, Homo sapiens
  misc_RNA (1)...(19): siRNA sense strand
gcauccagaucuccaagaa

SEQ ID NO: 383623 - RNA, 19 nt, Homo sapiens
  misc_RNA (1)...(19): siRNA sense strand
ugaaagccgugauggaaca

SEQ ID NO: 383624 - RNA, 19 nt, Homo sapiens
  misc_RNA (1)...(19): siRNA sense strand
ccaucaagcucuccaaguc

SEQ ID NO: 383625 - RNA, 19 nt, Homo sapiens
  misc_RNA (1)...(19): siRNA sense strand
cucaauaccucaucaguca

SEQ ID NO: 383626 - RNA, 19 nt, Homo sapiens
  misc_RNA (1)...(19): siRNA sense strand
ccacgcaagccgcucaaua

SEQ ID NO: 383627 - RNA, 19 nt, Homo sapiens
  misc_RNA (1)...(19): siRNA sense strand
ggugaaagccgugauggaa

SEQ ID NO: 383628 - RNA, 19 nt, Homo sapiens
  misc_RNA (1)...(19): siRNA sense strand
gggugcagcugucccagaa

SEQ ID NO: 383629 - RNA, 19 nt, Homo sapiens
  misc_RNA (1)...(19): siRNA sense strand
gagcggguaugccuaguac

SEQ ID NO: 383630 - RNA, 19 nt, Homo sapiens
  misc_RNA (1)...(19): siRNA sense strand
gagaggaaggcgaauacuu

SEQ ID NO: 383631 - RNA, 19 nt, Homo sapiens
  misc_RNA (1)...(19): siRNA sense strand
ccgagaagguccgagaaau

SEQ ID NO: 383632 - RNA, 19 nt, Homo sapiens
  misc_RNA (1)...(19): siRNA sense strand
gaagcuggcggcugagagu

SEQ ID NO: 383633 - RNA, 19 nt, Homo sapiens
  misc_RNA (1)...(19): siRNA sense strand
gcacggcagaggccuugaa

SEQ ID NO: 383634 - RNA, 19 nt, Homo sapiens
  misc_RNA (1)...(19): siRNA sense strand
gcagcugccucaacaucag

SEQ ID NO: 383635 - RNA, 19 nt, Homo sapiens
  misc_RNA (1)...(19): siRNA sense strand
ugcagaagguacaagaaga

SEQ ID NO: 383636 - RNA, 19 nt, Homo sapiens
  misc_RNA (1)...(19): siRNA sense strand
gaaaucccacaagcgauga

SEQ ID NO: 383637 - RNA, 19 nt, Homo sapiens
  misc_RNA (1)...(19): siRNA sense strand
cgagaagguccgagaaauc

SEQ ID NO: 383638 - RNA, 19 nt, Homo sapiens
  misc_RNA (1)...(19): siRNA sense strand
cagcaacacgggagaggaa

SEQ ID NO: 383639 - RNA, 19 nt, Homo sapiens
  misc_RNA (1)...(19): siRNA sense strand
gaccggagccaccaucaag

SEQ ID NO: 383640 - RNA, 19 nt, Homo sapiens
  misc_RNA (1)...(19): siRNA sense strand
ccaaccuccuggcauccua

SEQ ID NO: 383641 - RNA, 19 nt, Homo sapiens
  misc_RNA (1)...(19): siRNA sense strand
agauugcggugccugagaa

SEQ ID NO: 383642 - RNA, 19 nt, Homo sapiens
  misc_RNA (1)...(19): siRNA sense strand
ucagucagcgggucaccua

SEQ ID NO: 383643 - RNA, 19 nt, Homo sapiens
  misc_RNA (1)...(19): siRNA sense strand
gccaucagcacggcgcuua

SEQ ID NO: 383644 - RNA, 19 nt, Homo sapiens
  misc_RNA (1)...(19): siRNA sense strand
gagauugcggugccugaga

SEQ ID NO: 383645 - RNA, 19 nt, Homo sapiens
  misc_RNA (1)...(19): siRNA sense strand
cggcagaggccuugaaugc

SEQ ID NO: 383646 - RNA, 19 nt, Homo sapiens
  misc_RNA (1)...(19): siRNA sense strand
gccgagaagguccgagaaa

SEQ ID NO: 383647 - RNA, 19 nt, Homo sapiens
  misc_RNA (1)...(19): siRNA sense strand
ugagcgccaucgugcagaa

SEQ ID NO: 383648 - RNA, 19 nt, Homo sapiens
  misc_RNA (1)...(19): siRNA sense strand
gcagaagguacaagaagac

SEQ ID NO: 383649 - RNA, 19 nt, Homo sapiens
  misc_RNA (1)...(19): siRNA sense strand
gagaagguccgagaaaucc

SEQ ID NO: 383650 - RNA, 19 nt, Homo sapiens
  misc_RNA (1)...(19): siRNA sense strand
gagccaagcaggccaagcu

SEQ ID NO: 383651 - RNA, 19 nt, Homo sapiens
  misc_RNA (1)...(19): siRNA sense strand
gggagaggaaggcgaauac

SEQ ID NO: 383652 - RNA, 19 nt, Homo sapiens
  misc_RNA (1)...(19): siRNA sense strand
ccaagcaggccaagcugau

SEQ ID NO: 383653 - RNA, 19 nt, Homo sapiens
  misc_RNA (1)...(19): siRNA sense strand
gugcagaagguacaagaag

SEQ ID NO: 383654 - RNA, 19 nt, Homo sapiens
  misc_RNA (1)...(19): siRNA sense strand
cggcugagagugccaagga

SEQ ID NO: 383655 - RNA, 19 nt, Homo sapiens
  misc_RNA (1)...(19): siRNA sense strand
agccugagguggucaacau

SEQ ID NO: 383656 - RNA, 19 nt, Homo sapiens
  misc_RNA (1)...(19): siRNA sense strand
gagaagcuggcggcugaga

SEQ ID NO: 383657 - RNA, 19 nt, Homo sapiens
  misc_RNA (1)...(19): siRNA sense strand
ggagcaaggugaaauacau

SEQ ID NO: 383658 - RNA, 19 nt, Homo sapiens
  misc_RNA (1)...(19): siRNA sense strand
cgagaucaauggacucuug

SEQ ID NO: 383659 - RNA, 19 nt, Homo sapiens
  misc_RNA (1)...(19): siRNA sense strand
ggaggagcaaggugaaaua

SEQ ID NO: 383660 - RNA, 19 nt, Homo sapiens
  misc_RNA (1)...(19): siRNA sense strand
ggacacgcaugugcacaga

SEQ ID NO: 383661 - RNA, 19 nt, Homo sapiens
  misc_RNA (1)...(19): siRNA sense strand
ggaccaagaaggcaaccaa

SEQ ID NO: 383662 - RNA, 19 nt, Homo sapiens
  misc_RNA (1)...(19): siRNA sense strand
acacgcaugugcacagaau

SEQ ID NO: 383663 - RNA, 19 nt, Homo sapiens
  misc_RNA (1)...(19): siRNA sense strand
aggcugagguggaccaaga

SEQ ID NO: 383664 - RNA, 19 nt, Homo sapiens
  misc_RNA (1)...(19): siRNA sense strand
cugaugcucuccagccaaa

SEQ ID NO: 383665 - RNA, 19 nt, Homo sapiens
  misc_RNA (1)...(19): siRNA sense strand
ccaagaaggcaaccaaguc

SEQ ID NO: 383666 - RNA, 19 nt, Homo sapiens
  misc_RNA (1)...(19): siRNA sense strand
agcaacagcuggucaacau

SEQ ID NO: 383667 - RNA, 19 nt, Homo sapiens
  misc_RNA (1)...(19): siRNA sense strand
gacugcguguggccuauga

SEQ ID NO: 383668 - RNA, 19 nt, Homo sapiens
  misc_RNA (1)...(19): siRNA sense strand
gcaaggugaaauacaucaa

SEQ ID NO: 383669 - RNA, 19 nt, Homo sapiens
  misc_RNA (1)...(19): siRNA sense strand
gagacugcguguggccuau

SEQ ID NO: 383670 - RNA, 19 nt, Homo sapiens
  misc_RNA (1)...(19): siRNA sense strand
gagcaaggugaaauacauc

SEQ ID NO: 383671 - RNA, 19 nt, Homo sapiens
  misc_RNA (1)...(19): siRNA sense strand
ggaugcaccuguggaccau

SEQ ID NO: 383672 - RNA, 19 nt, Homo sapiens
  misc_RNA (1)...(19): siRNA sense strand
gggcucggacagugagaaa

SEQ ID NO: 383673 - RNA, 19 nt, Homo sapiens
  misc_RNA (1)...(19): siRNA sense strand
caaggugaaauacaucaag

SEQ ID NO: 383674 - RNA, 19 nt, Homo sapiens
  misc_RNA (1)...(19): siRNA sense strand
gucaacauccgugccauga

SEQ ID NO: 383675 - RNA, 19 nt, Homo sapiens
  misc_RNA (1)...(19): siRNA sense strand
ggacagcauccugcagaca

SEQ ID NO: 383676 - RNA, 19 nt, Homo sapiens
  misc_RNA (1)...(19): siRNA sense strand
gcucuccagccaaaccaaa

SEQ ID NO: 383677 - RNA, 19 nt, Homo sapiens
  misc_RNA (1)...(19): siRNA sense strand
acagcauccugcagacaga

SEQ ID NO: 383678 - RNA, 19 nt, Homo sapiens
  misc_RNA (1)...(19): siRNA sense strand
caggugcugcugucacuga

SEQ ID NO: 383679 - RNA, 19 nt, Homo sapiens
  misc_RNA (1)...(19): siRNA sense strand
gcucggacagugagaaagg

SEQ ID NO: 383680 - RNA, 19 nt, Homo sapiens
  misc_RNA (1)...(19): siRNA sense strand
ggcacugugucaggcauug

SEQ ID NO: 383681 - RNA, 19 nt, Homo sapiens
  misc_RNA (1)...(19): siRNA sense strand
gcacuacgguggggacauc

SEQ ID NO: 383682 - RNA, 19 nt, Homo sapiens
  misc_RNA (1)...(19): siRNA sense strand
ucacugaccucuucuuugu

SEQ ID NO: 383683 - RNA, 19 nt, Homo sapiens
  misc_RNA (1)...(19): siRNA sense strand
uaacaaagccaucuccuau

SEQ ID NO: 383684 - RNA, 19 nt, Homo sapiens
  misc_RNA (1)...(19): siRNA sense strand
guuccaacauucagauuaa

SEQ ID NO: 383685 - RNA, 19 nt, Homo sapiens
  misc_RNA (1)...(19): siRNA sense strand
ggauguuccuguccaugua

SEQ ID NO: 383686 - RNA, 19 nt, Homo sapiens
  misc_RNA (1)...(19): siRNA sense strand
gaagacuccuagauaaaca

SEQ ID NO: 383687 - RNA, 19 nt, Homo sapiens
  misc_RNA (1)...(19): siRNA sense strand
ugggaagacuccuagauaa

SEQ ID NO: 383688 - RNA, 19 nt, Homo sapiens
  misc_RNA (1)...(19): siRNA sense strand
gaaaugugcucaucauccu

SEQ ID NO: 383689 - RNA, 19 nt, Homo sapiens
  misc_RNA (1)...(19): siRNA sense strand
ccacagccaugagcccuaa

SEQ ID NO: 383690 - RNA, 19 nt, Homo sapiens
  misc_RNA (1)...(19): siRNA sense strand
gggaagacuccuagauaaa

SEQ ID NO: 383691 - RNA, 19 nt, Homo sapiens
  misc_RNA (1)...(19): siRNA sense strand
gcccuaagcucuguaucuu

SEQ ID NO: 383692 - RNA, 19 nt, Homo sapiens
  misc_RNA (1)...(19): siRNA sense strand
gauggcauaugaccgcuau

SEQ ID NO: 383693 - RNA, 19 nt, Homo sapiens
  misc_RNA (1)...(19): siRNA sense strand
ucugugagauguauguauu

SEQ ID NO: 383694 - RNA, 19 nt, Homo sapiens
  misc_RNA (1)...(19): siRNA sense strand
uaucagagccauccucaga

SEQ ID NO: 383695 - RNA, 19 nt, Homo sapiens
  misc_RNA (1)...(19): siRNA sense strand
acuccuagauaaacacuuu

SEQ ID NO: 383696 - RNA, 19 nt, Homo sapiens
  misc_RNA (1)...(19): siRNA sense strand
gguccuauccguccucuau

SEQ ID NO: 383697 - RNA, 19 nt, Homo sapiens
  misc_RNA (1)...(19): siRNA sense strand
ucagagccauccucagaau

SEQ ID NO: 383698 - RNA, 19 nt, Homo sapiens
  misc_RNA (1)...(19): siRNA sense strand
cagaauacccucagucucu

SEQ ID NO: 383699 - RNA, 19 nt, Homo sapiens
  misc_RNA (1)...(19): siRNA sense strand
cuccauaccuacucuguga

SEQ ID NO: 383700 - RNA, 19 nt, Homo sapiens
  misc_RNA (1)...(19): siRNA sense strand
uggcugugauggcauauga

SEQ ID NO: 383701 - RNA, 19 nt, Homo sapiens
  misc_RNA (1)...(19): siRNA sense strand
acaaagccaucuccuaugc

SEQ ID NO: 383702 - RNA, 19 nt, Homo sapiens
  misc_RNA (1)...(19): siRNA sense strand
ggaagacuccuagauaaac

SEQ ID NO: 383703 - RNA, 19 nt, Homo sapiens
  misc_RNA (1)...(19): siRNA sense strand
cacuacaucuucugugaga

SEQ ID NO: 383704 - RNA, 19 nt, Homo sapiens
  misc_RNA (1)...(19): siRNA sense strand
auacacacccuccucauga

SEQ ID NO: 383705 - RNA, 19 nt, Homo sapiens
  misc_RNA (1)...(19): siRNA sense strand
agaauacccucagucucua

SEQ ID NO: 383706 - RNA, 19 nt, Homo sapiens
  misc_RNA (1)...(19): siRNA sense strand
gauucgugaucauuuccua

SEQ ID NO: 383707 - RNA, 19 nt, Homo sapiens
  misc_RNA (1)...(19): siRNA sense strand
gauguaugcuguggugaca

SEQ ID NO: 383708 - RNA, 19 nt, Homo sapiens
  misc_RNA (1)...(19): siRNA sense strand
gaauacccucagucucuaa

SEQ ID NO: 383709 - RNA, 19 nt, Homo sapiens
  misc_RNA (1)...(19): siRNA sense strand
ggacacuuuguaugguaua

SEQ ID NO: 383710 - RNA, 19 nt, Homo sapiens
  misc_RNA (1)...(19): siRNA sense strand
ugggacacuuuguauggua

SEQ ID NO: 383711 - RNA, 19 nt, Homo sapiens
  misc_RNA (1)...(19): siRNA sense strand
cugggaagacuccuagaua

SEQ ID NO: 383712 - RNA, 19 nt, Homo sapiens
  misc_RNA (1)...(19): siRNA sense strand
ccaagaugcuggugaaccu

SEQ ID NO: 383713 - RNA, 19 nt, Homo sapiens
  misc_RNA (1)...(19): siRNA sense strand
ccucagucucuaagaaaua

SEQ ID NO: 383714 - RNA, 19 nt, Homo sapiens
  misc_RNA (1)...(19): siRNA sense strand
gccacaggcugcuucaucu

SEQ ID NO: 383715 - RNA, 19 nt, Homo sapiens
  misc_RNA (1)...(19): siRNA sense strand
ccaccugugccucccauuu

SEQ ID NO: 383716 - RNA, 19 nt, Homo sapiens
  misc_RNA (1)...(19): siRNA sense strand
gggacacuuuguaugguau

SEQ ID NO: 383717 - RNA, 19 nt, Homo sapiens
  misc_RNA (1)...(19): siRNA sense strand
cucuguaucuuacuccuuu

SEQ ID NO: 383718 - RNA, 19 nt, Homo sapiens
  misc_RNA (1)...(19): siRNA sense strand
uccacuacaucuucuguga

SEQ ID NO: 383719 - RNA, 19 nt, Homo sapiens
  misc_RNA (1)...(19): siRNA sense strand
ucacgguggugggaaaugu

SEQ ID NO: 383720 - RNA, 19 nt, Homo sapiens
  misc_RNA (1)...(19): siRNA sense strand
uaaagccccuccauaccua

SEQ ID NO: 383721 - RNA, 19 nt, Homo sapiens
  misc_RNA (1)...(19): siRNA sense strand
ccaacauucagauuaauca

SEQ ID NO: 383722 - RNA, 19 nt, Homo sapiens
  misc_RNA (1)...(19): siRNA sense strand
ggugggaaaugugcucauc

SEQ ID NO: 383723 - RNA, 19 nt, Homo sapiens
  misc_RNA (1)...(19): siRNA sense strand
uuuccuaugugcugauuau

SEQ ID NO: 383724 - RNA, 19 nt, Homo sapiens
  misc_RNA (1)...(19): siRNA sense strand
gugaaccuccagucccaua

SEQ ID NO: 383725 - RNA, 19 nt, Homo sapiens
  misc_RNA (1)...(19): siRNA sense strand
guaucuuacuccuuuccuu

SEQ ID NO: 383726 - RNA, 19 nt, Homo sapiens
  misc_RNA (1)...(19): siRNA sense strand
uacccucagucucuaagaa

SEQ ID NO: 383727 - RNA, 19 nt, Homo sapiens
  misc_RNA (1)...(19): siRNA sense strand
ggaggcaaccagagugaag

SEQ ID NO: 383728 - RNA, 19 nt, Homo sapiens
  misc_RNA (1)...(19): siRNA sense strand
ugacacccaugaugaaucc

SEQ ID NO: 383729 - RNA, 19 nt, Homo sapiens
  misc_RNA (1)...(19): siRNA sense strand
ccuccagucccauaacaaa

SEQ ID NO: 383730 - RNA, 19 nt, Homo sapiens
  misc_RNA (1)...(19): siRNA sense strand
ggauggaggcaaccagagu

SEQ ID NO: 383731 - RNA, 19 nt, Homo sapiens
  misc_RNA (1)...(19): siRNA sense strand
ugggaaaugugcucaucau

SEQ ID NO: 383732 - RNA, 19 nt, Homo sapiens
  misc_RNA (1)...(19): siRNA sense strand
ccucauucccuuuggauuc

SEQ ID NO: 383733 - RNA, 19 nt, Homo sapiens
  misc_RNA (1)...(19): siRNA sense strand
cauacacacccuccucaug

SEQ ID NO: 383734 - RNA, 19 nt, Homo sapiens
  misc_RNA (1)...(19): siRNA sense strand
cuccuucacugaccucuuc

SEQ ID NO: 383735 - RNA, 19 nt, Homo sapiens
  misc_RNA (1)...(19): siRNA sense strand
caccugugccucccauuug

SEQ ID NO: 383736 - RNA, 19 nt, Homo sapiens
  misc_RNA (1)...(19): siRNA sense strand
cagagccauccucagaaua

SEQ ID NO: 383737 - RNA, 19 nt, Homo sapiens
  misc_RNA (1)...(19): siRNA sense strand
cgugaucauuuccuaugug

SEQ ID NO: 383738 - RNA, 19 nt, Homo sapiens
  misc_RNA (1)...(19): siRNA sense strand
auaacaaagccaucuccua

SEQ ID NO: 383739 - RNA, 19 nt, Homo sapiens
  misc_RNA (1)...(19): siRNA sense strand
cagucucccucuucuaugg

SEQ ID NO: 383740 - RNA, 19 nt, Homo sapiens
  misc_RNA (1)...(19): siRNA sense strand
gcagucucccucuucuaug

SEQ ID NO: 383741 - RNA, 19 nt, Homo sapiens
  misc_RNA (1)...(19): siRNA sense strand
uaugggacacuuuguaugg

SEQ ID NO: 383742 - RNA, 19 nt, Homo sapiens
  misc_RNA (1)...(19): siRNA sense strand
ggugcagucucccucuucu

SEQ ID NO: 383743 - RNA, 19 nt, Homo sapiens
  misc_RNA (1)...(19): siRNA sense strand
gcauggggcucugggaaga

SEQ ID NO: 383744 - RNA, 19 nt, Homo sapiens
  misc_RNA (1)...(19): siRNA sense strand
gaaccuccagucccauaac

SEQ ID NO: 383745 - RNA, 19 nt, Homo sapiens
  misc_RNA (1)...(19): siRNA sense strand
ucuaugggacacuuuguau

SEQ ID NO: 383746 - RNA, 19 nt, Homo sapiens
  misc_RNA (1)...(19): siRNA sense strand
ccaaugaggucaaucacuu

SEQ ID NO: 383747 - RNA, 19 nt, Homo sapiens
  misc_RNA (1)...(19): siRNA sense strand
gaagagaugcagccaguug

SEQ ID NO: 383748 - RNA, 19 nt, Homo sapiens
  misc_RNA (1)...(19): siRNA sense strand
ggaccgcuguugcugaguu

SEQ ID NO: 383749 - RNA, 19 nt, Homo sapiens
  misc_RNA (1)...(19): siRNA sense strand
gcugaacccucuuaucuac

SEQ ID NO: 383750 - RNA, 19 nt, Homo sapiens
  misc_RNA (1)...(19): siRNA sense strand
ucccacaaguccacaauuu

SEQ ID NO: 383751 - RNA, 19 nt, Homo sapiens
  misc_RNA (1)...(19): siRNA sense strand
ugaccgccauggccuauga

SEQ ID NO: 383752 - RNA, 19 nt, Homo sapiens
  misc_RNA (1)...(19): siRNA sense strand
agagguaucuucaacuaca

SEQ ID NO: 383753 - RNA, 19 nt, Homo sapiens
  misc_RNA (1)...(19): siRNA sense strand
cguggcagcugcaguucua

SEQ ID NO: 383754 - RNA, 19 nt, Homo sapiens
  misc_RNA (1)...(19): siRNA sense strand
ggugcucuguggcaaauau

SEQ ID NO: 383755 - RNA, 19 nt, Homo sapiens
  misc_RNA (1)...(19): siRNA sense strand
gcagccaguugucuuugug

SEQ ID NO: 383756 - RNA, 19 nt, Homo sapiens
  misc_RNA (1)...(19): siRNA sense strand
agaggaggcuucagacaag

SEQ ID NO: 383757 - RNA, 19 nt, Homo sapiens
  misc_RNA (1)...(19): siRNA sense strand
aauguugggucgucucuug

SEQ ID NO: 383758 - RNA, 19 nt, Homo sapiens
  misc_RNA (1)...(19): siRNA sense strand
gaagcugggaccaauagga

SEQ ID NO: 383759 - RNA, 19 nt, Homo sapiens
  misc_RNA (1)...(19): siRNA sense strand
gaugcagccaguugucuuu

SEQ ID NO: 383760 - RNA, 19 nt, Homo sapiens
  misc_RNA (1)...(19): siRNA sense strand
guucagaggaggcuucaga

SEQ ID NO: 383761 - RNA, 19 nt, Homo sapiens
  misc_RNA (1)...(19): siRNA sense strand
ccacguggcagcugcaguu

SEQ ID NO: 383762 - RNA, 19 nt, Homo sapiens
  misc_RNA (1)...(19): siRNA sense strand
gcucuuugcuguggguuuc

SEQ ID NO: 383763 - RNA, 19 nt, Homo sapiens
  misc_RNA (1)...(19): siRNA sense strand
cagaggaggcuucagacaa

SEQ ID NO: 383764 - RNA, 19 nt, Homo sapiens
  misc_RNA (1)...(19): siRNA sense strand
gcacaccuuugguucucau

SEQ ID NO: 383765 - RNA, 19 nt, Homo sapiens
  misc_RNA (1)...(19): siRNA sense strand
cagcugcaguucuacgaau

SEQ ID NO: 383766 - RNA, 19 nt, Homo sapiens
  misc_RNA (1)...(19): siRNA sense strand
caaccaagagcaagaaacu

SEQ ID NO: 383767 - RNA, 19 nt, Homo sapiens
  misc_RNA (1)...(19): siRNA sense strand
aguccacaauuuccuauga

SEQ ID NO: 383768 - RNA, 19 nt, Homo sapiens
  misc_RNA (1)...(19): siRNA sense strand
ugaggucaaucacuucuac

SEQ ID NO: 383769 - RNA, 19 nt, Homo sapiens
  misc_RNA (1)...(19): siRNA sense strand
acacuguuaucaacccuau

SEQ ID NO: 383770 - RNA, 19 nt, Homo sapiens
  misc_RNA (1)...(19): siRNA sense strand
ucucccagcucuucuucuu

SEQ ID NO: 383771 - RNA, 19 nt, Homo sapiens
  misc_RNA (1)...(19): siRNA sense strand
ucacuguuccugcaauguu

SEQ ID NO: 383772 - RNA, 19 nt, Homo sapiens
  misc_RNA (1)...(19): siRNA sense strand
cuacugggccuagugcaaa

SEQ ID NO: 383773 - RNA, 19 nt, Homo sapiens
  misc_RNA (1)...(19): siRNA sense strand
uaucuucaacuacaugaga

SEQ ID NO: 383774 - RNA, 19 nt, Homo sapiens
  misc_RNA (1)...(19): siRNA sense strand
caagagcaagaaacucaug

SEQ ID NO: 383775 - RNA, 19 nt, Homo sapiens
  misc_RNA (1)...(19): siRNA sense strand
ggucaaucacuucuacugu

SEQ ID NO: 383776 - RNA, 19 nt, Homo sapiens
  misc_RNA (1)...(19): siRNA sense strand
cuacagcacccgcaugagu

SEQ ID NO: 383777 - RNA, 19 nt, Homo sapiens
  misc_RNA (1)...(19): siRNA sense strand
cagaagcugggaccaauag

SEQ ID NO: 383778 - RNA, 19 nt, Homo sapiens
  misc_RNA (1)...(19): siRNA sense strand
gagguaucuucaacuacau

SEQ ID NO: 383779 - RNA, 19 nt, Homo sapiens
  misc_RNA (1)...(19): siRNA sense strand
uggcugggauggacugcuu

SEQ ID NO: 383780 - RNA, 19 nt, Homo sapiens
  misc_RNA (1)...(19): siRNA sense strand
cauccuggcagccgucuug

SEQ ID NO: 383781 - RNA, 19 nt, Homo sapiens
  misc_RNA (1)...(19): siRNA sense strand
ugaacccucuuaucuacag

SEQ ID NO: 383782 - RNA, 19 nt, Homo sapiens
  misc_RNA (1)...(19): siRNA sense strand
gaaccugucagugcuggau

SEQ ID NO: 383783 - RNA, 19 nt, Homo sapiens
  misc_RNA (1)...(19): siRNA sense strand
cacuguuccugcaauguug

SEQ ID NO: 383784 - RNA, 19 nt, Homo sapiens
  misc_RNA (1)...(19): siRNA sense strand
ccuaugcugaacccucuua

SEQ ID NO: 383785 - RNA, 19 nt, Homo sapiens
  misc_RNA (1)...(19): siRNA sense strand
gggccuagugcaaacagaa

SEQ ID NO: 383786 - RNA, 19 nt, Homo sapiens
  misc_RNA (1)...(19): siRNA sense strand
gcagcugcaguucuacgaa

SEQ ID NO: 383787 - RNA, 19 nt, Homo sapiens
  misc_RNA (1)...(19): siRNA sense strand
uguccacgcucaacuucug

SEQ ID NO: 383788 - RNA, 19 nt, Homo sapiens
  misc_RNA (1)...(19): siRNA sense strand
acaaguccacaauuuccua

SEQ ID NO: 383789 - RNA, 19 nt, Homo sapiens
  misc_RNA (1)...(19): siRNA sense strand
gaccgcuguugcugaguuc

SEQ ID NO: 383790 - RNA, 19 nt, Homo sapiens
  misc_RNA (1)...(19): siRNA sense strand
acaugagacuggguucaga

SEQ ID NO: 383791 - RNA, 19 nt, Homo sapiens
  misc_RNA (1)...(19): siRNA sense strand
gauguaucacugucacugu

SEQ ID NO: 383792 - RNA, 19 nt, Homo sapiens
  misc_RNA (1)...(19): siRNA sense strand
ccagcacccaacucaauga

SEQ ID NO: 383793 - RNA, 19 nt, Homo sapiens
  misc_RNA (1)...(19): siRNA sense strand
caaguccacaauuuccuau

SEQ ID NO: 383794 - RNA, 19 nt, Homo sapiens
  misc_RNA (1)...(19): siRNA sense strand
caacuucuguggccccaau

SEQ ID NO: 383795 - RNA, 19 nt, Homo sapiens
  misc_RNA (1)...(19): siRNA sense strand
ccacaaguccacaauuucc

SEQ ID NO: 383796 - RNA, 19 nt, Homo sapiens
  misc_RNA (1)...(19): siRNA sense strand
gaaacucauggagccagaa

SEQ ID NO: 383797 - RNA, 19 nt, Homo sapiens
  misc_RNA (1)...(19): siRNA sense strand
uaucaacccuaugcugaac

SEQ ID NO: 383798 - RNA, 19 nt, Homo sapiens
  misc_RNA (1)...(19): siRNA sense strand
ggcaggcacaccuuugguu

SEQ ID NO: 383799 - RNA, 19 nt, Homo sapiens
  misc_RNA (1)...(19): siRNA sense strand
caaugaggucaaucacuuc

SEQ ID NO: 383800 - RNA, 19 nt, Homo sapiens
  misc_RNA (1)...(19): siRNA sense strand
ugacgacgaucuucuugua

SEQ ID NO: 383801 - RNA, 19 nt, Homo sapiens
  misc_RNA (1)...(19): siRNA sense strand
guaagcacauccagaguga

SEQ ID NO: 383802 - RNA, 19 nt, Homo sapiens
  misc_RNA (1)...(19): siRNA sense strand
ggcagugucucgagaacuu

SEQ ID NO: 383803 - RNA, 19 nt, Homo sapiens
  misc_RNA (1)...(19): siRNA sense strand
gcacccgagucccagauga

SEQ ID NO: 383804 - RNA, 19 nt, Homo sapiens
  misc_RNA (1)...(19): siRNA sense strand
gaaugguucuucgaguuug

SEQ ID NO: 383805 - RNA, 19 nt, Homo sapiens
  misc_RNA (1)...(19): siRNA sense strand
gaagauacucuggcaagga

SEQ ID NO: 383806 - RNA, 19 nt, Homo sapiens
  misc_RNA (1)...(19): siRNA sense strand
aagauacucuggcaaggaa

SEQ ID NO: 383807 - RNA, 19 nt, Homo sapiens
  misc_RNA (1)...(19): siRNA sense strand
gaugccagcaagcgucuua

SEQ ID NO: 383808 - RNA, 19 nt, Homo sapiens
  misc_RNA (1)...(19): siRNA sense strand
cgucuuaacugggaacguu

SEQ ID NO: 383809 - RNA, 19 nt, Homo sapiens
  misc_RNA (1)...(19): siRNA sense strand
aucccuaacuccacaaaua

SEQ ID NO: 383810 - RNA, 19 nt, Homo sapiens
  misc_RNA (1)...(19): siRNA sense strand
caaacuaaauuggaugaac

SEQ ID NO: 383811 - RNA, 19 nt, Homo sapiens
  misc_RNA (1)...(19): siRNA sense strand
ccaagaaaauccucaagug

SEQ ID NO: 383812 - RNA, 19 nt, Homo sapiens
  misc_RNA (1)...(19): siRNA sense strand
ggaacguuaucauagaaac

SEQ ID NO: 383813 - RNA, 19 nt, Homo sapiens
  misc_RNA (1)...(19): siRNA sense strand
gagcaugaagcccguguuc

SEQ ID NO: 383814 - RNA, 19 nt, Homo sapiens
  misc_RNA (1)...(19): siRNA sense strand
gaacguuaucauagaaaca

SEQ ID NO: 383815 - RNA, 19 nt, Homo sapiens
  misc_RNA (1)...(19): siRNA sense strand
gcuucaaacuaaauuggau

SEQ ID NO: 383816 - RNA, 19 nt, Homo sapiens
  misc_RNA (1)...(19): siRNA sense strand
guucuucgaguuuggcuuu

SEQ ID NO: 383817 - RNA, 19 nt, Homo sapiens
  misc_RNA (1)...(19): siRNA sense strand
ugggaacguuaucauagaa

SEQ ID NO: 383818 - RNA, 19 nt, Homo sapiens
  misc_RNA (1)...(19): siRNA sense strand
gcagugucucgagaacuua

SEQ ID NO: 383819 - RNA, 19 nt, Homo sapiens
  misc_RNA (1)...(19): siRNA sense strand
gagugagacuuuucuaugu

SEQ ID NO: 383820 - RNA, 19 nt, Homo sapiens
  misc_RNA (1)...(19): siRNA sense strand
cugggaacguuaucauaga

SEQ ID NO: 383821 - RNA, 19 nt, Homo sapiens
  misc_RNA (1)...(19): siRNA sense strand
cugaggggcuucaaacuaa

SEQ ID NO: 383822 - RNA, 19 nt, Homo sapiens
  misc_RNA (1)...(19): siRNA sense strand
ccagcaagcgucuuaacug

SEQ ID NO: 383823 - RNA, 19 nt, Homo sapiens
  misc_RNA (1)...(19): siRNA sense strand
gcaaugccuagaagaaugg

SEQ ID NO: 383824 - RNA, 19 nt, Homo sapiens
  misc_RNA (1)...(19): siRNA sense strand
cgacagaacaaauggaaaa

SEQ ID NO: 383825 - RNA, 19 nt, Homo sapiens
  misc_RNA (1)...(19): siRNA sense strand
gacgacgaucuucuuguaa

SEQ ID NO: 383826 - RNA, 19 nt, Homo sapiens
  misc_RNA (1)...(19): siRNA sense strand
caaggcagugucucgagaa

SEQ ID NO: 383827 - RNA, 19 nt, Homo sapiens
  misc_RNA (1)...(19): siRNA sense strand
gggaacguuaucauagaaa

SEQ ID NO: 383828 - RNA, 19 nt, Homo sapiens
  misc_RNA (1)...(19): siRNA sense strand
gugagacuuuucuauguuu

SEQ ID NO: 383829 - RNA, 19 nt, Homo sapiens
  misc_RNA (1)...(19): siRNA sense strand
aagcacauccagagugaga

SEQ ID NO: 383830 - RNA, 19 nt, Homo sapiens
  misc_RNA (1)...(19): siRNA sense strand
ucccugguguggagcauga

SEQ ID NO: 383831 - RNA, 19 nt, Homo sapiens
  misc_RNA (1)...(19): siRNA sense strand
gcugagacagggaagauac

SEQ ID NO: 383832 - RNA, 19 nt, Homo sapiens
  misc_RNA (1)...(19): siRNA sense strand
acgacgaucuucuuguaag

SEQ ID NO: 383833 - RNA, 19 nt, Homo sapiens
  misc_RNA (1)...(19): siRNA sense strand
caaauaccuggcaguccuu

SEQ ID NO: 383834 - RNA, 19 nt, Homo sapiens
  misc_RNA (1)...(19): siRNA sense strand
agaaaauccucaagugcaa

SEQ ID NO: 383835 - RNA, 19 nt, Homo sapiens
  misc_RNA (1)...(19): siRNA sense strand
gcacauccagagugagacu

SEQ ID NO: 383836 - RNA, 19 nt, Homo sapiens
  misc_RNA (1)...(19): siRNA sense strand
gaugaaacuucguagauuu

SEQ ID NO: 383837 - RNA, 19 nt, Homo sapiens
  misc_RNA (1)...(19): siRNA sense strand
gaaauagucuaguaagcuu

SEQ ID NO: 383838 - RNA, 19 nt, Homo sapiens
  misc_RNA (1)...(19): siRNA sense strand
ucagaaggcuacuaaguuu

SEQ ID NO: 383839 - RNA, 19 nt, Homo sapiens
  misc_RNA (1)...(19): siRNA sense strand
guacugcgguuucaaauuc

SEQ ID NO: 383840 - RNA, 19 nt, Homo sapiens
  misc_RNA (1)...(19): siRNA sense strand
gaguaucugucuuuguuua

SEQ ID NO: 383841 - RNA, 19 nt, Homo sapiens
  misc_RNA (1)...(19): siRNA sense strand
gcuaggagauguacgugua

SEQ ID NO: 383842 - RNA, 19 nt, Homo sapiens
  misc_RNA (1)...(19): siRNA sense strand
ggauagaggugauuuaugc

SEQ ID NO: 383843 - RNA, 19 nt, Homo sapiens
  misc_RNA (1)...(19): siRNA sense strand
guacuuccauuuagauaug

SEQ ID NO: 383844 - RNA, 19 nt, Homo sapiens
  misc_RNA (1)...(19): siRNA sense strand
gauaggugcucugauacua

SEQ ID NO: 383845 - RNA, 19 nt, Homo sapiens
  misc_RNA (1)...(19): siRNA sense strand
cuaguaagcuuaaccuuuc

SEQ ID NO: 383846 - RNA, 19 nt, Homo sapiens
  misc_RNA (1)...(19): siRNA sense strand
ucaagaagauuaccacagu

SEQ ID NO: 383847 - RNA, 19 nt, Homo sapiens
  misc_RNA (1)...(19): siRNA sense strand
gccaugcacuguuacuuaa

SEQ ID NO: 383848 - RNA, 19 nt, Homo sapiens
  misc_RNA (1)...(19): siRNA sense strand
gaagagguucucacccaua

SEQ ID NO: 383849 - RNA, 19 nt, Homo sapiens
  misc_RNA (1)...(19): siRNA sense strand
aaccuaagcuugccaauuc

SEQ ID NO: 383850 - RNA, 19 nt, Homo sapiens
  misc_RNA (1)...(19): siRNA sense strand
gaagauuaccacagucaaa

SEQ ID NO: 383851 - RNA, 19 nt, Homo sapiens
  misc_RNA (1)...(19): siRNA sense strand
guggagcuauuuccuauga

SEQ ID NO: 383852 - RNA, 19 nt, Homo sapiens
  misc_RNA (1)...(19): siRNA sense strand
guuaaucaaccuuuccuua

SEQ ID NO: 383853 - RNA, 19 nt, Homo sapiens
  misc_RNA (1)...(19): siRNA sense strand
acagauggcuuugaaaugu

SEQ ID NO: 383854 - RNA, 19 nt, Homo sapiens
  misc_RNA (1)...(19): siRNA sense strand
ggccaugcacuguuacuua

SEQ ID NO: 383855 - RNA, 19 nt, Homo sapiens
  misc_RNA (1)...(19): siRNA sense strand
gaaagcaggcaacaaaugg

SEQ ID NO: 383856 - RNA, 19 nt, Homo sapiens
  misc_RNA (1)...(19): siRNA sense strand
ucuuagaucuucacgcuuu

SEQ ID NO: 383857 - RNA, 19 nt, Homo sapiens
  misc_RNA (1)...(19): siRNA sense strand
gaaccuaagcuugccaauu

SEQ ID NO: 383858 - RNA, 19 nt, Homo sapiens
  misc_RNA (1)...(19): siRNA sense strand
gcuuugaaaugugcugaua

SEQ ID NO: 383859 - RNA, 19 nt, Homo sapiens
  misc_RNA (1)...(19): siRNA sense strand
gauaugaugaaacuucgua

SEQ ID NO: 383860 - RNA, 19 nt, Homo sapiens
  misc_RNA (1)...(19): siRNA sense strand
gaaugaguaucugucuuug

SEQ ID NO: 383861 - RNA, 19 nt, Homo sapiens
  misc_RNA (1)...(19): siRNA sense strand
uuagaaagcaggcaacaaa

SEQ ID NO: 383862 - RNA, 19 nt, Homo sapiens
  misc_RNA (1)...(19): siRNA sense strand
ucucacaucugccauuaga

SEQ ID NO: 383863 - RNA, 19 nt, Homo sapiens
  misc_RNA (1)...(19): siRNA sense strand
ugaugaaacuucguagauu

SEQ ID NO: 383864 - RNA, 19 nt, Homo sapiens
  misc_RNA (1)...(19): siRNA sense strand
gaucugcagugggcuuauu

SEQ ID NO: 383865 - RNA, 19 nt, Homo sapiens
  misc_RNA (1)...(19): siRNA sense strand
gcguggagcuauuuccuau

SEQ ID NO: 383866 - RNA, 19 nt, Homo sapiens
  misc_RNA (1)...(19): siRNA sense strand
ucacaucugccauuagaaa

SEQ ID NO: 383867 - RNA, 19 nt, Homo sapiens
  misc_RNA (1)...(19): siRNA sense strand
gagccgagcaggauuugaa

SEQ ID NO: 383868 - RNA, 19 nt, Homo sapiens
  misc_RNA (1)...(19): siRNA sense strand
auacaagaauaccucagua

SEQ ID NO: 383869 - RNA, 19 nt, Homo sapiens
  misc_RNA (1)...(19): siRNA sense strand
ggagcuauuuccuaugaca

SEQ ID NO: 383870 - RNA, 19 nt, Homo sapiens
  misc_RNA (1)...(19): siRNA sense strand
acacagacauuugguuuua

SEQ ID NO: 383871 - RNA, 19 nt, Homo sapiens
  misc_RNA (1)...(19): siRNA sense strand
caacaaauggagacacaga

SEQ ID NO: 383872 - RNA, 19 nt, Homo sapiens
  misc_RNA (1)...(19): siRNA sense strand
gagguucucacccauauau

SEQ ID NO: 383873 - RNA, 19 nt, Homo sapiens
  misc_RNA (1)...(19): siRNA sense strand
gcacuguuacuuaaaggaa

SEQ ID NO: 383874 - RNA, 19 nt, Homo sapiens
  misc_RNA (1)...(19): siRNA sense strand
agaaugaguaucugucuuu

SEQ ID NO: 383875 - RNA, 19 nt, Homo sapiens
  misc_RNA (1)...(19): siRNA sense strand
agacaucagucgccagaau

SEQ ID NO: 383876 - RNA, 19 nt, Homo sapiens
  misc_RNA (1)...(19): siRNA sense strand
gaaauugaagugucugucu

SEQ ID NO: 383877 - RNA, 19 nt, Homo sapiens
  misc_RNA (1)...(19): siRNA sense strand
acaaauggagacacagaua

SEQ ID NO: 383878 - RNA, 19 nt, Homo sapiens
  misc_RNA (1)...(19): siRNA sense strand
gaauaccucaguacuggaa

SEQ ID NO: 383879 - RNA, 19 nt, Homo sapiens
  misc_RNA (1)...(19): siRNA sense strand
gauacuagccacagacauc

SEQ ID NO: 383880 - RNA, 19 nt, Homo sapiens
  misc_RNA (1)...(19): siRNA sense strand
agacacagacauuugguuu

SEQ ID NO: 383881 - RNA, 19 nt, Homo sapiens
  misc_RNA (1)...(19): siRNA sense strand
gauagacuaacaaauggaa

SEQ ID NO: 383882 - RNA, 19 nt, Homo sapiens
  misc_RNA (1)...(19): siRNA sense strand
augaguaucugucuuuguu

SEQ ID NO: 383883 - RNA, 19 nt, Homo sapiens
  misc_RNA (1)...(19): siRNA sense strand
ggcaacaaauggagacaca

SEQ ID NO: 383884 - RNA, 19 nt, Homo sapiens
  misc_RNA (1)...(19): siRNA sense strand
cuucauggauuaauugagu

SEQ ID NO: 383885 - RNA, 19 nt, Homo sapiens
  misc_RNA (1)...(19): siRNA sense strand
ggaaauagucuaguaagcu

SEQ ID NO: 383886 - RNA, 19 nt, Homo sapiens
  misc_RNA (1)...(19): siRNA sense strand
cagacugcauuauacauuc

SEQ ID NO: 383887 - RNA, 19 nt, Homo sapiens
  misc_RNA (1)...(19): siRNA sense strand
caucaaggagauauagaaa

SEQ ID NO: 383888 - RNA, 19 nt, Homo sapiens
  misc_RNA (1)...(19): siRNA sense strand
guaaggagccgagcaggau

SEQ ID NO: 383889 - RNA, 19 nt, Homo sapiens
  misc_RNA (1)...(19): siRNA sense strand
gaucagacugcauuauaca

SEQ ID NO: 383890 - RNA, 19 nt, Homo sapiens
  misc_RNA (1)...(19): siRNA sense strand
ugucggacgugggaauuaa

SEQ ID NO: 383891 - RNA, 19 nt, Homo sapiens
  misc_RNA (1)...(19): siRNA sense strand
caagaauaccucaguacug

SEQ ID NO: 383892 - RNA, 19 nt, Homo sapiens
  misc_RNA (1)...(19): siRNA sense strand
ggacaagccaaguguaugc

SEQ ID NO: 383893 - RNA, 19 nt, Homo sapiens
  misc_RNA (1)...(19): siRNA sense strand
ggagauguacguguaagga

SEQ ID NO: 383894 - RNA, 19 nt, Homo sapiens
  misc_RNA (1)...(19): siRNA sense strand
cugaucagacugcauuaua

SEQ ID NO: 383895 - RNA, 19 nt, Homo sapiens
  misc_RNA (1)...(19): siRNA sense strand
aagagguucucacccauau

SEQ ID NO: 383896 - RNA, 19 nt, Homo sapiens
  misc_RNA (1)...(19): siRNA sense strand
cucaggccaugcacuguua

SEQ ID NO: 383897 - RNA, 19 nt, Homo sapiens
  misc_RNA (1)...(19): siRNA sense strand
ucuaguaagcuuaaccuuu

SEQ ID NO: 383898 - RNA, 19 nt, Homo sapiens
  misc_RNA (1)...(19): siRNA sense strand
aauaucagaaggcuacuaa

SEQ ID NO: 383899 - RNA, 19 nt, Homo sapiens
  misc_RNA (1)...(19): siRNA sense strand
guucucacccauauauuga

SEQ ID NO: 383900 - RNA, 19 nt, Homo sapiens
  misc_RNA (1)...(19): siRNA sense strand
gaguacuuccauuuagaua

SEQ ID NO: 383901 - RNA, 19 nt, Homo sapiens
  misc_RNA (1)...(19): siRNA sense strand
ccaaguguaugcuggaaaa

SEQ ID NO: 383902 - RNA, 19 nt, Homo sapiens
  misc_RNA (1)...(19): siRNA sense strand
gaucgucacacugaaucua

SEQ ID NO: 383903 - RNA, 19 nt, Homo sapiens
  misc_RNA (1)...(19): siRNA sense strand
ggacgugggaauuaagcaa

SEQ ID NO: 383904 - RNA, 19 nt, Homo sapiens
  misc_RNA (1)...(19): siRNA sense strand
caaauggagacacagauag

SEQ ID NO: 383905 - RNA, 19 nt, Homo sapiens
  misc_RNA (1)...(19): siRNA sense strand
uggcaacuuuauacaagaa

SEQ ID NO: 383906 - RNA, 19 nt, Homo sapiens
  misc_RNA (1)...(19): siRNA sense strand
gucaaaauccuuaccauaa

SEQ ID NO: 383907 - RNA, 19 nt, Homo sapiens
  misc_RNA (1)...(19): siRNA sense strand
uaagcaagcaguggaguga

SEQ ID NO: 383908 - RNA, 19 nt, Homo sapiens
  misc_RNA (1)...(19): siRNA sense strand
accauuacuuggcaacuuu

SEQ ID NO: 383909 - RNA, 19 nt, Homo sapiens
  misc_RNA (1)...(19): siRNA sense strand
gcuauuuccuaugacaguu

SEQ ID NO: 383910 - RNA, 19 nt, Homo sapiens
  misc_RNA (1)...(19): siRNA sense strand
uuacagauggcuuugaaau

SEQ ID NO: 383911 - RNA, 19 nt, Homo sapiens
  misc_RNA (1)...(19): siRNA sense strand
ggugauuuaugccuagaag

SEQ ID NO: 383912 - RNA, 19 nt, Homo sapiens
  misc_RNA (1)...(19): siRNA sense strand
ucagacugcauuauacauu

SEQ ID NO: 383913 - RNA, 19 nt, Homo sapiens
  misc_RNA (1)...(19): siRNA sense strand
ucucacccauauauugauu

SEQ ID NO: 383914 - RNA, 19 nt, Homo sapiens
  misc_RNA (1)...(19): siRNA sense strand
ugaucagacugcauuauac

SEQ ID NO: 383915 - RNA, 19 nt, Homo sapiens
  misc_RNA (1)...(19): siRNA sense strand
gaauaucagaaggcuacua

SEQ ID NO: 383916 - RNA, 19 nt, Homo sapiens
  misc_RNA (1)...(19): siRNA sense strand
gguucucacccauauauug

SEQ ID NO: 383917 - RNA, 19 nt, Homo sapiens
  misc_RNA (1)...(19): siRNA sense strand
cagauggcuuugaaaugug

SEQ ID NO: 383918 - RNA, 19 nt, Homo sapiens
  misc_RNA (1)...(19): siRNA sense strand
agaaagcaggcaacaaaug

SEQ ID NO: 383919 - RNA, 19 nt, Homo sapiens
  misc_RNA (1)...(19): siRNA sense strand
gauaucuugcugagcuuaa

SEQ ID NO: 383920 - RNA, 19 nt, Homo sapiens
  misc_RNA (1)...(19): siRNA sense strand
uaucagaaggcuacuaagu

SEQ ID NO: 383921 - RNA, 19 nt, Homo sapiens
  misc_RNA (1)...(19): siRNA sense strand
ccaucaaggagauauagaa

SEQ ID NO: 383922 - RNA, 19 nt, Homo sapiens
  misc_RNA (1)...(19): siRNA sense strand
gagaucugcagugggcuua

SEQ ID NO: 383923 - RNA, 19 nt, Homo sapiens
  misc_RNA (1)...(19): siRNA sense strand
gaaaaucaccacuggagau

SEQ ID NO: 383924 - RNA, 19 nt, Homo sapiens
  misc_RNA (1)...(19): siRNA sense strand
ggauaucuugcugagcuua

SEQ ID NO: 383925 - RNA, 19 nt, Homo sapiens
  misc_RNA (1)...(19): siRNA sense strand
gguacugcgguuucaaauu

SEQ ID NO: 383926 - RNA, 19 nt, Homo sapiens
  misc_RNA (1)...(19): siRNA sense strand
caccagacacagacauuug

SEQ ID NO: 383927 - RNA, 19 nt, Homo sapiens
  misc_RNA (1)...(19): siRNA sense strand
uugaguacuuccauuuaga

SEQ ID NO: 383928 - RNA, 19 nt, Homo sapiens
  misc_RNA (1)...(19): siRNA sense strand
cugaaucuauugccaacau

SEQ ID NO: 383929 - RNA, 19 nt, Homo sapiens
  misc_RNA (1)...(19): siRNA sense strand
agcaagcaguggagugaaa

SEQ ID NO: 383930 - RNA, 19 nt, Homo sapiens
  misc_RNA (1)...(19): siRNA sense strand
auucucacaucugccauua

SEQ ID NO: 383931 - RNA, 19 nt, Homo sapiens
  misc_RNA (1)...(19): siRNA sense strand
gaucauccagguguuaauc

SEQ ID NO: 383932 - RNA, 19 nt, Homo sapiens
  misc_RNA (1)...(19): siRNA sense strand
caugcacuguuacuuaaag

SEQ ID NO: 383933 - RNA, 19 nt, Homo sapiens
  misc_RNA (1)...(19): siRNA sense strand
ucauccagguguuaaucaa

SEQ ID NO: 383934 - RNA, 19 nt, Homo sapiens
  misc_RNA (1)...(19): siRNA sense strand
gacaucagucgccagaaug

SEQ ID NO: 383935 - RNA, 19 nt, Homo sapiens
  misc_RNA (1)...(19): siRNA sense strand
auugagagaaucaggcuua

SEQ ID NO: 383936 - RNA, 19 nt, Homo sapiens
  misc_RNA (1)...(19): siRNA sense strand
gaugaaacuucguagauuu

SEQ ID NO: 383937 - RNA, 19 nt, Homo sapiens
  misc_RNA (1)...(19): siRNA sense strand
gaaauagucuaguaagcuu

SEQ ID NO: 383938 - RNA, 19 nt, Homo sapiens
  misc_RNA (1)...(19): siRNA sense strand
ucagaaggcuacuaaguuu

SEQ ID NO: 383939 - RNA, 19 nt, Homo sapiens
  misc_RNA (1)...(19): siRNA sense strand
guacugcgguuucaaauuc

SEQ ID NO: 383940 - RNA, 19 nt, Homo sapiens
  misc_RNA (1)...(19): siRNA sense strand
gaguaucugucuuuguuua

SEQ ID NO: 383941 - RNA, 19 nt, Homo sapiens
  misc_RNA (1)...(19): siRNA sense strand
gcuaggagauguacgugua

SEQ ID NO: 383942 - RNA, 19 nt, Homo sapiens
  misc_RNA (1)...(19): siRNA sense strand
ggauagaggugauuuaugc

SEQ ID NO: 383943 - RNA, 19 nt, Homo sapiens
  misc_RNA (1)...(19): siRNA sense strand
guacuuccauuuagauaug

SEQ ID NO: 383944 - RNA, 19 nt, Homo sapiens
  misc_RNA (1)...(19): siRNA sense strand
gauaggugcucugauacua

SEQ ID NO: 383945 - RNA, 19 nt, Homo sapiens
  misc_RNA (1)...(19): siRNA sense strand
cuaguaagcuuaaccuuuc

SEQ ID NO: 383946 - RNA, 19 nt, Homo sapiens
  misc_RNA (1)...(19): siRNA sense strand
ucaagaagauuaccacagu

SEQ ID NO: 383947 - RNA, 19 nt, Homo sapiens
  misc_RNA (1)...(19): siRNA sense strand
gccaugcacuguuacuuaa

SEQ ID NO: 383948 - RNA, 19 nt, Homo sapiens
  misc_RNA (1)...(19): siRNA sense strand
gaagagguucucacccaua

SEQ ID NO: 383949 - RNA, 19 nt, Homo sapiens
  misc_RNA (1)...(19): siRNA sense strand
aaccuaagcuugccaauuc

SEQ ID NO: 383950 - RNA, 19 nt, Homo sapiens
  misc_RNA (1)...(19): siRNA sense strand
gaagauuaccacagucaaa

SEQ ID NO: 383951 - RNA, 19 nt, Homo sapiens
  misc_RNA (1)...(19): siRNA sense strand
guggagcuauuuccuauga

SEQ ID NO: 383952 - RNA, 19 nt, Homo sapiens
  misc_RNA (1)...(19): siRNA sense strand
guuaaucaaccuuuccuua

SEQ ID NO: 383953 - RNA, 19 nt, Homo sapiens
  misc_RNA (1)...(19): siRNA sense strand
acagauggcuuugaaaugu

SEQ ID NO: 383954 - RNA, 19 nt, Homo sapiens
  misc_RNA (1)...(19): siRNA sense strand
ggccaugcacuguuacuua

SEQ ID NO: 383955 - RNA, 19 nt, Homo sapiens
  misc_RNA (1)...(19): siRNA sense strand
gaaagcaggcaacaaaugg

SEQ ID NO: 383956 - RNA, 19 nt, Homo sapiens
  misc_RNA (1)...(19): siRNA sense strand
ucuuagaucuucacgcuuu

SEQ ID NO: 383957 - RNA, 19 nt, Homo sapiens
  misc_RNA (1)...(19): siRNA sense strand
gaaccuaagcuugccaauu

SEQ ID NO: 383958 - RNA, 19 nt, Homo sapiens
  misc_RNA (1)...(19): siRNA sense strand
gcuuugaaaugugcugaua

SEQ ID NO: 383959 - RNA, 19 nt, Homo sapiens
  misc_RNA (1)...(19): siRNA sense strand
gauaugaugaaacuucgua

SEQ ID NO: 383960 - RNA, 19 nt, Homo sapiens
  misc_RNA (1)...(19): siRNA sense strand
gaaugaguaucugucuuug

SEQ ID NO: 383961 - RNA, 19 nt, Homo sapiens
  misc_RNA (1)...(19): siRNA sense strand
uuagaaagcaggcaacaaa

SEQ ID NO: 383962 - RNA, 19 nt, Homo sapiens
  misc_RNA (1)...(19): siRNA sense strand
ucucacaucugccauuaga

SEQ ID NO: 383963 - RNA, 19 nt, Homo sapiens
  misc_RNA (1)...(19): siRNA sense strand
ugaugaaacuucguagauu

SEQ ID NO: 383964 - RNA, 19 nt, Homo sapiens
  misc_RNA (1)...(19): siRNA sense strand
gaucugcagugggcuuauu

SEQ ID NO: 383965 - RNA, 19 nt, Homo sapiens
  misc_RNA (1)...(19): siRNA sense strand
gcguggagcuauuuccuau

SEQ ID NO: 383966 - RNA, 19 nt, Homo sapiens
  misc_RNA (1)...(19): siRNA sense strand
ucacaucugccauuagaaa

SEQ ID NO: 383967 - RNA, 19 nt, Homo sapiens
  misc_RNA (1)...(19): siRNA sense strand
gagccgagcaggauuugaa

SEQ ID NO: 383968 - RNA, 19 nt, Homo sapiens
  misc_RNA (1)...(19): siRNA sense strand
auacaagaauaccucagua

SEQ ID NO: 383969 - RNA, 19 nt, Homo sapiens
  misc_RNA (1)...(19): siRNA sense strand
ggagcuauuuccuaugaca

SEQ ID NO: 383970 - RNA, 19 nt, Homo sapiens
  misc_RNA (1)...(19): siRNA sense strand
acacagacauuugguuuua

SEQ ID NO: 383971 - RNA, 19 nt, Homo sapiens
  misc_RNA (1)...(19): siRNA sense strand
caacaaauggagacacaga

SEQ ID NO: 383972 - RNA, 19 nt, Homo sapiens
  misc_RNA (1)...(19): siRNA sense strand
gagguucucacccauauau

SEQ ID NO: 383973 - RNA, 19 nt, Homo sapiens
  misc_RNA (1)...(19): siRNA sense strand
gcacuguuacuuaaaggaa

SEQ ID NO: 383974 - RNA, 19 nt, Homo sapiens
  misc_RNA (1)...(19): siRNA sense strand
agaaugaguaucugucuuu

SEQ ID NO: 383975 - RNA, 19 nt, Homo sapiens
  misc_RNA (1)...(19): siRNA sense strand
agacaucagucgccagaau

SEQ ID NO: 383976 - RNA, 19 nt, Homo sapiens
  misc_RNA (1)...(19): siRNA sense strand
gaaauugaagugucugucu

SEQ ID NO: 383977 - RNA, 19 nt, Homo sapiens
  misc_RNA (1)...(19): siRNA sense strand
acaaauggagacacagaua

SEQ ID NO: 383978 - RNA, 19 nt, Homo sapiens
  misc_RNA (1)...(19): siRNA sense strand
gaauaccucaguacuggaa

SEQ ID NO: 383979 - RNA, 19 nt, Homo sapiens
  misc_RNA (1)...(19): siRNA sense strand
gauacuagccacagacauc

SEQ ID NO: 383980 - RNA, 19 nt, Homo sapiens
  misc_RNA (1)...(19): siRNA sense strand
agacacagacauuugguuu

SEQ ID NO: 383981 - RNA, 19 nt, Homo sapiens
  misc_RNA (1)...(19): siRNA sense strand
gauagacuaacaaauggaa

SEQ ID NO: 383982 - RNA, 19 nt, Homo sapiens
  misc_RNA (1)...(19): siRNA sense strand
augaguaucugucuuuguu

SEQ ID NO: 383983 - RNA, 19 nt, Homo sapiens
  misc_RNA (1)...(19): siRNA sense strand
ggcaacaaauggagacaca

SEQ ID NO: 383984 - RNA, 19 nt, Homo sapiens
  misc_RNA (1)...(19): siRNA sense strand
cuucauggauuaauugagu

SEQ ID NO: 383985 - RNA, 19 nt, Homo sapiens
  misc_RNA (1)...(19): siRNA sense strand
ggaaauagucuaguaagcu

SEQ ID NO: 383986 - RNA, 19 nt, Homo sapiens
  misc_RNA (1)...(19): siRNA sense strand
cagacugcauuauacauuc

SEQ ID NO: 383987 - RNA, 19 nt, Homo sapiens
  misc_RNA (1)...(19): siRNA sense strand
caucaaggagauauagaaa

SEQ ID NO: 383988 - RNA, 19 nt, Homo sapiens
  misc_RNA (1)...(19): siRNA sense strand
guaaggagccgagcaggau

SEQ ID NO: 383989 - RNA, 19 nt, Homo sapiens
  misc_RNA (1)...(19): siRNA sense strand
gaucagacugcauuauaca

SEQ ID NO: 383990 - RNA, 19 nt, Homo sapiens
  misc_RNA (1)...(19): siRNA sense strand
ugucggacgugggaauuaa

SEQ ID NO: 383991 - RNA, 19 nt, Homo sapiens
  misc_RNA (1)...(19): siRNA sense strand
caagaauaccucaguacug

SEQ ID NO: 383992 - RNA, 19 nt, Homo sapiens
  misc_RNA (1)...(19): siRNA sense strand
ggacaagccaaguguaugc

SEQ ID NO: 383993 - RNA, 19 nt, Homo sapiens
  misc_RNA (1)...(19): siRNA sense strand
ggagauguacguguaagga

SEQ ID NO: 383994 - RNA, 19 nt, Homo sapiens
  misc_RNA (1)...(19): siRNA sense strand
cugaucagacugcauuaua

SEQ ID NO: 383995 - RNA, 19 nt, Homo sapiens
  misc_RNA (1)...(19): siRNA sense strand
aagagguucucacccauau

SEQ ID NO: 383996 - RNA, 19 nt, Homo sapiens
  misc_RNA (1)...(19): siRNA sense strand
cucaggccaugcacuguua

SEQ ID NO: 383997 - RNA, 19 nt, Homo sapiens
  misc_RNA (1)...(19): siRNA sense strand
ucuaguaagcuuaaccuuu

SEQ ID NO: 383998 - RNA, 19 nt, Homo sapiens
  misc_RNA (1)...(19): siRNA sense strand
aauaucagaaggcuacuaa

SEQ ID NO: 383999 - RNA, 19 nt, Homo sapiens
  misc_RNA (1)...(19): siRNA sense strand
guucucacccauauauuga

SEQ ID NO: 384000 - RNA, 19 nt, Homo sapiens
  misc_RNA (1)...(19): siRNA sense strand
gaguacuuccauuuagaua

SEQ ID NO: 384001 - RNA, 19 nt, Homo sapiens
  misc_RNA (1)...(19): siRNA sense strand
ccaaguguaugcuggaaaa

SEQ ID NO: 384002 - RNA, 19 nt, Homo sapiens
  misc_RNA (1)...(19): siRNA sense strand
gaucgucacacugaaucua

SEQ ID NO: 384003 - RNA, 19 nt, Homo sapiens
  misc_RNA (1)...(19): siRNA sense strand
ggacgugggaauuaagcaa

SEQ ID NO: 384004 - RNA, 19 nt, Homo sapiens
  misc_RNA (1)...(19): siRNA sense strand
caaauggagacacagauag

SEQ ID NO: 384005 - RNA, 19 nt, Homo sapiens
  misc_RNA (1)...(19): siRNA sense strand
uggcaacuuuauacaagaa

SEQ ID NO: 384006 - RNA, 19 nt, Homo sapiens
  misc_RNA (1)...(19): siRNA sense strand
gucaaaauccuuaccauaa

SEQ ID NO: 384007 - RNA, 19 nt, Homo sapiens
  misc_RNA (1)...(19): siRNA sense strand
uaagcaagcaguggaguga

SEQ ID NO: 384008 - RNA, 19 nt, Homo sapiens
  misc_RNA (1)...(19): siRNA sense strand
accauuacuuggcaacuuu

SEQ ID NO: 384009 - RNA, 19 nt, Homo sapiens
  misc_RNA (1)...(19): siRNA sense strand
gcuauuuccuaugacaguu

SEQ ID NO: 384010 - RNA, 19 nt, Homo sapiens
  misc_RNA (1)...(19): siRNA sense strand
uuacagauggcuuugaaau

SEQ ID NO: 384011 - RNA, 19 nt, Homo sapiens
  misc_RNA (1)...(19): siRNA sense strand
ggugauuuaugccuagaag

SEQ ID NO: 384012 - RNA, 19 nt, Homo sapiens
  misc_RNA (1)...(19): siRNA sense strand
ucagacugcauuauacauu

SEQ ID NO: 384013 - RNA, 19 nt, Homo sapiens
  misc_RNA (1)...(19): siRNA sense strand
ucucacccauauauugauu

SEQ ID NO: 384014 - RNA, 19 nt, Homo sapiens
  misc_RNA (1)...(19): siRNA sense strand
ugaucagacugcauuauac

SEQ ID NO: 384015 - RNA, 19 nt, Homo sapiens
  misc_RNA (1)...(19): siRNA sense strand
gaauaucagaaggcuacua

SEQ ID NO: 384016 - RNA, 19 nt, Homo sapiens
  misc_RNA (1)...(19): siRNA sense strand
gguucucacccauauauug

SEQ ID NO: 384017 - RNA, 19 nt, Homo sapiens
  misc_RNA (1)...(19): siRNA sense strand
cagauggcuuugaaaugug

SEQ ID NO: 384018 - RNA, 19 nt, Homo sapiens
  misc_RNA (1)...(19): siRNA sense strand
agaaagcaggcaacaaaug

SEQ ID NO: 384019 - RNA, 19 nt, Homo sapiens
  misc_RNA (1)...(19): siRNA sense strand
gauaucuugcugagcuuaa

SEQ ID NO: 384020 - RNA, 19 nt, Homo sapiens
  misc_RNA (1)...(19): siRNA sense strand
uaucagaaggcuacuaagu

SEQ ID NO: 384021 - RNA, 19 nt, Homo sapiens
  misc_RNA (1)...(19): siRNA sense strand
ccaucaaggagauauagaa

SEQ ID NO: 384022 - RNA, 19 nt, Homo sapiens
  misc_RNA (1)...(19): siRNA sense strand
gagaucugcagugggcuua

SEQ ID NO: 384023 - RNA, 19 nt, Homo sapiens
  misc_RNA (1)...(19): siRNA sense strand
gaaaaucaccacuggagau

SEQ ID NO: 384024 - RNA, 19 nt, Homo sapiens
  misc_RNA (1)...(19): siRNA sense strand
ggauaucuugcugagcuua

SEQ ID NO: 384025 - RNA, 19 nt, Homo sapiens
  misc_RNA (1)...(19): siRNA sense strand
gguacugcgguuucaaauu

SEQ ID NO: 384026 - RNA, 19 nt, Homo sapiens
  misc_RNA (1)...(19): siRNA sense strand
caccagacacagacauuug

SEQ ID NO: 384027 - RNA, 19 nt, Homo sapiens
  misc_RNA (1)...(19): siRNA sense strand
uugaguacuuccauuuaga

SEQ ID NO: 384028 - RNA, 19 nt, Homo sapiens
  misc_RNA (1)...(19): siRNA sense strand
cugaaucuauugccaacau

SEQ ID NO: 384029 - RNA, 19 nt, Homo sapiens
  misc_RNA (1)...(19): siRNA sense strand
agcaagcaguggagugaaa

SEQ ID NO: 384030 - RNA, 19 nt, Homo sapiens
  misc_RNA (1)...(19): siRNA sense strand
auucucacaucugccauua

SEQ ID NO: 384031 - RNA, 19 nt, Homo sapiens
  misc_RNA (1)...(19): siRNA sense strand
gaucauccagguguuaauc

SEQ ID NO: 384032 - RNA, 19 nt, Homo sapiens
  misc_RNA (1)...(19): siRNA sense strand
caugcacuguuacuuaaag

SEQ ID NO: 384033 - RNA, 19 nt, Homo sapiens
  misc_RNA (1)...(19): siRNA sense strand
ucauccagguguuaaucaa

SEQ ID NO: 384034 - RNA, 19 nt, Homo sapiens
  misc_RNA (1)...(19): siRNA sense strand
gacaucagucgccagaaug

SEQ ID NO: 384035 - RNA, 19 nt, Homo sapiens
  misc_RNA (1)...(19): siRNA sense strand
auugagagaaucaggcuua

SEQ ID NO: 384036 - RNA, 19 nt, Homo sapiens
  misc_RNA (1)...(19): siRNA sense strand
ggacaaacaucaugacauu

SEQ ID NO: 384037 - RNA, 19 nt, Homo sapiens
  misc_RNA (1)...(19): siRNA sense strand
gauaauaccugucauugga

SEQ ID NO: 384038 - RNA, 19 nt, Homo sapiens
  misc_RNA (1)...(19): siRNA sense strand
gaagauaaccaauguaaug

SEQ ID NO: 384039 - RNA, 19 nt, Homo sapiens
  misc_RNA (1)...(19): siRNA sense strand
ggaaaggacuggacgaaau

SEQ ID NO: 384040 - RNA, 19 nt, Homo sapiens
  misc_RNA (1)...(19): siRNA sense strand
caaagaagauaaccaaugu

SEQ ID NO: 384041 - RNA, 19 nt, Homo sapiens
  misc_RNA (1)...(19): siRNA sense strand
gaagugagcuggccauuuu

SEQ ID NO: 384042 - RNA, 19 nt, Homo sapiens
  misc_RNA (1)...(19): siRNA sense strand
ucagucaggugaauuaaua

SEQ ID NO: 384043 - RNA, 19 nt, Homo sapiens
  misc_RNA (1)...(19): siRNA sense strand
caaaugguuucaagcaaua

SEQ ID NO: 384044 - RNA, 19 nt, Homo sapiens
  misc_RNA (1)...(19): siRNA sense strand
gagaagugccuauaaauga

SEQ ID NO: 384045 - RNA, 19 nt, Homo sapiens
  misc_RNA (1)...(19): siRNA sense strand
acaauaggccuuugauuua

SEQ ID NO: 384046 - RNA, 19 nt, Homo sapiens
  misc_RNA (1)...(19): siRNA sense strand
ggguuuaaguguacaguua

SEQ ID NO: 384047 - RNA, 19 nt, Homo sapiens
  misc_RNA (1)...(19): siRNA sense strand
ccaaaucucuuucauugau

SEQ ID NO: 384048 - RNA, 19 nt, Homo sapiens
  misc_RNA (1)...(19): siRNA sense strand
gagaagaguuguccguaau

SEQ ID NO: 384049 - RNA, 19 nt, Homo sapiens
  misc_RNA (1)...(19): siRNA sense strand
ccacagaaaugacaaagca

SEQ ID NO: 384050 - RNA, 19 nt, Homo sapiens
  misc_RNA (1)...(19): siRNA sense strand
ucaaacgaaugcugauuaa

SEQ ID NO: 384051 - RNA, 19 nt, Homo sapiens
  misc_RNA (1)...(19): siRNA sense strand
gaaccggacccuaaucaaa

SEQ ID NO: 384052 - RNA, 19 nt, Homo sapiens
  misc_RNA (1)...(19): siRNA sense strand
gaggugcgaucacaacuga

SEQ ID NO: 384053 - RNA, 19 nt, Homo sapiens
  misc_RNA (1)...(19): siRNA sense strand
gaagauaauaccugucauu

SEQ ID NO: 384054 - RNA, 19 nt, Homo sapiens
  misc_RNA (1)...(19): siRNA sense strand
ucaccaagguaaucaauau

SEQ ID NO: 384055 - RNA, 19 nt, Homo sapiens
  misc_RNA (1)...(19): siRNA sense strand
gcaaggaauuuacuaugca

SEQ ID NO: 384056 - RNA, 19 nt, Homo sapiens
  misc_RNA (1)...(19): siRNA sense strand
ucccaaaucucuuucauug

SEQ ID NO: 384057 - RNA, 19 nt, Homo sapiens
  misc_RNA (1)...(19): siRNA sense strand
cacaauaggccuuugauuu

SEQ ID NO: 384058 - RNA, 19 nt, Homo sapiens
  misc_RNA (1)...(19): siRNA sense strand
uaagaaccacugaguuaua

SEQ ID NO: 384059 - RNA, 19 nt, Homo sapiens
  misc_RNA (1)...(19): siRNA sense strand
caauaaggcugagaaaaua

SEQ ID NO: 384060 - RNA, 19 nt, Homo sapiens
  misc_RNA (1)...(19): siRNA sense strand
gugauaaacacuaugcuua

SEQ ID NO: 384061 - RNA, 19 nt, Homo sapiens
  misc_RNA (1)...(19): siRNA sense strand
caauaggccuuugauuuau

SEQ ID NO: 384062 - RNA, 19 nt, Homo sapiens
  misc_RNA (1)...(19): siRNA sense strand
caucaaaacucucagaaaa

SEQ ID NO: 384063 - RNA, 19 nt, Homo sapiens
  misc_RNA (1)...(19): siRNA sense strand
ucuaagaaccacugaguua

SEQ ID NO: 384064 - RNA, 19 nt, Homo sapiens
  misc_RNA (1)...(19): siRNA sense strand
gaaaauauccgaauguguu

SEQ ID NO: 384065 - RNA, 19 nt, Homo sapiens
  misc_RNA (1)...(19): siRNA sense strand
ggagaagugccuauaaaug

SEQ ID NO: 384066 - RNA, 19 nt, Homo sapiens
  misc_RNA (1)...(19): siRNA sense strand
ggucuuagccacagaaaug

SEQ ID NO: 384067 - RNA, 19 nt, Homo sapiens
  misc_RNA (1)...(19): siRNA sense strand
gauuaaaugugcugaugug

SEQ ID NO: 384068 - RNA, 19 nt, Homo sapiens
  misc_RNA (1)...(19): siRNA sense strand
ccagagaaccggacccuaa

SEQ ID NO: 384069 - RNA, 19 nt, Homo sapiens
  misc_RNA (1)...(19): siRNA sense strand
gggaaugaauauguucuuu

SEQ ID NO: 384070 - RNA, 19 nt, Homo sapiens
  misc_RNA (1)...(19): siRNA sense strand
gaaaggacuggacgaaaug

SEQ ID NO: 384071 - RNA, 19 nt, Homo sapiens
  misc_RNA (1)...(19): siRNA sense strand
cgagugggcugcacgcauu

SEQ ID NO: 384072 - RNA, 19 nt, Homo sapiens
  misc_RNA (1)...(19): siRNA sense strand
gauaaccaauguaauggau

SEQ ID NO: 384073 - RNA, 19 nt, Homo sapiens
  misc_RNA (1)...(19): siRNA sense strand
uaaccaauguaauggauuc

SEQ ID NO: 384074 - RNA, 19 nt, Homo sapiens
  misc_RNA (1)...(19): siRNA sense strand
ccaaaucccaaaucucuuu

SEQ ID NO: 384075 - RNA, 19 nt, Homo sapiens
  misc_RNA (1)...(19): siRNA sense strand
ucaaaugguuucaagcaau

SEQ ID NO: 384076 - RNA, 19 nt, Homo sapiens
  misc_RNA (1)...(19): siRNA sense strand
uaucaaugcugcccaggaa

SEQ ID NO: 384077 - RNA, 19 nt, Homo sapiens
  misc_RNA (1)...(19): siRNA sense strand
aaacaacaaugggcuauca

SEQ ID NO: 384078 - RNA, 19 nt, Homo sapiens
  misc_RNA (1)...(19): siRNA sense strand
gaagguagcaguagcugau

SEQ ID NO: 384079 - RNA, 19 nt, Homo sapiens
  misc_RNA (1)...(19): siRNA sense strand
caucauagaccacagaaau

SEQ ID NO: 384080 - RNA, 19 nt, Homo sapiens
  misc_RNA (1)...(19): siRNA sense strand
agagaagaguuguccguaa

SEQ ID NO: 384081 - RNA, 19 nt, Homo sapiens
  misc_RNA (1)...(19): siRNA sense strand
gggcuuaccuguggugaug

SEQ ID NO: 384082 - RNA, 19 nt, Homo sapiens
  misc_RNA (1)...(19): siRNA sense strand
gagcaugucaacaaauuug

SEQ ID NO: 384083 - RNA, 19 nt, Homo sapiens
  misc_RNA (1)...(19): siRNA sense strand
cagugaagaugcaauugaa

SEQ ID NO: 384084 - RNA, 19 nt, Homo sapiens
  misc_RNA (1)...(19): siRNA sense strand
agaccugccugauuuaaug

SEQ ID NO: 384085 - RNA, 19 nt, Homo sapiens
  misc_RNA (1)...(19): siRNA sense strand
gaaccacugaguuauauuc

SEQ ID NO: 384086 - RNA, 19 nt, Homo sapiens
  misc_RNA (1)...(19): siRNA sense strand
agaagugccuauaaaugaa

SEQ ID NO: 384087 - RNA, 19 nt, Homo sapiens
  misc_RNA (1)...(19): siRNA sense strand
ccaaagaagauaaccaaug

SEQ ID NO: 384088 - RNA, 19 nt, Homo sapiens
  misc_RNA (1)...(19): siRNA sense strand
gcauuucggaagaauauuu

SEQ ID NO: 384089 - RNA, 19 nt, Homo sapiens
  misc_RNA (1)...(19): siRNA sense strand
gaaaauggggaaacugaua

SEQ ID NO: 384090 - RNA, 19 nt, Homo sapiens
  misc_RNA (1)...(19): siRNA sense strand
caacaaacccuuggcaaca

SEQ ID NO: 384091 - RNA, 19 nt, Homo sapiens
  misc_RNA (1)...(19): siRNA sense strand
cuuaaugucugaugguuug

SEQ ID NO: 384092 - RNA, 19 nt, Homo sapiens
  misc_RNA (1)...(19): siRNA sense strand
aguauucacugcauuagaa

SEQ ID NO: 384093 - RNA, 19 nt, Homo sapiens
  misc_RNA (1)...(19): siRNA sense strand
acucagggcuuguaacuca

SEQ ID NO: 384094 - RNA, 19 nt, Homo sapiens
  misc_RNA (1)...(19): siRNA sense strand
aaagcaggguuuaagugua

SEQ ID NO: 384095 - RNA, 19 nt, Homo sapiens
  misc_RNA (1)...(19): siRNA sense strand
gagauuucaucaagaucaa

SEQ ID NO: 384096 - RNA, 19 nt, Homo sapiens
  misc_RNA (1)...(19): siRNA sense strand
ccaacuccuuccuguguaa

SEQ ID NO: 384097 - RNA, 19 nt, Homo sapiens
  misc_RNA (1)...(19): siRNA sense strand
caucauggccugcuacaau

SEQ ID NO: 384098 - RNA, 19 nt, Homo sapiens
  misc_RNA (1)...(19): siRNA sense strand
acaaggagguauguagaaa

SEQ ID NO: 384099 - RNA, 19 nt, Homo sapiens
  misc_RNA (1)...(19): siRNA sense strand
gugcaggucuaucagauca

SEQ ID NO: 384100 - RNA, 19 nt, Homo sapiens
  misc_RNA (1)...(19): siRNA sense strand
ggagaugauaaaugcaaua

SEQ ID NO: 384101 - RNA, 19 nt, Homo sapiens
  misc_RNA (1)...(19): siRNA sense strand
caaggaauuuacuaugcaa

SEQ ID NO: 384102 - RNA, 19 nt, Homo sapiens
  misc_RNA (1)...(19): siRNA sense strand
gaagugccuauaaaugaaa

SEQ ID NO: 384103 - RNA, 19 nt, Homo sapiens
  misc_RNA (1)...(19): siRNA sense strand
uuucauuucugcuggauuu

SEQ ID NO: 384104 - RNA, 19 nt, Homo sapiens
  misc_RNA (1)...(19): siRNA sense strand
ccaaggagaggauaaagga

SEQ ID NO: 384105 - RNA, 19 nt, Homo sapiens
  misc_RNA (1)...(19): siRNA sense strand
ccaauuaucauuccuccaa

SEQ ID NO: 384106 - RNA, 19 nt, Homo sapiens
  misc_RNA (1)...(19): siRNA sense strand
cuaagaucaugguuacaaa

SEQ ID NO: 384107 - RNA, 19 nt, Homo sapiens
  misc_RNA (1)...(19): siRNA sense strand
gcucgauacuauaaauuca

SEQ ID NO: 384108 - RNA, 19 nt, Homo sapiens
  misc_RNA (1)...(19): siRNA sense strand
ggaagugagcuggccauuu

SEQ ID NO: 384109 - RNA, 19 nt, Homo sapiens
  misc_RNA (1)...(19): siRNA sense strand
ggaaggaguuaggagaagu

SEQ ID NO: 384110 - RNA, 19 nt, Homo sapiens
  misc_RNA (1)...(19): siRNA sense strand
uuguagaccugccugauuu

SEQ ID NO: 384111 - RNA, 19 nt, Homo sapiens
  misc_RNA (1)...(19): siRNA sense strand
gauuaucgacauggucuua

SEQ ID NO: 384112 - RNA, 19 nt, Homo sapiens
  misc_RNA (1)...(19): siRNA sense strand
acauggagaggaaugauua

SEQ ID NO: 384113 - RNA, 19 nt, Homo sapiens
  misc_RNA (1)...(19): siRNA sense strand
aaucagacaggcaaacaua

SEQ ID NO: 384114 - RNA, 19 nt, Homo sapiens
  misc_RNA (1)...(19): siRNA sense strand
gcaacaauaaggcugagaa

SEQ ID NO: 384115 - RNA, 19 nt, Homo sapiens
  misc_RNA (1)...(19): siRNA sense strand
gcuuguaacucaguauuca

SEQ ID NO: 384116 - RNA, 19 nt, Homo sapiens
  misc_RNA (1)...(19): siRNA sense strand
aacgaaugcugauuaaaug

SEQ ID NO: 384117 - RNA, 19 nt, Homo sapiens
  misc_RNA (1)...(19): siRNA sense strand
ccacaauucuacacauucu

SEQ ID NO: 384118 - RNA, 19 nt, Homo sapiens
  misc_RNA (1)...(19): siRNA sense strand
gcuaagaucaugguuacaa

SEQ ID NO: 384119 - RNA, 19 nt, Homo sapiens
  misc_RNA (1)...(19): siRNA sense strand
gaggaauacugggacuuug

SEQ ID NO: 384120 - RNA, 19 nt, Homo sapiens
  misc_RNA (1)...(19): siRNA sense strand
ggaaugaauauguucuuuc

SEQ ID NO: 384121 - RNA, 19 nt, Homo sapiens
  misc_RNA (1)...(19): siRNA sense strand
aagaaccacugaguuauau

SEQ ID NO: 384122 - RNA, 19 nt, Homo sapiens
  misc_RNA (1)...(19): siRNA sense strand
caacaauaaggcugagaaa

SEQ ID NO: 384123 - RNA, 19 nt, Homo sapiens
  misc_RNA (1)...(19): siRNA sense strand
ggcaaggaguggcaaggaa

SEQ ID NO: 384124 - RNA, 19 nt, Homo sapiens
  misc_RNA (1)...(19): siRNA sense strand
uacauuccaugacaauuga

SEQ ID NO: 384125 - RNA, 19 nt, Homo sapiens
  misc_RNA (1)...(19): siRNA sense strand
caucuugacaacaacuuua

SEQ ID NO: 384126 - RNA, 19 nt, Homo sapiens
  misc_RNA (1)...(19): siRNA sense strand
gauaaacacuaugcuuagg

SEQ ID NO: 384127 - RNA, 19 nt, Homo sapiens
  misc_RNA (1)...(19): siRNA sense strand
ggcaaggaauuuacuaugc

SEQ ID NO: 384128 - RNA, 19 nt, Homo sapiens
  misc_RNA (1)...(19): siRNA sense strand
gcacgcauuucggaagaau

SEQ ID NO: 384129 - RNA, 19 nt, Homo sapiens
  misc_RNA (1)...(19): siRNA sense strand
caaacaucaugacauuauc

SEQ ID NO: 384130 - RNA, 19 nt, Homo sapiens
  misc_RNA (1)...(19): siRNA sense strand
uaccacaauucuacacauu

SEQ ID NO: 384131 - RNA, 19 nt, Homo sapiens
  misc_RNA (1)...(19): siRNA sense strand
aaacagugaagaugcaauu

SEQ ID NO: 384132 - RNA, 19 nt, Homo sapiens
  misc_RNA (1)...(19): siRNA sense strand
gaagaguuguccguaaugc

SEQ ID NO: 384133 - RNA, 19 nt, Homo sapiens
  misc_RNA (1)...(19): siRNA sense strand
gaauacugggacuuugaua

SEQ ID NO: 384134 - RNA, 19 nt, Homo sapiens
  misc_RNA (1)...(19): siRNA sense strand
gagaaccggacccuaauca

SEQ ID NO: 384135 - RNA, 19 nt, Homo sapiens
  misc_RNA (1)...(19): siRNA sense strand
gaaacuuuagauccaauug

SEQ ID NO: 384136 - RNA, 19 nt, Homo sapiens
  misc_RNA (1)...(19): siRNA sense strand
gaacuuagcucucaaagaa

SEQ ID NO: 384137 - RNA, 19 nt, Homo sapiens
  misc_RNA (1)...(19): siRNA sense strand
gauguuagguuuaagaaga

SEQ ID NO: 384138 - RNA, 19 nt, Homo sapiens
  misc_RNA (1)...(19): siRNA sense strand
gaugauggaugcuaccuuu

SEQ ID NO: 384139 - RNA, 19 nt, Homo sapiens
  misc_RNA (1)...(19): siRNA sense strand
ccaaacaacaggacuuaua

SEQ ID NO: 384140 - RNA, 19 nt, Homo sapiens
  misc_RNA (1)...(19): siRNA sense strand
acaggaagcugccuuugaa

SEQ ID NO: 384141 - RNA, 19 nt, Homo sapiens
  misc_RNA (1)...(19): siRNA sense strand
ggauguagcaaaucacuuu

SEQ ID NO: 384142 - RNA, 19 nt, Homo sapiens
  misc_RNA (1)...(19): siRNA sense strand
caaguaaaguuuccaagca

SEQ ID NO: 384143 - RNA, 19 nt, Homo sapiens
  misc_RNA (1)...(19): siRNA sense strand
ccaauauucuuguucuuug

SEQ ID NO: 384144 - RNA, 19 nt, Homo sapiens
  misc_RNA (1)...(19): siRNA sense strand
ugauuuggguccuacuuua

SEQ ID NO: 384145 - RNA, 19 nt, Homo sapiens
  misc_RNA (1)...(19): siRNA sense strand
gacaagaccuggacaacca

SEQ ID NO: 384146 - RNA, 19 nt, Homo sapiens
  misc_RNA (1)...(19): siRNA sense strand
gcauuugccucugucagua

SEQ ID NO: 384147 - RNA, 19 nt, Homo sapiens
  misc_RNA (1)...(19): siRNA sense strand
cagcggauguuagguuuaa

SEQ ID NO: 384148 - RNA, 19 nt, Homo sapiens
  misc_RNA (1)...(19): siRNA sense strand
guccuuaccucauuuggaa

SEQ ID NO: 384149 - RNA, 19 nt, Homo sapiens
  misc_RNA (1)...(19): siRNA sense strand
ggacuuauaccugcgaauu

SEQ ID NO: 384150 - RNA, 19 nt, Homo sapiens
  misc_RNA (1)...(19): siRNA sense strand
ccaagcagcaacaaucuuu

SEQ ID NO: 384151 - RNA, 19 nt, Homo sapiens
  misc_RNA (1)...(19): siRNA sense strand
gagccacgguugcugauuc

SEQ ID NO: 384152 - RNA, 19 nt, Homo sapiens
  misc_RNA (1)...(19): siRNA sense strand
ggaaacuauugucuacuca

SEQ ID NO: 384153 - RNA, 19 nt, Homo sapiens
  misc_RNA (1)...(19): siRNA sense strand
caaagaacaacaacccaaa

SEQ ID NO: 384154 - RNA, 19 nt, Homo sapiens
  misc_RNA (1)...(19): siRNA sense strand
ugccguaucugaagaagaa

SEQ ID NO: 384155 - RNA, 19 nt, Homo sapiens
  misc_RNA (1)...(19): siRNA sense strand
ggaaguagcagugugaaca

SEQ ID NO: 384156 - RNA, 19 nt, Homo sapiens
  misc_RNA (1)...(19): siRNA sense strand
guucuuugcuguuauccuu

SEQ ID NO: 384157 - RNA, 19 nt, Homo sapiens
  misc_RNA (1)...(19): siRNA sense strand
gacuuauaccugcgaauua

SEQ ID NO: 384158 - RNA, 19 nt, Homo sapiens
  misc_RNA (1)...(19): siRNA sense strand
gagcagcuaccucagcaaa

SEQ ID NO: 384159 - RNA, 19 nt, Homo sapiens
  misc_RNA (1)...(19): siRNA sense strand
ggaaaacgguggaaucaag

SEQ ID NO: 384160 - RNA, 19 nt, Homo sapiens
  misc_RNA (1)...(19): siRNA sense strand
gauauggugccuauggaaa

SEQ ID NO: 384161 - RNA, 19 nt, Homo sapiens
  misc_RNA (1)...(19): siRNA sense strand
gaaguaacagacagcauca

SEQ ID NO: 384162 - RNA, 19 nt, Homo sapiens
  misc_RNA (1)...(19): siRNA sense strand
uguauuggauguagcaaau

SEQ ID NO: 384163 - RNA, 19 nt, Homo sapiens
  misc_RNA (1)...(19): siRNA sense strand
gaugaucuuccacccagua

SEQ ID NO: 384164 - RNA, 19 nt, Homo sapiens
  misc_RNA (1)...(19): siRNA sense strand
gaagcugccuuugaaucug

SEQ ID NO: 384165 - RNA, 19 nt, Homo sapiens
  misc_RNA (1)...(19): siRNA sense strand
ggaagcugccuuugaaucu

SEQ ID NO: 384166 - RNA, 19 nt, Homo sapiens
  misc_RNA (1)...(19): siRNA sense strand
uaacagacagcaucaacug

SEQ ID NO: 384167 - RNA, 19 nt, Homo sapiens
  misc_RNA (1)...(19): siRNA sense strand
gguccuacuuuaaugacaa

SEQ ID NO: 384168 - RNA, 19 nt, Homo sapiens
  misc_RNA (1)...(19): siRNA sense strand
gauuuggguccuacuuuaa

SEQ ID NO: 384169 - RNA, 19 nt, Homo sapiens
  misc_RNA (1)...(19): siRNA sense strand
gaacaggaagcugccuuug

SEQ ID NO: 384170 - RNA, 19 nt, Homo sapiens
  misc_RNA (1)...(19): siRNA sense strand
caacccaacacuaacuaaa

SEQ ID NO: 384171 - RNA, 19 nt, Homo sapiens
  misc_RNA (1)...(19): siRNA sense strand
ggccaaacaacaggacuua

SEQ ID NO: 384172 - RNA, 19 nt, Homo sapiens
  misc_RNA (1)...(19): siRNA sense strand
gcaaaaucuuggccaauau

SEQ ID NO: 384173 - RNA, 19 nt, Homo sapiens
  misc_RNA (1)...(19): siRNA sense strand
gaaaguauugugcaugcau

SEQ ID NO: 384174 - RNA, 19 nt, Homo sapiens
  misc_RNA (1)...(19): siRNA sense strand
uuucagggcuguauuggau

SEQ ID NO: 384175 - RNA, 19 nt, Homo sapiens
  misc_RNA (1)...(19): siRNA sense strand
gccaauauucuuguucuuu

SEQ ID NO: 384176 - RNA, 19 nt, Homo sapiens
  misc_RNA (1)...(19): siRNA sense strand
aaaguauugugcaugcauu

SEQ ID NO: 384177 - RNA, 19 nt, Homo sapiens
  misc_RNA (1)...(19): siRNA sense strand
gguggaaucaaguaaaguu

SEQ ID NO: 384178 - RNA, 19 nt, Homo sapiens
  misc_RNA (1)...(19): siRNA sense strand
aaacuauugucuacucaca

SEQ ID NO: 384179 - RNA, 19 nt, Homo sapiens
  misc_RNA (1)...(19): siRNA sense strand
ggugguccuuaccucauuu

SEQ ID NO: 384180 - RNA, 19 nt, Homo sapiens
  misc_RNA (1)...(19): siRNA sense strand
caaacaacaggacuuauac

SEQ ID NO: 384181 - RNA, 19 nt, Homo sapiens
  misc_RNA (1)...(19): siRNA sense strand
auaaugggcugggcuacaa

SEQ ID NO: 384182 - RNA, 19 nt, Homo sapiens
  misc_RNA (1)...(19): siRNA sense strand
uaauaagguuccaguugca

SEQ ID NO: 384183 - RNA, 19 nt, Homo sapiens
  misc_RNA (1)...(19): siRNA sense strand
ccacgguugcugauucuuu

SEQ ID NO: 384184 - RNA, 19 nt, Homo sapiens
  misc_RNA (1)...(19): siRNA sense strand
uacagcggauguuagguuu

SEQ ID NO: 384185 - RNA, 19 nt, Homo sapiens
  misc_RNA (1)...(19): siRNA sense strand
uauggaggcuauaguccuu

SEQ ID NO: 384186 - RNA, 19 nt, Homo sapiens
  misc_RNA (1)...(19): siRNA sense strand
ggugauaugcugaacuuag

SEQ ID NO: 384187 - RNA, 19 nt, Homo sapiens
  misc_RNA (1)...(19): siRNA sense strand
ccagagcagaauaugauuu

SEQ ID NO: 384188 - RNA, 19 nt, Homo sapiens
  misc_RNA (1)...(19): siRNA sense strand
caguagauuuguucagcaa

SEQ ID NO: 384189 - RNA, 19 nt, Homo sapiens
  misc_RNA (1)...(19): siRNA sense strand
uauggugccuauggaaauu

SEQ ID NO: 384190 - RNA, 19 nt, Homo sapiens
  misc_RNA (1)...(19): siRNA sense strand
cacgguugcugauucuuug

SEQ ID NO: 384191 - RNA, 19 nt, Homo sapiens
  misc_RNA (1)...(19): siRNA sense strand
gaggaugaccauguaguug

SEQ ID NO: 384192 - RNA, 19 nt, Homo sapiens
  misc_RNA (1)...(19): siRNA sense strand
gggcaaguggugaggauga

SEQ ID NO: 384193 - RNA, 19 nt, Homo sapiens
  misc_RNA (1)...(19): siRNA sense strand
ggauauggugccuauggaa

SEQ ID NO: 384194 - RNA, 19 nt, Homo sapiens
  misc_RNA (1)...(19): siRNA sense strand
uauuggauguagcaaauca

SEQ ID NO: 384195 - RNA, 19 nt, Homo sapiens
  misc_RNA (1)...(19): siRNA sense strand
guccuuauaguuauggaua

SEQ ID NO: 384196 - RNA, 19 nt, Homo sapiens
  misc_RNA (1)...(19): siRNA sense strand
cuacagcggauguuagguu

SEQ ID NO: 384197 - RNA, 19 nt, Homo sapiens
  misc_RNA (1)...(19): siRNA sense strand
ggacaaccagcacuuacca

SEQ ID NO: 384198 - RNA, 19 nt, Homo sapiens
  misc_RNA (1)...(19): siRNA sense strand
acuuauaccugcgaauuau

SEQ ID NO: 384199 - RNA, 19 nt, Homo sapiens
  misc_RNA (1)...(19): siRNA sense strand
gcagcuaccucagcaaaau

SEQ ID NO: 384200 - RNA, 19 nt, Homo sapiens
  misc_RNA (1)...(19): siRNA sense strand
aaccagcacuuaccagagu

SEQ ID NO: 384201 - RNA, 19 nt, Homo sapiens
  misc_RNA (1)...(19): siRNA sense strand
ucacagcagacaggaagua

SEQ ID NO: 384202 - RNA, 19 nt, Homo sapiens
  misc_RNA (1)...(19): siRNA sense strand
uaccucauuuggaaacuau

SEQ ID NO: 384203 - RNA, 19 nt, Homo sapiens
  misc_RNA (1)...(19): siRNA sense strand
gugcauuucaguccauuga

SEQ ID NO: 384204 - RNA, 19 nt, Homo sapiens
  misc_RNA (1)...(19): siRNA sense strand
cuggugauaugcugaacuu

SEQ ID NO: 384205 - RNA, 19 nt, Homo sapiens
  misc_RNA (1)...(19): siRNA sense strand
uggaaacuauugucuacuc

SEQ ID NO: 384206 - RNA, 19 nt, Homo sapiens
  misc_RNA (1)...(19): siRNA sense strand
ucaguccauugaaaguauu

SEQ ID NO: 384207 - RNA, 19 nt, Homo sapiens
  misc_RNA (1)...(19): siRNA sense strand
aaacgguggaaucaaguaa

SEQ ID NO: 384208 - RNA, 19 nt, Homo sapiens
  misc_RNA (1)...(19): siRNA sense strand
gugauaugcugaacuuagc

SEQ ID NO: 384209 - RNA, 19 nt, Homo sapiens
  misc_RNA (1)...(19): siRNA sense strand
acuaauaagguuccaguug

SEQ ID NO: 384210 - RNA, 19 nt, Homo sapiens
  misc_RNA (1)...(19): siRNA sense strand
ucagggcuguauuggaugu

SEQ ID NO: 384211 - RNA, 19 nt, Homo sapiens
  misc_RNA (1)...(19): siRNA sense strand
ugaggaugaccauguaguu

SEQ ID NO: 384212 - RNA, 19 nt, Homo sapiens
  misc_RNA (1)...(19): siRNA sense strand
ggccaauauucuuguucuu

SEQ ID NO: 384213 - RNA, 19 nt, Homo sapiens
  misc_RNA (1)...(19): siRNA sense strand
ugaacaggaagcugccuuu

SEQ ID NO: 384214 - RNA, 19 nt, Homo sapiens
  misc_RNA (1)...(19): siRNA sense strand
cagcagacaggaaguagca

SEQ ID NO: 384215 - RNA, 19 nt, Homo sapiens
  misc_RNA (1)...(19): siRNA sense strand
gcugaacuuagcucucaaa

SEQ ID NO: 384216 - RNA, 19 nt, Homo sapiens
  misc_RNA (1)...(19): siRNA sense strand
uuuccgggcuggugauaug

SEQ ID NO: 384217 - RNA, 19 nt, Homo sapiens
  misc_RNA (1)...(19): siRNA sense strand
gcggauguuagguuuaaga

SEQ ID NO: 384218 - RNA, 19 nt, Homo sapiens
  misc_RNA (1)...(19): siRNA sense strand
aaucuuggccaauauucuu

SEQ ID NO: 384219 - RNA, 19 nt, Homo sapiens
  misc_RNA (1)...(19): siRNA sense strand
acaggaaguagcaguguga

SEQ ID NO: 384220 - RNA, 19 nt, Homo sapiens
  misc_RNA (1)...(19): siRNA sense strand
caauauucuuguucuuugc

SEQ ID NO: 384221 - RNA, 19 nt, Homo sapiens
  misc_RNA (1)...(19): siRNA sense strand
uuaccucauuuggaaacua

SEQ ID NO: 384222 - RNA, 19 nt, Homo sapiens
  misc_RNA (1)...(19): siRNA sense strand
aagcugccuuugaaucugu

SEQ ID NO: 384223 - RNA, 19 nt, Homo sapiens
  misc_RNA (1)...(19): siRNA sense strand
ccaacccaacacuaacuaa

SEQ ID NO: 384224 - RNA, 19 nt, Homo sapiens
  misc_RNA (1)...(19): siRNA sense strand
guggaaucaaguaaaguuu

SEQ ID NO: 384225 - RNA, 19 nt, Homo sapiens
  misc_RNA (1)...(19): siRNA sense strand
uagccuugauggccaaaca

SEQ ID NO: 384226 - RNA, 19 nt, Homo sapiens
  misc_RNA (1)...(19): siRNA sense strand
acuuagcucucaaagaaca

SEQ ID NO: 384227 - RNA, 19 nt, Homo sapiens
  misc_RNA (1)...(19): siRNA sense strand
agcaaaaucuuggccaaua

SEQ ID NO: 384228 - RNA, 19 nt, Homo sapiens
  misc_RNA (1)...(19): siRNA sense strand
augcugaacuuagcucuca

SEQ ID NO: 384229 - RNA, 19 nt, Homo sapiens
  misc_RNA (1)...(19): siRNA sense strand
ugccagagcagaauaugau

SEQ ID NO: 384230 - RNA, 19 nt, Homo sapiens
  misc_RNA (1)...(19): siRNA sense strand
gauggaugcuaccuuuuca

SEQ ID NO: 384231 - RNA, 19 nt, Homo sapiens
  misc_RNA (1)...(19): siRNA sense strand
uagaccugcuuacaguuca

SEQ ID NO: 384232 - RNA, 19 nt, Homo sapiens
  misc_RNA (1)...(19): siRNA sense strand
uuuaccaacccaacacuaa

SEQ ID NO: 384233 - RNA, 19 nt, Homo sapiens
  misc_RNA (1)...(19): siRNA sense strand
uggauauggugccuaugga

SEQ ID NO: 384234 - RNA, 19 nt, Homo sapiens
  misc_RNA (1)...(19): siRNA sense strand
acuauugucuacucacagu

SEQ ID NO: 384235 - RNA, 19 nt, Homo sapiens
  misc_RNA (1)...(19): siRNA sense strand
uuuggaaacuauugucuac

SEQ ID NO: 384236 - RNA, 19 nt, Homo sapiens
  misc_RNA (1)...(19): siRNA sense strand
caaaucagccaguguauaa

SEQ ID NO: 384237 - RNA, 19 nt, Homo sapiens
  misc_RNA (1)...(19): siRNA sense strand
ccaaggaccuccaggauau

SEQ ID NO: 384238 - RNA, 19 nt, Homo sapiens
  misc_RNA (1)...(19): siRNA sense strand
ggacagaggguuuacuuug

SEQ ID NO: 384239 - RNA, 19 nt, Homo sapiens
  misc_RNA (1)...(19): siRNA sense strand
uacagacgcugauaacuuu

SEQ ID NO: 384240 - RNA, 19 nt, Homo sapiens
  misc_RNA (1)...(19): siRNA sense strand
aaacaaaacucacagauga

SEQ ID NO: 384241 - RNA, 19 nt, Homo sapiens
  misc_RNA (1)...(19): siRNA sense strand
guaccaauagguuauguua

SEQ ID NO: 384242 - RNA, 19 nt, Homo sapiens
  misc_RNA (1)...(19): siRNA sense strand
gaaaagagaggauguacua

SEQ ID NO: 384243 - RNA, 19 nt, Homo sapiens
  misc_RNA (1)...(19): siRNA sense strand
ggagagaccacuaagaugu

SEQ ID NO: 384244 - RNA, 19 nt, Homo sapiens
  misc_RNA (1)...(19): siRNA sense strand
gaaauuaagaacagcuuug

SEQ ID NO: 384245 - RNA, 19 nt, Homo sapiens
  misc_RNA (1)...(19): siRNA sense strand
cuaccaaaguuuacaauuc

SEQ ID NO: 384246 - RNA, 19 nt, Homo sapiens
  misc_RNA (1)...(19): siRNA sense strand
gcaaauugaacuucuggaa

SEQ ID NO: 384247 - RNA, 19 nt, Homo sapiens
  misc_RNA (1)...(19): siRNA sense strand
gagagaccacuaagaugua

SEQ ID NO: 384248 - RNA, 19 nt, Homo sapiens
  misc_RNA (1)...(19): siRNA sense strand
uaauaugggucaagaaguc

SEQ ID NO: 384249 - RNA, 19 nt, Homo sapiens
  misc_RNA (1)...(19): siRNA sense strand
gaauccaguucccuuuaga

SEQ ID NO: 384250 - RNA, 19 nt, Homo sapiens
  misc_RNA (1)...(19): siRNA sense strand
cuuuagaccuugauguuaa

SEQ ID NO: 384251 - RNA, 19 nt, Homo sapiens
  misc_RNA (1)...(19): siRNA sense strand
ucagauagaucagauacug

SEQ ID NO: 384252 - RNA, 19 nt, Homo sapiens
  misc_RNA (1)...(19): siRNA sense strand
gaagauacugauugcugua

SEQ ID NO: 384253 - RNA, 19 nt, Homo sapiens
  misc_RNA (1)...(19): siRNA sense strand
ccaccuggauuagaauauu

SEQ ID NO: 384254 - RNA, 19 nt, Homo sapiens
  misc_RNA (1)...(19): siRNA sense strand
ccaguucccuuuagaccuu

SEQ ID NO: 384255 - RNA, 19 nt, Homo sapiens
  misc_RNA (1)...(19): siRNA sense strand
aagaacagcuuuggacaga

SEQ ID NO: 384256 - RNA, 19 nt, Homo sapiens
  misc_RNA (1)...(19): siRNA sense strand
aaagagaggauguacuaaa

SEQ ID NO: 384257 - RNA, 19 nt, Homo sapiens
  misc_RNA (1)...(19): siRNA sense strand
gauaauaugggucaagaag

SEQ ID NO: 384258 - RNA, 19 nt, Homo sapiens
  misc_RNA (1)...(19): siRNA sense strand
gcacccaugucuaccaaag

SEQ ID NO: 384259 - RNA, 19 nt, Homo sapiens
  misc_RNA (1)...(19): siRNA sense strand
uaagucagauagaucagau

SEQ ID NO: 384260 - RNA, 19 nt, Homo sapiens
  misc_RNA (1)...(19): siRNA sense strand
guuauguuauucagacuug

SEQ ID NO: 384261 - RNA, 19 nt, Homo sapiens
  misc_RNA (1)...(19): siRNA sense strand
caccuggauuagaauauuu

SEQ ID NO: 384262 - RNA, 19 nt, Homo sapiens
  misc_RNA (1)...(19): siRNA sense strand
ggacuggaauuuugagaga

SEQ ID NO: 384263 - RNA, 19 nt, Homo sapiens
  misc_RNA (1)...(19): siRNA sense strand
ccaaaucagccaguguaua

SEQ ID NO: 384264 - RNA, 19 nt, Homo sapiens
  misc_RNA (1)...(19): siRNA sense strand
gcugauaacuuuggaaucc

SEQ ID NO: 384265 - RNA, 19 nt, Homo sapiens
  misc_RNA (1)...(19): siRNA sense strand
gucaagaagucauaacucu

SEQ ID NO: 384266 - RNA, 19 nt, Homo sapiens
  misc_RNA (1)...(19): siRNA sense strand
gacagaggguuuacuuugc

SEQ ID NO: 384267 - RNA, 19 nt, Homo sapiens
  misc_RNA (1)...(19): siRNA sense strand
ccucauugacuucauguuu

SEQ ID NO: 384268 - RNA, 19 nt, Homo sapiens
  misc_RNA (1)...(19): siRNA sense strand
ugaaagcuguaaugauugg

SEQ ID NO: 384269 - RNA, 19 nt, Homo sapiens
  misc_RNA (1)...(19): siRNA sense strand
ugagagaggcauuuacaga

SEQ ID NO: 384270 - RNA, 19 nt, Homo sapiens
  misc_RNA (1)...(19): siRNA sense strand
ccaagcuccuccuggugua

SEQ ID NO: 384271 - RNA, 19 nt, Homo sapiens
  misc_RNA (1)...(19): siRNA sense strand
ccaugucuaccaaaguuua

SEQ ID NO: 384272 - RNA, 19 nt, Homo sapiens
  misc_RNA (1)...(19): siRNA sense strand
uuacagacgcugauaacuu

SEQ ID NO: 384273 - RNA, 19 nt, Homo sapiens
  misc_RNA (1)...(19): siRNA sense strand
ccuuuuaccuugaggauua

SEQ ID NO: 384274 - RNA, 19 nt, Homo sapiens
  misc_RNA (1)...(19): siRNA sense strand
cgccacagccuccauuaaa

SEQ ID NO: 384275 - RNA, 19 nt, Homo sapiens
  misc_RNA (1)...(19): siRNA sense strand
uguagcagcuguuguuguc

SEQ ID NO: 384276 - RNA, 19 nt, Homo sapiens
  misc_RNA (1)...(19): siRNA sense strand
gugcagcuguuguggagau

SEQ ID NO: 384277 - RNA, 19 nt, Homo sapiens
  misc_RNA (1)...(19): siRNA sense strand
aauaagugguccauguguu

SEQ ID NO: 384278 - RNA, 19 nt, Homo sapiens
  misc_RNA (1)...(19): siRNA sense strand
ggagauagaaauccaagcu

SEQ ID NO: 384279 - RNA, 19 nt, Homo sapiens
  misc_RNA (1)...(19): siRNA sense strand
guauauaaucagccaguug

SEQ ID NO: 384280 - RNA, 19 nt, Homo sapiens
  misc_RNA (1)...(19): siRNA sense strand
guggagauguugauuuuga

SEQ ID NO: 384281 - RNA, 19 nt, Homo sapiens
  misc_RNA (1)...(19): siRNA sense strand
cagcggaagauacugauug

SEQ ID NO: 384282 - RNA, 19 nt, Homo sapiens
  misc_RNA (1)...(19): siRNA sense strand
aagagaggauguacuaaaa

SEQ ID NO: 384283 - RNA, 19 nt, Homo sapiens
  misc_RNA (1)...(19): siRNA sense strand
acccaugucuaccaaaguu

SEQ ID NO: 384284 - RNA, 19 nt, Homo sapiens
  misc_RNA (1)...(19): siRNA sense strand
cagcuguuguggagauguu

SEQ ID NO: 384285 - RNA, 19 nt, Homo sapiens
  misc_RNA (1)...(19): siRNA sense strand
gcauuuacagacgcugaua

SEQ ID NO: 384286 - RNA, 19 nt, Homo sapiens
  misc_RNA (1)...(19): siRNA sense strand
gcgccacagccuccauuaa

SEQ ID NO: 384287 - RNA, 19 nt, Homo sapiens
  misc_RNA (1)...(19): siRNA sense strand
ggaccuccaggauauagug

SEQ ID NO: 384288 - RNA, 19 nt, Homo sapiens
  misc_RNA (1)...(19): siRNA sense strand
acagaggguuuacuuugca

SEQ ID NO: 384289 - RNA, 19 nt, Homo sapiens
  misc_RNA (1)...(19): siRNA sense strand
gccacagccuccauuaaac

SEQ ID NO: 384290 - RNA, 19 nt, Homo sapiens
  misc_RNA (1)...(19): siRNA sense strand
gugccuguuuccucauuga

SEQ ID NO: 384291 - RNA, 19 nt, Homo sapiens
  misc_RNA (1)...(19): siRNA sense strand
caaggaccuccaggauaua

SEQ ID NO: 384292 - RNA, 19 nt, Homo sapiens
  misc_RNA (1)...(19): siRNA sense strand
gcuuuccugucccaaauca

SEQ ID NO: 384293 - RNA, 19 nt, Homo sapiens
  misc_RNA (1)...(19): siRNA sense strand
uccaaggaccuccaggaua

SEQ ID NO: 384294 - RNA, 19 nt, Homo sapiens
  misc_RNA (1)...(19): siRNA sense strand
agauguagcagcuguuguu

SEQ ID NO: 384295 - RNA, 19 nt, Homo sapiens
  misc_RNA (1)...(19): siRNA sense strand
ccuuuagaccuugauguua

SEQ ID NO: 384296 - RNA, 19 nt, Homo sapiens
  misc_RNA (1)...(19): siRNA sense strand
ucccaaaucagccagugua

SEQ ID NO: 384297 - RNA, 19 nt, Homo sapiens
  misc_RNA (1)...(19): siRNA sense strand
aaugauuggugccuguuuc

SEQ ID NO: 384298 - RNA, 19 nt, Homo sapiens
  misc_RNA (1)...(19): siRNA sense strand
cuucucacccggaaacaaa

SEQ ID NO: 384299 - RNA, 19 nt, Homo sapiens
  misc_RNA (1)...(19): siRNA sense strand
uggcuuuccugucccaaau

SEQ ID NO: 384300 - RNA, 19 nt, Homo sapiens
  misc_RNA (1)...(19): siRNA sense strand
uaagauguagcagcuguug

SEQ ID NO: 384301 - RNA, 19 nt, Homo sapiens
  misc_RNA (1)...(19): siRNA sense strand
uggguauccuccucaguau

SEQ ID NO: 384302 - RNA, 19 nt, Homo sapiens
  misc_RNA (1)...(19): siRNA sense strand
ccuguuuccucauugacuu

SEQ ID NO: 384303 - RNA, 19 nt, Homo sapiens
  misc_RNA (1)...(19): siRNA sense strand
uuggguauccuccucagua

SEQ ID NO: 384304 - RNA, 19 nt, Homo sapiens
  misc_RNA (1)...(19): siRNA sense strand
guuguggagauguugauuu

SEQ ID NO: 384305 - RNA, 19 nt, Homo sapiens
  misc_RNA (1)...(19): siRNA sense strand
ucagcaaauugaacuucug

SEQ ID NO: 384306 - RNA, 19 nt, Homo sapiens
  misc_RNA (1)...(19): siRNA sense strand
ccacagccuccauuaaacu

SEQ ID NO: 384307 - RNA, 19 nt, Homo sapiens
  misc_RNA (1)...(19): siRNA sense strand
auaagugguccauguguug

SEQ ID NO: 384308 - RNA, 19 nt, Homo sapiens
  misc_RNA (1)...(19): siRNA sense strand
cuggagagaccacuaagau

SEQ ID NO: 384309 - RNA, 19 nt, Homo sapiens
  misc_RNA (1)...(19): siRNA sense strand
ggucaagaagucauaacuc

SEQ ID NO: 384310 - RNA, 19 nt, Homo sapiens
  misc_RNA (1)...(19): siRNA sense strand
gcagcggaagauacugauu

SEQ ID NO: 384311 - RNA, 19 nt, Homo sapiens
  misc_RNA (1)...(19): siRNA sense strand
aaucagccaguauauaauc

SEQ ID NO: 384312 - RNA, 19 nt, Homo sapiens
  misc_RNA (1)...(19): siRNA sense strand
gcuuuggacagaggguuua

SEQ ID NO: 384313 - RNA, 19 nt, Homo sapiens
  misc_RNA (1)...(19): siRNA sense strand
caaacaaaacucacagaug

SEQ ID NO: 384314 - RNA, 19 nt, Homo sapiens
  misc_RNA (1)...(19): siRNA sense strand
ugauugcuguacccgaaau

SEQ ID NO: 384315 - RNA, 19 nt, Homo sapiens
  misc_RNA (1)...(19): siRNA sense strand
cauuuacagacgcugauaa

SEQ ID NO: 384316 - RNA, 19 nt, Homo sapiens
  misc_RNA (1)...(19): siRNA sense strand
uggcacccaugucuaccaa

SEQ ID NO: 384317 - RNA, 19 nt, Homo sapiens
  misc_RNA (1)...(19): siRNA sense strand
agagaccacuaagauguag

SEQ ID NO: 384318 - RNA, 19 nt, Homo sapiens
  misc_RNA (1)...(19): siRNA sense strand
ggacucgacugguguuuga

SEQ ID NO: 384319 - RNA, 19 nt, Homo sapiens
  misc_RNA (1)...(19): siRNA sense strand
uaacucggguugaaacuuu

SEQ ID NO: 384320 - RNA, 19 nt, Homo sapiens
  misc_RNA (1)...(19): siRNA sense strand
cauaaggaauuucaaagga

SEQ ID NO: 384321 - RNA, 19 nt, Homo sapiens
  misc_RNA (1)...(19): siRNA sense strand
cauaaggaauuucaaagga

SEQ ID NO: 384322 - RNA, 19 nt, Homo sapiens
  misc_RNA (1)...(19): siRNA sense strand
ugaaacaucacacaucuaa

SEQ ID NO: 384323 - RNA, 19 nt, Homo sapiens
  misc_RNA (1)...(19): siRNA sense strand
ggaagucaguccaucagau

SEQ ID NO: 384324 - RNA, 19 nt, Homo sapiens
  misc_RNA (1)...(19): siRNA sense strand
gaagucaguccaucagauu

SEQ ID NO: 384325 - RNA, 19 nt, Homo sapiens
  misc_RNA (1)...(19): siRNA sense strand
aaacaucacacaucuaaga

SEQ ID NO: 384326 - RNA, 19 nt, Homo sapiens
  misc_RNA (1)...(19): siRNA sense strand
gacuguaacuggagagcua

SEQ ID NO: 384327 - RNA, 19 nt, Homo sapiens
  misc_RNA (1)...(19): siRNA sense strand
cgaccuaacucggguugaa

SEQ ID NO: 384328 - RNA, 19 nt, Homo sapiens
  misc_RNA (1)...(19): siRNA sense strand
uucgaaggcuuaucucuuu

SEQ ID NO: 384329 - RNA, 19 nt, Homo sapiens
  misc_RNA (1)...(19): siRNA sense strand
gcuaaggccaucaaaccua

SEQ ID NO: 384330 - RNA, 19 nt, Homo sapiens
  misc_RNA (1)...(19): siRNA sense strand
cuacgggcaugcagaaguu

SEQ ID NO: 384331 - RNA, 19 nt, Homo sapiens
  misc_RNA (1)...(19): siRNA sense strand
cuaaggccaucaaaccuau

SEQ ID NO: 384332 - RNA, 19 nt, Homo sapiens
  misc_RNA (1)...(19): siRNA sense strand
gggaaaaucaucaagaaaa

SEQ ID NO: 384333 - RNA, 19 nt, Homo sapiens
  misc_RNA (1)...(19): siRNA sense strand
gguugaaacuuuuggcuuu

SEQ ID NO: 384334 - RNA, 19 nt, Homo sapiens
  misc_RNA (1)...(19): siRNA sense strand
gagcuacgggcaugcagaa

SEQ ID NO: 384335 - RNA, 19 nt, Homo sapiens
  misc_RNA (1)...(19): siRNA sense strand
aucuaaagcuuaaggacua

SEQ ID NO: 384336 - RNA, 19 nt, Homo sapiens
  misc_RNA (1)...(19): siRNA sense strand
ccagagggacccacaguca

SEQ ID NO: 384337 - RNA, 19 nt, Homo sapiens
  misc_RNA (1)...(19): siRNA sense strand
ucugaaacaucacacaucu

SEQ ID NO: 384338 - RNA, 19 nt, Homo sapiens
  misc_RNA (1)...(19): siRNA sense strand
gcaugcagaaguuggaaga

SEQ ID NO: 384339 - RNA, 19 nt, Homo sapiens
  misc_RNA (1)...(19): siRNA sense strand
ggaaaaucaucaagaaaac

SEQ ID NO: 384340 - RNA, 19 nt, Homo sapiens
  misc_RNA (1)...(19): siRNA sense strand
aaacuuacagaaccugcua

SEQ ID NO: 384341 - RNA, 19 nt, Homo sapiens
  misc_RNA (1)...(19): siRNA sense strand
gugauugucaguuucuuga

SEQ ID NO: 384342 - RNA, 19 nt, Homo sapiens
  misc_RNA (1)...(19): siRNA sense strand
gugauugucaguuucuuga

SEQ ID NO: 384343 - RNA, 19 nt, Homo sapiens
  misc_RNA (1)...(19): siRNA sense strand
aaacuucgaaggcuuaucu

SEQ ID NO: 384344 - RNA, 19 nt, Homo sapiens
  misc_RNA (1)...(19): siRNA sense strand
agaagaaacgugccugcuu

SEQ ID NO: 384345 - RNA, 19 nt, Homo sapiens
  misc_RNA (1)...(19): siRNA sense strand
agaagaaacgugccugcuu

SEQ ID NO: 384346 - RNA, 19 nt, Homo sapiens
  misc_RNA (1)...(19): siRNA sense strand
guacagccugcaaaacuua

SEQ ID NO: 384347 - RNA, 19 nt, Homo sapiens
  misc_RNA (1)...(19): siRNA sense strand
gaaggcuuaucucuuucag

SEQ ID NO: 384348 - RNA, 19 nt, Homo sapiens
  misc_RNA (1)...(19): siRNA sense strand
cugccgugauugucaguuu

SEQ ID NO: 384349 - RNA, 19 nt, Homo sapiens
  misc_RNA (1)...(19): siRNA sense strand
cagcgugaagcaguuauuu

SEQ ID NO: 384350 - RNA, 19 nt, Homo sapiens
  misc_RNA (1)...(19): siRNA sense strand
cugccgugauugucaguuu

SEQ ID NO: 384351 - RNA, 19 nt, Homo sapiens
  misc_RNA (1)...(19): siRNA sense strand
cagccaugcuuccuguaca

SEQ ID NO: 384352 - RNA, 19 nt, Homo sapiens
  misc_RNA (1)...(19): siRNA sense strand
cgagggaaggcaucacaga

SEQ ID NO: 384353 - RNA, 19 nt, Homo sapiens
  misc_RNA (1)...(19): siRNA sense strand
cagccaugcuuccuguaca

SEQ ID NO: 384354 - RNA, 19 nt, Homo sapiens
  misc_RNA (1)...(19): siRNA sense strand
gggagaaucauccagaaaa

SEQ ID NO: 384355 - RNA, 19 nt, Homo sapiens
  misc_RNA (1)...(19): siRNA sense strand
gaccuaacucggguugaaa

SEQ ID NO: 384356 - RNA, 19 nt, Homo sapiens
  misc_RNA (1)...(19): siRNA sense strand
ggaugcuggugccacuaau

SEQ ID NO: 384357 - RNA, 19 nt, Homo sapiens
  misc_RNA (1)...(19): siRNA sense strand
ccauaaggaauuucaaagg

SEQ ID NO: 384358 - RNA, 19 nt, Homo sapiens
  misc_RNA (1)...(19): siRNA sense strand
ccauaaggaauuucaaagg

SEQ ID NO: 384359 - RNA, 19 nt, Homo sapiens
  misc_RNA (1)...(19): siRNA sense strand
ucgagaguuugccgaccua

SEQ ID NO: 384360 - RNA, 19 nt, Homo sapiens
  misc_RNA (1)...(19): siRNA sense strand
gaugugggguagaagaaga

SEQ ID NO: 384361 - RNA, 19 nt, Homo sapiens
  misc_RNA (1)...(19): siRNA sense strand
ggagaaucauccagaaaac

SEQ ID NO: 384362 - RNA, 19 nt, Homo sapiens
  misc_RNA (1)...(19): siRNA sense strand
ggaauauuaagaagaaacg

SEQ ID NO: 384363 - RNA, 19 nt, Homo sapiens
  misc_RNA (1)...(19): siRNA sense strand
ggaauauuaagaagaaacg

SEQ ID NO: 384364 - RNA, 19 nt, Homo sapiens
  misc_RNA (1)...(19): siRNA sense strand
cgaaggcuuaucucuuuca

SEQ ID NO: 384365 - RNA, 19 nt, Homo sapiens
  misc_RNA (1)...(19): siRNA sense strand
gcucugaaacaucacacau

SEQ ID NO: 384366 - RNA, 19 nt, Homo sapiens
  misc_RNA (1)...(19): siRNA sense strand
gcugcaggguaauauauuu

SEQ ID NO: 384367 - RNA, 19 nt, Homo sapiens
  misc_RNA (1)...(19): siRNA sense strand
cugagaaacuggaccuuaa

SEQ ID NO: 384368 - RNA, 19 nt, Homo sapiens
  misc_RNA (1)...(19): siRNA sense strand
guauucggcuguccacuga

SEQ ID NO: 384369 - RNA, 19 nt, Homo sapiens
  misc_RNA (1)...(19): siRNA sense strand
cagcugcgcucaccucaca

SEQ ID NO: 384370 - RNA, 19 nt, Homo sapiens
  misc_RNA (1)...(19): siRNA sense strand
aaacagaaacgaaugaagu

SEQ ID NO: 384371 - RNA, 19 nt, Homo sapiens
  misc_RNA (1)...(19): siRNA sense strand
gcugagaaacuggaccuua

SEQ ID NO: 384372 - RNA, 19 nt, Homo sapiens
  misc_RNA (1)...(19): siRNA sense strand
gguaauauauuuggaagcu

SEQ ID NO: 384373 - RNA, 19 nt, Homo sapiens
  misc_RNA (1)...(19): siRNA sense strand
ccacguccuucaucugaga

SEQ ID NO: 384374 - RNA, 19 nt, Homo sapiens
  misc_RNA (1)...(19): siRNA sense strand
ggccaucgcugagaaacug

SEQ ID NO: 384375 - RNA, 19 nt, Homo sapiens
  misc_RNA (1)...(19): siRNA sense strand
cagaaacgaaugaaguauu

SEQ ID NO: 384376 - RNA, 19 nt, Homo sapiens
  misc_RNA (1)...(19): siRNA sense strand
gcagcugcaggguaauaua

SEQ ID NO: 384377 - RNA, 19 nt, Homo sapiens
  misc_RNA (1)...(19): siRNA sense strand
gcaggguaauauauuugga

SEQ ID NO: 384378 - RNA, 19 nt, Homo sapiens
  misc_RNA (1)...(19): siRNA sense strand
gacagaaacagaaacgaau

SEQ ID NO: 384379 - RNA, 19 nt, Homo sapiens
  misc_RNA (1)...(19): siRNA sense strand
ccagagacagaaacagaaa

SEQ ID NO: 384380 - RNA, 19 nt, Homo sapiens
  misc_RNA (1)...(19): siRNA sense strand
agacagaaacagaaacgaa

SEQ ID NO: 384381 - RNA, 19 nt, Homo sapiens
  misc_RNA (1)...(19): siRNA sense strand
gaaacagaaacgaaugaag

SEQ ID NO: 384382 - RNA, 19 nt, Homo sapiens
  misc_RNA (1)...(19): siRNA sense strand
ucagcgacguggagucaga

SEQ ID NO: 384383 - RNA, 19 nt, Homo sapiens
  misc_RNA (1)...(19): siRNA sense strand
cagaaacagaaacgaauga

SEQ ID NO: 384384 - RNA, 19 nt, Homo sapiens
  misc_RNA (1)...(19): siRNA sense strand
uuuggaagcuuugaugaga

SEQ ID NO: 384385 - RNA, 19 nt, Homo sapiens
  misc_RNA (1)...(19): siRNA sense strand
ugagaaacuggaccuuaaa

SEQ ID NO: 384386 - RNA, 19 nt, Homo sapiens
  misc_RNA (1)...(19): siRNA sense strand
caacaugaucgcucucaag

SEQ ID NO: 384387 - RNA, 19 nt, Homo sapiens
  misc_RNA (1)...(19): siRNA sense strand
aacagaaacgaaugaagua

SEQ ID NO: 384388 - RNA, 19 nt, Homo sapiens
  misc_RNA (1)...(19): siRNA sense strand
gcugcaagaacccaaauuc

SEQ ID NO: 384389 - RNA, 19 nt, Homo sapiens
  misc_RNA (1)...(19): siRNA sense strand
gcaaccagagacagaaaca

SEQ ID NO: 384390 - RNA, 19 nt, Homo sapiens
  misc_RNA (1)...(19): siRNA sense strand
cagcugcaggguaauauau

SEQ ID NO: 384391 - RNA, 19 nt, Homo sapiens
  misc_RNA (1)...(19): siRNA sense strand
ggugaugcccgcacagauc

SEQ ID NO: 384392 - RNA, 19 nt, Homo sapiens
  misc_RNA (1)...(19): siRNA sense strand
aaccagagacagaaacaga

SEQ ID NO: 384393 - RNA, 19 nt, Homo sapiens
  misc_RNA (1)...(19): siRNA sense strand
aaaagaacguggugagagu

SEQ ID NO: 384394 - RNA, 19 nt, Homo sapiens
  misc_RNA (1)...(19): siRNA sense strand
gcaagccagagcucuucaa

SEQ ID NO: 384395 - RNA, 19 nt, Homo sapiens
  misc_RNA (1)...(19): siRNA sense strand
acagaaacagaaacgaaug

SEQ ID NO: 384396 - RNA, 19 nt, Homo sapiens
  misc_RNA (1)...(19): siRNA sense strand
cgaggccuauuucgcuauc

SEQ ID NO: 384397 - RNA, 19 nt, Homo sapiens
  misc_RNA (1)...(19): siRNA sense strand
caggguaauauauuuggaa

SEQ ID NO: 384398 - RNA, 19 nt, Homo sapiens
  misc_RNA (1)...(19): siRNA sense strand
gagaaacuggaccuuaaaa

SEQ ID NO: 384399 - RNA, 19 nt, Homo sapiens
  misc_RNA (1)...(19): siRNA sense strand
acaacaugaucgcucucaa

SEQ ID NO: 384400 - RNA, 19 nt, Homo sapiens
  misc_RNA (1)...(19): siRNA sense strand
ccgcagcugcaggguaaua

SEQ ID NO: 384401 - RNA, 19 nt, Homo sapiens
  misc_RNA (1)...(19): siRNA sense strand
ccagccacguccuucaucu

SEQ ID NO: 384402 - RNA, 19 nt, Homo sapiens
  misc_RNA (1)...(19): siRNA sense strand
caacaagacugagaaagaa

SEQ ID NO: 384403 - RNA, 19 nt, Homo sapiens
  misc_RNA (1)...(19): siRNA sense strand
gaagcagugugaucaguuu

SEQ ID NO: 384404 - RNA, 19 nt, Homo sapiens
  misc_RNA (1)...(19): siRNA sense strand
ggagauccuuguuuacuug

SEQ ID NO: 384405 - RNA, 19 nt, Homo sapiens
  misc_RNA (1)...(19): siRNA sense strand
gaacaagccaacagugaaa

SEQ ID NO: 384406 - RNA, 19 nt, Homo sapiens
  misc_RNA (1)...(19): siRNA sense strand
cagcaaagucugauguuua

SEQ ID NO: 384407 - RNA, 19 nt, Homo sapiens
  misc_RNA (1)...(19): siRNA sense strand
ggacaucauuaaaggagaa

SEQ ID NO: 384408 - RNA, 19 nt, Homo sapiens
  misc_RNA (1)...(19): siRNA sense strand
gcucgaagcugccgaaguc

SEQ ID NO: 384409 - RNA, 19 nt, Homo sapiens
  misc_RNA (1)...(19): siRNA sense strand
ugaccaagcugauugacaa

SEQ ID NO: 384410 - RNA, 19 nt, Homo sapiens
  misc_RNA (1)...(19): siRNA sense strand
gaacugguggagcccauua

SEQ ID NO: 384411 - RNA, 19 nt, Homo sapiens
  misc_RNA (1)...(19): siRNA sense strand
cgaagucccugucggaaga

SEQ ID NO: 384412 - RNA, 19 nt, Homo sapiens
  misc_RNA (1)...(19): siRNA sense strand
ugaaauugcuauccagaug

SEQ ID NO: 384413 - RNA, 19 nt, Homo sapiens
  misc_RNA (1)...(19): siRNA sense strand
gaacugagaaguguauaug

SEQ ID NO: 384414 - RNA, 19 nt, Homo sapiens
  misc_RNA (1)...(19): siRNA sense strand
caaaguggccuccaagaau

SEQ ID NO: 384415 - RNA, 19 nt, Homo sapiens
  misc_RNA (1)...(19): siRNA sense strand
ugaaagagaugcccaugca

SEQ ID NO: 384416 - RNA, 19 nt, Homo sapiens
  misc_RNA (1)...(19): siRNA sense strand
ggaacaagccaacagugaa

SEQ ID NO: 384417 - RNA, 19 nt, Homo sapiens
  misc_RNA (1)...(19): siRNA sense strand
gaaauugcuauccagauga

SEQ ID NO: 384418 - RNA, 19 nt, Homo sapiens
  misc_RNA (1)...(19): siRNA sense strand
gcaguguggugccagaaug

SEQ ID NO: 384419 - RNA, 19 nt, Homo sapiens
  misc_RNA (1)...(19): siRNA sense strand
aaaguggccuccaagaaug

SEQ ID NO: 384420 - RNA, 19 nt, Homo sapiens
  misc_RNA (1)...(19): siRNA sense strand
gugaugaggugaaagagau

SEQ ID NO: 384421 - RNA, 19 nt, Homo sapiens
  misc_RNA (1)...(19): siRNA sense strand
cagccaguauucugaaauu

SEQ ID NO: 384422 - RNA, 19 nt, Homo sapiens
  misc_RNA (1)...(19): siRNA sense strand
aagaaauacucgacgcuuu

SEQ ID NO: 384423 - RNA, 19 nt, Homo sapiens
  misc_RNA (1)...(19): siRNA sense strand
ggagaucugugcgcugguu

SEQ ID NO: 384424 - RNA, 19 nt, Homo sapiens
  misc_RNA (1)...(19): siRNA sense strand
gcgagucucuccagaagca

SEQ ID NO: 384425 - RNA, 19 nt, Homo sapiens
  misc_RNA (1)...(19): siRNA sense strand
gcaaacgccauguguggaa

SEQ ID NO: 384426 - RNA, 19 nt, Homo sapiens
  misc_RNA (1)...(19): siRNA sense strand
ccagcaaagucugauguuu

SEQ ID NO: 384427 - RNA, 19 nt, Homo sapiens
  misc_RNA (1)...(19): siRNA sense strand
agucugauguuuacuguga

SEQ ID NO: 384428 - RNA, 19 nt, Homo sapiens
  misc_RNA (1)...(19): siRNA sense strand
cgacauaugcaaagacguu

SEQ ID NO: 384429 - RNA, 19 nt, Homo sapiens
  misc_RNA (1)...(19): siRNA sense strand
gauccuggcugcucuugag

SEQ ID NO: 384430 - RNA, 19 nt, Homo sapiens
  misc_RNA (1)...(19): siRNA sense strand
caacaacaagacugagaaa

SEQ ID NO: 384431 - RNA, 19 nt, Homo sapiens
  misc_RNA (1)...(19): siRNA sense strand
gugauaugcugaaggacaa

SEQ ID NO: 384432 - RNA, 19 nt, Homo sapiens
  misc_RNA (1)...(19): siRNA sense strand
agaacuauaucagccagua

SEQ ID NO: 384433 - RNA, 19 nt, Homo sapiens
  misc_RNA (1)...(19): siRNA sense strand
caagacugagaaagaaaua

SEQ ID NO: 384434 - RNA, 19 nt, Homo sapiens
  misc_RNA (1)...(19): siRNA sense strand
acaacaagacugagaaaga

SEQ ID NO: 384435 - RNA, 19 nt, Homo sapiens
  misc_RNA (1)...(19): siRNA sense strand
ccaagcugauugacaacaa

SEQ ID NO: 384436 - RNA, 19 nt, Homo sapiens
  misc_RNA (1)...(19): siRNA sense strand
ugaaggaggugaccaagcu

SEQ ID NO: 384437 - RNA, 19 nt, Homo sapiens
  misc_RNA (1)...(19): siRNA sense strand
ccaaaguggccuccaagaa

SEQ ID NO: 384438 - RNA, 19 nt, Homo sapiens
  misc_RNA (1)...(19): siRNA sense strand
ugucaucccugcccuggaa

SEQ ID NO: 384439 - RNA, 19 nt, Homo sapiens
  misc_RNA (1)...(19): siRNA sense strand
gcaccuagcagagcugaau

SEQ ID NO: 384440 - RNA, 19 nt, Homo sapiens
  misc_RNA (1)...(19): siRNA sense strand
gaggugugcucugcucuca

SEQ ID NO: 384441 - RNA, 19 nt, Homo sapiens
  misc_RNA (1)...(19): siRNA sense strand
gaggugaccaagcugauug

SEQ ID NO: 384442 - RNA, 19 nt, Homo sapiens
  misc_RNA (1)...(19): siRNA sense strand
ugaaggacaaugccacuga

SEQ ID NO: 384443 - RNA, 19 nt, Homo sapiens
  misc_RNA (1)...(19): siRNA sense strand
gcagugugaucaguuugug

SEQ ID NO: 384444 - RNA, 19 nt, Homo sapiens
  misc_RNA (1)...(19): siRNA sense strand
ugccaggacugcauucaga

SEQ ID NO: 384445 - RNA, 19 nt, Homo sapiens
  misc_RNA (1)...(19): siRNA sense strand
ggaacugagaaguguauau

SEQ ID NO: 384446 - RNA, 19 nt, Homo sapiens
  misc_RNA (1)...(19): siRNA sense strand
guugggaacugagaagugu

SEQ ID NO: 384447 - RNA, 19 nt, Homo sapiens
  misc_RNA (1)...(19): siRNA sense strand
gccagacccuuaccagaag

SEQ ID NO: 384448 - RNA, 19 nt, Homo sapiens
  misc_RNA (1)...(19): siRNA sense strand
gaacuauaucagccaguau

SEQ ID NO: 384449 - RNA, 19 nt, Homo sapiens
  misc_RNA (1)...(19): siRNA sense strand
ggaccaacuccaccuuugu

SEQ ID NO: 384450 - RNA, 19 nt, Homo sapiens
  misc_RNA (1)...(19): siRNA sense strand
gacaacaacaagacugaga

SEQ ID NO: 384451 - RNA, 19 nt, Homo sapiens
  misc_RNA (1)...(19): siRNA sense strand
aaagucugauguuuacugu

SEQ ID NO: 384452 - RNA, 19 nt, Homo sapiens
  misc_RNA (1)...(19): siRNA sense strand
guucugugaugaggugaaa

SEQ ID NO: 384453 - RNA, 19 nt, Homo sapiens
  misc_RNA (1)...(19): siRNA sense strand
caaagucugauguuuacug

SEQ ID NO: 384454 - RNA, 19 nt, Homo sapiens
  misc_RNA (1)...(19): siRNA sense strand
gcagaccguuuggaacaag

SEQ ID NO: 384455 - RNA, 19 nt, Homo sapiens
  misc_RNA (1)...(19): siRNA sense strand
ggaggugaccaagcugauu

SEQ ID NO: 384456 - RNA, 19 nt, Homo sapiens
  misc_RNA (1)...(19): siRNA sense strand
ggugugcucugcucucaac

SEQ ID NO: 384457 - RNA, 19 nt, Homo sapiens
  misc_RNA (1)...(19): siRNA sense strand
ucacgugacucagccaaag

SEQ ID NO: 384458 - RNA, 19 nt, Homo sapiens
  misc_RNA (1)...(19): siRNA sense strand
gcacgaggucccagcaaag

SEQ ID NO: 384459 - RNA, 19 nt, Homo sapiens
  misc_RNA (1)...(19): siRNA sense strand
cggaccaacuccaccuuug

SEQ ID NO: 384460 - RNA, 19 nt, Homo sapiens
  misc_RNA (1)...(19): siRNA sense strand
ccuggcugcucuugagaaa

SEQ ID NO: 384461 - RNA, 19 nt, Homo sapiens
  misc_RNA (1)...(19): siRNA sense strand
aaauugcuauccagaugau

SEQ ID NO: 384462 - RNA, 19 nt, Homo sapiens
  misc_RNA (1)...(19): siRNA sense strand
acugugaggugugugaauu

SEQ ID NO: 384463 - RNA, 19 nt, Homo sapiens
  misc_RNA (1)...(19): siRNA sense strand
ugguggagcccauuaagaa

SEQ ID NO: 384464 - RNA, 19 nt, Homo sapiens
  misc_RNA (1)...(19): siRNA sense strand
aaaccgaacaugucugcuu

SEQ ID NO: 384465 - RNA, 19 nt, Homo sapiens
  misc_RNA (1)...(19): siRNA sense strand
cuggugauaugcugaagga

SEQ ID NO: 384466 - RNA, 19 nt, Homo sapiens
  misc_RNA (1)...(19): siRNA sense strand
cagaagcagugugaucagu

SEQ ID NO: 384467 - RNA, 19 nt, Homo sapiens
  misc_RNA (1)...(19): siRNA sense strand
gcagcuccauccuguccau

SEQ ID NO: 384468 - RNA, 19 nt, Homo sapiens
  misc_RNA (1)...(19): siRNA sense strand
agcaaagucugauguuuac

SEQ ID NO: 384469 - RNA, 19 nt, Homo sapiens
  misc_RNA (1)...(19): siRNA sense strand
ugccagacccuuaccagaa

SEQ ID NO: 384470 - RNA, 19 nt, Homo sapiens
  misc_RNA (1)...(19): siRNA sense strand
uggcugcucuugagaaagg

SEQ ID NO: 384471 - RNA, 19 nt, Homo sapiens
  misc_RNA (1)...(19): siRNA sense strand
cauccuggacaucauuaaa

SEQ ID NO: 384472 - RNA, 19 nt, Homo sapiens
  misc_RNA (1)...(19): siRNA sense strand
uggaacaagccaacaguga

SEQ ID NO: 384473 - RNA, 19 nt, Homo sapiens
  misc_RNA (1)...(19): siRNA sense strand
ccaguauucugaaauugcu

SEQ ID NO: 384474 - RNA, 19 nt, Homo sapiens
  misc_RNA (1)...(19): siRNA sense strand
aggaggugguggacacgua

SEQ ID NO: 384475 - RNA, 19 nt, Homo sapiens
  misc_RNA (1)...(19): siRNA sense strand
gcagcaagccccagccaaa

SEQ ID NO: 384476 - RNA, 19 nt, Homo sapiens
  misc_RNA (1)...(19): siRNA sense strand
cugguuggguucugugaug

SEQ ID NO: 384477 - RNA, 19 nt, Homo sapiens
  misc_RNA (1)...(19): siRNA sense strand
ugacauccagacugcugua

SEQ ID NO: 384478 - RNA, 19 nt, Homo sapiens
  misc_RNA (1)...(19): siRNA sense strand
gaccaacuccaccuuuguc

SEQ ID NO: 384479 - RNA, 19 nt, Homo sapiens
  misc_RNA (1)...(19): siRNA sense strand
caagcugauugacaacaac

SEQ ID NO: 384480 - RNA, 19 nt, Homo sapiens
  misc_RNA (1)...(19): siRNA sense strand
cugcgagucucuccagaag

SEQ ID NO: 384481 - RNA, 19 nt, Homo sapiens
  misc_RNA (1)...(19): siRNA sense strand
gacagcagcccagugcaau

SEQ ID NO: 384482 - RNA, 19 nt, Homo sapiens
  misc_RNA (1)...(19): siRNA sense strand
acaacaacaagacugagaa

SEQ ID NO: 384483 - RNA, 19 nt, Homo sapiens
  misc_RNA (1)...(19): siRNA sense strand
uauaucagccaguauucug

SEQ ID NO: 384484 - RNA, 19 nt, Homo sapiens
  misc_RNA (1)...(19): siRNA sense strand
ugugugaauuccuggugaa

SEQ ID NO: 384485 - RNA, 19 nt, Homo sapiens
  misc_RNA (1)...(19): siRNA sense strand
acaagacugagaaagaaau

SEQ ID NO: 384486 - RNA, 19 nt, Homo sapiens
  misc_RNA (1)...(19): siRNA sense strand
agacagcagcccagugcaa

SEQ ID NO: 384487 - RNA, 19 nt, Homo sapiens
  misc_RNA (1)...(19): siRNA sense strand
gugacuggcuuccgaaacc

SEQ ID NO: 384488 - RNA, 19 nt, Homo sapiens
  misc_RNA (1)...(19): siRNA sense strand
caaagagacucagguguca

SEQ ID NO: 384489 - RNA, 19 nt, Homo sapiens
  misc_RNA (1)...(19): siRNA sense strand
ggaaccagauggcaaggau

SEQ ID NO: 384490 - RNA, 19 nt, Homo sapiens
  misc_RNA (1)...(19): siRNA sense strand
ggucaucuuuguccgagaa

SEQ ID NO: 384491 - RNA, 19 nt, Homo sapiens
  misc_RNA (1)...(19): siRNA sense strand
ggacggcucccucaucuca

SEQ ID NO: 384492 - RNA, 19 nt, Homo sapiens
  misc_RNA (1)...(19): siRNA sense strand
cgaggaaccagcccugaua

SEQ ID NO: 384493 - RNA, 19 nt, Homo sapiens
  misc_RNA (1)...(19): siRNA sense strand
ggaagagaaggcagagaaa

SEQ ID NO: 384494 - RNA, 19 nt, Homo sapiens
  misc_RNA (1)...(19): siRNA sense strand
gcucagguguugggaaaug

SEQ ID NO: 384495 - RNA, 19 nt, Homo sapiens
  misc_RNA (1)...(19): siRNA sense strand
gcgggcaguuuauguguga

SEQ ID NO: 384496 - RNA, 19 nt, Homo sapiens
  misc_RNA (1)...(19): siRNA sense strand
agagaaaggccucauguug

SEQ ID NO: 384497 - RNA, 19 nt, Homo sapiens
  misc_RNA (1)...(19): siRNA sense strand
gcuaugaugacaacuggua

SEQ ID NO: 384498 - RNA, 19 nt, Homo sapiens
  misc_RNA (1)...(19): siRNA sense strand
gcacugggcaagacacaga

SEQ ID NO: 384499 - RNA, 19 nt, Homo sapiens
  misc_RNA (1)...(19): siRNA sense strand
gcagagaaaggccucaugu

SEQ ID NO: 384500 - RNA, 19 nt, Homo sapiens
  misc_RNA (1)...(19): siRNA sense strand
aagcucagguguugggaaa

SEQ ID NO: 384501 - RNA, 19 nt, Homo sapiens
  misc_RNA (1)...(19): siRNA sense strand
gcagagcacugggcaagac

SEQ ID NO: 384502 - RNA, 19 nt, Homo sapiens
  misc_RNA (1)...(19): siRNA sense strand
gcgcugagcaggucaucuu

SEQ ID NO: 384503 - RNA, 19 nt, Homo sapiens
  misc_RNA (1)...(19): siRNA sense strand
uccgaaagcucagguguug

SEQ ID NO: 384504 - RNA, 19 nt, Homo sapiens
  misc_RNA (1)...(19): siRNA sense strand
gaagagaaggcagagaaag

SEQ ID NO: 384505 - RNA, 19 nt, Homo sapiens
  misc_RNA (1)...(19): siRNA sense strand
ggacugggaagccaaagag

SEQ ID NO: 384506 - RNA, 19 nt, Homo sapiens
  misc_RNA (1)...(19): siRNA sense strand
ccugcaaaguggagcauga

SEQ ID NO: 384507 - RNA, 19 nt, Homo sapiens
  misc_RNA (1)...(19): siRNA sense strand
gcaugagagcuucgaggaa

SEQ ID NO: 384508 - RNA, 19 nt, Homo sapiens
  misc_RNA (1)...(19): siRNA sense strand
cugagcaggucaucuuugu

SEQ ID NO: 384509 - RNA, 19 nt, Homo sapiens
  misc_RNA (1)...(19): siRNA sense strand
gcucccagcuggucaucca

SEQ ID NO: 384510 - RNA, 19 nt, Homo sapiens
  misc_RNA (1)...(19): siRNA sense strand
ggaaaccggagcccaggau

SEQ ID NO: 384511 - RNA, 19 nt, Homo sapiens
  misc_RNA (1)...(19): siRNA sense strand
acgcuacccuccugaagug

SEQ ID NO: 384512 - RNA, 19 nt, Homo sapiens
  misc_RNA (1)...(19): siRNA sense strand
ggaggaggaggaagagaag

SEQ ID NO: 384513 - RNA, 19 nt, Homo sapiens
  misc_RNA (1)...(19): siRNA sense strand
gugaggaggaggaggaaga

SEQ ID NO: 384514 - RNA, 19 nt, Homo sapiens
  misc_RNA (1)...(19): siRNA sense strand
cagagaaaggccucauguu

SEQ ID NO: 384515 - RNA, 19 nt, Homo sapiens
  misc_RNA (1)...(19): siRNA sense strand
gaccuggcucagagucaua

SEQ ID NO: 384516 - RNA, 19 nt, Homo sapiens
  misc_RNA (1)...(19): siRNA sense strand
ugugcgaguucaagugcua

SEQ ID NO: 384517 - RNA, 19 nt, Homo sapiens
  misc_RNA (1)...(19): siRNA sense strand
ggaggacgagggcaacuac

SEQ ID NO: 384518 - RNA, 19 nt, Homo sapiens
  misc_RNA (1)...(19): siRNA sense strand
gccaggacccuacgacagu

SEQ ID NO: 384519 - RNA, 19 nt, Homo sapiens
  misc_RNA (1)...(19): siRNA sense strand
ggacgagggcaacuacacu

SEQ ID NO: 384520 - RNA, 19 nt, Homo sapiens
  misc_RNA (1)...(19): siRNA sense strand
aggaagagaaggcagagaa

SEQ ID NO: 384521 - RNA, 19 nt, Homo sapiens
  misc_RNA (1)...(19): siRNA sense strand
gacgagggcaacuacacuu

SEQ ID NO: 384522 - RNA, 19 nt, Homo sapiens
  misc_RNA (1)...(19): siRNA sense strand
ggaggaggaggaggaggaa

SEQ ID NO: 384523 - RNA, 19 nt, Homo sapiens
  misc_RNA (1)...(19): siRNA sense strand
gcugagcaggucaucuuug

SEQ ID NO: 384524 - RNA, 19 nt, Homo sapiens
  misc_RNA (1)...(19): siRNA sense strand
ggaugugcgaguucaagug

SEQ ID NO: 384525 - RNA, 19 nt, Homo sapiens
  misc_RNA (1)...(19): siRNA sense strand
aaccagauggcaaggauga

SEQ ID NO: 384526 - RNA, 19 nt, Homo sapiens
  misc_RNA (1)...(19): siRNA sense strand
uagccaagcccaagaacca

SEQ ID NO: 384527 - RNA, 19 nt, Homo sapiens
  misc_RNA (1)...(19): siRNA sense strand
cugcgaaccaccagaaugu

SEQ ID NO: 384528 - RNA, 19 nt, Homo sapiens
  misc_RNA (1)...(19): siRNA sense strand
gcccagaaggucacguuca

SEQ ID NO: 384529 - RNA, 19 nt, Homo sapiens
  misc_RNA (1)...(19): siRNA sense strand
ggaaagugcucuugaugau

SEQ ID NO: 384530 - RNA, 19 nt, Homo sapiens
  misc_RNA (1)...(19): siRNA sense strand
aaagugcucuugaugauuu

SEQ ID NO: 384531 - RNA, 19 nt, Homo sapiens
  misc_RNA (1)...(19): siRNA sense strand
ggaguuggcugaggaagaa

SEQ ID NO: 384532 - RNA, 19 nt, Homo sapiens
  misc_RNA (1)...(19): siRNA sense strand
gauaugaccucccaacaag

SEQ ID NO: 384533 - RNA, 19 nt, Homo sapiens
  misc_RNA (1)...(19): siRNA sense strand
gaauucacuucuugccuaa

SEQ ID NO: 384534 - RNA, 19 nt, Homo sapiens
  misc_RNA (1)...(19): siRNA sense strand
caaaauaugugagcaguuu

SEQ ID NO: 384535 - RNA, 19 nt, Homo sapiens
  misc_RNA (1)...(19): siRNA sense strand
gaacagugucugaucaugu

SEQ ID NO: 384536 - RNA, 19 nt, Homo sapiens
  misc_RNA (1)...(19): siRNA sense strand
cuucagaacuccagcaugu

SEQ ID NO: 384537 - RNA, 19 nt, Homo sapiens
  misc_RNA (1)...(19): siRNA sense strand
cagaaugguugcagaguca

SEQ ID NO: 384538 - RNA, 19 nt, Homo sapiens
  misc_RNA (1)...(19): siRNA sense strand
ggugaacagugucugauca

SEQ ID NO: 384539 - RNA, 19 nt, Homo sapiens
  misc_RNA (1)...(19): siRNA sense strand
ugaaggagaucacagaaaa

SEQ ID NO: 384540 - RNA, 19 nt, Homo sapiens
  misc_RNA (1)...(19): siRNA sense strand
gaaagugcucuugaugauu

SEQ ID NO: 384541 - RNA, 19 nt, Homo sapiens
  misc_RNA (1)...(19): siRNA sense strand
uggaggagcuucuggaaag

SEQ ID NO: 384542 - RNA, 19 nt, Homo sapiens
  misc_RNA (1)...(19): siRNA sense strand
ugcagcagcuacaagauuu

SEQ ID NO: 384543 - RNA, 19 nt, Homo sapiens
  misc_RNA (1)...(19): siRNA sense strand
agaaggcaaugaaggaguu

SEQ ID NO: 384544 - RNA, 19 nt, Homo sapiens
  misc_RNA (1)...(19): siRNA sense strand
gcagcagcuacaagauuua

SEQ ID NO: 384545 - RNA, 19 nt, Homo sapiens
  misc_RNA (1)...(19): siRNA sense strand
caggagacacugccaaaga

SEQ ID NO: 384546 - RNA, 19 nt, Homo sapiens
  misc_RNA (1)...(19): siRNA sense strand
ugaccuggaugcccucaau

SEQ ID NO: 384547 - RNA, 19 nt, Homo sapiens
  misc_RNA (1)...(19): siRNA sense strand
gaaccuacucuccaaggau

SEQ ID NO: 384548 - RNA, 19 nt, Homo sapiens
  misc_RNA (1)...(19): siRNA sense strand
ugauuucgauaaagccaaa

SEQ ID NO: 384549 - RNA, 19 nt, Homo sapiens
  misc_RNA (1)...(19): siRNA sense strand
ggaacuauucgacagugaa

SEQ ID NO: 384550 - RNA, 19 nt, Homo sapiens
  misc_RNA (1)...(19): siRNA sense strand
agagcuggcuggagagaug

SEQ ID NO: 384551 - RNA, 19 nt, Homo sapiens
  misc_RNA (1)...(19): siRNA sense strand
gggagagugggcagugaua

SEQ ID NO: 384552 - RNA, 19 nt, Homo sapiens
  misc_RNA (1)...(19): siRNA sense strand
gagagugggcagugauaug

SEQ ID NO: 384553 - RNA, 19 nt, Homo sapiens
  misc_RNA (1)...(19): siRNA sense strand
gcagagucaucgggaaucu

SEQ ID NO: 384554 - RNA, 19 nt, Homo sapiens
  misc_RNA (1)...(19): siRNA sense strand
uggaugcccucaaucuuuc

SEQ ID NO: 384555 - RNA, 19 nt, Homo sapiens
  misc_RNA (1)...(19): siRNA sense strand
ccaagccacugcggaguuc

SEQ ID NO: 384556 - RNA, 19 nt, Homo sapiens
  misc_RNA (1)...(19): siRNA sense strand
ugauaugaccucccaacaa

SEQ ID NO: 384557 - RNA, 19 nt, Homo sapiens
  misc_RNA (1)...(19): siRNA sense strand
gaaggaguuggcugaggaa

SEQ ID NO: 384558 - RNA, 19 nt, Homo sapiens
  misc_RNA (1)...(19): siRNA sense strand
ggaggagcuucuggaaagu

SEQ ID NO: 384559 - RNA, 19 nt, Homo sapiens
  misc_RNA (1)...(19): siRNA sense strand
ggagaucacagaaaaguau

SEQ ID NO: 384560 - RNA, 19 nt, Homo sapiens
  misc_RNA (1)...(19): siRNA sense strand
aggagacacugccaaagau

SEQ ID NO: 384561 - RNA, 19 nt, Homo sapiens
  misc_RNA (1)...(19): siRNA sense strand
cuggaugcccucaaucuuu

SEQ ID NO: 384562 - RNA, 19 nt, Homo sapiens
  misc_RNA (1)...(19): siRNA sense strand
cccaucaugcagaguauua

SEQ ID NO: 384563 - RNA, 19 nt, Homo sapiens
  misc_RNA (1)...(19): siRNA sense strand
ccacugcggaguucgagaa

SEQ ID NO: 384564 - RNA, 19 nt, Homo sapiens
  misc_RNA (1)...(19): siRNA sense strand
ggagacacugccaaagaug

SEQ ID NO: 384565 - RNA, 19 nt, Homo sapiens
  misc_RNA (1)...(19): siRNA sense strand
uggaaagugcucuugauga

SEQ ID NO: 384566 - RNA, 19 nt, Homo sapiens
  misc_RNA (1)...(19): siRNA sense strand
uaugaccucccaacaagaa

SEQ ID NO: 384567 - RNA, 19 nt, Homo sapiens
  misc_RNA (1)...(19): siRNA sense strand
aacagugucugaucaugug

SEQ ID NO: 384568 - RNA, 19 nt, Homo sapiens
  misc_RNA (1)...(19): siRNA sense strand
gagcagcacagcgucaugu

SEQ ID NO: 384569 - RNA, 19 nt, Homo sapiens
  misc_RNA (1)...(19): siRNA sense strand
aaauaugugagcaguuuga

SEQ ID NO: 384570 - RNA, 19 nt, Homo sapiens
  misc_RNA (1)...(19): siRNA sense strand
gccaggagacacugccaaa

SEQ ID NO: 384571 - RNA, 19 nt, Homo sapiens
  misc_RNA (1)...(19): siRNA sense strand
ugaacagugucugaucaug

SEQ ID NO: 384572 - RNA, 19 nt, Homo sapiens
  misc_RNA (1)...(19): siRNA sense strand
gauuuaggccauccuccaa

SEQ ID NO: 384573 - RNA, 19 nt, Homo sapiens
  misc_RNA (1)...(19): siRNA sense strand
gaacuauucgacagugaac

SEQ ID NO: 384574 - RNA, 19 nt, Homo sapiens
  misc_RNA (1)...(19): siRNA sense strand
gugcuguacccaucacuga

SEQ ID NO: 384575 - RNA, 19 nt, Homo sapiens
  misc_RNA (1)...(19): siRNA sense strand
agagugggcagugauauga

SEQ ID NO: 384576 - RNA, 19 nt, Homo sapiens
  misc_RNA (1)...(19): siRNA sense strand
ggagagugggcagugauau

SEQ ID NO: 384577 - RNA, 19 nt, Homo sapiens
  misc_RNA (1)...(19): siRNA sense strand
gaacauccuccccaucaug

SEQ ID NO: 384578 - RNA, 19 nt, Homo sapiens
  misc_RNA (1)...(19): siRNA sense strand
ugcagaaccuacucuccaa

SEQ ID NO: 384579 - RNA, 19 nt, Homo sapiens
  misc_RNA (1)...(19): siRNA sense strand
cagcaugucggaagaagag

SEQ ID NO: 384580 - RNA, 19 nt, Homo sapiens
  misc_RNA (1)...(19): siRNA sense strand
ucuggaaagugcucuugau

SEQ ID NO: 384581 - RNA, 19 nt, Homo sapiens
  misc_RNA (1)...(19): siRNA sense strand
acccaucacugaaggagau

SEQ ID NO: 384582 - RNA, 19 nt, Homo sapiens
  misc_RNA (1)...(19): siRNA sense strand
gcucuugaugauuucgaua

SEQ ID NO: 384583 - RNA, 19 nt, Homo sapiens
  misc_RNA (1)...(19): siRNA sense strand
agaaaaguauccagaaugg

SEQ ID NO: 384584 - RNA, 19 nt, Homo sapiens
  misc_RNA (1)...(19): siRNA sense strand
cagggagagugggcaguga

SEQ ID NO: 384585 - RNA, 19 nt, Homo sapiens
  misc_RNA (1)...(19): siRNA sense strand
ccuccuggccucaacuuug

SEQ ID NO: 384586 - RNA, 19 nt, Homo sapiens
  misc_RNA (1)...(19): siRNA sense strand
agaaccuacucuccaagga

SEQ ID NO: 384587 - RNA, 19 nt, Homo sapiens
  misc_RNA (1)...(19): siRNA sense strand
ucgagaaggcaaugaagga

SEQ ID NO: 384588 - RNA, 19 nt, Homo sapiens
  misc_RNA (1)...(19): siRNA sense strand
ggaauuggaggagcuucug

SEQ ID NO: 384589 - RNA, 19 nt, Homo sapiens
  misc_RNA (1)...(19): siRNA sense strand
aaaaguauccagaaugguu

SEQ ID NO: 384590 - RNA, 19 nt, Homo sapiens
  misc_RNA (1)...(19): siRNA sense strand
caucaugcagaguauuaug

SEQ ID NO: 384591 - RNA, 19 nt, Homo sapiens
  misc_RNA (1)...(19): siRNA sense strand
ugaccucccaacaagaauu

SEQ ID NO: 384592 - RNA, 19 nt, Homo sapiens
  misc_RNA (1)...(19): siRNA sense strand
gcugaggaaggcuguagug

SEQ ID NO: 384593 - RNA, 19 nt, Homo sapiens
  misc_RNA (1)...(19): siRNA sense strand
ugccaguggugaacagugu

SEQ ID NO: 384594 - RNA, 19 nt, Homo sapiens
  misc_RNA (1)...(19): siRNA sense strand
gcaaagugcuauguucuug

SEQ ID NO: 384595 - RNA, 19 nt, Homo sapiens
  misc_RNA (1)...(19): siRNA sense strand
acaaguggcugcuuuacaa

SEQ ID NO: 384596 - RNA, 19 nt, Homo sapiens
  misc_RNA (1)...(19): siRNA sense strand
ggaagacccguuugagcua

SEQ ID NO: 384597 - RNA, 19 nt, Homo sapiens
  misc_RNA (1)...(19): siRNA sense strand
ugauggagaacaacucuua

SEQ ID NO: 384598 - RNA, 19 nt, Homo sapiens
  misc_RNA (1)...(19): siRNA sense strand
gaaacggacccuuuuaaaa

SEQ ID NO: 384599 - RNA, 19 nt, Homo sapiens
  misc_RNA (1)...(19): siRNA sense strand
aauauggucuugcugcauu

SEQ ID NO: 384600 - RNA, 19 nt, Homo sapiens
  misc_RNA (1)...(19): siRNA sense strand
acagcaagcuuucaucaag

SEQ ID NO: 384601 - RNA, 19 nt, Homo sapiens
  misc_RNA (1)...(19): siRNA sense strand
gcaaacagcaagcuuucau

SEQ ID NO: 384602 - RNA, 19 nt, Homo sapiens
  misc_RNA (1)...(19): siRNA sense strand
gcagacccauggacaagag

SEQ ID NO: 384603 - RNA, 19 nt, Homo sapiens
  misc_RNA (1)...(19): siRNA sense strand
gaauauacaagaagcuaca

SEQ ID NO: 384604 - RNA, 19 nt, Homo sapiens
  misc_RNA (1)...(19): siRNA sense strand
cccaaaagcuguccucaaa

SEQ ID NO: 384605 - RNA, 19 nt, Homo sapiens
  misc_RNA (1)...(19): siRNA sense strand
gcuacaaguggcugcuuua

SEQ ID NO: 384606 - RNA, 19 nt, Homo sapiens
  misc_RNA (1)...(19): siRNA sense strand
uaaagucggaauucuguga

SEQ ID NO: 384607 - RNA, 19 nt, Homo sapiens
  misc_RNA (1)...(19): siRNA sense strand
gcuguggucagaagcauuu

SEQ ID NO: 384608 - RNA, 19 nt, Homo sapiens
  misc_RNA (1)...(19): siRNA sense strand
caaaagcuguccucaaaag

SEQ ID NO: 384609 - RNA, 19 nt, Homo sapiens
  misc_RNA (1)...(19): siRNA sense strand
gcuauguucuuggcuguuc

SEQ ID NO: 384610 - RNA, 19 nt, Homo sapiens
  misc_RNA (1)...(19): siRNA sense strand
caacucuuauccucguuuc

SEQ ID NO: 384611 - RNA, 19 nt, Homo sapiens
  misc_RNA (1)...(19): siRNA sense strand
cuuuacaacugcccagaaa

SEQ ID NO: 384612 - RNA, 19 nt, Homo sapiens
  misc_RNA (1)...(19): siRNA sense strand
aaacagcaagcuuucauca

SEQ ID NO: 384613 - RNA, 19 nt, Homo sapiens
  misc_RNA (1)...(19): siRNA sense strand
uaccaggacuuguguaaaa

SEQ ID NO: 384614 - RNA, 19 nt, Homo sapiens
  misc_RNA (1)...(19): siRNA sense strand
aaaggaagcuccaaaagag

SEQ ID NO: 384615 - RNA, 19 nt, Homo sapiens
  misc_RNA (1)...(19): siRNA sense strand
aagaugaaacggacccuuu

SEQ ID NO: 384616 - RNA, 19 nt, Homo sapiens
  misc_RNA (1)...(19): siRNA sense strand
cagaauauacaagaagcua

SEQ ID NO: 384617 - RNA, 19 nt, Homo sapiens
  misc_RNA (1)...(19): siRNA sense strand
gauuggaagacccguuuga

SEQ ID NO: 384618 - RNA, 19 nt, Homo sapiens
  misc_RNA (1)...(19): siRNA sense strand
gaugaaacggacccuuuua

SEQ ID NO: 384619 - RNA, 19 nt, Homo sapiens
  misc_RNA (1)...(19): siRNA sense strand
aauucuggcuggccuguga

SEQ ID NO: 384620 - RNA, 19 nt, Homo sapiens
  misc_RNA (1)...(19): siRNA sense strand
gaaaaggaagcuccaaaag

SEQ ID NO: 384621 - RNA, 19 nt, Homo sapiens
  misc_RNA (1)...(19): siRNA sense strand
cacagagccucaugcuaca

SEQ ID NO: 384622 - RNA, 19 nt, Homo sapiens
  misc_RNA (1)...(19): siRNA sense strand
ccguuugagcuacuucuua

SEQ ID NO: 384623 - RNA, 19 nt, Homo sapiens
  misc_RNA (1)...(19): siRNA sense strand
gcaggcaguggccacaaga

SEQ ID NO: 384624 - RNA, 19 nt, Homo sapiens
  misc_RNA (1)...(19): siRNA sense strand
uauacagcuugauggagaa

SEQ ID NO: 384625 - RNA, 19 nt, Homo sapiens
  misc_RNA (1)...(19): siRNA sense strand
cguuugagcuacuucuuac

SEQ ID NO: 384626 - RNA, 19 nt, Homo sapiens
  misc_RNA (1)...(19): siRNA sense strand
gauggagaacaacucuuau

SEQ ID NO: 384627 - RNA, 19 nt, Homo sapiens
  misc_RNA (1)...(19): siRNA sense strand
gccagcaaauauggucuug

SEQ ID NO: 384628 - RNA, 19 nt, Homo sapiens
  misc_RNA (1)...(19): siRNA sense strand
uugagcuacuucuuacaaa

SEQ ID NO: 384629 - RNA, 19 nt, Homo sapiens
  misc_RNA (1)...(19): siRNA sense strand
acagcuugauggagaacaa

SEQ ID NO: 384630 - RNA, 19 nt, Homo sapiens
  misc_RNA (1)...(19): siRNA sense strand
aaaaggaagcuccaaaaga

SEQ ID NO: 384631 - RNA, 19 nt, Homo sapiens
  misc_RNA (1)...(19): siRNA sense strand
gcaaggaaaauauauacug

SEQ ID NO: 384632 - RNA, 19 nt, Homo sapiens
  misc_RNA (1)...(19): siRNA sense strand
aagauuggaagacccguuu

SEQ ID NO: 384633 - RNA, 19 nt, Homo sapiens
  misc_RNA (1)...(19): siRNA sense strand
agccacaaaucaccacaga

SEQ ID NO: 384634 - RNA, 19 nt, Homo sapiens
  misc_RNA (1)...(19): siRNA sense strand
caaacagcaagcuuucauc

SEQ ID NO: 384635 - RNA, 19 nt, Homo sapiens
  misc_RNA (1)...(19): siRNA sense strand
ggagaacaacucuuauccu

SEQ ID NO: 384636 - RNA, 19 nt, Homo sapiens
  misc_RNA (1)...(19): siRNA sense strand
gagaagcgagaaaagauga

SEQ ID NO: 384637 - RNA, 19 nt, Homo sapiens
  misc_RNA (1)...(19): siRNA sense strand
gccacaagagcgaggagaa

SEQ ID NO: 384638 - RNA, 19 nt, Homo sapiens
  misc_RNA (1)...(19): siRNA sense strand
agaauucuaccaggacuug

SEQ ID NO: 384639 - RNA, 19 nt, Homo sapiens
  misc_RNA (1)...(19): siRNA sense strand
ggguauacagcuugaugga

SEQ ID NO: 384640 - RNA, 19 nt, Homo sapiens
  misc_RNA (1)...(19): siRNA sense strand
ugaagaagcugacagauua

SEQ ID NO: 384641 - RNA, 19 nt, Homo sapiens
  misc_RNA (1)...(19): siRNA sense strand
ggaaagaggugaucaacaa

SEQ ID NO: 384642 - RNA, 19 nt, Homo sapiens
  misc_RNA (1)...(19): siRNA sense strand
gacaguauguuuacgauaa

SEQ ID NO: 384643 - RNA, 19 nt, Homo sapiens
  misc_RNA (1)...(19): siRNA sense strand
ucaauaaacugguucugua

SEQ ID NO: 384644 - RNA, 19 nt, Homo sapiens
  misc_RNA (1)...(19): siRNA sense strand
gaagacaagugcagggaaa

SEQ ID NO: 384645 - RNA, 19 nt, Homo sapiens
  misc_RNA (1)...(19): siRNA sense strand
ggauggagauggacaugaa

SEQ ID NO: 384646 - RNA, 19 nt, Homo sapiens
  misc_RNA (1)...(19): siRNA sense strand
gagcaggaaucggcguuua

SEQ ID NO: 384647 - RNA, 19 nt, Homo sapiens
  misc_RNA (1)...(19): siRNA sense strand
gcgcagagccguaugcaaa

SEQ ID NO: 384648 - RNA, 19 nt, Homo sapiens
  misc_RNA (1)...(19): siRNA sense strand
gaacaagcaaagacucaaa

SEQ ID NO: 384649 - RNA, 19 nt, Homo sapiens
  misc_RNA (1)...(19): siRNA sense strand
gauggcugcugcuccagua

SEQ ID NO: 384650 - RNA, 19 nt, Homo sapiens
  misc_RNA (1)...(19): siRNA sense strand
uuaagaaguuugccacaga

SEQ ID NO: 384651 - RNA, 19 nt, Homo sapiens
  misc_RNA (1)...(19): siRNA sense strand
uaaacaaucggaagacuga

SEQ ID NO: 384652 - RNA, 19 nt, Homo sapiens
  misc_RNA (1)...(19): siRNA sense strand
gaaagaggugaucaacaaa

SEQ ID NO: 384653 - RNA, 19 nt, Homo sapiens
  misc_RNA (1)...(19): siRNA sense strand
agaaggagcuaaacaaucg

SEQ ID NO: 384654 - RNA, 19 nt, Homo sapiens
  misc_RNA (1)...(19): siRNA sense strand
ggauggacauucaguggau

SEQ ID NO: 384655 - RNA, 19 nt, Homo sapiens
  misc_RNA (1)...(19): siRNA sense strand
ccaaagagcggaaauucau

SEQ ID NO: 384656 - RNA, 19 nt, Homo sapiens
  misc_RNA (1)...(19): siRNA sense strand
aaaucaacauggacaagaa

SEQ ID NO: 384657 - RNA, 19 nt, Homo sapiens
  misc_RNA (1)...(19): siRNA sense strand
cagauuagccagagaagga

SEQ ID NO: 384658 - RNA, 19 nt, Homo sapiens
  misc_RNA (1)...(19): siRNA sense strand
gagcuaaacaaucggaaga

SEQ ID NO: 384659 - RNA, 19 nt, Homo sapiens
  misc_RNA (1)...(19): siRNA sense strand
gagaaggagcuaaacaauc

SEQ ID NO: 384660 - RNA, 19 nt, Homo sapiens
  misc_RNA (1)...(19): siRNA sense strand
aagaggugaucaacaaaga

SEQ ID NO: 384661 - RNA, 19 nt, Homo sapiens
  misc_RNA (1)...(19): siRNA sense strand
ggccauccuuuaaauguag

SEQ ID NO: 384662 - RNA, 19 nt, Homo sapiens
  misc_RNA (1)...(19): siRNA sense strand
caaugaagaagcugacaga

SEQ ID NO: 384663 - RNA, 19 nt, Homo sapiens
  misc_RNA (1)...(19): siRNA sense strand
gaaguuugccacagaggau

SEQ ID NO: 384664 - RNA, 19 nt, Homo sapiens
  misc_RNA (1)...(19): siRNA sense strand
cagagaaggagcuaaacaa

SEQ ID NO: 384665 - RNA, 19 nt, Homo sapiens
  misc_RNA (1)...(19): siRNA sense strand
gguucaagguuggaagaaa

SEQ ID NO: 384666 - RNA, 19 nt, Homo sapiens
  misc_RNA (1)...(19): siRNA sense strand
caauaaacugguucuguau

SEQ ID NO: 384667 - RNA, 19 nt, Homo sapiens
  misc_RNA (1)...(19): siRNA sense strand
caaagccauugaacaagca

SEQ ID NO: 384668 - RNA, 19 nt, Homo sapiens
  misc_RNA (1)...(19): siRNA sense strand
cugcaaagccauugaacaa

SEQ ID NO: 384669 - RNA, 19 nt, Homo sapiens
  misc_RNA (1)...(19): siRNA sense strand
gcugccagauuuaagaagu

SEQ ID NO: 384670 - RNA, 19 nt, Homo sapiens
  misc_RNA (1)...(19): siRNA sense strand
gcagagacacguuuuccua

SEQ ID NO: 384671 - RNA, 19 nt, Homo sapiens
  misc_RNA (1)...(19): siRNA sense strand
uuucugaccuggaaugagu

SEQ ID NO: 384672 - RNA, 19 nt, Homo sapiens
  misc_RNA (1)...(19): siRNA sense strand
ugacagauuagccagagaa

SEQ ID NO: 384673 - RNA, 19 nt, Homo sapiens
  misc_RNA (1)...(19): siRNA sense strand
uaaacugguucuguauaca

SEQ ID NO: 384674 - RNA, 19 nt, Homo sapiens
  misc_RNA (1)...(19): siRNA sense strand
guucaagguuggaagaaaa

SEQ ID NO: 384675 - RNA, 19 nt, Homo sapiens
  misc_RNA (1)...(19): siRNA sense strand
auaaacugguucuguauac

SEQ ID NO: 384676 - RNA, 19 nt, Homo sapiens
  misc_RNA (1)...(19): siRNA sense strand
gaagaagcugacagauuag

SEQ ID NO: 384677 - RNA, 19 nt, Homo sapiens
  misc_RNA (1)...(19): siRNA sense strand
ggauuuauaggcaaugaag

SEQ ID NO: 384678 - RNA, 19 nt, Homo sapiens
  misc_RNA (1)...(19): siRNA sense strand
cagacaguauguuuacgau

SEQ ID NO: 384679 - RNA, 19 nt, Homo sapiens
  misc_RNA (1)...(19): siRNA sense strand
gcuaaacaaucggaagacu

SEQ ID NO: 384680 - RNA, 19 nt, Homo sapiens
  misc_RNA (1)...(19): siRNA sense strand
gccacuggauggagaugga

SEQ ID NO: 384681 - RNA, 19 nt, Homo sapiens
  misc_RNA (1)...(19): siRNA sense strand
ccuggucauucgggauuua

SEQ ID NO: 384682 - RNA, 19 nt, Homo sapiens
  misc_RNA (1)...(19): siRNA sense strand
gcauguuccuggucauucg

SEQ ID NO: 384683 - RNA, 19 nt, Homo sapiens
  misc_RNA (1)...(19): siRNA sense strand
caaagagcggaaauucaug

SEQ ID NO: 384684 - RNA, 19 nt, Homo sapiens
  misc_RNA (1)...(19): siRNA sense strand
ugaaagcgcagagccguau

SEQ ID NO: 384685 - RNA, 19 nt, Homo sapiens
  misc_RNA (1)...(19): siRNA sense strand
ugccagauuuaagaaguuu

SEQ ID NO: 384686 - RNA, 19 nt, Homo sapiens
  misc_RNA (1)...(19): siRNA sense strand
ggucauucgggauuuauag

SEQ ID NO: 384687 - RNA, 19 nt, Homo sapiens
  misc_RNA (1)...(19): siRNA sense strand
gauggagauggacaugaaa

SEQ ID NO: 384688 - RNA, 19 nt, Homo sapiens
  misc_RNA (1)...(19): siRNA sense strand
agagaaggagcuaaacaau

SEQ ID NO: 384689 - RNA, 19 nt, Homo sapiens
  misc_RNA (1)...(19): siRNA sense strand
ccagagaaggagcuaaaca

SEQ ID NO: 384690 - RNA, 19 nt, Homo sapiens
  misc_RNA (1)...(19): siRNA sense strand
aaaccaaagagcggaaauu

SEQ ID NO: 384691 - RNA, 19 nt, Homo sapiens
  misc_RNA (1)...(19): siRNA sense strand
gcaaagacucaaaacauca

SEQ ID NO: 384692 - RNA, 19 nt, Homo sapiens
  misc_RNA (1)...(19): siRNA sense strand
uauaggcaaugaagaagcu

SEQ ID NO: 384693 - RNA, 19 nt, Homo sapiens
  misc_RNA (1)...(19): siRNA sense strand
gcacagguggaccgguuuc

SEQ ID NO: 384694 - RNA, 19 nt, Homo sapiens
  misc_RNA (1)...(19): siRNA sense strand
gggaaagaggugaucaaca

SEQ ID NO: 384695 - RNA, 19 nt, Homo sapiens
  misc_RNA (1)...(19): siRNA sense strand
auaacuaacuggguucaag

SEQ ID NO: 384696 - RNA, 19 nt, Homo sapiens
  misc_RNA (1)...(19): siRNA sense strand
guuuccugcugccagauuu

SEQ ID NO: 384697 - RNA, 19 nt, Homo sapiens
  misc_RNA (1)...(19): siRNA sense strand
augaagaagcugacagauu

SEQ ID NO: 384698 - RNA, 19 nt, Homo sapiens
  misc_RNA (1)...(19): siRNA sense strand
acaagaaucggaggcgaaa

SEQ ID NO: 384699 - RNA, 19 nt, Homo sapiens
  misc_RNA (1)...(19): siRNA sense strand
cagaagggcaugaaaauca

SEQ ID NO: 384700 - RNA, 19 nt, Homo sapiens
  misc_RNA (1)...(19): siRNA sense strand
gcagagccguaugcaaagc

SEQ ID NO: 384701 - RNA, 19 nt, Homo sapiens
  misc_RNA (1)...(19): siRNA sense strand
ggcugcugcuccaguaaug

SEQ ID NO: 384702 - RNA, 19 nt, Homo sapiens
  misc_RNA (1)...(19): siRNA sense strand
agacaguauguuuacgaua

SEQ ID NO: 384703 - RNA, 19 nt, Homo sapiens
  misc_RNA (1)...(19): siRNA sense strand
gguucgggauguucuaugc

SEQ ID NO: 384704 - RNA, 19 nt, Homo sapiens
  misc_RNA (1)...(19): siRNA sense strand
ucugcaagcccggaaguuu

SEQ ID NO: 384705 - RNA, 19 nt, Homo sapiens
  misc_RNA (1)...(19): siRNA sense strand
cugccagauuuaagaaguu

SEQ ID NO: 384706 - RNA, 19 nt, Homo sapiens
  misc_RNA (1)...(19): siRNA sense strand
gcaggaaucggcguuuacu

SEQ ID NO: 384707 - RNA, 19 nt, Homo sapiens
  misc_RNA (1)...(19): siRNA sense strand
ucaaggagcuggcuaaaua

SEQ ID NO: 384708 - RNA, 19 nt, Homo sapiens
  misc_RNA (1)...(19): siRNA sense strand
gaagaggguuggagacugu

SEQ ID NO: 384709 - RNA, 19 nt, Homo sapiens
  misc_RNA (1)...(19): siRNA sense strand
ggagcuggcuaaauaugaa

SEQ ID NO: 384710 - RNA, 19 nt, Homo sapiens
  misc_RNA (1)...(19): siRNA sense strand
gaacaaguaaucuuaacug

SEQ ID NO: 384711 - RNA, 19 nt, Homo sapiens
  misc_RNA (1)...(19): siRNA sense strand
gaaggacacagcauuguug

SEQ ID NO: 384712 - RNA, 19 nt, Homo sapiens
  misc_RNA (1)...(19): siRNA sense strand
gcacuggacuccggaagga

SEQ ID NO: 384713 - RNA, 19 nt, Homo sapiens
  misc_RNA (1)...(19): siRNA sense strand
ggaaugaaccauccaucaa

SEQ ID NO: 384714 - RNA, 19 nt, Homo sapiens
  misc_RNA (1)...(19): siRNA sense strand
ggacacagcauuguugguu

SEQ ID NO: 384715 - RNA, 19 nt, Homo sapiens
  misc_RNA (1)...(19): siRNA sense strand
cuucugaucuguccaguga

SEQ ID NO: 384716 - RNA, 19 nt, Homo sapiens
  misc_RNA (1)...(19): siRNA sense strand
ggaaggacacagcauuguu

SEQ ID NO: 384717 - RNA, 19 nt, Homo sapiens
  misc_RNA (1)...(19): siRNA sense strand
gacacagcauuguugguuu

SEQ ID NO: 384718 - RNA, 19 nt, Homo sapiens
  misc_RNA (1)...(19): siRNA sense strand
uggcauaggaucagaaauu

SEQ ID NO: 384719 - RNA, 19 nt, Homo sapiens
  misc_RNA (1)...(19): siRNA sense strand
ggcauaggaucagaaauuc

SEQ ID NO: 384720 - RNA, 19 nt, Homo sapiens
  misc_RNA (1)...(19): siRNA sense strand
cagcaugcacuucuuggua

SEQ ID NO: 384721 - RNA, 19 nt, Homo sapiens
  misc_RNA (1)...(19): siRNA sense strand
uugcagaagugccgaaaga

SEQ ID NO: 384722 - RNA, 19 nt, Homo sapiens
  misc_RNA (1)...(19): siRNA sense strand
uauagaggcuuuggcauag

SEQ ID NO: 384723 - RNA, 19 nt, Homo sapiens
  misc_RNA (1)...(19): siRNA sense strand
uuauagaggcuuuggcaua

SEQ ID NO: 384724 - RNA, 19 nt, Homo sapiens
  misc_RNA (1)...(19): siRNA sense strand
gaggacuucuucgugauga

SEQ ID NO: 384725 - RNA, 19 nt, Homo sapiens
  misc_RNA (1)...(19): siRNA sense strand
guuggagacuguucaagau

SEQ ID NO: 384726 - RNA, 19 nt, Homo sapiens
  misc_RNA (1)...(19): siRNA sense strand
cgugaugagugauuauaga

SEQ ID NO: 384727 - RNA, 19 nt, Homo sapiens
  misc_RNA (1)...(19): siRNA sense strand
gcagcagcaugcacuucuu

SEQ ID NO: 384728 - RNA, 19 nt, Homo sapiens
  misc_RNA (1)...(19): siRNA sense strand
gaaugaaccauccaucaac

SEQ ID NO: 384729 - RNA, 19 nt, Homo sapiens
  misc_RNA (1)...(19): siRNA sense strand
aaccauccaucaacuucua

SEQ ID NO: 384730 - RNA, 19 nt, Homo sapiens
  misc_RNA (1)...(19): siRNA sense strand
gcuagaagaugguuuugga

SEQ ID NO: 384731 - RNA, 19 nt, Homo sapiens
  misc_RNA (1)...(19): siRNA sense strand
gaucaaggagcuggcuaaa

SEQ ID NO: 384732 - RNA, 19 nt, Homo sapiens
  misc_RNA (1)...(19): siRNA sense strand
gguuggagacuguucaaga

SEQ ID NO: 384733 - RNA, 19 nt, Homo sapiens
  misc_RNA (1)...(19): siRNA sense strand
ggagacuguucaagaucga

SEQ ID NO: 384734 - RNA, 19 nt, Homo sapiens
  misc_RNA (1)...(19): siRNA sense strand
gagugauuauagaggcuuu

SEQ ID NO: 384735 - RNA, 19 nt, Homo sapiens
  misc_RNA (1)...(19): siRNA sense strand
cccguggauuggcaaguua

SEQ ID NO: 384736 - RNA, 19 nt, Homo sapiens
  misc_RNA (1)...(19): siRNA sense strand
caaggagcuggcuaaauau

SEQ ID NO: 384737 - RNA, 19 nt, Homo sapiens
  misc_RNA (1)...(19): siRNA sense strand
uagaggcuuuggcauagga

SEQ ID NO: 384738 - RNA, 19 nt, Homo sapiens
  misc_RNA (1)...(19): siRNA sense strand
uaagccagguugcaaugag

SEQ ID NO: 384739 - RNA, 19 nt, Homo sapiens
  misc_RNA (1)...(19): siRNA sense strand
guagcagaauggaaugaac

SEQ ID NO: 384740 - RNA, 19 nt, Homo sapiens
  misc_RNA (1)...(19): siRNA sense strand
gacauacugcggcugauca

SEQ ID NO: 384741 - RNA, 19 nt, Homo sapiens
  misc_RNA (1)...(19): siRNA sense strand
aagaggugcuucugaucug

SEQ ID NO: 384742 - RNA, 19 nt, Homo sapiens
  misc_RNA (1)...(19): siRNA sense strand
uguucaagaucgacaagga

SEQ ID NO: 384743 - RNA, 19 nt, Homo sapiens
  misc_RNA (1)...(19): siRNA sense strand
cauccaucaacuucuauaa

SEQ ID NO: 384744 - RNA, 19 nt, Homo sapiens
  misc_RNA (1)...(19): siRNA sense strand
acacagcauuguugguuuu

SEQ ID NO: 384745 - RNA, 19 nt, Homo sapiens
  misc_RNA (1)...(19): siRNA sense strand
gaaccauccaucaacuucu

SEQ ID NO: 384746 - RNA, 19 nt, Homo sapiens
  misc_RNA (1)...(19): siRNA sense strand
ugaaccauccaucaacuuc

SEQ ID NO: 384747 - RNA, 19 nt, Homo sapiens
  misc_RNA (1)...(19): siRNA sense strand
gaagaaucuaagccagguu

SEQ ID NO: 384748 - RNA, 19 nt, Homo sapiens
  misc_RNA (1)...(19): siRNA sense strand
ucaagaucgacaaggagua

SEQ ID NO: 384749 - RNA, 19 nt, Homo sapiens
  misc_RNA (1)...(19): siRNA sense strand
gguagcagaauggaaugaa

SEQ ID NO: 384750 - RNA, 19 nt, Homo sapiens
  misc_RNA (1)...(19): siRNA sense strand
guuuugccauguacuauuu

SEQ ID NO: 384751 - RNA, 19 nt, Homo sapiens
  misc_RNA (1)...(19): siRNA sense strand
cagcagcaugcacuucuug

SEQ ID NO: 384752 - RNA, 19 nt, Homo sapiens
  misc_RNA (1)...(19): siRNA sense strand
ucugaucuguccagugaag

SEQ ID NO: 384753 - RNA, 19 nt, Homo sapiens
  misc_RNA (1)...(19): siRNA sense strand
ugaucaaggagcuggcuaa

SEQ ID NO: 384754 - RNA, 19 nt, Homo sapiens
  misc_RNA (1)...(19): siRNA sense strand
caagaucgacaaggaguac

SEQ ID NO: 384755 - RNA, 19 nt, Homo sapiens
  misc_RNA (1)...(19): siRNA sense strand
aaugaaccauccaucaacu

SEQ ID NO: 384756 - RNA, 19 nt, Homo sapiens
  misc_RNA (1)...(19): siRNA sense strand
ggacaaguuugcagaauau

SEQ ID NO: 384757 - RNA, 19 nt, Homo sapiens
  misc_RNA (1)...(19): siRNA sense strand
gaaagucgaaagaagauua

SEQ ID NO: 384758 - RNA, 19 nt, Homo sapiens
  misc_RNA (1)...(19): siRNA sense strand
gaagaguucuguuguaauc

SEQ ID NO: 384759 - RNA, 19 nt, Homo sapiens
  misc_RNA (1)...(19): siRNA sense strand
gcaagguucuucacuuuga

SEQ ID NO: 384760 - RNA, 19 nt, Homo sapiens
  misc_RNA (1)...(19): siRNA sense strand
gaagaaagucgaaagaaga

SEQ ID NO: 384761 - RNA, 19 nt, Homo sapiens
  misc_RNA (1)...(19): siRNA sense strand
caaauccacugaugcauau

SEQ ID NO: 384762 - RNA, 19 nt, Homo sapiens
  misc_RNA (1)...(19): siRNA sense strand
gcagaagcuugaagagaaa

SEQ ID NO: 384763 - RNA, 19 nt, Homo sapiens
  misc_RNA (1)...(19): siRNA sense strand
gcaaagaucuaagcaugau

SEQ ID NO: 384764 - RNA, 19 nt, Homo sapiens
  misc_RNA (1)...(19): siRNA sense strand
gaaagucaaacgaaugaaa

SEQ ID NO: 384765 - RNA, 19 nt, Homo sapiens
  misc_RNA (1)...(19): siRNA sense strand
gaacgcaaucuauuucaaa

SEQ ID NO: 384766 - RNA, 19 nt, Homo sapiens
  misc_RNA (1)...(19): siRNA sense strand
uagcaagguucuucacuuu

SEQ ID NO: 384767 - RNA, 19 nt, Homo sapiens
  misc_RNA (1)...(19): siRNA sense strand
agacaacacugcacaacaa

SEQ ID NO: 384768 - RNA, 19 nt, Homo sapiens
  misc_RNA (1)...(19): siRNA sense strand
gagccacggucucucagua

SEQ ID NO: 384769 - RNA, 19 nt, Homo sapiens
  misc_RNA (1)...(19): siRNA sense strand
cagcaucacaucagcauua

SEQ ID NO: 384770 - RNA, 19 nt, Homo sapiens
  misc_RNA (1)...(19): siRNA sense strand
uaucaucuccuucaacuaa

SEQ ID NO: 384771 - RNA, 19 nt, Homo sapiens
  misc_RNA (1)...(19): siRNA sense strand
caacacugcacaacaaauu

SEQ ID NO: 384772 - RNA, 19 nt, Homo sapiens
  misc_RNA (1)...(19): siRNA sense strand
gcagaccucucaggcauga

SEQ ID NO: 384773 - RNA, 19 nt, Homo sapiens
  misc_RNA (1)...(19): siRNA sense strand
acacuuaccucgguucaaa

SEQ ID NO: 384774 - RNA, 19 nt, Homo sapiens
  misc_RNA (1)...(19): siRNA sense strand
gcagugggagaauaaauuu

SEQ ID NO: 384775 - RNA, 19 nt, Homo sapiens
  misc_RNA (1)...(19): siRNA sense strand
gcugagaaauugauggaau

SEQ ID NO: 384776 - RNA, 19 nt, Homo sapiens
  misc_RNA (1)...(19): siRNA sense strand
ugacugaauucaacaaauc

SEQ ID NO: 384777 - RNA, 19 nt, Homo sapiens
  misc_RNA (1)...(19): siRNA sense strand
guaaucacccuuuccuauu

SEQ ID NO: 384778 - RNA, 19 nt, Homo sapiens
  misc_RNA (1)...(19): siRNA sense strand
guugauaggucaggaaaug

SEQ ID NO: 384779 - RNA, 19 nt, Homo sapiens
  misc_RNA (1)...(19): siRNA sense strand
ggccaaacaagaauacaua

SEQ ID NO: 384780 - RNA, 19 nt, Homo sapiens
  misc_RNA (1)...(19): siRNA sense strand
gaaauguucaucaccaguu

SEQ ID NO: 384781 - RNA, 19 nt, Homo sapiens
  misc_RNA (1)...(19): siRNA sense strand
ggcaauacaauuccuuuaa

SEQ ID NO: 384782 - RNA, 19 nt, Homo sapiens
  misc_RNA (1)...(19): siRNA sense strand
ugcagaagcuugaagagaa

SEQ ID NO: 384783 - RNA, 19 nt, Homo sapiens
  misc_RNA (1)...(19): siRNA sense strand
gagaaaagacguaucaauu

SEQ ID NO: 384784 - RNA, 19 nt, Homo sapiens
  misc_RNA (1)...(19): siRNA sense strand
uggacaaguuugcagaaua

SEQ ID NO: 384785 - RNA, 19 nt, Homo sapiens
  misc_RNA (1)...(19): siRNA sense strand
ugccaccgcuguaguagua

SEQ ID NO: 384786 - RNA, 19 nt, Homo sapiens
  misc_RNA (1)...(19): siRNA sense strand
caacaaauccacugaugca

SEQ ID NO: 384787 - RNA, 19 nt, Homo sapiens
  misc_RNA (1)...(19): siRNA sense strand
uaaucacccuuuccuauuc

SEQ ID NO: 384788 - RNA, 19 nt, Homo sapiens
  misc_RNA (1)...(19): siRNA sense strand
aaugaagaguucuguugua

SEQ ID NO: 384789 - RNA, 19 nt, Homo sapiens
  misc_RNA (1)...(19): siRNA sense strand
uguaguaguagucgaauua

SEQ ID NO: 384790 - RNA, 19 nt, Homo sapiens
  misc_RNA (1)...(19): siRNA sense strand
uaucuaaaguccuacacaa

SEQ ID NO: 384791 - RNA, 19 nt, Homo sapiens
  misc_RNA (1)...(19): siRNA sense strand
gaauuaucaucuccuucaa

SEQ ID NO: 384792 - RNA, 19 nt, Homo sapiens
  misc_RNA (1)...(19): siRNA sense strand
caacagcauccucuucuau

SEQ ID NO: 384793 - RNA, 19 nt, Homo sapiens
  misc_RNA (1)...(19): siRNA sense strand
ucacagagaacaccacaga

SEQ ID NO: 384794 - RNA, 19 nt, Homo sapiens
  misc_RNA (1)...(19): siRNA sense strand
ccaacagcauccucuucua

SEQ ID NO: 384795 - RNA, 19 nt, Homo sapiens
  misc_RNA (1)...(19): siRNA sense strand
agaagaaagucgaaagaag

SEQ ID NO: 384796 - RNA, 19 nt, Homo sapiens
  misc_RNA (1)...(19): siRNA sense strand
acaaauccacugaugcaua

SEQ ID NO: 384797 - RNA, 19 nt, Homo sapiens
  misc_RNA (1)...(19): siRNA sense strand
caaauuagcaagguucuuc

SEQ ID NO: 384798 - RNA, 19 nt, Homo sapiens
  misc_RNA (1)...(19): siRNA sense strand
gguggaaagucaaacgaau

SEQ ID NO: 384799 - RNA, 19 nt, Homo sapiens
  misc_RNA (1)...(19): siRNA sense strand
ugcaaaugcuccagaagaa

SEQ ID NO: 384800 - RNA, 19 nt, Homo sapiens
  misc_RNA (1)...(19): siRNA sense strand
cgaauuaucaucuccuuca

SEQ ID NO: 384801 - RNA, 19 nt, Homo sapiens
  misc_RNA (1)...(19): siRNA sense strand
gcaaaugcuccagaagaaa

SEQ ID NO: 384802 - RNA, 19 nt, Homo sapiens
  misc_RNA (1)...(19): siRNA sense strand
acagagaacaccacagaaa

SEQ ID NO: 384803 - RNA, 19 nt, Homo sapiens
  misc_RNA (1)...(19): siRNA sense strand
aaagggcagugggagaaua

SEQ ID NO: 384804 - RNA, 19 nt, Homo sapiens
  misc_RNA (1)...(19): siRNA sense strand
guucaucaccaguuucaaa

SEQ ID NO: 384805 - RNA, 19 nt, Homo sapiens
  misc_RNA (1)...(19): siRNA sense strand
cgacacugguucuugugaa

SEQ ID NO: 384806 - RNA, 19 nt, Homo sapiens
  misc_RNA (1)...(19): siRNA sense strand
caacaagcucuucggagaa

SEQ ID NO: 384807 - RNA, 19 nt, Homo sapiens
  misc_RNA (1)...(19): siRNA sense strand
aaauguucaucaccaguuu

SEQ ID NO: 384808 - RNA, 19 nt, Homo sapiens
  misc_RNA (1)...(19): siRNA sense strand
guacagaugaugaggcaau

SEQ ID NO: 384809 - RNA, 19 nt, Homo sapiens
  misc_RNA (1)...(19): siRNA sense strand
auacaaaggcaaagaucua

SEQ ID NO: 384810 - RNA, 19 nt, Homo sapiens
  misc_RNA (1)...(19): siRNA sense strand
augaagaguucuguuguaa

SEQ ID NO: 384811 - RNA, 19 nt, Homo sapiens
  misc_RNA (1)...(19): siRNA sense strand
ugauugugcugcugccaaa

SEQ ID NO: 384812 - RNA, 19 nt, Homo sapiens
  misc_RNA (1)...(19): siRNA sense strand
cuaaugaagaguucuguug

SEQ ID NO: 384813 - RNA, 19 nt, Homo sapiens
  misc_RNA (1)...(19): siRNA sense strand
gaacaacaucuucuauucc

SEQ ID NO: 384814 - RNA, 19 nt, Homo sapiens
  misc_RNA (1)...(19): siRNA sense strand
aaagaucuaagcaugauug

SEQ ID NO: 384815 - RNA, 19 nt, Homo sapiens
  misc_RNA (1)...(19): siRNA sense strand
ggcagugggagaauaaauu

SEQ ID NO: 384816 - RNA, 19 nt, Homo sapiens
  misc_RNA (1)...(19): siRNA sense strand
caaaugcuccagaagaaag

SEQ ID NO: 384817 - RNA, 19 nt, Homo sapiens
  misc_RNA (1)...(19): siRNA sense strand
aacaagcucuucggagaaa

SEQ ID NO: 384818 - RNA, 19 nt, Homo sapiens
  misc_RNA (1)...(19): siRNA sense strand
ccucuucuauggcagauuc

SEQ ID NO: 384819 - RNA, 19 nt, Homo sapiens
  misc_RNA (1)...(19): siRNA sense strand
cucaguaucuaaaguccua

SEQ ID NO: 384820 - RNA, 19 nt, Homo sapiens
  misc_RNA (1)...(19): siRNA sense strand
ggccaagguccuggaaaua

SEQ ID NO: 384821 - RNA, 19 nt, Homo sapiens
  misc_RNA (1)...(19): siRNA sense strand
ccagaagaaagucgaaaga

SEQ ID NO: 384822 - RNA, 19 nt, Homo sapiens
  misc_RNA (1)...(19): siRNA sense strand
uuagcaagguucuucacuu

SEQ ID NO: 384823 - RNA, 19 nt, Homo sapiens
  misc_RNA (1)...(19): siRNA sense strand
gaggcaauacaauuccuuu

SEQ ID NO: 384824 - RNA, 19 nt, Homo sapiens
  misc_RNA (1)...(19): siRNA sense strand
cagaagaaagucgaaagaa

SEQ ID NO: 384825 - RNA, 19 nt, Homo sapiens
  misc_RNA (1)...(19): siRNA sense strand
gaugaugaggcaauacaau

SEQ ID NO: 384826 - RNA, 19 nt, Homo sapiens
  misc_RNA (1)...(19): siRNA sense strand
auacgacacugguucuugu

SEQ ID NO: 384827 - RNA, 19 nt, Homo sapiens
  misc_RNA (1)...(19): siRNA sense strand
gaagccaacaccaaguuca

SEQ ID NO: 384828 - RNA, 19 nt, Homo sapiens
  misc_RNA (1)...(19): siRNA sense strand
ggucaggaaauguucauca

SEQ ID NO: 384829 - RNA, 19 nt, Homo sapiens
  misc_RNA (1)...(19): siRNA sense strand
uacagaugaugaggcaaua

SEQ ID NO: 384830 - RNA, 19 nt, Homo sapiens
  misc_RNA (1)...(19): siRNA sense strand
guucuucacuuugaucaag

SEQ ID NO: 384831 - RNA, 19 nt, Homo sapiens
  misc_RNA (1)...(19): siRNA sense strand
gauacgacacugguucuug

SEQ ID NO: 384832 - RNA, 19 nt, Homo sapiens
  misc_RNA (1)...(19): siRNA sense strand
ggcaaagaucuaagcauga

SEQ ID NO: 384833 - RNA, 19 nt, Homo sapiens
  misc_RNA (1)...(19): siRNA sense strand
uguaaucacccuuuccuau

SEQ ID NO: 384834 - RNA, 19 nt, Homo sapiens
  misc_RNA (1)...(19): siRNA sense strand
cugagaaauugauggaaug

SEQ ID NO: 384835 - RNA, 19 nt, Homo sapiens
  misc_RNA (1)...(19): siRNA sense strand
gacaacacugcacaacaaa

SEQ ID NO: 384836 - RNA, 19 nt, Homo sapiens
  misc_RNA (1)...(19): siRNA sense strand
ccuuuccuauucuucauaa

SEQ ID NO: 384837 - RNA, 19 nt, Homo sapiens
  misc_RNA (1)...(19): siRNA sense strand
gaucaagucacagagaaca

SEQ ID NO: 384838 - RNA, 19 nt, Homo sapiens
  misc_RNA (1)...(19): siRNA sense strand
agagagcuaugaccucaag

SEQ ID NO: 384839 - RNA, 19 nt, Homo sapiens
  misc_RNA (1)...(19): siRNA sense strand
acaacaaauuagcaagguu

SEQ ID NO: 384840 - RNA, 19 nt, Homo sapiens
  misc_RNA (1)...(19): siRNA sense strand
ucaaagggcagugggagaa

SEQ ID NO: 384841 - RNA, 19 nt, Homo sapiens
  misc_RNA (1)...(19): siRNA sense strand
uucaaaagcuucugacuga

SEQ ID NO: 384842 - RNA, 19 nt, Homo sapiens
  misc_RNA (1)...(19): siRNA sense strand
uugauggaauggacaaguu

SEQ ID NO: 384843 - RNA, 19 nt, Homo sapiens
  misc_RNA (1)...(19): siRNA sense strand
agaaaacacuaaagaggaa

SEQ ID NO: 384844 - RNA, 19 nt, Homo sapiens
  misc_RNA (1)...(19): siRNA sense strand
uggaaagucaaacgaauga

SEQ ID NO: 384845 - RNA, 19 nt, Homo sapiens
  misc_RNA (1)...(19): siRNA sense strand
caaagacaacacugcacaa

SEQ ID NO: 384846 - RNA, 19 nt, Homo sapiens
  misc_RNA (1)...(19): siRNA sense strand
cauuagggaugguccucuu

SEQ ID NO: 384847 - RNA, 19 nt, Homo sapiens
  misc_RNA (1)...(19): siRNA sense strand
gauuaacuccuggguggaa

SEQ ID NO: 384848 - RNA, 19 nt, Homo sapiens
  misc_RNA (1)...(19): siRNA sense strand
uaaugaagaguucuguugu

SEQ ID NO: 384849 - RNA, 19 nt, Homo sapiens
  misc_RNA (1)...(19): siRNA sense strand
aguaguagucgaauuauca

SEQ ID NO: 384850 - RNA, 19 nt, Homo sapiens
  misc_RNA (1)...(19): siRNA sense strand
gaauaugagagagacaugu

SEQ ID NO: 384851 - RNA, 19 nt, Homo sapiens
  misc_RNA (1)...(19): siRNA sense strand
gugcugcugccaaaugaaa

SEQ ID NO: 384852 - RNA, 19 nt, Homo sapiens
  misc_RNA (1)...(19): siRNA sense strand
caagguucuucacuuugau

SEQ ID NO: 384853 - RNA, 19 nt, Homo sapiens
  misc_RNA (1)...(19): siRNA sense strand
gauggaauggacaaguuug

SEQ ID NO: 384854 - RNA, 19 nt, Homo sapiens
  misc_RNA (1)...(19): siRNA sense strand
gcugccaaaugaaaucgau

SEQ ID NO: 384855 - RNA, 19 nt, Homo sapiens
  misc_RNA (1)...(19): siRNA sense strand
cacggucucucaguaucua

SEQ ID NO: 384856 - RNA, 19 nt, Homo sapiens
  misc_RNA (1)...(19): siRNA sense strand
ggagugaagucucagauaa

SEQ ID NO: 384857 - RNA, 19 nt, Homo sapiens
  misc_RNA (1)...(19): siRNA sense strand
gauaagaggaccuguguga

SEQ ID NO: 384858 - RNA, 19 nt, Homo sapiens
  misc_RNA (1)...(19): siRNA sense strand
ggaaauccaacaccagaaa

SEQ ID NO: 384859 - RNA, 19 nt, Homo sapiens
  misc_RNA (1)...(19): siRNA sense strand
gggagugaagucucagaua

SEQ ID NO: 384860 - RNA, 19 nt, Homo sapiens
  misc_RNA (1)...(19): siRNA sense strand
caacaggaacccagcaauc

SEQ ID NO: 384861 - RNA, 19 nt, Homo sapiens
  misc_RNA (1)...(19): siRNA sense strand
caccagaaauaacaugauc

SEQ ID NO: 384862 - RNA, 19 nt, Homo sapiens
  misc_RNA (1)...(19): siRNA sense strand
gaaauccaacaccagaaau

SEQ ID NO: 384863 - RNA, 19 nt, Homo sapiens
  misc_RNA (1)...(19): siRNA sense strand
gaacccagcaaucgaccaa

SEQ ID NO: 384864 - RNA, 19 nt, Homo sapiens
  misc_RNA (1)...(19): siRNA sense strand
acccagcaaucgaccaaua

SEQ ID NO: 384865 - RNA, 19 nt, Homo sapiens
  misc_RNA (1)...(19): siRNA sense strand
ucaggagcauggacaggaa

SEQ ID NO: 384866 - RNA, 19 nt, Homo sapiens
  misc_RNA (1)...(19): siRNA sense strand
aaauccaacaccagaaaua

SEQ ID NO: 384867 - RNA, 19 nt, Homo sapiens
  misc_RNA (1)...(19): siRNA sense strand
gaaucaagaccuacaccau

SEQ ID NO: 384868 - RNA, 19 nt, Homo sapiens
  misc_RNA (1)...(19): siRNA sense strand
agugaagucucagauaaga

SEQ ID NO: 384869 - RNA, 19 nt, Homo sapiens
  misc_RNA (1)...(19): siRNA sense strand
ucugcucucucacugcaua

SEQ ID NO: 384870 - RNA, 19 nt, Homo sapiens
  misc_RNA (1)...(19): siRNA sense strand
cagauaagaggaccugugu

SEQ ID NO: 384871 - RNA, 19 nt, Homo sapiens
  misc_RNA (1)...(19): siRNA sense strand
ccgguuagcagaaucaaga

SEQ ID NO: 384872 - RNA, 19 nt, Homo sapiens
  misc_RNA (1)...(19): siRNA sense strand
uaccaaacguggccuaaaa

SEQ ID NO: 384873 - RNA, 19 nt, Homo sapiens
  misc_RNA (1)...(19): siRNA sense strand
gaagguguagggagugaag

SEQ ID NO: 384874 - RNA, 19 nt, Homo sapiens
  misc_RNA (1)...(19): siRNA sense strand
uguagggagugaagucuca

SEQ ID NO: 384875 - RNA, 19 nt, Homo sapiens
  misc_RNA (1)...(19): siRNA sense strand
caacaccagaaauaacaug

SEQ ID NO: 384876 - RNA, 19 nt, Homo sapiens
  misc_RNA (1)...(19): siRNA sense strand
uuagcagaaucaagaccua

SEQ ID NO: 384877 - RNA, 19 nt, Homo sapiens
  misc_RNA (1)...(19): siRNA sense strand
aauccaacaccagaaauaa

SEQ ID NO: 384878 - RNA, 19 nt, Homo sapiens
  misc_RNA (1)...(19): siRNA sense strand
gagugaagucucagauaag

SEQ ID NO: 384879 - RNA, 19 nt, Homo sapiens
  misc_RNA (1)...(19): siRNA sense strand
cuuggcaucugcucucuca

SEQ ID NO: 384880 - RNA, 19 nt, Homo sapiens
  misc_RNA (1)...(19): siRNA sense strand
aucaagaccuacaccauca

SEQ ID NO: 384881 - RNA, 19 nt, Homo sapiens
  misc_RNA (1)...(19): siRNA sense strand
acccagcgacugccgguua

SEQ ID NO: 384882 - RNA, 19 nt, Homo sapiens
  misc_RNA (1)...(19): siRNA sense strand
ccagaaauaacaugaucca

SEQ ID NO: 384883 - RNA, 19 nt, Homo sapiens
  misc_RNA (1)...(19): siRNA sense strand
uggaagguguagggaguga

SEQ ID NO: 384884 - RNA, 19 nt, Homo sapiens
  misc_RNA (1)...(19): siRNA sense strand
gaagagagcuuggagauga

SEQ ID NO: 384885 - RNA, 19 nt, Homo sapiens
  misc_RNA (1)...(19): siRNA sense strand
gaaccaagcuagaugauga

SEQ ID NO: 384886 - RNA, 19 nt, Homo sapiens
  misc_RNA (1)...(19): siRNA sense strand
ucaaagagauggaaaggaa

SEQ ID NO: 384887 - RNA, 19 nt, Homo sapiens
  misc_RNA (1)...(19): siRNA sense strand
gaugaugacuucaaagaga

SEQ ID NO: 384888 - RNA, 19 nt, Homo sapiens
  misc_RNA (1)...(19): siRNA sense strand
ggagauggauauugaacaa

SEQ ID NO: 384889 - RNA, 19 nt, Homo sapiens
  misc_RNA (1)...(19): siRNA sense strand
ucaagaagcaguuccauaa

SEQ ID NO: 384890 - RNA, 19 nt, Homo sapiens
  misc_RNA (1)...(19): siRNA sense strand
gaaagugagugagaagguu

SEQ ID NO: 384891 - RNA, 19 nt, Homo sapiens
  misc_RNA (1)...(19): siRNA sense strand
caagcuagaugaugacuuc

SEQ ID NO: 384892 - RNA, 19 nt, Homo sapiens
  misc_RNA (1)...(19): siRNA sense strand
ggagaugauugcaacuuug

SEQ ID NO: 384893 - RNA, 19 nt, Homo sapiens
  misc_RNA (1)...(19): siRNA sense strand
gcuagaugaugacuucaaa

SEQ ID NO: 384894 - RNA, 19 nt, Homo sapiens
  misc_RNA (1)...(19): siRNA sense strand
acaaagaucuuagggaaau

SEQ ID NO: 384895 - RNA, 19 nt, Homo sapiens
  misc_RNA (1)...(19): siRNA sense strand
caaccuaaaccacgaauga

SEQ ID NO: 384896 - RNA, 19 nt, Homo sapiens
  misc_RNA (1)...(19): siRNA sense strand
gaaacgacaaggcaagauu

SEQ ID NO: 384897 - RNA, 19 nt, Homo sapiens
  misc_RNA (1)...(19): siRNA sense strand
gaacuucauugacccucuu

SEQ ID NO: 384898 - RNA, 19 nt, Homo sapiens
  misc_RNA (1)...(19): siRNA sense strand
gucaagcucuagagaaauu

SEQ ID NO: 384899 - RNA, 19 nt, Homo sapiens
  misc_RNA (1)...(19): siRNA sense strand
cagaggccaugcucaaauu

SEQ ID NO: 384900 - RNA, 19 nt, Homo sapiens
  misc_RNA (1)...(19): siRNA sense strand
gaagggaauaucaaccuaa

SEQ ID NO: 384901 - RNA, 19 nt, Homo sapiens
  misc_RNA (1)...(19): siRNA sense strand
ccauaaagccacucagaaa

SEQ ID NO: 384902 - RNA, 19 nt, Homo sapiens
  misc_RNA (1)...(19): siRNA sense strand
gcagggcugugauggaaau

SEQ ID NO: 384903 - RNA, 19 nt, Homo sapiens
  misc_RNA (1)...(19): siRNA sense strand
uaaggaaauugcugaguca

SEQ ID NO: 384904 - RNA, 19 nt, Homo sapiens
  misc_RNA (1)...(19): siRNA sense strand
gaaggaaccaagcuagaug

SEQ ID NO: 384905 - RNA, 19 nt, Homo sapiens
  misc_RNA (1)...(19): siRNA sense strand
gauaucaucacacucacua

SEQ ID NO: 384906 - RNA, 19 nt, Homo sapiens
  misc_RNA (1)...(19): siRNA sense strand
gaaauuugaugagucuaag

SEQ ID NO: 384907 - RNA, 19 nt, Homo sapiens
  misc_RNA (1)...(19): siRNA sense strand
gcaagauuccggaugaaga

SEQ ID NO: 384908 - RNA, 19 nt, Homo sapiens
  misc_RNA (1)...(19): siRNA sense strand
ggaaauucaacaucaucua

SEQ ID NO: 384909 - RNA, 19 nt, Homo sapiens
  misc_RNA (1)...(19): siRNA sense strand
gaaaggaaaguggauguca

SEQ ID NO: 384910 - RNA, 19 nt, Homo sapiens
  misc_RNA (1)...(19): siRNA sense strand
gaaggggaguugggauuua

SEQ ID NO: 384911 - RNA, 19 nt, Homo sapiens
  misc_RNA (1)...(19): siRNA sense strand
acauagaagugaagcagaa

SEQ ID NO: 384912 - RNA, 19 nt, Homo sapiens
  misc_RNA (1)...(19): siRNA sense strand
caagaagcaguuccauaaa

SEQ ID NO: 384913 - RNA, 19 nt, Homo sapiens
  misc_RNA (1)...(19): siRNA sense strand
ucacuaaccaaauugauga

SEQ ID NO: 384914 - RNA, 19 nt, Homo sapiens
  misc_RNA (1)...(19): siRNA sense strand
uaagacaggcuucaucuca

SEQ ID NO: 384915 - RNA, 19 nt, Homo sapiens
  misc_RNA (1)...(19): siRNA sense strand
gggcugugauggaaauaau

SEQ ID NO: 384916 - RNA, 19 nt, Homo sapiens
  misc_RNA (1)...(19): siRNA sense strand
guacgacuuugaaccugaa

SEQ ID NO: 384917 - RNA, 19 nt, Homo sapiens
  misc_RNA (1)...(19): siRNA sense strand
gaauaagacaggcuucauc

SEQ ID NO: 384918 - RNA, 19 nt, Homo sapiens
  misc_RNA (1)...(19): siRNA sense strand
uuagggaaauucaacauca

SEQ ID NO: 384919 - RNA, 19 nt, Homo sapiens
  misc_RNA (1)...(19): siRNA sense strand
gcagaggccaugcucaaau

SEQ ID NO: 384920 - RNA, 19 nt, Homo sapiens
  misc_RNA (1)...(19): siRNA sense strand
uggagaugauugcaacuuu

SEQ ID NO: 384921 - RNA, 19 nt, Homo sapiens
  misc_RNA (1)...(19): siRNA sense strand
ucuuggagauggauauuga

SEQ ID NO: 384922 - RNA, 19 nt, Homo sapiens
  misc_RNA (1)...(19): siRNA sense strand
cuaaccaaauugaugagaa

SEQ ID NO: 384923 - RNA, 19 nt, Homo sapiens
  misc_RNA (1)...(19): siRNA sense strand
cacacucacuaaccaaauu

SEQ ID NO: 384924 - RNA, 19 nt, Homo sapiens
  misc_RNA (1)...(19): siRNA sense strand
ucagaaucuucaugacaaa

SEQ ID NO: 384925 - RNA, 19 nt, Homo sapiens
  misc_RNA (1)...(19): siRNA sense strand
aagggaauaucaaccuaaa

SEQ ID NO: 384926 - RNA, 19 nt, Homo sapiens
  misc_RNA (1)...(19): siRNA sense strand
gcuaagcucagcaugauca

SEQ ID NO: 384927 - RNA, 19 nt, Homo sapiens
  misc_RNA (1)...(19): siRNA sense strand
uaaagagggcgauaucauc

SEQ ID NO: 384928 - RNA, 19 nt, Homo sapiens
  misc_RNA (1)...(19): siRNA sense strand
gaaugagccuggaguuucc

SEQ ID NO: 384929 - RNA, 19 nt, Homo sapiens
  misc_RNA (1)...(19): siRNA sense strand
cgaaugagccuggaguuuc

SEQ ID NO: 384930 - RNA, 19 nt, Homo sapiens
  misc_RNA (1)...(19): siRNA sense strand
agaagggaauaucaaccua

SEQ ID NO: 384931 - RNA, 19 nt, Homo sapiens
  misc_RNA (1)...(19): siRNA sense strand
ucaagcauguucaaucucu

SEQ ID NO: 384932 - RNA, 19 nt, Homo sapiens
  misc_RNA (1)...(19): siRNA sense strand
ucgucaagcucuagagaaa

SEQ ID NO: 384933 - RNA, 19 nt, Homo sapiens
  misc_RNA (1)...(19): siRNA sense strand
aagaagcaguuccauaaag

SEQ ID NO: 384934 - RNA, 19 nt, Homo sapiens
  misc_RNA (1)...(19): siRNA sense strand
caacaucaucuaaagaagu

SEQ ID NO: 384935 - RNA, 19 nt, Homo sapiens
  misc_RNA (1)...(19): siRNA sense strand
aaggcaagauuccggauga

SEQ ID NO: 384936 - RNA, 19 nt, Homo sapiens
  misc_RNA (1)...(19): siRNA sense strand
ggucagacuggaagaaaga

SEQ ID NO: 384937 - RNA, 19 nt, Homo sapiens
  misc_RNA (1)...(19): siRNA sense strand
agagaaauuugaugagucu

SEQ ID NO: 384938 - RNA, 19 nt, Homo sapiens
  misc_RNA (1)...(19): siRNA sense strand
gccgagcucuguacgacuu

SEQ ID NO: 384939 - RNA, 19 nt, Homo sapiens
  misc_RNA (1)...(19): siRNA sense strand
caaagaucuuagggaaauu

SEQ ID NO: 384940 - RNA, 19 nt, Homo sapiens
  misc_RNA (1)...(19): siRNA sense strand
uaaccaaauugaugagaac

SEQ ID NO: 384941 - RNA, 19 nt, Homo sapiens
  misc_RNA (1)...(19): siRNA sense strand
cagacuggaagaaagaaua

SEQ ID NO: 384942 - RNA, 19 nt, Homo sapiens
  misc_RNA (1)...(19): siRNA sense strand
cuagagaaauuugaugagu

SEQ ID NO: 384943 - RNA, 19 nt, Homo sapiens
  misc_RNA (1)...(19): siRNA sense strand
ugaugagucuaaggaaauu

SEQ ID NO: 384944 - RNA, 19 nt, Homo sapiens
  misc_RNA (1)...(19): siRNA sense strand
ccacacaggcacucccaaa

SEQ ID NO: 384945 - RNA, 19 nt, Homo sapiens
  misc_RNA (1)...(19): siRNA sense strand
gcugugauggaaauaauga

SEQ ID NO: 384946 - RNA, 19 nt, Homo sapiens
  misc_RNA (1)...(19): siRNA sense strand
gauggauauugaacaagug

SEQ ID NO: 384947 - RNA, 19 nt, Homo sapiens
  misc_RNA (1)...(19): siRNA sense strand
gacaaagaucuuagggaaa

SEQ ID NO: 384948 - RNA, 19 nt, Homo sapiens
  misc_RNA (1)...(19): siRNA sense strand
cauugacccucuucagaau

SEQ ID NO: 384949 - RNA, 19 nt, Homo sapiens
  misc_RNA (1)...(19): siRNA sense strand
ucauugacccucuucagaa

SEQ ID NO: 384950 - RNA, 19 nt, Homo sapiens
  misc_RNA (1)...(19): siRNA sense strand
ggaguugggauuuaaagag

SEQ ID NO: 384951 - RNA, 19 nt, Homo sapiens
  misc_RNA (1)...(19): siRNA sense strand
uagaugaugacuucaaaga

SEQ ID NO: 384952 - RNA, 19 nt, Homo sapiens
  misc_RNA (1)...(19): siRNA sense strand
ccagcucucugcacuugug

SEQ ID NO: 384953 - RNA, 19 nt, Homo sapiens
  misc_RNA (1)...(19): siRNA sense strand
aaagagggcgauaucauca

SEQ ID NO: 384954 - RNA, 19 nt, Homo sapiens
  misc_RNA (1)...(19): siRNA sense strand
ggaagagagcuuggagaug

SEQ ID NO: 384955 - RNA, 19 nt, Homo sapiens
  misc_RNA (1)...(19): siRNA sense strand
aaauugaugagaacuggua

SEQ ID NO: 384956 - RNA, 19 nt, Homo sapiens
  misc_RNA (1)...(19): siRNA sense strand
ggcgauaucaucacacuca

SEQ ID NO: 384957 - RNA, 19 nt, Homo sapiens
  misc_RNA (1)...(19): siRNA sense strand
agacuggaagaaagaauaa

SEQ ID NO: 384958 - RNA, 19 nt, Homo sapiens
  misc_RNA (1)...(19): siRNA sense strand
caaagagauggaaaggaaa

SEQ ID NO: 384959 - RNA, 19 nt, Homo sapiens
  misc_RNA (1)...(19): siRNA sense strand
ggaacugucggaggucaaa

SEQ ID NO: 384960 - RNA, 19 nt, Homo sapiens
  misc_RNA (1)...(19): siRNA sense strand
uucagaaucuucaugacaa

SEQ ID NO: 384961 - RNA, 19 nt, Homo sapiens
  misc_RNA (1)...(19): siRNA sense strand
agauggauauugaacaagu

SEQ ID NO: 384962 - RNA, 19 nt, Homo sapiens
  misc_RNA (1)...(19): siRNA sense strand
gagggucgacgccuggauu

SEQ ID NO: 384963 - RNA, 19 nt, Homo sapiens
  misc_RNA (1)...(19): siRNA sense strand
agucaagcauguucaaucu

SEQ ID NO: 384964 - RNA, 19 nt, Homo sapiens
  misc_RNA (1)...(19): siRNA sense strand
caacuuuggcccagcacuu

SEQ ID NO: 384965 - RNA, 19 nt, Homo sapiens
  misc_RNA (1)...(19): siRNA sense strand
gaucuuagggaaauucaac

SEQ ID NO: 384966 - RNA, 19 nt, Homo sapiens
  misc_RNA (1)...(19): siRNA sense strand
gaagguuggaggagcugaa

SEQ ID NO: 384967 - RNA, 19 nt, Homo sapiens
  misc_RNA (1)...(19): siRNA sense strand
gagucaagcauguucaauc

SEQ ID NO: 384968 - RNA, 19 nt, Homo sapiens
  misc_RNA (1)...(19): siRNA sense strand
gaggccaugcucaaauuug

SEQ ID NO: 384969 - RNA, 19 nt, Homo sapiens
  misc_RNA (1)...(19): siRNA sense strand
uuugaugagucuaaggaaa

SEQ ID NO: 384970 - RNA, 19 nt, Homo sapiens
  misc_RNA (1)...(19): siRNA sense strand
cauaaagccacucagaaag

SEQ ID NO: 384971 - RNA, 19 nt, Homo sapiens
  misc_RNA (1)...(19): siRNA sense strand
agaagcaguuccauaaagc

SEQ ID NO: 384972 - RNA, 19 nt, Homo sapiens
  misc_RNA (1)...(19): siRNA sense strand
ggaaccaagcuagaugaug

SEQ ID NO: 384973 - RNA, 19 nt, Homo sapiens
  misc_RNA (1)...(19): siRNA sense strand
gagaugauugcaacuuugg

SEQ ID NO: 384974 - RNA, 19 nt, Homo sapiens
  misc_RNA (1)...(19): siRNA sense strand
cuucaugacaaagaucuua

SEQ ID NO: 384975 - RNA, 19 nt, Homo sapiens
  misc_RNA (1)...(19): siRNA sense strand
gugauggaaauaaugacua

SEQ ID NO: 384976 - RNA, 19 nt, Homo sapiens
  misc_RNA (1)...(19): siRNA sense strand
aaacgacaaggcaagauuc

SEQ ID NO: 384977 - RNA, 19 nt, Homo sapiens
  misc_RNA (1)...(19): siRNA sense strand
ucaacaucaucuaaagaag

SEQ ID NO: 384978 - RNA, 19 nt, Homo sapiens
  misc_RNA (1)...(19): siRNA sense strand
agagggcgauaucaucaca

SEQ ID NO: 384979 - RNA, 19 nt, Homo sapiens
  misc_RNA (1)...(19): siRNA sense strand
uuaaagagggcgauaucau

SEQ ID NO: 384980 - RNA, 19 nt, Homo sapiens
  misc_RNA (1)...(19): siRNA sense strand
ggauuuaaagagggcgaua

SEQ ID NO: 384981 - RNA, 19 nt, Homo sapiens
  misc_RNA (1)...(19): siRNA sense strand
agacaguacucagcccaau

SEQ ID NO: 384982 - RNA, 19 nt, Homo sapiens
  misc_RNA (1)...(19): siRNA sense strand
caagcauguucaaucucuu

SEQ ID NO: 384983 - RNA, 19 nt, Homo sapiens
  misc_RNA (1)...(19): siRNA sense strand
caagauuccggaugaagag

SEQ ID NO: 384984 - RNA, 19 nt, Homo sapiens
  misc_RNA (1)...(19): siRNA sense strand
gaaaguggcuaauucagua

SEQ ID NO: 384985 - RNA, 19 nt, Homo sapiens
  misc_RNA (1)...(19): siRNA sense strand
gaagagcucugugaguuua

SEQ ID NO: 384986 - RNA, 19 nt, Homo sapiens
  misc_RNA (1)...(19): siRNA sense strand
gcccaaagcucacauguug

SEQ ID NO: 384987 - RNA, 19 nt, Homo sapiens
  misc_RNA (1)...(19): siRNA sense strand
caacagccauuaugaauag

SEQ ID NO: 384988 - RNA, 19 nt, Homo sapiens
  misc_RNA (1)...(19): siRNA sense strand
caacuuggcuauggagaaa

SEQ ID NO: 384989 - RNA, 19 nt, Homo sapiens
  misc_RNA (1)...(19): siRNA sense strand
cagcauaaguccauuacaa

SEQ ID NO: 384990 - RNA, 19 nt, Homo sapiens
  misc_RNA (1)...(19): siRNA sense strand
caagcaagcugaaaauuuu

SEQ ID NO: 384991 - RNA, 19 nt, Homo sapiens
  misc_RNA (1)...(19): siRNA sense strand
gcaacagccauuaugaaua

SEQ ID NO: 384992 - RNA, 19 nt, Homo sapiens
  misc_RNA (1)...(19): siRNA sense strand
ggucauaggcgacgauuga

SEQ ID NO: 384993 - RNA, 19 nt, Homo sapiens
  misc_RNA (1)...(19): siRNA sense strand
gaaauaacucugccacaca

SEQ ID NO: 384994 - RNA, 19 nt, Homo sapiens
  misc_RNA (1)...(19): siRNA sense strand
ggaauugcaacagccauua

SEQ ID NO: 384995 - RNA, 19 nt, Homo sapiens
  misc_RNA (1)...(19): siRNA sense strand
ggagaaaguggcuaauuca

SEQ ID NO: 384996 - RNA, 19 nt, Homo sapiens
  misc_RNA (1)...(19): siRNA sense strand
caauuuaggcaucaaugua

SEQ ID NO: 384997 - RNA, 19 nt, Homo sapiens
  misc_RNA (1)...(19): siRNA sense strand
ggaagcgacuccucgaucu

SEQ ID NO: 384998 - RNA, 19 nt, Homo sapiens
  misc_RNA (1)...(19): siRNA sense strand
caacugcauccaacaauga

SEQ ID NO: 384999 - RNA, 19 nt, Homo sapiens
  misc_RNA (1)...(19): siRNA sense strand
guaacuauuuccauguguu

SEQ ID NO: 385000 - RNA, 19 nt, Homo sapiens
  misc_RNA (1)...(19): siRNA sense strand
gcaucaauguaacuauuuc

SEQ ID NO: 385001 - RNA, 19 nt, Homo sapiens
  misc_RNA (1)...(19): siRNA sense strand
cagaguggccaucuuguuu

SEQ ID NO: 385002 - RNA, 19 nt, Homo sapiens
  misc_RNA (1)...(19): siRNA sense strand
gcacaacugcauccaacaa

SEQ ID NO: 385003 - RNA, 19 nt, Homo sapiens
  misc_RNA (1)...(19): siRNA sense strand
uggagaaaguggcuaauuc

SEQ ID NO: 385004 - RNA, 19 nt, Homo sapiens
  misc_RNA (1)...(19): siRNA sense strand
gauaggaacacgcaagcaa

SEQ ID NO: 385005 - RNA, 19 nt, Homo sapiens
  misc_RNA (1)...(19): siRNA sense strand
gcuguugacugggugauga

SEQ ID NO: 385006 - RNA, 19 nt, Homo sapiens
  misc_RNA (1)...(19): siRNA sense strand
gcaagcaagcugaaaauuu

SEQ ID NO: 385007 - RNA, 19 nt, Homo sapiens
  misc_RNA (1)...(19): siRNA sense strand
ucacuucauguuagucuua

SEQ ID NO: 385008 - RNA, 19 nt, Homo sapiens
  misc_RNA (1)...(19): siRNA sense strand
gcaguucuucgcaaucgua

SEQ ID NO: 385009 - RNA, 19 nt, Homo sapiens
  misc_RNA (1)...(19): siRNA sense strand
cauguuagucuuagagaaa

SEQ ID NO: 385010 - RNA, 19 nt, Homo sapiens
  misc_RNA (1)...(19): siRNA sense strand
gaagcgacuccucgaucua

SEQ ID NO: 385011 - RNA, 19 nt, Homo sapiens
  misc_RNA (1)...(19): siRNA sense strand
augaagagcucugugaguu

SEQ ID NO: 385012 - RNA, 19 nt, Homo sapiens
  misc_RNA (1)...(19): siRNA sense strand
aggcaucaauguaacuauu

SEQ ID NO: 385013 - RNA, 19 nt, Homo sapiens
  misc_RNA (1)...(19): siRNA sense strand
gcaauuuaggcaucaaugu

SEQ ID NO: 385014 - RNA, 19 nt, Homo sapiens
  misc_RNA (1)...(19): siRNA sense strand
gcaacuuggcuauggagaa

SEQ ID NO: 385015 - RNA, 19 nt, Homo sapiens
  misc_RNA (1)...(19): siRNA sense strand
gaauugcaacagccauuau

SEQ ID NO: 385016 - RNA, 19 nt, Homo sapiens
  misc_RNA (1)...(19): siRNA sense strand
ucugugaguuuaggccuua

SEQ ID NO: 385017 - RNA, 19 nt, Homo sapiens
  misc_RNA (1)...(19): siRNA sense strand
gaguggccaucuuguuugu

SEQ ID NO: 385018 - RNA, 19 nt, Homo sapiens
  misc_RNA (1)...(19): siRNA sense strand
gggauccauucgcaacuug

SEQ ID NO: 385019 - RNA, 19 nt, Homo sapiens
  misc_RNA (1)...(19): siRNA sense strand
aaauaugcgucuucuggau

SEQ ID NO: 385020 - RNA, 19 nt, Homo sapiens
  misc_RNA (1)...(19): siRNA sense strand
caucagcauaaguccauua

SEQ ID NO: 385021 - RNA, 19 nt, Homo sapiens
  misc_RNA (1)...(19): siRNA sense strand
ugaagagcucugugaguuu

SEQ ID NO: 385022 - RNA, 19 nt, Homo sapiens
  misc_RNA (1)...(19): siRNA sense strand
gcaaggcucucuggaugcu

SEQ ID NO: 385023 - RNA, 19 nt, Homo sapiens
  misc_RNA (1)...(19): siRNA sense strand
acaacugcauccaacaaug

SEQ ID NO: 385024 - RNA, 19 nt, Homo sapiens
  misc_RNA (1)...(19): siRNA sense strand
acagggagaggauauaguu

SEQ ID NO: 385025 - RNA, 19 nt, Homo sapiens
  misc_RNA (1)...(19): siRNA sense strand
cugcuuugacuauguguua

SEQ ID NO: 385026 - RNA, 19 nt, Homo sapiens
  misc_RNA (1)...(19): siRNA sense strand
ggcaucaauguaacuauuu

SEQ ID NO: 385027 - RNA, 19 nt, Homo sapiens
  misc_RNA (1)...(19): siRNA sense strand
uagcaacugucgcccaaag

SEQ ID NO: 385028 - RNA, 19 nt, Homo sapiens
  misc_RNA (1)...(19): siRNA sense strand
ccaaagcucacauguuguc

SEQ ID NO: 385029 - RNA, 19 nt, Homo sapiens
  misc_RNA (1)...(19): siRNA sense strand
uaacuauuuccauguguug

SEQ ID NO: 385030 - RNA, 19 nt, Homo sapiens
  misc_RNA (1)...(19): siRNA sense strand
gcccuggugcuuccuguaa

SEQ ID NO: 385031 - RNA, 19 nt, Homo sapiens
  misc_RNA (1)...(19): siRNA sense strand
gcuacagacauuaaucuuc

SEQ ID NO: 385032 - RNA, 19 nt, Homo sapiens
  misc_RNA (1)...(19): siRNA sense strand
guggccaucuuguuuguag

SEQ ID NO: 385033 - RNA, 19 nt, Homo sapiens
  misc_RNA (1)...(19): siRNA sense strand
aagcucacauguuguccaa

SEQ ID NO: 385034 - RNA, 19 nt, Homo sapiens
  misc_RNA (1)...(19): siRNA sense strand
uggcuuucacuucauguua

SEQ ID NO: 385035 - RNA, 19 nt, Homo sapiens
  misc_RNA (1)...(19): siRNA sense strand
gcaguccuguuuuggcuuu

SEQ ID NO: 385036 - RNA, 19 nt, Homo sapiens
  misc_RNA (1)...(19): siRNA sense strand
guggcuaauucaguacuuu

SEQ ID NO: 385037 - RNA, 19 nt, Homo sapiens
  misc_RNA (1)...(19): siRNA sense strand
ggcuuucacuucauguuag

SEQ ID NO: 385038 - RNA, 19 nt, Homo sapiens
  misc_RNA (1)...(19): siRNA sense strand
cauuaugaauagcgacugu

SEQ ID NO: 385039 - RNA, 19 nt, Homo sapiens
  misc_RNA (1)...(19): siRNA sense strand
cauaggcgacgauugacuu

SEQ ID NO: 385040 - RNA, 19 nt, Homo sapiens
  misc_RNA (1)...(19): siRNA sense strand
gcaaucguacagcugauag

SEQ ID NO: 385041 - RNA, 19 nt, Homo sapiens
  misc_RNA (1)...(19): siRNA sense strand
ucauguuagucuuagagaa

SEQ ID NO: 385042 - RNA, 19 nt, Homo sapiens
  misc_RNA (1)...(19): siRNA sense strand
ucuucuggaugugaaauaa

SEQ ID NO: 385043 - RNA, 19 nt, Homo sapiens
  misc_RNA (1)...(19): siRNA sense strand
acuccucgaucuauucaug

SEQ ID NO: 385044 - RNA, 19 nt, Homo sapiens
  misc_RNA (1)...(19): siRNA sense strand
ugagcuaaauggucauagg

SEQ ID NO: 385045 - RNA, 19 nt, Homo sapiens
  misc_RNA (1)...(19): siRNA sense strand
ugaugaugcaguccuguuu

SEQ ID NO: 385046 - RNA, 19 nt, Homo sapiens
  misc_RNA (1)...(19): siRNA sense strand
ugucagaguggccaucuug

SEQ ID NO: 385047 - RNA, 19 nt, Homo sapiens
  misc_RNA (1)...(19): siRNA sense strand
ucagaguggccaucuuguu

SEQ ID NO: 385048 - RNA, 19 nt, Homo sapiens
  misc_RNA (1)...(19): siRNA sense strand
agaaaguggcuaauucagu

SEQ ID NO: 385049 - RNA, 19 nt, Homo sapiens
  misc_RNA (1)...(19): siRNA sense strand
guaaauggcaaggcucucu

SEQ ID NO: 385050 - RNA, 19 nt, Homo sapiens
  misc_RNA (1)...(19): siRNA sense strand
cagcaguucuucgcaaucg

SEQ ID NO: 385051 - RNA, 19 nt, Homo sapiens
  misc_RNA (1)...(19): siRNA sense strand
caucuuguuuguagcaacu

SEQ ID NO: 385052 - RNA, 19 nt, Homo sapiens
  misc_RNA (1)...(19): siRNA sense strand
uaaucuuccuggugcuguu

SEQ ID NO: 385053 - RNA, 19 nt, Homo sapiens
  misc_RNA (1)...(19): siRNA sense strand
ccuggugcuuccuguaaau

SEQ ID NO: 385054 - RNA, 19 nt, Homo sapiens
  misc_RNA (1)...(19): siRNA sense strand
uuaccgacuugagcuaaau

SEQ ID NO: 385055 - RNA, 19 nt, Homo sapiens
  misc_RNA (1)...(19): siRNA sense strand
gcaucagcauaaguccauu

SEQ ID NO: 385056 - RNA, 19 nt, Homo sapiens
  misc_RNA (1)...(19): siRNA sense strand
ugcaacagccauuaugaau

SEQ ID NO: 385057 - RNA, 19 nt, Homo sapiens
  misc_RNA (1)...(19): siRNA sense strand
gagaaaguggcuaauucag

SEQ ID NO: 385058 - RNA, 19 nt, Homo sapiens
  misc_RNA (1)...(19): siRNA sense strand
cuuaccgacuugagcuaaa

SEQ ID NO: 385059 - RNA, 19 nt, Homo sapiens
  misc_RNA (1)...(19): siRNA sense strand
gcuuucacuucauguuagu

SEQ ID NO: 385060 - RNA, 19 nt, Homo sapiens
  misc_RNA (1)...(19): siRNA sense strand
gcaacugucgcccaaagcu

SEQ ID NO: 385061 - RNA, 19 nt, Homo sapiens
  misc_RNA (1)...(19): siRNA sense strand
gaacugcgauugaauaaca

SEQ ID NO: 385062 - RNA, 19 nt, Homo sapiens
  misc_RNA (1)...(19): siRNA sense strand
gaaaccagcugcacauguu

SEQ ID NO: 385063 - RNA, 19 nt, Homo sapiens
  misc_RNA (1)...(19): siRNA sense strand
ggaggaaguucaccuuuga

SEQ ID NO: 385064 - RNA, 19 nt, Homo sapiens
  misc_RNA (1)...(19): siRNA sense strand
ucacagaacucuauuugga

SEQ ID NO: 385065 - RNA, 19 nt, Homo sapiens
  misc_RNA (1)...(19): siRNA sense strand
gaucaacgaugggcaauuc

SEQ ID NO: 385066 - RNA, 19 nt, Homo sapiens
  misc_RNA (1)...(19): siRNA sense strand
ggauagaccugagcaacaa

SEQ ID NO: 385067 - RNA, 19 nt, Homo sapiens
  misc_RNA (1)...(19): siRNA sense strand
gcccagaacccuuucauuu

SEQ ID NO: 385068 - RNA, 19 nt, Homo sapiens
  misc_RNA (1)...(19): siRNA sense strand
gugaaucucuccauugaug

SEQ ID NO: 385069 - RNA, 19 nt, Homo sapiens
  misc_RNA (1)...(19): siRNA sense strand
caacaaggugucagaaauu

SEQ ID NO: 385070 - RNA, 19 nt, Homo sapiens
  misc_RNA (1)...(19): siRNA sense strand
gaucaugccugugccaaug

SEQ ID NO: 385071 - RNA, 19 nt, Homo sapiens
  misc_RNA (1)...(19): siRNA sense strand
ggugacaacugcagugaga

SEQ ID NO: 385072 - RNA, 19 nt, Homo sapiens
  misc_RNA (1)...(19): siRNA sense strand
caaccaggcuuugucaaga

SEQ ID NO: 385073 - RNA, 19 nt, Homo sapiens
  misc_RNA (1)...(19): siRNA sense strand
ccaagggcauucccaagaa

SEQ ID NO: 385074 - RNA, 19 nt, Homo sapiens
  misc_RNA (1)...(19): siRNA sense strand
gaccaccgcugccagaaug

SEQ ID NO: 385075 - RNA, 19 nt, Homo sapiens
  misc_RNA (1)...(19): siRNA sense strand
gcagugagaaccaggauga

SEQ ID NO: 385076 - RNA, 19 nt, Homo sapiens
  misc_RNA (1)...(19): siRNA sense strand
acaaugggauccuucugua

SEQ ID NO: 385077 - RNA, 19 nt, Homo sapiens
  misc_RNA (1)...(19): siRNA sense strand
ucacucggauccauaagaa

SEQ ID NO: 385078 - RNA, 19 nt, Homo sapiens
  misc_RNA (1)...(19): siRNA sense strand
caacaagaucaguuccuua

SEQ ID NO: 385079 - RNA, 19 nt, Homo sapiens
  misc_RNA (1)...(19): siRNA sense strand
ggaggccacugggauguuu

SEQ ID NO: 385080 - RNA, 19 nt, Homo sapiens
  misc_RNA (1)...(19): siRNA sense strand
gugagugcaugccagguua

SEQ ID NO: 385081 - RNA, 19 nt, Homo sapiens
  misc_RNA (1)...(19): siRNA sense strand
agacuggacuugagugaga

SEQ ID NO: 385082 - RNA, 19 nt, Homo sapiens
  misc_RNA (1)...(19): siRNA sense strand
acaacaaggugucagaaau

SEQ ID NO: 385083 - RNA, 19 nt, Homo sapiens
  misc_RNA (1)...(19): siRNA sense strand
ugaacucgcugguccucua

SEQ ID NO: 385084 - RNA, 19 nt, Homo sapiens
  misc_RNA (1)...(19): siRNA sense strand
acaacgagcugcaggacuu

SEQ ID NO: 385085 - RNA, 19 nt, Homo sapiens
  misc_RNA (1)...(19): siRNA sense strand
gaaugucacagaacucuau

SEQ ID NO: 385086 - RNA, 19 nt, Homo sapiens
  misc_RNA (1)...(19): siRNA sense strand
gcacuccaaccaccuguuu

SEQ ID NO: 385087 - RNA, 19 nt, Homo sapiens
  misc_RNA (1)...(19): siRNA sense strand
caacaucacucggauccau

SEQ ID NO: 385088 - RNA, 19 nt, Homo sapiens
  misc_RNA (1)...(19): siRNA sense strand
ccaacaagaucaacugcau

SEQ ID NO: 385089 - RNA, 19 nt, Homo sapiens
  misc_RNA (1)...(19): siRNA sense strand
gaacaccgagcgccuggaa

SEQ ID NO: 385090 - RNA, 19 nt, Homo sapiens
  misc_RNA (1)...(19): siRNA sense strand
ggacaacgaccacauugca

SEQ ID NO: 385091 - RNA, 19 nt, Homo sapiens
  misc_RNA (1)...(19): siRNA sense strand
ggugaagacuggcuacaag

SEQ ID NO: 385092 - RNA, 19 nt, Homo sapiens
  misc_RNA (1)...(19): siRNA sense strand
ccaaagagcaguacuucau

SEQ ID NO: 385093 - RNA, 19 nt, Homo sapiens
  misc_RNA (1)...(19): siRNA sense strand
ucacugcucucccuguaug

SEQ ID NO: 385094 - RNA, 19 nt, Homo sapiens
  misc_RNA (1)...(19): siRNA sense strand
caagaucaguuccuuaagc

SEQ ID NO: 385095 - RNA, 19 nt, Homo sapiens
  misc_RNA (1)...(19): siRNA sense strand
ccaagaaugucacagaacu

SEQ ID NO: 385096 - RNA, 19 nt, Homo sapiens
  misc_RNA (1)...(19): siRNA sense strand
ccagaacccuuucauuugc

SEQ ID NO: 385097 - RNA, 19 nt, Homo sapiens
  misc_RNA (1)...(19): siRNA sense strand
caaagagcaguacuucauu

SEQ ID NO: 385098 - RNA, 19 nt, Homo sapiens
  misc_RNA (1)...(19): siRNA sense strand
gugagcagcugguggacuu

SEQ ID NO: 385099 - RNA, 19 nt, Homo sapiens
  misc_RNA (1)...(19): siRNA sense strand
gccugaagcucaccaagau

SEQ ID NO: 385100 - RNA, 19 nt, Homo sapiens
  misc_RNA (1)...(19): siRNA sense strand
uggaugaagucaacagcua

SEQ ID NO: 385101 - RNA, 19 nt, Homo sapiens
  misc_RNA (1)...(19): siRNA sense strand
gaagacuggcuacaaggaa

SEQ ID NO: 385102 - RNA, 19 nt, Homo sapiens
  misc_RNA (1)...(19): siRNA sense strand
aaagagcaguacuucauuc

SEQ ID NO: 385103 - RNA, 19 nt, Homo sapiens
  misc_RNA (1)...(19): siRNA sense strand
gcaacaacaagaucaguuc

SEQ ID NO: 385104 - RNA, 19 nt, Homo sapiens
  misc_RNA (1)...(19): siRNA sense strand
gaucugaacccaugucaac

SEQ ID NO: 385105 - RNA, 19 nt, Homo sapiens
  misc_RNA (1)...(19): siRNA sense strand
guguccagcuucaaccaua

SEQ ID NO: 385106 - RNA, 19 nt, Homo sapiens
  misc_RNA (1)...(19): siRNA sense strand
cggaggaaguucaccuuug

SEQ ID NO: 385107 - RNA, 19 nt, Homo sapiens
  misc_RNA (1)...(19): siRNA sense strand
gcccguggaugucaacuca

SEQ ID NO: 385108 - RNA, 19 nt, Homo sapiens
  misc_RNA (1)...(19): siRNA sense strand
ggacugagugccagaaugg

SEQ ID NO: 385109 - RNA, 19 nt, Homo sapiens
  misc_RNA (1)...(19): siRNA sense strand
gaucaguuccuuaagcaau

SEQ ID NO: 385110 - RNA, 19 nt, Homo sapiens
  misc_RNA (1)...(19): siRNA sense strand
caaggugucagaaauugaa

SEQ ID NO: 385111 - RNA, 19 nt, Homo sapiens
  misc_RNA (1)...(19): siRNA sense strand
gcaacaacaaggugucaga

SEQ ID NO: 385112 - RNA, 19 nt, Homo sapiens
  misc_RNA (1)...(19): siRNA sense strand
gcugugcccucugcgcaua

SEQ ID NO: 385113 - RNA, 19 nt, Homo sapiens
  misc_RNA (1)...(19): siRNA sense strand
cugcaggacuucaccaaga

SEQ ID NO: 385114 - RNA, 19 nt, Homo sapiens
  misc_RNA (1)...(19): siRNA sense strand
uggugaaucucuccauuga

SEQ ID NO: 385115 - RNA, 19 nt, Homo sapiens
  misc_RNA (1)...(19): siRNA sense strand
gaccugagcaacaacaaga

SEQ ID NO: 385116 - RNA, 19 nt, Homo sapiens
  misc_RNA (1)...(19): siRNA sense strand
ggaacucaauggcaacaac

SEQ ID NO: 385117 - RNA, 19 nt, Homo sapiens
  misc_RNA (1)...(19): siRNA sense strand
gcagcgaugggaccucuuu

SEQ ID NO: 385118 - RNA, 19 nt, Homo sapiens
  misc_RNA (1)...(19): siRNA sense strand
uggcagagguccagaagag

SEQ ID NO: 385119 - RNA, 19 nt, Homo sapiens
  misc_RNA (1)...(19): siRNA sense strand
aaacuuacacaucugaaga

SEQ ID NO: 385120 - RNA, 19 nt, Homo sapiens
  misc_RNA (1)...(19): siRNA sense strand
gggcagaucaagagcaaga

SEQ ID NO: 385121 - RNA, 19 nt, Homo sapiens
  misc_RNA (1)...(19): siRNA sense strand
gagcugaacggcaucaagu

SEQ ID NO: 385122 - RNA, 19 nt, Homo sapiens
  misc_RNA (1)...(19): siRNA sense strand
gaucagcugcauugaggaa

SEQ ID NO: 385123 - RNA, 19 nt, Homo sapiens
  misc_RNA (1)...(19): siRNA sense strand
cuauaagggucgagacugu

SEQ ID NO: 385124 - RNA, 19 nt, Homo sapiens
  misc_RNA (1)...(19): siRNA sense strand
ucaccacgccugccaagaa

SEQ ID NO: 385125 - RNA, 19 nt, Homo sapiens
  misc_RNA (1)...(19): siRNA sense strand
gaaccgggcauugcucguu

SEQ ID NO: 385126 - RNA, 19 nt, Homo sapiens
  misc_RNA (1)...(19): siRNA sense strand
cagaacugcgauugaauaa

SEQ ID NO: 385127 - RNA, 19 nt, Homo sapiens
  misc_RNA (1)...(19): siRNA sense strand
aacaagaucaguuccuuaa

SEQ ID NO: 385128 - RNA, 19 nt, Homo sapiens
  misc_RNA (1)...(19): siRNA sense strand
acagaaagcuacggaggau

SEQ ID NO: 385129 - RNA, 19 nt, Homo sapiens
  misc_RNA (1)...(19): siRNA sense strand
ucaccaagacgcagaugaa

SEQ ID NO: 385130 - RNA, 19 nt, Homo sapiens
  misc_RNA (1)...(19): siRNA sense strand
cgaaaccuguacaucaaca

SEQ ID NO: 385131 - RNA, 19 nt, Homo sapiens
  misc_RNA (1)...(19): siRNA sense strand
aaaucaaucugagcaacaa

SEQ ID NO: 385132 - RNA, 19 nt, Homo sapiens
  misc_RNA (1)...(19): siRNA sense strand
ucucacugcucucccugua

SEQ ID NO: 385133 - RNA, 19 nt, Homo sapiens
  misc_RNA (1)...(19): siRNA sense strand
uccgaaaccuguacaucaa

SEQ ID NO: 385134 - RNA, 19 nt, Homo sapiens
  misc_RNA (1)...(19): siRNA sense strand
gcgaggcgccacucuaugu

SEQ ID NO: 385135 - RNA, 19 nt, Homo sapiens
  misc_RNA (1)...(19): siRNA sense strand
gaacucaauggcaacaaca

SEQ ID NO: 385136 - RNA, 19 nt, Homo sapiens
  misc_RNA (1)...(19): siRNA sense strand
gaauaacaaugagauuucc

SEQ ID NO: 385137 - RNA, 19 nt, Homo sapiens
  misc_RNA (1)...(19): siRNA sense strand
acaacaagaucaguuccuu

SEQ ID NO: 385138 - RNA, 19 nt, Homo sapiens
  misc_RNA (1)...(19): siRNA sense strand
gacaaugggauccuucugu

SEQ ID NO: 385139 - RNA, 19 nt, Homo sapiens
  misc_RNA (1)...(19): siRNA sense strand
gagaaguugcucaguguca

SEQ ID NO: 385140 - RNA, 19 nt, Homo sapiens
  misc_RNA (1)...(19): siRNA sense strand
gggacugagugccagaaug

SEQ ID NO: 385141 - RNA, 19 nt, Homo sapiens
  misc_RNA (1)...(19): siRNA sense strand
gcaauuccuccuucaccaa

SEQ ID NO: 385142 - RNA, 19 nt, Homo sapiens
  misc_RNA (1)...(19): siRNA sense strand
cccagaacccuuucauuug

SEQ ID NO: 385143 - RNA, 19 nt, Homo sapiens
  misc_RNA (1)...(19): siRNA sense strand
aacaaggugucagaaauug

SEQ ID NO: 385144 - RNA, 19 nt, Homo sapiens
  misc_RNA (1)...(19): siRNA sense strand
acaaugagauuuccauccu

SEQ ID NO: 385145 - RNA, 19 nt, Homo sapiens
  misc_RNA (1)...(19): siRNA sense strand
caacgaccacauugcaguu

SEQ ID NO: 385146 - RNA, 19 nt, Homo sapiens
  misc_RNA (1)...(19): siRNA sense strand
caacaacaaggugucagaa

SEQ ID NO: 385147 - RNA, 19 nt, Homo sapiens
  misc_RNA (1)...(19): siRNA sense strand
ccacaccguugagcugguu

SEQ ID NO: 385148 - RNA, 19 nt, Homo sapiens
  misc_RNA (1)...(19): siRNA sense strand
gugcugacccugaacaaca

SEQ ID NO: 385149 - RNA, 19 nt, Homo sapiens
  misc_RNA (1)...(19): siRNA sense strand
cagcgaggcgccacucuau

SEQ ID NO: 385150 - RNA, 19 nt, Homo sapiens
  misc_RNA (1)...(19): siRNA sense strand
gugcugagacgaucaacga

SEQ ID NO: 385151 - RNA, 19 nt, Homo sapiens
  misc_RNA (1)...(19): siRNA sense strand
ucacugaccugcaaaacug

SEQ ID NO: 385152 - RNA, 19 nt, Homo sapiens
  misc_RNA (1)...(19): siRNA sense strand
acacuuaccugcaguucac

SEQ ID NO: 385153 - RNA, 19 nt, Homo sapiens
  misc_RNA (1)...(19): siRNA sense strand
gaaguuugaaugccaaggu

SEQ ID NO: 385154 - RNA, 19 nt, Homo sapiens
  misc_RNA (1)...(19): siRNA sense strand
ugagccagcugaccacucu

SEQ ID NO: 385155 - RNA, 19 nt, Homo sapiens
  misc_RNA (1)...(19): siRNA sense strand
ucccaagaaugucacagaa

SEQ ID NO: 385156 - RNA, 19 nt, Homo sapiens
  misc_RNA (1)...(19): siRNA sense strand
gguccucuauggaaacaag

SEQ ID NO: 385157 - RNA, 19 nt, Homo sapiens
  misc_RNA (1)...(19): siRNA sense strand
gaacucgcugguccucuau

SEQ ID NO: 385158 - RNA, 19 nt, Homo sapiens
  misc_RNA (1)...(19): siRNA sense strand
aaaccagcugcacauguua

SEQ ID NO: 385159 - RNA, 19 nt, Homo sapiens
  misc_RNA (1)...(19): siRNA sense strand
gcaaacauuacacgcucaa

SEQ ID NO: 385160 - RNA, 19 nt, Homo sapiens
  misc_RNA (1)...(19): siRNA sense strand
acauugcaguugagcugua

SEQ ID NO: 385161 - RNA, 19 nt, Homo sapiens
  misc_RNA (1)...(19): siRNA sense strand
gaacagaacuccaucaaag

SEQ ID NO: 385162 - RNA, 19 nt, Homo sapiens
  misc_RNA (1)...(19): siRNA sense strand
gaaauaauaucaccaggau

SEQ ID NO: 385163 - RNA, 19 nt, Homo sapiens
  misc_RNA (1)...(19): siRNA sense strand
gaauagacaucagcaagaa

SEQ ID NO: 385164 - RNA, 19 nt, Homo sapiens
  misc_RNA (1)...(19): siRNA sense strand
ucacaucgcugguccugua

SEQ ID NO: 385165 - RNA, 19 nt, Homo sapiens
  misc_RNA (1)...(19): siRNA sense strand
gcgagaagcucaucacugu

SEQ ID NO: 385166 - RNA, 19 nt, Homo sapiens
  misc_RNA (1)...(19): siRNA sense strand
ccagaaagguuaugcauca

SEQ ID NO: 385167 - RNA, 19 nt, Homo sapiens
  misc_RNA (1)...(19): siRNA sense strand
gcaaguccuuccagaauug

SEQ ID NO: 385168 - RNA, 19 nt, Homo sapiens
  misc_RNA (1)...(19): siRNA sense strand
ggagauuccugccaacuug

SEQ ID NO: 385169 - RNA, 19 nt, Homo sapiens
  misc_RNA (1)...(19): siRNA sense strand
gcucaucacugucaacuuc

SEQ ID NO: 385170 - RNA, 19 nt, Homo sapiens
  misc_RNA (1)...(19): siRNA sense strand
caagccaccucccugaaua

SEQ ID NO: 385171 - RNA, 19 nt, Homo sapiens
  misc_RNA (1)...(19): siRNA sense strand
gaaauacgccuagaacaga

SEQ ID NO: 385172 - RNA, 19 nt, Homo sapiens
  misc_RNA (1)...(19): siRNA sense strand
gaaagguuaugcaucaugu

SEQ ID NO: 385173 - RNA, 19 nt, Homo sapiens
  misc_RNA (1)...(19): siRNA sense strand
ggaacaagaucaccgagau

SEQ ID NO: 385174 - RNA, 19 nt, Homo sapiens
  misc_RNA (1)...(19): siRNA sense strand
ugaaguggcuggccgacua

SEQ ID NO: 385175 - RNA, 19 nt, Homo sapiens
  misc_RNA (1)...(19): siRNA sense strand
gaacaagaauaagcugcaa

SEQ ID NO: 385176 - RNA, 19 nt, Homo sapiens
  misc_RNA (1)...(19): siRNA sense strand
gaccuggacagaaauaaua

SEQ ID NO: 385177 - RNA, 19 nt, Homo sapiens
  misc_RNA (1)...(19): siRNA sense strand
ccauaaaccuccuguccaa

SEQ ID NO: 385178 - RNA, 19 nt, Homo sapiens
  misc_RNA (1)...(19): siRNA sense strand
gaaagggcuugauggagau

SEQ ID NO: 385179 - RNA, 19 nt, Homo sapiens
  misc_RNA (1)...(19): siRNA sense strand
uaacagccgugcccagaga

SEQ ID NO: 385180 - RNA, 19 nt, Homo sapiens
  misc_RNA (1)...(19): siRNA sense strand
ggaaggaaaccaccuaaca

SEQ ID NO: 385181 - RNA, 19 nt, Homo sapiens
  misc_RNA (1)...(19): siRNA sense strand
acaagaaacugaagcgaau

SEQ ID NO: 385182 - RNA, 19 nt, Homo sapiens
  misc_RNA (1)...(19): siRNA sense strand
ucacaucucuuucccaucu

SEQ ID NO: 385183 - RNA, 19 nt, Homo sapiens
  misc_RNA (1)...(19): siRNA sense strand
ggacuucgcugggcucaag

SEQ ID NO: 385184 - RNA, 19 nt, Homo sapiens
  misc_RNA (1)...(19): siRNA sense strand
uagaagagguggagagaca

SEQ ID NO: 385185 - RNA, 19 nt, Homo sapiens
  misc_RNA (1)...(19): siRNA sense strand
gaacaagaucaccgagauu

SEQ ID NO: 385186 - RNA, 19 nt, Homo sapiens
  misc_RNA (1)...(19): siRNA sense strand
caaagacuccuacguggaa

SEQ ID NO: 385187 - RNA, 19 nt, Homo sapiens
  misc_RNA (1)...(19): siRNA sense strand
agagggagcuuucgaugga

SEQ ID NO: 385188 - RNA, 19 nt, Homo sapiens
  misc_RNA (1)...(19): siRNA sense strand
gcauggcuccugugcauuu

SEQ ID NO: 385189 - RNA, 19 nt, Homo sapiens
  misc_RNA (1)...(19): siRNA sense strand
ggagggcaucgucgaaaua

SEQ ID NO: 385190 - RNA, 19 nt, Homo sapiens
  misc_RNA (1)...(19): siRNA sense strand
acaacgagcugcaggacuu

SEQ ID NO: 385191 - RNA, 19 nt, Homo sapiens
  misc_RNA (1)...(19): siRNA sense strand
cgacugcgccugaacaaga

SEQ ID NO: 385192 - RNA, 19 nt, Homo sapiens
  misc_RNA (1)...(19): siRNA sense strand
cgacagcgacggacaguug

SEQ ID NO: 385193 - RNA, 19 nt, Homo sapiens
  misc_RNA (1)...(19): siRNA sense strand
ucaacuugcucucccugua

SEQ ID NO: 385194 - RNA, 19 nt, Homo sapiens
  misc_RNA (1)...(19): siRNA sense strand
caaccacaguguacagugu

SEQ ID NO: 385195 - RNA, 19 nt, Homo sapiens
  misc_RNA (1)...(19): siRNA sense strand
gagaagcucaucacuguca

SEQ ID NO: 385196 - RNA, 19 nt, Homo sapiens
  misc_RNA (1)...(19): siRNA sense strand
gcucaggcuccgaggauua

SEQ ID NO: 385197 - RNA, 19 nt, Homo sapiens
  misc_RNA (1)...(19): siRNA sense strand
agacuagauuugagugaaa

SEQ ID NO: 385198 - RNA, 19 nt, Homo sapiens
  misc_RNA (1)...(19): siRNA sense strand
gacaaaggaacuccaaaga

SEQ ID NO: 385199 - RNA, 19 nt, Homo sapiens
  misc_RNA (1)...(19): siRNA sense strand
ggacaaaggaacuccaaag

SEQ ID NO: 385200 - RNA, 19 nt, Homo sapiens
  misc_RNA (1)...(19): siRNA sense strand
gccuugaccuggacagaaa

SEQ ID NO: 385201 - RNA, 19 nt, Homo sapiens
  misc_RNA (1)...(19): siRNA sense strand
gaucaacaacuacgugugu

SEQ ID NO: 385202 - RNA, 19 nt, Homo sapiens
  misc_RNA (1)...(19): siRNA sense strand
ccaacccacuccacuguga

SEQ ID NO: 385203 - RNA, 19 nt, Homo sapiens
  misc_RNA (1)...(19): siRNA sense strand
gaucaacccagaugacugu

SEQ ID NO: 385204 - RNA, 19 nt, Homo sapiens
  misc_RNA (1)...(19): siRNA sense strand
ccagaggcaugcccaagga

SEQ ID NO: 385205 - RNA, 19 nt, Homo sapiens
  misc_RNA (1)...(19): siRNA sense strand
gcucagccuucaaguguca

SEQ ID NO: 385206 - RNA, 19 nt, Homo sapiens
  misc_RNA (1)...(19): siRNA sense strand
ucaacgaccucacaucucu

SEQ ID NO: 385207 - RNA, 19 nt, Homo sapiens
  misc_RNA (1)...(19): siRNA sense strand
gaaugacaaugagguaucu

SEQ ID NO: 385208 - RNA, 19 nt, Homo sapiens
  misc_RNA (1)...(19): siRNA sense strand
gaaccuaguaguggacaaa

SEQ ID NO: 385209 - RNA, 19 nt, Homo sapiens
  misc_RNA (1)...(19): siRNA sense strand
uaacuacacaggugagcua

SEQ ID NO: 385210 - RNA, 19 nt, Homo sapiens
  misc_RNA (1)...(19): siRNA sense strand
gcaaagggccaguggacau

SEQ ID NO: 385211 - RNA, 19 nt, Homo sapiens
  misc_RNA (1)...(19): siRNA sense strand
cacaucagcugcauugaag

SEQ ID NO: 385212 - RNA, 19 nt, Homo sapiens
  misc_RNA (1)...(19): siRNA sense strand
gaaggaaaccaccuaacag

SEQ ID NO: 385213 - RNA, 19 nt, Homo sapiens
  misc_RNA (1)...(19): siRNA sense strand
ucaaggagauucccaucca

SEQ ID NO: 385214 - RNA, 19 nt, Homo sapiens
  misc_RNA (1)...(19): siRNA sense strand
ggcaagugguugaggaaga

SEQ ID NO: 385215 - RNA, 19 nt, Homo sapiens
  misc_RNA (1)...(19): siRNA sense strand
acaacaagcugcagaccau

SEQ ID NO: 385216 - RNA, 19 nt, Homo sapiens
  misc_RNA (1)...(19): siRNA sense strand
ccacaucagcugcauugaa

SEQ ID NO: 385217 - RNA, 19 nt, Homo sapiens
  misc_RNA (1)...(19): siRNA sense strand
ucucaccucuccacucuga

SEQ ID NO: 385218 - RNA, 19 nt, Homo sapiens
  misc_RNA (1)...(19): siRNA sense strand
uggcggaugugcagaagaa

SEQ ID NO: 385219 - RNA, 19 nt, Homo sapiens
  misc_RNA (1)...(19): siRNA sense strand
gaggaaagggcuugaugga

SEQ ID NO: 385220 - RNA, 19 nt, Homo sapiens
  misc_RNA (1)...(19): siRNA sense strand
gcuccucguuuguagaaga

SEQ ID NO: 385221 - RNA, 19 nt, Homo sapiens
  misc_RNA (1)...(19): siRNA sense strand
cggcauccuucucuacaaa

SEQ ID NO: 385222 - RNA, 19 nt, Homo sapiens
  misc_RNA (1)...(19): siRNA sense strand
ccacucugauccugagcua

SEQ ID NO: 385223 - RNA, 19 nt, Homo sapiens
  misc_RNA (1)...(19): siRNA sense strand
gcaagugguugaggaagag

SEQ ID NO: 385224 - RNA, 19 nt, Homo sapiens
  misc_RNA (1)...(19): siRNA sense strand
ucaccaggaucaccaagau

SEQ ID NO: 385225 - RNA, 19 nt, Homo sapiens
  misc_RNA (1)...(19): siRNA sense strand
cgaauagacaucagcaaga

SEQ ID NO: 385226 - RNA, 19 nt, Homo sapiens
  misc_RNA (1)...(19): siRNA sense strand
caacugggaccucauacau

SEQ ID NO: 385227 - RNA, 19 nt, Homo sapiens
  misc_RNA (1)...(19): siRNA sense strand
ccacagaugccaccaugga

SEQ ID NO: 385228 - RNA, 19 nt, Homo sapiens
  misc_RNA (1)...(19): siRNA sense strand
gcaccugccaccugaguga

SEQ ID NO: 385229 - RNA, 19 nt, Homo sapiens
  misc_RNA (1)...(19): siRNA sense strand
cauccagacacuccacuua

SEQ ID NO: 385230 - RNA, 19 nt, Homo sapiens
  misc_RNA (1)...(19): siRNA sense strand
caggagccuucacccagua

SEQ ID NO: 385231 - RNA, 19 nt, Homo sapiens
  misc_RNA (1)...(19): siRNA sense strand
ccucauacaugugcaagug

SEQ ID NO: 385232 - RNA, 19 nt, Homo sapiens
  misc_RNA (1)...(19): siRNA sense strand
aauaauaucaccaggauca

SEQ ID NO: 385233 - RNA, 19 nt, Homo sapiens
  misc_RNA (1)...(19): siRNA sense strand
guaacaauaagaucaagga

SEQ ID NO: 385234 - RNA, 19 nt, Homo sapiens
  misc_RNA (1)...(19): siRNA sense strand
cagacuagauuugagugaa

SEQ ID NO: 385235 - RNA, 19 nt, Homo sapiens
  misc_RNA (1)...(19): siRNA sense strand
aagaaugacucugccaaug

SEQ ID NO: 385236 - RNA, 19 nt, Homo sapiens
  misc_RNA (1)...(19): siRNA sense strand
ugagacugcugucccucua

SEQ ID NO: 385237 - RNA, 19 nt, Homo sapiens
  misc_RNA (1)...(19): siRNA sense strand
aaacugaagcgaauagaca

SEQ ID NO: 385238 - RNA, 19 nt, Homo sapiens
  misc_RNA (1)...(19): siRNA sense strand
uggacgggaucaacaacua

SEQ ID NO: 385239 - RNA, 19 nt, Homo sapiens
  misc_RNA (1)...(19): siRNA sense strand
gagcagugcaccuguaugg

SEQ ID NO: 385240 - RNA, 19 nt, Homo sapiens
  misc_RNA (1)...(19): siRNA sense strand
ccaccucccugaauauguc

SEQ ID NO: 385241 - RNA, 19 nt, Homo sapiens
  misc_RNA (1)...(19): siRNA sense strand
caucagcaagaaucagaua

SEQ ID NO: 385242 - RNA, 19 nt, Homo sapiens
  misc_RNA (1)...(19): siRNA sense strand
caacaacaacaacaucagu

SEQ ID NO: 385243 - RNA, 19 nt, Homo sapiens
  misc_RNA (1)...(19): siRNA sense strand
gcacugccaacaagagaau

SEQ ID NO: 385244 - RNA, 19 nt, Homo sapiens
  misc_RNA (1)...(19): siRNA sense strand
gaagcucaccagacuagau

SEQ ID NO: 385245 - RNA, 19 nt, Homo sapiens
  misc_RNA (1)...(19): siRNA sense strand
cacaaucaauggcuacaca

SEQ ID NO: 385246 - RNA, 19 nt, Homo sapiens
  misc_RNA (1)...(19): siRNA sense strand
gcaagaauaacgggacaug

SEQ ID NO: 385247 - RNA, 19 nt, Homo sapiens
  misc_RNA (1)...(19): siRNA sense strand
acaaugagguaucuguucu

SEQ ID NO: 385248 - RNA, 19 nt, Homo sapiens
  misc_RNA (1)...(19): siRNA sense strand
caacuugcucucccuguau

SEQ ID NO: 385249 - RNA, 19 nt, Homo sapiens
  misc_RNA (1)...(19): siRNA sense strand
aaauacgccuagaacagaa

SEQ ID NO: 385250 - RNA, 19 nt, Homo sapiens
  misc_RNA (1)...(19): siRNA sense strand
uggccuggcucucggauug

SEQ ID NO: 385251 - RNA, 19 nt, Homo sapiens
  misc_RNA (1)...(19): siRNA sense strand
cgaaauacgccuagaacag

SEQ ID NO: 385252 - RNA, 19 nt, Homo sapiens
  misc_RNA (1)...(19): siRNA sense strand
ucaguggacccuucuguga

SEQ ID NO: 385253 - RNA, 19 nt, Homo sapiens
  misc_RNA (1)...(19): siRNA sense strand
ccaguggacaucaacauug

SEQ ID NO: 385254 - RNA, 19 nt, Homo sapiens
  misc_RNA (1)...(19): siRNA sense strand
gacugcgccugaacaagaa

SEQ ID NO: 385255 - RNA, 19 nt, Homo sapiens
  misc_RNA (1)...(19): siRNA sense strand
gccaagggacuguuugaug

SEQ ID NO: 385256 - RNA, 19 nt, Homo sapiens
  misc_RNA (1)...(19): siRNA sense strand
ccgacuaccuccaggacaa

SEQ ID NO: 385257 - RNA, 19 nt, Homo sapiens
  misc_RNA (1)...(19): siRNA sense strand
caacuacguguguaucugu

SEQ ID NO: 385258 - RNA, 19 nt, Homo sapiens
  misc_RNA (1)...(19): siRNA sense strand
ugcaaguccuuccagaauu

SEQ ID NO: 385259 - RNA, 19 nt, Homo sapiens
  misc_RNA (1)...(19): siRNA sense strand
caguggacaucaacauugu

SEQ ID NO: 385260 - RNA, 19 nt, Homo sapiens
  misc_RNA (1)...(19): siRNA sense strand
ggacugcuccaaccagaag

SEQ ID NO: 385261 - RNA, 19 nt, Homo sapiens
  misc_RNA (1)...(19): siRNA sense strand
gcaaagaccuauacaaauc

SEQ ID NO: 385262 - RNA, 19 nt, Homo sapiens
  misc_RNA (1)...(19): siRNA sense strand
ggaagaaaccauuacaaua

SEQ ID NO: 385263 - RNA, 19 nt, Homo sapiens
  misc_RNA (1)...(19): siRNA sense strand
gaacaugucauugucauua

SEQ ID NO: 385264 - RNA, 19 nt, Homo sapiens
  misc_RNA (1)...(19): siRNA sense strand
gaagaaaccauuacaauag

SEQ ID NO: 385265 - RNA, 19 nt, Homo sapiens
  misc_RNA (1)...(19): siRNA sense strand
gaacacaaaccauaccaaa

SEQ ID NO: 385266 - RNA, 19 nt, Homo sapiens
  misc_RNA (1)...(19): siRNA sense strand
gagcuuauccuaucuguga

SEQ ID NO: 385267 - RNA, 19 nt, Homo sapiens
  misc_RNA (1)...(19): siRNA sense strand
caugaugacugcuuggaua

SEQ ID NO: 385268 - RNA, 19 nt, Homo sapiens
  misc_RNA (1)...(19): siRNA sense strand
auacugaccuggugacuuu

SEQ ID NO: 385269 - RNA, 19 nt, Homo sapiens
  misc_RNA (1)...(19): siRNA sense strand
cagcagacaugauugaaga

SEQ ID NO: 385270 - RNA, 19 nt, Homo sapiens
  misc_RNA (1)...(19): siRNA sense strand
cagcaaagaccuauacaaa

SEQ ID NO: 385271 - RNA, 19 nt, Homo sapiens
  misc_RNA (1)...(19): siRNA sense strand
gagcagaacuaucauugag

SEQ ID NO: 385272 - RNA, 19 nt, Homo sapiens
  misc_RNA (1)...(19): siRNA sense strand
acaaagaacacaaaccaua

SEQ ID NO: 385273 - RNA, 19 nt, Homo sapiens
  misc_RNA (1)...(19): siRNA sense strand
ccagaugggugacgaacaa

SEQ ID NO: 385274 - RNA, 19 nt, Homo sapiens
  misc_RNA (1)...(19): siRNA sense strand
ggagucacaugccauagga

SEQ ID NO: 385275 - RNA, 19 nt, Homo sapiens
  misc_RNA (1)...(19): siRNA sense strand
ccagauugguggugaauuc

SEQ ID NO: 385276 - RNA, 19 nt, Homo sapiens
  misc_RNA (1)...(19): siRNA sense strand
cuuguacccuguuauauuu

SEQ ID NO: 385277 - RNA, 19 nt, Homo sapiens
  misc_RNA (1)...(19): siRNA sense strand
uagaggcuauggaaaguuu

SEQ ID NO: 385278 - RNA, 19 nt, Homo sapiens
  misc_RNA (1)...(19): siRNA sense strand
gcacaaagaacacaaacca

SEQ ID NO: 385279 - RNA, 19 nt, Homo sapiens
  misc_RNA (1)...(19): siRNA sense strand
gaucgagccugcagacaag

SEQ ID NO: 385280 - RNA, 19 nt, Homo sapiens
  misc_RNA (1)...(19): siRNA sense strand
gauuugagcagaacuauca

SEQ ID NO: 385281 - RNA, 19 nt, Homo sapiens
  misc_RNA (1)...(19): siRNA sense strand
cagcaacacuccugaccaa

SEQ ID NO: 385282 - RNA, 19 nt, Homo sapiens
  misc_RNA (1)...(19): siRNA sense strand
caacugagggauucaauuc

SEQ ID NO: 385283 - RNA, 19 nt, Homo sapiens
  misc_RNA (1)...(19): siRNA sense strand
acauaaggcuugugcauca

SEQ ID NO: 385284 - RNA, 19 nt, Homo sapiens
  misc_RNA (1)...(19): siRNA sense strand
auacaaaucagccuucuuu

SEQ ID NO: 385285 - RNA, 19 nt, Homo sapiens
  misc_RNA (1)...(19): siRNA sense strand
gggaagaaaccauuacaau

SEQ ID NO: 385286 - RNA, 19 nt, Homo sapiens
  misc_RNA (1)...(19): siRNA sense strand
gcacaucagcaaagaccua

SEQ ID NO: 385287 - RNA, 19 nt, Homo sapiens
  misc_RNA (1)...(19): siRNA sense strand
ucacacaacugagggauuc

SEQ ID NO: 385288 - RNA, 19 nt, Homo sapiens
  misc_RNA (1)...(19): siRNA sense strand
gauaaaagauacccagaau

SEQ ID NO: 385289 - RNA, 19 nt, Homo sapiens
  misc_RNA (1)...(19): siRNA sense strand
ugacgaacaaugacaguuu

SEQ ID NO: 385290 - RNA, 19 nt, Homo sapiens
  misc_RNA (1)...(19): siRNA sense strand
gauccuggaaccuuuaauu

SEQ ID NO: 385291 - RNA, 19 nt, Homo sapiens
  misc_RNA (1)...(19): siRNA sense strand
ucagugaccuccagauugg

SEQ ID NO: 385292 - RNA, 19 nt, Homo sapiens
  misc_RNA (1)...(19): siRNA sense strand
acacaaaccauaccaaaca

SEQ ID NO: 385293 - RNA, 19 nt, Homo sapiens
  misc_RNA (1)...(19): siRNA sense strand
gcaacuuuccagaguauga

SEQ ID NO: 385294 - RNA, 19 nt, Homo sapiens
  misc_RNA (1)...(19): siRNA sense strand
gcugcaacuuuccagagua

SEQ ID NO: 385295 - RNA, 19 nt, Homo sapiens
  misc_RNA (1)...(19): siRNA sense strand
caagaagcauuggcuaugg

SEQ ID NO: 385296 - RNA, 19 nt, Homo sapiens
  misc_RNA (1)...(19): siRNA sense strand
caaaucagccuucuuuuau

SEQ ID NO: 385297 - RNA, 19 nt, Homo sapiens
  misc_RNA (1)...(19): siRNA sense strand
gaugacugcuuggauagga

SEQ ID NO: 385298 - RNA, 19 nt, Homo sapiens
  misc_RNA (1)...(19): siRNA sense strand
cugcuagaauggaagauuu

SEQ ID NO: 385299 - RNA, 19 nt, Homo sapiens
  misc_RNA (1)...(19): siRNA sense strand
ggucagagucccaugauag

SEQ ID NO: 385300 - RNA, 19 nt, Homo sapiens
  misc_RNA (1)...(19): siRNA sense strand
uaucuuguacccuguuaua

SEQ ID NO: 385301 - RNA, 19 nt, Homo sapiens
  misc_RNA (1)...(19): siRNA sense strand
gaugggugacgaacaauga

SEQ ID NO: 385302 - RNA, 19 nt, Homo sapiens
  misc_RNA (1)...(19): siRNA sense strand
cgagguggcccuacgugua

SEQ ID NO: 385303 - RNA, 19 nt, Homo sapiens
  misc_RNA (1)...(19): siRNA sense strand
cagaagucauuccggagaa

SEQ ID NO: 385304 - RNA, 19 nt, Homo sapiens
  misc_RNA (1)...(19): siRNA sense strand
uccgaaugcugcacuauga

SEQ ID NO: 385305 - RNA, 19 nt, Homo sapiens
  misc_RNA (1)...(19): siRNA sense strand
gaauggaagauuucaccuu

SEQ ID NO: 385306 - RNA, 19 nt, Homo sapiens
  misc_RNA (1)...(19): siRNA sense strand
caaagaacacaaaccauac

SEQ ID NO: 385307 - RNA, 19 nt, Homo sapiens
  misc_RNA (1)...(19): siRNA sense strand
ugacuuguguauuaaacug

SEQ ID NO: 385308 - RNA, 19 nt, Homo sapiens
  misc_RNA (1)...(19): siRNA sense strand
gauuucaccuucaaugacu

SEQ ID NO: 385309 - RNA, 19 nt, Homo sapiens
  misc_RNA (1)...(19): siRNA sense strand
ucagacugcuagaauggaa

SEQ ID NO: 385310 - RNA, 19 nt, Homo sapiens
  misc_RNA (1)...(19): siRNA sense strand
gcagagauuugagcagaac

SEQ ID NO: 385311 - RNA, 19 nt, Homo sapiens
  misc_RNA (1)...(19): siRNA sense strand
caaagaccuauacaaauca

SEQ ID NO: 385312 - RNA, 19 nt, Homo sapiens
  misc_RNA (1)...(19): siRNA sense strand
caaaccauaccaaacaaug

SEQ ID NO: 385313 - RNA, 19 nt, Homo sapiens
  misc_RNA (1)...(19): siRNA sense strand
aaauucagcagacaugauu

SEQ ID NO: 385314 - RNA, 19 nt, Homo sapiens
  misc_RNA (1)...(19): siRNA sense strand
cacaaaccauaccaaacaa

SEQ ID NO: 385315 - RNA, 19 nt, Homo sapiens
  misc_RNA (1)...(19): siRNA sense strand
gggauucaauucgaugugu

SEQ ID NO: 385316 - RNA, 19 nt, Homo sapiens
  misc_RNA (1)...(19): siRNA sense strand
gcugcacuaugauucagaa

SEQ ID NO: 385317 - RNA, 19 nt, Homo sapiens
  misc_RNA (1)...(19): siRNA sense strand
ggugugcggccuugauaaa

SEQ ID NO: 385318 - RNA, 19 nt, Homo sapiens
  misc_RNA (1)...(19): siRNA sense strand
uaaggcuugugcaucauga

SEQ ID NO: 385319 - RNA, 19 nt, Homo sapiens
  misc_RNA (1)...(19): siRNA sense strand
uuuaugagauggagucaca

SEQ ID NO: 385320 - RNA, 19 nt, Homo sapiens
  misc_RNA (1)...(19): siRNA sense strand
gguggugaauucagcaaca

SEQ ID NO: 385321 - RNA, 19 nt, Homo sapiens
  misc_RNA (1)...(19): siRNA sense strand
uauccuaucugugaauauc

SEQ ID NO: 385322 - RNA, 19 nt, Homo sapiens
  misc_RNA (1)...(19): siRNA sense strand
caucgggaagaaaccauua

SEQ ID NO: 385323 - RNA, 19 nt, Homo sapiens
  misc_RNA (1)...(19): siRNA sense strand
cgaaugcugcacuaugauu

SEQ ID NO: 385324 - RNA, 19 nt, Homo sapiens
  misc_RNA (1)...(19): siRNA sense strand
ggacggugaggauccagaa

SEQ ID NO: 385325 - RNA, 19 nt, Homo sapiens
  misc_RNA (1)...(19): siRNA sense strand
gggagacugugaacauguc

SEQ ID NO: 385326 - RNA, 19 nt, Homo sapiens
  misc_RNA (1)...(19): siRNA sense strand
caccuucaaugacuugugu

SEQ ID NO: 385327 - RNA, 19 nt, Homo sapiens
  misc_RNA (1)...(19): siRNA sense strand
gcggugugcggccuugaua

SEQ ID NO: 385328 - RNA, 19 nt, Homo sapiens
  misc_RNA (1)...(19): siRNA sense strand
acaaaucagccuucuuuua

SEQ ID NO: 385329 - RNA, 19 nt, Homo sapiens
  misc_RNA (1)...(19): siRNA sense strand
gaaaccauuacaauagauc

SEQ ID NO: 385330 - RNA, 19 nt, Homo sapiens
  misc_RNA (1)...(19): siRNA sense strand
aauaucuuguacccuguua

SEQ ID NO: 385331 - RNA, 19 nt, Homo sapiens
  misc_RNA (1)...(19): siRNA sense strand
ucaagaagcauuggcuaug

SEQ ID NO: 385332 - RNA, 19 nt, Homo sapiens
  misc_RNA (1)...(19): siRNA sense strand
gacgaacaaugacaguuuu

SEQ ID NO: 385333 - RNA, 19 nt, Homo sapiens
  misc_RNA (1)...(19): siRNA sense strand
gaauaucuuguacccuguu

SEQ ID NO: 385334 - RNA, 19 nt, Homo sapiens
  misc_RNA (1)...(19): siRNA sense strand
uugcuuauccuuauguuga

SEQ ID NO: 385335 - RNA, 19 nt, Homo sapiens
  misc_RNA (1)...(19): siRNA sense strand
gugaacaugucauugucau

SEQ ID NO: 385336 - RNA, 19 nt, Homo sapiens
  misc_RNA (1)...(19): siRNA sense strand
cagggagacugugaacaug

SEQ ID NO: 385337 - RNA, 19 nt, Homo sapiens
  misc_RNA (1)...(19): siRNA sense strand
aacauucguuuaugagaug

SEQ ID NO: 385338 - RNA, 19 nt, Homo sapiens
  misc_RNA (1)...(19): siRNA sense strand
ccagaaugcagagauuuga

SEQ ID NO: 385339 - RNA, 19 nt, Homo sapiens
  misc_RNA (1)...(19): siRNA sense strand
cugcaacuuuccagaguau

SEQ ID NO: 385340 - RNA, 19 nt, Homo sapiens
  misc_RNA (1)...(19): siRNA sense strand
gcuuggauaggacauugua

SEQ ID NO: 385341 - RNA, 19 nt, Homo sapiens
  misc_RNA (1)...(19): siRNA sense strand
agaggacccaugcuucuuu

SEQ ID NO: 385342 - RNA, 19 nt, Homo sapiens
  misc_RNA (1)...(19): siRNA sense strand
gaacaucgggaagaaacca

SEQ ID NO: 385343 - RNA, 19 nt, Homo sapiens
  misc_RNA (1)...(19): siRNA sense strand
ucagggagacugugaacau

SEQ ID NO: 385344 - RNA, 19 nt, Homo sapiens
  misc_RNA (1)...(19): siRNA sense strand
cuuauccuaucugugaaua

SEQ ID NO: 385345 - RNA, 19 nt, Homo sapiens
  misc_RNA (1)...(19): siRNA sense strand
cauuggcuauggaccagaa

SEQ ID NO: 385346 - RNA, 19 nt, Homo sapiens
  misc_RNA (1)...(19): siRNA sense strand
aagaagcauuggcuaugga

SEQ ID NO: 385347 - RNA, 19 nt, Homo sapiens
  misc_RNA (1)...(19): siRNA sense strand
ucuuguacccuguuauauu

SEQ ID NO: 385348 - RNA, 19 nt, Homo sapiens
  misc_RNA (1)...(19): siRNA sense strand
gggagcuuauccuaucugu

SEQ ID NO: 385349 - RNA, 19 nt, Homo sapiens
  misc_RNA (1)...(19): siRNA sense strand
guuucagacugcuagaaug

SEQ ID NO: 385350 - RNA, 19 nt, Homo sapiens
  misc_RNA (1)...(19): siRNA sense strand
uacccagaaugcagagauu

SEQ ID NO: 385351 - RNA, 19 nt, Homo sapiens
  misc_RNA (1)...(19): siRNA sense strand
uaagcacaaagaacacaaa

SEQ ID NO: 385352 - RNA, 19 nt, Homo sapiens
  misc_RNA (1)...(19): siRNA sense strand
uccuggaaccuuuaauuaa

SEQ ID NO: 385353 - RNA, 19 nt, Homo sapiens
  misc_RNA (1)...(19): siRNA sense strand
gaggacccaugcuucuuuu

SEQ ID NO: 385354 - RNA, 19 nt, Homo sapiens
  misc_RNA (1)...(19): siRNA sense strand
gagauuugagcagaacuau

SEQ ID NO: 385355 - RNA, 19 nt, Homo sapiens
  misc_RNA (1)...(19): siRNA sense strand
guugauccuggaaccuuua

SEQ ID NO: 385356 - RNA, 19 nt, Homo sapiens
  misc_RNA (1)...(19): siRNA sense strand
ugacauaaggcuugugcau

SEQ ID NO: 385357 - RNA, 19 nt, Homo sapiens
  misc_RNA (1)...(19): siRNA sense strand
aagauuucaccuucaauga

SEQ ID NO: 385358 - RNA, 19 nt, Homo sapiens
  misc_RNA (1)...(19): siRNA sense strand
ugauucagaaggcaacaaa

SEQ ID NO: 385359 - RNA, 19 nt, Homo sapiens
  misc_RNA (1)...(19): siRNA sense strand
cggccuugauaaacugaaa

SEQ ID NO: 385360 - RNA, 19 nt, Homo sapiens
  misc_RNA (1)...(19): siRNA sense strand
caguggcggcugcaacuuu

SEQ ID NO: 385361 - RNA, 19 nt, Homo sapiens
  misc_RNA (1)...(19): siRNA sense strand
ugacaauugugaugcauau

SEQ ID NO: 385362 - RNA, 19 nt, Homo sapiens
  misc_RNA (1)...(19): siRNA sense strand
caauugugaugcauaucua

SEQ ID NO: 385363 - RNA, 19 nt, Homo sapiens
  misc_RNA (1)...(19): siRNA sense strand
cuauagaccaguuugaaua

SEQ ID NO: 385364 - RNA, 19 nt, Homo sapiens
  misc_RNA (1)...(19): siRNA sense strand
uagaccaguuugaauauga

SEQ ID NO: 385365 - RNA, 19 nt, Homo sapiens
  misc_RNA (1)...(19): siRNA sense strand
accgagagaugguauauga

SEQ ID NO: 385366 - RNA, 19 nt, Homo sapiens
  misc_RNA (1)...(19): siRNA sense strand
acacagcuauaaagaccua

SEQ ID NO: 385367 - RNA, 19 nt, Homo sapiens
  misc_RNA (1)...(19): siRNA sense strand
gcacuagcucuuccuuuga

SEQ ID NO: 385368 - RNA, 19 nt, Homo sapiens
  misc_RNA (1)...(19): siRNA sense strand
cagcgagucaguaacuuua

SEQ ID NO: 385369 - RNA, 19 nt, Homo sapiens
  misc_RNA (1)...(19): siRNA sense strand
gcagcgagucaguaacuuu

SEQ ID NO: 385370 - RNA, 19 nt, Homo sapiens
  misc_RNA (1)...(19): siRNA sense strand
ugaugcauaucuacaaaug

SEQ ID NO: 385371 - RNA, 19 nt, Homo sapiens
  misc_RNA (1)...(19): siRNA sense strand
ccagagacacagcuauaaa

SEQ ID NO: 385372 - RNA, 19 nt, Homo sapiens
  misc_RNA (1)...(19): siRNA sense strand
ucaagacuauagaccaguu

SEQ ID NO: 385373 - RNA, 19 nt, Homo sapiens
  misc_RNA (1)...(19): siRNA sense strand
guauaugacugcacuagcu

SEQ ID NO: 385374 - RNA, 19 nt, Homo sapiens
  misc_RNA (1)...(19): siRNA sense strand
cgaaggaccugcggcaucu

SEQ ID NO: 385375 - RNA, 19 nt, Homo sapiens
  misc_RNA (1)...(19): siRNA sense strand
ugcacuagcucuuccuuug

SEQ ID NO: 385376 - RNA, 19 nt, Homo sapiens
  misc_RNA (1)...(19): siRNA sense strand
cuacaaauccagagacaca

SEQ ID NO: 385377 - RNA, 19 nt, Homo sapiens
  misc_RNA (1)...(19): siRNA sense strand
ggaguggccuacaaaucca

SEQ ID NO: 385378 - RNA, 19 nt, Homo sapiens
  misc_RNA (1)...(19): siRNA sense strand
ugugaugcauaucuacaaa

SEQ ID NO: 385379 - RNA, 19 nt, Homo sapiens
  misc_RNA (1)...(19): siRNA sense strand
gaaggguaaccgagagaug

SEQ ID NO: 385380 - RNA, 19 nt, Homo sapiens
  misc_RNA (1)...(19): siRNA sense strand
gcgagucaguaacuuuaag

SEQ ID NO: 385381 - RNA, 19 nt, Homo sapiens
  misc_RNA (1)...(19): siRNA sense strand
gaggaguggccuacaaauc

SEQ ID NO: 385382 - RNA, 19 nt, Homo sapiens
  misc_RNA (1)...(19): siRNA sense strand
guuugaauaugaugguugu

SEQ ID NO: 385383 - RNA, 19 nt, Homo sapiens
  misc_RNA (1)...(19): siRNA sense strand
gacuauagaccaguuugaa

SEQ ID NO: 385384 - RNA, 19 nt, Homo sapiens
  misc_RNA (1)...(19): siRNA sense strand
uggagacggugccgaagga

SEQ ID NO: 385385 - RNA, 19 nt, Homo sapiens
  misc_RNA (1)...(19): siRNA sense strand
guucgcuggucaagacuau

SEQ ID NO: 385386 - RNA, 19 nt, Homo sapiens
  misc_RNA (1)...(19): siRNA sense strand
gaauaugaugguugugaca

SEQ ID NO: 385387 - RNA, 19 nt, Homo sapiens
  misc_RNA (1)...(19): siRNA sense strand
uaaccgagagaugguauau

SEQ ID NO: 385388 - RNA, 19 nt, Homo sapiens
  misc_RNA (1)...(19): siRNA sense strand
cacuagcucuuccuuugau

SEQ ID NO: 385389 - RNA, 19 nt, Homo sapiens
  misc_RNA (1)...(19): siRNA sense strand
agagacacagcuauaaaga

SEQ ID NO: 385390 - RNA, 19 nt, Homo sapiens
  misc_RNA (1)...(19): siRNA sense strand
acagcugggucuccaagug

SEQ ID NO: 385391 - RNA, 19 nt, Homo sapiens
  misc_RNA (1)...(19): siRNA sense strand
gggccuguuugcuguguuc

SEQ ID NO: 385392 - RNA, 19 nt, Homo sapiens
  misc_RNA (1)...(19): siRNA sense strand
cagagacacagcuauaaag

SEQ ID NO: 385393 - RNA, 19 nt, Homo sapiens
  misc_RNA (1)...(19): siRNA sense strand
uaacuuuaagccaggugua

SEQ ID NO: 385394 - RNA, 19 nt, Homo sapiens
  misc_RNA (1)...(19): siRNA sense strand
gaugcauaucuacaaauga

SEQ ID NO: 385395 - RNA, 19 nt, Homo sapiens
  misc_RNA (1)...(19): siRNA sense strand
gucgaggaguggccuacaa

SEQ ID NO: 385396 - RNA, 19 nt, Homo sapiens
  misc_RNA (1)...(19): siRNA sense strand
guaaccgagagaugguaua

SEQ ID NO: 385397 - RNA, 19 nt, Homo sapiens
  misc_RNA (1)...(19): siRNA sense strand
gccuacaaauccagagaca

SEQ ID NO: 385398 - RNA, 19 nt, Homo sapiens
  misc_RNA (1)...(19): siRNA sense strand
caagacuauagaccaguuu

SEQ ID NO: 385399 - RNA, 19 nt, Homo sapiens
  misc_RNA (1)...(19): siRNA sense strand
gugacaauugugaugcaua

SEQ ID NO: 385400 - RNA, 19 nt, Homo sapiens
  misc_RNA (1)...(19): siRNA sense strand
uguguucgcuggucaagac

SEQ ID NO: 385401 - RNA, 19 nt, Homo sapiens
  misc_RNA (1)...(19): siRNA sense strand
cgagagaugguauaugacu

SEQ ID NO: 385402 - RNA, 19 nt, Homo sapiens
  misc_RNA (1)...(19): siRNA sense strand
agaccaguuugaauaugau

SEQ ID NO: 385403 - RNA, 19 nt, Homo sapiens
  misc_RNA (1)...(19): siRNA sense strand
guauaugcggugucaguca

SEQ ID NO: 385404 - RNA, 19 nt, Homo sapiens
  misc_RNA (1)...(19): siRNA sense strand
gguaaccgagagaugguau

SEQ ID NO: 385405 - RNA, 19 nt, Homo sapiens
  misc_RNA (1)...(19): siRNA sense strand
gaaucgugcgggagcugaa

SEQ ID NO: 385406 - RNA, 19 nt, Homo sapiens
  misc_RNA (1)...(19): siRNA sense strand
ggauuuagcugaugucaaa

SEQ ID NO: 385407 - RNA, 19 nt, Homo sapiens
  misc_RNA (1)...(19): siRNA sense strand
gauggaagcuuacuagauu

SEQ ID NO: 385408 - RNA, 19 nt, Homo sapiens
  misc_RNA (1)...(19): siRNA sense strand
gagaagagcaagcgaaaua

SEQ ID NO: 385409 - RNA, 19 nt, Homo sapiens
  misc_RNA (1)...(19): siRNA sense strand
gaaagaagaagaagaggaa

SEQ ID NO: 385410 - RNA, 19 nt, Homo sapiens
  misc_RNA (1)...(19): siRNA sense strand
gaacugauuuccuucaaag

SEQ ID NO: 385411 - RNA, 19 nt, Homo sapiens
  misc_RNA (1)...(19): siRNA sense strand
aaacccaccuccacacuua

SEQ ID NO: 385412 - RNA, 19 nt, Homo sapiens
  misc_RNA (1)...(19): siRNA sense strand
guacagcaaugaacacuuc

SEQ ID NO: 385413 - RNA, 19 nt, Homo sapiens
  misc_RNA (1)...(19): siRNA sense strand
gaugucggcucacuccaua

SEQ ID NO: 385414 - RNA, 19 nt, Homo sapiens
  misc_RNA (1)...(19): siRNA sense strand
ccucagcgcuccuaagaaa

SEQ ID NO: 385415 - RNA, 19 nt, Homo sapiens
  misc_RNA (1)...(19): siRNA sense strand
caaaucgucucuagucaau

SEQ ID NO: 385416 - RNA, 19 nt, Homo sapiens
  misc_RNA (1)...(19): siRNA sense strand
gcacagccgucgacuucuu

SEQ ID NO: 385417 - RNA, 19 nt, Homo sapiens
  misc_RNA (1)...(19): siRNA sense strand
cagcgaauguuuccuaaau

SEQ ID NO: 385418 - RNA, 19 nt, Homo sapiens
  misc_RNA (1)...(19): siRNA sense strand
caccaagucuuuagaauag

SEQ ID NO: 385419 - RNA, 19 nt, Homo sapiens
  misc_RNA (1)...(19): siRNA sense strand
aaagugcguucgcuacaua

SEQ ID NO: 385420 - RNA, 19 nt, Homo sapiens
  misc_RNA (1)...(19): siRNA sense strand
caaaacagcuccuccgauu

SEQ ID NO: 385421 - RNA, 19 nt, Homo sapiens
  misc_RNA (1)...(19): siRNA sense strand
agaaaccucuuaaugcauu

SEQ ID NO: 385422 - RNA, 19 nt, Homo sapiens
  misc_RNA (1)...(19): siRNA sense strand
cggcacacauugucucuaa

SEQ ID NO: 385423 - RNA, 19 nt, Homo sapiens
  misc_RNA (1)...(19): siRNA sense strand
ggauaacuauggaaagaag

SEQ ID NO: 385424 - RNA, 19 nt, Homo sapiens
  misc_RNA (1)...(19): siRNA sense strand
ucaccaagucuuuagaaua

SEQ ID NO: 385425 - RNA, 19 nt, Homo sapiens
  misc_RNA (1)...(19): siRNA sense strand
aaucgucucuagucaauga

SEQ ID NO: 385426 - RNA, 19 nt, Homo sapiens
  misc_RNA (1)...(19): siRNA sense strand
cgagacaaaucccgggaaa

SEQ ID NO: 385427 - RNA, 19 nt, Homo sapiens
  misc_RNA (1)...(19): siRNA sense strand
gaugucaaaucgucucuag

SEQ ID NO: 385428 - RNA, 19 nt, Homo sapiens
  misc_RNA (1)...(19): siRNA sense strand
gagugcacguugaaagaaa

SEQ ID NO: 385429 - RNA, 19 nt, Homo sapiens
  misc_RNA (1)...(19): siRNA sense strand
ugaaggaaaugagagcaaa

SEQ ID NO: 385430 - RNA, 19 nt, Homo sapiens
  misc_RNA (1)...(19): siRNA sense strand
acaaaucccgggaaaguuu

SEQ ID NO: 385431 - RNA, 19 nt, Homo sapiens
  misc_RNA (1)...(19): siRNA sense strand
gccgucgacuucuugguua

SEQ ID NO: 385432 - RNA, 19 nt, Homo sapiens
  misc_RNA (1)...(19): siRNA sense strand
cgaacugauuuccuucaaa

SEQ ID NO: 385433 - RNA, 19 nt, Homo sapiens
  misc_RNA (1)...(19): siRNA sense strand
ugaaauggccacugcuuga

SEQ ID NO: 385434 - RNA, 19 nt, Homo sapiens
  misc_RNA (1)...(19): siRNA sense strand
ggcaugcacuguccagaga

SEQ ID NO: 385435 - RNA, 19 nt, Homo sapiens
  misc_RNA (1)...(19): siRNA sense strand
caaccaguguacccaauca

SEQ ID NO: 385436 - RNA, 19 nt, Homo sapiens
  misc_RNA (1)...(19): siRNA sense strand
ccuaaauccuugccuuuca

SEQ ID NO: 385437 - RNA, 19 nt, Homo sapiens
  misc_RNA (1)...(19): siRNA sense strand
cgggauaacuauggaaaga

SEQ ID NO: 385438 - RNA, 19 nt, Homo sapiens
  misc_RNA (1)...(19): siRNA sense strand
gaccucagcgcuccuaaga

SEQ ID NO: 385439 - RNA, 19 nt, Homo sapiens
  misc_RNA (1)...(19): siRNA sense strand
gcacacauugucucuaaca

SEQ ID NO: 385440 - RNA, 19 nt, Homo sapiens
  misc_RNA (1)...(19): siRNA sense strand
acacuuaccagccgacgua

SEQ ID NO: 385441 - RNA, 19 nt, Homo sapiens
  misc_RNA (1)...(19): siRNA sense strand
gaauguuuccuaaauccuu

SEQ ID NO: 385442 - RNA, 19 nt, Homo sapiens
  misc_RNA (1)...(19): siRNA sense strand
gagaagagcuccgaaaacu

SEQ ID NO: 385443 - RNA, 19 nt, Homo sapiens
  misc_RNA (1)...(19): siRNA sense strand
ucuagucaaugaaucagaa

SEQ ID NO: 385444 - RNA, 19 nt, Homo sapiens
  misc_RNA (1)...(19): siRNA sense strand
caaagcaucaggacuccaa

SEQ ID NO: 385445 - RNA, 19 nt, Homo sapiens
  misc_RNA (1)...(19): siRNA sense strand
gaaacccaccuccacacuu

SEQ ID NO: 385446 - RNA, 19 nt, Homo sapiens
  misc_RNA (1)...(19): siRNA sense strand
gcagcacccucaccauguc

SEQ ID NO: 385447 - RNA, 19 nt, Homo sapiens
  misc_RNA (1)...(19): siRNA sense strand
guagcugagugcacguuga

SEQ ID NO: 385448 - RNA, 19 nt, Homo sapiens
  misc_RNA (1)...(19): siRNA sense strand
gaaucagaaacgaaucaaa

SEQ ID NO: 385449 - RNA, 19 nt, Homo sapiens
  misc_RNA (1)...(19): siRNA sense strand
acacagcgaauguuuccua

SEQ ID NO: 385450 - RNA, 19 nt, Homo sapiens
  misc_RNA (1)...(19): siRNA sense strand
cagagaagagcaagcgaaa

SEQ ID NO: 385451 - RNA, 19 nt, Homo sapiens
  misc_RNA (1)...(19): siRNA sense strand
guagacaagcccucaagga

SEQ ID NO: 385452 - RNA, 19 nt, Homo sapiens
  misc_RNA (1)...(19): siRNA sense strand
caaugaaucagaaacgaau

SEQ ID NO: 385453 - RNA, 19 nt, Homo sapiens
  misc_RNA (1)...(19): siRNA sense strand
gcucgucaccaagucuuua

SEQ ID NO: 385454 - RNA, 19 nt, Homo sapiens
  misc_RNA (1)...(19): siRNA sense strand
gcuuuggccuugaucaaca

SEQ ID NO: 385455 - RNA, 19 nt, Homo sapiens
  misc_RNA (1)...(19): siRNA sense strand
gaaaugccgagcgcgcuuu

SEQ ID NO: 385456 - RNA, 19 nt, Homo sapiens
  misc_RNA (1)...(19): siRNA sense strand
agagagggauuuagcugau

SEQ ID NO: 385457 - RNA, 19 nt, Homo sapiens
  misc_RNA (1)...(19): siRNA sense strand
ccagauauauccccguauu

SEQ ID NO: 385458 - RNA, 19 nt, Homo sapiens
  misc_RNA (1)...(19): siRNA sense strand
gagagggauuuagcugaug

SEQ ID NO: 385459 - RNA, 19 nt, Homo sapiens
  misc_RNA (1)...(19): siRNA sense strand
gaugaaauggccacugcuu

SEQ ID NO: 385460 - RNA, 19 nt, Homo sapiens
  misc_RNA (1)...(19): siRNA sense strand
cacagcgaauguuuccuaa

SEQ ID NO: 385461 - RNA, 19 nt, Homo sapiens
  misc_RNA (1)...(19): siRNA sense strand
gaagaagccccacauaaag

SEQ ID NO: 385462 - RNA, 19 nt, Homo sapiens
  misc_RNA (1)...(19): siRNA sense strand
gaaauggccacugcuugau

SEQ ID NO: 385463 - RNA, 19 nt, Homo sapiens
  misc_RNA (1)...(19): siRNA sense strand
gcaaaggucguagcugagu

SEQ ID NO: 385464 - RNA, 19 nt, Homo sapiens
  misc_RNA (1)...(19): siRNA sense strand
gcgaauguuuccuaaaucc

SEQ ID NO: 385465 - RNA, 19 nt, Homo sapiens
  misc_RNA (1)...(19): siRNA sense strand
agacaaaucccgggaaagu

SEQ ID NO: 385466 - RNA, 19 nt, Homo sapiens
  misc_RNA (1)...(19): siRNA sense strand
ccaaugaacacagcgaaug

SEQ ID NO: 385467 - RNA, 19 nt, Homo sapiens
  misc_RNA (1)...(19): siRNA sense strand
gaagagcaagcgaaauacu

SEQ ID NO: 385468 - RNA, 19 nt, Homo sapiens
  misc_RNA (1)...(19): siRNA sense strand
ccgcuaggaugguuaguac

SEQ ID NO: 385469 - RNA, 19 nt, Homo sapiens
  misc_RNA (1)...(19): siRNA sense strand
gccuugaucaacagaauaa

SEQ ID NO: 385470 - RNA, 19 nt, Homo sapiens
  misc_RNA (1)...(19): siRNA sense strand
cuuaaugcauucauguugu

SEQ ID NO: 385471 - RNA, 19 nt, Homo sapiens
  misc_RNA (1)...(19): siRNA sense strand
gaaaccucuuaaugcauuc

SEQ ID NO: 385472 - RNA, 19 nt, Homo sapiens
  misc_RNA (1)...(19): siRNA sense strand
ccgggaaaguuuggaagaa

SEQ ID NO: 385473 - RNA, 19 nt, Homo sapiens
  misc_RNA (1)...(19): siRNA sense strand
caaugaacacagcgaaugu

SEQ ID NO: 385474 - RNA, 19 nt, Homo sapiens
  misc_RNA (1)...(19): siRNA sense strand
guauaugaaggaaaugaga

SEQ ID NO: 385475 - RNA, 19 nt, Homo sapiens
  misc_RNA (1)...(19): siRNA sense strand
agaagaagccccacauaaa

SEQ ID NO: 385476 - RNA, 19 nt, Homo sapiens
  misc_RNA (1)...(19): siRNA sense strand
ggagcgacagcuucauaug

SEQ ID NO: 385477 - RNA, 19 nt, Homo sapiens
  misc_RNA (1)...(19): siRNA sense strand
acgacgaacugauuuccuu

SEQ ID NO: 385478 - RNA, 19 nt, Homo sapiens
  misc_RNA (1)...(19): siRNA sense strand
ggagagaccaaugaacaca

SEQ ID NO: 385479 - RNA, 19 nt, Homo sapiens
  misc_RNA (1)...(19): siRNA sense strand
ccgccucgcuccgaaaguu

SEQ ID NO: 385480 - RNA, 19 nt, Homo sapiens
  misc_RNA (1)...(19): siRNA sense strand
ucaaugaaucagaaacgaa

SEQ ID NO: 385481 - RNA, 19 nt, Homo sapiens
  misc_RNA (1)...(19): siRNA sense strand
ucaaaucgucucuagucaa

SEQ ID NO: 385482 - RNA, 19 nt, Homo sapiens
  misc_RNA (1)...(19): siRNA sense strand
gacaaaucccgggaaaguu

SEQ ID NO: 385483 - RNA, 19 nt, Homo sapiens
  misc_RNA (1)...(19): siRNA sense strand
gauggagggcucuuuaagg

SEQ ID NO: 385484 - RNA, 19 nt, Homo sapiens
  misc_RNA (1)...(19): siRNA sense strand
gucaaaucgucucuaguca

SEQ ID NO: 385485 - RNA, 19 nt, Homo sapiens
  misc_RNA (1)...(19): siRNA sense strand
ucagauggaagcuuacuag

SEQ ID NO: 385486 - RNA, 19 nt, Homo sapiens
  misc_RNA (1)...(19): siRNA sense strand
aaggagcgacagcuucaua

SEQ ID NO: 385487 - RNA, 19 nt, Homo sapiens
  misc_RNA (1)...(19): siRNA sense strand
aagagcaagcgaaauacua

SEQ ID NO: 385488 - RNA, 19 nt, Homo sapiens
  misc_RNA (1)...(19): siRNA sense strand
gaaaacuccucggcagaga

SEQ ID NO: 385489 - RNA, 19 nt, Homo sapiens
  misc_RNA (1)...(19): siRNA sense strand
uagacaagcccucaaggau

SEQ ID NO: 385490 - RNA, 19 nt, Homo sapiens
  misc_RNA (1)...(19): siRNA sense strand
cgccaacgacgaacugauu

SEQ ID NO: 385491 - RNA, 19 nt, Homo sapiens
  misc_RNA (1)...(19): siRNA sense strand
ucagcgcuccuaagaaaug

SEQ ID NO: 385492 - RNA, 19 nt, Homo sapiens
  misc_RNA (1)...(19): siRNA sense strand
gagcgacagcuucauaugc

SEQ ID NO: 385493 - RNA, 19 nt, Homo sapiens
  misc_RNA (1)...(19): siRNA sense strand
ugucaaaucgucucuaguc

SEQ ID NO: 385494 - RNA, 19 nt, Homo sapiens
  misc_RNA (1)...(19): siRNA sense strand
ccuccgcacccuccagaua

SEQ ID NO: 385495 - RNA, 19 nt, Homo sapiens
  misc_RNA (1)...(19): siRNA sense strand
gccaacgacgaacugauuu

SEQ ID NO: 385496 - RNA, 19 nt, Homo sapiens
  misc_RNA (1)...(19): siRNA sense strand
gcgacagcuucauaugcaa

SEQ ID NO: 385497 - RNA, 19 nt, Homo sapiens
  misc_RNA (1)...(19): siRNA sense strand
gaaggaaaugagagcaaag

SEQ ID NO: 385498 - RNA, 19 nt, Homo sapiens
  misc_RNA (1)...(19): siRNA sense strand
ucacguacagcaaugaaca

SEQ ID NO: 385499 - RNA, 19 nt, Homo sapiens
  misc_RNA (1)...(19): siRNA sense strand
cgggagagaccaaugaaca

SEQ ID NO: 385500 - RNA, 19 nt, Homo sapiens
  misc_RNA (1)...(19): siRNA sense strand
uccgcacccuccagauaua

SEQ ID NO: 385501 - RNA, 19 nt, Homo sapiens
  misc_RNA (1)...(19): siRNA sense strand
agagggauuuagcugaugu

SEQ ID NO: 385502 - RNA, 19 nt, Homo sapiens
  misc_RNA (1)...(19): siRNA sense strand
gcgaacaggaggagaagag

SEQ ID NO: 385503 - RNA, 19 nt, Homo sapiens
  misc_RNA (1)...(19): siRNA sense strand
gucaaugaaucagaaacga

SEQ ID NO: 385504 - RNA, 19 nt, Homo sapiens
  misc_RNA (1)...(19): siRNA sense strand
gggauaacuauggaaagaa

SEQ ID NO: 385505 - RNA, 19 nt, Homo sapiens
  misc_RNA (1)...(19): siRNA sense strand
ggccuugaucaacagaaua

SEQ ID NO: 385506 - RNA, 19 nt, Homo sapiens
  misc_RNA (1)...(19): siRNA sense strand
uaaaggaacuguuuggaaa

SEQ ID NO: 385507 - RNA, 19 nt, Homo sapiens
  misc_RNA (1)...(19): siRNA sense strand
gagcacaacaucauauuua

SEQ ID NO: 385508 - RNA, 19 nt, Homo sapiens
  misc_RNA (1)...(19): siRNA sense strand
gagaauggccgauuuguau

SEQ ID NO: 385509 - RNA, 19 nt, Homo sapiens
  misc_RNA (1)...(19): siRNA sense strand
ccagagaaauauaugauga

SEQ ID NO: 385510 - RNA, 19 nt, Homo sapiens
  misc_RNA (1)...(19): siRNA sense strand
aaagaaagguggcuuaaag

SEQ ID NO: 385511 - RNA, 19 nt, Homo sapiens
  misc_RNA (1)...(19): siRNA sense strand
aaacagggauacacaagaa

SEQ ID NO: 385512 - RNA, 19 nt, Homo sapiens
  misc_RNA (1)...(19): siRNA sense strand
gaaaacaggugucuaguca

SEQ ID NO: 385513 - RNA, 19 nt, Homo sapiens
  misc_RNA (1)...(19): siRNA sense strand
cacaagacgucaagccuuu

SEQ ID NO: 385514 - RNA, 19 nt, Homo sapiens
  misc_RNA (1)...(19): siRNA sense strand
gaaagguggcuuaaaggaa

SEQ ID NO: 385515 - RNA, 19 nt, Homo sapiens
  misc_RNA (1)...(19): siRNA sense strand
ggacauucgucagauuuau

SEQ ID NO: 385516 - RNA, 19 nt, Homo sapiens
  misc_RNA (1)...(19): siRNA sense strand
ccacugccauucauaacaa

SEQ ID NO: 385517 - RNA, 19 nt, Homo sapiens
  misc_RNA (1)...(19): siRNA sense strand
gcaagacgaggaccagaaa

SEQ ID NO: 385518 - RNA, 19 nt, Homo sapiens
  misc_RNA (1)...(19): siRNA sense strand
cgauuuguauaccgaauaa

SEQ ID NO: 385519 - RNA, 19 nt, Homo sapiens
  misc_RNA (1)...(19): siRNA sense strand
gaucagacugcaaaggaua

SEQ ID NO: 385520 - RNA, 19 nt, Homo sapiens
  misc_RNA (1)...(19): siRNA sense strand
uaaaggaucagacugcaaa

SEQ ID NO: 385521 - RNA, 19 nt, Homo sapiens
  misc_RNA (1)...(19): siRNA sense strand
gcagauaagccaauugaca

SEQ ID NO: 385522 - RNA, 19 nt, Homo sapiens
  misc_RNA (1)...(19): siRNA sense strand
aaacaggugucuagucaca

SEQ ID NO: 385523 - RNA, 19 nt, Homo sapiens
  misc_RNA (1)...(19): siRNA sense strand
cgacaucgagcaaagcuuu

SEQ ID NO: 385524 - RNA, 19 nt, Homo sapiens
  misc_RNA (1)...(19): siRNA sense strand
ccacaagcucaaacacuua

SEQ ID NO: 385525 - RNA, 19 nt, Homo sapiens
  misc_RNA (1)...(19): siRNA sense strand
ggaaagggcccucaaaaug

SEQ ID NO: 385526 - RNA, 19 nt, Homo sapiens
  misc_RNA (1)...(19): siRNA sense strand
gacggaguaugcaagguuu

SEQ ID NO: 385527 - RNA, 19 nt, Homo sapiens
  misc_RNA (1)...(19): siRNA sense strand
gaacacggagcacaacauc

SEQ ID NO: 385528 - RNA, 19 nt, Homo sapiens
  misc_RNA (1)...(19): siRNA sense strand
ggagcacaacaucauauuu

SEQ ID NO: 385529 - RNA, 19 nt, Homo sapiens
  misc_RNA (1)...(19): siRNA sense strand
ggaaaaucaucuuaucaga

SEQ ID NO: 385530 - RNA, 19 nt, Homo sapiens
  misc_RNA (1)...(19): siRNA sense strand
cagauaagccaauugacaa

SEQ ID NO: 385531 - RNA, 19 nt, Homo sapiens
  misc_RNA (1)...(19): siRNA sense strand
ugguaggaaugaauugaua

SEQ ID NO: 385532 - RNA, 19 nt, Homo sapiens
  misc_RNA (1)...(19): siRNA sense strand
uaacaaacagggauacaca

SEQ ID NO: 385533 - RNA, 19 nt, Homo sapiens
  misc_RNA (1)...(19): siRNA sense strand
cugcauggccuguguguuu

SEQ ID NO: 385534 - RNA, 19 nt, Homo sapiens
  misc_RNA (1)...(19): siRNA sense strand
acaggugucuagucacauu

SEQ ID NO: 385535 - RNA, 19 nt, Homo sapiens
  misc_RNA (1)...(19): siRNA sense strand
ucaaacacuuaccagagaa

SEQ ID NO: 385536 - RNA, 19 nt, Homo sapiens
  misc_RNA (1)...(19): siRNA sense strand
ggaucagacugcaaaggau

SEQ ID NO: 385537 - RNA, 19 nt, Homo sapiens
  misc_RNA (1)...(19): siRNA sense strand
ggaagcaaguaguagaaaa

SEQ ID NO: 385538 - RNA, 19 nt, Homo sapiens
  misc_RNA (1)...(19): siRNA sense strand
guacaacaaacaccucuuc

SEQ ID NO: 385539 - RNA, 19 nt, Homo sapiens
  misc_RNA (1)...(19): siRNA sense strand
ggaggaaaaucaucuuauc

SEQ ID NO: 385540 - RNA, 19 nt, Homo sapiens
  misc_RNA (1)...(19): siRNA sense strand
gcacaacaucauauuuaca

SEQ ID NO: 385541 - RNA, 19 nt, Homo sapiens
  misc_RNA (1)...(19): siRNA sense strand
cccaaugugugaauauaug

SEQ ID NO: 385542 - RNA, 19 nt, Homo sapiens
  misc_RNA (1)...(19): siRNA sense strand
gggcugauuuaaacugcaa

SEQ ID NO: 385543 - RNA, 19 nt, Homo sapiens
  misc_RNA (1)...(19): siRNA sense strand
gacccagacucguacaaca

SEQ ID NO: 385544 - RNA, 19 nt, Homo sapiens
  misc_RNA (1)...(19): siRNA sense strand
gaauugauagccagauaca

SEQ ID NO: 385545 - RNA, 19 nt, Homo sapiens
  misc_RNA (1)...(19): siRNA sense strand
caaaauguaugguaggaau

SEQ ID NO: 385546 - RNA, 19 nt, Homo sapiens
  misc_RNA (1)...(19): siRNA sense strand
guuugagaauggccgauuu

SEQ ID NO: 385547 - RNA, 19 nt, Homo sapiens
  misc_RNA (1)...(19): siRNA sense strand
acacuuaccagagaaauau

SEQ ID NO: 385548 - RNA, 19 nt, Homo sapiens
  misc_RNA (1)...(19): siRNA sense strand
cucaaacacuuaccagaga

SEQ ID NO: 385549 - RNA, 19 nt, Homo sapiens
  misc_RNA (1)...(19): siRNA sense strand
ugagaauggccgauuugua

SEQ ID NO: 385550 - RNA, 19 nt, Homo sapiens
  misc_RNA (1)...(19): siRNA sense strand
ggcaugccaaccauucuua

SEQ ID NO: 385551 - RNA, 19 nt, Homo sapiens
  misc_RNA (1)...(19): siRNA sense strand
caaacagggauacacaaga

SEQ ID NO: 385552 - RNA, 19 nt, Homo sapiens
  misc_RNA (1)...(19): siRNA sense strand
gaaaagaaagguggcuuaa

SEQ ID NO: 385553 - RNA, 19 nt, Homo sapiens
  misc_RNA (1)...(19): siRNA sense strand
guacgagaguucugaaaau

SEQ ID NO: 385554 - RNA, 19 nt, Homo sapiens
  misc_RNA (1)...(19): siRNA sense strand
uuaaaggaacuguuuggaa

SEQ ID NO: 385555 - RNA, 19 nt, Homo sapiens
  misc_RNA (1)...(19): siRNA sense strand
uccacaagcucaaacacuu

SEQ ID NO: 385556 - RNA, 19 nt, Homo sapiens
  misc_RNA (1)...(19): siRNA sense strand
gauagccagauacaucaaa

SEQ ID NO: 385557 - RNA, 19 nt, Homo sapiens
  misc_RNA (1)...(19): siRNA sense strand
ggauacacaagaaacucua

SEQ ID NO: 385558 - RNA, 19 nt, Homo sapiens
  misc_RNA (1)...(19): siRNA sense strand
augaauugauagccagaua

SEQ ID NO: 385559 - RNA, 19 nt, Homo sapiens
  misc_RNA (1)...(19): siRNA sense strand
guaaaauucugggcugauu

SEQ ID NO: 385560 - RNA, 19 nt, Homo sapiens
  misc_RNA (1)...(19): siRNA sense strand
acugcaauauucaagauga

SEQ ID NO: 385561 - RNA, 19 nt, Homo sapiens
  misc_RNA (1)...(19): siRNA sense strand
aggaggcccuggcuaucua

SEQ ID NO: 385562 - RNA, 19 nt, Homo sapiens
  misc_RNA (1)...(19): siRNA sense strand
agaauggccgauuuguaua

SEQ ID NO: 385563 - RNA, 19 nt, Homo sapiens
  misc_RNA (1)...(19): siRNA sense strand
uggcuuaaaggaacuguuu

SEQ ID NO: 385564 - RNA, 19 nt, Homo sapiens
  misc_RNA (1)...(19): siRNA sense strand
uaugcaagguuugagaaug

SEQ ID NO: 385565 - RNA, 19 nt, Homo sapiens
  misc_RNA (1)...(19): siRNA sense strand
gaauggccgauuuguauac

SEQ ID NO: 385566 - RNA, 19 nt, Homo sapiens
  misc_RNA (1)...(19): siRNA sense strand
aagaaacucuacucugcau

SEQ ID NO: 385567 - RNA, 19 nt, Homo sapiens
  misc_RNA (1)...(19): siRNA sense strand
guggacauucgucagauuu

SEQ ID NO: 385568 - RNA, 19 nt, Homo sapiens
  misc_RNA (1)...(19): siRNA sense strand
caaacacuuaccagagaaa

SEQ ID NO: 385569 - RNA, 19 nt, Homo sapiens
  misc_RNA (1)...(19): siRNA sense strand
ccaaugugugaauauauga

SEQ ID NO: 385570 - RNA, 19 nt, Homo sapiens
  misc_RNA (1)...(19): siRNA sense strand
ggcuaucuauccaccaugu

SEQ ID NO: 385571 - RNA, 19 nt, Homo sapiens
  misc_RNA (1)...(19): siRNA sense strand
gggaagcaaguaguagaaa

SEQ ID NO: 385572 - RNA, 19 nt, Homo sapiens
  misc_RNA (1)...(19): siRNA sense strand
cgagaguucugaaaauaug

SEQ ID NO: 385573 - RNA, 19 nt, Homo sapiens
  misc_RNA (1)...(19): siRNA sense strand
gaaggcaaaauguauggua

SEQ ID NO: 385574 - RNA, 19 nt, Homo sapiens
  misc_RNA (1)...(19): siRNA sense strand
auuccaagcuaaaggauca

SEQ ID NO: 385575 - RNA, 19 nt, Homo sapiens
  misc_RNA (1)...(19): siRNA sense strand
gcugauuuaaacugcaaua

SEQ ID NO: 385576 - RNA, 19 nt, Homo sapiens
  misc_RNA (1)...(19): siRNA sense strand
auucugggcugauuuaaac

SEQ ID NO: 385577 - RNA, 19 nt, Homo sapiens
  misc_RNA (1)...(19): siRNA sense strand
ccaaccauucuuacaguga

SEQ ID NO: 385578 - RNA, 19 nt, Homo sapiens
  misc_RNA (1)...(19): siRNA sense strand
cagccaggauccucacaag

SEQ ID NO: 385579 - RNA, 19 nt, Homo sapiens
  misc_RNA (1)...(19): siRNA sense strand
ggcaagacgaggaccagaa

SEQ ID NO: 385580 - RNA, 19 nt, Homo sapiens
  misc_RNA (1)...(19): siRNA sense strand
gaaagggcccucaaaaugc

SEQ ID NO: 385581 - RNA, 19 nt, Homo sapiens
  misc_RNA (1)...(19): siRNA sense strand
agaaagguggcuuaaagga

SEQ ID NO: 385582 - RNA, 19 nt, Homo sapiens
  misc_RNA (1)...(19): siRNA sense strand
acagugacccauugcuuga

SEQ ID NO: 385583 - RNA, 19 nt, Homo sapiens
  misc_RNA (1)...(19): siRNA sense strand
gguggaauuuucagcuuuu

SEQ ID NO: 385584 - RNA, 19 nt, Homo sapiens
  misc_RNA (1)...(19): siRNA sense strand
gacauucgucagauuuaug

SEQ ID NO: 385585 - RNA, 19 nt, Homo sapiens
  misc_RNA (1)...(19): siRNA sense strand
acacggagcacaacaucau

SEQ ID NO: 385586 - RNA, 19 nt, Homo sapiens
  misc_RNA (1)...(19): siRNA sense strand
gccuguguguuugaaguuu

SEQ ID NO: 385587 - RNA, 19 nt, Homo sapiens
  misc_RNA (1)...(19): siRNA sense strand
gaguaugcaagguuugaga

SEQ ID NO: 385588 - RNA, 19 nt, Homo sapiens
  misc_RNA (1)...(19): siRNA sense strand
guagagacggaguaugcaa

SEQ ID NO: 385589 - RNA, 19 nt, Homo sapiens
  misc_RNA (1)...(19): siRNA sense strand
uacgagaguucugaaaaua

SEQ ID NO: 385590 - RNA, 19 nt, Homo sapiens
  misc_RNA (1)...(19): siRNA sense strand
cugcagauaagccaauuga

SEQ ID NO: 385591 - RNA, 19 nt, Homo sapiens
  misc_RNA (1)...(19): siRNA sense strand
ucaguggacauucgucaga

SEQ ID NO: 385592 - RNA, 19 nt, Homo sapiens
  misc_RNA (1)...(19): siRNA sense strand
aaauguaugguaggaauga

SEQ ID NO: 385593 - RNA, 19 nt, Homo sapiens
  misc_RNA (1)...(19): siRNA sense strand
agacggaguaugcaagguu

SEQ ID NO: 385594 - RNA, 19 nt, Homo sapiens
  misc_RNA (1)...(19): siRNA sense strand
acccauugcuugaaucagu

SEQ ID NO: 385595 - RNA, 19 nt, Homo sapiens
  misc_RNA (1)...(19): siRNA sense strand
gaucaacuucauccacaag

SEQ ID NO: 385596 - RNA, 19 nt, Homo sapiens
  misc_RNA (1)...(19): siRNA sense strand
agucaccuguuccaccaaa

SEQ ID NO: 385597 - RNA, 19 nt, Homo sapiens
  misc_RNA (1)...(19): siRNA sense strand
gaggaggaaaaucaucuua

SEQ ID NO: 385598 - RNA, 19 nt, Homo sapiens
  misc_RNA (1)...(19): siRNA sense strand
auaaaccgcuccccaaugu

SEQ ID NO: 385599 - RNA, 19 nt, Homo sapiens
  misc_RNA (1)...(19): siRNA sense strand
gaauaaaccgcuccccaau

SEQ ID NO: 385600 - RNA, 19 nt, Homo sapiens
  misc_RNA (1)...(19): siRNA sense strand
ugaaaagaaagguggcuua

SEQ ID NO: 385601 - RNA, 19 nt, Homo sapiens
  misc_RNA (1)...(19): siRNA sense strand
gcuugaaucaguggacauu

SEQ ID NO: 385602 - RNA, 19 nt, Homo sapiens
  misc_RNA (1)...(19): siRNA sense strand
gggcaugccaaccauucuu

SEQ ID NO: 385603 - RNA, 19 nt, Homo sapiens
  misc_RNA (1)...(19): siRNA sense strand
auaaggcccugcagcacau

SEQ ID NO: 385604 - RNA, 19 nt, Homo sapiens
  misc_RNA (1)...(19): siRNA sense strand
augcaagguuugagaaugg

SEQ ID NO: 385605 - RNA, 19 nt, Homo sapiens
  misc_RNA (1)...(19): siRNA sense strand
ugaucaacuucauccacaa

SEQ ID NO: 385606 - RNA, 19 nt, Homo sapiens
  misc_RNA (1)...(19): siRNA sense strand
gcaaacaggugguagagaa

SEQ ID NO: 385607 - RNA, 19 nt, Homo sapiens
  misc_RNA (1)...(19): siRNA sense strand
ugaaggagcucuaugagaa

SEQ ID NO: 385608 - RNA, 19 nt, Homo sapiens
  misc_RNA (1)...(19): siRNA sense strand
ggaagaaggugcgggagua

SEQ ID NO: 385609 - RNA, 19 nt, Homo sapiens
  misc_RNA (1)...(19): siRNA sense strand
ccagaucuaugacaaauuc

SEQ ID NO: 385610 - RNA, 19 nt, Homo sapiens
  misc_RNA (1)...(19): siRNA sense strand
uagagaagguggagacuga

SEQ ID NO: 385611 - RNA, 19 nt, Homo sapiens
  misc_RNA (1)...(19): siRNA sense strand
gcgaguacaugaucaacuu

SEQ ID NO: 385612 - RNA, 19 nt, Homo sapiens
  misc_RNA (1)...(19): siRNA sense strand
ggaagacucggacaagaaa

SEQ ID NO: 385613 - RNA, 19 nt, Homo sapiens
  misc_RNA (1)...(19): siRNA sense strand
ucuacaagcucgucaaaga

SEQ ID NO: 385614 - RNA, 19 nt, Homo sapiens
  misc_RNA (1)...(19): siRNA sense strand
ggaagaucauccugucaga

SEQ ID NO: 385615 - RNA, 19 nt, Homo sapiens
  misc_RNA (1)...(19): siRNA sense strand
ugaagcaccugcccgagaa

SEQ ID NO: 385616 - RNA, 19 nt, Homo sapiens
  misc_RNA (1)...(19): siRNA sense strand
gauugaaggagcucuauga

SEQ ID NO: 385617 - RNA, 19 nt, Homo sapiens
  misc_RNA (1)...(19): siRNA sense strand
cgccgacgcucagcaguua

SEQ ID NO: 385618 - RNA, 19 nt, Homo sapiens
  misc_RNA (1)...(19): siRNA sense strand
gggaagacucggacaagaa

SEQ ID NO: 385619 - RNA, 19 nt, Homo sapiens
  misc_RNA (1)...(19): siRNA sense strand
gaacccugcuugucauugc

SEQ ID NO: 385620 - RNA, 19 nt, Homo sapiens
  misc_RNA (1)...(19): siRNA sense strand
gaagguggagacugaguau

SEQ ID NO: 385621 - RNA, 19 nt, Homo sapiens
  misc_RNA (1)...(19): siRNA sense strand
acaaagcccuucagagcau

SEQ ID NO: 385622 - RNA, 19 nt, Homo sapiens
  misc_RNA (1)...(19): siRNA sense strand
ccaguguccugcagaacaa

SEQ ID NO: 385623 - RNA, 19 nt, Homo sapiens
  misc_RNA (1)...(19): siRNA sense strand
agaaguacaugaugaacag

SEQ ID NO: 385624 - RNA, 19 nt, Homo sapiens
  misc_RNA (1)...(19): siRNA sense strand
caagauguacggccgaaau

SEQ ID NO: 385625 - RNA, 19 nt, Homo sapiens
  misc_RNA (1)...(19): siRNA sense strand
uugauugcacgcuauauua

SEQ ID NO: 385626 - RNA, 19 nt, Homo sapiens
  misc_RNA (1)...(19): siRNA sense strand
gauugcacgcuauauuaaa

SEQ ID NO: 385627 - RNA, 19 nt, Homo sapiens
  misc_RNA (1)...(19): siRNA sense strand
gagaaguacaugaugaaca

SEQ ID NO: 385628 - RNA, 19 nt, Homo sapiens
  misc_RNA (1)...(19): siRNA sense strand
ugauugcacgcuauauuaa

SEQ ID NO: 385629 - RNA, 19 nt, Homo sapiens
  misc_RNA (1)...(19): siRNA sense strand
guaccagguuggcaucaag

SEQ ID NO: 385630 - RNA, 19 nt, Homo sapiens
  misc_RNA (1)...(19): siRNA sense strand
cccgagaaguacaugauga

SEQ ID NO: 385631 - RNA, 19 nt, Homo sapiens
  misc_RNA (1)...(19): siRNA sense strand
cagacgagggcaagaugua

SEQ ID NO: 385632 - RNA, 19 nt, Homo sapiens
  misc_RNA (1)...(19): siRNA sense strand
ggacaucaagcccuuugca

SEQ ID NO: 385633 - RNA, 19 nt, Homo sapiens
  misc_RNA (1)...(19): siRNA sense strand
gaugugcgccagaucuaug

SEQ ID NO: 385634 - RNA, 19 nt, Homo sapiens
  misc_RNA (1)...(19): siRNA sense strand
ggaguauucagccuucaug

SEQ ID NO: 385635 - RNA, 19 nt, Homo sapiens
  misc_RNA (1)...(19): siRNA sense strand
guugauugcacgcuauauu

SEQ ID NO: 385636 - RNA, 19 nt, Homo sapiens
  misc_RNA (1)...(19): siRNA sense strand
gaaggagcucuaugagaag

SEQ ID NO: 385637 - RNA, 19 nt, Homo sapiens
  misc_RNA (1)...(19): siRNA sense strand
uggcaggaccguaccauug

SEQ ID NO: 385638 - RNA, 19 nt, Homo sapiens
  misc_RNA (1)...(19): siRNA sense strand
ugaguugauugcacgcuau

SEQ ID NO: 385639 - RNA, 19 nt, Homo sapiens
  misc_RNA (1)...(19): siRNA sense strand
cgccagaucuaugacaaau

SEQ ID NO: 385640 - RNA, 19 nt, Homo sapiens
  misc_RNA (1)...(19): siRNA sense strand
acagguguccagccacaua

SEQ ID NO: 385641 - RNA, 19 nt, Homo sapiens
  misc_RNA (1)...(19): siRNA sense strand
cggccgaaaugaguugauu

SEQ ID NO: 385642 - RNA, 19 nt, Homo sapiens
  misc_RNA (1)...(19): siRNA sense strand
gaguugauugcacgcuaua

SEQ ID NO: 385643 - RNA, 19 nt, Homo sapiens
  misc_RNA (1)...(19): siRNA sense strand
cuaaugccuucuuccuugu

SEQ ID NO: 385644 - RNA, 19 nt, Homo sapiens
  misc_RNA (1)...(19): siRNA sense strand
ccacauacagguucuagcu

SEQ ID NO: 385645 - RNA, 19 nt, Homo sapiens
  misc_RNA (1)...(19): siRNA sense strand
acaagcucgucaaagacua

SEQ ID NO: 385646 - RNA, 19 nt, Homo sapiens
  misc_RNA (1)...(19): siRNA sense strand
gaggauugaaggagcucua

SEQ ID NO: 385647 - RNA, 19 nt, Homo sapiens
  misc_RNA (1)...(19): siRNA sense strand
gcacgcuauauuaaacuga

SEQ ID NO: 385648 - RNA, 19 nt, Homo sapiens
  misc_RNA (1)...(19): siRNA sense strand
guacggccgaaaugaguug

SEQ ID NO: 385649 - RNA, 19 nt, Homo sapiens
  misc_RNA (1)...(19): siRNA sense strand
ccagcaccaugucuacaag

SEQ ID NO: 385650 - RNA, 19 nt, Homo sapiens
  misc_RNA (1)...(19): siRNA sense strand
gaucaacuucauccacaag

SEQ ID NO: 385651 - RNA, 19 nt, Homo sapiens
  misc_RNA (1)...(19): siRNA sense strand
gauguacggccgaaaugag

SEQ ID NO: 385652 - RNA, 19 nt, Homo sapiens
  misc_RNA (1)...(19): siRNA sense strand
gggcccagcaccaugucua

SEQ ID NO: 385653 - RNA, 19 nt, Homo sapiens
  misc_RNA (1)...(19): siRNA sense strand
ugucauugcuuuugucuuc

SEQ ID NO: 385654 - RNA, 19 nt, Homo sapiens
  misc_RNA (1)...(19): siRNA sense strand
ccgagaaguacaugaugaa

SEQ ID NO: 385655 - RNA, 19 nt, Homo sapiens
  misc_RNA (1)...(19): siRNA sense strand
agaagguggagacugagua

SEQ ID NO: 385656 - RNA, 19 nt, Homo sapiens
  misc_RNA (1)...(19): siRNA sense strand
gaagaaggugcgggaguac

SEQ ID NO: 385657 - RNA, 19 nt, Homo sapiens
  misc_RNA (1)...(19): siRNA sense strand
ggaacccugcuugucauug

SEQ ID NO: 385658 - RNA, 19 nt, Homo sapiens
  misc_RNA (1)...(19): siRNA sense strand
ugaucaacuucauccacaa

SEQ ID NO: 385659 - RNA, 19 nt, Homo sapiens
  misc_RNA (1)...(19): siRNA sense strand
gcgccagaucuaugacaaa

SEQ ID NO: 385660 - RNA, 19 nt, Homo sapiens
  misc_RNA (1)...(19): siRNA sense strand
agcgagacccugacacgua

SEQ ID NO: 385661 - RNA, 19 nt, Homo sapiens
  misc_RNA (1)...(19): siRNA sense strand
acaaggggcuggacaacga

SEQ ID NO: 385662 - RNA, 19 nt, Homo sapiens
  misc_RNA (1)...(19): siRNA sense strand
gaguacaugaucaacuuca

SEQ ID NO: 385663 - RNA, 19 nt, Homo sapiens
  misc_RNA (1)...(19): siRNA sense strand
gccaguguccugcagaaca

SEQ ID NO: 385664 - RNA, 19 nt, Homo sapiens
  misc_RNA (1)...(19): siRNA sense strand
ccaggucuccaaggacaaa

SEQ ID NO: 385665 - RNA, 19 nt, Homo sapiens
  misc_RNA (1)...(19): siRNA sense strand
gcaccugcccgagaaguac

SEQ ID NO: 385666 - RNA, 19 nt, Homo sapiens
  misc_RNA (1)...(19): siRNA sense strand
ggacaaggacgaaggcaua

SEQ ID NO: 385667 - RNA, 19 nt, Homo sapiens
  misc_RNA (1)...(19): siRNA sense strand
gaaggugcccucuuugcaa

SEQ ID NO: 385668 - RNA, 19 nt, Homo sapiens
  misc_RNA (1)...(19): siRNA sense strand
cucagaaggugcccucuuu

SEQ ID NO: 385669 - RNA, 19 nt, Homo sapiens
  misc_RNA (1)...(19): siRNA sense strand
gcagacagccgaguacauc

SEQ ID NO: 385670 - RNA, 19 nt, Homo sapiens
  misc_RNA (1)...(19): siRNA sense strand
ggauuccagucccucaaga

SEQ ID NO: 385671 - RNA, 19 nt, Homo sapiens
  misc_RNA (1)...(19): siRNA sense strand
ccacacagacggagagaag

SEQ ID NO: 385672 - RNA, 19 nt, Homo sapiens
  misc_RNA (1)...(19): siRNA sense strand
gcccacauguacccggaaa

SEQ ID NO: 385673 - RNA, 19 nt, Homo sapiens
  misc_RNA (1)...(19): siRNA sense strand
gaaaacagagaaagaagug

SEQ ID NO: 385674 - RNA, 19 nt, Homo sapiens
  misc_RNA (1)...(19): siRNA sense strand
ucaacucuguuuccacauc

SEQ ID NO: 385675 - RNA, 19 nt, Homo sapiens
  misc_RNA (1)...(19): siRNA sense strand
aaacagagaaagaagugau

SEQ ID NO: 385676 - RNA, 19 nt, Homo sapiens
  misc_RNA (1)...(19): siRNA sense strand
ggcgagcugucaucgugaa

SEQ ID NO: 385677 - RNA, 19 nt, Homo sapiens
  misc_RNA (1)...(19): siRNA sense strand
gagcaucaacgcgggauuc

SEQ ID NO: 385678 - RNA, 19 nt, Homo sapiens
  misc_RNA (1)...(19): siRNA sense strand
cggaaaagcucaaggugau

SEQ ID NO: 385679 - RNA, 19 nt, Homo sapiens
  misc_RNA (1)...(19): siRNA sense strand
gcucagcaaggcagccauu

SEQ ID NO: 385680 - RNA, 19 nt, Homo sapiens
  misc_RNA (1)...(19): siRNA sense strand
agagaaagaagugauagga

SEQ ID NO: 385681 - RNA, 19 nt, Homo sapiens
  misc_RNA (1)...(19): siRNA sense strand
gcuggaggcccacauguac

SEQ ID NO: 385682 - RNA, 19 nt, Homo sapiens
  misc_RNA (1)...(19): siRNA sense strand
gcagaacacacagcucaag

SEQ ID NO: 385683 - RNA, 19 nt, Homo sapiens
  misc_RNA (1)...(19): siRNA sense strand
gaaaagcucaaggugauug

SEQ ID NO: 385684 - RNA, 19 nt, Homo sapiens
  misc_RNA (1)...(19): siRNA sense strand
gugauaggagggcucugua

SEQ ID NO: 385685 - RNA, 19 nt, Homo sapiens
  misc_RNA (1)...(19): siRNA sense strand
ggcaaaaucuggacaccau

SEQ ID NO: 385686 - RNA, 19 nt, Homo sapiens
  misc_RNA (1)...(19): siRNA sense strand
ucuguagccuugccaacau

SEQ ID NO: 385687 - RNA, 19 nt, Homo sapiens
  misc_RNA (1)...(19): siRNA sense strand
aacagagaaagaagugaua

SEQ ID NO: 385688 - RNA, 19 nt, Homo sapiens
  misc_RNA (1)...(19): siRNA sense strand
gacagccgaguacaucuuc

SEQ ID NO: 385689 - RNA, 19 nt, Homo sapiens
  misc_RNA (1)...(19): siRNA sense strand
ccucggucaucaacucugu

SEQ ID NO: 385690 - RNA, 19 nt, Homo sapiens
  misc_RNA (1)...(19): siRNA sense strand
ggaggagacugugagaauu

SEQ ID NO: 385691 - RNA, 19 nt, Homo sapiens
  misc_RNA (1)...(19): siRNA sense strand
uggauaggcugacgaagaa

SEQ ID NO: 385692 - RNA, 19 nt, Homo sapiens
  misc_RNA (1)...(19): siRNA sense strand
gaagcugguucacgacaug

SEQ ID NO: 385693 - RNA, 19 nt, Homo sapiens
  misc_RNA (1)...(19): siRNA sense strand
gaucgaaguuuucacauug

SEQ ID NO: 385694 - RNA, 19 nt, Homo sapiens
  misc_RNA (1)...(19): siRNA sense strand
ggccuuugaucgcgucuuu

SEQ ID NO: 385695 - RNA, 19 nt, Homo sapiens
  misc_RNA (1)...(19): siRNA sense strand
gagaauuguugcucuggau

SEQ ID NO: 385696 - RNA, 19 nt, Homo sapiens
  misc_RNA (1)...(19): siRNA sense strand
cacauuggcuguuacaagu

SEQ ID NO: 385697 - RNA, 19 nt, Homo sapiens
  misc_RNA (1)...(19): siRNA sense strand
gaccagaccgacaggcaua

SEQ ID NO: 385698 - RNA, 19 nt, Homo sapiens
  misc_RNA (1)...(19): siRNA sense strand
gaggagacugugagaauug

SEQ ID NO: 385699 - RNA, 19 nt, Homo sapiens
  misc_RNA (1)...(19): siRNA sense strand
cacgugggcugcuuuguau

SEQ ID NO: 385700 - RNA, 19 nt, Homo sapiens
  misc_RNA (1)...(19): siRNA sense strand
ggaguacuuuggccagugu

SEQ ID NO: 385701 - RNA, 19 nt, Homo sapiens
  misc_RNA (1)...(19): siRNA sense strand
ucacgugggcugcuuugua

SEQ ID NO: 385702 - RNA, 19 nt, Homo sapiens
  misc_RNA (1)...(19): siRNA sense strand
ccacugcauugaggacuuu

SEQ ID NO: 385703 - RNA, 19 nt, Homo sapiens
  misc_RNA (1)...(19): siRNA sense strand
ggaucgaaguuuucacauu

SEQ ID NO: 385704 - RNA, 19 nt, Homo sapiens
  misc_RNA (1)...(19): siRNA sense strand
cagccaccgucaccacuga

SEQ ID NO: 385705 - RNA, 19 nt, Homo sapiens
  misc_RNA (1)...(19): siRNA sense strand
ggacgccgagauagacuug

SEQ ID NO: 385706 - RNA, 19 nt, Homo sapiens
  misc_RNA (1)...(19): siRNA sense strand
gcuauaggagccagagaga

SEQ ID NO: 385707 - RNA, 19 nt, Homo sapiens
  misc_RNA (1)...(19): siRNA sense strand
gagacugugagaauuguug

SEQ ID NO: 385708 - RNA, 19 nt, Homo sapiens
  misc_RNA (1)...(19): siRNA sense strand
ugacgaagaagcugguuca

SEQ ID NO: 385709 - RNA, 19 nt, Homo sapiens
  misc_RNA (1)...(19): siRNA sense strand
uggccacccuggagaaaug

SEQ ID NO: 385710 - RNA, 19 nt, Homo sapiens
  misc_RNA (1)...(19): siRNA sense strand
acuccagccucuuacacua

SEQ ID NO: 385711 - RNA, 19 nt, Homo sapiens
  misc_RNA (1)...(19): siRNA sense strand
ucacauuggcuguuacaag

SEQ ID NO: 385712 - RNA, 19 nt, Homo sapiens
  misc_RNA (1)...(19): siRNA sense strand
ggucaggaggagacuguga

SEQ ID NO: 385713 - RNA, 19 nt, Homo sapiens
  misc_RNA (1)...(19): siRNA sense strand
cuggauaggcugacgaaga

SEQ ID NO: 385714 - RNA, 19 nt, Homo sapiens
  misc_RNA (1)...(19): siRNA sense strand
uugaggacuuucacaggaa

SEQ ID NO: 385715 - RNA, 19 nt, Homo sapiens
  misc_RNA (1)...(19): siRNA sense strand
gggcugcuuuguauguucu

SEQ ID NO: 385716 - RNA, 19 nt, Homo sapiens
  misc_RNA (1)...(19): siRNA sense strand
gcucccagcgucucccuau

SEQ ID NO: 385717 - RNA, 19 nt, Homo sapiens
  misc_RNA (1)...(19): siRNA sense strand
cgagccagauccacugcau

SEQ ID NO: 385718 - RNA, 19 nt, Homo sapiens
  misc_RNA (1)...(19): siRNA sense strand
aagccuggacgccgagaua

SEQ ID NO: 385719 - RNA, 19 nt, Homo sapiens
  misc_RNA (1)...(19): siRNA sense strand
uggagaggagggcauauug

SEQ ID NO: 385720 - RNA, 19 nt, Homo sapiens
  misc_RNA (1)...(19): siRNA sense strand
cagaggaugagcuggauag

SEQ ID NO: 385721 - RNA, 19 nt, Homo sapiens
  misc_RNA (1)...(19): siRNA sense strand
ggcugcugcucuccucuga

SEQ ID NO: 385722 - RNA, 19 nt, Homo sapiens
  misc_RNA (1)...(19): siRNA sense strand
guggagaggagggcauauu

SEQ ID NO: 385723 - RNA, 19 nt, Homo sapiens
  misc_RNA (1)...(19): siRNA sense strand
aggaggagacugugagaau

SEQ ID NO: 385724 - RNA, 19 nt, Homo sapiens
  misc_RNA (1)...(19): siRNA sense strand
ggagaggagggcauauugc

SEQ ID NO: 385725 - RNA, 19 nt, Homo sapiens
  misc_RNA (1)...(19): siRNA sense strand
gagccagauccacugcauu

SEQ ID NO: 385726 - RNA, 19 nt, Homo sapiens
  misc_RNA (1)...(19): siRNA sense strand
cagaccgacaggcauauga

SEQ ID NO: 385727 - RNA, 19 nt, Homo sapiens
  misc_RNA (1)...(19): siRNA sense strand
ugacgaagaugaagacaug

SEQ ID NO: 385728 - RNA, 19 nt, Homo sapiens
  misc_RNA (1)...(19): siRNA sense strand
caagauugcugagauccua

SEQ ID NO: 385729 - RNA, 19 nt, Homo sapiens
  misc_RNA (1)...(19): siRNA sense strand
gcuguuggaugacauaaug

SEQ ID NO: 385730 - RNA, 19 nt, Homo sapiens
  misc_RNA (1)...(19): siRNA sense strand
gaagagaagcauccuguuc

SEQ ID NO: 385731 - RNA, 19 nt, Homo sapiens
  misc_RNA (1)...(19): siRNA sense strand
gaauacagggcuucucauu

SEQ ID NO: 385732 - RNA, 19 nt, Homo sapiens
  misc_RNA (1)...(19): siRNA sense strand
uugcugagauccuauguaa

SEQ ID NO: 385733 - RNA, 19 nt, Homo sapiens
  misc_RNA (1)...(19): siRNA sense strand
uaacaagauugcugagauc

SEQ ID NO: 385734 - RNA, 19 nt, Homo sapiens
  misc_RNA (1)...(19): siRNA sense strand
caacagcagccuuaacuuc

SEQ ID NO: 385735 - RNA, 19 nt, Homo sapiens
  misc_RNA (1)...(19): siRNA sense strand
gcaauccccugcaauacua

SEQ ID NO: 385736 - RNA, 19 nt, Homo sapiens
  misc_RNA (1)...(19): siRNA sense strand
ggaugaagccaccugaaga

SEQ ID NO: 385737 - RNA, 19 nt, Homo sapiens
  misc_RNA (1)...(19): siRNA sense strand
cuaacaagauugcugagau

SEQ ID NO: 385738 - RNA, 19 nt, Homo sapiens
  misc_RNA (1)...(19): siRNA sense strand
aggaauaucuggugaacau

SEQ ID NO: 385739 - RNA, 19 nt, Homo sapiens
  misc_RNA (1)...(19): siRNA sense strand
uaaagugauuaccaaggaa

SEQ ID NO: 385740 - RNA, 19 nt, Homo sapiens
  misc_RNA (1)...(19): siRNA sense strand
auaaagugauuaccaagga

SEQ ID NO: 385741 - RNA, 19 nt, Homo sapiens
  misc_RNA (1)...(19): siRNA sense strand
gaauaucuggugaacauca

SEQ ID NO: 385742 - RNA, 19 nt, Homo sapiens
  misc_RNA (1)...(19): siRNA sense strand
ccugaucacugacgaagau

SEQ ID NO: 385743 - RNA, 19 nt, Homo sapiens
  misc_RNA (1)...(19): siRNA sense strand
gcugagauccuauguaagg

SEQ ID NO: 385744 - RNA, 19 nt, Homo sapiens
  misc_RNA (1)...(19): siRNA sense strand
gaagacaugcugagcuaca

SEQ ID NO: 385745 - RNA, 19 nt, Homo sapiens
  misc_RNA (1)...(19): siRNA sense strand
gaccacaacuucgcaggau

SEQ ID NO: 385746 - RNA, 19 nt, Homo sapiens
  misc_RNA (1)...(19): siRNA sense strand
caccacaacagcagccuua

SEQ ID NO: 385747 - RNA, 19 nt, Homo sapiens
  misc_RNA (1)...(19): siRNA sense strand
gaucacugacgaagaugaa

SEQ ID NO: 385748 - RNA, 19 nt, Homo sapiens
  misc_RNA (1)...(19): siRNA sense strand
augaagacaugcugagcua

SEQ ID NO: 385749 - RNA, 19 nt, Homo sapiens
  misc_RNA (1)...(19): siRNA sense strand
gaagcauccuguucaucuc

SEQ ID NO: 385750 - RNA, 19 nt, Homo sapiens
  misc_RNA (1)...(19): siRNA sense strand
gccuggagguggaagaaga

SEQ ID NO: 385751 - RNA, 19 nt, Homo sapiens
  misc_RNA (1)...(19): siRNA sense strand
caaggaauaucuggugaac

SEQ ID NO: 385752 - RNA, 19 nt, Homo sapiens
  misc_RNA (1)...(19): siRNA sense strand
agagugagcaggcggcuuu

SEQ ID NO: 385753 - RNA, 19 nt, Homo sapiens
  misc_RNA (1)...(19): siRNA sense strand
ucugcaagaucauguuguu

SEQ ID NO: 385754 - RNA, 19 nt, Homo sapiens
  misc_RNA (1)...(19): siRNA sense strand
agugguauccggauuauga

SEQ ID NO: 385755 - RNA, 19 nt, Homo sapiens
  misc_RNA (1)...(19): siRNA sense strand
cagcagccuuaacuucuuc

SEQ ID NO: 385756 - RNA, 19 nt, Homo sapiens
  misc_RNA (1)...(19): siRNA sense strand
auacagggcuucucauucc

SEQ ID NO: 385757 - RNA, 19 nt, Homo sapiens
  misc_RNA (1)...(19): siRNA sense strand
guauccggauuaugaagug

SEQ ID NO: 385758 - RNA, 19 nt, Homo sapiens
  misc_RNA (1)...(19): siRNA sense strand
ugagugguauccggauuau

SEQ ID NO: 385759 - RNA, 19 nt, Homo sapiens
  misc_RNA (1)...(19): siRNA sense strand
caacuucgcaggaucuaac

SEQ ID NO: 385760 - RNA, 19 nt, Homo sapiens
  misc_RNA (1)...(19): siRNA sense strand
ggagguggaagaagagaag

SEQ ID NO: 385761 - RNA, 19 nt, Homo sapiens
  misc_RNA (1)...(19): siRNA sense strand
gaugaagccaccugaagag

SEQ ID NO: 385762 - RNA, 19 nt, Homo sapiens
  misc_RNA (1)...(19): siRNA sense strand
acagcagccuuaacuucuu

SEQ ID NO: 385763 - RNA, 19 nt, Homo sapiens
  misc_RNA (1)...(19): siRNA sense strand
cagaauaaagugauuacca

SEQ ID NO: 385764 - RNA, 19 nt, Homo sapiens
  misc_RNA (1)...(19): siRNA sense strand
aagagaagcauccuguuca

SEQ ID NO: 385765 - RNA, 19 nt, Homo sapiens
  misc_RNA (1)...(19): siRNA sense strand
agagaagcauccuguucau

SEQ ID NO: 385766 - RNA, 19 nt, Homo sapiens
  misc_RNA (1)...(19): siRNA sense strand
gagcuggagccgguuaaug

SEQ ID NO: 385767 - RNA, 19 nt, Homo sapiens
  misc_RNA (1)...(19): siRNA sense strand
cuucugggccaauguuauu

SEQ ID NO: 385768 - RNA, 19 nt, Homo sapiens
  misc_RNA (1)...(19): siRNA sense strand
ucucauuccacuccaauug

SEQ ID NO: 385769 - RNA, 19 nt, Homo sapiens
  misc_RNA (1)...(19): siRNA sense strand
ccaaggaauaucuggugaa

SEQ ID NO: 385770 - RNA, 19 nt, Homo sapiens
  misc_RNA (1)...(19): siRNA sense strand
agaagcauccuguucaucu

SEQ ID NO: 385771 - RNA, 19 nt, Homo sapiens
  misc_RNA (1)...(19): siRNA sense strand
ucacugacgaagaugaaga

SEQ ID NO: 385772 - RNA, 19 nt, Homo sapiens
  misc_RNA (1)...(19): siRNA sense strand
gaggaugaagccaccugaa

SEQ ID NO: 385773 - RNA, 19 nt, Homo sapiens
  misc_RNA (1)...(19): siRNA sense strand
gcaccgccuucaggaugga

SEQ ID NO: 385774 - RNA, 19 nt, Homo sapiens
  misc_RNA (1)...(19): siRNA sense strand
agccuuaacuucuucaacu

SEQ ID NO: 385775 - RNA, 19 nt, Homo sapiens
  misc_RNA (1)...(19): siRNA sense strand
cacaacagcagccuuaacu

SEQ ID NO: 385776 - RNA, 19 nt, Homo sapiens
  misc_RNA (1)...(19): siRNA sense strand
cuuccagaauaaagugauu

SEQ ID NO: 385777 - RNA, 19 nt, Homo sapiens
  misc_RNA (1)...(19): siRNA sense strand
gccuuaacuucuucaacug

SEQ ID NO: 385778 - RNA, 19 nt, Homo sapiens
  misc_RNA (1)...(19): siRNA sense strand
ccacaacuucgcaggaucu

SEQ ID NO: 385779 - RNA, 19 nt, Homo sapiens
  misc_RNA (1)...(19): siRNA sense strand
gagaagcauccuguucauc

SEQ ID NO: 385780 - RNA, 19 nt, Homo sapiens
  misc_RNA (1)...(19): siRNA sense strand
cggugcugcuguuggauga

SEQ ID NO: 385781 - RNA, 19 nt, Homo sapiens
  misc_RNA (1)...(19): siRNA sense strand
ggaaacagcguaucacuga

SEQ ID NO: 385782 - RNA, 19 nt, Homo sapiens
  misc_RNA (1)...(19): siRNA sense strand
acacacagaggccguauua

SEQ ID NO: 385783 - RNA, 19 nt, Homo sapiens
  misc_RNA (1)...(19): siRNA sense strand
gaggccguauuacaaauga

SEQ ID NO: 385784 - RNA, 19 nt, Homo sapiens
  misc_RNA (1)...(19): siRNA sense strand
ggucagaggucggaugucu

SEQ ID NO: 385785 - RNA, 19 nt, Homo sapiens
  misc_RNA (1)...(19): siRNA sense strand
acacagaggccguauuaca

SEQ ID NO: 385786 - RNA, 19 nt, Homo sapiens
  misc_RNA (1)...(19): siRNA sense strand
ucauugcccuggccgugua

SEQ ID NO: 385787 - RNA, 19 nt, Homo sapiens
  misc_RNA (1)...(19): siRNA sense strand
gcccagagcgauugcaguu

SEQ ID NO: 385788 - RNA, 19 nt, Homo sapiens
  misc_RNA (1)...(19): siRNA sense strand
cacagaggccguauuacaa

SEQ ID NO: 385789 - RNA, 19 nt, Homo sapiens
  misc_RNA (1)...(19): siRNA sense strand
acagaggccguauuacaaa

SEQ ID NO: 385790 - RNA, 19 nt, Homo sapiens
  misc_RNA (1)...(19): siRNA sense strand
aaacagcguaucacugaga

SEQ ID NO: 385791 - RNA, 19 nt, Homo sapiens
  misc_RNA (1)...(19): siRNA sense strand
cagaggccguauuacaaau

SEQ ID NO: 385792 - RNA, 19 nt, Homo sapiens
  misc_RNA (1)...(19): siRNA sense strand
acagcgaccucaacacaca

SEQ ID NO: 385793 - RNA, 19 nt, Homo sapiens
  misc_RNA (1)...(19): siRNA sense strand
cuacagcgaccucaacaca

SEQ ID NO: 385794 - RNA, 19 nt, Homo sapiens
  misc_RNA (1)...(19): siRNA sense strand
gugcugacagugcucauug

SEQ ID NO: 385795 - RNA, 19 nt, Homo sapiens
  misc_RNA (1)...(19): siRNA sense strand
gagaccgagucgccuuauc

SEQ ID NO: 385796 - RNA, 19 nt, Homo sapiens
  misc_RNA (1)...(19): siRNA sense strand
agaccgagucgccuuauca

SEQ ID NO: 385797 - RNA, 19 nt, Homo sapiens
  misc_RNA (1)...(19): siRNA sense strand
gagaccuggugcugacagu

SEQ ID NO: 385798 - RNA, 19 nt, Homo sapiens
  misc_RNA (1)...(19): siRNA sense strand
ucagaggucggaugucuac

SEQ ID NO: 385799 - RNA, 19 nt, Homo sapiens
  misc_RNA (1)...(19): siRNA sense strand
ggaaacagcguaucacuga

SEQ ID NO: 385800 - RNA, 19 nt, Homo sapiens
  misc_RNA (1)...(19): siRNA sense strand
acacacagaggccguauua

SEQ ID NO: 385801 - RNA, 19 nt, Homo sapiens
  misc_RNA (1)...(19): siRNA sense strand
gaggccguauuacaaauga

SEQ ID NO: 385802 - RNA, 19 nt, Homo sapiens
  misc_RNA (1)...(19): siRNA sense strand
ggucagaggucggaugucu

SEQ ID NO: 385803 - RNA, 19 nt, Homo sapiens
  misc_RNA (1)...(19): siRNA sense strand
acacagaggccguauuaca

SEQ ID NO: 385804 - RNA, 19 nt, Homo sapiens
  misc_RNA (1)...(19): siRNA sense strand
ucauugcccuggccgugua

SEQ ID NO: 385805 - RNA, 19 nt, Homo sapiens
  misc_RNA (1)...(19): siRNA sense strand
gcccagagcgauugcaguu

SEQ ID NO: 385806 - RNA, 19 nt, Homo sapiens
  misc_RNA (1)...(19): siRNA sense strand
cacagaggccguauuacaa

SEQ ID NO: 385807 - RNA, 19 nt, Homo sapiens
  misc_RNA (1)...(19): siRNA sense strand
acagaggccguauuacaaa

SEQ ID NO: 385808 - RNA, 19 nt, Homo sapiens
  misc_RNA (1)...(19): siRNA sense strand
aaacagcguaucacugaga

SEQ ID NO: 385809 - RNA, 19 nt, Homo sapiens
  misc_RNA (1)...(19): siRNA sense strand
cagaggccguauuacaaau

SEQ ID NO: 385810 - RNA, 19 nt, Homo sapiens
  misc_RNA (1)...(19): siRNA sense strand
acagcgaccucaacacaca

SEQ ID NO: 385811 - RNA, 19 nt, Homo sapiens
  misc_RNA (1)...(19): siRNA sense strand
cuacagcgaccucaacaca

SEQ ID NO: 385812 - RNA, 19 nt, Homo sapiens
  misc_RNA (1)...(19): siRNA sense strand
gugcugacagugcucauug

SEQ ID NO: 385813 - RNA, 19 nt, Homo sapiens
  misc_RNA (1)...(19): siRNA sense strand
gagaccgagucgccuuauc

SEQ ID NO: 385814 - RNA, 19 nt, Homo sapiens
  misc_RNA (1)...(19): siRNA sense strand
agaccgagucgccuuauca

SEQ ID NO: 385815 - RNA, 19 nt, Homo sapiens
  misc_RNA (1)...(19): siRNA sense strand
gagaccuggugcugacagu

SEQ ID NO: 385816 - RNA, 19 nt, Homo sapiens
  misc_RNA (1)...(19): siRNA sense strand
ucagaggucggaugucuac

SEQ ID NO: 385817 - RNA, 19 nt, Homo sapiens
  misc_RNA (1)...(19): siRNA sense strand
ggaaagagcuucacuugua

SEQ ID NO: 385818 - RNA, 19 nt, Homo sapiens
  misc_RNA (1)...(19): siRNA sense strand
gaaagaagauuugguacua

SEQ ID NO: 385819 - RNA, 19 nt, Homo sapiens
  misc_RNA (1)...(19): siRNA sense strand
gaugagaucucccagguua

SEQ ID NO: 385820 - RNA, 19 nt, Homo sapiens
  misc_RNA (1)...(19): siRNA sense strand
gaagaagacuguggaauug

SEQ ID NO: 385821 - RNA, 19 nt, Homo sapiens
  misc_RNA (1)...(19): siRNA sense strand
gaacgcgccuuacaaauau

SEQ ID NO: 385822 - RNA, 19 nt, Homo sapiens
  misc_RNA (1)...(19): siRNA sense strand
gaaagagcuucacuuguaa

SEQ ID NO: 385823 - RNA, 19 nt, Homo sapiens
  misc_RNA (1)...(19): siRNA sense strand
gagaaacccuauaaaugua

SEQ ID NO: 385824 - RNA, 19 nt, Homo sapiens
  misc_RNA (1)...(19): siRNA sense strand
ggaagaagacuguggaauu

SEQ ID NO: 385825 - RNA, 19 nt, Homo sapiens
  misc_RNA (1)...(19): siRNA sense strand
acacgaagcucacaucuug

SEQ ID NO: 385826 - RNA, 19 nt, Homo sapiens
  misc_RNA (1)...(19): siRNA sense strand
cagaggauaucacuuaauu

SEQ ID NO: 385827 - RNA, 19 nt, Homo sapiens
  misc_RNA (1)...(19): siRNA sense strand
gagagaaacccuauaaaug

SEQ ID NO: 385828 - RNA, 19 nt, Homo sapiens
  misc_RNA (1)...(19): siRNA sense strand
ggagaaacccuauagaugu

SEQ ID NO: 385829 - RNA, 19 nt, Homo sapiens
  misc_RNA (1)...(19): siRNA sense strand
gaagagaccuccccuguga

SEQ ID NO: 385830 - RNA, 19 nt, Homo sapiens
  misc_RNA (1)...(19): siRNA sense strand
cagcagaggauaucacuua

SEQ ID NO: 385831 - RNA, 19 nt, Homo sapiens
  misc_RNA (1)...(19): siRNA sense strand
gaucugaguuuggaggaua

SEQ ID NO: 385832 - RNA, 19 nt, Homo sapiens
  misc_RNA (1)...(19): siRNA sense strand
ggagagaaacccuauaaau

SEQ ID NO: 385833 - RNA, 19 nt, Homo sapiens
  misc_RNA (1)...(19): siRNA sense strand
gcaggaagaucugaguuug

SEQ ID NO: 385834 - RNA, 19 nt, Homo sapiens
  misc_RNA (1)...(19): siRNA sense strand
ugaacgcgccuuacaaaua

SEQ ID NO: 385835 - RNA, 19 nt, Homo sapiens
  misc_RNA (1)...(19): siRNA sense strand
gagaaacccuauagaugug

SEQ ID NO: 385836 - RNA, 19 nt, Homo sapiens
  misc_RNA (1)...(19): siRNA sense strand
gaggagcucuggagacuca

SEQ ID NO: 385837 - RNA, 19 nt, Homo sapiens
  misc_RNA (1)...(19): siRNA sense strand
caucaugacuguucugugu

SEQ ID NO: 385838 - RNA, 19 nt, Homo sapiens
  misc_RNA (1)...(19): siRNA sense strand
ggagauaggaguaaagaug

SEQ ID NO: 385839 - RNA, 19 nt, Homo sapiens
  misc_RNA (1)...(19): siRNA sense strand
ccagguagacuuaaugaaa

SEQ ID NO: 385840 - RNA, 19 nt, Homo sapiens
  misc_RNA (1)...(19): siRNA sense strand
gaugaacgcgccuuacaaa

SEQ ID NO: 385841 - RNA, 19 nt, Homo sapiens
  misc_RNA (1)...(19): siRNA sense strand
gacaauccagguagacuua

SEQ ID NO: 385842 - RNA, 19 nt, Homo sapiens
  misc_RNA (1)...(19): siRNA sense strand
gaggauaucacuuaauuag

SEQ ID NO: 385843 - RNA, 19 nt, Homo sapiens
  misc_RNA (1)...(19): siRNA sense strand
ggauguggccguaugcuuu

SEQ ID NO: 385844 - RNA, 19 nt, Homo sapiens
  misc_RNA (1)...(19): siRNA sense strand
ccagaaauccugaguuuua

SEQ ID NO: 385845 - RNA, 19 nt, Homo sapiens
  misc_RNA (1)...(19): siRNA sense strand
agagaaacccuauaaaugu

SEQ ID NO: 385846 - RNA, 19 nt, Homo sapiens
  misc_RNA (1)...(19): siRNA sense strand
gagauaggaguaaagauga

SEQ ID NO: 385847 - RNA, 19 nt, Homo sapiens
  misc_RNA (1)...(19): siRNA sense strand
cguccuaccuggagaacua

SEQ ID NO: 385848 - RNA, 19 nt, Homo sapiens
  misc_RNA (1)...(19): siRNA sense strand
cagaggagacggugcauuu

SEQ ID NO: 385849 - RNA, 19 nt, Homo sapiens
  misc_RNA (1)...(19): siRNA sense strand
gagccugagucaccuaaug

SEQ ID NO: 385850 - RNA, 19 nt, Homo sapiens
  misc_RNA (1)...(19): siRNA sense strand
uaacaacacaccaaagaau

SEQ ID NO: 385851 - RNA, 19 nt, Homo sapiens
  misc_RNA (1)...(19): siRNA sense strand
gagaugguugcucuucuua

SEQ ID NO: 385852 - RNA, 19 nt, Homo sapiens
  misc_RNA (1)...(19): siRNA sense strand
gaggacacauacuggagaa

SEQ ID NO: 385853 - RNA, 19 nt, Homo sapiens
  misc_RNA (1)...(19): siRNA sense strand
gaaacccuauaaauguaug

SEQ ID NO: 385854 - RNA, 19 nt, Homo sapiens
  misc_RNA (1)...(19): siRNA sense strand
caggagagaaacccuauaa

SEQ ID NO: 385855 - RNA, 19 nt, Homo sapiens
  misc_RNA (1)...(19): siRNA sense strand
ucaaggauguggccguaug

SEQ ID NO: 385856 - RNA, 19 nt, Homo sapiens
  misc_RNA (1)...(19): siRNA sense strand
gaguaaagaugaggaagag

SEQ ID NO: 385857 - RNA, 19 nt, Homo sapiens
  misc_RNA (1)...(19): siRNA sense strand
ggaguaaagaugaggaaga

SEQ ID NO: 385858 - RNA, 19 nt, Homo sapiens
  misc_RNA (1)...(19): siRNA sense strand
agccagaaauccugaguuu

SEQ ID NO: 385859 - RNA, 19 nt, Homo sapiens
  misc_RNA (1)...(19): siRNA sense strand
gcagcaagcccuagagaag

SEQ ID NO: 385860 - RNA, 19 nt, Homo sapiens
  misc_RNA (1)...(19): siRNA sense strand
agaagacuguggaauuguu

SEQ ID NO: 385861 - RNA, 19 nt, Homo sapiens
  misc_RNA (1)...(19): siRNA sense strand
uggagaauaugucuuggaa

SEQ ID NO: 385862 - RNA, 19 nt, Homo sapiens
  misc_RNA (1)...(19): siRNA sense strand
guuaacaacacaccaaaga

SEQ ID NO: 385863 - RNA, 19 nt, Homo sapiens
  misc_RNA (1)...(19): siRNA sense strand
cagguagacuuaaugaaag

SEQ ID NO: 385864 - RNA, 19 nt, Homo sapiens
  misc_RNA (1)...(19): siRNA sense strand
gacgcacgcugcugaggaa

SEQ ID NO: 385865 - RNA, 19 nt, Homo sapiens
  misc_RNA (1)...(19): siRNA sense strand
uggugaaacuggaagauga

SEQ ID NO: 385866 - RNA, 19 nt, Homo sapiens
  misc_RNA (1)...(19): siRNA sense strand
gguggaggguuugcagaaa

SEQ ID NO: 385867 - RNA, 19 nt, Homo sapiens
  misc_RNA (1)...(19): siRNA sense strand
gacuccagauugggaaaua

SEQ ID NO: 385868 - RNA, 19 nt, Homo sapiens
  misc_RNA (1)...(19): siRNA sense strand
cacagggacugguaacguu

SEQ ID NO: 385869 - RNA, 19 nt, Homo sapiens
  misc_RNA (1)...(19): siRNA sense strand
gaugguugcucuucuuacu

SEQ ID NO: 385870 - RNA, 19 nt, Homo sapiens
  misc_RNA (1)...(19): siRNA sense strand
gugcuggaacaauuucuua

SEQ ID NO: 385871 - RNA, 19 nt, Homo sapiens
  misc_RNA (1)...(19): siRNA sense strand
agaaaucuguguuaacaac

SEQ ID NO: 385872 - RNA, 19 nt, Homo sapiens
  misc_RNA (1)...(19): siRNA sense strand
agacaucagaggacacaua

SEQ ID NO: 385873 - RNA, 19 nt, Homo sapiens
  misc_RNA (1)...(19): siRNA sense strand
ggaggcaucaugacuguuc

SEQ ID NO: 385874 - RNA, 19 nt, Homo sapiens
  misc_RNA (1)...(19): siRNA sense strand
ggacaauccagguagacuu

SEQ ID NO: 385875 - RNA, 19 nt, Homo sapiens
  misc_RNA (1)...(19): siRNA sense strand
cuacuuguguggagagugu

SEQ ID NO: 385876 - RNA, 19 nt, Homo sapiens
  misc_RNA (1)...(19): siRNA sense strand
cagaggacccacucagaaa

SEQ ID NO: 385877 - RNA, 19 nt, Homo sapiens
  misc_RNA (1)...(19): siRNA sense strand
gugggugacuguccauguu

SEQ ID NO: 385878 - RNA, 19 nt, Homo sapiens
  misc_RNA (1)...(19): siRNA sense strand
gaauucugauggugaaacu

SEQ ID NO: 385879 - RNA, 19 nt, Homo sapiens
  misc_RNA (1)...(19): siRNA sense strand
guggaaagagcuucacuug

SEQ ID NO: 385880 - RNA, 19 nt, Homo sapiens
  misc_RNA (1)...(19): siRNA sense strand
gaagacuguggaauuguug

SEQ ID NO: 385881 - RNA, 19 nt, Homo sapiens
  misc_RNA (1)...(19): siRNA sense strand
ucagaggacccacucagaa

SEQ ID NO: 385882 - RNA, 19 nt, Homo sapiens
  misc_RNA (1)...(19): siRNA sense strand
gaccagagaggcggacaaa

SEQ ID NO: 385883 - RNA, 19 nt, Homo sapiens
  misc_RNA (1)...(19): siRNA sense strand
ggaaaccucccaccagaac

SEQ ID NO: 385884 - RNA, 19 nt, Homo sapiens
  misc_RNA (1)...(19): siRNA sense strand
caucagaggacacauacug

SEQ ID NO: 385885 - RNA, 19 nt, Homo sapiens
  misc_RNA (1)...(19): siRNA sense strand
gaaacccuauagaugugau

SEQ ID NO: 385886 - RNA, 19 nt, Homo sapiens
  misc_RNA (1)...(19): siRNA sense strand
ugacgcugguggaggguuu

SEQ ID NO: 385887 - RNA, 19 nt, Homo sapiens
  misc_RNA (1)...(19): siRNA sense strand
ccagagaggcggacaaagg

SEQ ID NO: 385888 - RNA, 19 nt, Homo sapiens
  misc_RNA (1)...(19): siRNA sense strand
cggaagaauuuggaagaga

SEQ ID NO: 385889 - RNA, 19 nt, Homo sapiens
  misc_RNA (1)...(19): siRNA sense strand
ccaaaagguucacaagaug

SEQ ID NO: 385890 - RNA, 19 nt, Homo sapiens
  misc_RNA (1)...(19): siRNA sense strand
ucaccagacuccagauugg

SEQ ID NO: 385891 - RNA, 19 nt, Homo sapiens
  misc_RNA (1)...(19): siRNA sense strand
aggaagaucugaguuugga

SEQ ID NO: 385892 - RNA, 19 nt, Homo sapiens
  misc_RNA (1)...(19): siRNA sense strand
gaggagacggugcauuuag

SEQ ID NO: 385893 - RNA, 19 nt, Homo sapiens
  misc_RNA (1)...(19): siRNA sense strand
aaacaacccaggagaccaa

SEQ ID NO: 385894 - RNA, 19 nt, Homo sapiens
  misc_RNA (1)...(19): siRNA sense strand
ccgcuggacuucagaccuu

SEQ ID NO: 385895 - RNA, 19 nt, Homo sapiens
  misc_RNA (1)...(19): siRNA sense strand
uggagaaacccuauagaug

SEQ ID NO: 385896 - RNA, 19 nt, Homo sapiens
  misc_RNA (1)...(19): siRNA sense strand
caauccagguagacuuaau

SEQ ID NO: 385897 - RNA, 19 nt, Homo sapiens
  misc_RNA (1)...(19): siRNA sense strand
cagaggaccaggaucuuug

SEQ ID NO: 385898 - RNA, 19 nt, Homo sapiens
  misc_RNA (1)...(19): siRNA sense strand
ggaauuguugucucucugu

SEQ ID NO: 385899 - RNA, 19 nt, Homo sapiens
  misc_RNA (1)...(19): siRNA sense strand
gcagaggauaucacuuaau

SEQ ID NO: 385900 - RNA, 19 nt, Homo sapiens
  misc_RNA (1)...(19): siRNA sense strand
gaggcaaacccuacuugug

SEQ ID NO: 385901 - RNA, 19 nt, Homo sapiens
  misc_RNA (1)...(19): siRNA sense strand
cccuauagaugugaugauu

SEQ ID NO: 385902 - RNA, 19 nt, Homo sapiens
  misc_RNA (1)...(19): siRNA sense strand
caucagacuccgagaacuu

SEQ ID NO: 385903 - RNA, 19 nt, Homo sapiens
  misc_RNA (1)...(19): siRNA sense strand
ugaggacaauccagguaga

SEQ ID NO: 385904 - RNA, 19 nt, Homo sapiens
  misc_RNA (1)...(19): siRNA sense strand
cacaggagauaggaguaaa

SEQ ID NO: 385905 - RNA, 19 nt, Homo sapiens
  misc_RNA (1)...(19): siRNA sense strand
cuauagaugugaugauugc

SEQ ID NO: 385906 - RNA, 19 nt, Homo sapiens
  misc_RNA (1)...(19): siRNA sense strand
cagagaggcggacaaagga

SEQ ID NO: 385907 - RNA, 19 nt, Homo sapiens
  misc_RNA (1)...(19): siRNA sense strand
cccuaaaccggaagaauuu

SEQ ID NO: 385908 - RNA, 19 nt, Homo sapiens
  misc_RNA (1)...(19): siRNA sense strand
ccagaggaccaggaucuuu

SEQ ID NO: 385909 - RNA, 19 nt, Homo sapiens
  misc_RNA (1)...(19): siRNA sense strand
ggagacggugcauuuagga

SEQ ID NO: 385910 - RNA, 19 nt, Homo sapiens
  misc_RNA (1)...(19): siRNA sense strand
gcacgcugcugaggaacuc

SEQ ID NO: 385911 - RNA, 19 nt, Homo sapiens
  misc_RNA (1)...(19): siRNA sense strand
aggcaaacccuacuugugu

SEQ ID NO: 385912 - RNA, 19 nt, Homo sapiens
  misc_RNA (1)...(19): siRNA sense strand
guggagaaacccuauagau

SEQ ID NO: 385913 - RNA, 19 nt, Homo sapiens
  misc_RNA (1)...(19): siRNA sense strand
gagcaggaagaucugaguu

SEQ ID NO: 385914 - RNA, 19 nt, Homo sapiens
  misc_RNA (1)...(19): siRNA sense strand
cuauggagaauaugucuug

SEQ ID NO: 385915 - RNA, 19 nt, Homo sapiens
  misc_RNA (1)...(19): siRNA sense strand
ggaggcaaacccuacuugu

SEQ ID NO: 385916 - RNA, 19 nt, Homo sapiens
  misc_RNA (1)...(19): siRNA sense strand
ucaugacuguucugugugu

SEQ ID NO: 385917 - RNA, 19 nt, Homo sapiens
  misc_RNA (1)...(19): siRNA sense strand
gggagaaguucguguauuu

SEQ ID NO: 385918 - RNA, 19 nt, Homo sapiens
  misc_RNA (1)...(19): siRNA sense strand
cgagauaaaggauagguua

SEQ ID NO: 385919 - RNA, 19 nt, Homo sapiens
  misc_RNA (1)...(19): siRNA sense strand
gcccuuaaccaucgagaua

SEQ ID NO: 385920 - RNA, 19 nt, Homo sapiens
  misc_RNA (1)...(19): siRNA sense strand
gcccaagccugcugccuau

SEQ ID NO: 385921 - RNA, 19 nt, Homo sapiens
  misc_RNA (1)...(19): siRNA sense strand
uaaaggauagguuacaguu

SEQ ID NO: 385922 - RNA, 19 nt, Homo sapiens
  misc_RNA (1)...(19): siRNA sense strand
gauaaaggauagguuacag

SEQ ID NO: 385923 - RNA, 19 nt, Homo sapiens
  misc_RNA (1)...(19): siRNA sense strand
aaggauagguuacaguuac

SEQ ID NO: 385924 - RNA, 19 nt, Homo sapiens
  misc_RNA (1)...(19): siRNA sense strand
ccuuaaccaucgagauaaa

SEQ ID NO: 385925 - RNA, 19 nt, Homo sapiens
  misc_RNA (1)...(19): siRNA sense strand
ggagaaguucguguauuug

SEQ ID NO: 385926 - RNA, 19 nt, Homo sapiens
  misc_RNA (1)...(19): siRNA sense strand
ccaucgagauaaaggauag

SEQ ID NO: 385927 - RNA, 19 nt, Homo sapiens
  misc_RNA (1)...(19): siRNA sense strand
aaaggauagguuacaguua

SEQ ID NO: 385928 - RNA, 19 nt, Homo sapiens
  misc_RNA (1)...(19): siRNA sense strand
gauccucagacuccaguuu

SEQ ID NO: 385929 - RNA, 19 nt, Homo sapiens
  misc_RNA (1)...(19): siRNA sense strand
gagaaguucguguauuugg

SEQ ID NO: 385930 - RNA, 19 nt, Homo sapiens
  misc_RNA (1)...(19): siRNA sense strand
uggcagcucuacccugaug

SEQ ID NO: 385931 - RNA, 19 nt, Homo sapiens
  misc_RNA (1)...(19): siRNA sense strand
gacgauaccgauccucaga

SEQ ID NO: 385932 - RNA, 19 nt, Homo sapiens
  misc_RNA (1)...(19): siRNA sense strand
agaaguucguguauuugga

SEQ ID NO: 385933 - RNA, 19 nt, Homo sapiens
  misc_RNA (1)...(19): siRNA sense strand
ucgagcugcugccagauga

SEQ ID NO: 385934 - RNA, 19 nt, Homo sapiens
  misc_RNA (1)...(19): siRNA sense strand
ugggagaaguucguguauu

SEQ ID NO: 385935 - RNA, 19 nt, Homo sapiens
  misc_RNA (1)...(19): siRNA sense strand
ccaagccugcugccuauca

SEQ ID NO: 385936 - RNA, 19 nt, Homo sapiens
  misc_RNA (1)...(19): siRNA sense strand
gcgcuuaguguaccacauc

SEQ ID NO: 385937 - RNA, 19 nt, Homo sapiens
  misc_RNA (1)...(19): siRNA sense strand
gagauaaaggauagguuac

SEQ ID NO: 385938 - RNA, 19 nt, Homo sapiens
  misc_RNA (1)...(19): siRNA sense strand
cgauaccgauccucagacu

SEQ ID NO: 385939 - RNA, 19 nt, Homo sapiens
  misc_RNA (1)...(19): siRNA sense strand
caagccugcugccuaucau

SEQ ID NO: 385940 - RNA, 19 nt, Homo sapiens
  misc_RNA (1)...(19): siRNA sense strand
ccugggagaaguucgugua

SEQ ID NO: 385941 - RNA, 19 nt, Homo sapiens
  misc_RNA (1)...(19): siRNA sense strand
gcagcucuacccugaugga

SEQ ID NO: 385942 - RNA, 19 nt, Homo sapiens
  misc_RNA (1)...(19): siRNA sense strand
gcugcugccagaugacuga

SEQ ID NO: 385943 - RNA, 19 nt, Homo sapiens
  misc_RNA (1)...(19): siRNA sense strand
gaacaaagccaucuccuau

SEQ ID NO: 385944 - RNA, 19 nt, Homo sapiens
  misc_RNA (1)...(19): siRNA sense strand
ucacugaccucuucuuugu

SEQ ID NO: 385945 - RNA, 19 nt, Homo sapiens
  misc_RNA (1)...(19): siRNA sense strand
ggagauaaccagagugaga

SEQ ID NO: 385946 - RNA, 19 nt, Homo sapiens
  misc_RNA (1)...(19): siRNA sense strand
ccaagaugcuggugaacuu

SEQ ID NO: 385947 - RNA, 19 nt, Homo sapiens
  misc_RNA (1)...(19): siRNA sense strand
ggauguuccuguccaugua

SEQ ID NO: 385948 - RNA, 19 nt, Homo sapiens
  misc_RNA (1)...(19): siRNA sense strand
gaaaugugcucaucauccu

SEQ ID NO: 385949 - RNA, 19 nt, Homo sapiens
  misc_RNA (1)...(19): siRNA sense strand
ggauggagauaaccagagu

SEQ ID NO: 385950 - RNA, 19 nt, Homo sapiens
  misc_RNA (1)...(19): siRNA sense strand
caaaugcccucggccucua

SEQ ID NO: 385951 - RNA, 19 nt, Homo sapiens
  misc_RNA (1)...(19): siRNA sense strand
ucagaaccauccuucaaau

SEQ ID NO: 385952 - RNA, 19 nt, Homo sapiens
  misc_RNA (1)...(19): siRNA sense strand
gagauaaccagagugagaa

SEQ ID NO: 385953 - RNA, 19 nt, Homo sapiens
  misc_RNA (1)...(19): siRNA sense strand
cuccauaccuacuccauga

SEQ ID NO: 385954 - RNA, 19 nt, Homo sapiens
  misc_RNA (1)...(19): siRNA sense strand
ucacggugcugggaaaugu

SEQ ID NO: 385955 - RNA, 19 nt, Homo sapiens
  misc_RNA (1)...(19): siRNA sense strand
caccuaugaugaacccuuu

SEQ ID NO: 385956 - RNA, 19 nt, Homo sapiens
  misc_RNA (1)...(19): siRNA sense strand
acaaagccaucuccuaugc

SEQ ID NO: 385957 - RNA, 19 nt, Homo sapiens
  misc_RNA (1)...(19): siRNA sense strand
gugcugacaccuaugauga

SEQ ID NO: 385958 - RNA, 19 nt, Homo sapiens
  misc_RNA (1)...(19): siRNA sense strand
gauggcguaugaucgcuau

SEQ ID NO: 385959 - RNA, 19 nt, Homo sapiens
  misc_RNA (1)...(19): siRNA sense strand
uccacuaccucuucuguga

SEQ ID NO: 385960 - RNA, 19 nt, Homo sapiens
  misc_RNA (1)...(19): siRNA sense strand
gauguaugcugugcugaca

SEQ ID NO: 385961 - RNA, 19 nt, Homo sapiens
  misc_RNA (1)...(19): siRNA sense strand
gucagaaccauccuucaaa

SEQ ID NO: 385962 - RNA, 19 nt, Homo sapiens
  misc_RNA (1)...(19): siRNA sense strand
gcccucggccucuaagaaa

SEQ ID NO: 385963 - RNA, 19 nt, Homo sapiens
  misc_RNA (1)...(19): siRNA sense strand
cuauguacguauugucaga

SEQ ID NO: 385964 - RNA, 19 nt, Homo sapiens
  misc_RNA (1)...(19): siRNA sense strand
gagauccacuaccucuucu

SEQ ID NO: 385965 - RNA, 19 nt, Homo sapiens
  misc_RNA (1)...(19): siRNA sense strand
ccucggccucuaagaaaua

SEQ ID NO: 385966 - RNA, 19 nt, Homo sapiens
  misc_RNA (1)...(19): siRNA sense strand
gaacuuccagucccagaac

SEQ ID NO: 385967 - RNA, 19 nt, Homo sapiens
  misc_RNA (1)...(19): siRNA sense strand
guucaugaccacauccuau

SEQ ID NO: 385968 - RNA, 19 nt, Homo sapiens
  misc_RNA (1)...(19): siRNA sense strand
caucuuccucacccucuua

SEQ ID NO: 385969 - RNA, 19 nt, Homo sapiens
  misc_RNA (1)...(19): siRNA sense strand
gcugggaaaugugcucauc

SEQ ID NO: 385970 - RNA, 19 nt, Homo sapiens
  misc_RNA (1)...(19): siRNA sense strand
ggacgcuugcuauggugua

SEQ ID NO: 385971 - RNA, 19 nt, Homo sapiens
  misc_RNA (1)...(19): siRNA sense strand
agaacaaagccaucuccua

SEQ ID NO: 385972 - RNA, 19 nt, Homo sapiens
  misc_RNA (1)...(19): siRNA sense strand
gauccacuaccucuucugu

SEQ ID NO: 385973 - RNA, 19 nt, Homo sapiens
  misc_RNA (1)...(19): siRNA sense strand
gguguggucucccucuuuu

SEQ ID NO: 385974 - RNA, 19 nt, Homo sapiens
  misc_RNA (1)...(19): siRNA sense strand
ugaccagggugaccuucug

SEQ ID NO: 385975 - RNA, 19 nt, Homo sapiens
  misc_RNA (1)...(19): siRNA sense strand
cuauggagacccuuucaga

SEQ ID NO: 385976 - RNA, 19 nt, Homo sapiens
  misc_RNA (1)...(19): siRNA sense strand
gcugugcugacaccuauga

SEQ ID NO: 385977 - RNA, 19 nt, Homo sapiens
  misc_RNA (1)...(19): siRNA sense strand
ccucuucugugacauguac

SEQ ID NO: 385978 - RNA, 19 nt, Homo sapiens
  misc_RNA (1)...(19): siRNA sense strand
ccaacacccacaucauuca

SEQ ID NO: 385979 - RNA, 19 nt, Homo sapiens
  misc_RNA (1)...(19): siRNA sense strand
ugucagaaccauccuucaa

SEQ ID NO: 385980 - RNA, 19 nt, Homo sapiens
  misc_RNA (1)...(19): siRNA sense strand
gcagcagcagauccuguuu

SEQ ID NO: 385981 - RNA, 19 nt, Homo sapiens
  misc_RNA (1)...(19): siRNA sense strand
ugggaaaugugcucaucau

SEQ ID NO: 385982 - RNA, 19 nt, Homo sapiens
  misc_RNA (1)...(19): siRNA sense strand
cuaccugugccucgcauuu

SEQ ID NO: 385983 - RNA, 19 nt, Homo sapiens
  misc_RNA (1)...(19): siRNA sense strand
uggccgugauggcguauga

SEQ ID NO: 385984 - RNA, 19 nt, Homo sapiens
  misc_RNA (1)...(19): siRNA sense strand
cuccuucacugaccucuuc

SEQ ID NO: 385985 - RNA, 19 nt, Homo sapiens
  misc_RNA (1)...(19): siRNA sense strand
cagaaccauccuucaaaug

SEQ ID NO: 385986 - RNA, 19 nt, Homo sapiens
  misc_RNA (1)...(19): siRNA sense strand
cauccuauguacguauugu

SEQ ID NO: 385987 - RNA, 19 nt, Homo sapiens
  misc_RNA (1)...(19): siRNA sense strand
ggguguggucucccucuuu

SEQ ID NO: 385988 - RNA, 19 nt, Homo sapiens
  misc_RNA (1)...(19): siRNA sense strand
gcugacaccuaugaugaac

SEQ ID NO: 385989 - RNA, 19 nt, Homo sapiens
  misc_RNA (1)...(19): siRNA sense strand
ggcguaugaucgcuaugug

SEQ ID NO: 385990 - RNA, 19 nt, Homo sapiens
  misc_RNA (1)...(19): siRNA sense strand
guacguauugucagaacca

SEQ ID NO: 385991 - RNA, 19 nt, Homo sapiens
  misc_RNA (1)...(19): siRNA sense strand
cagcagauccuguuuugga

SEQ ID NO: 385992 - RNA, 19 nt, Homo sapiens
  misc_RNA (1)...(19): siRNA sense strand
gcuaauaguucuacucuaa

SEQ ID NO: 385993 - RNA, 19 nt, Homo sapiens
  misc_RNA (1)...(19): siRNA sense strand
gcagagucauucaucagaa

SEQ ID NO: 385994 - RNA, 19 nt, Homo sapiens
  misc_RNA (1)...(19): siRNA sense strand
gcacuacaccgccaucaug

SEQ ID NO: 385995 - RNA, 19 nt, Homo sapiens
  misc_RNA (1)...(19): siRNA sense strand
guuacacacuuuacucaug

SEQ ID NO: 385996 - RNA, 19 nt, Homo sapiens
  misc_RNA (1)...(19): siRNA sense strand
guuaaugaaugggugauau

SEQ ID NO: 385997 - RNA, 19 nt, Homo sapiens
  misc_RNA (1)...(19): siRNA sense strand
gggaaccuccucaucauug

SEQ ID NO: 385998 - RNA, 19 nt, Homo sapiens
  misc_RNA (1)...(19): siRNA sense strand
ccacacgccuauguauuug

SEQ ID NO: 385999 - RNA, 19 nt, Homo sapiens
  misc_RNA (1)...(19): siRNA sense strand
ggaaccuccucaucauugu

SEQ ID NO: 386000 - RNA, 19 nt, Homo sapiens
  misc_RNA (1)...(19): siRNA sense strand
guacuucuuccuguuauuu

SEQ ID NO: 386001 - RNA, 19 nt, Homo sapiens
  misc_RNA (1)...(19): siRNA sense strand
ccucaucauuguccucauu

SEQ ID NO: 386002 - RNA, 19 nt, Homo sapiens
  misc_RNA (1)...(19): siRNA sense strand
gaccauucccaaguuguua

SEQ ID NO: 386003 - RNA, 19 nt, Homo sapiens
  misc_RNA (1)...(19): siRNA sense strand
ggagggcucauucuuguca

SEQ ID NO: 386004 - RNA, 19 nt, Homo sapiens
  misc_RNA (1)...(19): siRNA sense strand
acacucgaguuaaugaaug

SEQ ID NO: 386005 - RNA, 19 nt, Homo sapiens
  misc_RNA (1)...(19): siRNA sense strand
ugcaaggccuucucuacuu

SEQ ID NO: 386006 - RNA, 19 nt, Homo sapiens
  misc_RNA (1)...(19): siRNA sense strand
acacgccuauguauuuguu

SEQ ID NO: 386007 - RNA, 19 nt, Homo sapiens
  misc_RNA (1)...(19): siRNA sense strand
caagaauugucuccuccau

SEQ ID NO: 386008 - RNA, 19 nt, Homo sapiens
  misc_RNA (1)...(19): siRNA sense strand
ugggagggcucauucuugu

SEQ ID NO: 386009 - RNA, 19 nt, Homo sapiens
  misc_RNA (1)...(19): siRNA sense strand
gcaacuuguccuucucuga

SEQ ID NO: 386010 - RNA, 19 nt, Homo sapiens
  misc_RNA (1)...(19): siRNA sense strand
aaaccagcaucucagacuu

SEQ ID NO: 386011 - RNA, 19 nt, Homo sapiens
  misc_RNA (1)...(19): siRNA sense strand
ugacccaaauguacuucuu

SEQ ID NO: 386012 - RNA, 19 nt, Homo sapiens
  misc_RNA (1)...(19): siRNA sense strand
aaauguacuucuuccuguu

SEQ ID NO: 386013 - RNA, 19 nt, Homo sapiens
  misc_RNA (1)...(19): siRNA sense strand
uccacacgccuauguauuu

SEQ ID NO: 386014 - RNA, 19 nt, Homo sapiens
  misc_RNA (1)...(19): siRNA sense strand
aagcuggccuucucugaca

SEQ ID NO: 386015 - RNA, 19 nt, Homo sapiens
  misc_RNA (1)...(19): siRNA sense strand
ugagcagagucauucauca

SEQ ID NO: 386016 - RNA, 19 nt, Homo sapiens
  misc_RNA (1)...(19): siRNA sense strand
uuggagaccuggagagcuu

SEQ ID NO: 386017 - RNA, 19 nt, Homo sapiens
  misc_RNA (1)...(19): siRNA sense strand
aauguacuucuuccuguua

SEQ ID NO: 386018 - RNA, 19 nt, Homo sapiens
  misc_RNA (1)...(19): siRNA sense strand
cagagucauucaucagaag

SEQ ID NO: 386019 - RNA, 19 nt, Homo sapiens
  misc_RNA (1)...(19): siRNA sense strand
cggacugccugacccaaau

SEQ ID NO: 386020 - RNA, 19 nt, Homo sapiens
  misc_RNA (1)...(19): siRNA sense strand
uggcuaugauguacacugu

SEQ ID NO: 386021 - RNA, 19 nt, Homo sapiens
  misc_RNA (1)...(19): siRNA sense strand
uacagaacaugcagaacca

SEQ ID NO: 386022 - RNA, 19 nt, Homo sapiens
  misc_RNA (1)...(19): siRNA sense strand
caaaccagcaucucagacu

SEQ ID NO: 386023 - RNA, 19 nt, Homo sapiens
  misc_RNA (1)...(19): siRNA sense strand
gagcagagucauucaucag

SEQ ID NO: 386024 - RNA, 19 nt, Homo sapiens
  misc_RNA (1)...(19): siRNA sense strand
ccuauguauuuguuucuca

SEQ ID NO: 386025 - RNA, 19 nt, Homo sapiens
  misc_RNA (1)...(19): siRNA sense strand
gcccugagcagagucauuc

SEQ ID NO: 386026 - RNA, 19 nt, Homo sapiens
  misc_RNA (1)...(19): siRNA sense strand
gacacucgaguuaaugaau

SEQ ID NO: 386027 - RNA, 19 nt, Homo sapiens
  misc_RNA (1)...(19): siRNA sense strand
ggacugccugacccaaaug

SEQ ID NO: 386028 - RNA, 19 nt, Homo sapiens
  misc_RNA (1)...(19): siRNA sense strand
gcggacugccugacccaaa

SEQ ID NO: 386029 - RNA, 19 nt, Homo sapiens
  misc_RNA (1)...(19): siRNA sense strand
ccugugcuaugcccuguuc

SEQ ID NO: 386030 - RNA, 19 nt, Homo sapiens
  misc_RNA (1)...(19): siRNA sense strand
ccgugaccauucccaaguu

SEQ ID NO: 386031 - RNA, 19 nt, Homo sapiens
  misc_RNA (1)...(19): siRNA sense strand
agucauucaucagaagaaa

SEQ ID NO: 386032 - RNA, 19 nt, Homo sapiens
  misc_RNA (1)...(19): siRNA sense strand
gaggaacagagacaugaag

SEQ ID NO: 386033 - RNA, 19 nt, Homo sapiens
  misc_RNA (1)...(19): siRNA sense strand
cagcuaauaguucuacucu

SEQ ID NO: 386034 - RNA, 19 nt, Homo sapiens
  misc_RNA (1)...(19): siRNA sense strand
cgugaccauucccaaguug

SEQ ID NO: 386035 - RNA, 19 nt, Homo sapiens
  misc_RNA (1)...(19): siRNA sense strand
uguauuuguuucucagcaa

SEQ ID NO: 386036 - RNA, 19 nt, Homo sapiens
  misc_RNA (1)...(19): siRNA sense strand
uggguccuaugcaagaauu

SEQ ID NO: 386037 - RNA, 19 nt, Homo sapiens
  misc_RNA (1)...(19): siRNA sense strand
cauggccuaugaccgcuau

SEQ ID NO: 386038 - RNA, 19 nt, Homo sapiens
  misc_RNA (1)...(19): siRNA sense strand
gugcuaugcccuguucuug

SEQ ID NO: 386039 - RNA, 19 nt, Homo sapiens
  misc_RNA (1)...(19): siRNA sense strand
uggugucacuguucuaugg

SEQ ID NO: 386040 - RNA, 19 nt, Homo sapiens
  misc_RNA (1)...(19): siRNA sense strand
ugucuguggugucacuguu

SEQ ID NO: 386041 - RNA, 19 nt, Homo sapiens
  misc_RNA (1)...(19): siRNA sense strand
gucaucccauuccuacuca

SEQ ID NO: 386042 - RNA, 19 nt, Homo sapiens
  misc_RNA (1)...(19): siRNA sense strand
gcuauguggccaucugcuu

SEQ ID NO: 386043 - RNA, 19 nt, Homo sapiens
  misc_RNA (1)...(19): siRNA sense strand
ugaccauucccaaguuguu

SEQ ID NO: 386044 - RNA, 19 nt, Homo sapiens
  misc_RNA (1)...(19): siRNA sense strand
aaaucaaaccagcaucuca

SEQ ID NO: 386045 - RNA, 19 nt, Homo sapiens
  misc_RNA (1)...(19): siRNA sense strand
uaucaugggagggcucauu

SEQ ID NO: 386046 - RNA, 19 nt, Homo sapiens
  misc_RNA (1)...(19): siRNA sense strand
ugucugcucugcugaagcu

SEQ ID NO: 386047 - RNA, 19 nt, Homo sapiens
  misc_RNA (1)...(19): siRNA sense strand
gcuaauaguucuacucuaa

SEQ ID NO: 386048 - RNA, 19 nt, Homo sapiens
  misc_RNA (1)...(19): siRNA sense strand
uggaaagggucauuuguaa

SEQ ID NO: 386049 - RNA, 19 nt, Homo sapiens
  misc_RNA (1)...(19): siRNA sense strand
ccaaauugcugcagaacau

SEQ ID NO: 386050 - RNA, 19 nt, Homo sapiens
  misc_RNA (1)...(19): siRNA sense strand
caaauguacuucuucuugu

SEQ ID NO: 386051 - RNA, 19 nt, Homo sapiens
  misc_RNA (1)...(19): siRNA sense strand
ccaaauguacuucuucuug

SEQ ID NO: 386052 - RNA, 19 nt, Homo sapiens
  misc_RNA (1)...(19): siRNA sense strand
gcacuacaccgccaucaug

SEQ ID NO: 386053 - RNA, 19 nt, Homo sapiens
  misc_RNA (1)...(19): siRNA sense strand
ggaaagggucauuuguaaa

SEQ ID NO: 386054 - RNA, 19 nt, Homo sapiens
  misc_RNA (1)...(19): siRNA sense strand
gaaagggucauuuguaaaa

SEQ ID NO: 386055 - RNA, 19 nt, Homo sapiens
  misc_RNA (1)...(19): siRNA sense strand
guuacacacuuuacucaug

SEQ ID NO: 386056 - RNA, 19 nt, Homo sapiens
  misc_RNA (1)...(19): siRNA sense strand
guuaaugaaugggugauau

SEQ ID NO: 386057 - RNA, 19 nt, Homo sapiens
  misc_RNA (1)...(19): siRNA sense strand
gggaaccuccucaucauug

SEQ ID NO: 386058 - RNA, 19 nt, Homo sapiens
  misc_RNA (1)...(19): siRNA sense strand
ggaaccuccucaucauugu

SEQ ID NO: 386059 - RNA, 19 nt, Homo sapiens
  misc_RNA (1)...(19): siRNA sense strand
ccucaucauuguccucauu

SEQ ID NO: 386060 - RNA, 19 nt, Homo sapiens
  misc_RNA (1)...(19): siRNA sense strand
ggagggcucauucuuguca

SEQ ID NO: 386061 - RNA, 19 nt, Homo sapiens
  misc_RNA (1)...(19): siRNA sense strand
acacucgaguuaaugaaug

SEQ ID NO: 386062 - RNA, 19 nt, Homo sapiens
  misc_RNA (1)...(19): siRNA sense strand
ugcaaggccuucucuacuu

SEQ ID NO: 386063 - RNA, 19 nt, Homo sapiens
  misc_RNA (1)...(19): siRNA sense strand
gcaacuuguccuucucuga

SEQ ID NO: 386064 - RNA, 19 nt, Homo sapiens
  misc_RNA (1)...(19): siRNA sense strand
caagaauugucuccuccau

SEQ ID NO: 386065 - RNA, 19 nt, Homo sapiens
  misc_RNA (1)...(19): siRNA sense strand
ugggagggcucauucuugu

SEQ ID NO: 386066 - RNA, 19 nt, Homo sapiens
  misc_RNA (1)...(19): siRNA sense strand
ugacccaaauguacuucuu

SEQ ID NO: 386067 - RNA, 19 nt, Homo sapiens
  misc_RNA (1)...(19): siRNA sense strand
gcucugacacucgaguuaa

SEQ ID NO: 386068 - RNA, 19 nt, Homo sapiens
  misc_RNA (1)...(19): siRNA sense strand
aaaccagcaucucagacuu

SEQ ID NO: 386069 - RNA, 19 nt, Homo sapiens
  misc_RNA (1)...(19): siRNA sense strand
cagucacaaugcccaaauu

SEQ ID NO: 386070 - RNA, 19 nt, Homo sapiens
  misc_RNA (1)...(19): siRNA sense strand
gaacaugcagaaccaagac

SEQ ID NO: 386071 - RNA, 19 nt, Homo sapiens
  misc_RNA (1)...(19): siRNA sense strand
cuggaaagggucauuugua

SEQ ID NO: 386072 - RNA, 19 nt, Homo sapiens
  misc_RNA (1)...(19): siRNA sense strand
aagcuggccugcucugaca

SEQ ID NO: 386073 - RNA, 19 nt, Homo sapiens
  misc_RNA (1)...(19): siRNA sense strand
uggcuaugauguacacugu

SEQ ID NO: 386074 - RNA, 19 nt, Homo sapiens
  misc_RNA (1)...(19): siRNA sense strand
uuucggaucuagagagcuu

SEQ ID NO: 386075 - RNA, 19 nt, Homo sapiens
  misc_RNA (1)...(19): siRNA sense strand
caaaccagcaucucagacu

SEQ ID NO: 386076 - RNA, 19 nt, Homo sapiens
  misc_RNA (1)...(19): siRNA sense strand
gacacucgaguuaaugaau

SEQ ID NO: 386077 - RNA, 19 nt, Homo sapiens
  misc_RNA (1)...(19): siRNA sense strand
ccugugcuaugcccuguuc

SEQ ID NO: 386078 - RNA, 19 nt, Homo sapiens
  misc_RNA (1)...(19): siRNA sense strand
cagcuaauaguucuacucu

SEQ ID NO: 386079 - RNA, 19 nt, Homo sapiens
  misc_RNA (1)...(19): siRNA sense strand
gaggaacagagacaugaag

SEQ ID NO: 386080 - RNA, 19 nt, Homo sapiens
  misc_RNA (1)...(19): siRNA sense strand
uguauuuguuucucagcaa

SEQ ID NO: 386081 - RNA, 19 nt, Homo sapiens
  misc_RNA (1)...(19): siRNA sense strand
uggguccuaugcaagaauu

SEQ ID NO: 386082 - RNA, 19 nt, Homo sapiens
  misc_RNA (1)...(19): siRNA sense strand
cauggccuaugaccgcuau

SEQ ID NO: 386083 - RNA, 19 nt, Homo sapiens
  misc_RNA (1)...(19): siRNA sense strand
gugcuaugcccuguucuug

SEQ ID NO: 386084 - RNA, 19 nt, Homo sapiens
  misc_RNA (1)...(19): siRNA sense strand
uggugucacuguucuaugg

SEQ ID NO: 386085 - RNA, 19 nt, Homo sapiens
  misc_RNA (1)...(19): siRNA sense strand
ucucuguggugucacuguu

SEQ ID NO: 386086 - RNA, 19 nt, Homo sapiens
  misc_RNA (1)...(19): siRNA sense strand
gucaucccauuccuacuca

SEQ ID NO: 386087 - RNA, 19 nt, Homo sapiens
  misc_RNA (1)...(19): siRNA sense strand
gcuauguggccaucugcuu

SEQ ID NO: 386088 - RNA, 19 nt, Homo sapiens
  misc_RNA (1)...(19): siRNA sense strand
uagagagcuuccuccuugu

SEQ ID NO: 386089 - RNA, 19 nt, Homo sapiens
  misc_RNA (1)...(19): siRNA sense strand
uaucaugggagggcucauu

SEQ ID NO: 386090 - RNA, 19 nt, Homo sapiens
  misc_RNA (1)...(19): siRNA sense strand
ugucugcucugcugaagcu

SEQ ID NO: 386091 - RNA, 19 nt, Homo sapiens
  misc_RNA (1)...(19): siRNA sense strand
aaaucaaaccagcaucuca

SEQ ID NO: 386092 - RNA, 19 nt, Homo sapiens
  misc_RNA (1)...(19): siRNA sense strand
ccaaugagcuggugaucuu

SEQ ID NO: 386093 - RNA, 19 nt, Homo sapiens
  misc_RNA (1)...(19): siRNA sense strand
aauaaagucuucccugaga

SEQ ID NO: 386094 - RNA, 19 nt, Homo sapiens
  misc_RNA (1)...(19): siRNA sense strand
ggacucauuugugugcuuu

SEQ ID NO: 386095 - RNA, 19 nt, Homo sapiens
  misc_RNA (1)...(19): siRNA sense strand
cguggucucucucuucuuu

SEQ ID NO: 386096 - RNA, 19 nt, Homo sapiens
  misc_RNA (1)...(19): siRNA sense strand
gaaggacacaguugcauca

SEQ ID NO: 386097 - RNA, 19 nt, Homo sapiens
  misc_RNA (1)...(19): siRNA sense strand
gguccuuccuguucaugua

SEQ ID NO: 386098 - RNA, 19 nt, Homo sapiens
  misc_RNA (1)...(19): siRNA sense strand
ccacuucauuacauucuga

SEQ ID NO: 386099 - RNA, 19 nt, Homo sapiens
  misc_RNA (1)...(19): siRNA sense strand
gcaggcaaccuccucauca

SEQ ID NO: 386100 - RNA, 19 nt, Homo sapiens
  misc_RNA (1)...(19): siRNA sense strand
agugguaacuccaauguug

SEQ ID NO: 386101 - RNA, 19 nt, Homo sapiens
  misc_RNA (1)...(19): siRNA sense strand
gaaccaagaaauaaagucu

SEQ ID NO: 386102 - RNA, 19 nt, Homo sapiens
  misc_RNA (1)...(19): siRNA sense strand
caucauuacugacacucaa

SEQ ID NO: 386103 - RNA, 19 nt, Homo sapiens
  misc_RNA (1)...(19): siRNA sense strand
ccacccacuucauuacauu

SEQ ID NO: 386104 - RNA, 19 nt, Homo sapiens
  misc_RNA (1)...(19): siRNA sense strand
cuaagaugcuggcaaacau

SEQ ID NO: 386105 - RNA, 19 nt, Homo sapiens
  misc_RNA (1)...(19): siRNA sense strand
cuacacacacuucugauga

SEQ ID NO: 386106 - RNA, 19 nt, Homo sapiens
  misc_RNA (1)...(19): siRNA sense strand
uaagaugcuggcaaacaua

SEQ ID NO: 386107 - RNA, 19 nt, Homo sapiens
  misc_RNA (1)...(19): siRNA sense strand
acauacagauccagaguca

SEQ ID NO: 386108 - RNA, 19 nt, Homo sapiens
  misc_RNA (1)...(19): siRNA sense strand
uaaagucuucccugagaaa

SEQ ID NO: 386109 - RNA, 19 nt, Homo sapiens
  misc_RNA (1)...(19): siRNA sense strand
ucccuaagaugcuggcaaa

SEQ ID NO: 386110 - RNA, 19 nt, Homo sapiens
  misc_RNA (1)...(19): siRNA sense strand
gaaaauucauuccccuuag

SEQ ID NO: 386111 - RNA, 19 nt, Homo sapiens
  misc_RNA (1)...(19): siRNA sense strand
ugugugcuuugccugauua

SEQ ID NO: 386112 - RNA, 19 nt, Homo sapiens
  misc_RNA (1)...(19): siRNA sense strand
ccaccacagucccuaagau

SEQ ID NO: 386113 - RNA, 19 nt, Homo sapiens
  misc_RNA (1)...(19): siRNA sense strand
ugaggaaccaagaaauaaa

SEQ ID NO: 386114 - RNA, 19 nt, Homo sapiens
  misc_RNA (1)...(19): siRNA sense strand
ugaccagcaucucagaaug

SEQ ID NO: 386115 - RNA, 19 nt, Homo sapiens
  misc_RNA (1)...(19): siRNA sense strand
ggucucacaggacucauuu

SEQ ID NO: 386116 - RNA, 19 nt, Homo sapiens
  misc_RNA (1)...(19): siRNA sense strand
gcacagaccccuucaccaa

SEQ ID NO: 386117 - RNA, 19 nt, Homo sapiens
  misc_RNA (1)...(19): siRNA sense strand
cagggugucuacuacaguu

SEQ ID NO: 386118 - RNA, 19 nt, Homo sapiens
  misc_RNA (1)...(19): siRNA sense strand
gcaaccuccucaucauucu

SEQ ID NO: 386119 - RNA, 19 nt, Homo sapiens
  misc_RNA (1)...(19): siRNA sense strand
cuacucagggugucuacua

SEQ ID NO: 386120 - RNA, 19 nt, Homo sapiens
  misc_RNA (1)...(19): siRNA sense strand
uacacacacuucugaugaa

SEQ ID NO: 386121 - RNA, 19 nt, Homo sapiens
  misc_RNA (1)...(19): siRNA sense strand
gaggaaccaagaaauaaag

SEQ ID NO: 386122 - RNA, 19 nt, Homo sapiens
  misc_RNA (1)...(19): siRNA sense strand
gaccagcaucucagaaugu

SEQ ID NO: 386123 - RNA, 19 nt, Homo sapiens
  misc_RNA (1)...(19): siRNA sense strand
cccuuuaucuacaguuuga

SEQ ID NO: 386124 - RNA, 19 nt, Homo sapiens
  misc_RNA (1)...(19): siRNA sense strand
uaacuccaauguugaaucc

SEQ ID NO: 386125 - RNA, 19 nt, Homo sapiens
  misc_RNA (1)...(19): siRNA sense strand
ccucaucauucuagucauc

SEQ ID NO: 386126 - RNA, 19 nt, Homo sapiens
  misc_RNA (1)...(19): siRNA sense strand
uuugaggaaccaagaaaua

SEQ ID NO: 386127 - RNA, 19 nt, Homo sapiens
  misc_RNA (1)...(19): siRNA sense strand
uugaaucccuuuaucuaca

SEQ ID NO: 386128 - RNA, 19 nt, Homo sapiens
  misc_RNA (1)...(19): siRNA sense strand
gauuucaguucucccucaa

SEQ ID NO: 386129 - RNA, 19 nt, Homo sapiens
  misc_RNA (1)...(19): siRNA sense strand
cagcaucucagaauguuuc

SEQ ID NO: 386130 - RNA, 19 nt, Homo sapiens
  misc_RNA (1)...(19): siRNA sense strand
caaccucucccuugcagau

SEQ ID NO: 386131 - RNA, 19 nt, Homo sapiens
  misc_RNA (1)...(19): siRNA sense strand
ugagaucccacacuucuuc

SEQ ID NO: 386132 - RNA, 19 nt, Homo sapiens
  misc_RNA (1)...(19): siRNA sense strand
acacagugguaacuccaau

SEQ ID NO: 386133 - RNA, 19 nt, Homo sapiens
  misc_RNA (1)...(19): siRNA sense strand
agucuucccugagaaaguu

SEQ ID NO: 386134 - RNA, 19 nt, Homo sapiens
  misc_RNA (1)...(19): siRNA sense strand
uaugccacccacuucauua

SEQ ID NO: 386135 - RNA, 19 nt, Homo sapiens
  misc_RNA (1)...(19): siRNA sense strand
ggcaaccuccucaucauuc

SEQ ID NO: 386136 - RNA, 19 nt, Homo sapiens
  misc_RNA (1)...(19): siRNA sense strand
ggccauaugccacccacuu

SEQ ID NO: 386137 - RNA, 19 nt, Homo sapiens
  misc_RNA (1)...(19): siRNA sense strand
ccaauguugaaucccuuua

SEQ ID NO: 386138 - RNA, 19 nt, Homo sapiens
  misc_RNA (1)...(19): siRNA sense strand
cuucuucugugacaucaau

SEQ ID NO: 386139 - RNA, 19 nt, Homo sapiens
  misc_RNA (1)...(19): siRNA sense strand
gaucccacacuucuucugu

SEQ ID NO: 386140 - RNA, 19 nt, Homo sapiens
  misc_RNA (1)...(19): siRNA sense strand
caugagaucccacacuucu

SEQ ID NO: 386141 - RNA, 19 nt, Homo sapiens
  misc_RNA (1)...(19): siRNA sense strand
caggcaaccuccucaucau

SEQ ID NO: 386142 - RNA, 19 nt, Homo sapiens
  misc_RNA (1)...(19): siRNA sense strand
gugcuuugccugauuaucu

SEQ ID NO: 386143 - RNA, 19 nt, Homo sapiens
  misc_RNA (1)...(19): siRNA sense strand
aaacauacagauccagagu

SEQ ID NO: 386144 - RNA, 19 nt, Homo sapiens
  misc_RNA (1)...(19): siRNA sense strand
cccauguacuucuuucuag

SEQ ID NO: 386145 - RNA, 19 nt, Homo sapiens
  misc_RNA (1)...(19): siRNA sense strand
guuaaucuggguucggaaa

SEQ ID NO: 386146 - RNA, 19 nt, Homo sapiens
  misc_RNA (1)...(19): siRNA sense strand
uugaggaaccaagaaauaa

SEQ ID NO: 386147 - RNA, 19 nt, Homo sapiens
  misc_RNA (1)...(19): siRNA sense strand
uguugaaucccuuuaucua

SEQ ID NO: 386148 - RNA, 19 nt, Homo sapiens
  misc_RNA (1)...(19): siRNA sense strand
ucucgaccauccugaagau

SEQ ID NO: 386149 - RNA, 19 nt, Homo sapiens
  misc_RNA (1)...(19): siRNA sense strand
accaugagaucccacacuu

SEQ ID NO: 386150 - RNA, 19 nt, Homo sapiens
  misc_RNA (1)...(19): siRNA sense strand
agagucaggccaucuccua

SEQ ID NO: 386151 - RNA, 19 nt, Homo sapiens
  misc_RNA (1)...(19): siRNA sense strand
auaaagucuucccugagaa

SEQ ID NO: 386152 - RNA, 19 nt, Homo sapiens
  misc_RNA (1)...(19): siRNA sense strand
aauguugaaucccuuuauc

SEQ ID NO: 386153 - RNA, 19 nt, Homo sapiens
  misc_RNA (1)...(19): siRNA sense strand
caauguugaaucccuuuau

SEQ ID NO: 386154 - RNA, 19 nt, Homo sapiens
  misc_RNA (1)...(19): siRNA sense strand
acacacuucugaugaacag

SEQ ID NO: 386155 - RNA, 19 nt, Homo sapiens
  misc_RNA (1)...(19): siRNA sense strand
ccacucccuucuacacaca

SEQ ID NO: 386156 - RNA, 19 nt, Homo sapiens
  misc_RNA (1)...(19): siRNA sense strand
cauuacauucugaucauga

SEQ ID NO: 386157 - RNA, 19 nt, Homo sapiens
  misc_RNA (1)...(19): siRNA sense strand
gcccagaaggacacaguug

SEQ ID NO: 386158 - RNA, 19 nt, Homo sapiens
  misc_RNA (1)...(19): siRNA sense strand
gcccuccacucccuucuac

SEQ ID NO: 386159 - RNA, 19 nt, Homo sapiens
  misc_RNA (1)...(19): siRNA sense strand
ugacugcuacguggccaua

SEQ ID NO: 386160 - RNA, 19 nt, Homo sapiens
  misc_RNA (1)...(19): siRNA sense strand
gagcagaagccccucuuug

SEQ ID NO: 386161 - RNA, 19 nt, Homo sapiens
  misc_RNA (1)...(19): siRNA sense strand
gccacccacuucauuacau

SEQ ID NO: 386162 - RNA, 19 nt, Homo sapiens
  misc_RNA (1)...(19): siRNA sense strand
caccacagucccuaagaug

SEQ ID NO: 386163 - RNA, 19 nt, Homo sapiens
  misc_RNA (1)...(19): siRNA sense strand
ggaaccaagaaauaaaguc

SEQ ID NO: 386164 - RNA, 19 nt, Homo sapiens
  misc_RNA (1)...(19): siRNA sense strand
caaccuccucaucauucua

SEQ ID NO: 386165 - RNA, 19 nt, Homo sapiens
  misc_RNA (1)...(19): siRNA sense strand
uuugccugauuaucucuua

SEQ ID NO: 386166 - RNA, 19 nt, Homo sapiens
  misc_RNA (1)...(19): siRNA sense strand
ccuaagaugcuggcaaaca

SEQ ID NO: 386167 - RNA, 19 nt, Homo sapiens
  misc_RNA (1)...(19): siRNA sense strand
guaacuccaauguugaauc

SEQ ID NO: 386168 - RNA, 19 nt, Homo sapiens
  misc_RNA (1)...(19): siRNA sense strand
cuucuacacacacuucuga

SEQ ID NO: 386169 - RNA, 19 nt, Homo sapiens
  misc_RNA (1)...(19): siRNA sense strand
uggcaaacauacagaucca

SEQ ID NO: 386170 - RNA, 19 nt, Homo sapiens
  misc_RNA (1)...(19): siRNA sense strand
gugguaacuccaauguuga

SEQ ID NO: 386171 - RNA, 19 nt, Homo sapiens
  misc_RNA (1)...(19): siRNA sense strand
caucauucuagucaucauu

SEQ ID NO: 386172 - RNA, 19 nt, Homo sapiens
  misc_RNA (1)...(19): siRNA sense strand
ggaaagcucuuguuuauga

SEQ ID NO: 386173 - RNA, 19 nt, Homo sapiens
  misc_RNA (1)...(19): siRNA sense strand
ggacuuagauuuccugcaa

SEQ ID NO: 386174 - RNA, 19 nt, Homo sapiens
  misc_RNA (1)...(19): siRNA sense strand
gcacaaagaagcugaguuu

SEQ ID NO: 386175 - RNA, 19 nt, Homo sapiens
  misc_RNA (1)...(19): siRNA sense strand
gcagacagauuucuuaagu

SEQ ID NO: 386176 - RNA, 19 nt, Homo sapiens
  misc_RNA (1)...(19): siRNA sense strand
gaccagugaugaugaauuu

SEQ ID NO: 386177 - RNA, 19 nt, Homo sapiens
  misc_RNA (1)...(19): siRNA sense strand
cuagaaagcuucaagauca

SEQ ID NO: 386178 - RNA, 19 nt, Homo sapiens
  misc_RNA (1)...(19): siRNA sense strand
caacagccauggaaucuau

SEQ ID NO: 386179 - RNA, 19 nt, Homo sapiens
  misc_RNA (1)...(19): siRNA sense strand
gaaugcacuuuacauauga

SEQ ID NO: 386180 - RNA, 19 nt, Homo sapiens
  misc_RNA (1)...(19): siRNA sense strand
gcuucaagaucauggauua

SEQ ID NO: 386181 - RNA, 19 nt, Homo sapiens
  misc_RNA (1)...(19): siRNA sense strand
uaagacauacgcuccauua

SEQ ID NO: 386182 - RNA, 19 nt, Homo sapiens
  misc_RNA (1)...(19): siRNA sense strand
cuggaaagcucuuguuuau

SEQ ID NO: 386183 - RNA, 19 nt, Homo sapiens
  misc_RNA (1)...(19): siRNA sense strand
cgacaggccuacacucuau

SEQ ID NO: 386184 - RNA, 19 nt, Homo sapiens
  misc_RNA (1)...(19): siRNA sense strand
ggacugggaugcagaaggu

SEQ ID NO: 386185 - RNA, 19 nt, Homo sapiens
  misc_RNA (1)...(19): siRNA sense strand
ggccuacacucuauucaaa

SEQ ID NO: 386186 - RNA, 19 nt, Homo sapiens
  misc_RNA (1)...(19): siRNA sense strand
gagaugggauaaucacaga

SEQ ID NO: 386187 - RNA, 19 nt, Homo sapiens
  misc_RNA (1)...(19): siRNA sense strand
gacauacgcuccauuagca

SEQ ID NO: 386188 - RNA, 19 nt, Homo sapiens
  misc_RNA (1)...(19): siRNA sense strand
uacccagacuuuagauuua

SEQ ID NO: 386189 - RNA, 19 nt, Homo sapiens
  misc_RNA (1)...(19): siRNA sense strand
gcaaucauauagguuaaug

SEQ ID NO: 386190 - RNA, 19 nt, Homo sapiens
  misc_RNA (1)...(19): siRNA sense strand
agaaugcacuuuacauaug

SEQ ID NO: 386191 - RNA, 19 nt, Homo sapiens
  misc_RNA (1)...(19): siRNA sense strand
gagaaugcacuuuacauau

SEQ ID NO: 386192 - RNA, 19 nt, Homo sapiens
  misc_RNA (1)...(19): siRNA sense strand
agacagauuucuuaaguuc

SEQ ID NO: 386193 - RNA, 19 nt, Homo sapiens
  misc_RNA (1)...(19): siRNA sense strand
ugacaaugcuucugugcuu

SEQ ID NO: 386194 - RNA, 19 nt, Homo sapiens
  misc_RNA (1)...(19): siRNA sense strand
gcgaagagcaucccguaaa

SEQ ID NO: 386195 - RNA, 19 nt, Homo sapiens
  misc_RNA (1)...(19): siRNA sense strand
caaccacaauuucaucuuc

SEQ ID NO: 386196 - RNA, 19 nt, Homo sapiens
  misc_RNA (1)...(19): siRNA sense strand
gcacaucacuacccagacu

SEQ ID NO: 386197 - RNA, 19 nt, Homo sapiens
  misc_RNA (1)...(19): siRNA sense strand
ugaagaaguuagaacauuc

SEQ ID NO: 386198 - RNA, 19 nt, Homo sapiens
  misc_RNA (1)...(19): siRNA sense strand
guucaugaauuccagaguu

SEQ ID NO: 386199 - RNA, 19 nt, Homo sapiens
  misc_RNA (1)...(19): siRNA sense strand
ugagaaugcacuuuacaua

SEQ ID NO: 386200 - RNA, 19 nt, Homo sapiens
  misc_RNA (1)...(19): siRNA sense strand
guaaagagagagagaaauc

SEQ ID NO: 386201 - RNA, 19 nt, Homo sapiens
  misc_RNA (1)...(19): siRNA sense strand
gcacuuuacauaugacuug

SEQ ID NO: 386202 - RNA, 19 nt, Homo sapiens
  misc_RNA (1)...(19): siRNA sense strand
gcauuaauaucaggauugu

SEQ ID NO: 386203 - RNA, 19 nt, Homo sapiens
  misc_RNA (1)...(19): siRNA sense strand
gcaaucaggaggcauuaau

SEQ ID NO: 386204 - RNA, 19 nt, Homo sapiens
  misc_RNA (1)...(19): siRNA sense strand
ccauuagcauuccgauauu

SEQ ID NO: 386205 - RNA, 19 nt, Homo sapiens
  misc_RNA (1)...(19): siRNA sense strand
aagaaacggugcaauucaa

SEQ ID NO: 386206 - RNA, 19 nt, Homo sapiens
  misc_RNA (1)...(19): siRNA sense strand
ucaagaucauggauuauag

SEQ ID NO: 386207 - RNA, 19 nt, Homo sapiens
  misc_RNA (1)...(19): siRNA sense strand
cgaagagcaucccguaaag

SEQ ID NO: 386208 - RNA, 19 nt, Homo sapiens
  misc_RNA (1)...(19): siRNA sense strand
uagcagccuugaugaagaa

SEQ ID NO: 386209 - RNA, 19 nt, Homo sapiens
  misc_RNA (1)...(19): siRNA sense strand
caacauuuaccuuggaaga

SEQ ID NO: 386210 - RNA, 19 nt, Homo sapiens
  misc_RNA (1)...(19): siRNA sense strand
gaugauuacuuguauucca

SEQ ID NO: 386211 - RNA, 19 nt, Homo sapiens
  misc_RNA (1)...(19): siRNA sense strand
gacauucugcaaucauaua

SEQ ID NO: 386212 - RNA, 19 nt, Homo sapiens
  misc_RNA (1)...(19): siRNA sense strand
ugcaucaucugcuauuaaa

SEQ ID NO: 386213 - RNA, 19 nt, Homo sapiens
  misc_RNA (1)...(19): siRNA sense strand
caaucaggaggcauuaaua

SEQ ID NO: 386214 - RNA, 19 nt, Homo sapiens
  misc_RNA (1)...(19): siRNA sense strand
auacaacgcgcuuaugaaa

SEQ ID NO: 386215 - RNA, 19 nt, Homo sapiens
  misc_RNA (1)...(19): siRNA sense strand
gaaagcucuuguuuaugau

SEQ ID NO: 386216 - RNA, 19 nt, Homo sapiens
  misc_RNA (1)...(19): siRNA sense strand
ugaaaggcucaacguauaa

SEQ ID NO: 386217 - RNA, 19 nt, Homo sapiens
  misc_RNA (1)...(19): siRNA sense strand
gcuugacgucuauuuauaa

SEQ ID NO: 386218 - RNA, 19 nt, Homo sapiens
  misc_RNA (1)...(19): siRNA sense strand
gaaggguuguauuuugaua

SEQ ID NO: 386219 - RNA, 19 nt, Homo sapiens
  misc_RNA (1)...(19): siRNA sense strand
cuacccagacuuuagauuu

SEQ ID NO: 386220 - RNA, 19 nt, Homo sapiens
  misc_RNA (1)...(19): siRNA sense strand
uaagaaacggugcaauuca

SEQ ID NO: 386221 - RNA, 19 nt, Homo sapiens
  misc_RNA (1)...(19): siRNA sense strand
caagaaaauucaagcuuug

SEQ ID NO: 386222 - RNA, 19 nt, Homo sapiens
  misc_RNA (1)...(19): siRNA sense strand
gaagagcaucccguaaaga

SEQ ID NO: 386223 - RNA, 19 nt, Homo sapiens
  misc_RNA (1)...(19): siRNA sense strand
ucaggaggcauuaauauca

SEQ ID NO: 386224 - RNA, 19 nt, Homo sapiens
  misc_RNA (1)...(19): siRNA sense strand
caucugcagugaaccucua

SEQ ID NO: 386225 - RNA, 19 nt, Homo sapiens
  misc_RNA (1)...(19): siRNA sense strand
aaacauacaacgcgcuuau

SEQ ID NO: 386226 - RNA, 19 nt, Homo sapiens
  misc_RNA (1)...(19): siRNA sense strand
aaacaguucagcacaaaga

SEQ ID NO: 386227 - RNA, 19 nt, Homo sapiens
  misc_RNA (1)...(19): siRNA sense strand
gccaggcuauuacaugaau

SEQ ID NO: 386228 - RNA, 19 nt, Homo sapiens
  misc_RNA (1)...(19): siRNA sense strand
ucuaagaaacggugcaauu

SEQ ID NO: 386229 - RNA, 19 nt, Homo sapiens
  misc_RNA (1)...(19): siRNA sense strand
cagacagauuucuuaaguu

SEQ ID NO: 386230 - RNA, 19 nt, Homo sapiens
  misc_RNA (1)...(19): siRNA sense strand
ggacacuguuucuguucau

SEQ ID NO: 386231 - RNA, 19 nt, Homo sapiens
  misc_RNA (1)...(19): siRNA sense strand
cagaauccaaggacucuuu

SEQ ID NO: 386232 - RNA, 19 nt, Homo sapiens
  misc_RNA (1)...(19): siRNA sense strand
cauuagcauuccgauauuu

SEQ ID NO: 386233 - RNA, 19 nt, Homo sapiens
  misc_RNA (1)...(19): siRNA sense strand
guucaacauuuaccuugga

SEQ ID NO: 386234 - RNA, 19 nt, Homo sapiens
  misc_RNA (1)...(19): siRNA sense strand
ugacugaaggacaaaguuu

SEQ ID NO: 386235 - RNA, 19 nt, Homo sapiens
  misc_RNA (1)...(19): siRNA sense strand
gacacuguuucuguucaua

SEQ ID NO: 386236 - RNA, 19 nt, Homo sapiens
  misc_RNA (1)...(19): siRNA sense strand
ccuggaaagcucuuguuua

SEQ ID NO: 386237 - RNA, 19 nt, Homo sapiens
  misc_RNA (1)...(19): siRNA sense strand
gggaggcauuccagcuaaa

SEQ ID NO: 386238 - RNA, 19 nt, Homo sapiens
  misc_RNA (1)...(19): siRNA sense strand
uggguaaucucacuuccaa

SEQ ID NO: 386239 - RNA, 19 nt, Homo sapiens
  misc_RNA (1)...(19): siRNA sense strand
caaaacaguucagcacaaa

SEQ ID NO: 386240 - RNA, 19 nt, Homo sapiens
  misc_RNA (1)...(19): siRNA sense strand
ccagugaugaugaauuuau

SEQ ID NO: 386241 - RNA, 19 nt, Homo sapiens
  misc_RNA (1)...(19): siRNA sense strand
gcuagaaagcuucaagauc

SEQ ID NO: 386242 - RNA, 19 nt, Homo sapiens
  misc_RNA (1)...(19): siRNA sense strand
ggaagugcaggaugacaau

SEQ ID NO: 386243 - RNA, 19 nt, Homo sapiens
  misc_RNA (1)...(19): siRNA sense strand
gaccauucccucaaagaga

SEQ ID NO: 386244 - RNA, 19 nt, Homo sapiens
  misc_RNA (1)...(19): siRNA sense strand
gaugggauaaucacagaga

SEQ ID NO: 386245 - RNA, 19 nt, Homo sapiens
  misc_RNA (1)...(19): siRNA sense strand
ccuuccaguucaacauuua

SEQ ID NO: 386246 - RNA, 19 nt, Homo sapiens
  misc_RNA (1)...(19): siRNA sense strand
ugcuugacgucuauuuaua

SEQ ID NO: 386247 - RNA, 19 nt, Homo sapiens
  misc_RNA (1)...(19): siRNA sense strand
gaaacauacaacgcgcuua

SEQ ID NO: 386248 - RNA, 19 nt, Homo sapiens
  misc_RNA (1)...(19): siRNA sense strand
uaugcagacagauuucuua

SEQ ID NO: 386249 - RNA, 19 nt, Homo sapiens
  misc_RNA (1)...(19): siRNA sense strand
ggagaggcagcaccuggaa

SEQ ID NO: 386250 - RNA, 19 nt, Homo sapiens
  misc_RNA (1)...(19): siRNA sense strand
gaaacggugcaauucaauc

SEQ ID NO: 386251 - RNA, 19 nt, Homo sapiens
  misc_RNA (1)...(19): siRNA sense strand
ugggaggcauuccagcuaa

SEQ ID NO: 386252 - RNA, 19 nt, Homo sapiens
  misc_RNA (1)...(19): siRNA sense strand
uauccaggguccagggaaa

SEQ ID NO: 386253 - RNA, 19 nt, Homo sapiens
  misc_RNA (1)...(19): siRNA sense strand
gaggagaccccacaaaaug

SEQ ID NO: 386254 - RNA, 19 nt, Homo sapiens
  misc_RNA (1)...(19): siRNA sense strand
cugccaggcuauuacauga

SEQ ID NO: 386255 - RNA, 19 nt, Homo sapiens
  misc_RNA (1)...(19): siRNA sense strand
uuagcagccuugaugaaga

SEQ ID NO: 386256 - RNA, 19 nt, Homo sapiens
  misc_RNA (1)...(19): siRNA sense strand
ccacuucacaggagauugu

SEQ ID NO: 386257 - RNA, 19 nt, Homo sapiens
  misc_RNA (1)...(19): siRNA sense strand
ucacuacccagacuuuaga

SEQ ID NO: 386258 - RNA, 19 nt, Homo sapiens
  misc_RNA (1)...(19): siRNA sense strand
gggacacuguuucuguuca

SEQ ID NO: 386259 - RNA, 19 nt, Homo sapiens
  misc_RNA (1)...(19): siRNA sense strand
uugacauucugcaaucaua

SEQ ID NO: 386260 - RNA, 19 nt, Homo sapiens
  misc_RNA (1)...(19): siRNA sense strand
uccaugagaaugcacuuua

SEQ ID NO: 386261 - RNA, 19 nt, Homo sapiens
  misc_RNA (1)...(19): siRNA sense strand
gcuauuaaaggugcuauuc

SEQ ID NO: 386262 - RNA, 19 nt, Homo sapiens
  misc_RNA (1)...(19): siRNA sense strand
gugcuugacgucuauuuau

SEQ ID NO: 386263 - RNA, 19 nt, Homo sapiens
  misc_RNA (1)...(19): siRNA sense strand
gaagcgggauuugcugacu

SEQ ID NO: 386264 - RNA, 19 nt, Homo sapiens
  misc_RNA (1)...(19): siRNA sense strand
ggaauggaaggaugagaag

SEQ ID NO: 386265 - RNA, 19 nt, Homo sapiens
  misc_RNA (1)...(19): siRNA sense strand
cuaagaaacggugcaauuc

SEQ ID NO: 386266 - RNA, 19 nt, Homo sapiens
  misc_RNA (1)...(19): siRNA sense strand
gauacacaguggguaaucu

SEQ ID NO: 386267 - RNA, 19 nt, Homo sapiens
  misc_RNA (1)...(19): siRNA sense strand
cagagaacccagacacaau

SEQ ID NO: 386268 - RNA, 19 nt, Homo sapiens
  misc_RNA (1)...(19): siRNA sense strand
ccuggaccauucccucaaa

SEQ ID NO: 386269 - RNA, 19 nt, Homo sapiens
  misc_RNA (1)...(19): siRNA sense strand
gcacgaaggguuguauuuu

SEQ ID NO: 386270 - RNA, 19 nt, Homo sapiens
  misc_RNA (1)...(19): siRNA sense strand
caauuagccaggaauggaa

SEQ ID NO: 386271 - RNA, 19 nt, Homo sapiens
  misc_RNA (1)...(19): siRNA sense strand
ccuacacucuauucaaaca

SEQ ID NO: 386272 - RNA, 19 nt, Homo sapiens
  misc_RNA (1)...(19): siRNA sense strand
gaacuacgaugcuccagaa

SEQ ID NO: 386273 - RNA, 19 nt, Homo sapiens
  misc_RNA (1)...(19): siRNA sense strand
ugaccgagauccaugagua

SEQ ID NO: 386274 - RNA, 19 nt, Homo sapiens
  misc_RNA (1)...(19): siRNA sense strand
ugaccgaccucauccguaa

SEQ ID NO: 386275 - RNA, 19 nt, Homo sapiens
  misc_RNA (1)...(19): siRNA sense strand
ggaaggcgaucuugacucu

SEQ ID NO: 386276 - RNA, 19 nt, Homo sapiens
  misc_RNA (1)...(19): siRNA sense strand
gaagaaacucuccaucguu

SEQ ID NO: 386277 - RNA, 19 nt, Homo sapiens
  misc_RNA (1)...(19): siRNA sense strand
ucaccaacuuguucucuaa

SEQ ID NO: 386278 - RNA, 19 nt, Homo sapiens
  misc_RNA (1)...(19): siRNA sense strand
gaucuugacucugcugaga

SEQ ID NO: 386279 - RNA, 19 nt, Homo sapiens
  misc_RNA (1)...(19): siRNA sense strand
ccaaggaacugggcaagau

SEQ ID NO: 386280 - RNA, 19 nt, Homo sapiens
  misc_RNA (1)...(19): siRNA sense strand
ccaacaaggugaagaaacu

SEQ ID NO: 386281 - RNA, 19 nt, Homo sapiens
  misc_RNA (1)...(19): siRNA sense strand
caucacagccguaucauca

SEQ ID NO: 386282 - RNA, 19 nt, Homo sapiens
  misc_RNA (1)...(19): siRNA sense strand
gccaugaaguucucucaga

SEQ ID NO: 386283 - RNA, 19 nt, Homo sapiens
  misc_RNA (1)...(19): siRNA sense strand
ugaaaggccucaucaucau

SEQ ID NO: 386284 - RNA, 19 nt, Homo sapiens
  misc_RNA (1)...(19): siRNA sense strand
uaaacaaccuagaacuaca

SEQ ID NO: 386285 - RNA, 19 nt, Homo sapiens
  misc_RNA (1)...(19): siRNA sense strand
gcagccagauccacagcaa

SEQ ID NO: 386286 - RNA, 19 nt, Homo sapiens
  misc_RNA (1)...(19): siRNA sense strand
gugaaaggccucaucauca

SEQ ID NO: 386287 - RNA, 19 nt, Homo sapiens
  misc_RNA (1)...(19): siRNA sense strand
ucaaggcccucaucguguu

SEQ ID NO: 386288 - RNA, 19 nt, Homo sapiens
  misc_RNA (1)...(19): siRNA sense strand
guaaguccauggccuacau

SEQ ID NO: 386289 - RNA, 19 nt, Homo sapiens
  misc_RNA (1)...(19): siRNA sense strand
ugaagaaacucuccaucgu

SEQ ID NO: 386290 - RNA, 19 nt, Homo sapiens
  misc_RNA (1)...(19): siRNA sense strand
gggcagcuccuacuuacuu

SEQ ID NO: 386291 - RNA, 19 nt, Homo sapiens
  misc_RNA (1)...(19): siRNA sense strand
ugguggagcuggugcagua

SEQ ID NO: 386292 - RNA, 19 nt, Homo sapiens
  misc_RNA (1)...(19): siRNA sense strand
gcaagggucaggccaacaa

SEQ ID NO: 386293 - RNA, 19 nt, Homo sapiens
  misc_RNA (1)...(19): siRNA sense strand
ggauggaggaggagugaaa

SEQ ID NO: 386294 - RNA, 19 nt, Homo sapiens
  misc_RNA (1)...(19): siRNA sense strand
gcagacuugucaccaggaa

SEQ ID NO: 386295 - RNA, 19 nt, Homo sapiens
  misc_RNA (1)...(19): siRNA sense strand
gaagggcagcugauucugu

SEQ ID NO: 386296 - RNA, 19 nt, Homo sapiens
  misc_RNA (1)...(19): siRNA sense strand
gaaagacaacguggagaug

SEQ ID NO: 386297 - RNA, 19 nt, Homo sapiens
  misc_RNA (1)...(19): siRNA sense strand
gagcuggccaagacuguuu

SEQ ID NO: 386298 - RNA, 19 nt, Homo sapiens
  misc_RNA (1)...(19): siRNA sense strand
ccuaaacaaccuagaacua

SEQ ID NO: 386299 - RNA, 19 nt, Homo sapiens
  misc_RNA (1)...(19): siRNA sense strand
uagugaauuuccaucagua

SEQ ID NO: 386300 - RNA, 19 nt, Homo sapiens
  misc_RNA (1)...(19): siRNA sense strand
ggagugaaaggccucauca

SEQ ID NO: 386301 - RNA, 19 nt, Homo sapiens
  misc_RNA (1)...(19): siRNA sense strand
ggaggaagggcagcugauu

SEQ ID NO: 386302 - RNA, 19 nt, Homo sapiens
  misc_RNA (1)...(19): siRNA sense strand
cgagauccaugaguacaau

SEQ ID NO: 386303 - RNA, 19 nt, Homo sapiens
  misc_RNA (1)...(19): siRNA sense strand
caugaaggaugagguguuc

SEQ ID NO: 386304 - RNA, 19 nt, Homo sapiens
  misc_RNA (1)...(19): siRNA sense strand
ccaccaaggaccuguuuga

SEQ ID NO: 386305 - RNA, 19 nt, Homo sapiens
  misc_RNA (1)...(19): siRNA sense strand
cuacgaugcuccagaaacu

SEQ ID NO: 386306 - RNA, 19 nt, Homo sapiens
  misc_RNA (1)...(19): siRNA sense strand
cugcuacccuucuaugaga

SEQ ID NO: 386307 - RNA, 19 nt, Homo sapiens
  misc_RNA (1)...(19): siRNA sense strand
cggcugaacuccaccucuu

SEQ ID NO: 386308 - RNA, 19 nt, Homo sapiens
  misc_RNA (1)...(19): siRNA sense strand
agauggaugucaccgacua

SEQ ID NO: 386309 - RNA, 19 nt, Homo sapiens
  misc_RNA (1)...(19): siRNA sense strand
caaccuagaacuacaggau

SEQ ID NO: 386310 - RNA, 19 nt, Homo sapiens
  misc_RNA (1)...(19): siRNA sense strand
gcgaggaguuccagaagcu

SEQ ID NO: 386311 - RNA, 19 nt, Homo sapiens
  misc_RNA (1)...(19): siRNA sense strand
aagggcagcugauucuguu

SEQ ID NO: 386312 - RNA, 19 nt, Homo sapiens
  misc_RNA (1)...(19): siRNA sense strand
cugacgcccuagugaauuu

SEQ ID NO: 386313 - RNA, 19 nt, Homo sapiens
  misc_RNA (1)...(19): siRNA sense strand
gaaacucuccaucguuguc

SEQ ID NO: 386314 - RNA, 19 nt, Homo sapiens
  misc_RNA (1)...(19): siRNA sense strand
gcaugaaggaugagguguu

SEQ ID NO: 386315 - RNA, 19 nt, Homo sapiens
  misc_RNA (1)...(19): siRNA sense strand
ucaguggcgucaccaacuu

SEQ ID NO: 386316 - RNA, 19 nt, Homo sapiens
  misc_RNA (1)...(19): siRNA sense strand
gcaccugaccgaccucauc

SEQ ID NO: 386317 - RNA, 19 nt, Homo sapiens
  misc_RNA (1)...(19): siRNA sense strand
ugaaccaggugaauaacca

SEQ ID NO: 386318 - RNA, 19 nt, Homo sapiens
  misc_RNA (1)...(19): siRNA sense strand
uacaggaucucaugcacau

SEQ ID NO: 386319 - RNA, 19 nt, Homo sapiens
  misc_RNA (1)...(19): siRNA sense strand
cuacauuccuagccuccaa

SEQ ID NO: 386320 - RNA, 19 nt, Homo sapiens
  misc_RNA (1)...(19): siRNA sense strand
cgaaagacaacguggagau

SEQ ID NO: 386321 - RNA, 19 nt, Homo sapiens
  misc_RNA (1)...(19): siRNA sense strand
gaggaagggcagcugauuc

SEQ ID NO: 386322 - RNA, 19 nt, Homo sapiens
  misc_RNA (1)...(19): siRNA sense strand
caucagcugugccaauugc

SEQ ID NO: 386323 - RNA, 19 nt, Homo sapiens
  misc_RNA (1)...(19): siRNA sense strand
uggccauucugcacaguaa

SEQ ID NO: 386324 - RNA, 19 nt, Homo sapiens
  misc_RNA (1)...(19): siRNA sense strand
cuagugaauuuccaucagu

SEQ ID NO: 386325 - RNA, 19 nt, Homo sapiens
  misc_RNA (1)...(19): siRNA sense strand
gaaaggccucaucaucauc

SEQ ID NO: 386326 - RNA, 19 nt, Homo sapiens
  misc_RNA (1)...(19): siRNA sense strand
ccaccgaucagccuaaaca

SEQ ID NO: 386327 - RNA, 19 nt, Homo sapiens
  misc_RNA (1)...(19): siRNA sense strand
ccgcuucgacugugccaua

SEQ ID NO: 386328 - RNA, 19 nt, Homo sapiens
  misc_RNA (1)...(19): siRNA sense strand
gucaccaacuuguucucua

SEQ ID NO: 386329 - RNA, 19 nt, Homo sapiens
  misc_RNA (1)...(19): siRNA sense strand
gcaccuggccaugucgaaa

SEQ ID NO: 386330 - RNA, 19 nt, Homo sapiens
  misc_RNA (1)...(19): siRNA sense strand
ggaugucaccgacuacaag

SEQ ID NO: 386331 - RNA, 19 nt, Homo sapiens
  misc_RNA (1)...(19): siRNA sense strand
aaagacaacguggagauga

SEQ ID NO: 386332 - RNA, 19 nt, Homo sapiens
  misc_RNA (1)...(19): siRNA sense strand
gcgcaaccgcuucgacugu

SEQ ID NO: 386333 - RNA, 19 nt, Homo sapiens
  misc_RNA (1)...(19): siRNA sense strand
gaaccaggugaauaaccaa

SEQ ID NO: 386334 - RNA, 19 nt, Homo sapiens
  misc_RNA (1)...(19): siRNA sense strand
gaucagccuaaacaaccua

SEQ ID NO: 386335 - RNA, 19 nt, Homo sapiens
  misc_RNA (1)...(19): siRNA sense strand
guacugccacacucagaug

SEQ ID NO: 386336 - RNA, 19 nt, Homo sapiens
  misc_RNA (1)...(19): siRNA sense strand
gugaauuuccaucaguauu

SEQ ID NO: 386337 - RNA, 19 nt, Homo sapiens
  misc_RNA (1)...(19): siRNA sense strand
gcaaugcucggugcaacau

SEQ ID NO: 386338 - RNA, 19 nt, Homo sapiens
  misc_RNA (1)...(19): siRNA sense strand
cauccaguacuucagauug

SEQ ID NO: 386339 - RNA, 19 nt, Homo sapiens
  misc_RNA (1)...(19): siRNA sense strand
caaggaacugggcaagaug

SEQ ID NO: 386340 - RNA, 19 nt, Homo sapiens
  misc_RNA (1)...(19): siRNA sense strand
cuaaacaaccuagaacuac

SEQ ID NO: 386341 - RNA, 19 nt, Homo sapiens
  misc_RNA (1)...(19): siRNA sense strand
cagccuaaacaaccuagaa

SEQ ID NO: 386342 - RNA, 19 nt, Homo sapiens
  misc_RNA (1)...(19): siRNA sense strand
ggccaagaacgcagagaug

SEQ ID NO: 386343 - RNA, 19 nt, Homo sapiens
  misc_RNA (1)...(19): siRNA sense strand
agauggugguggacuguug

SEQ ID NO: 386344 - RNA, 19 nt, Homo sapiens
  misc_RNA (1)...(19): siRNA sense strand
ucaggaaacccaaggugau

SEQ ID NO: 386345 - RNA, 19 nt, Homo sapiens
  misc_RNA (1)...(19): siRNA sense strand
gaggcugacgcccuaguga

SEQ ID NO: 386346 - RNA, 19 nt, Homo sapiens
  misc_RNA (1)...(19): siRNA sense strand
ccaauugcgcggagaacga

SEQ ID NO: 386347 - RNA, 19 nt, Homo sapiens
  misc_RNA (1)...(19): siRNA sense strand
ugaccuguguggaugucuu

SEQ ID NO: 386348 - RNA, 19 nt, Homo sapiens
  misc_RNA (1)...(19): siRNA sense strand
aagacaacguggagaugau

SEQ ID NO: 386349 - RNA, 19 nt, Homo sapiens
  misc_RNA (1)...(19): siRNA sense strand
cuucgacugugccauagug

SEQ ID NO: 386350 - RNA, 19 nt, Homo sapiens
  misc_RNA (1)...(19): siRNA sense strand
auccaguacuucagauuga

SEQ ID NO: 386351 - RNA, 19 nt, Homo sapiens
  misc_RNA (1)...(19): siRNA sense strand
gcauccaguacuucagauu

SEQ ID NO: 386352 - RNA, 19 nt, Homo sapiens
  misc_RNA (1)...(19): siRNA sense strand
gcucugcagcgccacauca

SEQ ID NO: 386353 - RNA, 19 nt, Homo sapiens
  misc_RNA (1)...(19): siRNA sense strand
gcugacgcccuagugaauu

SEQ ID NO: 386354 - RNA, 19 nt, Homo sapiens
  misc_RNA (1)...(19): siRNA sense strand
aaugcucggugcaacauca

SEQ ID NO: 386355 - RNA, 19 nt, Homo sapiens
  misc_RNA (1)...(19): siRNA sense strand
cuuguucucuaacccauuc

SEQ ID NO: 386356 - RNA, 19 nt, Homo sapiens
  misc_RNA (1)...(19): siRNA sense strand
gugggcugcuggccaacaa

SEQ ID NO: 386357 - RNA, 19 nt, Homo sapiens
  misc_RNA (1)...(19): siRNA sense strand
caucccuucucccuggaaa

SEQ ID NO: 386358 - RNA, 19 nt, Homo sapiens
  misc_RNA (1)...(19): siRNA sense strand
ggacaccccgaaugacuuu

SEQ ID NO: 386359 - RNA, 19 nt, Homo sapiens
  misc_RNA (1)...(19): siRNA sense strand
cgcgagugcuuccaucaca

SEQ ID NO: 386360 - RNA, 19 nt, Homo sapiens
  misc_RNA (1)...(19): siRNA sense strand
ccucaucgccaucgagaag

SEQ ID NO: 386361 - RNA, 19 nt, Homo sapiens
  misc_RNA (1)...(19): siRNA sense strand
uaucaucagcugugccaau

SEQ ID NO: 386362 - RNA, 19 nt, Homo sapiens
  misc_RNA (1)...(19): siRNA sense strand
caggaaacccaaggugaug

SEQ ID NO: 386363 - RNA, 19 nt, Homo sapiens
  misc_RNA (1)...(19): siRNA sense strand
ccgacuacaccucgaguga

SEQ ID NO: 386364 - RNA, 19 nt, Homo sapiens
  misc_RNA (1)...(19): siRNA sense strand
ggccaccaaggaccuguuu

SEQ ID NO: 386365 - RNA, 19 nt, Homo sapiens
  misc_RNA (1)...(19): siRNA sense strand
guuucaaccagaacguuaa

SEQ ID NO: 386366 - RNA, 19 nt, Homo sapiens
  misc_RNA (1)...(19): siRNA sense strand
gcacagauccuuccguuua

SEQ ID NO: 386367 - RNA, 19 nt, Homo sapiens
  misc_RNA (1)...(19): siRNA sense strand
ggaagagacuaauugcuua

SEQ ID NO: 386368 - RNA, 19 nt, Homo sapiens
  misc_RNA (1)...(19): siRNA sense strand
gaaggaaacuguugaggaa

SEQ ID NO: 386369 - RNA, 19 nt, Homo sapiens
  misc_RNA (1)...(19): siRNA sense strand
aaagagagguuccagaaua

SEQ ID NO: 386370 - RNA, 19 nt, Homo sapiens
  misc_RNA (1)...(19): siRNA sense strand
gaacagcgaucguaaucaa

SEQ ID NO: 386371 - RNA, 19 nt, Homo sapiens
  misc_RNA (1)...(19): siRNA sense strand
gcauguggauucaaaguua

SEQ ID NO: 386372 - RNA, 19 nt, Homo sapiens
  misc_RNA (1)...(19): siRNA sense strand
ggagauggcuucagcuuug

SEQ ID NO: 386373 - RNA, 19 nt, Homo sapiens
  misc_RNA (1)...(19): siRNA sense strand
gaacccauauuauuaguga

SEQ ID NO: 386374 - RNA, 19 nt, Homo sapiens
  misc_RNA (1)...(19): siRNA sense strand
cagaauaucuuaaccaugu

SEQ ID NO: 386375 - RNA, 19 nt, Homo sapiens
  misc_RNA (1)...(19): siRNA sense strand
ugucaaagcucaagcauga

SEQ ID NO: 386376 - RNA, 19 nt, Homo sapiens
  misc_RNA (1)...(19): siRNA sense strand
gcgaguacaucaagacuuu

SEQ ID NO: 386377 - RNA, 19 nt, Homo sapiens
  misc_RNA (1)...(19): siRNA sense strand
gauagaggauagugaauug

SEQ ID NO: 386378 - RNA, 19 nt, Homo sapiens
  misc_RNA (1)...(19): siRNA sense strand
agagaagacucacuagaua

SEQ ID NO: 386379 - RNA, 19 nt, Homo sapiens
  misc_RNA (1)...(19): siRNA sense strand
caaagcauguggauucaaa

SEQ ID NO: 386380 - RNA, 19 nt, Homo sapiens
  misc_RNA (1)...(19): siRNA sense strand
gcuauuaggagaacauuua

SEQ ID NO: 386381 - RNA, 19 nt, Homo sapiens
  misc_RNA (1)...(19): siRNA sense strand
cagcugaaauuuccaguaa

SEQ ID NO: 386382 - RNA, 19 nt, Homo sapiens
  misc_RNA (1)...(19): siRNA sense strand
gagagaguguuucaggaua

SEQ ID NO: 386383 - RNA, 19 nt, Homo sapiens
  misc_RNA (1)...(19): siRNA sense strand
caacaagccugcagaacug

SEQ ID NO: 386384 - RNA, 19 nt, Homo sapiens
  misc_RNA (1)...(19): siRNA sense strand
gaaagggcucgaccacuua

SEQ ID NO: 386385 - RNA, 19 nt, Homo sapiens
  misc_RNA (1)...(19): siRNA sense strand
gagacagaguaaucacuua

SEQ ID NO: 386386 - RNA, 19 nt, Homo sapiens
  misc_RNA (1)...(19): siRNA sense strand
ggaaguauuuaaggcauuu

SEQ ID NO: 386387 - RNA, 19 nt, Homo sapiens
  misc_RNA (1)...(19): siRNA sense strand
aaacuucaguggcaaacua

SEQ ID NO: 386388 - RNA, 19 nt, Homo sapiens
  misc_RNA (1)...(19): siRNA sense strand
gcagacaaaugaucaugau

SEQ ID NO: 386389 - RNA, 19 nt, Homo sapiens
  misc_RNA (1)...(19): siRNA sense strand
gaagagggagacagaguaa

SEQ ID NO: 386390 - RNA, 19 nt, Homo sapiens
  misc_RNA (1)...(19): siRNA sense strand
gagacuauauggagagaga

SEQ ID NO: 386391 - RNA, 19 nt, Homo sapiens
  misc_RNA (1)...(19): siRNA sense strand
ggucauaaucuucuaguuu

SEQ ID NO: 386392 - RNA, 19 nt, Homo sapiens
  misc_RNA (1)...(19): siRNA sense strand
gauagugaauugcgcagaa

SEQ ID NO: 386393 - RNA, 19 nt, Homo sapiens
  misc_RNA (1)...(19): siRNA sense strand
acaaagacaugguccaaga

SEQ ID NO: 386394 - RNA, 19 nt, Homo sapiens
  misc_RNA (1)...(19): siRNA sense strand
gauuagaacuguuuagaac

SEQ ID NO: 386395 - RNA, 19 nt, Homo sapiens
  misc_RNA (1)...(19): siRNA sense strand
ggagaacauuuaacagcaa

SEQ ID NO: 386396 - RNA, 19 nt, Homo sapiens
  misc_RNA (1)...(19): siRNA sense strand
guuaagagcaggcaacaaa

SEQ ID NO: 386397 - RNA, 19 nt, Homo sapiens
  misc_RNA (1)...(19): siRNA sense strand
agaaagggcucgaccacuu

SEQ ID NO: 386398 - RNA, 19 nt, Homo sapiens
  misc_RNA (1)...(19): siRNA sense strand
gagacuaauugcuuauaug

SEQ ID NO: 386399 - RNA, 19 nt, Homo sapiens
  misc_RNA (1)...(19): siRNA sense strand
ggagagagacaaagacaau

SEQ ID NO: 386400 - RNA, 19 nt, Homo sapiens
  misc_RNA (1)...(19): siRNA sense strand
ggaagagggagacagagua

SEQ ID NO: 386401 - RNA, 19 nt, Homo sapiens
  misc_RNA (1)...(19): siRNA sense strand
gauaugggauuagaacugu

SEQ ID NO: 386402 - RNA, 19 nt, Homo sapiens
  misc_RNA (1)...(19): siRNA sense strand
cguaaucaauccugagaaa

SEQ ID NO: 386403 - RNA, 19 nt, Homo sapiens
  misc_RNA (1)...(19): siRNA sense strand
caucugggauaugggauua

SEQ ID NO: 386404 - RNA, 19 nt, Homo sapiens
  misc_RNA (1)...(19): siRNA sense strand
cgaaggacaucaugguuca

SEQ ID NO: 386405 - RNA, 19 nt, Homo sapiens
  misc_RNA (1)...(19): siRNA sense strand
ggagaaacagcuauuagga

SEQ ID NO: 386406 - RNA, 19 nt, Homo sapiens
  misc_RNA (1)...(19): siRNA sense strand
gcagguguauaaagauuca

SEQ ID NO: 386407 - RNA, 19 nt, Homo sapiens
  misc_RNA (1)...(19): siRNA sense strand
cugcagaacugaucgcaaa

SEQ ID NO: 386408 - RNA, 19 nt, Homo sapiens
  misc_RNA (1)...(19): siRNA sense strand
acauggagcuuucgaagga

SEQ ID NO: 386409 - RNA, 19 nt, Homo sapiens
  misc_RNA (1)...(19): siRNA sense strand
gcugaaauuuccaguaaag

SEQ ID NO: 386410 - RNA, 19 nt, Homo sapiens
  misc_RNA (1)...(19): siRNA sense strand
gucauaaucuucuaguuuc

SEQ ID NO: 386411 - RNA, 19 nt, Homo sapiens
  misc_RNA (1)...(19): siRNA sense strand
caacauacacgcccaugga

SEQ ID NO: 386412 - RNA, 19 nt, Homo sapiens
  misc_RNA (1)...(19): siRNA sense strand
aguaaagccuggagauuug

SEQ ID NO: 386413 - RNA, 19 nt, Homo sapiens
  misc_RNA (1)...(19): siRNA sense strand
acacagaaaccacugauug

SEQ ID NO: 386414 - RNA, 19 nt, Homo sapiens
  misc_RNA (1)...(19): siRNA sense strand
gaauugaaucucugauaga

SEQ ID NO: 386415 - RNA, 19 nt, Homo sapiens
  misc_RNA (1)...(19): siRNA sense strand
gcugcuaucgucagaauaa

SEQ ID NO: 386416 - RNA, 19 nt, Homo sapiens
  misc_RNA (1)...(19): siRNA sense strand
ucaaggacauggagcuuuc

SEQ ID NO: 386417 - RNA, 19 nt, Homo sapiens
  misc_RNA (1)...(19): siRNA sense strand
gagcggacguuggacaaga

SEQ ID NO: 386418 - RNA, 19 nt, Homo sapiens
  misc_RNA (1)...(19): siRNA sense strand
gaaagagagguuccagaau

SEQ ID NO: 386419 - RNA, 19 nt, Homo sapiens
  misc_RNA (1)...(19): siRNA sense strand
caggaccacugcagacaaa

SEQ ID NO: 386420 - RNA, 19 nt, Homo sapiens
  misc_RNA (1)...(19): siRNA sense strand
ggauuagaacuguuuagaa

SEQ ID NO: 386421 - RNA, 19 nt, Homo sapiens
  misc_RNA (1)...(19): siRNA sense strand
ggauagaggauagugaauu

SEQ ID NO: 386422 - RNA, 19 nt, Homo sapiens
  misc_RNA (1)...(19): siRNA sense strand
caucaugguucauuucaag

SEQ ID NO: 386423 - RNA, 19 nt, Homo sapiens
  misc_RNA (1)...(19): siRNA sense strand
ggagacagaguaaucacuu

SEQ ID NO: 386424 - RNA, 19 nt, Homo sapiens
  misc_RNA (1)...(19): siRNA sense strand
agaauugaaucucugauag

SEQ ID NO: 386425 - RNA, 19 nt, Homo sapiens
  misc_RNA (1)...(19): siRNA sense strand
caguaaagccuggagauuu

SEQ ID NO: 386426 - RNA, 19 nt, Homo sapiens
  misc_RNA (1)...(19): siRNA sense strand
gcacuuaaccccagaaaug

SEQ ID NO: 386427 - RNA, 19 nt, Homo sapiens
  misc_RNA (1)...(19): siRNA sense strand
gagaacauuuaacagcaau

SEQ ID NO: 386428 - RNA, 19 nt, Homo sapiens
  misc_RNA (1)...(19): siRNA sense strand
aagagagguuccagaauau

SEQ ID NO: 386429 - RNA, 19 nt, Homo sapiens
  misc_RNA (1)...(19): siRNA sense strand
gaacauuuaacagcaauuc

SEQ ID NO: 386430 - RNA, 19 nt, Homo sapiens
  misc_RNA (1)...(19): siRNA sense strand
gaacuguuuagaacccaua

SEQ ID NO: 386431 - RNA, 19 nt, Homo sapiens
  misc_RNA (1)...(19): siRNA sense strand
ccagaaaugauuaaacuuc

SEQ ID NO: 386432 - RNA, 19 nt, Homo sapiens
  misc_RNA (1)...(19): siRNA sense strand
uaaucaauccugagaaaga

SEQ ID NO: 386433 - RNA, 19 nt, Homo sapiens
  misc_RNA (1)...(19): siRNA sense strand
gaagagacuaauugcuuau

SEQ ID NO: 386434 - RNA, 19 nt, Homo sapiens
  misc_RNA (1)...(19): siRNA sense strand
gagguuccagaauaucuua

SEQ ID NO: 386435 - RNA, 19 nt, Homo sapiens
  misc_RNA (1)...(19): siRNA sense strand
gcuaucgucagaauaauga

SEQ ID NO: 386436 - RNA, 19 nt, Homo sapiens
  misc_RNA (1)...(19): siRNA sense strand
gaagauggagacaaguuca

SEQ ID NO: 386437 - RNA, 19 nt, Homo sapiens
  misc_RNA (1)...(19): siRNA sense strand
ggaaagcacaguggucgaa

SEQ ID NO: 386438 - RNA, 19 nt, Homo sapiens
  misc_RNA (1)...(19): siRNA sense strand
ugagaaagacaaagacaug

SEQ ID NO: 386439 - RNA, 19 nt, Homo sapiens
  misc_RNA (1)...(19): siRNA sense strand
gauggagacaaguucauuu

SEQ ID NO: 386440 - RNA, 19 nt, Homo sapiens
  misc_RNA (1)...(19): siRNA sense strand
gagauggcuucagcuuuga

SEQ ID NO: 386441 - RNA, 19 nt, Homo sapiens
  misc_RNA (1)...(19): siRNA sense strand
gcacaguggucgaaaacuu

SEQ ID NO: 386442 - RNA, 19 nt, Homo sapiens
  misc_RNA (1)...(19): siRNA sense strand
ucaagcagcauaugcagaa

SEQ ID NO: 386443 - RNA, 19 nt, Homo sapiens
  misc_RNA (1)...(19): siRNA sense strand
ggacaucaugguucauuuc

SEQ ID NO: 386444 - RNA, 19 nt, Homo sapiens
  misc_RNA (1)...(19): siRNA sense strand
cauguggauucaaaguuaa

SEQ ID NO: 386445 - RNA, 19 nt, Homo sapiens
  misc_RNA (1)...(19): siRNA sense strand
acaaagacaauccgaauca

SEQ ID NO: 386446 - RNA, 19 nt, Homo sapiens
  misc_RNA (1)...(19): siRNA sense strand
guaaacgcuuagaggaaga

SEQ ID NO: 386447 - RNA, 19 nt, Homo sapiens
  misc_RNA (1)...(19): siRNA sense strand
gaccacugcagacaaauga

SEQ ID NO: 386448 - RNA, 19 nt, Homo sapiens
  misc_RNA (1)...(19): siRNA sense strand
gauaaaaugguucagagua

SEQ ID NO: 386449 - RNA, 19 nt, Homo sapiens
  misc_RNA (1)...(19): siRNA sense strand
aagacaauccgaaucagua

SEQ ID NO: 386450 - RNA, 19 nt, Homo sapiens
  misc_RNA (1)...(19): siRNA sense strand
uagagaagacucacuagau

SEQ ID NO: 386451 - RNA, 19 nt, Homo sapiens
  misc_RNA (1)...(19): siRNA sense strand
gagaagacucacuagauag

SEQ ID NO: 386452 - RNA, 19 nt, Homo sapiens
  misc_RNA (1)...(19): siRNA sense strand
gagaguguuucaggauaga

SEQ ID NO: 386453 - RNA, 19 nt, Homo sapiens
  misc_RNA (1)...(19): siRNA sense strand
ucgcaaagcauguggauuc

SEQ ID NO: 386454 - RNA, 19 nt, Homo sapiens
  misc_RNA (1)...(19): siRNA sense strand
uaagagcaggcaacaaaga

SEQ ID NO: 386455 - RNA, 19 nt, Homo sapiens
  misc_RNA (1)...(19): siRNA sense strand
ggaagauggagacaaguuc

SEQ ID NO: 386456 - RNA, 19 nt, Homo sapiens
  misc_RNA (1)...(19): siRNA sense strand
gggacaugcuguuuuaaaa

SEQ ID NO: 386457 - RNA, 19 nt, Homo sapiens
  misc_RNA (1)...(19): siRNA sense strand
uggaaggcauguucaagga

SEQ ID NO: 386458 - RNA, 19 nt, Homo sapiens
  misc_RNA (1)...(19): siRNA sense strand
ucagguuuauccacgguaa

SEQ ID NO: 386459 - RNA, 19 nt, Homo sapiens
  misc_RNA (1)...(19): siRNA sense strand
cuguuuagaacccauauua

SEQ ID NO: 386460 - RNA, 19 nt, Homo sapiens
  misc_RNA (1)...(19): siRNA sense strand
gaaagcacaguggucgaaa

SEQ ID NO: 386461 - RNA, 19 nt, Homo sapiens
  misc_RNA (1)...(19): siRNA sense strand
cagcauaugcagaaucaga

SEQ ID NO: 386462 - RNA, 19 nt, Homo sapiens
  misc_RNA (1)...(19): siRNA sense strand
gaaacagcuauuaggagaa

SEQ ID NO: 386463 - RNA, 19 nt, Homo sapiens
  misc_RNA (1)...(19): siRNA sense strand
ggaaaggaaguggaagaug

SEQ ID NO: 386464 - RNA, 19 nt, Homo sapiens
  misc_RNA (1)...(19): siRNA sense strand
cagguuagcaccacugaga

SEQ ID NO: 386465 - RNA, 19 nt, Homo sapiens
  misc_RNA (1)...(19): siRNA sense strand
uggaagagacuaauugcuu

SEQ ID NO: 386466 - RNA, 19 nt, Homo sapiens
  misc_RNA (1)...(19): siRNA sense strand
gaaggaauguuuagggaua

SEQ ID NO: 386467 - RNA, 19 nt, Homo sapiens
  misc_RNA (1)...(19): siRNA sense strand
gaaagaagaugcagcacaa

SEQ ID NO: 386468 - RNA, 19 nt, Homo sapiens
  misc_RNA (1)...(19): siRNA sense strand
guaaagcucuuguuucuga

SEQ ID NO: 386469 - RNA, 19 nt, Homo sapiens
  misc_RNA (1)...(19): siRNA sense strand
gaaagaauccuguugacua

SEQ ID NO: 386470 - RNA, 19 nt, Homo sapiens
  misc_RNA (1)...(19): siRNA sense strand
ccgaacaucucauaaauaa

SEQ ID NO: 386471 - RNA, 19 nt, Homo sapiens
  misc_RNA (1)...(19): siRNA sense strand
gaagaucagucuaugaaga

SEQ ID NO: 386472 - RNA, 19 nt, Homo sapiens
  misc_RNA (1)...(19): siRNA sense strand
gagaucaaguuguacguua

SEQ ID NO: 386473 - RNA, 19 nt, Homo sapiens
  misc_RNA (1)...(19): siRNA sense strand
gaaaguagaagcuagaauu

SEQ ID NO: 386474 - RNA, 19 nt, Homo sapiens
  misc_RNA (1)...(19): siRNA sense strand
gagaagauguacuaaauuc

SEQ ID NO: 386475 - RNA, 19 nt, Homo sapiens
  misc_RNA (1)...(19): siRNA sense strand
gcgagaagauguacuaaau

SEQ ID NO: 386476 - RNA, 19 nt, Homo sapiens
  misc_RNA (1)...(19): siRNA sense strand
gaaaguagacgacgacaga

SEQ ID NO: 386477 - RNA, 19 nt, Homo sapiens
  misc_RNA (1)...(19): siRNA sense strand
gaacccaaaucaaaggaaa

SEQ ID NO: 386478 - RNA, 19 nt, Homo sapiens
  misc_RNA (1)...(19): siRNA sense strand
gaccgucucuuuaaacaaa

SEQ ID NO: 386479 - RNA, 19 nt, Homo sapiens
  misc_RNA (1)...(19): siRNA sense strand
gaaauccagcguaagaaua

SEQ ID NO: 386480 - RNA, 19 nt, Homo sapiens
  misc_RNA (1)...(19): siRNA sense strand
gcagcacaauguucuagua

SEQ ID NO: 386481 - RNA, 19 nt, Homo sapiens
  misc_RNA (1)...(19): siRNA sense strand
ggagaauucugggcuagua

SEQ ID NO: 386482 - RNA, 19 nt, Homo sapiens
  misc_RNA (1)...(19): siRNA sense strand
gaaggaagaucagucuaug

SEQ ID NO: 386483 - RNA, 19 nt, Homo sapiens
  misc_RNA (1)...(19): siRNA sense strand
acacaacgauggaugaauu

SEQ ID NO: 386484 - RNA, 19 nt, Homo sapiens
  misc_RNA (1)...(19): siRNA sense strand
gaggagcucuauagaaaug

SEQ ID NO: 386485 - RNA, 19 nt, Homo sapiens
  misc_RNA (1)...(19): siRNA sense strand
gcucuacacuggacuaaga

SEQ ID NO: 386486 - RNA, 19 nt, Homo sapiens
  misc_RNA (1)...(19): siRNA sense strand
ggacuaagagaaguuguua

SEQ ID NO: 386487 - RNA, 19 nt, Homo sapiens
  misc_RNA (1)...(19): siRNA sense strand
uaaauaaggugcgagaaga

SEQ ID NO: 386488 - RNA, 19 nt, Homo sapiens
  misc_RNA (1)...(19): siRNA sense strand
gaacaucucauaaauaagg

SEQ ID NO: 386489 - RNA, 19 nt, Homo sapiens
  misc_RNA (1)...(19): siRNA sense strand
caaguccaguuguuauuaa

SEQ ID NO: 386490 - RNA, 19 nt, Homo sapiens
  misc_RNA (1)...(19): siRNA sense strand
gcacugccuugacaaauca

SEQ ID NO: 386491 - RNA, 19 nt, Homo sapiens
  misc_RNA (1)...(19): siRNA sense strand
uaagaaacguauugaagga

SEQ ID NO: 386492 - RNA, 19 nt, Homo sapiens
  misc_RNA (1)...(19): siRNA sense strand
uggagaacgucuacaauuu

SEQ ID NO: 386493 - RNA, 19 nt, Homo sapiens
  misc_RNA (1)...(19): siRNA sense strand
caagaaauccagcguaaga

SEQ ID NO: 386494 - RNA, 19 nt, Homo sapiens
  misc_RNA (1)...(19): siRNA sense strand
caacaaugaccgucucuuu

SEQ ID NO: 386495 - RNA, 19 nt, Homo sapiens
  misc_RNA (1)...(19): siRNA sense strand
gaagaaauagaacgaguga

SEQ ID NO: 386496 - RNA, 19 nt, Homo sapiens
  misc_RNA (1)...(19): siRNA sense strand
gcacaugaagacuauagua

SEQ ID NO: 386497 - RNA, 19 nt, Homo sapiens
  misc_RNA (1)...(19): siRNA sense strand
gaauguggaugucaguuca

SEQ ID NO: 386498 - RNA, 19 nt, Homo sapiens
  misc_RNA (1)...(19): siRNA sense strand
gcuaacagaacaagaagua

SEQ ID NO: 386499 - RNA, 19 nt, Homo sapiens
  misc_RNA (1)...(19): siRNA sense strand
gaauaacaguggucuuagu

SEQ ID NO: 386500 - RNA, 19 nt, Homo sapiens
  misc_RNA (1)...(19): siRNA sense strand
uugaggagcucuauagaaa

SEQ ID NO: 386501 - RNA, 19 nt, Homo sapiens
  misc_RNA (1)...(19): siRNA sense strand
aagcacauauugcaaguuu

SEQ ID NO: 386502 - RNA, 19 nt, Homo sapiens
  misc_RNA (1)...(19): siRNA sense strand
gaugucaguucacgucaaa

SEQ ID NO: 386503 - RNA, 19 nt, Homo sapiens
  misc_RNA (1)...(19): siRNA sense strand
caugaagacuauaguagaa

SEQ ID NO: 386504 - RNA, 19 nt, Homo sapiens
  misc_RNA (1)...(19): siRNA sense strand
caaacucuauuggauauga

SEQ ID NO: 386505 - RNA, 19 nt, Homo sapiens
  misc_RNA (1)...(19): siRNA sense strand
ccaagcacaugaagacuau

SEQ ID NO: 386506 - RNA, 19 nt, Homo sapiens
  misc_RNA (1)...(19): siRNA sense strand
ucaaagggcuaacagaaca

SEQ ID NO: 386507 - RNA, 19 nt, Homo sapiens
  misc_RNA (1)...(19): siRNA sense strand
aaagaauccuguugacuau

SEQ ID NO: 386508 - RNA, 19 nt, Homo sapiens
  misc_RNA (1)...(19): siRNA sense strand
ggagaacgucuacaauuug

SEQ ID NO: 386509 - RNA, 19 nt, Homo sapiens
  misc_RNA (1)...(19): siRNA sense strand
gaaagaaacaaggcagaaa

SEQ ID NO: 386510 - RNA, 19 nt, Homo sapiens
  misc_RNA (1)...(19): siRNA sense strand
ucaaacaguugcugccaaa

SEQ ID NO: 386511 - RNA, 19 nt, Homo sapiens
  misc_RNA (1)...(19): siRNA sense strand
ugccagauguuaaugauuu

SEQ ID NO: 386512 - RNA, 19 nt, Homo sapiens
  misc_RNA (1)...(19): siRNA sense strand
ggcaaacucuauuggauau

SEQ ID NO: 386513 - RNA, 19 nt, Homo sapiens
  misc_RNA (1)...(19): siRNA sense strand
caaaagaacccaaaucaaa

SEQ ID NO: 386514 - RNA, 19 nt, Homo sapiens
  misc_RNA (1)...(19): siRNA sense strand
acaaguaacuggcucuaau

SEQ ID NO: 386515 - RNA, 19 nt, Homo sapiens
  misc_RNA (1)...(19): siRNA sense strand
guugaaggcgcgauucuua

SEQ ID NO: 386516 - RNA, 19 nt, Homo sapiens
  misc_RNA (1)...(19): siRNA sense strand
gaaacaaggcagaaaguag

SEQ ID NO: 386517 - RNA, 19 nt, Homo sapiens
  misc_RNA (1)...(19): siRNA sense strand
caaguaacuggcucuaaua

SEQ ID NO: 386518 - RNA, 19 nt, Homo sapiens
  misc_RNA (1)...(19): siRNA sense strand
agacagaggcgcaauaaga

SEQ ID NO: 386519 - RNA, 19 nt, Homo sapiens
  misc_RNA (1)...(19): siRNA sense strand
ggcaacugguguaucuuua

SEQ ID NO: 386520 - RNA, 19 nt, Homo sapiens
  misc_RNA (1)...(19): siRNA sense strand
caaugaccgucucuuuaaa

SEQ ID NO: 386521 - RNA, 19 nt, Homo sapiens
  misc_RNA (1)...(19): siRNA sense strand
ggugaugauuagagacaua

SEQ ID NO: 386522 - RNA, 19 nt, Homo sapiens
  misc_RNA (1)...(19): siRNA sense strand
uguaugaguuccuauuuga

SEQ ID NO: 386523 - RNA, 19 nt, Homo sapiens
  misc_RNA (1)...(19): siRNA sense strand
ucaaacagcuauggugaug

SEQ ID NO: 386524 - RNA, 19 nt, Homo sapiens
  misc_RNA (1)...(19): siRNA sense strand
acaaugaccgucucuuuaa

SEQ ID NO: 386525 - RNA, 19 nt, Homo sapiens
  misc_RNA (1)...(19): siRNA sense strand
ggaagaaccaauuguaaag

SEQ ID NO: 386526 - RNA, 19 nt, Homo sapiens
  misc_RNA (1)...(19): siRNA sense strand
gauggaaagccagaaauuu

SEQ ID NO: 386527 - RNA, 19 nt, Homo sapiens
  misc_RNA (1)...(19): siRNA sense strand
ugaaagagagcuuguuaga

SEQ ID NO: 386528 - RNA, 19 nt, Homo sapiens
  misc_RNA (1)...(19): siRNA sense strand
gaacaagaaguagaaacaa

SEQ ID NO: 386529 - RNA, 19 nt, Homo sapiens
  misc_RNA (1)...(19): siRNA sense strand
gcuaguacauauguugaaa

SEQ ID NO: 386530 - RNA, 19 nt, Homo sapiens
  misc_RNA (1)...(19): siRNA sense strand
aaacagcuauggugaugau

SEQ ID NO: 386531 - RNA, 19 nt, Homo sapiens
  misc_RNA (1)...(19): siRNA sense strand
gaagaugcagcacaauguu

SEQ ID NO: 386532 - RNA, 19 nt, Homo sapiens
  misc_RNA (1)...(19): siRNA sense strand
agacagauaucccugaaag

SEQ ID NO: 386533 - RNA, 19 nt, Homo sapiens
  misc_RNA (1)...(19): siRNA sense strand
ggaagcacauauugcaagu

SEQ ID NO: 386534 - RNA, 19 nt, Homo sapiens
  misc_RNA (1)...(19): siRNA sense strand
uaguagaaauggagaauuc

SEQ ID NO: 386535 - RNA, 19 nt, Homo sapiens
  misc_RNA (1)...(19): siRNA sense strand
cgucuacaauuugggauua

SEQ ID NO: 386536 - RNA, 19 nt, Homo sapiens
  misc_RNA (1)...(19): siRNA sense strand
gagaacgucuacaauuugg

SEQ ID NO: 386537 - RNA, 19 nt, Homo sapiens
  misc_RNA (1)...(19): siRNA sense strand
cgggugacuuugaguauuu

SEQ ID NO: 386538 - RNA, 19 nt, Homo sapiens
  misc_RNA (1)...(19): siRNA sense strand
gaaaggagaagucguagac

SEQ ID NO: 386539 - RNA, 19 nt, Homo sapiens
  misc_RNA (1)...(19): siRNA sense strand
gcggaaaggagaagucgua

SEQ ID NO: 386540 - RNA, 19 nt, Homo sapiens
  misc_RNA (1)...(19): siRNA sense strand
gaaaauagugcuucaguau

SEQ ID NO: 386541 - RNA, 19 nt, Homo sapiens
  misc_RNA (1)...(19): siRNA sense strand
aagaaaugcuugccagaug

SEQ ID NO: 386542 - RNA, 19 nt, Homo sapiens
  misc_RNA (1)...(19): siRNA sense strand
gacagaggcgcaauaagaa

SEQ ID NO: 386543 - RNA, 19 nt, Homo sapiens
  misc_RNA (1)...(19): siRNA sense strand
ccaaguccaguuguuauua

SEQ ID NO: 386544 - RNA, 19 nt, Homo sapiens
  misc_RNA (1)...(19): siRNA sense strand
gcuauagugcggauaauga

SEQ ID NO: 386545 - RNA, 19 nt, Homo sapiens
  misc_RNA (1)...(19): siRNA sense strand
aaacaaggcagaaaguaga

SEQ ID NO: 386546 - RNA, 19 nt, Homo sapiens
  misc_RNA (1)...(19): siRNA sense strand
ucaauucacauccaaacua

SEQ ID NO: 386547 - RNA, 19 nt, Homo sapiens
  misc_RNA (1)...(19): siRNA sense strand
uaacagaacaagaaguaga

SEQ ID NO: 386548 - RNA, 19 nt, Homo sapiens
  misc_RNA (1)...(19): siRNA sense strand
agaauccuguugacuauau

SEQ ID NO: 386549 - RNA, 19 nt, Homo sapiens
  misc_RNA (1)...(19): siRNA sense strand
gaagcuagaauuaaugaag

SEQ ID NO: 386550 - RNA, 19 nt, Homo sapiens
  misc_RNA (1)...(19): siRNA sense strand
uaccgaacaucucauaaau

SEQ ID NO: 386551 - RNA, 19 nt, Homo sapiens
  misc_RNA (1)...(19): siRNA sense strand
ggaaagaaacaaggcagaa

SEQ ID NO: 386552 - RNA, 19 nt, Homo sapiens
  misc_RNA (1)...(19): siRNA sense strand
ccagaugaccauauuaaug

SEQ ID NO: 386553 - RNA, 19 nt, Homo sapiens
  misc_RNA (1)...(19): siRNA sense strand
uguuggaggugcacaagua

SEQ ID NO: 386554 - RNA, 19 nt, Homo sapiens
  misc_RNA (1)...(19): siRNA sense strand
guaacuggcucuaauacac

SEQ ID NO: 386555 - RNA, 19 nt, Homo sapiens
  misc_RNA (1)...(19): siRNA sense strand
guacguuauggguguauua

SEQ ID NO: 386556 - RNA, 19 nt, Homo sapiens
  misc_RNA (1)...(19): siRNA sense strand
gagucaagauucaaacagu

SEQ ID NO: 386557 - RNA, 19 nt, Homo sapiens
  misc_RNA (1)...(19): siRNA sense strand
agaaauagaacgagugaug

SEQ ID NO: 386558 - RNA, 19 nt, Homo sapiens
  misc_RNA (1)...(19): siRNA sense strand
guagacagaggcgcaauaa

SEQ ID NO: 386559 - RNA, 19 nt, Homo sapiens
  misc_RNA (1)...(19): siRNA sense strand
uaaaucaagcuuggaauga

SEQ ID NO: 386560 - RNA, 19 nt, Homo sapiens
  misc_RNA (1)...(19): siRNA sense strand
ugaaggacuuauugagaga

SEQ ID NO: 386561 - RNA, 19 nt, Homo sapiens
  misc_RNA (1)...(19): siRNA sense strand
gaaacguauugaaggacuu

SEQ ID NO: 386562 - RNA, 19 nt, Homo sapiens
  misc_RNA (1)...(19): siRNA sense strand
ccugaaagagagcuuguua

SEQ ID NO: 386563 - RNA, 19 nt, Homo sapiens
  misc_RNA (1)...(19): siRNA sense strand
gaagaaggagaaggaaaga

SEQ ID NO: 386564 - RNA, 19 nt, Homo sapiens
  misc_RNA (1)...(19): siRNA sense strand
uaacaguggucuuaguuuu

SEQ ID NO: 386565 - RNA, 19 nt, Homo sapiens
  misc_RNA (1)...(19): siRNA sense strand
agaaaugcauauacaaugg

SEQ ID NO: 386566 - RNA, 19 nt, Homo sapiens
  misc_RNA (1)...(19): siRNA sense strand
gcgaguaccuggugaauuu

SEQ ID NO: 386567 - RNA, 19 nt, Homo sapiens
  misc_RNA (1)...(19): siRNA sense strand
ggacaaggcuuuccagaca

SEQ ID NO: 386568 - RNA, 19 nt, Homo sapiens
  misc_RNA (1)...(19): siRNA sense strand
cagaugcaguugauucuua

SEQ ID NO: 386569 - RNA, 19 nt, Homo sapiens
  misc_RNA (1)...(19): siRNA sense strand
gcaagcaggugguggagaa

SEQ ID NO: 386570 - RNA, 19 nt, Homo sapiens
  misc_RNA (1)...(19): siRNA sense strand
gaaauccaguccaaguuga

SEQ ID NO: 386571 - RNA, 19 nt, Homo sapiens
  misc_RNA (1)...(19): siRNA sense strand
cgaaggaaaucaagggaaa

SEQ ID NO: 386572 - RNA, 19 nt, Homo sapiens
  misc_RNA (1)...(19): siRNA sense strand
gcagaucuacgacaaauuc

SEQ ID NO: 386573 - RNA, 19 nt, Homo sapiens
  misc_RNA (1)...(19): siRNA sense strand
caagggaaauccaguccaa

SEQ ID NO: 386574 - RNA, 19 nt, Homo sapiens
  misc_RNA (1)...(19): siRNA sense strand
ggaaauccaguccaaguug

SEQ ID NO: 386575 - RNA, 19 nt, Homo sapiens
  misc_RNA (1)...(19): siRNA sense strand
gggaagacccgaacucgaa

SEQ ID NO: 386576 - RNA, 19 nt, Homo sapiens
  misc_RNA (1)...(19): siRNA sense strand
caagauguauggucggaau

SEQ ID NO: 386577 - RNA, 19 nt, Homo sapiens
  misc_RNA (1)...(19): siRNA sense strand
cgacaaauucccugagaaa

SEQ ID NO: 386578 - RNA, 19 nt, Homo sapiens
  misc_RNA (1)...(19): siRNA sense strand
gggcccagcaucacauuua

SEQ ID NO: 386579 - RNA, 19 nt, Homo sapiens
  misc_RNA (1)...(19): siRNA sense strand
gguugcagcugguagaguu

SEQ ID NO: 386580 - RNA, 19 nt, Homo sapiens
  misc_RNA (1)...(19): siRNA sense strand
ggagugagcagccaguaug

SEQ ID NO: 386581 - RNA, 19 nt, Homo sapiens
  misc_RNA (1)...(19): siRNA sense strand
aaacagagacacccaggaa

SEQ ID NO: 386582 - RNA, 19 nt, Homo sapiens
  misc_RNA (1)...(19): siRNA sense strand
ccugagcgauacaugauga

SEQ ID NO: 386583 - RNA, 19 nt, Homo sapiens
  misc_RNA (1)...(19): siRNA sense strand
gacaaggcuuuccagacaa

SEQ ID NO: 386584 - RNA, 19 nt, Homo sapiens
  misc_RNA (1)...(19): siRNA sense strand
ggaagacccgaacucgaaa

SEQ ID NO: 386585 - RNA, 19 nt, Homo sapiens
  misc_RNA (1)...(19): siRNA sense strand
ccuccaaggucugcucuuu

SEQ ID NO: 386586 - RNA, 19 nt, Homo sapiens
  misc_RNA (1)...(19): siRNA sense strand
gcuggaggacggcagauuu

SEQ ID NO: 386587 - RNA, 19 nt, Homo sapiens
  misc_RNA (1)...(19): siRNA sense strand
guucucagccuucguggaa

SEQ ID NO: 386588 - RNA, 19 nt, Homo sapiens
  misc_RNA (1)...(19): siRNA sense strand
gaugaacagcguccuggaa

SEQ ID NO: 386589 - RNA, 19 nt, Homo sapiens
  misc_RNA (1)...(19): siRNA sense strand
gauguauggucggaaugaa

SEQ ID NO: 386590 - RNA, 19 nt, Homo sapiens
  misc_RNA (1)...(19): siRNA sense strand
gaugaaggcaagauguaug

SEQ ID NO: 386591 - RNA, 19 nt, Homo sapiens
  misc_RNA (1)...(19): siRNA sense strand
cggcagaucuacgacaaau

SEQ ID NO: 386592 - RNA, 19 nt, Homo sapiens
  misc_RNA (1)...(19): siRNA sense strand
gggaaauccaguccaaguu

SEQ ID NO: 386593 - RNA, 19 nt, Homo sapiens
  misc_RNA (1)...(19): siRNA sense strand
ccucugagcuuuuccaguu

SEQ ID NO: 386594 - RNA, 19 nt, Homo sapiens
  misc_RNA (1)...(19): siRNA sense strand
gaggacggcagauuugugu

SEQ ID NO: 386595 - RNA, 19 nt, Homo sapiens
  misc_RNA (1)...(19): siRNA sense strand
ugaaggaccagguuuccaa

SEQ ID NO: 386596 - RNA, 19 nt, Homo sapiens
  misc_RNA (1)...(19): siRNA sense strand
ccguucaccuugucacuga

SEQ ID NO: 386597 - RNA, 19 nt, Homo sapiens
  misc_RNA (1)...(19): siRNA sense strand
cagcagugguggcuucuac

SEQ ID NO: 386598 - RNA, 19 nt, Homo sapiens
  misc_RNA (1)...(19): siRNA sense strand
ggaaaucaagggaaaucca

SEQ ID NO: 386599 - RNA, 19 nt, Homo sapiens
  misc_RNA (1)...(19): siRNA sense strand
acaugacccucaccuguuc

SEQ ID NO: 386600 - RNA, 19 nt, Homo sapiens
  misc_RNA (1)...(19): siRNA sense strand
uacgacaaauucccugaga

SEQ ID NO: 386601 - RNA, 19 nt, Homo sapiens
  misc_RNA (1)...(19): siRNA sense strand
acaaggcuuuccagacaau

SEQ ID NO: 386602 - RNA, 19 nt, Homo sapiens
  misc_RNA (1)...(19): siRNA sense strand
gcagugaggaaggcaguga

SEQ ID NO: 386603 - RNA, 19 nt, Homo sapiens
  misc_RNA (1)...(19): siRNA sense strand
gaaggaaaucaagggaaau

SEQ ID NO: 386604 - RNA, 19 nt, Homo sapiens
  misc_RNA (1)...(19): siRNA sense strand
gcagcugccugagcgauac

SEQ ID NO: 386605 - RNA, 19 nt, Homo sapiens
  misc_RNA (1)...(19): siRNA sense strand
gugagcagccaguaugaga

SEQ ID NO: 386606 - RNA, 19 nt, Homo sapiens
  misc_RNA (1)...(19): siRNA sense strand
uuccagaugugaagccauu

SEQ ID NO: 386607 - RNA, 19 nt, Homo sapiens
  misc_RNA (1)...(19): siRNA sense strand
ggaggacggcagauuugug

SEQ ID NO: 386608 - RNA, 19 nt, Homo sapiens
  misc_RNA (1)...(19): siRNA sense strand
ggacggcagauuuguguac

SEQ ID NO: 386609 - RNA, 19 nt, Homo sapiens
  misc_RNA (1)...(19): siRNA sense strand
caaguugaaggaccagguu

SEQ ID NO: 386610 - RNA, 19 nt, Homo sapiens
  misc_RNA (1)...(19): siRNA sense strand
ggaaccgccagaugcaguu

SEQ ID NO: 386611 - RNA, 19 nt, Homo sapiens
  misc_RNA (1)...(19): siRNA sense strand
cacaugacccucaccuguu

SEQ ID NO: 386612 - RNA, 19 nt, Homo sapiens
  misc_RNA (1)...(19): siRNA sense strand
uaugagagccuggaacaca

SEQ ID NO: 386613 - RNA, 19 nt, Homo sapiens
  misc_RNA (1)...(19): siRNA sense strand
gagugagcagccaguauga

SEQ ID NO: 386614 - RNA, 19 nt, Homo sapiens
  misc_RNA (1)...(19): siRNA sense strand
gagcgauacaugaugaaca

SEQ ID NO: 386615 - RNA, 19 nt, Homo sapiens
  misc_RNA (1)...(19): siRNA sense strand
gguguggagcccagacauu

SEQ ID NO: 386616 - RNA, 19 nt, Homo sapiens
  misc_RNA (1)...(19): siRNA sense strand
gaauguuccagaugugaag

SEQ ID NO: 386617 - RNA, 19 nt, Homo sapiens
  misc_RNA (1)...(19): siRNA sense strand
gaagccauucucacagaca

SEQ ID NO: 386618 - RNA, 19 nt, Homo sapiens
  misc_RNA (1)...(19): siRNA sense strand
ucuagucacauccagguuu

SEQ ID NO: 386619 - RNA, 19 nt, Homo sapiens
  misc_RNA (1)...(19): siRNA sense strand
cagacaccguucaccuugu

SEQ ID NO: 386620 - RNA, 19 nt, Homo sapiens
  misc_RNA (1)...(19): siRNA sense strand
guaccuggugaauuucuug

SEQ ID NO: 386621 - RNA, 19 nt, Homo sapiens
  misc_RNA (1)...(19): siRNA sense strand
cugaugaaggcaagaugua

SEQ ID NO: 386622 - RNA, 19 nt, Homo sapiens
  misc_RNA (1)...(19): siRNA sense strand
guguggagcccagacauug

SEQ ID NO: 386623 - RNA, 19 nt, Homo sapiens
  misc_RNA (1)...(19): siRNA sense strand
gcucugcaccgccuauguc

SEQ ID NO: 386624 - RNA, 19 nt, Homo sapiens
  misc_RNA (1)...(19): siRNA sense strand
aggaccagguuuccaagga

SEQ ID NO: 386625 - RNA, 19 nt, Homo sapiens
  misc_RNA (1)...(19): siRNA sense strand
acgacaaauucccugagaa

SEQ ID NO: 386626 - RNA, 19 nt, Homo sapiens
  misc_RNA (1)...(19): siRNA sense strand
cugcaccgccuaugucuuc

SEQ ID NO: 386627 - RNA, 19 nt, Homo sapiens
  misc_RNA (1)...(19): siRNA sense strand
acagguuucuagucacauc

SEQ ID NO: 386628 - RNA, 19 nt, Homo sapiens
  misc_RNA (1)...(19): siRNA sense strand
cuaaagaggugaauauuga

SEQ ID NO: 386629 - RNA, 19 nt, Homo sapiens
  misc_RNA (1)...(19): siRNA sense strand
ccaaggagauuaagaucaa

SEQ ID NO: 386630 - RNA, 19 nt, Homo sapiens
  misc_RNA (1)...(19): siRNA sense strand
gaaagggccaaggagauua

SEQ ID NO: 386631 - RNA, 19 nt, Homo sapiens
  misc_RNA (1)...(19): siRNA sense strand
cuaaggacaucacaaugaa

SEQ ID NO: 386632 - RNA, 19 nt, Homo sapiens
  misc_RNA (1)...(19): siRNA sense strand
ggaaagggccaaggagauu

SEQ ID NO: 386633 - RNA, 19 nt, Homo sapiens
  misc_RNA (1)...(19): siRNA sense strand
aaaguuuccugaagucuga

SEQ ID NO: 386634 - RNA, 19 nt, Homo sapiens
  misc_RNA (1)...(19): siRNA sense strand
gagaaggcaaagcaaauuu

SEQ ID NO: 386635 - RNA, 19 nt, Homo sapiens
  misc_RNA (1)...(19): siRNA sense strand
gaaggcaaagcaaauuuau

SEQ ID NO: 386636 - RNA, 19 nt, Homo sapiens
  misc_RNA (1)...(19): siRNA sense strand
acuauggacuugccaguuu

SEQ ID NO: 386637 - RNA, 19 nt, Homo sapiens
  misc_RNA (1)...(19): siRNA sense strand
cagaacaacuauggacuug

SEQ ID NO: 386638 - RNA, 19 nt, Homo sapiens
  misc_RNA (1)...(19): siRNA sense strand
gcaaagcaaauuuaugaag

SEQ ID NO: 386639 - RNA, 19 nt, Homo sapiens
  misc_RNA (1)...(19): siRNA sense strand
gcagaacaacuauggacuu

SEQ ID NO: 386640 - RNA, 19 nt, Homo sapiens
  misc_RNA (1)...(19): siRNA sense strand
aggcaaagcaaauuuauga

SEQ ID NO: 386641 - RNA, 19 nt, Homo sapiens
  misc_RNA (1)...(19): siRNA sense strand
agaaggcaaagcaaauuua

SEQ ID NO: 386642 - RNA, 19 nt, Homo sapiens
  misc_RNA (1)...(19): siRNA sense strand
uaucaggaguuaaucaagu

SEQ ID NO: 386643 - RNA, 19 nt, Homo sapiens
  misc_RNA (1)...(19): siRNA sense strand
uggacaaacuccugcagaa

SEQ ID NO: 386644 - RNA, 19 nt, Homo sapiens
  misc_RNA (1)...(19): siRNA sense strand
gcuuugacauggcccagaa

SEQ ID NO: 386645 - RNA, 19 nt, Homo sapiens
  misc_RNA (1)...(19): siRNA sense strand
acaaacuccugcagaacaa

SEQ ID NO: 386646 - RNA, 19 nt, Homo sapiens
  misc_RNA (1)...(19): siRNA sense strand
gacaaacuccugcagaaca

SEQ ID NO: 386647 - RNA, 19 nt, Homo sapiens
  misc_RNA (1)...(19): siRNA sense strand
ucacuaaggacaucacaau

SEQ ID NO: 386648 - RNA, 19 nt, Homo sapiens
  misc_RNA (1)...(19): siRNA sense strand
ggauugccugugaggauua

SEQ ID NO: 386649 - RNA, 19 nt, Homo sapiens
  misc_RNA (1)...(19): siRNA sense strand
aagaauccaugcccugaug

SEQ ID NO: 386650 - RNA, 19 nt, Homo sapiens
  misc_RNA (1)...(19): siRNA sense strand
gcccugcaguggcgugauu

SEQ ID NO: 386651 - RNA, 19 nt, Homo sapiens
  misc_RNA (1)...(19): siRNA sense strand
gugauucccuggacaaacu

SEQ ID NO: 386652 - RNA, 19 nt, Homo sapiens
  misc_RNA (1)...(19): siRNA sense strand
acaaugagaagccagagaa

SEQ ID NO: 386653 - RNA, 19 nt, Homo sapiens
  misc_RNA (1)...(19): siRNA sense strand
ccuaaagaggugaauauug

SEQ ID NO: 386654 - RNA, 19 nt, Homo sapiens
  misc_RNA (1)...(19): siRNA sense strand
gcugagaaggcaaagcaaa

SEQ ID NO: 386655 - RNA, 19 nt, Homo sapiens
  misc_RNA (1)...(19): siRNA sense strand
ccagaagccagacucaguu

SEQ ID NO: 386656 - RNA, 19 nt, Homo sapiens
  misc_RNA (1)...(19): siRNA sense strand
acuaaggacaucacaauga

SEQ ID NO: 386657 - RNA, 19 nt, Homo sapiens
  misc_RNA (1)...(19): siRNA sense strand
ccacuucacuaaggacauc

SEQ ID NO: 386658 - RNA, 19 nt, Homo sapiens
  misc_RNA (1)...(19): siRNA sense strand
agacucaguuggugaccuu

SEQ ID NO: 386659 - RNA, 19 nt, Homo sapiens
  misc_RNA (1)...(19): siRNA sense strand
ggagauuaagaucaaguug

SEQ ID NO: 386660 - RNA, 19 nt, Homo sapiens
  misc_RNA (1)...(19): siRNA sense strand
ggugaauauugaccacuuc

SEQ ID NO: 386661 - RNA, 19 nt, Homo sapiens
  misc_RNA (1)...(19): siRNA sense strand
ugagaaggcaaagcaaauu

SEQ ID NO: 386662 - RNA, 19 nt, Homo sapiens
  misc_RNA (1)...(19): siRNA sense strand
ggacuugccaguuucaaaa

SEQ ID NO: 386663 - RNA, 19 nt, Homo sapiens
  misc_RNA (1)...(19): siRNA sense strand
gaauauugaccacuucacu

SEQ ID NO: 386664 - RNA, 19 nt, Homo sapiens
  misc_RNA (1)...(19): siRNA sense strand
aaccuugaguucuggauug

SEQ ID NO: 386665 - RNA, 19 nt, Homo sapiens
  misc_RNA (1)...(19): siRNA sense strand
ccagagaaaccagccaaga

SEQ ID NO: 386666 - RNA, 19 nt, Homo sapiens
  misc_RNA (1)...(19): siRNA sense strand
aagaucaaguugggaauuc

SEQ ID NO: 386667 - RNA, 19 nt, Homo sapiens
  misc_RNA (1)...(19): siRNA sense strand
aaagggccaaggagauuaa

SEQ ID NO: 386668 - RNA, 19 nt, Homo sapiens
  misc_RNA (1)...(19): siRNA sense strand
gaagccagacucaguuggu

SEQ ID NO: 386669 - RNA, 19 nt, Homo sapiens
  misc_RNA (1)...(19): siRNA sense strand
ccugugaggauuacaagaa

SEQ ID NO: 386670 - RNA, 19 nt, Homo sapiens
  misc_RNA (1)...(19): siRNA sense strand
uaagaucaaguugggaauu

SEQ ID NO: 386671 - RNA, 19 nt, Homo sapiens
  misc_RNA (1)...(19): siRNA sense strand
auauugaccacuucacuaa

SEQ ID NO: 386672 - RNA, 19 nt, Homo sapiens
  misc_RNA (1)...(19): siRNA sense strand
aucaggaguuaaucaagua

SEQ ID NO: 386673 - RNA, 19 nt, Homo sapiens
  misc_RNA (1)...(19): siRNA sense strand
gggccaaggagauuaagau

SEQ ID NO: 386674 - RNA, 19 nt, Homo sapiens
  misc_RNA (1)...(19): siRNA sense strand
caaugagaagccagagaaa

SEQ ID NO: 386675 - RNA, 19 nt, Homo sapiens
  misc_RNA (1)...(19): siRNA sense strand
uggauugccugugaggauu

SEQ ID NO: 386676 - RNA, 19 nt, Homo sapiens
  misc_RNA (1)...(19): siRNA sense strand
aauauugaccacuucacua

SEQ ID NO: 386677 - RNA, 19 nt, Homo sapiens
  misc_RNA (1)...(19): siRNA sense strand
ggacaaacuccugcagaac

SEQ ID NO: 386678 - RNA, 19 nt, Homo sapiens
  misc_RNA (1)...(19): siRNA sense strand
gaggauuacaagaagauca

SEQ ID NO: 386679 - RNA, 19 nt, Homo sapiens
  misc_RNA (1)...(19): siRNA sense strand
gccaaggagauuaagauca

SEQ ID NO: 386680 - RNA, 19 nt, Homo sapiens
  misc_RNA (1)...(19): siRNA sense strand
ggacaucacaaugaagaac

SEQ ID NO: 386681 - RNA, 19 nt, Homo sapiens
  misc_RNA (1)...(19): siRNA sense strand
aaggacaucacaaugaaga

SEQ ID NO: 386682 - RNA, 19 nt, Homo sapiens
  misc_RNA (1)...(19): siRNA sense strand
ggcaaagcaaauuuaugaa

SEQ ID NO: 386683 - RNA, 19 nt, Homo sapiens
  misc_RNA (1)...(19): siRNA sense strand
gcuccuaaagaggugaaua

SEQ ID NO: 386684 - RNA, 19 nt, Homo sapiens
  misc_RNA (1)...(19): siRNA sense strand
cuauggacuugccaguuuc

SEQ ID NO: 386685 - RNA, 19 nt, Homo sapiens
  misc_RNA (1)...(19): siRNA sense strand
ugacauggcccagaaaaga

SEQ ID NO: 386686 - RNA, 19 nt, Homo sapiens
  misc_RNA (1)...(19): siRNA sense strand
cagaagccagacucaguug

SEQ ID NO: 386687 - RNA, 19 nt, Homo sapiens
  misc_RNA (1)...(19): siRNA sense strand
caaguccccugccaagaug

SEQ ID NO: 386688 - RNA, 19 nt, Homo sapiens
  misc_RNA (1)...(19): siRNA sense strand
gguggacgcucgaauguua

SEQ ID NO: 386689 - RNA, 19 nt, Homo sapiens
  misc_RNA (1)...(19): siRNA sense strand
cgaaggagcugaacuuaug

SEQ ID NO: 386690 - RNA, 19 nt, Homo sapiens
  misc_RNA (1)...(19): siRNA sense strand
ugaaacggcucaacuauga

SEQ ID NO: 386691 - RNA, 19 nt, Homo sapiens
  misc_RNA (1)...(19): siRNA sense strand
gcucaaagcucuaaagucu

SEQ ID NO: 386692 - RNA, 19 nt, Homo sapiens
  misc_RNA (1)...(19): siRNA sense strand
gggagaagaugaacgauga

SEQ ID NO: 386693 - RNA, 19 nt, Homo sapiens
  misc_RNA (1)...(19): siRNA sense strand
gaugaacgaugaccacaau

SEQ ID NO: 386694 - RNA, 19 nt, Homo sapiens
  misc_RNA (1)...(19): siRNA sense strand
caagagcggugccaucaug

SEQ ID NO: 386695 - RNA, 19 nt, Homo sapiens
  misc_RNA (1)...(19): siRNA sense strand
gggagcagauccuggcaua

SEQ ID NO: 386696 - RNA, 19 nt, Homo sapiens
  misc_RNA (1)...(19): siRNA sense strand
uagaucaccuuaacaagaa

SEQ ID NO: 386697 - RNA, 19 nt, Homo sapiens
  misc_RNA (1)...(19): siRNA sense strand
gcacgacgccaacgacaaa

SEQ ID NO: 386698 - RNA, 19 nt, Homo sapiens
  misc_RNA (1)...(19): siRNA sense strand
ggagauagccaacaugaag

SEQ ID NO: 386699 - RNA, 19 nt, Homo sapiens
  misc_RNA (1)...(19): siRNA sense strand
ggaacaagaggaagcauga

SEQ ID NO: 386700 - RNA, 19 nt, Homo sapiens
  misc_RNA (1)...(19): siRNA sense strand
ggagagggaggaagagauu

SEQ ID NO: 386701 - RNA, 19 nt, Homo sapiens
  misc_RNA (1)...(19): siRNA sense strand
cagcaaccuuaucuccuua

SEQ ID NO: 386702 - RNA, 19 nt, Homo sapiens
  misc_RNA (1)...(19): siRNA sense strand
gagcaucaagucauccaua

SEQ ID NO: 386703 - RNA, 19 nt, Homo sapiens
  misc_RNA (1)...(19): siRNA sense strand
caggaugaguugcugcuaa

SEQ ID NO: 386704 - RNA, 19 nt, Homo sapiens
  misc_RNA (1)...(19): siRNA sense strand
ugaaggaauuugccacgaa

SEQ ID NO: 386705 - RNA, 19 nt, Homo sapiens
  misc_RNA (1)...(19): siRNA sense strand
gagcagauccuggcauaug

SEQ ID NO: 386706 - RNA, 19 nt, Homo sapiens
  misc_RNA (1)...(19): siRNA sense strand
ucaaagcucuaaagucucu

SEQ ID NO: 386707 - RNA, 19 nt, Homo sapiens
  misc_RNA (1)...(19): siRNA sense strand
gaaagagaagggacgaaug

SEQ ID NO: 386708 - RNA, 19 nt, Homo sapiens
  misc_RNA (1)...(19): siRNA sense strand
gaagaagagcaucaaguca

SEQ ID NO: 386709 - RNA, 19 nt, Homo sapiens
  misc_RNA (1)...(19): siRNA sense strand
gaggagauagccaacauga

SEQ ID NO: 386710 - RNA, 19 nt, Homo sapiens
  misc_RNA (1)...(19): siRNA sense strand
acaaggcccuggaugagaa

SEQ ID NO: 386711 - RNA, 19 nt, Homo sapiens
  misc_RNA (1)...(19): siRNA sense strand
gcuuacagcuucaccucaa

SEQ ID NO: 386712 - RNA, 19 nt, Homo sapiens
  misc_RNA (1)...(19): siRNA sense strand
gaacgaugaccacaauaag

SEQ ID NO: 386713 - RNA, 19 nt, Homo sapiens
  misc_RNA (1)...(19): siRNA sense strand
gagucuacauuaugggauu

SEQ ID NO: 386714 - RNA, 19 nt, Homo sapiens
  misc_RNA (1)...(19): siRNA sense strand
gaggagauggagucccuua

SEQ ID NO: 386715 - RNA, 19 nt, Homo sapiens
  misc_RNA (1)...(19): siRNA sense strand
cuaaucaugucccuaagga

SEQ ID NO: 386716 - RNA, 19 nt, Homo sapiens
  misc_RNA (1)...(19): siRNA sense strand
gauauggaggagcggauua

SEQ ID NO: 386717 - RNA, 19 nt, Homo sapiens
  misc_RNA (1)...(19): siRNA sense strand
ucagcaaccuuaucuccuu

SEQ ID NO: 386718 - RNA, 19 nt, Homo sapiens
  misc_RNA (1)...(19): siRNA sense strand
gcgaggagauagccaacau

SEQ ID NO: 386719 - RNA, 19 nt, Homo sapiens
  misc_RNA (1)...(19): siRNA sense strand
ggagguagaagugcucaaa

SEQ ID NO: 386720 - RNA, 19 nt, Homo sapiens
  misc_RNA (1)...(19): siRNA sense strand
ggacgagaccuucgacuac

SEQ ID NO: 386721 - RNA, 19 nt, Homo sapiens
  misc_RNA (1)...(19): siRNA sense strand
ugaacgaugaccacaauaa

SEQ ID NO: 386722 - RNA, 19 nt, Homo sapiens
  misc_RNA (1)...(19): siRNA sense strand
gcaaggagucguuguaucg

SEQ ID NO: 386723 - RNA, 19 nt, Homo sapiens
  misc_RNA (1)...(19): siRNA sense strand
gaagugcucaaagcucuaa

SEQ ID NO: 386724 - RNA, 19 nt, Homo sapiens
  misc_RNA (1)...(19): siRNA sense strand
ggaugcagauggagaucga

SEQ ID NO: 386725 - RNA, 19 nt, Homo sapiens
  misc_RNA (1)...(19): siRNA sense strand
gggauuaugugccugaaac

SEQ ID NO: 386726 - RNA, 19 nt, Homo sapiens
  misc_RNA (1)...(19): siRNA sense strand
cgaggaacgucaugggaau

SEQ ID NO: 386727 - RNA, 19 nt, Homo sapiens
  misc_RNA (1)...(19): siRNA sense strand
gagcggaggcgggaagaaa

SEQ ID NO: 386728 - RNA, 19 nt, Homo sapiens
  misc_RNA (1)...(19): siRNA sense strand
gcaccgacaaggcuaauca

SEQ ID NO: 386729 - RNA, 19 nt, Homo sapiens
  misc_RNA (1)...(19): siRNA sense strand
ggagaaggagacaacagaa

SEQ ID NO: 386730 - RNA, 19 nt, Homo sapiens
  misc_RNA (1)...(19): siRNA sense strand
caagaugguggacagcuuu

SEQ ID NO: 386731 - RNA, 19 nt, Homo sapiens
  misc_RNA (1)...(19): siRNA sense strand
cagggugagucuacauuau

SEQ ID NO: 386732 - RNA, 19 nt, Homo sapiens
  misc_RNA (1)...(19): siRNA sense strand
ggacagcgccaagucuuuc

SEQ ID NO: 386733 - RNA, 19 nt, Homo sapiens
  misc_RNA (1)...(19): siRNA sense strand
gaauucagcaaccuuaucu

SEQ ID NO: 386734 - RNA, 19 nt, Homo sapiens
  misc_RNA (1)...(19): siRNA sense strand
gacgaaggagcugaacuua

SEQ ID NO: 386735 - RNA, 19 nt, Homo sapiens
  misc_RNA (1)...(19): siRNA sense strand
ccaccuggaucccuaugug

SEQ ID NO: 386736 - RNA, 19 nt, Homo sapiens
  misc_RNA (1)...(19): siRNA sense strand
cgaccaagcccgagaccaa

SEQ ID NO: 386737 - RNA, 19 nt, Homo sapiens
  misc_RNA (1)...(19): siRNA sense strand
caucauggccaaccuguca

SEQ ID NO: 386738 - RNA, 19 nt, Homo sapiens
  misc_RNA (1)...(19): siRNA sense strand
gacaaggaccgaaggaaca

SEQ ID NO: 386739 - RNA, 19 nt, Homo sapiens
  misc_RNA (1)...(19): siRNA sense strand
uuagaucaccuuaacaaga

SEQ ID NO: 386740 - RNA, 19 nt, Homo sapiens
  misc_RNA (1)...(19): siRNA sense strand
agaagagcaucaagucauc

SEQ ID NO: 386741 - RNA, 19 nt, Homo sapiens
  misc_RNA (1)...(19): siRNA sense strand
aggcguaacucccgacuca

SEQ ID NO: 386742 - RNA, 19 nt, Homo sapiens
  misc_RNA (1)...(19): siRNA sense strand
gugauggugugguccaaug

SEQ ID NO: 386743 - RNA, 19 nt, Homo sapiens
  misc_RNA (1)...(19): siRNA sense strand
ucaagaugguggacagcuu

SEQ ID NO: 386744 - RNA, 19 nt, Homo sapiens
  misc_RNA (1)...(19): siRNA sense strand
ugacgaaggagcugaacuu

SEQ ID NO: 386745 - RNA, 19 nt, Homo sapiens
  misc_RNA (1)...(19): siRNA sense strand
gaacaagaggaagcaugaa

SEQ ID NO: 386746 - RNA, 19 nt, Homo sapiens
  misc_RNA (1)...(19): siRNA sense strand
gagauagccaacaugaaga

SEQ ID NO: 386747 - RNA, 19 nt, Homo sapiens
  misc_RNA (1)...(19): siRNA sense strand
gcucuggcuuggacucguu

SEQ ID NO: 386748 - RNA, 19 nt, Homo sapiens
  misc_RNA (1)...(19): siRNA sense strand
aggaugaguugcugcuaaa

SEQ ID NO: 386749 - RNA, 19 nt, Homo sapiens
  misc_RNA (1)...(19): siRNA sense strand
gagaacgaguuagcuagca

SEQ ID NO: 386750 - RNA, 19 nt, Homo sapiens
  misc_RNA (1)...(19): siRNA sense strand
ggaauucagcaaccuuauc

SEQ ID NO: 386751 - RNA, 19 nt, Homo sapiens
  misc_RNA (1)...(19): siRNA sense strand
gaauguuagaucaccuuaa

SEQ ID NO: 386752 - RNA, 19 nt, Homo sapiens
  misc_RNA (1)...(19): siRNA sense strand
acaggaaacguguggauga

SEQ ID NO: 386753 - RNA, 19 nt, Homo sapiens
  misc_RNA (1)...(19): siRNA sense strand
uugcagcucugacgaagga

SEQ ID NO: 386754 - RNA, 19 nt, Homo sapiens
  misc_RNA (1)...(19): siRNA sense strand
uggaagagaagaaucaaga

SEQ ID NO: 386755 - RNA, 19 nt, Homo sapiens
  misc_RNA (1)...(19): siRNA sense strand
ggagaccuugcccgagaua

SEQ ID NO: 386756 - RNA, 19 nt, Homo sapiens
  misc_RNA (1)...(19): siRNA sense strand
ggcugggccugaaggaauu

SEQ ID NO: 386757 - RNA, 19 nt, Homo sapiens
  misc_RNA (1)...(19): siRNA sense strand
caacaaggccgaggaacgu

SEQ ID NO: 386758 - RNA, 19 nt, Homo sapiens
  misc_RNA (1)...(19): siRNA sense strand
caacgagcgcuuacagcuu

SEQ ID NO: 386759 - RNA, 19 nt, Homo sapiens
  misc_RNA (1)...(19): siRNA sense strand
gggcugggccugaaggaau

SEQ ID NO: 386760 - RNA, 19 nt, Homo sapiens
  misc_RNA (1)...(19): siRNA sense strand
gcacccacuuuaccuucug

SEQ ID NO: 386761 - RNA, 19 nt, Homo sapiens
  misc_RNA (1)...(19): siRNA sense strand
gaggacagcgccaagucuu

SEQ ID NO: 386762 - RNA, 19 nt, Homo sapiens
  misc_RNA (1)...(19): siRNA sense strand
gugcugugccgucagauga

SEQ ID NO: 386763 - RNA, 19 nt, Homo sapiens
  misc_RNA (1)...(19): siRNA sense strand
gggugagucuacauuaugg

SEQ ID NO: 386764 - RNA, 19 nt, Homo sapiens
  misc_RNA (1)...(19): siRNA sense strand
gagaggucacugcgcauga

SEQ ID NO: 386765 - RNA, 19 nt, Homo sapiens
  misc_RNA (1)...(19): siRNA sense strand
acagggugagucuacauua

SEQ ID NO: 386766 - RNA, 19 nt, Homo sapiens
  misc_RNA (1)...(19): siRNA sense strand
gagcuggaacugagcaauc

SEQ ID NO: 386767 - RNA, 19 nt, Homo sapiens
  misc_RNA (1)...(19): siRNA sense strand
gaugaguugcugcuaaaca

SEQ ID NO: 386768 - RNA, 19 nt, Homo sapiens
  misc_RNA (1)...(19): siRNA sense strand
cgaauguuagaucaccuua

SEQ ID NO: 386769 - RNA, 19 nt, Homo sapiens
  misc_RNA (1)...(19): siRNA sense strand
gaaggaacaagaggaagca

SEQ ID NO: 386770 - RNA, 19 nt, Homo sapiens
  misc_RNA (1)...(19): siRNA sense strand
aaagagaagggacgaaugg

SEQ ID NO: 386771 - RNA, 19 nt, Homo sapiens
  misc_RNA (1)...(19): siRNA sense strand
gaaggagcugaacuuaugu

SEQ ID NO: 386772 - RNA, 19 nt, Homo sapiens
  misc_RNA (1)...(19): siRNA sense strand
agaagaagagcaucaaguc

SEQ ID NO: 386773 - RNA, 19 nt, Homo sapiens
  misc_RNA (1)...(19): siRNA sense strand
acgacaaacuggagaacga

SEQ ID NO: 386774 - RNA, 19 nt, Homo sapiens
  misc_RNA (1)...(19): siRNA sense strand
augagacacuggccacuga

SEQ ID NO: 386775 - RNA, 19 nt, Homo sapiens
  misc_RNA (1)...(19): siRNA sense strand
gcuggaacacccucagaug

SEQ ID NO: 386776 - RNA, 19 nt, Homo sapiens
  misc_RNA (1)...(19): siRNA sense strand
aggcccagcuggaagagaa

SEQ ID NO: 386777 - RNA, 19 nt, Homo sapiens
  misc_RNA (1)...(19): siRNA sense strand
gaggaggagcuggaacuga

SEQ ID NO: 386778 - RNA, 19 nt, Homo sapiens
  misc_RNA (1)...(19): siRNA sense strand
agaacgaguuagcuagcaa

SEQ ID NO: 386779 - RNA, 19 nt, Homo sapiens
  misc_RNA (1)...(19): siRNA sense strand
ggacgacgccaagcagaag

SEQ ID NO: 386780 - RNA, 19 nt, Homo sapiens
  misc_RNA (1)...(19): siRNA sense strand
gacgagaccuucgacuacu

SEQ ID NO: 386781 - RNA, 19 nt, Homo sapiens
  misc_RNA (1)...(19): siRNA sense strand
ggagacaaggaccgaagga

SEQ ID NO: 386782 - RNA, 19 nt, Homo sapiens
  misc_RNA (1)...(19): siRNA sense strand
ccaagaagaagagcaucaa

SEQ ID NO: 386783 - RNA, 19 nt, Homo sapiens
  misc_RNA (1)...(19): siRNA sense strand
aggcuaaucaugucccuaa

SEQ ID NO: 386784 - RNA, 19 nt, Homo sapiens
  misc_RNA (1)...(19): siRNA sense strand
uggaggccaucaacaagga

SEQ ID NO: 386785 - RNA, 19 nt, Homo sapiens
  misc_RNA (1)...(19): siRNA sense strand
gaagcuucaggaugaguug

SEQ ID NO: 386786 - RNA, 19 nt, Homo sapiens
  misc_RNA (1)...(19): siRNA sense strand
gcucaacaaggccgaggaa

SEQ ID NO: 386787 - RNA, 19 nt, Homo sapiens
  misc_RNA (1)...(19): siRNA sense strand
caauaccgcagcuacuuca

SEQ ID NO: 386788 - RNA, 19 nt, Homo sapiens
  misc_RNA (1)...(19): siRNA sense strand
gaacaaggaucccaagaga

SEQ ID NO: 386789 - RNA, 19 nt, Homo sapiens
  misc_RNA (1)...(19): siRNA sense strand
ggaauaaaguccaagguuu

SEQ ID NO: 386790 - RNA, 19 nt, Homo sapiens
  misc_RNA (1)...(19): siRNA sense strand
gaacaccaaugaagagauu

SEQ ID NO: 386791 - RNA, 19 nt, Homo sapiens
  misc_RNA (1)...(19): siRNA sense strand
gagaagccacuuugucuua

SEQ ID NO: 386792 - RNA, 19 nt, Homo sapiens
  misc_RNA (1)...(19): siRNA sense strand
gcacaccaaccuuauauuu

SEQ ID NO: 386793 - RNA, 19 nt, Homo sapiens
  misc_RNA (1)...(19): siRNA sense strand
gagaagcccugggaauaaa

SEQ ID NO: 386794 - RNA, 19 nt, Homo sapiens
  misc_RNA (1)...(19): siRNA sense strand
caagaaaguuacucucuca

SEQ ID NO: 386795 - RNA, 19 nt, Homo sapiens
  misc_RNA (1)...(19): siRNA sense strand
ggagaagcccugggaauaa

SEQ ID NO: 386796 - RNA, 19 nt, Homo sapiens
  misc_RNA (1)...(19): siRNA sense strand
cuacaacuguggguuaauu

SEQ ID NO: 386797 - RNA, 19 nt, Homo sapiens
  misc_RNA (1)...(19): siRNA sense strand
gagaaccaguuauccaaca

SEQ ID NO: 386798 - RNA, 19 nt, Homo sapiens
  misc_RNA (1)...(19): siRNA sense strand
gaagccacuuugucuuaau

SEQ ID NO: 386799 - RNA, 19 nt, Homo sapiens
  misc_RNA (1)...(19): siRNA sense strand
aauagaaccucaucacaca

SEQ ID NO: 386800 - RNA, 19 nt, Homo sapiens
  misc_RNA (1)...(19): siRNA sense strand
ccauuaagagaaccaguua

SEQ ID NO: 386801 - RNA, 19 nt, Homo sapiens
  misc_RNA (1)...(19): siRNA sense strand
ggacaagcuucauuuacac

SEQ ID NO: 386802 - RNA, 19 nt, Homo sapiens
  misc_RNA (1)...(19): siRNA sense strand
uggacaagcuucauuuaca

SEQ ID NO: 386803 - RNA, 19 nt, Homo sapiens
  misc_RNA (1)...(19): siRNA sense strand
caacuguggguuaauuuga

SEQ ID NO: 386804 - RNA, 19 nt, Homo sapiens
  misc_RNA (1)...(19): siRNA sense strand
gggaauaaaguccaagguu

SEQ ID NO: 386805 - RNA, 19 nt, Homo sapiens
  misc_RNA (1)...(19): siRNA sense strand
gccaaacauucccaaccua

SEQ ID NO: 386806 - RNA, 19 nt, Homo sapiens
  misc_RNA (1)...(19): siRNA sense strand
gguggacaagcuucauuua

SEQ ID NO: 386807 - RNA, 19 nt, Homo sapiens
  misc_RNA (1)...(19): siRNA sense strand
aagcuucauuuacacgaua

SEQ ID NO: 386808 - RNA, 19 nt, Homo sapiens
  misc_RNA (1)...(19): siRNA sense strand
gcccauggccuacaacugu

SEQ ID NO: 386809 - RNA, 19 nt, Homo sapiens
  misc_RNA (1)...(19): siRNA sense strand
agaagccacuuugucuuaa

SEQ ID NO: 386810 - RNA, 19 nt, Homo sapiens
  misc_RNA (1)...(19): siRNA sense strand
uggagaagcccugggaaua

SEQ ID NO: 386811 - RNA, 19 nt, Homo sapiens
  misc_RNA (1)...(19): siRNA sense strand
caagagaagccacuuuguc

SEQ ID NO: 386812 - RNA, 19 nt, Homo sapiens
  misc_RNA (1)...(19): siRNA sense strand
gaucauccacaucgagguu

SEQ ID NO: 386813 - RNA, 19 nt, Homo sapiens
  misc_RNA (1)...(19): siRNA sense strand
ggccuacaacuguggguua

SEQ ID NO: 386814 - RNA, 19 nt, Homo sapiens
  misc_RNA (1)...(19): siRNA sense strand
ggagauuugcaguggauga

SEQ ID NO: 386815 - RNA, 19 nt, Homo sapiens
  misc_RNA (1)...(19): siRNA sense strand
gccaaaaccuggaaaucaa

SEQ ID NO: 386816 - RNA, 19 nt, Homo sapiens
  misc_RNA (1)...(19): siRNA sense strand
caggagauuugcaguggau

SEQ ID NO: 386817 - RNA, 19 nt, Homo sapiens
  misc_RNA (1)...(19): siRNA sense strand
gcccgaugaugcacaacaa

SEQ ID NO: 386818 - RNA, 19 nt, Homo sapiens
  misc_RNA (1)...(19): siRNA sense strand
caguaaggauggugugaca

SEQ ID NO: 386819 - RNA, 19 nt, Homo sapiens
  misc_RNA (1)...(19): siRNA sense strand
gugaagaaaucccuaaacc

SEQ ID NO: 386820 - RNA, 19 nt, Homo sapiens
  misc_RNA (1)...(19): siRNA sense strand
gccuacaacuguggguuaa

SEQ ID NO: 386821 - RNA, 19 nt, Homo sapiens
  misc_RNA (1)...(19): siRNA sense strand
gaaaucccuaaacccagua

SEQ ID NO: 386822 - RNA, 19 nt, Homo sapiens
  misc_RNA (1)...(19): siRNA sense strand
gaugaacaccaaugaagag

SEQ ID NO: 386823 - RNA, 19 nt, Homo sapiens
  misc_RNA (1)...(19): siRNA sense strand
ccaaacauucccaaccuau

SEQ ID NO: 386824 - RNA, 19 nt, Homo sapiens
  misc_RNA (1)...(19): siRNA sense strand
uaaggauggugugacaguu

SEQ ID NO: 386825 - RNA, 19 nt, Homo sapiens
  misc_RNA (1)...(19): siRNA sense strand
gaaccaguuauccaacaug

SEQ ID NO: 386826 - RNA, 19 nt, Homo sapiens
  misc_RNA (1)...(19): siRNA sense strand
aagccacuuugucuuaauu

SEQ ID NO: 386827 - RNA, 19 nt, Homo sapiens
  misc_RNA (1)...(19): siRNA sense strand
acaaggaucccaagagaag

SEQ ID NO: 386828 - RNA, 19 nt, Homo sapiens
  misc_RNA (1)...(19): siRNA sense strand
gaacugaaaagugaagaaa

SEQ ID NO: 386829 - RNA, 19 nt, Homo sapiens
  misc_RNA (1)...(19): siRNA sense strand
uaagagaaccaguuaucca

SEQ ID NO: 386830 - RNA, 19 nt, Homo sapiens
  misc_RNA (1)...(19): siRNA sense strand
gagaacaaggaucccaaga

SEQ ID NO: 386831 - RNA, 19 nt, Homo sapiens
  misc_RNA (1)...(19): siRNA sense strand
ccuaaaggguggacaagcu

SEQ ID NO: 386832 - RNA, 19 nt, Homo sapiens
  misc_RNA (1)...(19): siRNA sense strand
ggagguagaccaggaggau

SEQ ID NO: 386833 - RNA, 19 nt, Homo sapiens
  misc_RNA (1)...(19): siRNA sense strand
guaaggauggugugacagu

SEQ ID NO: 386834 - RNA, 19 nt, Homo sapiens
  misc_RNA (1)...(19): siRNA sense strand
aaagugaagaaaucccuaa

SEQ ID NO: 386835 - RNA, 19 nt, Homo sapiens
  misc_RNA (1)...(19): siRNA sense strand
ccuuauauuuggacuucaa

SEQ ID NO: 386836 - RNA, 19 nt, Homo sapiens
  misc_RNA (1)...(19): siRNA sense strand
cacaccaaccuuauauuug

SEQ ID NO: 386837 - RNA, 19 nt, Homo sapiens
  misc_RNA (1)...(19): siRNA sense strand
ggacacacugguaaaauga

SEQ ID NO: 386838 - RNA, 19 nt, Homo sapiens
  misc_RNA (1)...(19): siRNA sense strand
cuggagauguguauauugg

SEQ ID NO: 386839 - RNA, 19 nt, Homo sapiens
  misc_RNA (1)...(19): siRNA sense strand
caagcuucauuuacacgau

SEQ ID NO: 386840 - RNA, 19 nt, Homo sapiens
  misc_RNA (1)...(19): siRNA sense strand
ggguggacaagcuucauuu

SEQ ID NO: 386841 - RNA, 19 nt, Homo sapiens
  misc_RNA (1)...(19): siRNA sense strand
ugaugaacaccaaugaaga

SEQ ID NO: 386842 - RNA, 19 nt, Homo sapiens
  misc_RNA (1)...(19): siRNA sense strand
aaccuuauauuuggacuuc

SEQ ID NO: 386843 - RNA, 19 nt, Homo sapiens
  misc_RNA (1)...(19): siRNA sense strand
gugaugaacaccaaugaag

SEQ ID NO: 386844 - RNA, 19 nt, Homo sapiens
  misc_RNA (1)...(19): siRNA sense strand
gccauuaagagaaccaguu

SEQ ID NO: 386845 - RNA, 19 nt, Homo sapiens
  misc_RNA (1)...(19): siRNA sense strand
gaggagcucagagaagaug

SEQ ID NO: 386846 - RNA, 19 nt, Homo sapiens
  misc_RNA (1)...(19): siRNA sense strand
gacccaggagccaaacauu

SEQ ID NO: 386847 - RNA, 19 nt, Homo sapiens
  misc_RNA (1)...(19): siRNA sense strand
ccacaucgagguuuugaaa

SEQ ID NO: 386848 - RNA, 19 nt, Homo sapiens
  misc_RNA (1)...(19): siRNA sense strand
aagagaaccaguuauccaa

SEQ ID NO: 386849 - RNA, 19 nt, Homo sapiens
  misc_RNA (1)...(19): siRNA sense strand
aaugaacccaggagauuug

SEQ ID NO: 386850 - RNA, 19 nt, Homo sapiens
  misc_RNA (1)...(19): siRNA sense strand
cauuugugaugaacaccaa

SEQ ID NO: 386851 - RNA, 19 nt, Homo sapiens
  misc_RNA (1)...(19): siRNA sense strand
aagagaagccacuuugucu

SEQ ID NO: 386852 - RNA, 19 nt, Homo sapiens
  misc_RNA (1)...(19): siRNA sense strand
ccaagagaagccacuuugu

SEQ ID NO: 386853 - RNA, 19 nt, Homo sapiens
  misc_RNA (1)...(19): siRNA sense strand
ggacccaggagccaaacau

SEQ ID NO: 386854 - RNA, 19 nt, Homo sapiens
  misc_RNA (1)...(19): siRNA sense strand
ucgcacaccaaccuuauau

SEQ ID NO: 386855 - RNA, 19 nt, Homo sapiens
  misc_RNA (1)...(19): siRNA sense strand
cccaagagaagccacuuug

SEQ ID NO: 386856 - RNA, 19 nt, Homo sapiens
  misc_RNA (1)...(19): siRNA sense strand
caaacauucccaaccuauc

SEQ ID NO: 386857 - RNA, 19 nt, Homo sapiens
  misc_RNA (1)...(19): siRNA sense strand
aaaaugaacccaggagauu

SEQ ID NO: 386858 - RNA, 19 nt, Homo sapiens
  misc_RNA (1)...(19): siRNA sense strand
cauuggcagacccgaguua

SEQ ID NO: 386859 - RNA, 19 nt, Homo sapiens
  misc_RNA (1)...(19): siRNA sense strand
agguagaccaggaggauuu

SEQ ID NO: 386860 - RNA, 19 nt, Homo sapiens
  misc_RNA (1)...(19): siRNA sense strand
gaagcccugggaauaaagu

SEQ ID NO: 386861 - RNA, 19 nt, Homo sapiens
  misc_RNA (1)...(19): siRNA sense strand
gaagaaauaugugacaaga

SEQ ID NO: 386862 - RNA, 19 nt, Homo sapiens
  misc_RNA (1)...(19): siRNA sense strand
gagcaaagaagaaauaugu

SEQ ID NO: 386863 - RNA, 19 nt, Homo sapiens
  misc_RNA (1)...(19): siRNA sense strand
caucgaagaucuuggagaa

SEQ ID NO: 386864 - RNA, 19 nt, Homo sapiens
  misc_RNA (1)...(19): siRNA sense strand
acaagaagcuggaauuagu

SEQ ID NO: 386865 - RNA, 19 nt, Homo sapiens
  misc_RNA (1)...(19): siRNA sense strand
gcaaagaagaaauauguga

SEQ ID NO: 386866 - RNA, 19 nt, Homo sapiens
  misc_RNA (1)...(19): siRNA sense strand
caaguuagaugccgauuac

SEQ ID NO: 386867 - RNA, 19 nt, Homo sapiens
  misc_RNA (1)...(19): siRNA sense strand
ggccagagguagaugauga

SEQ ID NO: 386868 - RNA, 19 nt, Homo sapiens
  misc_RNA (1)...(19): siRNA sense strand
gugaauauaugccugaugu

SEQ ID NO: 386869 - RNA, 19 nt, Homo sapiens
  misc_RNA (1)...(19): siRNA sense strand
gacaaugguuagagaagaa

SEQ ID NO: 386870 - RNA, 19 nt, Homo sapiens
  misc_RNA (1)...(19): siRNA sense strand
aaggaacagugccaaguua

SEQ ID NO: 386871 - RNA, 19 nt, Homo sapiens
  misc_RNA (1)...(19): siRNA sense strand
agaaauaugugacaagagu

SEQ ID NO: 386872 - RNA, 19 nt, Homo sapiens
  misc_RNA (1)...(19): siRNA sense strand
gaauauaugccugauguug

SEQ ID NO: 386873 - RNA, 19 nt, Homo sapiens
  misc_RNA (1)...(19): siRNA sense strand
ggaagaagaggagaagaaa

SEQ ID NO: 386874 - RNA, 19 nt, Homo sapiens
  misc_RNA (1)...(19): siRNA sense strand
uauguggccuugcaacuuu

SEQ ID NO: 386875 - RNA, 19 nt, Homo sapiens
  misc_RNA (1)...(19): siRNA sense strand
caaacaagaagcuggaauu

SEQ ID NO: 386876 - RNA, 19 nt, Homo sapiens
  misc_RNA (1)...(19): siRNA sense strand
ccagagcaaagaagaaaua

SEQ ID NO: 386877 - RNA, 19 nt, Homo sapiens
  misc_RNA (1)...(19): siRNA sense strand
aaacaagaagcuggaauua

SEQ ID NO: 386878 - RNA, 19 nt, Homo sapiens
  misc_RNA (1)...(19): siRNA sense strand
cgaagaucuuggagaagua

SEQ ID NO: 386879 - RNA, 19 nt, Homo sapiens
  misc_RNA (1)...(19): siRNA sense strand
gaacagugccaaguuagau

SEQ ID NO: 386880 - RNA, 19 nt, Homo sapiens
  misc_RNA (1)...(19): siRNA sense strand
gggaagaagaggagaagaa

SEQ ID NO: 386881 - RNA, 19 nt, Homo sapiens
  misc_RNA (1)...(19): siRNA sense strand
gaaauaugugacaagagua

SEQ ID NO: 386882 - RNA, 19 nt, Homo sapiens
  misc_RNA (1)...(19): siRNA sense strand
gcaaaggagacccaaggaa

SEQ ID NO: 386883 - RNA, 19 nt, Homo sapiens
  misc_RNA (1)...(19): siRNA sense strand
gaagaucuuggagaaguaa

SEQ ID NO: 386884 - RNA, 19 nt, Homo sapiens
  misc_RNA (1)...(19): siRNA sense strand
ccacuucgaguccuuuauu

SEQ ID NO: 386885 - RNA, 19 nt, Homo sapiens
  misc_RNA (1)...(19): siRNA sense strand
caaggaacagugccaaguu

SEQ ID NO: 386886 - RNA, 19 nt, Homo sapiens
  misc_RNA (1)...(19): siRNA sense strand
aagaagaccguaccacaaa

SEQ ID NO: 386887 - RNA, 19 nt, Homo sapiens
  misc_RNA (1)...(19): siRNA sense strand
agaguacugugaauauaug

SEQ ID NO: 386888 - RNA, 19 nt, Homo sapiens
  misc_RNA (1)...(19): siRNA sense strand
ccaaguuagaugccgauua

SEQ ID NO: 386889 - RNA, 19 nt, Homo sapiens
  misc_RNA (1)...(19): siRNA sense strand
ggaacagugccaaguuaga

SEQ ID NO: 386890 - RNA, 19 nt, Homo sapiens
  misc_RNA (1)...(19): siRNA sense strand
aaagguuacuauagccaaa

SEQ ID NO: 386891 - RNA, 19 nt, Homo sapiens
  misc_RNA (1)...(19): siRNA sense strand
agacaaugguuagagaaga

SEQ ID NO: 386892 - RNA, 19 nt, Homo sapiens
  misc_RNA (1)...(19): siRNA sense strand
ugccugauguugcuaaaug

SEQ ID NO: 386893 - RNA, 19 nt, Homo sapiens
  misc_RNA (1)...(19): siRNA sense strand
aaagaagaccguaccacaa

SEQ ID NO: 386894 - RNA, 19 nt, Homo sapiens
  misc_RNA (1)...(19): siRNA sense strand
guugcuaaauguagacaau

SEQ ID NO: 386895 - RNA, 19 nt, Homo sapiens
  misc_RNA (1)...(19): siRNA sense strand
ucgaagaucuuggagaagu

SEQ ID NO: 386896 - RNA, 19 nt, Homo sapiens
  misc_RNA (1)...(19): siRNA sense strand
ggagucuguucauuaccaa

SEQ ID NO: 386897 - RNA, 19 nt, Homo sapiens
  misc_RNA (1)...(19): siRNA sense strand
uguagacaaugguuagaga

SEQ ID NO: 386898 - RNA, 19 nt, Homo sapiens
  misc_RNA (1)...(19): siRNA sense strand
cagaguacugugaauauau

SEQ ID NO: 386899 - RNA, 19 nt, Homo sapiens
  misc_RNA (1)...(19): siRNA sense strand
guucauuaccaacagagua

SEQ ID NO: 386900 - RNA, 19 nt, Homo sapiens
  misc_RNA (1)...(19): siRNA sense strand
uggaaggggucaaauaaaa

SEQ ID NO: 386901 - RNA, 19 nt, Homo sapiens
  misc_RNA (1)...(19): siRNA sense strand
cauaauugaugucauucag

SEQ ID NO: 386902 - RNA, 19 nt, Homo sapiens
  misc_RNA (1)...(19): siRNA sense strand
acagaugacauaauugaug

SEQ ID NO: 386903 - RNA, 19 nt, Homo sapiens
  misc_RNA (1)...(19): siRNA sense strand
cugcugacauuucugaauc

SEQ ID NO: 386904 - RNA, 19 nt, Homo sapiens
  misc_RNA (1)...(19): siRNA sense strand
ugauguugcuaaauguaga

SEQ ID NO: 386905 - RNA, 19 nt, Homo sapiens
  misc_RNA (1)...(19): siRNA sense strand
guagacaaugguuagagaa

SEQ ID NO: 386906 - RNA, 19 nt, Homo sapiens
  misc_RNA (1)...(19): siRNA sense strand
aaacagaagagagguggaa

SEQ ID NO: 386907 - RNA, 19 nt, Homo sapiens
  misc_RNA (1)...(19): siRNA sense strand
caagaagcuggaauuagug

SEQ ID NO: 386908 - RNA, 19 nt, Homo sapiens
  misc_RNA (1)...(19): siRNA sense strand
aaauucacccaaacaagaa

SEQ ID NO: 386909 - RNA, 19 nt, Homo sapiens
  misc_RNA (1)...(19): siRNA sense strand
cagcaucgaagaucuugga

SEQ ID NO: 386910 - RNA, 19 nt, Homo sapiens
  misc_RNA (1)...(19): siRNA sense strand
gaacagcaggggaagaaga

SEQ ID NO: 386911 - RNA, 19 nt, Homo sapiens
  misc_RNA (1)...(19): siRNA sense strand
guauguggccuugcaacuu

SEQ ID NO: 386912 - RNA, 19 nt, Homo sapiens
  misc_RNA (1)...(19): siRNA sense strand
aagaguauguggccuugca

SEQ ID NO: 386913 - RNA, 19 nt, Homo sapiens
  misc_RNA (1)...(19): siRNA sense strand
aaaggagacccaaggaaca

SEQ ID NO: 386914 - RNA, 19 nt, Homo sapiens
  misc_RNA (1)...(19): siRNA sense strand
gguggaaggggucaaauaa

SEQ ID NO: 386915 - RNA, 19 nt, Homo sapiens
  misc_RNA (1)...(19): siRNA sense strand
ccacaaaagguuacuauag

SEQ ID NO: 386916 - RNA, 19 nt, Homo sapiens
  misc_RNA (1)...(19): siRNA sense strand
uuggagaaguaaagaagug

SEQ ID NO: 386917 - RNA, 19 nt, Homo sapiens
  misc_RNA (1)...(19): siRNA sense strand
uguggagucuguucauuac

SEQ ID NO: 386918 - RNA, 19 nt, Homo sapiens
  misc_RNA (1)...(19): siRNA sense strand
ucagggagauuuuacagau

SEQ ID NO: 386919 - RNA, 19 nt, Homo sapiens
  misc_RNA (1)...(19): siRNA sense strand
cuaaauguagacaaugguu

SEQ ID NO: 386920 - RNA, 19 nt, Homo sapiens
  misc_RNA (1)...(19): siRNA sense strand
gaagaagaggagaagaaaa

SEQ ID NO: 386921 - RNA, 19 nt, Homo sapiens
  misc_RNA (1)...(19): siRNA sense strand
cacuucgaguccuuuauug

SEQ ID NO: 386922 - RNA, 19 nt, Homo sapiens
  misc_RNA (1)...(19): siRNA sense strand
ugacagcaucgaagaucuu

SEQ ID NO: 386923 - RNA, 19 nt, Homo sapiens
  misc_RNA (1)...(19): siRNA sense strand
aaaauucacccaaacaaga

SEQ ID NO: 386924 - RNA, 19 nt, Homo sapiens
  misc_RNA (1)...(19): siRNA sense strand
uuguggagucuguucauua

SEQ ID NO: 386925 - RNA, 19 nt, Homo sapiens
  misc_RNA (1)...(19): siRNA sense strand
aaauguagacaaugguuag

SEQ ID NO: 386926 - RNA, 19 nt, Homo sapiens
  misc_RNA (1)...(19): siRNA sense strand
ccuugcaacuuuugaaauu

SEQ ID NO: 386927 - RNA, 19 nt, Homo sapiens
  misc_RNA (1)...(19): siRNA sense strand
ccaaggaacagugccaagu

SEQ ID NO: 386928 - RNA, 19 nt, Homo sapiens
  misc_RNA (1)...(19): siRNA sense strand
uagugagggucaaggaaca

SEQ ID NO: 386929 - RNA, 19 nt, Homo sapiens
  misc_RNA (1)...(19): siRNA sense strand
gaaaauucacccaaacaag

SEQ ID NO: 386930 - RNA, 19 nt, Homo sapiens
  misc_RNA (1)...(19): siRNA sense strand
uugcaaaacuuacuguaga

SEQ ID NO: 386931 - RNA, 19 nt, Homo sapiens
  misc_RNA (1)...(19): siRNA sense strand
uguagaaaauucacccaaa

SEQ ID NO: 386932 - RNA, 19 nt, Homo sapiens
  misc_RNA (1)...(19): siRNA sense strand
ggggucaaauaaaacaaaa

SEQ ID NO: 386933 - RNA, 19 nt, Homo sapiens
  misc_RNA (1)...(19): siRNA sense strand
guagaaaauucacccaaac

SEQ ID NO: 386934 - RNA, 19 nt, Homo sapiens
  misc_RNA (1)...(19): siRNA sense strand
ggaauuagugagggucaag

SEQ ID NO: 386935 - RNA, 19 nt, Homo sapiens
  misc_RNA (1)...(19): siRNA sense strand
gaacaaauuuccaaucuca

SEQ ID NO: 386936 - RNA, 19 nt, Homo sapiens
  misc_RNA (1)...(19): siRNA sense strand
gaagaaaccucgcuuugau

SEQ ID NO: 386937 - RNA, 19 nt, Homo sapiens
  misc_RNA (1)...(19): siRNA sense strand
guaaugaugugguagauuu

SEQ ID NO: 386938 - RNA, 19 nt, Homo sapiens
  misc_RNA (1)...(19): siRNA sense strand
gaacaaaucauucacaugu

SEQ ID NO: 386939 - RNA, 19 nt, Homo sapiens
  misc_RNA (1)...(19): siRNA sense strand
ggacaaagucucaguauau

SEQ ID NO: 386940 - RNA, 19 nt, Homo sapiens
  misc_RNA (1)...(19): siRNA sense strand
gaucucaccugaugaagaa

SEQ ID NO: 386941 - RNA, 19 nt, Homo sapiens
  misc_RNA (1)...(19): siRNA sense strand
guaaagugcucuucauuuc

SEQ ID NO: 386942 - RNA, 19 nt, Homo sapiens
  misc_RNA (1)...(19): siRNA sense strand
gaaccuaauuaucugcaua

SEQ ID NO: 386943 - RNA, 19 nt, Homo sapiens
  misc_RNA (1)...(19): siRNA sense strand
ggacucaucugucauucaa

SEQ ID NO: 386944 - RNA, 19 nt, Homo sapiens
  misc_RNA (1)...(19): siRNA sense strand
gaaauguaauccagaggaa

SEQ ID NO: 386945 - RNA, 19 nt, Homo sapiens
  misc_RNA (1)...(19): siRNA sense strand
gaagacugcuugguauuug

SEQ ID NO: 386946 - RNA, 19 nt, Homo sapiens
  misc_RNA (1)...(19): siRNA sense strand
gacaaagucucaguauauu

SEQ ID NO: 386947 - RNA, 19 nt, Homo sapiens
  misc_RNA (1)...(19): siRNA sense strand
ggaagaagcauuaacuuag

SEQ ID NO: 386948 - RNA, 19 nt, Homo sapiens
  misc_RNA (1)...(19): siRNA sense strand
ugacaaaguucccaaagau

SEQ ID NO: 386949 - RNA, 19 nt, Homo sapiens
  misc_RNA (1)...(19): siRNA sense strand
gggacaaagucucaguaua

SEQ ID NO: 386950 - RNA, 19 nt, Homo sapiens
  misc_RNA (1)...(19): siRNA sense strand
gcucuucauuucacuuuaa

SEQ ID NO: 386951 - RNA, 19 nt, Homo sapiens
  misc_RNA (1)...(19): siRNA sense strand
gcuuggaucugacaaaguu

SEQ ID NO: 386952 - RNA, 19 nt, Homo sapiens
  misc_RNA (1)...(19): siRNA sense strand
agaagaacauggagagauu

SEQ ID NO: 386953 - RNA, 19 nt, Homo sapiens
  misc_RNA (1)...(19): siRNA sense strand
gaccuuaguuugugucuuc

SEQ ID NO: 386954 - RNA, 19 nt, Homo sapiens
  misc_RNA (1)...(19): siRNA sense strand
ccagauugauguauaugaa

SEQ ID NO: 386955 - RNA, 19 nt, Homo sapiens
  misc_RNA (1)...(19): siRNA sense strand
gaagaagcauuaacuuagc

SEQ ID NO: 386956 - RNA, 19 nt, Homo sapiens
  misc_RNA (1)...(19): siRNA sense strand
cagauuguaucccaaggua

SEQ ID NO: 386957 - RNA, 19 nt, Homo sapiens
  misc_RNA (1)...(19): siRNA sense strand
gagaaaaucuaaacaagga

SEQ ID NO: 386958 - RNA, 19 nt, Homo sapiens
  misc_RNA (1)...(19): siRNA sense strand
ucacagugcuuggaucuga

SEQ ID NO: 386959 - RNA, 19 nt, Homo sapiens
  misc_RNA (1)...(19): siRNA sense strand
gagcacaugucaacucaag

SEQ ID NO: 386960 - RNA, 19 nt, Homo sapiens
  misc_RNA (1)...(19): siRNA sense strand
aaacaaggaucuauugacu

SEQ ID NO: 386961 - RNA, 19 nt, Homo sapiens
  misc_RNA (1)...(19): siRNA sense strand
guaccuaccuacuuauaca

SEQ ID NO: 386962 - RNA, 19 nt, Homo sapiens
  misc_RNA (1)...(19): siRNA sense strand
agaugcagcucaugcuaua

SEQ ID NO: 386963 - RNA, 19 nt, Homo sapiens
  misc_RNA (1)...(19): siRNA sense strand
gaacauggagagauuucuu

SEQ ID NO: 386964 - RNA, 19 nt, Homo sapiens
  misc_RNA (1)...(19): siRNA sense strand
ugacugcugcugagaaaua

SEQ ID NO: 386965 - RNA, 19 nt, Homo sapiens
  misc_RNA (1)...(19): siRNA sense strand
uggcuugguuggcucauua

SEQ ID NO: 386966 - RNA, 19 nt, Homo sapiens
  misc_RNA (1)...(19): siRNA sense strand
uuucagaccuauccaugua

SEQ ID NO: 386967 - RNA, 19 nt, Homo sapiens
  misc_RNA (1)...(19): siRNA sense strand
agaaaccucgcuuugauua

SEQ ID NO: 386968 - RNA, 19 nt, Homo sapiens
  misc_RNA (1)...(19): siRNA sense strand
gaaagcuguuggccuggaa

SEQ ID NO: 386969 - RNA, 19 nt, Homo sapiens
  misc_RNA (1)...(19): siRNA sense strand
agaaugauccacucucuuu

SEQ ID NO: 386970 - RNA, 19 nt, Homo sapiens
  misc_RNA (1)...(19): siRNA sense strand
uggaagaagcauuaacuua

SEQ ID NO: 386971 - RNA, 19 nt, Homo sapiens
  misc_RNA (1)...(19): siRNA sense strand
ggaacuggauagcucacuu

SEQ ID NO: 386972 - RNA, 19 nt, Homo sapiens
  misc_RNA (1)...(19): siRNA sense strand
ucuauacaauggucacuuu

SEQ ID NO: 386973 - RNA, 19 nt, Homo sapiens
  misc_RNA (1)...(19): siRNA sense strand
guaacgaccuuaguuugug

SEQ ID NO: 386974 - RNA, 19 nt, Homo sapiens
  misc_RNA (1)...(19): siRNA sense strand
cuugguauuugaugaguua

SEQ ID NO: 386975 - RNA, 19 nt, Homo sapiens
  misc_RNA (1)...(19): siRNA sense strand
caagaaugauccacucucu

SEQ ID NO: 386976 - RNA, 19 nt, Homo sapiens
  misc_RNA (1)...(19): siRNA sense strand
acacguggaagaagcauua

SEQ ID NO: 386977 - RNA, 19 nt, Homo sapiens
  misc_RNA (1)...(19): siRNA sense strand
gguauuugaugaguuaaug

SEQ ID NO: 386978 - RNA, 19 nt, Homo sapiens
  misc_RNA (1)...(19): siRNA sense strand
cuuuaaaucucacugugua

SEQ ID NO: 386979 - RNA, 19 nt, Homo sapiens
  misc_RNA (1)...(19): siRNA sense strand
uaacuuagcccuuucucau

SEQ ID NO: 386980 - RNA, 19 nt, Homo sapiens
  misc_RNA (1)...(19): siRNA sense strand
gauuguaucccaagguauu

SEQ ID NO: 386981 - RNA, 19 nt, Homo sapiens
  misc_RNA (1)...(19): siRNA sense strand
uaaauucaguaacgaccuu

SEQ ID NO: 386982 - RNA, 19 nt, Homo sapiens
  misc_RNA (1)...(19): siRNA sense strand
gcgagcacaugucaacuca

SEQ ID NO: 386983 - RNA, 19 nt, Homo sapiens
  misc_RNA (1)...(19): siRNA sense strand
ccuggaagaucagauugua

SEQ ID NO: 386984 - RNA, 19 nt, Homo sapiens
  misc_RNA (1)...(19): siRNA sense strand
caucagcaguaccuaccua

SEQ ID NO: 386985 - RNA, 19 nt, Homo sapiens
  misc_RNA (1)...(19): siRNA sense strand
gaagaacauggagagauuu

SEQ ID NO: 386986 - RNA, 19 nt, Homo sapiens
  misc_RNA (1)...(19): siRNA sense strand
gauggagccuauucaacug

SEQ ID NO: 386987 - RNA, 19 nt, Homo sapiens
  misc_RNA (1)...(19): siRNA sense strand
ugaagaaaccucgcuuuga

SEQ ID NO: 386988 - RNA, 19 nt, Homo sapiens
  misc_RNA (1)...(19): siRNA sense strand
cugcauauuuggccuagaa

SEQ ID NO: 386989 - RNA, 19 nt, Homo sapiens
  misc_RNA (1)...(19): siRNA sense strand
gagauuucuucaugcgauu

SEQ ID NO: 386990 - RNA, 19 nt, Homo sapiens
  misc_RNA (1)...(19): siRNA sense strand
ggagaugcagcucaugcua

SEQ ID NO: 386991 - RNA, 19 nt, Homo sapiens
  misc_RNA (1)...(19): siRNA sense strand
auagcucacuuccggaaua

SEQ ID NO: 386992 - RNA, 19 nt, Homo sapiens
  misc_RNA (1)...(19): siRNA sense strand
gaaugaaugcgggcuuuga

SEQ ID NO: 386993 - RNA, 19 nt, Homo sapiens
  misc_RNA (1)...(19): siRNA sense strand
gaaauaccccaaugugaaa

SEQ ID NO: 386994 - RNA, 19 nt, Homo sapiens
  misc_RNA (1)...(19): siRNA sense strand
aacucaagcugguucauuu

SEQ ID NO: 386995 - RNA, 19 nt, Homo sapiens
  misc_RNA (1)...(19): siRNA sense strand
accuauccauguacaauua

SEQ ID NO: 386996 - RNA, 19 nt, Homo sapiens
  misc_RNA (1)...(19): siRNA sense strand
aaaccucgcuuugauuaca

SEQ ID NO: 386997 - RNA, 19 nt, Homo sapiens
  misc_RNA (1)...(19): siRNA sense strand
caaagucucaguauauucu

SEQ ID NO: 386998 - RNA, 19 nt, Homo sapiens
  misc_RNA (1)...(19): siRNA sense strand
gaugaagaaaccucgcuuu

SEQ ID NO: 386999 - RNA, 19 nt, Homo sapiens
  misc_RNA (1)...(19): siRNA sense strand
gaauuuccagauugaugua

SEQ ID NO: 387000 - RNA, 19 nt, Homo sapiens
  misc_RNA (1)...(19): siRNA sense strand
uguaaagugcucuucauuu

SEQ ID NO: 387001 - RNA, 19 nt, Homo sapiens
  misc_RNA (1)...(19): siRNA sense strand
gaacuggauagcucacuuc

SEQ ID NO: 387002 - RNA, 19 nt, Homo sapiens
  misc_RNA (1)...(19): siRNA sense strand
ucaguaacgaccuuaguuu

SEQ ID NO: 387003 - RNA, 19 nt, Homo sapiens
  misc_RNA (1)...(19): siRNA sense strand
ucccaaagaugucacuugu

SEQ ID NO: 387004 - RNA, 19 nt, Homo sapiens
  misc_RNA (1)...(19): siRNA sense strand
uaacgaccuuaguuugugu

SEQ ID NO: 387005 - RNA, 19 nt, Homo sapiens
  misc_RNA (1)...(19): siRNA sense strand
ugaagacugcuugguauuu

SEQ ID NO: 387006 - RNA, 19 nt, Homo sapiens
  misc_RNA (1)...(19): siRNA sense strand
acaaaucauucacauguac

SEQ ID NO: 387007 - RNA, 19 nt, Homo sapiens
  misc_RNA (1)...(19): siRNA sense strand
cauggaaccuaauuaucug

SEQ ID NO: 387008 - RNA, 19 nt, Homo sapiens
  misc_RNA (1)...(19): siRNA sense strand
uacauggaguugacuauuc

SEQ ID NO: 387009 - RNA, 19 nt, Homo sapiens
  misc_RNA (1)...(19): siRNA sense strand
guacauggaguugacuauu

SEQ ID NO: 387010 - RNA, 19 nt, Homo sapiens
  misc_RNA (1)...(19): siRNA sense strand
caucugucauucaaaggaa

SEQ ID NO: 387011 - RNA, 19 nt, Homo sapiens
  misc_RNA (1)...(19): siRNA sense strand
gcauuaacuuagcccuuuc

SEQ ID NO: 387012 - RNA, 19 nt, Homo sapiens
  misc_RNA (1)...(19): siRNA sense strand
aaaaguagcugucauuggu

SEQ ID NO: 387013 - RNA, 19 nt, Homo sapiens
  misc_RNA (1)...(19): siRNA sense strand
caacucaagcugguucauu

SEQ ID NO: 387014 - RNA, 19 nt, Homo sapiens
  misc_RNA (1)...(19): siRNA sense strand
ccauggaaccuaauuaucu

SEQ ID NO: 387015 - RNA, 19 nt, Homo sapiens
  misc_RNA (1)...(19): siRNA sense strand
caccuaagaacggagauua

SEQ ID NO: 387016 - RNA, 19 nt, Homo sapiens
  misc_RNA (1)...(19): siRNA sense strand
gagaugcagcucaugcuau

SEQ ID NO: 387017 - RNA, 19 nt, Homo sapiens
  misc_RNA (1)...(19): siRNA sense strand
ggacucccuagaacaaauu

SEQ ID NO: 387018 - RNA, 19 nt, Homo sapiens
  misc_RNA (1)...(19): siRNA sense strand
auggagagauuucuucaug

SEQ ID NO: 387019 - RNA, 19 nt, Homo sapiens
  misc_RNA (1)...(19): siRNA sense strand
gagaugcgagcacauguca

SEQ ID NO: 387020 - RNA, 19 nt, Homo sapiens
  misc_RNA (1)...(19): siRNA sense strand
gccuagaaauaccuuuaug

SEQ ID NO: 387021 - RNA, 19 nt, Homo sapiens
  misc_RNA (1)...(19): siRNA sense strand
cagaugaucacgcgauuuc

SEQ ID NO: 387022 - RNA, 19 nt, Homo sapiens
  misc_RNA (1)...(19): siRNA sense strand
aaacuucuaaccaguaaug

SEQ ID NO: 387023 - RNA, 19 nt, Homo sapiens
  misc_RNA (1)...(19): siRNA sense strand
cugacaaaguucccaaaga

SEQ ID NO: 387024 - RNA, 19 nt, Homo sapiens
  misc_RNA (1)...(19): siRNA sense strand
auuaugccaucgaccuuua

SEQ ID NO: 387025 - RNA, 19 nt, Homo sapiens
  misc_RNA (1)...(19): siRNA sense strand
gauugcacuuccuaacaug

SEQ ID NO: 387026 - RNA, 19 nt, Homo sapiens
  misc_RNA (1)...(19): siRNA sense strand
ugauugcacuuccuaacau

SEQ ID NO: 387027 - RNA, 19 nt, Homo sapiens
  misc_RNA (1)...(19): siRNA sense strand
ucauucacauguacuuugu

SEQ ID NO: 387028 - RNA, 19 nt, Homo sapiens
  misc_RNA (1)...(19): siRNA sense strand
guacaauuacauagagaug

SEQ ID NO: 387029 - RNA, 19 nt, Homo sapiens
  misc_RNA (1)...(19): siRNA sense strand
ccaagguauucccaugaga

SEQ ID NO: 387030 - RNA, 19 nt, Homo sapiens
  misc_RNA (1)...(19): siRNA sense strand
uaaagugcucuucauuuca

SEQ ID NO: 387031 - RNA, 19 nt, Homo sapiens
  misc_RNA (1)...(19): siRNA sense strand
agcauuaacuuagcccuuu

SEQ ID NO: 387032 - RNA, 19 nt, Homo sapiens
  misc_RNA (1)...(19): siRNA sense strand
ucacgcgauuucagaccua

SEQ ID NO: 387033 - RNA, 19 nt, Homo sapiens
  misc_RNA (1)...(19): siRNA sense strand
caacauguuuccccgcaaa

SEQ ID NO: 387034 - RNA, 19 nt, Homo sapiens
  misc_RNA (1)...(19): siRNA sense strand
gaccuauccauguacaauu

SEQ ID NO: 387035 - RNA, 19 nt, Homo sapiens
  misc_RNA (1)...(19): siRNA sense strand
ggaaucuggugaagaagga

SEQ ID NO: 387036 - RNA, 19 nt, Homo sapiens
  misc_RNA (1)...(19): siRNA sense strand
gcaaugagaagcugcacaa

SEQ ID NO: 387037 - RNA, 19 nt, Homo sapiens
  misc_RNA (1)...(19): siRNA sense strand
gaggaccugugcaaugaga

SEQ ID NO: 387038 - RNA, 19 nt, Homo sapiens
  misc_RNA (1)...(19): siRNA sense strand
ccuccuggccgucaucuua

SEQ ID NO: 387039 - RNA, 19 nt, Homo sapiens
  misc_RNA (1)...(19): siRNA sense strand
aggaggaccugugcaauga

SEQ ID NO: 387040 - RNA, 19 nt, Homo sapiens
  misc_RNA (1)...(19): siRNA sense strand
gcaagaccacgaacacagu

SEQ ID NO: 387041 - RNA, 19 nt, Homo sapiens
  misc_RNA (1)...(19): siRNA sense strand
uccagcaacugcaagcauu

SEQ ID NO: 387042 - RNA, 19 nt, Homo sapiens
  misc_RNA (1)...(19): siRNA sense strand
gcaacugcaagcauucugu

SEQ ID NO: 387043 - RNA, 19 nt, Homo sapiens
  misc_RNA (1)...(19): siRNA sense strand
gaagagaaagcaaggauaa

SEQ ID NO: 387044 - RNA, 19 nt, Homo sapiens
  misc_RNA (1)...(19): siRNA sense strand
ggagaaaucuauugaagca

SEQ ID NO: 387045 - RNA, 19 nt, Homo sapiens
  misc_RNA (1)...(19): siRNA sense strand
gagaagugaucaacagaaa

SEQ ID NO: 387046 - RNA, 19 nt, Homo sapiens
  misc_RNA (1)...(19): siRNA sense strand
gaagaaagcccugcuccua

SEQ ID NO: 387047 - RNA, 19 nt, Homo sapiens
  misc_RNA (1)...(19): siRNA sense strand
cacaauagcuucccacgaa

SEQ ID NO: 387048 - RNA, 19 nt, Homo sapiens
  misc_RNA (1)...(19): siRNA sense strand
gaucagaggcccacaauag

SEQ ID NO: 387049 - RNA, 19 nt, Homo sapiens
  misc_RNA (1)...(19): siRNA sense strand
gaacucugcugucuauaag

SEQ ID NO: 387050 - RNA, 19 nt, Homo sapiens
  misc_RNA (1)...(19): siRNA sense strand
gauaaucuaugaagacuac

SEQ ID NO: 387051 - RNA, 19 nt, Homo sapiens
  misc_RNA (1)...(19): siRNA sense strand
caacacauauucgaugaug

SEQ ID NO: 387052 - RNA, 19 nt, Homo sapiens
  misc_RNA (1)...(19): siRNA sense strand
aagcaaggauaaucuauga

SEQ ID NO: 387053 - RNA, 19 nt, Homo sapiens
  misc_RNA (1)...(19): siRNA sense strand
caugaacucugcugucuau

SEQ ID NO: 387054 - RNA, 19 nt, Homo sapiens
  misc_RNA (1)...(19): siRNA sense strand
gaucagagcggauggagau

SEQ ID NO: 387055 - RNA, 19 nt, Homo sapiens
  misc_RNA (1)...(19): siRNA sense strand
ggagccaucccaacacaua

SEQ ID NO: 387056 - RNA, 19 nt, Homo sapiens
  misc_RNA (1)...(19): siRNA sense strand
gaagugaucaacagaaaca

SEQ ID NO: 387057 - RNA, 19 nt, Homo sapiens
  misc_RNA (1)...(19): siRNA sense strand
augcucaacuucagauuua

SEQ ID NO: 387058 - RNA, 19 nt, Homo sapiens
  misc_RNA (1)...(19): siRNA sense strand
gaaagcaaggauaaucuau

SEQ ID NO: 387059 - RNA, 19 nt, Homo sapiens
  misc_RNA (1)...(19): siRNA sense strand
uauaaggacuugcuucagu

SEQ ID NO: 387060 - RNA, 19 nt, Homo sapiens
  misc_RNA (1)...(19): siRNA sense strand
caaggauaaucuaugaaga

SEQ ID NO: 387061 - RNA, 19 nt, Homo sapiens
  misc_RNA (1)...(19): siRNA sense strand
gcucgugucucacuguuag

SEQ ID NO: 387062 - RNA, 19 nt, Homo sapiens
  misc_RNA (1)...(19): siRNA sense strand
gcaaggauaaucuaugaag

SEQ ID NO: 387063 - RNA, 19 nt, Homo sapiens
  misc_RNA (1)...(19): siRNA sense strand
cauauucgaugaugcucaa

SEQ ID NO: 387064 - RNA, 19 nt, Homo sapiens
  misc_RNA (1)...(19): siRNA sense strand
gaacucagagcagaucuuc

SEQ ID NO: 387065 - RNA, 19 nt, Homo sapiens
  misc_RNA (1)...(19): siRNA sense strand
gcacagagacucauauccu

SEQ ID NO: 387066 - RNA, 19 nt, Homo sapiens
  misc_RNA (1)...(19): siRNA sense strand
ugaacucugcugucuauaa

SEQ ID NO: 387067 - RNA, 19 nt, Homo sapiens
  misc_RNA (1)...(19): siRNA sense strand
agacucauauccucgauuc

SEQ ID NO: 387068 - RNA, 19 nt, Homo sapiens
  misc_RNA (1)...(19): siRNA sense strand
gaagacuacauuucuauac

SEQ ID NO: 387069 - RNA, 19 nt, Homo sapiens
  misc_RNA (1)...(19): siRNA sense strand
ugagagaagugaucaacag

SEQ ID NO: 387070 - RNA, 19 nt, Homo sapiens
  misc_RNA (1)...(19): siRNA sense strand
gaugcucaacuucagauuu

SEQ ID NO: 387071 - RNA, 19 nt, Homo sapiens
  misc_RNA (1)...(19): siRNA sense strand
gaagaucagaggcccacaa

SEQ ID NO: 387072 - RNA, 19 nt, Homo sapiens
  misc_RNA (1)...(19): siRNA sense strand
cgccugggcucagucauuu

SEQ ID NO: 387073 - RNA, 19 nt, Homo sapiens
  misc_RNA (1)...(19): siRNA sense strand
gagaaagcaaggauaaucu

SEQ ID NO: 387074 - RNA, 19 nt, Homo sapiens
  misc_RNA (1)...(19): siRNA sense strand
ugaagagaaagcaaggaua

SEQ ID NO: 387075 - RNA, 19 nt, Homo sapiens
  misc_RNA (1)...(19): siRNA sense strand
gagagaagugaucaacaga

SEQ ID NO: 387076 - RNA, 19 nt, Homo sapiens
  misc_RNA (1)...(19): siRNA sense strand
cccaacacauauucgauga

SEQ ID NO: 387077 - RNA, 19 nt, Homo sapiens
  misc_RNA (1)...(19): siRNA sense strand
ucggagaaaucuauugaag

SEQ ID NO: 387078 - RNA, 19 nt, Homo sapiens
  misc_RNA (1)...(19): siRNA sense strand
gugaauuccuccgaacaga

SEQ ID NO: 387079 - RNA, 19 nt, Homo sapiens
  misc_RNA (1)...(19): siRNA sense strand
uaucggagaaaucuauuga

SEQ ID NO: 387080 - RNA, 19 nt, Homo sapiens
  misc_RNA (1)...(19): siRNA sense strand
uuagaaaccaggaagauca

SEQ ID NO: 387081 - RNA, 19 nt, Homo sapiens
  misc_RNA (1)...(19): siRNA sense strand
agaaagcaaggauaaucua

SEQ ID NO: 387082 - RNA, 19 nt, Homo sapiens
  misc_RNA (1)...(19): siRNA sense strand
agaaagcccugcuccuacu

SEQ ID NO: 387083 - RNA, 19 nt, Homo sapiens
  misc_RNA (1)...(19): siRNA sense strand
acucugcugucuauaagga

SEQ ID NO: 387084 - RNA, 19 nt, Homo sapiens
  misc_RNA (1)...(19): siRNA sense strand
aaaauaugcucuucuggau

SEQ ID NO: 387085 - RNA, 19 nt, Homo sapiens
  misc_RNA (1)...(19): siRNA sense strand
guggagccaucccaacaca

SEQ ID NO: 387086 - RNA, 19 nt, Homo sapiens
  misc_RNA (1)...(19): siRNA sense strand
cagcaggaaggaaugcauu

SEQ ID NO: 387087 - RNA, 19 nt, Homo sapiens
  misc_RNA (1)...(19): siRNA sense strand
gaugaugcucaacuucaga

SEQ ID NO: 387088 - RNA, 19 nt, Homo sapiens
  misc_RNA (1)...(19): siRNA sense strand
agagaaagcaaggauaauc

SEQ ID NO: 387089 - RNA, 19 nt, Homo sapiens
  misc_RNA (1)...(19): siRNA sense strand
aaagcaaggauaaucuaug

SEQ ID NO: 387090 - RNA, 19 nt, Homo sapiens
  misc_RNA (1)...(19): siRNA sense strand
ugaauuccuccgaacagaa

SEQ ID NO: 387091 - RNA, 19 nt, Homo sapiens
  misc_RNA (1)...(19): siRNA sense strand
uauccucgauucaugaacu

SEQ ID NO: 387092 - RNA, 19 nt, Homo sapiens
  misc_RNA (1)...(19): siRNA sense strand
uguagcugcucgugucuca

SEQ ID NO: 387093 - RNA, 19 nt, Homo sapiens
  misc_RNA (1)...(19): siRNA sense strand
ggauaaucuaugaagacua

SEQ ID NO: 387094 - RNA, 19 nt, Homo sapiens
  misc_RNA (1)...(19): siRNA sense strand
gagccaucccaacacauau

SEQ ID NO: 387095 - RNA, 19 nt, Homo sapiens
  misc_RNA (1)...(19): siRNA sense strand
cuggauggccugugaggaa

SEQ ID NO: 387096 - RNA, 19 nt, Homo sapiens
  misc_RNA (1)...(19): siRNA sense strand
cuaugaagacuacauuucu

SEQ ID NO: 387097 - RNA, 19 nt, Homo sapiens
  misc_RNA (1)...(19): siRNA sense strand
agagaagugaucaacagaa

SEQ ID NO: 387098 - RNA, 19 nt, Homo sapiens
  misc_RNA (1)...(19): siRNA sense strand
cgaugaugcucaacuucag

SEQ ID NO: 387099 - RNA, 19 nt, Homo sapiens
  misc_RNA (1)...(19): siRNA sense strand
ucuaugaagacuacauuuc

SEQ ID NO: 387100 - RNA, 19 nt, Homo sapiens
  misc_RNA (1)...(19): siRNA sense strand
gaugcacagagacucauau

SEQ ID NO: 387101 - RNA, 19 nt, Homo sapiens
  misc_RNA (1)...(19): siRNA sense strand
gcucaacuucagauuuaca

SEQ ID NO: 387102 - RNA, 19 nt, Homo sapiens
  misc_RNA (1)...(19): siRNA sense strand
ucuauaaggacuugcuuca

SEQ ID NO: 387103 - RNA, 19 nt, Homo sapiens
  misc_RNA (1)...(19): siRNA sense strand
caagauauccuguccauga

SEQ ID NO: 387104 - RNA, 19 nt, Homo sapiens
  misc_RNA (1)...(19): siRNA sense strand
gaagagaucagugaacuuu

SEQ ID NO: 387105 - RNA, 19 nt, Homo sapiens
  misc_RNA (1)...(19): siRNA sense strand
agaaagaaaucauccaaga

SEQ ID NO: 387106 - RNA, 19 nt, Homo sapiens
  misc_RNA (1)...(19): siRNA sense strand
gcagaaagagcgaguagaa

SEQ ID NO: 387107 - RNA, 19 nt, Homo sapiens
  misc_RNA (1)...(19): siRNA sense strand
caacugagaucaagaagac

SEQ ID NO: 387108 - RNA, 19 nt, Homo sapiens
  misc_RNA (1)...(19): siRNA sense strand
gaaagagcaugucgaagag

SEQ ID NO: 387109 - RNA, 19 nt, Homo sapiens
  misc_RNA (1)...(19): siRNA sense strand
caaaggaaccaaacaguug

SEQ ID NO: 387110 - RNA, 19 nt, Homo sapiens
  misc_RNA (1)...(19): siRNA sense strand
uuaauaagguggugaacaa

SEQ ID NO: 387111 - RNA, 19 nt, Homo sapiens
  misc_RNA (1)...(19): siRNA sense strand
ccacagaauucgaccuuga

SEQ ID NO: 387112 - RNA, 19 nt, Homo sapiens
  misc_RNA (1)...(19): siRNA sense strand
gaauaaaggagaccaagga

SEQ ID NO: 387113 - RNA, 19 nt, Homo sapiens
  misc_RNA (1)...(19): siRNA sense strand
caaggaaguuuaugaaggu

SEQ ID NO: 387114 - RNA, 19 nt, Homo sapiens
  misc_RNA (1)...(19): siRNA sense strand
agacagaggugcugaugga

SEQ ID NO: 387115 - RNA, 19 nt, Homo sapiens
  misc_RNA (1)...(19): siRNA sense strand
agacagaaaucacagacaa

SEQ ID NO: 387116 - RNA, 19 nt, Homo sapiens
  misc_RNA (1)...(19): siRNA sense strand
ggaaguuuaugaaggugaa

SEQ ID NO: 387117 - RNA, 19 nt, Homo sapiens
  misc_RNA (1)...(19): siRNA sense strand
agaaagagcaugucgaaga

SEQ ID NO: 387118 - RNA, 19 nt, Homo sapiens
  misc_RNA (1)...(19): siRNA sense strand
ccuugaagcugaagaguau

SEQ ID NO: 387119 - RNA, 19 nt, Homo sapiens
  misc_RNA (1)...(19): siRNA sense strand
gaaagaaaucauccaagau

SEQ ID NO: 387120 - RNA, 19 nt, Homo sapiens
  misc_RNA (1)...(19): siRNA sense strand
gaugugaccuugcaugacu

SEQ ID NO: 387121 - RNA, 19 nt, Homo sapiens
  misc_RNA (1)...(19): siRNA sense strand
ucagugaacuuuucuauga

SEQ ID NO: 387122 - RNA, 19 nt, Homo sapiens
  misc_RNA (1)...(19): siRNA sense strand
ggaaggacagcauugagaa

SEQ ID NO: 387123 - RNA, 19 nt, Homo sapiens
  misc_RNA (1)...(19): siRNA sense strand
gugaagagcacuacgaaga

SEQ ID NO: 387124 - RNA, 19 nt, Homo sapiens
  misc_RNA (1)...(19): siRNA sense strand
cagaggugcugauggagaa

SEQ ID NO: 387125 - RNA, 19 nt, Homo sapiens
  misc_RNA (1)...(19): siRNA sense strand
gaaggacagcauugagaaa

SEQ ID NO: 387126 - RNA, 19 nt, Homo sapiens
  misc_RNA (1)...(19): siRNA sense strand
gcacugaggacaucacauc

SEQ ID NO: 387127 - RNA, 19 nt, Homo sapiens
  misc_RNA (1)...(19): siRNA sense strand
auaagguggugaacaagua

SEQ ID NO: 387128 - RNA, 19 nt, Homo sapiens
  misc_RNA (1)...(19): siRNA sense strand
gccauugggcugcgaauaa

SEQ ID NO: 387129 - RNA, 19 nt, Homo sapiens
  misc_RNA (1)...(19): siRNA sense strand
uaaaggagaccaaggaagu

SEQ ID NO: 387130 - RNA, 19 nt, Homo sapiens
  misc_RNA (1)...(19): siRNA sense strand
ccauugggcugcgaauaaa

SEQ ID NO: 387131 - RNA, 19 nt, Homo sapiens
  misc_RNA (1)...(19): siRNA sense strand
agaggcauguggcgucaua

SEQ ID NO: 387132 - RNA, 19 nt, Homo sapiens
  misc_RNA (1)...(19): siRNA sense strand
ccaaaggaaccaaacaguu

SEQ ID NO: 387133 - RNA, 19 nt, Homo sapiens
  misc_RNA (1)...(19): siRNA sense strand
gaaaucacagacaaacuuc

SEQ ID NO: 387134 - RNA, 19 nt, Homo sapiens
  misc_RNA (1)...(19): siRNA sense strand
aguagaagcuggagaugug

SEQ ID NO: 387135 - RNA, 19 nt, Homo sapiens
  misc_RNA (1)...(19): siRNA sense strand
gaccaaggaaguuuaugaa

SEQ ID NO: 387136 - RNA, 19 nt, Homo sapiens
  misc_RNA (1)...(19): siRNA sense strand
ggacagcauugagaaagag

SEQ ID NO: 387137 - RNA, 19 nt, Homo sapiens
  misc_RNA (1)...(19): siRNA sense strand
cauuagccaugugaucaua

SEQ ID NO: 387138 - RNA, 19 nt, Homo sapiens
  misc_RNA (1)...(19): siRNA sense strand
ugagaaagagcaugucgaa

SEQ ID NO: 387139 - RNA, 19 nt, Homo sapiens
  misc_RNA (1)...(19): siRNA sense strand
cucaggagcuggguaguaa

SEQ ID NO: 387140 - RNA, 19 nt, Homo sapiens
  misc_RNA (1)...(19): siRNA sense strand
cggcaucccucuugaccuu

SEQ ID NO: 387141 - RNA, 19 nt, Homo sapiens
  misc_RNA (1)...(19): siRNA sense strand
gaagacagaggugcugaug

SEQ ID NO: 387142 - RNA, 19 nt, Homo sapiens
  misc_RNA (1)...(19): siRNA sense strand
cuaaugaagccaaagaaga

SEQ ID NO: 387143 - RNA, 19 nt, Homo sapiens
  misc_RNA (1)...(19): siRNA sense strand
ccaaagaagacagaaauca

SEQ ID NO: 387144 - RNA, 19 nt, Homo sapiens
  misc_RNA (1)...(19): siRNA sense strand
agaaaucacagacaaacuu

SEQ ID NO: 387145 - RNA, 19 nt, Homo sapiens
  misc_RNA (1)...(19): siRNA sense strand
caggauaaguacaugaagu

SEQ ID NO: 387146 - RNA, 19 nt, Homo sapiens
  misc_RNA (1)...(19): siRNA sense strand
gggaaggacagcauugaga

SEQ ID NO: 387147 - RNA, 19 nt, Homo sapiens
  misc_RNA (1)...(19): siRNA sense strand
cacaggaaaugaaacagau

SEQ ID NO: 387148 - RNA, 19 nt, Homo sapiens
  misc_RNA (1)...(19): siRNA sense strand
gagcuaacuccgugugaga

SEQ ID NO: 387149 - RNA, 19 nt, Homo sapiens
  misc_RNA (1)...(19): siRNA sense strand
cgaggcaacugugucauca

SEQ ID NO: 387150 - RNA, 19 nt, Homo sapiens
  misc_RNA (1)...(19): siRNA sense strand
guacaucgaccagggcauu

SEQ ID NO: 387151 - RNA, 19 nt, Homo sapiens
  misc_RNA (1)...(19): siRNA sense strand
gaccuugcaugacuuggau

SEQ ID NO: 387152 - RNA, 19 nt, Homo sapiens
  misc_RNA (1)...(19): siRNA sense strand
gcauguggcgucauaguag

SEQ ID NO: 387153 - RNA, 19 nt, Homo sapiens
  misc_RNA (1)...(19): siRNA sense strand
ccacaggaaaugaaacaga

SEQ ID NO: 387154 - RNA, 19 nt, Homo sapiens
  misc_RNA (1)...(19): siRNA sense strand
ggagaccaaggaaguuuau

SEQ ID NO: 387155 - RNA, 19 nt, Homo sapiens
  misc_RNA (1)...(19): siRNA sense strand
cgucauaguagaauuaauc

SEQ ID NO: 387156 - RNA, 19 nt, Homo sapiens
  misc_RNA (1)...(19): siRNA sense strand
ggaaggaaucaacaucagu

SEQ ID NO: 387157 - RNA, 19 nt, Homo sapiens
  misc_RNA (1)...(19): siRNA sense strand
cgggugugcuguuuguuga

SEQ ID NO: 387158 - RNA, 19 nt, Homo sapiens
  misc_RNA (1)...(19): siRNA sense strand
gacagaaaucacagacaaa

SEQ ID NO: 387159 - RNA, 19 nt, Homo sapiens
  misc_RNA (1)...(19): siRNA sense strand
ugacuuggauguggcuaau

SEQ ID NO: 387160 - RNA, 19 nt, Homo sapiens
  misc_RNA (1)...(19): siRNA sense strand
aggcagggcaggugugaua

SEQ ID NO: 387161 - RNA, 19 nt, Homo sapiens
  misc_RNA (1)...(19): siRNA sense strand
gcaaaaccauuagccaugu

SEQ ID NO: 387162 - RNA, 19 nt, Homo sapiens
  misc_RNA (1)...(19): siRNA sense strand
ggcauguggcgucauagua

SEQ ID NO: 387163 - RNA, 19 nt, Homo sapiens
  misc_RNA (1)...(19): siRNA sense strand
ccaagaccacacugaggua

SEQ ID NO: 387164 - RNA, 19 nt, Homo sapiens
  misc_RNA (1)...(19): siRNA sense strand
gaggggagauuaauaaggu

SEQ ID NO: 387165 - RNA, 19 nt, Homo sapiens
  misc_RNA (1)...(19): siRNA sense strand
aaagaagacagaaaucaca

SEQ ID NO: 387166 - RNA, 19 nt, Homo sapiens
  misc_RNA (1)...(19): siRNA sense strand
gaagcuggagaugugauuu

SEQ ID NO: 387167 - RNA, 19 nt, Homo sapiens
  misc_RNA (1)...(19): siRNA sense strand
uugaaaguuugcagaaaga

SEQ ID NO: 387168 - RNA, 19 nt, Homo sapiens
  misc_RNA (1)...(19): siRNA sense strand
agaccaaggaaguuuauga

SEQ ID NO: 387169 - RNA, 19 nt, Homo sapiens
  misc_RNA (1)...(19): siRNA sense strand
gcauugagaaagagcaugu

SEQ ID NO: 387170 - RNA, 19 nt, Homo sapiens
  misc_RNA (1)...(19): siRNA sense strand
caacgggaaggacagcauu

SEQ ID NO: 387171 - RNA, 19 nt, Homo sapiens
  misc_RNA (1)...(19): siRNA sense strand
cggccaacuugcuugcuaa

SEQ ID NO: 387172 - RNA, 19 nt, Homo sapiens
  misc_RNA (1)...(19): siRNA sense strand
aggcaacugugucaucaga

SEQ ID NO: 387173 - RNA, 19 nt, Homo sapiens
  misc_RNA (1)...(19): siRNA sense strand
aagcuggagaugugauuua

SEQ ID NO: 387174 - RNA, 19 nt, Homo sapiens
  misc_RNA (1)...(19): siRNA sense strand
gaucauaggacucaaaaca

SEQ ID NO: 387175 - RNA, 19 nt, Homo sapiens
  misc_RNA (1)...(19): siRNA sense strand
aaaggaaccaaacaguuga

SEQ ID NO: 387176 - RNA, 19 nt, Homo sapiens
  misc_RNA (1)...(19): siRNA sense strand
ugauaccuaugccacagaa

SEQ ID NO: 387177 - RNA, 19 nt, Homo sapiens
  misc_RNA (1)...(19): siRNA sense strand
gaaagagcgaguagaagcu

SEQ ID NO: 387178 - RNA, 19 nt, Homo sapiens
  misc_RNA (1)...(19): siRNA sense strand
ggauaaguacaugaaguga

SEQ ID NO: 387179 - RNA, 19 nt, Homo sapiens
  misc_RNA (1)...(19): siRNA sense strand
ccaacuugcuugcuaaaau

SEQ ID NO: 387180 - RNA, 19 nt, Homo sapiens
  misc_RNA (1)...(19): siRNA sense strand
ggucccgggugugcuguuu

SEQ ID NO: 387181 - RNA, 19 nt, Homo sapiens
  misc_RNA (1)...(19): siRNA sense strand
cauguggcgucauaguaga

SEQ ID NO: 387182 - RNA, 19 nt, Homo sapiens
  misc_RNA (1)...(19): siRNA sense strand
gcgaguagaagcuggagau

SEQ ID NO: 387183 - RNA, 19 nt, Homo sapiens
  misc_RNA (1)...(19): siRNA sense strand
ggugugcuguuuguugaug

SEQ ID NO: 387184 - RNA, 19 nt, Homo sapiens
  misc_RNA (1)...(19): siRNA sense strand
gaacuuccgcagggccauu

SEQ ID NO: 387185 - RNA, 19 nt, Homo sapiens
  misc_RNA (1)...(19): siRNA sense strand
caacuugcuugcuaaaauc

SEQ ID NO: 387186 - RNA, 19 nt, Homo sapiens
  misc_RNA (1)...(19): siRNA sense strand
cagaggcacugaggacauc

SEQ ID NO: 387187 - RNA, 19 nt, Homo sapiens
  misc_RNA (1)...(19): siRNA sense strand
uggcgucauaguagaauua

SEQ ID NO: 387188 - RNA, 19 nt, Homo sapiens
  misc_RNA (1)...(19): siRNA sense strand
caugggaggauauggcaaa

SEQ ID NO: 387189 - RNA, 19 nt, Homo sapiens
  misc_RNA (1)...(19): siRNA sense strand
uuugaaaguuugcagaaag

SEQ ID NO: 387190 - RNA, 19 nt, Homo sapiens
  misc_RNA (1)...(19): siRNA sense strand
ccggccaacuugcuugcua

SEQ ID NO: 387191 - RNA, 19 nt, Homo sapiens
  misc_RNA (1)...(19): siRNA sense strand
caaagaagacagaaaucac

SEQ ID NO: 387192 - RNA, 19 nt, Homo sapiens
  misc_RNA (1)...(19): siRNA sense strand
uaaugaagccaaagaagac

SEQ ID NO: 387193 - RNA, 19 nt, Homo sapiens
  misc_RNA (1)...(19): siRNA sense strand
cagcuaaugaagccaaaga

SEQ ID NO: 387194 - RNA, 19 nt, Homo sapiens
  misc_RNA (1)...(19): siRNA sense strand
ucgaagagaucagugaacu

SEQ ID NO: 387195 - RNA, 19 nt, Homo sapiens
  misc_RNA (1)...(19): siRNA sense strand
gagcaugucgaagagauca

SEQ ID NO: 387196 - RNA, 19 nt, Homo sapiens
  misc_RNA (1)...(19): siRNA sense strand
aagauauccuguccaugau

SEQ ID NO: 387197 - RNA, 19 nt, Homo sapiens
  misc_RNA (1)...(19): siRNA sense strand
gcuaaugaagccaaagaag

SEQ ID NO: 387198 - RNA, 19 nt, Homo sapiens
  misc_RNA (1)...(19): siRNA sense strand
aaaaggggaugugcacaaa

SEQ ID NO: 387199 - RNA, 19 nt, Homo sapiens
  misc_RNA (1)...(19): siRNA sense strand
cugaccagcaggauaagua

SEQ ID NO: 387200 - RNA, 19 nt, Homo sapiens
  misc_RNA (1)...(19): siRNA sense strand
aagagcaugucgaagagau

SEQ ID NO: 387201 - RNA, 19 nt, Homo sapiens
  misc_RNA (1)...(19): siRNA sense strand
ccucacggcaucccucuug

SEQ ID NO: 387202 - RNA, 19 nt, Homo sapiens
  misc_RNA (1)...(19): siRNA sense strand
gaggugaagagcacuacga

SEQ ID NO: 387203 - RNA, 19 nt, Homo sapiens
  misc_RNA (1)...(19): siRNA sense strand
gcacaacgcuggaaaauuu

SEQ ID NO: 387204 - RNA, 19 nt, Homo sapiens
  misc_RNA (1)...(19): siRNA sense strand
gcaagucauucaucaaaga

SEQ ID NO: 387205 - RNA, 19 nt, Homo sapiens
  misc_RNA (1)...(19): siRNA sense strand
aaagacgccuugaaaugua

SEQ ID NO: 387206 - RNA, 19 nt, Homo sapiens
  misc_RNA (1)...(19): siRNA sense strand
ggucaacgcuggcgaugug

SEQ ID NO: 387207 - RNA, 19 nt, Homo sapiens
  misc_RNA (1)...(19): siRNA sense strand
caaagacgccuugaaaugu

SEQ ID NO: 387208 - RNA, 19 nt, Homo sapiens
  misc_RNA (1)...(19): siRNA sense strand
gcacagguucggcugcaua

SEQ ID NO: 387209 - RNA, 19 nt, Homo sapiens
  misc_RNA (1)...(19): siRNA sense strand
ggaaauggugucccaguug

SEQ ID NO: 387210 - RNA, 19 nt, Homo sapiens
  misc_RNA (1)...(19): siRNA sense strand
gggcaagucauucaucaaa

SEQ ID NO: 387211 - RNA, 19 nt, Homo sapiens
  misc_RNA (1)...(19): siRNA sense strand
gacccuggcuuugguguug

SEQ ID NO: 387212 - RNA, 19 nt, Homo sapiens
  misc_RNA (1)...(19): siRNA sense strand
gcgugcagguucaguguga

SEQ ID NO: 387213 - RNA, 19 nt, Homo sapiens
  misc_RNA (1)...(19): siRNA sense strand
ggaagccugugcuccaucu

SEQ ID NO: 387214 - RNA, 19 nt, Homo sapiens
  misc_RNA (1)...(19): siRNA sense strand
gcaccucggccauccagaa

SEQ ID NO: 387215 - RNA, 19 nt, Homo sapiens
  misc_RNA (1)...(19): siRNA sense strand
gguguggcguguuugaaug

SEQ ID NO: 387216 - RNA, 19 nt, Homo sapiens
  misc_RNA (1)...(19): siRNA sense strand
ggagauccagcacuguuug

SEQ ID NO: 387217 - RNA, 19 nt, Homo sapiens
  misc_RNA (1)...(19): siRNA sense strand
gacgaacagucugaguauu

SEQ ID NO: 387218 - RNA, 19 nt, Homo sapiens
  misc_RNA (1)...(19): siRNA sense strand
cagggcaagucauucauca

SEQ ID NO: 387219 - RNA, 19 nt, Homo sapiens
  misc_RNA (1)...(19): siRNA sense strand
aagacgccuugaaauguaa

SEQ ID NO: 387220 - RNA, 19 nt, Homo sapiens
  misc_RNA (1)...(19): siRNA sense strand
cgaacagucugaguauucu

SEQ ID NO: 387221 - RNA, 19 nt, Homo sapiens
  misc_RNA (1)...(19): siRNA sense strand
ggcaagucauucaucaaag

SEQ ID NO: 387222 - RNA, 19 nt, Homo sapiens
  misc_RNA (1)...(19): siRNA sense strand
guagcaagagccacccaaa

SEQ ID NO: 387223 - RNA, 19 nt, Homo sapiens
  misc_RNA (1)...(19): siRNA sense strand
gcggagauccagcacuguu

SEQ ID NO: 387224 - RNA, 19 nt, Homo sapiens
  misc_RNA (1)...(19): siRNA sense strand
cagucugaguauucugaua

SEQ ID NO: 387225 - RNA, 19 nt, Homo sapiens
  misc_RNA (1)...(19): siRNA sense strand
ggugagcgagguagcaaga

SEQ ID NO: 387226 - RNA, 19 nt, Homo sapiens
  misc_RNA (1)...(19): siRNA sense strand
gggcuuacaugggauuugc

SEQ ID NO: 387227 - RNA, 19 nt, Homo sapiens
  misc_RNA (1)...(19): siRNA sense strand
guggcguguuugaauguuu

SEQ ID NO: 387228 - RNA, 19 nt, Homo sapiens
  misc_RNA (1)...(19): siRNA sense strand
gccugucccugcagaauac

SEQ ID NO: 387229 - RNA, 19 nt, Homo sapiens
  misc_RNA (1)...(19): siRNA sense strand
caggagcucccagcagaaa

SEQ ID NO: 387230 - RNA, 19 nt, Homo sapiens
  misc_RNA (1)...(19): siRNA sense strand
guucaugacccuggcuuug

SEQ ID NO: 387231 - RNA, 19 nt, Homo sapiens
  misc_RNA (1)...(19): siRNA sense strand
acguggaccucgugaacuu

SEQ ID NO: 387232 - RNA, 19 nt, Homo sapiens
  misc_RNA (1)...(19): siRNA sense strand
guuugaauguuucgagaac

SEQ ID NO: 387233 - RNA, 19 nt, Homo sapiens
  misc_RNA (1)...(19): siRNA sense strand
acgaacagucugaguauuc

SEQ ID NO: 387234 - RNA, 19 nt, Homo sapiens
  misc_RNA (1)...(19): siRNA sense strand
ucaugacccuggcuuuggu

SEQ ID NO: 387235 - RNA, 19 nt, Homo sapiens
  misc_RNA (1)...(19): siRNA sense strand
ggguguggcguguuugaau

SEQ ID NO: 387236 - RNA, 19 nt, Homo sapiens
  misc_RNA (1)...(19): siRNA sense strand
agccugugcuccaucuuga

SEQ ID NO: 387237 - RNA, 19 nt, Homo sapiens
  misc_RNA (1)...(19): siRNA sense strand
gcgggaaugcuaccucaag

SEQ ID NO: 387238 - RNA, 19 nt, Homo sapiens
  misc_RNA (1)...(19): siRNA sense strand
ggacagaguucuagagauu

SEQ ID NO: 387239 - RNA, 19 nt, Homo sapiens
  misc_RNA (1)...(19): siRNA sense strand
cgacagagcugguuauaga

SEQ ID NO: 387240 - RNA, 19 nt, Homo sapiens
  misc_RNA (1)...(19): siRNA sense strand
gagaauagcagcauaauug

SEQ ID NO: 387241 - RNA, 19 nt, Homo sapiens
  misc_RNA (1)...(19): siRNA sense strand
gguuauagaugcaauauug

SEQ ID NO: 387242 - RNA, 19 nt, Homo sapiens
  misc_RNA (1)...(19): siRNA sense strand
gaaguucgcucccaguuca

SEQ ID NO: 387243 - RNA, 19 nt, Homo sapiens
  misc_RNA (1)...(19): siRNA sense strand
caacaucuuugaauuggaa

SEQ ID NO: 387244 - RNA, 19 nt, Homo sapiens
  misc_RNA (1)...(19): siRNA sense strand
ucucagaucucuuucauug

SEQ ID NO: 387245 - RNA, 19 nt, Homo sapiens
  misc_RNA (1)...(19): siRNA sense strand
agacagagccucauucauu

SEQ ID NO: 387246 - RNA, 19 nt, Homo sapiens
  misc_RNA (1)...(19): siRNA sense strand
gaaaagaacucgcugaucu

SEQ ID NO: 387247 - RNA, 19 nt, Homo sapiens
  misc_RNA (1)...(19): siRNA sense strand
ucaaacgcaugaugauuaa

SEQ ID NO: 387248 - RNA, 19 nt, Homo sapiens
  misc_RNA (1)...(19): siRNA sense strand
ggagauuuauggagaauag

SEQ ID NO: 387249 - RNA, 19 nt, Homo sapiens
  misc_RNA (1)...(19): siRNA sense strand
gaucauagacaaacucaga

SEQ ID NO: 387250 - RNA, 19 nt, Homo sapiens
  misc_RNA (1)...(19): siRNA sense strand
caacagagaugacaaaaca

SEQ ID NO: 387251 - RNA, 19 nt, Homo sapiens
  misc_RNA (1)...(19): siRNA sense strand
ucaugaagccauagaaaua

SEQ ID NO: 387252 - RNA, 19 nt, Homo sapiens
  misc_RNA (1)...(19): siRNA sense strand
ugagaagacugucaggaaa

SEQ ID NO: 387253 - RNA, 19 nt, Homo sapiens
  misc_RNA (1)...(19): siRNA sense strand
gacagagccucauucauuc

SEQ ID NO: 387254 - RNA, 19 nt, Homo sapiens
  misc_RNA (1)...(19): siRNA sense strand
gcaggacccuauucagguu

SEQ ID NO: 387255 - RNA, 19 nt, Homo sapiens
  misc_RNA (1)...(19): siRNA sense strand
gaggaucucugaggaguau

SEQ ID NO: 387256 - RNA, 19 nt, Homo sapiens
  misc_RNA (1)...(19): siRNA sense strand
cuugaaugcuuucuugaua

SEQ ID NO: 387257 - RNA, 19 nt, Homo sapiens
  misc_RNA (1)...(19): siRNA sense strand
gcacgccaccgcuuucuuu

SEQ ID NO: 387258 - RNA, 19 nt, Homo sapiens
  misc_RNA (1)...(19): siRNA sense strand
ccucauucauucagauaua

SEQ ID NO: 387259 - RNA, 19 nt, Homo sapiens
  misc_RNA (1)...(19): siRNA sense strand
gacacuagaugaccuaaag

SEQ ID NO: 387260 - RNA, 19 nt, Homo sapiens
  misc_RNA (1)...(19): siRNA sense strand
gcaccaagccugcagaauc

SEQ ID NO: 387261 - RNA, 19 nt, Homo sapiens
  misc_RNA (1)...(19): siRNA sense strand
gaugaugggcuaccacaaa

SEQ ID NO: 387262 - RNA, 19 nt, Homo sapiens
  misc_RNA (1)...(19): siRNA sense strand
gaacaugugaauaaguuug

SEQ ID NO: 387263 - RNA, 19 nt, Homo sapiens
  misc_RNA (1)...(19): siRNA sense strand
gaacuucccugaaaaccaa

SEQ ID NO: 387264 - RNA, 19 nt, Homo sapiens
  misc_RNA (1)...(19): siRNA sense strand
caagauucaucgugauuca

SEQ ID NO: 387265 - RNA, 19 nt, Homo sapiens
  misc_RNA (1)...(19): siRNA sense strand
uggaagccauuacgcauaa

SEQ ID NO: 387266 - RNA, 19 nt, Homo sapiens
  misc_RNA (1)...(19): siRNA sense strand
caacagcacgugaagauca

SEQ ID NO: 387267 - RNA, 19 nt, Homo sapiens
  misc_RNA (1)...(19): siRNA sense strand
ccaagucucagaucucuuu

SEQ ID NO: 387268 - RNA, 19 nt, Homo sapiens
  misc_RNA (1)...(19): siRNA sense strand
gcagugguuucgcgaguau

SEQ ID NO: 387269 - RNA, 19 nt, Homo sapiens
  misc_RNA (1)...(19): siRNA sense strand
aaggugagcuccugggaaa

SEQ ID NO: 387270 - RNA, 19 nt, Homo sapiens
  misc_RNA (1)...(19): siRNA sense strand
aaacagcccagucacagua

SEQ ID NO: 387271 - RNA, 19 nt, Homo sapiens
  misc_RNA (1)...(19): siRNA sense strand
ucaagaaacuguguuguac

SEQ ID NO: 387272 - RNA, 19 nt, Homo sapiens
  misc_RNA (1)...(19): siRNA sense strand
guuugaggcuuccaucuga

SEQ ID NO: 387273 - RNA, 19 nt, Homo sapiens
  misc_RNA (1)...(19): siRNA sense strand
caucgaggcucccaucaca

SEQ ID NO: 387274 - RNA, 19 nt, Homo sapiens
  misc_RNA (1)...(19): siRNA sense strand
ggaggaaagaguccauuga

SEQ ID NO: 387275 - RNA, 19 nt, Homo sapiens
  misc_RNA (1)...(19): siRNA sense strand
ucacugucaugaagccaua

SEQ ID NO: 387276 - RNA, 19 nt, Homo sapiens
  misc_RNA (1)...(19): siRNA sense strand
ugaauaaguuugugaacag

SEQ ID NO: 387277 - RNA, 19 nt, Homo sapiens
  misc_RNA (1)...(19): siRNA sense strand
guaccacugacaauaauaa

SEQ ID NO: 387278 - RNA, 19 nt, Homo sapiens
  misc_RNA (1)...(19): siRNA sense strand
gcccuugaaugcuuucuug

SEQ ID NO: 387279 - RNA, 19 nt, Homo sapiens
  misc_RNA (1)...(19): siRNA sense strand
uagaugaccuaaagugcaa

SEQ ID NO: 387280 - RNA, 19 nt, Homo sapiens
  misc_RNA (1)...(19): siRNA sense strand
gaagacacuagaugaccua

SEQ ID NO: 387281 - RNA, 19 nt, Homo sapiens
  misc_RNA (1)...(19): siRNA sense strand
ggagaauagcagcauaauu

SEQ ID NO: 387282 - RNA, 19 nt, Homo sapiens
  misc_RNA (1)...(19): siRNA sense strand
gaagccaacuaccacucuu

SEQ ID NO: 387283 - RNA, 19 nt, Homo sapiens
  misc_RNA (1)...(19): siRNA sense strand
ggccuguaauucaguguuu

SEQ ID NO: 387284 - RNA, 19 nt, Homo sapiens
  misc_RNA (1)...(19): siRNA sense strand
gaaggcagcgacugugaau

SEQ ID NO: 387285 - RNA, 19 nt, Homo sapiens
  misc_RNA (1)...(19): siRNA sense strand
gugaauaaguuugugaaca

SEQ ID NO: 387286 - RNA, 19 nt, Homo sapiens
  misc_RNA (1)...(19): siRNA sense strand
gacaggaaccauuaucgaa

SEQ ID NO: 387287 - RNA, 19 nt, Homo sapiens
  misc_RNA (1)...(19): siRNA sense strand
gcgaggauccacuccauga

SEQ ID NO: 387288 - RNA, 19 nt, Homo sapiens
  misc_RNA (1)...(19): siRNA sense strand
gcaaaggaagauagucaga

SEQ ID NO: 387289 - RNA, 19 nt, Homo sapiens
  misc_RNA (1)...(19): siRNA sense strand
gaggagaguugggacuuca

SEQ ID NO: 387290 - RNA, 19 nt, Homo sapiens
  misc_RNA (1)...(19): siRNA sense strand
auaagcagauucacaagau

SEQ ID NO: 387291 - RNA, 19 nt, Homo sapiens
  misc_RNA (1)...(19): siRNA sense strand
gcauaauugcuugcuauaa

SEQ ID NO: 387292 - RNA, 19 nt, Homo sapiens
  misc_RNA (1)...(19): siRNA sense strand
uugcugugcucuacaauga

SEQ ID NO: 387293 - RNA, 19 nt, Homo sapiens
  misc_RNA (1)...(19): siRNA sense strand
gcaaugccaauaaccauca

SEQ ID NO: 387294 - RNA, 19 nt, Homo sapiens
  misc_RNA (1)...(19): siRNA sense strand
gauauaagaacaggaggaa

SEQ ID NO: 387295 - RNA, 19 nt, Homo sapiens
  misc_RNA (1)...(19): siRNA sense strand
uaagcagauucacaagauu

SEQ ID NO: 387296 - RNA, 19 nt, Homo sapiens
  misc_RNA (1)...(19): siRNA sense strand
uuagaucacugucaugaag

SEQ ID NO: 387297 - RNA, 19 nt, Homo sapiens
  misc_RNA (1)...(19): siRNA sense strand
caugaagccauagaaauaa

SEQ ID NO: 387298 - RNA, 19 nt, Homo sapiens
  misc_RNA (1)...(19): siRNA sense strand
gcuuccaucugacagcuaa

SEQ ID NO: 387299 - RNA, 19 nt, Homo sapiens
  misc_RNA (1)...(19): siRNA sense strand
gggacuaccuguggugaug

SEQ ID NO: 387300 - RNA, 19 nt, Homo sapiens
  misc_RNA (1)...(19): siRNA sense strand
gcucccaucacaaagguua

SEQ ID NO: 387301 - RNA, 19 nt, Homo sapiens
  misc_RNA (1)...(19): siRNA sense strand
gaacugauucaaauagaac

SEQ ID NO: 387302 - RNA, 19 nt, Homo sapiens
  misc_RNA (1)...(19): siRNA sense strand
gaccuaaagugcaaaaguu

SEQ ID NO: 387303 - RNA, 19 nt, Homo sapiens
  misc_RNA (1)...(19): siRNA sense strand
caaugacacugcuguucug

SEQ ID NO: 387304 - RNA, 19 nt, Homo sapiens
  misc_RNA (1)...(19): siRNA sense strand
caucgugauucaggagaua

SEQ ID NO: 387305 - RNA, 19 nt, Homo sapiens
  misc_RNA (1)...(19): siRNA sense strand
uagacaaacucagaacuuc

SEQ ID NO: 387306 - RNA, 19 nt, Homo sapiens
  misc_RNA (1)...(19): siRNA sense strand
ucagaucucuuucauugac

SEQ ID NO: 387307 - RNA, 19 nt, Homo sapiens
  misc_RNA (1)...(19): siRNA sense strand
gcgaugaccacgugauuca

SEQ ID NO: 387308 - RNA, 19 nt, Homo sapiens
  misc_RNA (1)...(19): siRNA sense strand
ggucuucucucgguuugga

SEQ ID NO: 387309 - RNA, 19 nt, Homo sapiens
  misc_RNA (1)...(19): siRNA sense strand
gacgugaaaucgauaucau

SEQ ID NO: 387310 - RNA, 19 nt, Homo sapiens
  misc_RNA (1)...(19): siRNA sense strand
ccauugacgugaaaucgau

SEQ ID NO: 387311 - RNA, 19 nt, Homo sapiens
  misc_RNA (1)...(19): siRNA sense strand
gaguaucggaugaccauga

SEQ ID NO: 387312 - RNA, 19 nt, Homo sapiens
  misc_RNA (1)...(19): siRNA sense strand
ugaaugcuuucuugauaag

SEQ ID NO: 387313 - RNA, 19 nt, Homo sapiens
  misc_RNA (1)...(19): siRNA sense strand
gcugacaacuacaaacacu

SEQ ID NO: 387314 - RNA, 19 nt, Homo sapiens
  misc_RNA (1)...(19): siRNA sense strand
acauuuggcugacaacuac

SEQ ID NO: 387315 - RNA, 19 nt, Homo sapiens
  misc_RNA (1)...(19): siRNA sense strand
gaacgcugcgccaggcuau

SEQ ID NO: 387316 - RNA, 19 nt, Homo sapiens
  misc_RNA (1)...(19): siRNA sense strand
gcugugcucuacaaugaca

SEQ ID NO: 387317 - RNA, 19 nt, Homo sapiens
  misc_RNA (1)...(19): siRNA sense strand
cgggaaggaccaacucuuu

SEQ ID NO: 387318 - RNA, 19 nt, Homo sapiens
  misc_RNA (1)...(19): siRNA sense strand
caacuaccacucuuccaau

SEQ ID NO: 387319 - RNA, 19 nt, Homo sapiens
  misc_RNA (1)...(19): siRNA sense strand
caccaagccugcagaaucg

SEQ ID NO: 387320 - RNA, 19 nt, Homo sapiens
  misc_RNA (1)...(19): siRNA sense strand
uaccagcccugaugcaaca

SEQ ID NO: 387321 - RNA, 19 nt, Homo sapiens
  misc_RNA (1)...(19): siRNA sense strand
ggaucucugaggaguauuu

SEQ ID NO: 387322 - RNA, 19 nt, Homo sapiens
  misc_RNA (1)...(19): siRNA sense strand
ucaaggacaccaaaugcaa

SEQ ID NO: 387323 - RNA, 19 nt, Homo sapiens
  misc_RNA (1)...(19): siRNA sense strand
cauaaaaggccauugguuu

SEQ ID NO: 387324 - RNA, 19 nt, Homo sapiens
  misc_RNA (1)...(19): siRNA sense strand
agucagcccuugaaugcuu

SEQ ID NO: 387325 - RNA, 19 nt, Homo sapiens
  misc_RNA (1)...(19): siRNA sense strand
ggaagccauuacgcauaaa

SEQ ID NO: 387326 - RNA, 19 nt, Homo sapiens
  misc_RNA (1)...(19): siRNA sense strand
ccacugacaauaauaagca

SEQ ID NO: 387327 - RNA, 19 nt, Homo sapiens
  misc_RNA (1)...(19): siRNA sense strand
cagcccugaugcaacauuu

SEQ ID NO: 387328 - RNA, 19 nt, Homo sapiens
  misc_RNA (1)...(19): siRNA sense strand
ccuuguaucucucaauuac

SEQ ID NO: 387329 - RNA, 19 nt, Homo sapiens
  misc_RNA (1)...(19): siRNA sense strand
uuggaggccugaugacuga

SEQ ID NO: 387330 - RNA, 19 nt, Homo sapiens
  misc_RNA (1)...(19): siRNA sense strand
uauaagaacaggaggaaag

SEQ ID NO: 387331 - RNA, 19 nt, Homo sapiens
  misc_RNA (1)...(19): siRNA sense strand
gccuguaauucaguguuua

SEQ ID NO: 387332 - RNA, 19 nt, Homo sapiens
  misc_RNA (1)...(19): siRNA sense strand
cgccaccgcuuucuuucuu

SEQ ID NO: 387333 - RNA, 19 nt, Homo sapiens
  misc_RNA (1)...(19): siRNA sense strand
caccagugaucuuguugga

SEQ ID NO: 387334 - RNA, 19 nt, Homo sapiens
  misc_RNA (1)...(19): siRNA sense strand
gagccucauucauucagau

SEQ ID NO: 387335 - RNA, 19 nt, Homo sapiens
  misc_RNA (1)...(19): siRNA sense strand
gggaagccucgaucaguug

SEQ ID NO: 387336 - RNA, 19 nt, Homo sapiens
  misc_RNA (1)...(19): siRNA sense strand
gggcugggaggaucucuga

SEQ ID NO: 387337 - RNA, 19 nt, Homo sapiens
  misc_RNA (1)...(19): siRNA sense strand
aauggcagcugagauugaa

SEQ ID NO: 387338 - RNA, 19 nt, Homo sapiens
  misc_RNA (1)...(19): siRNA sense strand
uaaggaagguuaaagagaa

SEQ ID NO: 387339 - RNA, 19 nt, Homo sapiens
  misc_RNA (1)...(19): siRNA sense strand
ugaaacaucggccaacuaa

SEQ ID NO: 387340 - RNA, 19 nt, Homo sapiens
  misc_RNA (1)...(19): siRNA sense strand
gaagagggcacgagacauc

SEQ ID NO: 387341 - RNA, 19 nt, Homo sapiens
  misc_RNA (1)...(19): siRNA sense strand
gcacgagacauccacuuga

SEQ ID NO: 387342 - RNA, 19 nt, Homo sapiens
  misc_RNA (1)...(19): siRNA sense strand
cagccaagcaucacaaaga

SEQ ID NO: 387343 - RNA, 19 nt, Homo sapiens
  misc_RNA (1)...(19): siRNA sense strand
ugaagcagcagauugaaga

SEQ ID NO: 387344 - RNA, 19 nt, Homo sapiens
  misc_RNA (1)...(19): siRNA sense strand
ggaaauuucugcccauccu

SEQ ID NO: 387345 - RNA, 19 nt, Homo sapiens
  misc_RNA (1)...(19): siRNA sense strand
ggaaggaagaggugcuaga

SEQ ID NO: 387346 - RNA, 19 nt, Homo sapiens
  misc_RNA (1)...(19): siRNA sense strand
gagcccauaaggaagguua

SEQ ID NO: 387347 - RNA, 19 nt, Homo sapiens
  misc_RNA (1)...(19): siRNA sense strand
ccauaaggaagguuaaaga

SEQ ID NO: 387348 - RNA, 19 nt, Homo sapiens
  misc_RNA (1)...(19): siRNA sense strand
gcggugguccuggaaauuu

SEQ ID NO: 387349 - RNA, 19 nt, Homo sapiens
  misc_RNA (1)...(19): siRNA sense strand
ggugcuccuuagccaaaua

SEQ ID NO: 387350 - RNA, 19 nt, Homo sapiens
  misc_RNA (1)...(19): siRNA sense strand
aaggaagguuaaagagaaa

SEQ ID NO: 387351 - RNA, 19 nt, Homo sapiens
  misc_RNA (1)...(19): siRNA sense strand
cauugugccugccuacaga

SEQ ID NO: 387352 - RNA, 19 nt, Homo sapiens
  misc_RNA (1)...(19): siRNA sense strand
gagcugguggcguuucuga

SEQ ID NO: 387353 - RNA, 19 nt, Homo sapiens
  misc_RNA (1)...(19): siRNA sense strand
guucugaggcugauaugga

SEQ ID NO: 387354 - RNA, 19 nt, Homo sapiens
  misc_RNA (1)...(19): siRNA sense strand
ggugggagcuacgccuaug

SEQ ID NO: 387355 - RNA, 19 nt, Homo sapiens
  misc_RNA (1)...(19): siRNA sense strand
ggccuucucuucccaacuc

SEQ ID NO: 387356 - RNA, 19 nt, Homo sapiens
  misc_RNA (1)...(19): siRNA sense strand
ggaauuccaaggccaaguc

SEQ ID NO: 387357 - RNA, 19 nt, Homo sapiens
  misc_RNA (1)...(19): siRNA sense strand
gggaauggcacgguucuca

SEQ ID NO: 387358 - RNA, 19 nt, Homo sapiens
  misc_RNA (1)...(19): siRNA sense strand
gcacugaugcaggaacugu

SEQ ID NO: 387359 - RNA, 19 nt, Homo sapiens
  misc_RNA (1)...(19): siRNA sense strand
aaacaucggccaacuaagc

SEQ ID NO: 387360 - RNA, 19 nt, Homo sapiens
  misc_RNA (1)...(19): siRNA sense strand
gugaaacaucggccaacua

SEQ ID NO: 387361 - RNA, 19 nt, Homo sapiens
  misc_RNA (1)...(19): siRNA sense strand
gauguucugaggcugauau

SEQ ID NO: 387362 - RNA, 19 nt, Homo sapiens
  misc_RNA (1)...(19): siRNA sense strand
ccaucacggucaccauugu

SEQ ID NO: 387363 - RNA, 19 nt, Homo sapiens
  misc_RNA (1)...(19): siRNA sense strand
gcagugagaggcagcuucu

SEQ ID NO: 387364 - RNA, 19 nt, Homo sapiens
  misc_RNA (1)...(19): siRNA sense strand
uggcguuucugagcuguuu

SEQ ID NO: 387365 - RNA, 19 nt, Homo sapiens
  misc_RNA (1)...(19): siRNA sense strand
ccaaauaugggaucuucuc

SEQ ID NO: 387366 - RNA, 19 nt, Homo sapiens
  misc_RNA (1)...(19): siRNA sense strand
gaaggaagaggugcuagac

SEQ ID NO: 387367 - RNA, 19 nt, Homo sapiens
  misc_RNA (1)...(19): siRNA sense strand
gcccaucacggucaccauu

SEQ ID NO: 387368 - RNA, 19 nt, Homo sapiens
  misc_RNA (1)...(19): siRNA sense strand
gcgagcugcagagaaauuu

SEQ ID NO: 387369 - RNA, 19 nt, Homo sapiens
  misc_RNA (1)...(19): siRNA sense strand
caggugcuccuuagccaaa

SEQ ID NO: 387370 - RNA, 19 nt, Homo sapiens
  misc_RNA (1)...(19): siRNA sense strand
gugaagagggcacgagaca

SEQ ID NO: 387371 - RNA, 19 nt, Homo sapiens
  misc_RNA (1)...(19): siRNA sense strand
gaaauuucugcccauccuu

SEQ ID NO: 387372 - RNA, 19 nt, Homo sapiens
  misc_RNA (1)...(19): siRNA sense strand
ccuccgagauccaggucuu

SEQ ID NO: 387373 - RNA, 19 nt, Homo sapiens
  misc_RNA (1)...(19): siRNA sense strand
ucgaggaccugaggaugga

SEQ ID NO: 387374 - RNA, 19 nt, Homo sapiens
  misc_RNA (1)...(19): siRNA sense strand
ggaaaaccauguggcaaag

SEQ ID NO: 387375 - RNA, 19 nt, Homo sapiens
  misc_RNA (1)...(19): siRNA sense strand
auaaggaagguuaaagaga

SEQ ID NO: 387376 - RNA, 19 nt, Homo sapiens
  misc_RNA (1)...(19): siRNA sense strand
ggcacgagacauccacuug

SEQ ID NO: 387377 - RNA, 19 nt, Homo sapiens
  misc_RNA (1)...(19): siRNA sense strand
cagcaggggcuuccuaaaa

SEQ ID NO: 387378 - RNA, 19 nt, Homo sapiens
  misc_RNA (1)...(19): siRNA sense strand
cauaaggaagguuaaagag

SEQ ID NO: 387379 - RNA, 19 nt, Homo sapiens
  misc_RNA (1)...(19): siRNA sense strand
agccaagcaucacaaagau

SEQ ID NO: 387380 - RNA, 19 nt, Homo sapiens
  misc_RNA (1)...(19): siRNA sense strand
acacucucauccucucgaa

SEQ ID NO: 387381 - RNA, 19 nt, Homo sapiens
  misc_RNA (1)...(19): siRNA sense strand
agccaaauaugggaucuuc

SEQ ID NO: 387382 - RNA, 19 nt, Homo sapiens
  misc_RNA (1)...(19): siRNA sense strand
gcuaugacaacagggagaa

SEQ ID NO: 387383 - RNA, 19 nt, Homo sapiens
  misc_RNA (1)...(19): siRNA sense strand
cucccacacucacaucuau

SEQ ID NO: 387384 - RNA, 19 nt, Homo sapiens
  misc_RNA (1)...(19): siRNA sense strand
cgugaagaauccugauggu

SEQ ID NO: 387385 - RNA, 19 nt, Homo sapiens
  misc_RNA (1)...(19): siRNA sense strand
ugaaacaucggccaacuaa

SEQ ID NO: 387386 - RNA, 19 nt, Homo sapiens
  misc_RNA (1)...(19): siRNA sense strand
cagccaagcaucacaaaga

SEQ ID NO: 387387 - RNA, 19 nt, Homo sapiens
  misc_RNA (1)...(19): siRNA sense strand
ggaaauuucugcccauccu

SEQ ID NO: 387388 - RNA, 19 nt, Homo sapiens
  misc_RNA (1)...(19): siRNA sense strand
ggaaggaagaggugcuaga

SEQ ID NO: 387389 - RNA, 19 nt, Homo sapiens
  misc_RNA (1)...(19): siRNA sense strand
gcggugguccuggaaauuu

SEQ ID NO: 387390 - RNA, 19 nt, Homo sapiens
  misc_RNA (1)...(19): siRNA sense strand
cauugugccugccuacaga

SEQ ID NO: 387391 - RNA, 19 nt, Homo sapiens
  misc_RNA (1)...(19): siRNA sense strand
gagcugguggcguuucuga

SEQ ID NO: 387392 - RNA, 19 nt, Homo sapiens
  misc_RNA (1)...(19): siRNA sense strand
guucugaggcugauaugga

SEQ ID NO: 387393 - RNA, 19 nt, Homo sapiens
  misc_RNA (1)...(19): siRNA sense strand
ggccuucucuucccaacuc

SEQ ID NO: 387394 - RNA, 19 nt, Homo sapiens
  misc_RNA (1)...(19): siRNA sense strand
gggaauggcacgguucuca

SEQ ID NO: 387395 - RNA, 19 nt, Homo sapiens
  misc_RNA (1)...(19): siRNA sense strand
aaacaucggccaacuaagc

SEQ ID NO: 387396 - RNA, 19 nt, Homo sapiens
  misc_RNA (1)...(19): siRNA sense strand
gugaaacaucggccaacua

SEQ ID NO: 387397 - RNA, 19 nt, Homo sapiens
  misc_RNA (1)...(19): siRNA sense strand
gcacugaugcaggaacugu

SEQ ID NO: 387398 - RNA, 19 nt, Homo sapiens
  misc_RNA (1)...(19): siRNA sense strand
gauguucugaggcugauau

SEQ ID NO: 387399 - RNA, 19 nt, Homo sapiens
  misc_RNA (1)...(19): siRNA sense strand
ccaucacggucaccauugu

SEQ ID NO: 387400 - RNA, 19 nt, Homo sapiens
  misc_RNA (1)...(19): siRNA sense strand
uggcguuucugagcuguuu

SEQ ID NO: 387401 - RNA, 19 nt, Homo sapiens
  misc_RNA (1)...(19): siRNA sense strand
gcccaucacggucaccauu

SEQ ID NO: 387402 - RNA, 19 nt, Homo sapiens
  misc_RNA (1)...(19): siRNA sense strand
gaaggaagaggugcuagac

SEQ ID NO: 387403 - RNA, 19 nt, Homo sapiens
  misc_RNA (1)...(19): siRNA sense strand
gcgagcugcagagaaauuu

SEQ ID NO: 387404 - RNA, 19 nt, Homo sapiens
  misc_RNA (1)...(19): siRNA sense strand
gaaauuucugcccauccuu

SEQ ID NO: 387405 - RNA, 19 nt, Homo sapiens
  misc_RNA (1)...(19): siRNA sense strand
ucgaggaccugaggaugga

SEQ ID NO: 387406 - RNA, 19 nt, Homo sapiens
  misc_RNA (1)...(19): siRNA sense strand
ggaaaaccauguggcaaag

SEQ ID NO: 387407 - RNA, 19 nt, Homo sapiens
  misc_RNA (1)...(19): siRNA sense strand
agccaagcaucacaaagau

SEQ ID NO: 387408 - RNA, 19 nt, Homo sapiens
  misc_RNA (1)...(19): siRNA sense strand
ucaaugagcugauggauau

SEQ ID NO: 387409 - RNA, 19 nt, Homo sapiens
  misc_RNA (1)...(19): siRNA sense strand
ggaccuaccucuucaccua

SEQ ID NO: 387410 - RNA, 19 nt, Homo sapiens
  misc_RNA (1)...(19): siRNA sense strand
ggaugaagaugcugagaaa

SEQ ID NO: 387411 - RNA, 19 nt, Homo sapiens
  misc_RNA (1)...(19): siRNA sense strand
agaagaagaugaacaagaa

SEQ ID NO: 387412 - RNA, 19 nt, Homo sapiens
  misc_RNA (1)...(19): siRNA sense strand
ggacaaagcuaagaagaag

SEQ ID NO: 387413 - RNA, 19 nt, Homo sapiens
  misc_RNA (1)...(19): siRNA sense strand
ggacacagguuccacaucu

SEQ ID NO: 387414 - RNA, 19 nt, Homo sapiens
  misc_RNA (1)...(19): siRNA sense strand
gaagauaccaagagaguug

SEQ ID NO: 387415 - RNA, 19 nt, Homo sapiens
  misc_RNA (1)...(19): siRNA sense strand
acgaauggaugaagaauuu

SEQ ID NO: 387416 - RNA, 19 nt, Homo sapiens
  misc_RNA (1)...(19): siRNA sense strand
ucaagaaacugaaugagau

SEQ ID NO: 387417 - RNA, 19 nt, Homo sapiens
  misc_RNA (1)...(19): siRNA sense strand
ggaagaagaagaugaacaa

SEQ ID NO: 387418 - RNA, 19 nt, Homo sapiens
  misc_RNA (1)...(19): siRNA sense strand
gaagaugaaugggaaagug

SEQ ID NO: 387419 - RNA, 19 nt, Homo sapiens
  misc_RNA (1)...(19): siRNA sense strand
gcugauggauauccuguuu

SEQ ID NO: 387420 - RNA, 19 nt, Homo sapiens
  misc_RNA (1)...(19): siRNA sense strand
gggaggagcucgucaccaa

SEQ ID NO: 387421 - RNA, 19 nt, Homo sapiens
  misc_RNA (1)...(19): siRNA sense strand
gagcgaggaugaagaagau

SEQ ID NO: 387422 - RNA, 19 nt, Homo sapiens
  misc_RNA (1)...(19): siRNA sense strand
gcacaccuacuacaaguuu

SEQ ID NO: 387423 - RNA, 19 nt, Homo sapiens
  misc_RNA (1)...(19): siRNA sense strand
ugaagaagauaccaagaga

SEQ ID NO: 387424 - RNA, 19 nt, Homo sapiens
  misc_RNA (1)...(19): siRNA sense strand
gaaacugaaugagauccua

SEQ ID NO: 387425 - RNA, 19 nt, Homo sapiens
  misc_RNA (1)...(19): siRNA sense strand
aaagauggaugaugaagau

SEQ ID NO: 387426 - RNA, 19 nt, Homo sapiens
  misc_RNA (1)...(19): siRNA sense strand
ccaagugccuggaagaguu

SEQ ID NO: 387427 - RNA, 19 nt, Homo sapiens
  misc_RNA (1)...(19): siRNA sense strand
gaaggcagccgagaagaaa

SEQ ID NO: 387428 - RNA, 19 nt, Homo sapiens
  misc_RNA (1)...(19): siRNA sense strand
uuaaugagcuuugggaaga

SEQ ID NO: 387429 - RNA, 19 nt, Homo sapiens
  misc_RNA (1)...(19): siRNA sense strand
ggacucggcuguguugaug

SEQ ID NO: 387430 - RNA, 19 nt, Homo sapiens
  misc_RNA (1)...(19): siRNA sense strand
gaagaagcacgacaggaaa

SEQ ID NO: 387431 - RNA, 19 nt, Homo sapiens
  misc_RNA (1)...(19): siRNA sense strand
ggaagugccuggacugcau

SEQ ID NO: 387432 - RNA, 19 nt, Homo sapiens
  misc_RNA (1)...(19): siRNA sense strand
cuagaggacuaucuuaaug

SEQ ID NO: 387433 - RNA, 19 nt, Homo sapiens
  misc_RNA (1)...(19): siRNA sense strand
gaucacccaugcuguuguu

SEQ ID NO: 387434 - RNA, 19 nt, Homo sapiens
  misc_RNA (1)...(19): siRNA sense strand
gcgcuggccucaagauuuc

SEQ ID NO: 387435 - RNA, 19 nt, Homo sapiens
  misc_RNA (1)...(19): siRNA sense strand
ggagagggcgucauuguca

SEQ ID NO: 387436 - RNA, 19 nt, Homo sapiens
  misc_RNA (1)...(19): siRNA sense strand
gaagaaacgggaggacaaa

SEQ ID NO: 387437 - RNA, 19 nt, Homo sapiens
  misc_RNA (1)...(19): siRNA sense strand
gaagggaagaagaagauga

SEQ ID NO: 387438 - RNA, 19 nt, Homo sapiens
  misc_RNA (1)...(19): siRNA sense strand
gccaaggccugaccaagga

SEQ ID NO: 387439 - RNA, 19 nt, Homo sapiens
  misc_RNA (1)...(19): siRNA sense strand
ggaugaagaauuuaccaaa

SEQ ID NO: 387440 - RNA, 19 nt, Homo sapiens
  misc_RNA (1)...(19): siRNA sense strand
guccguggcugcauccuaa

SEQ ID NO: 387441 - RNA, 19 nt, Homo sapiens
  misc_RNA (1)...(19): siRNA sense strand
uaucaucgccucucucuau

SEQ ID NO: 387442 - RNA, 19 nt, Homo sapiens
  misc_RNA (1)...(19): siRNA sense strand
ccacagaugaggacaagaa

SEQ ID NO: 387443 - RNA, 19 nt, Homo sapiens
  misc_RNA (1)...(19): siRNA sense strand
uuaggaagauccaggaaga

SEQ ID NO: 387444 - RNA, 19 nt, Homo sapiens
  misc_RNA (1)...(19): siRNA sense strand
gaggaggucugccgcaucu

SEQ ID NO: 387445 - RNA, 19 nt, Homo sapiens
  misc_RNA (1)...(19): siRNA sense strand
gaagauccaggaagaguca

SEQ ID NO: 387446 - RNA, 19 nt, Homo sapiens
  misc_RNA (1)...(19): siRNA sense strand
gucaagaucaaguucaaua

SEQ ID NO: 387447 - RNA, 19 nt, Homo sapiens
  misc_RNA (1)...(19): siRNA sense strand
gaggagcugaccaaccuua

SEQ ID NO: 387448 - RNA, 19 nt, Homo sapiens
  misc_RNA (1)...(19): siRNA sense strand
gcauggagacgcugucaga

SEQ ID NO: 387449 - RNA, 19 nt, Homo sapiens
  misc_RNA (1)...(19): siRNA sense strand
cagaagauuccgaagauga

SEQ ID NO: 387450 - RNA, 19 nt, Homo sapiens
  misc_RNA (1)...(19): siRNA sense strand
gauaaggaagggaagaaga

SEQ ID NO: 387451 - RNA, 19 nt, Homo sapiens
  misc_RNA (1)...(19): siRNA sense strand
gagagacugugcaaguaca

SEQ ID NO: 387452 - RNA, 19 nt, Homo sapiens
  misc_RNA (1)...(19): siRNA sense strand
agaagaagcacgacaggaa

SEQ ID NO: 387453 - RNA, 19 nt, Homo sapiens
  misc_RNA (1)...(19): siRNA sense strand
cagaugaggaugaggauga

SEQ ID NO: 387454 - RNA, 19 nt, Homo sapiens
  misc_RNA (1)...(19): siRNA sense strand
uggagagacugugcaagua

SEQ ID NO: 387455 - RNA, 19 nt, Homo sapiens
  misc_RNA (1)...(19): siRNA sense strand
ggaacgaauggaugaagaa

SEQ ID NO: 387456 - RNA, 19 nt, Homo sapiens
  misc_RNA (1)...(19): siRNA sense strand
gagagggcgucauugucaa

SEQ ID NO: 387457 - RNA, 19 nt, Homo sapiens
  misc_RNA (1)...(19): siRNA sense strand
guaaugccaugaagauucg

SEQ ID NO: 387458 - RNA, 19 nt, Homo sapiens
  misc_RNA (1)...(19): siRNA sense strand
cauccuaacucugguggaa

SEQ ID NO: 387459 - RNA, 19 nt, Homo sapiens
  misc_RNA (1)...(19): siRNA sense strand
caacugcugguucagauug

SEQ ID NO: 387460 - RNA, 19 nt, Homo sapiens
  misc_RNA (1)...(19): siRNA sense strand
gaggaagaagggaaacaaa

SEQ ID NO: 387461 - RNA, 19 nt, Homo sapiens
  misc_RNA (1)...(19): siRNA sense strand
ccaugaagauucgugaugu

SEQ ID NO: 387462 - RNA, 19 nt, Homo sapiens
  misc_RNA (1)...(19): siRNA sense strand
ucaaugagaagaugaaugg

SEQ ID NO: 387463 - RNA, 19 nt, Homo sapiens
  misc_RNA (1)...(19): siRNA sense strand
cuacaaguuugauuacaag

SEQ ID NO: 387464 - RNA, 19 nt, Homo sapiens
  misc_RNA (1)...(19): siRNA sense strand
ccuacuacaaguuugauua

SEQ ID NO: 387465 - RNA, 19 nt, Homo sapiens
  misc_RNA (1)...(19): siRNA sense strand
gcggagugccguugguuaa

SEQ ID NO: 387466 - RNA, 19 nt, Homo sapiens
  misc_RNA (1)...(19): siRNA sense strand
uggcugaccuagaggacua

SEQ ID NO: 387467 - RNA, 19 nt, Homo sapiens
  misc_RNA (1)...(19): siRNA sense strand
gaagauaaggaagggaaga

SEQ ID NO: 387468 - RNA, 19 nt, Homo sapiens
  misc_RNA (1)...(19): siRNA sense strand
gauauccuguuugcaaauc

SEQ ID NO: 387469 - RNA, 19 nt, Homo sapiens
  misc_RNA (1)...(19): siRNA sense strand
ggaggaggaggacaaugaa

SEQ ID NO: 387470 - RNA, 19 nt, Homo sapiens
  misc_RNA (1)...(19): siRNA sense strand
aaaccgcgcuggccucaag

SEQ ID NO: 387471 - RNA, 19 nt, Homo sapiens
  misc_RNA (1)...(19): siRNA sense strand
gaccuagaggacuaucuua

SEQ ID NO: 387472 - RNA, 19 nt, Homo sapiens
  misc_RNA (1)...(19): siRNA sense strand
ggacaacauucagcaugca

SEQ ID NO: 387473 - RNA, 19 nt, Homo sapiens
  misc_RNA (1)...(19): siRNA sense strand
gagcaagaccaggcagaaa

SEQ ID NO: 387474 - RNA, 19 nt, Homo sapiens
  misc_RNA (1)...(19): siRNA sense strand
gauuucgagucccauauca

SEQ ID NO: 387475 - RNA, 19 nt, Homo sapiens
  misc_RNA (1)...(19): siRNA sense strand
gaagaugaacaagaacaau

SEQ ID NO: 387476 - RNA, 19 nt, Homo sapiens
  misc_RNA (1)...(19): siRNA sense strand
cauccuggcugaccuagag

SEQ ID NO: 387477 - RNA, 19 nt, Homo sapiens
  misc_RNA (1)...(19): siRNA sense strand
cagugcagauccuuuacaa

SEQ ID NO: 387478 - RNA, 19 nt, Homo sapiens
  misc_RNA (1)...(19): siRNA sense strand
gaacgaauggaugaagaau

SEQ ID NO: 387479 - RNA, 19 nt, Homo sapiens
  misc_RNA (1)...(19): siRNA sense strand
caagaaggcagccgagaag

SEQ ID NO: 387480 - RNA, 19 nt, Homo sapiens
  misc_RNA (1)...(19): siRNA sense strand
ggaggaagaagggaaacaa

SEQ ID NO: 387481 - RNA, 19 nt, Homo sapiens
  misc_RNA (1)...(19): siRNA sense strand
ggacuaucuuaaugagcuu

SEQ ID NO: 387482 - RNA, 19 nt, Homo sapiens
  misc_RNA (1)...(19): siRNA sense strand
gcugagcgaggaugaagaa

SEQ ID NO: 387483 - RNA, 19 nt, Homo sapiens
  misc_RNA (1)...(19): siRNA sense strand
aguuugagcuccugggaaa

SEQ ID NO: 387484 - RNA, 19 nt, Homo sapiens
  misc_RNA (1)...(19): siRNA sense strand
caagaucaaguucaauauc

SEQ ID NO: 387485 - RNA, 19 nt, Homo sapiens
  misc_RNA (1)...(19): siRNA sense strand
gaggacaaagcuaagaaga

SEQ ID NO: 387486 - RNA, 19 nt, Homo sapiens
  misc_RNA (1)...(19): siRNA sense strand
gaagaagaaaucagaagcu

SEQ ID NO: 387487 - RNA, 19 nt, Homo sapiens
  misc_RNA (1)...(19): siRNA sense strand
uggauauccuguuugcaaa

SEQ ID NO: 387488 - RNA, 19 nt, Homo sapiens
  misc_RNA (1)...(19): siRNA sense strand
gcaaccaggagcaggagaa

SEQ ID NO: 387489 - RNA, 19 nt, Homo sapiens
  misc_RNA (1)...(19): siRNA sense strand
gaccggauccgcacaugug

SEQ ID NO: 387490 - RNA, 19 nt, Homo sapiens
  misc_RNA (1)...(19): siRNA sense strand
uaacucugguggaacgaau

SEQ ID NO: 387491 - RNA, 19 nt, Homo sapiens
  misc_RNA (1)...(19): siRNA sense strand
gucagaagauccgaaaaua

SEQ ID NO: 387492 - RNA, 19 nt, Homo sapiens
  misc_RNA (1)...(19): siRNA sense strand
aagaguacguggagcacuu

SEQ ID NO: 387493 - RNA, 19 nt, Homo sapiens
  misc_RNA (1)...(19): siRNA sense strand
guuugcaaaucccaacauu

SEQ ID NO: 387494 - RNA, 19 nt, Homo sapiens
  misc_RNA (1)...(19): siRNA sense strand
ucgccucucucuaugacua

SEQ ID NO: 387495 - RNA, 19 nt, Homo sapiens
  misc_RNA (1)...(19): siRNA sense strand
agauugagcugcugcaacu

SEQ ID NO: 387496 - RNA, 19 nt, Homo sapiens
  misc_RNA (1)...(19): siRNA sense strand
gauggaugaugaagaugag

SEQ ID NO: 387497 - RNA, 19 nt, Homo sapiens
  misc_RNA (1)...(19): siRNA sense strand
uagaggacuaucuuaauga

SEQ ID NO: 387498 - RNA, 19 nt, Homo sapiens
  misc_RNA (1)...(19): siRNA sense strand
caacacagacaguggugau

SEQ ID NO: 387499 - RNA, 19 nt, Homo sapiens
  misc_RNA (1)...(19): siRNA sense strand
ccacuugcaggacaacauu

SEQ ID NO: 387500 - RNA, 19 nt, Homo sapiens
  misc_RNA (1)...(19): siRNA sense strand
ccaggugugugccaucauc

SEQ ID NO: 387501 - RNA, 19 nt, Homo sapiens
  misc_RNA (1)...(19): siRNA sense strand
cucagaagauuccgaagau

SEQ ID NO: 387502 - RNA, 19 nt, Homo sapiens
  misc_RNA (1)...(19): siRNA sense strand
gcaccuugcgucagaagau

SEQ ID NO: 387503 - RNA, 19 nt, Homo sapiens
  misc_RNA (1)...(19): siRNA sense strand
guuguuaucaagaaacuga

SEQ ID NO: 387504 - RNA, 19 nt, Homo sapiens
  misc_RNA (1)...(19): siRNA sense strand
acaacgaacggguguuuga

SEQ ID NO: 387505 - RNA, 19 nt, Homo sapiens
  misc_RNA (1)...(19): siRNA sense strand
gcagccugguggagaacaa

SEQ ID NO: 387506 - RNA, 19 nt, Homo sapiens
  misc_RNA (1)...(19): siRNA sense strand
aagagucacugaggaccua

SEQ ID NO: 387507 - RNA, 19 nt, Homo sapiens
  misc_RNA (1)...(19): siRNA sense strand
gggcgucauugucaagauc

SEQ ID NO: 387508 - RNA, 19 nt, Homo sapiens
  misc_RNA (1)...(19): siRNA sense strand
gagcaucucuucuuuauuu

SEQ ID NO: 387509 - RNA, 19 nt, Homo sapiens
  misc_RNA (1)...(19): siRNA sense strand
caacacaccuggaaauuaa

SEQ ID NO: 387510 - RNA, 19 nt, Homo sapiens
  misc_RNA (1)...(19): siRNA sense strand
ggagaaagcuuccaaagga

SEQ ID NO: 387511 - RNA, 19 nt, Homo sapiens
  misc_RNA (1)...(19): siRNA sense strand
gaagaagcauugauaauug

SEQ ID NO: 387512 - RNA, 19 nt, Homo sapiens
  misc_RNA (1)...(19): siRNA sense strand
gaaagaugcuagaagauuu

SEQ ID NO: 387513 - RNA, 19 nt, Homo sapiens
  misc_RNA (1)...(19): siRNA sense strand
ggaggaagcugcacuuuga

SEQ ID NO: 387514 - RNA, 19 nt, Homo sapiens
  misc_RNA (1)...(19): siRNA sense strand
guaagcaacuguauaauga

SEQ ID NO: 387515 - RNA, 19 nt, Homo sapiens
  misc_RNA (1)...(19): siRNA sense strand
gaaagcagcuaaagucuuc

SEQ ID NO: 387516 - RNA, 19 nt, Homo sapiens
  misc_RNA (1)...(19): siRNA sense strand
gcacuaacauggaguuuga

SEQ ID NO: 387517 - RNA, 19 nt, Homo sapiens
  misc_RNA (1)...(19): siRNA sense strand
gaccacagauguaggaaua

SEQ ID NO: 387518 - RNA, 19 nt, Homo sapiens
  misc_RNA (1)...(19): siRNA sense strand
gauagacccucuugaauug

SEQ ID NO: 387519 - RNA, 19 nt, Homo sapiens
  misc_RNA (1)...(19): siRNA sense strand
ggaauuaaguggaucaaga

SEQ ID NO: 387520 - RNA, 19 nt, Homo sapiens
  misc_RNA (1)...(19): siRNA sense strand
gaagauuacugaaagcauu

SEQ ID NO: 387521 - RNA, 19 nt, Homo sapiens
  misc_RNA (1)...(19): siRNA sense strand
agacaacucuccucaauuu

SEQ ID NO: 387522 - RNA, 19 nt, Homo sapiens
  misc_RNA (1)...(19): siRNA sense strand
gacaacagaugaacucuuu

SEQ ID NO: 387523 - RNA, 19 nt, Homo sapiens
  misc_RNA (1)...(19): siRNA sense strand
aaacagcccugaaggauuu

SEQ ID NO: 387524 - RNA, 19 nt, Homo sapiens
  misc_RNA (1)...(19): siRNA sense strand
ggaagaauuucgaggcaua

SEQ ID NO: 387525 - RNA, 19 nt, Homo sapiens
  misc_RNA (1)...(19): siRNA sense strand
caaauuagcuaacagacuu

SEQ ID NO: 387526 - RNA, 19 nt, Homo sapiens
  misc_RNA (1)...(19): siRNA sense strand
ggguagaucuugccaauuu

SEQ ID NO: 387527 - RNA, 19 nt, Homo sapiens
  misc_RNA (1)...(19): siRNA sense strand
gaaaguucauuacguugua

SEQ ID NO: 387528 - RNA, 19 nt, Homo sapiens
  misc_RNA (1)...(19): siRNA sense strand
gaacuagauuucuggauga

SEQ ID NO: 387529 - RNA, 19 nt, Homo sapiens
  misc_RNA (1)...(19): siRNA sense strand
ugaaugagcuacaagaauu

SEQ ID NO: 387530 - RNA, 19 nt, Homo sapiens
  misc_RNA (1)...(19): siRNA sense strand
agacuuggcuuuacaauug

SEQ ID NO: 387531 - RNA, 19 nt, Homo sapiens
  misc_RNA (1)...(19): siRNA sense strand
gcaauugaaucugugguua

SEQ ID NO: 387532 - RNA, 19 nt, Homo sapiens
  misc_RNA (1)...(19): siRNA sense strand
ggaaauacguauaucacuu

SEQ ID NO: 387533 - RNA, 19 nt, Homo sapiens
  misc_RNA (1)...(19): siRNA sense strand
gaauccagcuugugaaaga

SEQ ID NO: 387534 - RNA, 19 nt, Homo sapiens
  misc_RNA (1)...(19): siRNA sense strand
cagaugaacucuuugguuu

SEQ ID NO: 387535 - RNA, 19 nt, Homo sapiens
  misc_RNA (1)...(19): siRNA sense strand
gacagaaggugaugcuuaa

SEQ ID NO: 387536 - RNA, 19 nt, Homo sapiens
  misc_RNA (1)...(19): siRNA sense strand
gaaacagugucgcaaagaa

SEQ ID NO: 387537 - RNA, 19 nt, Homo sapiens
  misc_RNA (1)...(19): siRNA sense strand
aagcaaaucuuaagcauga

SEQ ID NO: 387538 - RNA, 19 nt, Homo sapiens
  misc_RNA (1)...(19): siRNA sense strand
gcuggaaacugcuuauaaa

SEQ ID NO: 387539 - RNA, 19 nt, Homo sapiens
  misc_RNA (1)...(19): siRNA sense strand
gaucagaauuguucagaga

SEQ ID NO: 387540 - RNA, 19 nt, Homo sapiens
  misc_RNA (1)...(19): siRNA sense strand
ggacuuaguuaaagcauuc

SEQ ID NO: 387541 - RNA, 19 nt, Homo sapiens
  misc_RNA (1)...(19): siRNA sense strand
gaugaaagcagugaaauuu

SEQ ID NO: 387542 - RNA, 19 nt, Homo sapiens
  misc_RNA (1)...(19): siRNA sense strand
ccacuuugcuugaucaauu

SEQ ID NO: 387543 - RNA, 19 nt, Homo sapiens
  misc_RNA (1)...(19): siRNA sense strand
aacaagaacuuucgccuua

SEQ ID NO: 387544 - RNA, 19 nt, Homo sapiens
  misc_RNA (1)...(19): siRNA sense strand
ggaaugacuuaaacccuaa

SEQ ID NO: 387545 - RNA, 19 nt, Homo sapiens
  misc_RNA (1)...(19): siRNA sense strand
gaacaaccaccaacucuug

SEQ ID NO: 387546 - RNA, 19 nt, Homo sapiens
  misc_RNA (1)...(19): siRNA sense strand
uuaagaaccuguugaagaa

SEQ ID NO: 387547 - RNA, 19 nt, Homo sapiens
  misc_RNA (1)...(19): siRNA sense strand
gaaaugaguaccagauauu

SEQ ID NO: 387548 - RNA, 19 nt, Homo sapiens
  misc_RNA (1)...(19): siRNA sense strand
cagaagaucaugacaauuu

SEQ ID NO: 387549 - RNA, 19 nt, Homo sapiens
  misc_RNA (1)...(19): siRNA sense strand
ggaagucacucuuauaagg

SEQ ID NO: 387550 - RNA, 19 nt, Homo sapiens
  misc_RNA (1)...(19): siRNA sense strand
gagcaaauuugaggacuuu

SEQ ID NO: 387551 - RNA, 19 nt, Homo sapiens
  misc_RNA (1)...(19): siRNA sense strand
gugauuauguggcauuuaa

SEQ ID NO: 387552 - RNA, 19 nt, Homo sapiens
  misc_RNA (1)...(19): siRNA sense strand
gcuaaucugugaaaucuug

SEQ ID NO: 387553 - RNA, 19 nt, Homo sapiens
  misc_RNA (1)...(19): siRNA sense strand
gaaauuuggucacucaaca

SEQ ID NO: 387554 - RNA, 19 nt, Homo sapiens
  misc_RNA (1)...(19): siRNA sense strand
gcuaguggcuguauugaga

SEQ ID NO: 387555 - RNA, 19 nt, Homo sapiens
  misc_RNA (1)...(19): siRNA sense strand
gcagguggcuguuaacauc

SEQ ID NO: 387556 - RNA, 19 nt, Homo sapiens
  misc_RNA (1)...(19): siRNA sense strand
acugacagguguuauauua

SEQ ID NO: 387557 - RNA, 19 nt, Homo sapiens
  misc_RNA (1)...(19): siRNA sense strand
gaacagacuaugcaagaaa

SEQ ID NO: 387558 - RNA, 19 nt, Homo sapiens
  misc_RNA (1)...(19): siRNA sense strand
gaaguugaauacccucuga

SEQ ID NO: 387559 - RNA, 19 nt, Homo sapiens
  misc_RNA (1)...(19): siRNA sense strand
gaacuuugcuggagaugca

SEQ ID NO: 387560 - RNA, 19 nt, Homo sapiens
  misc_RNA (1)...(19): siRNA sense strand
ccacccaaaugcugaaaua

SEQ ID NO: 387561 - RNA, 19 nt, Homo sapiens
  misc_RNA (1)...(19): siRNA sense strand
gagacaaacugauagacaa

SEQ ID NO: 387562 - RNA, 19 nt, Homo sapiens
  misc_RNA (1)...(19): siRNA sense strand
gacagaagaucaugacaau

SEQ ID NO: 387563 - RNA, 19 nt, Homo sapiens
  misc_RNA (1)...(19): siRNA sense strand
gaagcaacgugcagaccua

SEQ ID NO: 387564 - RNA, 19 nt, Homo sapiens
  misc_RNA (1)...(19): siRNA sense strand
gcaacacaccuggaaauua

SEQ ID NO: 387565 - RNA, 19 nt, Homo sapiens
  misc_RNA (1)...(19): siRNA sense strand
ccaagaagauuacugaaag

SEQ ID NO: 387566 - RNA, 19 nt, Homo sapiens
  misc_RNA (1)...(19): siRNA sense strand
ccaaggagcaggaguuuaa

SEQ ID NO: 387567 - RNA, 19 nt, Homo sapiens
  misc_RNA (1)...(19): siRNA sense strand
gaaaguauaucaggauugg

SEQ ID NO: 387568 - RNA, 19 nt, Homo sapiens
  misc_RNA (1)...(19): siRNA sense strand
caacaugugugucgcauca

SEQ ID NO: 387569 - RNA, 19 nt, Homo sapiens
  misc_RNA (1)...(19): siRNA sense strand
ggaaacagcccucgacuag

SEQ ID NO: 387570 - RNA, 19 nt, Homo sapiens
  misc_RNA (1)...(19): siRNA sense strand
gcacuaaccagcucacaaa

SEQ ID NO: 387571 - RNA, 19 nt, Homo sapiens
  misc_RNA (1)...(19): siRNA sense strand
ccacaacuuuggcagauuu

SEQ ID NO: 387572 - RNA, 19 nt, Homo sapiens
  misc_RNA (1)...(19): siRNA sense strand
caacaaagucuuagauuuc

SEQ ID NO: 387573 - RNA, 19 nt, Homo sapiens
  misc_RNA (1)...(19): siRNA sense strand
uaaauggucuucucugugu

SEQ ID NO: 387574 - RNA, 19 nt, Homo sapiens
  misc_RNA (1)...(19): siRNA sense strand
ccacagacacgcauauuaa

SEQ ID NO: 387575 - RNA, 19 nt, Homo sapiens
  misc_RNA (1)...(19): siRNA sense strand
gaaaggauaauacuucaug

SEQ ID NO: 387576 - RNA, 19 nt, Homo sapiens
  misc_RNA (1)...(19): siRNA sense strand
cuaaccagcucacaaauau

SEQ ID NO: 387577 - RNA, 19 nt, Homo sapiens
  misc_RNA (1)...(19): siRNA sense strand
gaacaggcauuccauuacu

SEQ ID NO: 387578 - RNA, 19 nt, Homo sapiens
  misc_RNA (1)...(19): siRNA sense strand
uaaaugaagccacaacuuu

SEQ ID NO: 387579 - RNA, 19 nt, Homo sapiens
  misc_RNA (1)...(19): siRNA sense strand
ggagacagauuccggacuu

SEQ ID NO: 387580 - RNA, 19 nt, Homo sapiens
  misc_RNA (1)...(19): siRNA sense strand
uaacugcaauggcuuagaa

SEQ ID NO: 387581 - RNA, 19 nt, Homo sapiens
  misc_RNA (1)...(19): siRNA sense strand
ggcaacagcuuaccuuuca

SEQ ID NO: 387582 - RNA, 19 nt, Homo sapiens
  misc_RNA (1)...(19): siRNA sense strand
ugggaaagguugaugauuu

SEQ ID NO: 387583 - RNA, 19 nt, Homo sapiens
  misc_RNA (1)...(19): siRNA sense strand
aaacagagaccaccaaaga

SEQ ID NO: 387584 - RNA, 19 nt, Homo sapiens
  misc_RNA (1)...(19): siRNA sense strand
ggaagaaggcuacgaaaca

SEQ ID NO: 387585 - RNA, 19 nt, Homo sapiens
  misc_RNA (1)...(19): siRNA sense strand
gauugaauguggucaugua

SEQ ID NO: 387586 - RNA, 19 nt, Homo sapiens
  misc_RNA (1)...(19): siRNA sense strand
gagauucagugcagcguuu

SEQ ID NO: 387587 - RNA, 19 nt, Homo sapiens
  misc_RNA (1)...(19): siRNA sense strand
ugaaagacccagaguuuaa

SEQ ID NO: 387588 - RNA, 19 nt, Homo sapiens
  misc_RNA (1)...(19): siRNA sense strand
gcacggcuauugacugguu

SEQ ID NO: 387589 - RNA, 19 nt, Homo sapiens
  misc_RNA (1)...(19): siRNA sense strand
gcaagucucucugaggauu

SEQ ID NO: 387590 - RNA, 19 nt, Homo sapiens
  misc_RNA (1)...(19): siRNA sense strand
aaacugagaacaagcuuua

SEQ ID NO: 387591 - RNA, 19 nt, Homo sapiens
  misc_RNA (1)...(19): siRNA sense strand
ugugaaaucuuguuaguug

SEQ ID NO: 387592 - RNA, 19 nt, Homo sapiens
  misc_RNA (1)...(19): siRNA sense strand
gagcuaaucugugaaaucu

SEQ ID NO: 387593 - RNA, 19 nt, Homo sapiens
  misc_RNA (1)...(19): siRNA sense strand
gccaucaguuggaauauuu

SEQ ID NO: 387594 - RNA, 19 nt, Homo sapiens
  misc_RNA (1)...(19): siRNA sense strand
cauaccagauucagcuuua

SEQ ID NO: 387595 - RNA, 19 nt, Homo sapiens
  misc_RNA (1)...(19): siRNA sense strand
guuaagauccugacaacua

SEQ ID NO: 387596 - RNA, 19 nt, Homo sapiens
  misc_RNA (1)...(19): siRNA sense strand
gugcagaccuaaucucuau

SEQ ID NO: 387597 - RNA, 19 nt, Homo sapiens
  misc_RNA (1)...(19): siRNA sense strand
gaaauacguauaucacuug

SEQ ID NO: 387598 - RNA, 19 nt, Homo sapiens
  misc_RNA (1)...(19): siRNA sense strand
uggcaaauccucacuauaa

SEQ ID NO: 387599 - RNA, 19 nt, Homo sapiens
  misc_RNA (1)...(19): siRNA sense strand
gagagaagacacaacuaua

SEQ ID NO: 387600 - RNA, 19 nt, Homo sapiens
  misc_RNA (1)...(19): siRNA sense strand
gcuauugacugguuucaug

SEQ ID NO: 387601 - RNA, 19 nt, Homo sapiens
  misc_RNA (1)...(19): siRNA sense strand
gagcugguauucuguaugu

SEQ ID NO: 387602 - RNA, 19 nt, Homo sapiens
  misc_RNA (1)...(19): siRNA sense strand
aaacagcccucgacuagug

SEQ ID NO: 387603 - RNA, 19 nt, Homo sapiens
  misc_RNA (1)...(19): siRNA sense strand
ccaacgacuucaaauguuu

SEQ ID NO: 387604 - RNA, 19 nt, Homo sapiens
  misc_RNA (1)...(19): siRNA sense strand
ggaaagcuauggccagaag

SEQ ID NO: 387605 - RNA, 19 nt, Homo sapiens
  misc_RNA (1)...(19): siRNA sense strand
acagagagcuacugaugaa

SEQ ID NO: 387606 - RNA, 19 nt, Homo sapiens
  misc_RNA (1)...(19): siRNA sense strand
gagcugaguuuaugaagca

SEQ ID NO: 387607 - RNA, 19 nt, Homo sapiens
  misc_RNA (1)...(19): siRNA sense strand
gaaagucguaucuauaaug

SEQ ID NO: 387608 - RNA, 19 nt, Homo sapiens
  misc_RNA (1)...(19): siRNA sense strand
gcacaaaucuuacauagag

SEQ ID NO: 387609 - RNA, 19 nt, Homo sapiens
  misc_RNA (1)...(19): siRNA sense strand
gacacuagacguaauauua

SEQ ID NO: 387610 - RNA, 19 nt, Homo sapiens
  misc_RNA (1)...(19): siRNA sense strand
cgaaugaccucuaaguaug

SEQ ID NO: 387611 - RNA, 19 nt, Homo sapiens
  misc_RNA (1)...(19): siRNA sense strand
gauaaguugcuucauguua

SEQ ID NO: 387612 - RNA, 19 nt, Homo sapiens
  misc_RNA (1)...(19): siRNA sense strand
gaagacacuagacguaaua

SEQ ID NO: 387613 - RNA, 19 nt, Homo sapiens
  misc_RNA (1)...(19): siRNA sense strand
caaaguuucuugcccuuga

SEQ ID NO: 387614 - RNA, 19 nt, Homo sapiens
  misc_RNA (1)...(19): siRNA sense strand
agaaugaccucucugaaau

SEQ ID NO: 387615 - RNA, 19 nt, Homo sapiens
  misc_RNA (1)...(19): siRNA sense strand
ucagagagauggaugacaa

SEQ ID NO: 387616 - RNA, 19 nt, Homo sapiens
  misc_RNA (1)...(19): siRNA sense strand
cuaaguauguugagguauu

SEQ ID NO: 387617 - RNA, 19 nt, Homo sapiens
  misc_RNA (1)...(19): siRNA sense strand
ggaugaugcacaaaucuua

SEQ ID NO: 387618 - RNA, 19 nt, Homo sapiens
  misc_RNA (1)...(19): siRNA sense strand
gaacgugauuggugaaggu

SEQ ID NO: 387619 - RNA, 19 nt, Homo sapiens
  misc_RNA (1)...(19): siRNA sense strand
caaggcgaaugaccucuaa

SEQ ID NO: 387620 - RNA, 19 nt, Homo sapiens
  misc_RNA (1)...(19): siRNA sense strand
cagauacaaugguggcaua

SEQ ID NO: 387621 - RNA, 19 nt, Homo sapiens
  misc_RNA (1)...(19): siRNA sense strand
gaaguucaauuugucuguu

SEQ ID NO: 387622 - RNA, 19 nt, Homo sapiens
  misc_RNA (1)...(19): siRNA sense strand
gcgaaugaccucuaaguau

SEQ ID NO: 387623 - RNA, 19 nt, Homo sapiens
  misc_RNA (1)...(19): siRNA sense strand
ucaaggaaauggaaaugug

SEQ ID NO: 387624 - RNA, 19 nt, Homo sapiens
  misc_RNA (1)...(19): siRNA sense strand
gcauaaacauguacguucu

SEQ ID NO: 387625 - RNA, 19 nt, Homo sapiens
  misc_RNA (1)...(19): siRNA sense strand
gauauggaaacucuucuaa

SEQ ID NO: 387626 - RNA, 19 nt, Homo sapiens
  misc_RNA (1)...(19): siRNA sense strand
ugaccucucugaaauugaa

SEQ ID NO: 387627 - RNA, 19 nt, Homo sapiens
  misc_RNA (1)...(19): siRNA sense strand
ggauuaugaucucagcauu

SEQ ID NO: 387628 - RNA, 19 nt, Homo sapiens
  misc_RNA (1)...(19): siRNA sense strand
ggaugacaaucaaggaaau

SEQ ID NO: 387629 - RNA, 19 nt, Homo sapiens
  misc_RNA (1)...(19): siRNA sense strand
gaccacccauuccuauuug

SEQ ID NO: 387630 - RNA, 19 nt, Homo sapiens
  misc_RNA (1)...(19): siRNA sense strand
cacaggaaguaauauugua

SEQ ID NO: 387631 - RNA, 19 nt, Homo sapiens
  misc_RNA (1)...(19): siRNA sense strand
caaggaugaugcacaaauc

SEQ ID NO: 387632 - RNA, 19 nt, Homo sapiens
  misc_RNA (1)...(19): siRNA sense strand
gaguugacuuuacgaauca

SEQ ID NO: 387633 - RNA, 19 nt, Homo sapiens
  misc_RNA (1)...(19): siRNA sense strand
cgaguugacuuuacgaauc

SEQ ID NO: 387634 - RNA, 19 nt, Homo sapiens
  misc_RNA (1)...(19): siRNA sense strand
ccacaaggauuaugaucuc

SEQ ID NO: 387635 - RNA, 19 nt, Homo sapiens
  misc_RNA (1)...(19): siRNA sense strand
ucucucagauugauaaguu

SEQ ID NO: 387636 - RNA, 19 nt, Homo sapiens
  misc_RNA (1)...(19): siRNA sense strand
ggaaggcagucgccaugau

SEQ ID NO: 387637 - RNA, 19 nt, Homo sapiens
  misc_RNA (1)...(19): siRNA sense strand
aagcucaucugcuguaaug

SEQ ID NO: 387638 - RNA, 19 nt, Homo sapiens
  misc_RNA (1)...(19): siRNA sense strand
gaaauggaaauguguucuu

SEQ ID NO: 387639 - RNA, 19 nt, Homo sapiens
  misc_RNA (1)...(19): siRNA sense strand
gaggacccaucaaugaaga

SEQ ID NO: 387640 - RNA, 19 nt, Homo sapiens
  misc_RNA (1)...(19): siRNA sense strand
cauaaggacuacauugagu

SEQ ID NO: 387641 - RNA, 19 nt, Homo sapiens
  misc_RNA (1)...(19): siRNA sense strand
gaaugaccucucugaaauu

SEQ ID NO: 387642 - RNA, 19 nt, Homo sapiens
  misc_RNA (1)...(19): siRNA sense strand
agagauggaugacaaucaa

SEQ ID NO: 387643 - RNA, 19 nt, Homo sapiens
  misc_RNA (1)...(19): siRNA sense strand
uaacacugccucaggauau

SEQ ID NO: 387644 - RNA, 19 nt, Homo sapiens
  misc_RNA (1)...(19): siRNA sense strand
gaaacucuucuaauaguca

SEQ ID NO: 387645 - RNA, 19 nt, Homo sapiens
  misc_RNA (1)...(19): siRNA sense strand
uggaaacucuucuaauagu

SEQ ID NO: 387646 - RNA, 19 nt, Homo sapiens
  misc_RNA (1)...(19): siRNA sense strand
caaucagccuucaccaaga

SEQ ID NO: 387647 - RNA, 19 nt, Homo sapiens
  misc_RNA (1)...(19): siRNA sense strand
ggaaacucuucuaauaguc

SEQ ID NO: 387648 - RNA, 19 nt, Homo sapiens
  misc_RNA (1)...(19): siRNA sense strand
gcuucaaccuguucagaga

SEQ ID NO: 387649 - RNA, 19 nt, Homo sapiens
  misc_RNA (1)...(19): siRNA sense strand
ggugaaugcuguguacuuc

SEQ ID NO: 387650 - RNA, 19 nt, Homo sapiens
  misc_RNA (1)...(19): siRNA sense strand
agucagggcuccagucuca

SEQ ID NO: 387651 - RNA, 19 nt, Homo sapiens
  misc_RNA (1)...(19): siRNA sense strand
gaaggcagucgccaugaug

SEQ ID NO: 387652 - RNA, 19 nt, Homo sapiens
  misc_RNA (1)...(19): siRNA sense strand
cauaagcucaucugcugua

SEQ ID NO: 387653 - RNA, 19 nt, Homo sapiens
  misc_RNA (1)...(19): siRNA sense strand
ugaccacccauuccuauuu

SEQ ID NO: 387654 - RNA, 19 nt, Homo sapiens
  misc_RNA (1)...(19): siRNA sense strand
cuguauauaucaaggauga

SEQ ID NO: 387655 - RNA, 19 nt, Homo sapiens
  misc_RNA (1)...(19): siRNA sense strand
caagagcgaaaccauaaau

SEQ ID NO: 387656 - RNA, 19 nt, Homo sapiens
  misc_RNA (1)...(19): siRNA sense strand
gaaugaccucuaaguaugu

SEQ ID NO: 387657 - RNA, 19 nt, Homo sapiens
  misc_RNA (1)...(19): siRNA sense strand
ggucgucuguauauaucaa

SEQ ID NO: 387658 - RNA, 19 nt, Homo sapiens
  misc_RNA (1)...(19): siRNA sense strand
ggauauggaaacucuucua

SEQ ID NO: 387659 - RNA, 19 nt, Homo sapiens
  misc_RNA (1)...(19): siRNA sense strand
gaugcacaaaucuuacaua

SEQ ID NO: 387660 - RNA, 19 nt, Homo sapiens
  misc_RNA (1)...(19): siRNA sense strand
cccuagggcugaaagauau

SEQ ID NO: 387661 - RNA, 19 nt, Homo sapiens
  misc_RNA (1)...(19): siRNA sense strand
cuaauggaauggaccaauc

SEQ ID NO: 387662 - RNA, 19 nt, Homo sapiens
  misc_RNA (1)...(19): siRNA sense strand
gaaaccauaaauugccauu

SEQ ID NO: 387663 - RNA, 19 nt, Homo sapiens
  misc_RNA (1)...(19): siRNA sense strand
agaagacacuagacguaau

SEQ ID NO: 387664 - RNA, 19 nt, Homo sapiens
  misc_RNA (1)...(19): siRNA sense strand
cuuauucaguggcaaaguu

SEQ ID NO: 387665 - RNA, 19 nt, Homo sapiens
  misc_RNA (1)...(19): siRNA sense strand
ccacaggaaguaauauugu

SEQ ID NO: 387666 - RNA, 19 nt, Homo sapiens
  misc_RNA (1)...(19): siRNA sense strand
aaaacaaacugaccuuuca

SEQ ID NO: 387667 - RNA, 19 nt, Homo sapiens
  misc_RNA (1)...(19): siRNA sense strand
aaugaccucucugaaauug

SEQ ID NO: 387668 - RNA, 19 nt, Homo sapiens
  misc_RNA (1)...(19): siRNA sense strand
gacaaucaaggaaauggaa

SEQ ID NO: 387669 - RNA, 19 nt, Homo sapiens
  misc_RNA (1)...(19): siRNA sense strand
gagcgaaaccauaaauugc

SEQ ID NO: 387670 - RNA, 19 nt, Homo sapiens
  misc_RNA (1)...(19): siRNA sense strand
gaagguggcauaagcucau

SEQ ID NO: 387671 - RNA, 19 nt, Homo sapiens
  misc_RNA (1)...(19): siRNA sense strand
uuagaagacacuagacgua

SEQ ID NO: 387672 - RNA, 19 nt, Homo sapiens
  misc_RNA (1)...(19): siRNA sense strand
gagagauggaugacaauca

SEQ ID NO: 387673 - RNA, 19 nt, Homo sapiens
  misc_RNA (1)...(19): siRNA sense strand
ggcgaaugaccucuaagua

SEQ ID NO: 387674 - RNA, 19 nt, Homo sapiens
  misc_RNA (1)...(19): siRNA sense strand
uagaagacacuagacguaa

SEQ ID NO: 387675 - RNA, 19 nt, Homo sapiens
  misc_RNA (1)...(19): siRNA sense strand
uaauggugcuggugaaugc

SEQ ID NO: 387676 - RNA, 19 nt, Homo sapiens
  misc_RNA (1)...(19): siRNA sense strand
gauuaugaucucagcauug

SEQ ID NO: 387677 - RNA, 19 nt, Homo sapiens
  misc_RNA (1)...(19): siRNA sense strand
cacccauuccuauuuguua

SEQ ID NO: 387678 - RNA, 19 nt, Homo sapiens
  misc_RNA (1)...(19): siRNA sense strand
caccaagagcgaaaccaua

SEQ ID NO: 387679 - RNA, 19 nt, Homo sapiens
  misc_RNA (1)...(19): siRNA sense strand
uugauaaguugcuucaugu

SEQ ID NO: 387680 - RNA, 19 nt, Homo sapiens
  misc_RNA (1)...(19): siRNA sense strand
aaaugaaacacauggcaaa

SEQ ID NO: 387681 - RNA, 19 nt, Homo sapiens
  misc_RNA (1)...(19): siRNA sense strand
uaugaucucagcauuguga

SEQ ID NO: 387682 - RNA, 19 nt, Homo sapiens
  misc_RNA (1)...(19): siRNA sense strand
agagcgaaaccauaaauug

SEQ ID NO: 387683 - RNA, 19 nt, Homo sapiens
  misc_RNA (1)...(19): siRNA sense strand
ggagcgaguugacuuuacg

SEQ ID NO: 387684 - RNA, 19 nt, Homo sapiens
  misc_RNA (1)...(19): siRNA sense strand
ggaaguucaauuugucugu

SEQ ID NO: 387685 - RNA, 19 nt, Homo sapiens
  misc_RNA (1)...(19): siRNA sense strand
auaaguggguugaaaauga

SEQ ID NO: 387686 - RNA, 19 nt, Homo sapiens
  misc_RNA (1)...(19): siRNA sense strand
caaggaaauggaaaugugu

SEQ ID NO: 387687 - RNA, 19 nt, Homo sapiens
  misc_RNA (1)...(19): siRNA sense strand
ucaaggaugaugcacaaau

SEQ ID NO: 387688 - RNA, 19 nt, Homo sapiens
  misc_RNA (1)...(19): siRNA sense strand
accaagagcgaaaccauaa

SEQ ID NO: 387689 - RNA, 19 nt, Homo sapiens
  misc_RNA (1)...(19): siRNA sense strand
auugauaaguugcuucaug

SEQ ID NO: 387690 - RNA, 19 nt, Homo sapiens
  misc_RNA (1)...(19): siRNA sense strand
uaaaugcaucccacaagga

SEQ ID NO: 387691 - RNA, 19 nt, Homo sapiens
  misc_RNA (1)...(19): siRNA sense strand
ugaaacacauggcaaaauc

SEQ ID NO: 387692 - RNA, 19 nt, Homo sapiens
  misc_RNA (1)...(19): siRNA sense strand
auacaaugguggcauaaac

SEQ ID NO: 387693 - RNA, 19 nt, Homo sapiens
  misc_RNA (1)...(19): siRNA sense strand
gauacaaugguggcauaaa

SEQ ID NO: 387694 - RNA, 19 nt, Homo sapiens
  misc_RNA (1)...(19): siRNA sense strand
gcuggugaaugcuguguac

SEQ ID NO: 387695 - RNA, 19 nt, Homo sapiens
  misc_RNA (1)...(19): siRNA sense strand
uaaguugcuucauguuaac

SEQ ID NO: 387696 - RNA, 19 nt, Homo sapiens
  misc_RNA (1)...(19): siRNA sense strand
ccucaguccacgcuguuua

SEQ ID NO: 387697 - RNA, 19 nt, Homo sapiens
  misc_RNA (1)...(19): siRNA sense strand
gcugccacaggaaguaaua

SEQ ID NO: 387698 - RNA, 19 nt, Homo sapiens
  misc_RNA (1)...(19): siRNA sense strand
ccaaggcgaaugaccucua

SEQ ID NO: 387699 - RNA, 19 nt, Homo sapiens
  misc_RNA (1)...(19): siRNA sense strand
uucagaaucuaauggaaug

SEQ ID NO: 387700 - RNA, 19 nt, Homo sapiens
  misc_RNA (1)...(19): siRNA sense strand
gccacaggaaguaauauug

SEQ ID NO: 387701 - RNA, 19 nt, Homo sapiens
  misc_RNA (1)...(19): siRNA sense strand
auuauacgaugccaaagug

SEQ ID NO: 387702 - RNA, 19 nt, Homo sapiens
  misc_RNA (1)...(19): siRNA sense strand
gcugaccacccauuccuau

SEQ ID NO: 387703 - RNA, 19 nt, Homo sapiens
  misc_RNA (1)...(19): siRNA sense strand
gaugacucccucucucaga

SEQ ID NO: 387704 - RNA, 19 nt, Homo sapiens
  misc_RNA (1)...(19): siRNA sense strand
ggacccaucaaugaagauu

SEQ ID NO: 387705 - RNA, 19 nt, Homo sapiens
  misc_RNA (1)...(19): siRNA sense strand
gaaaagcaacucccucagu

SEQ ID NO: 387706 - RNA, 19 nt, Homo sapiens
  misc_RNA (1)...(19): siRNA sense strand
ugacaucaucuuauucagu

SEQ ID NO: 387707 - RNA, 19 nt, Homo sapiens
  misc_RNA (1)...(19): siRNA sense strand
ccauuccuauuuguuauca

SEQ ID NO: 387708 - RNA, 19 nt, Homo sapiens
  misc_RNA (1)...(19): siRNA sense strand
gauaaaggcugcaagauua

SEQ ID NO: 387709 - RNA, 19 nt, Homo sapiens
  misc_RNA (1)...(19): siRNA sense strand
gaaauaaccuguauacaug

SEQ ID NO: 387710 - RNA, 19 nt, Homo sapiens
  misc_RNA (1)...(19): siRNA sense strand
gaaaugaaaugguggaguu

SEQ ID NO: 387711 - RNA, 19 nt, Homo sapiens
  misc_RNA (1)...(19): siRNA sense strand
gcagaggguuuaaagcuua

SEQ ID NO: 387712 - RNA, 19 nt, Homo sapiens
  misc_RNA (1)...(19): siRNA sense strand
gaaagacgaugacaagcuu

SEQ ID NO: 387713 - RNA, 19 nt, Homo sapiens
  misc_RNA (1)...(19): siRNA sense strand
caaagccaaugaagaauaa

SEQ ID NO: 387714 - RNA, 19 nt, Homo sapiens
  misc_RNA (1)...(19): siRNA sense strand
gaauagcuuucaagaguuu

SEQ ID NO: 387715 - RNA, 19 nt, Homo sapiens
  misc_RNA (1)...(19): siRNA sense strand
ggaaauaaccuguauacau

SEQ ID NO: 387716 - RNA, 19 nt, Homo sapiens
  misc_RNA (1)...(19): siRNA sense strand
guuauaaacugcugaagaa

SEQ ID NO: 387717 - RNA, 19 nt, Homo sapiens
  misc_RNA (1)...(19): siRNA sense strand
gagaagcuauagccaauga

SEQ ID NO: 387718 - RNA, 19 nt, Homo sapiens
  misc_RNA (1)...(19): siRNA sense strand
uagcaaagcuuggacuuaa

SEQ ID NO: 387719 - RNA, 19 nt, Homo sapiens
  misc_RNA (1)...(19): siRNA sense strand
gcaguuggaagauuuguua

SEQ ID NO: 387720 - RNA, 19 nt, Homo sapiens
  misc_RNA (1)...(19): siRNA sense strand
gaauaugccuguaaacucu

SEQ ID NO: 387721 - RNA, 19 nt, Homo sapiens
  misc_RNA (1)...(19): siRNA sense strand
gaaagaacuucauaguaca

SEQ ID NO: 387722 - RNA, 19 nt, Homo sapiens
  misc_RNA (1)...(19): siRNA sense strand
gcacagagaacgcaucuug

SEQ ID NO: 387723 - RNA, 19 nt, Homo sapiens
  misc_RNA (1)...(19): siRNA sense strand
gaacgcaucuuggaacugu

SEQ ID NO: 387724 - RNA, 19 nt, Homo sapiens
  misc_RNA (1)...(19): siRNA sense strand
agaaaucaaugacguguuu

SEQ ID NO: 387725 - RNA, 19 nt, Homo sapiens
  misc_RNA (1)...(19): siRNA sense strand
agaaagaacuucauaguac

SEQ ID NO: 387726 - RNA, 19 nt, Homo sapiens
  misc_RNA (1)...(19): siRNA sense strand
ucaccacgcuuauuaauca

SEQ ID NO: 387727 - RNA, 19 nt, Homo sapiens
  misc_RNA (1)...(19): siRNA sense strand
gauaauuucugcugcugaa

SEQ ID NO: 387728 - RNA, 19 nt, Homo sapiens
  misc_RNA (1)...(19): siRNA sense strand
gggaagaucaggagaauga

SEQ ID NO: 387729 - RNA, 19 nt, Homo sapiens
  misc_RNA (1)...(19): siRNA sense strand
uaaaguaggagaagcuaua

SEQ ID NO: 387730 - RNA, 19 nt, Homo sapiens
  misc_RNA (1)...(19): siRNA sense strand
ugagaccugucgauuguua

SEQ ID NO: 387731 - RNA, 19 nt, Homo sapiens
  misc_RNA (1)...(19): siRNA sense strand
agacugacauuucaucuau

SEQ ID NO: 387732 - RNA, 19 nt, Homo sapiens
  misc_RNA (1)...(19): siRNA sense strand
gaaccuuucugugacauug

SEQ ID NO: 387733 - RNA, 19 nt, Homo sapiens
  misc_RNA (1)...(19): siRNA sense strand
caacuucuuucacuuuguu

SEQ ID NO: 387734 - RNA, 19 nt, Homo sapiens
  misc_RNA (1)...(19): siRNA sense strand
cagaucaccacgcuuauua

SEQ ID NO: 387735 - RNA, 19 nt, Homo sapiens
  misc_RNA (1)...(19): siRNA sense strand
aaacugggauuugaaagaa

SEQ ID NO: 387736 - RNA, 19 nt, Homo sapiens
  misc_RNA (1)...(19): siRNA sense strand
ugaaccaucuggaaucuga

SEQ ID NO: 387737 - RNA, 19 nt, Homo sapiens
  misc_RNA (1)...(19): siRNA sense strand
uagaagcuuuggcugaaua

SEQ ID NO: 387738 - RNA, 19 nt, Homo sapiens
  misc_RNA (1)...(19): siRNA sense strand
gauaaggucauugaaauug

SEQ ID NO: 387739 - RNA, 19 nt, Homo sapiens
  misc_RNA (1)...(19): siRNA sense strand
gaaggaaauuuagaagcuu

SEQ ID NO: 387740 - RNA, 19 nt, Homo sapiens
  misc_RNA (1)...(19): siRNA sense strand
gaaacaauugcagcacuua

SEQ ID NO: 387741 - RNA, 19 nt, Homo sapiens
  misc_RNA (1)...(19): siRNA sense strand
caugauggcucucuuaguc

SEQ ID NO: 387742 - RNA, 19 nt, Homo sapiens
  misc_RNA (1)...(19): siRNA sense strand
ccaaagccaaugaagaaua

SEQ ID NO: 387743 - RNA, 19 nt, Homo sapiens
  misc_RNA (1)...(19): siRNA sense strand
guugagaccugucgauugu

SEQ ID NO: 387744 - RNA, 19 nt, Homo sapiens
  misc_RNA (1)...(19): siRNA sense strand
gacauuucaucuaucagua

SEQ ID NO: 387745 - RNA, 19 nt, Homo sapiens
  misc_RNA (1)...(19): siRNA sense strand
ucauugaaauugugacuga

SEQ ID NO: 387746 - RNA, 19 nt, Homo sapiens
  misc_RNA (1)...(19): siRNA sense strand
augcaaaccugaaaucauu

SEQ ID NO: 387747 - RNA, 19 nt, Homo sapiens
  misc_RNA (1)...(19): siRNA sense strand
gaagcuauagccaaugaaa

SEQ ID NO: 387748 - RNA, 19 nt, Homo sapiens
  misc_RNA (1)...(19): siRNA sense strand
ggccuauucucuguauuua

SEQ ID NO: 387749 - RNA, 19 nt, Homo sapiens
  misc_RNA (1)...(19): siRNA sense strand
agaaagagcagcuuguuga

SEQ ID NO: 387750 - RNA, 19 nt, Homo sapiens
  misc_RNA (1)...(19): siRNA sense strand
gaaagacuagagaaaguga

SEQ ID NO: 387751 - RNA, 19 nt, Homo sapiens
  misc_RNA (1)...(19): siRNA sense strand
gacggaacauguccaguau

SEQ ID NO: 387752 - RNA, 19 nt, Homo sapiens
  misc_RNA (1)...(19): siRNA sense strand
guccaaauauucagucaau

SEQ ID NO: 387753 - RNA, 19 nt, Homo sapiens
  misc_RNA (1)...(19): siRNA sense strand
caaauaaggacacuaugga

SEQ ID NO: 387754 - RNA, 19 nt, Homo sapiens
  misc_RNA (1)...(19): siRNA sense strand
gaauaaugcaaaccugaaa

SEQ ID NO: 387755 - RNA, 19 nt, Homo sapiens
  misc_RNA (1)...(19): siRNA sense strand
caacacugcugagagaaau

SEQ ID NO: 387756 - RNA, 19 nt, Homo sapiens
  misc_RNA (1)...(19): siRNA sense strand
uggauaaggucauugaaau

SEQ ID NO: 387757 - RNA, 19 nt, Homo sapiens
  misc_RNA (1)...(19): siRNA sense strand
uuacagacauaaccaacuu

SEQ ID NO: 387758 - RNA, 19 nt, Homo sapiens
  misc_RNA (1)...(19): siRNA sense strand
gaagacaagauccaugaug

SEQ ID NO: 387759 - RNA, 19 nt, Homo sapiens
  misc_RNA (1)...(19): siRNA sense strand
uggaguagaaggaaauuua

SEQ ID NO: 387760 - RNA, 19 nt, Homo sapiens
  misc_RNA (1)...(19): siRNA sense strand
aagcaucgcugaagaacug

SEQ ID NO: 387761 - RNA, 19 nt, Homo sapiens
  misc_RNA (1)...(19): siRNA sense strand
ucucacagcuucaaagaca

SEQ ID NO: 387762 - RNA, 19 nt, Homo sapiens
  misc_RNA (1)...(19): siRNA sense strand
uaaacaagcaggagaaaca

SEQ ID NO: 387763 - RNA, 19 nt, Homo sapiens
  misc_RNA (1)...(19): siRNA sense strand
gcaaaccugaaaucauuaa

SEQ ID NO: 387764 - RNA, 19 nt, Homo sapiens
  misc_RNA (1)...(19): siRNA sense strand
ggauaaggucauugaaauu

SEQ ID NO: 387765 - RNA, 19 nt, Homo sapiens
  misc_RNA (1)...(19): siRNA sense strand
gcagaccgaguagucauua

SEQ ID NO: 387766 - RNA, 19 nt, Homo sapiens
  misc_RNA (1)...(19): siRNA sense strand
gcaagcaauucagcgugua

SEQ ID NO: 387767 - RNA, 19 nt, Homo sapiens
  misc_RNA (1)...(19): siRNA sense strand
ugauaaaggcugcaagauu

SEQ ID NO: 387768 - RNA, 19 nt, Homo sapiens
  misc_RNA (1)...(19): siRNA sense strand
gggucucaguuacaaauaa

SEQ ID NO: 387769 - RNA, 19 nt, Homo sapiens
  misc_RNA (1)...(19): siRNA sense strand
ugucaacacugcugagaga

SEQ ID NO: 387770 - RNA, 19 nt, Homo sapiens
  misc_RNA (1)...(19): siRNA sense strand
gggagaaucuuuauuuuca

SEQ ID NO: 387771 - RNA, 19 nt, Homo sapiens
  misc_RNA (1)...(19): siRNA sense strand
uagagaaagugaauagcuu

SEQ ID NO: 387772 - RNA, 19 nt, Homo sapiens
  misc_RNA (1)...(19): siRNA sense strand
ucucagaucaccacgcuua

SEQ ID NO: 387773 - RNA, 19 nt, Homo sapiens
  misc_RNA (1)...(19): siRNA sense strand
ggaugggucucaguuacaa

SEQ ID NO: 387774 - RNA, 19 nt, Homo sapiens
  misc_RNA (1)...(19): siRNA sense strand
gaaguauggcuaccuuuca

SEQ ID NO: 387775 - RNA, 19 nt, Homo sapiens
  misc_RNA (1)...(19): siRNA sense strand
caacuugaaccaucuggaa

SEQ ID NO: 387776 - RNA, 19 nt, Homo sapiens
  misc_RNA (1)...(19): siRNA sense strand
gcugaaacauugacauugc

SEQ ID NO: 387777 - RNA, 19 nt, Homo sapiens
  misc_RNA (1)...(19): siRNA sense strand
gaaaaucagucacagucuu

SEQ ID NO: 387778 - RNA, 19 nt, Homo sapiens
  misc_RNA (1)...(19): siRNA sense strand
gaaaguggcauuggauaag

SEQ ID NO: 387779 - RNA, 19 nt, Homo sapiens
  misc_RNA (1)...(19): siRNA sense strand
guaugaaaguggcauugga

SEQ ID NO: 387780 - RNA, 19 nt, Homo sapiens
  misc_RNA (1)...(19): siRNA sense strand
gaugggcagaucacaauuu

SEQ ID NO: 387781 - RNA, 19 nt, Homo sapiens
  misc_RNA (1)...(19): siRNA sense strand
gaaauugugacugacugua

SEQ ID NO: 387782 - RNA, 19 nt, Homo sapiens
  misc_RNA (1)...(19): siRNA sense strand
uuacuucuuucuucaguga

SEQ ID NO: 387783 - RNA, 19 nt, Homo sapiens
  misc_RNA (1)...(19): siRNA sense strand
gaagaucaggagaaugaga

SEQ ID NO: 387784 - RNA, 19 nt, Homo sapiens
  misc_RNA (1)...(19): siRNA sense strand
ccuguaaacucucugaaca

SEQ ID NO: 387785 - RNA, 19 nt, Homo sapiens
  misc_RNA (1)...(19): siRNA sense strand
gaacuuaagaaagaacuuc

SEQ ID NO: 387786 - RNA, 19 nt, Homo sapiens
  misc_RNA (1)...(19): siRNA sense strand
ggagauagacaaaaugauu

SEQ ID NO: 387787 - RNA, 19 nt, Homo sapiens
  misc_RNA (1)...(19): siRNA sense strand
ugaaaguggcauuggauaa

SEQ ID NO: 387788 - RNA, 19 nt, Homo sapiens
  misc_RNA (1)...(19): siRNA sense strand
gaucaccacgcuuauuaau

SEQ ID NO: 387789 - RNA, 19 nt, Homo sapiens
  misc_RNA (1)...(19): siRNA sense strand
aauaaggacacuauggaua

SEQ ID NO: 387790 - RNA, 19 nt, Homo sapiens
  misc_RNA (1)...(19): siRNA sense strand
caauauggacggaacaugu

SEQ ID NO: 387791 - RNA, 19 nt, Homo sapiens
  misc_RNA (1)...(19): siRNA sense strand
ugacguguuugaaggaaga

SEQ ID NO: 387792 - RNA, 19 nt, Homo sapiens
  misc_RNA (1)...(19): siRNA sense strand
guuaauuucuguguggauu

SEQ ID NO: 387793 - RNA, 19 nt, Homo sapiens
  misc_RNA (1)...(19): siRNA sense strand
guauggaggacuuuacuga

SEQ ID NO: 387794 - RNA, 19 nt, Homo sapiens
  misc_RNA (1)...(19): siRNA sense strand
caagaugaauauugaagcu

SEQ ID NO: 387795 - RNA, 19 nt, Homo sapiens
  misc_RNA (1)...(19): siRNA sense strand
guuggaagauuuguuaaag

SEQ ID NO: 387796 - RNA, 19 nt, Homo sapiens
  misc_RNA (1)...(19): siRNA sense strand
uggagagacugacauuuca

SEQ ID NO: 387797 - RNA, 19 nt, Homo sapiens
  misc_RNA (1)...(19): siRNA sense strand
gcugaaagacgaugacaag

SEQ ID NO: 387798 - RNA, 19 nt, Homo sapiens
  misc_RNA (1)...(19): siRNA sense strand
agaaggaaauuuagaagcu

SEQ ID NO: 387799 - RNA, 19 nt, Homo sapiens
  misc_RNA (1)...(19): siRNA sense strand
gagacugacauuucaucua

SEQ ID NO: 387800 - RNA, 19 nt, Homo sapiens
  misc_RNA (1)...(19): siRNA sense strand
uaaccaacuugaaccaucu

SEQ ID NO: 387801 - RNA, 19 nt, Homo sapiens
  misc_RNA (1)...(19): siRNA sense strand
guugacaaguguauuacga

SEQ ID NO: 387802 - RNA, 19 nt, Homo sapiens
  misc_RNA (1)...(19): siRNA sense strand
ucuaaagguugacaagugu

SEQ ID NO: 387803 - RNA, 19 nt, Homo sapiens
  misc_RNA (1)...(19): siRNA sense strand
uauugaagcuaaacaagca

SEQ ID NO: 387804 - RNA, 19 nt, Homo sapiens
  misc_RNA (1)...(19): siRNA sense strand
gaaaacuucccaggauuua

SEQ ID NO: 387805 - RNA, 19 nt, Homo sapiens
  misc_RNA (1)...(19): siRNA sense strand
gacauuggaagucaucuug

SEQ ID NO: 387806 - RNA, 19 nt, Homo sapiens
  misc_RNA (1)...(19): siRNA sense strand
uaaggucauugaaauugug

SEQ ID NO: 387807 - RNA, 19 nt, Homo sapiens
  misc_RNA (1)...(19): siRNA sense strand
uggaaagacuagagaaagu

SEQ ID NO: 387808 - RNA, 19 nt, Homo sapiens
  misc_RNA (1)...(19): siRNA sense strand
gagagaagcuaucauauuu

SEQ ID NO: 387809 - RNA, 19 nt, Homo sapiens
  misc_RNA (1)...(19): siRNA sense strand
caucgaaacuuaucuguua

SEQ ID NO: 387810 - RNA, 19 nt, Homo sapiens
  misc_RNA (1)...(19): siRNA sense strand
ggaaggagcuggaggagaa

SEQ ID NO: 387811 - RNA, 19 nt, Homo sapiens
  misc_RNA (1)...(19): siRNA sense strand
ggaagaagauaaagucaau

SEQ ID NO: 387812 - RNA, 19 nt, Homo sapiens
  misc_RNA (1)...(19): siRNA sense strand
cggcagacaucgaaacuua

SEQ ID NO: 387813 - RNA, 19 nt, Homo sapiens
  misc_RNA (1)...(19): siRNA sense strand
caugaacccucccaaauuu

SEQ ID NO: 387814 - RNA, 19 nt, Homo sapiens
  misc_RNA (1)...(19): siRNA sense strand
gaagagauuuccgacuuaa

SEQ ID NO: 387815 - RNA, 19 nt, Homo sapiens
  misc_RNA (1)...(19): siRNA sense strand
cagaauagaugacgaacaa

SEQ ID NO: 387816 - RNA, 19 nt, Homo sapiens
  misc_RNA (1)...(19): siRNA sense strand
gauaaaugcuccucucuca

SEQ ID NO: 387817 - RNA, 19 nt, Homo sapiens
  misc_RNA (1)...(19): siRNA sense strand
gcaaauagaagagaaauug

SEQ ID NO: 387818 - RNA, 19 nt, Homo sapiens
  misc_RNA (1)...(19): siRNA sense strand
gcuuugagaucuuugauuu

SEQ ID NO: 387819 - RNA, 19 nt, Homo sapiens
  misc_RNA (1)...(19): siRNA sense strand
gaagaaaucgagcagcuaa

SEQ ID NO: 387820 - RNA, 19 nt, Homo sapiens
  misc_RNA (1)...(19): siRNA sense strand
ggaagaagcagauccagaa

SEQ ID NO: 387821 - RNA, 19 nt, Homo sapiens
  misc_RNA (1)...(19): siRNA sense strand
gaagaaugaccuccaauug

SEQ ID NO: 387822 - RNA, 19 nt, Homo sapiens
  misc_RNA (1)...(19): siRNA sense strand
cgacuuaacugagcagauu

SEQ ID NO: 387823 - RNA, 19 nt, Homo sapiens
  misc_RNA (1)...(19): siRNA sense strand
gguagaagaucaauuuagu

SEQ ID NO: 387824 - RNA, 19 nt, Homo sapiens
  misc_RNA (1)...(19): siRNA sense strand
gagcugaccuugacgaaag

SEQ ID NO: 387825 - RNA, 19 nt, Homo sapiens
  misc_RNA (1)...(19): siRNA sense strand
gaaggagucucugauuuca

SEQ ID NO: 387826 - RNA, 19 nt, Homo sapiens
  misc_RNA (1)...(19): siRNA sense strand
ugacaacuccucaagauuu

SEQ ID NO: 387827 - RNA, 19 nt, Homo sapiens
  misc_RNA (1)...(19): siRNA sense strand
gcaggucgccuuagaagaa

SEQ ID NO: 387828 - RNA, 19 nt, Homo sapiens
  misc_RNA (1)...(19): siRNA sense strand
gcaaugaauaugucacuaa

SEQ ID NO: 387829 - RNA, 19 nt, Homo sapiens
  misc_RNA (1)...(19): siRNA sense strand
gaggaggaccgcaagaaua

SEQ ID NO: 387830 - RNA, 19 nt, Homo sapiens
  misc_RNA (1)...(19): siRNA sense strand
ggacauugcuggcuuugag

SEQ ID NO: 387831 - RNA, 19 nt, Homo sapiens
  misc_RNA (1)...(19): siRNA sense strand
cagagugacguuucaauua

SEQ ID NO: 387832 - RNA, 19 nt, Homo sapiens
  misc_RNA (1)...(19): siRNA sense strand
gaagggagcccacaaguac

SEQ ID NO: 387833 - RNA, 19 nt, Homo sapiens
  misc_RNA (1)...(19): siRNA sense strand
aagaggagaugaauucuga

SEQ ID NO: 387834 - RNA, 19 nt, Homo sapiens
  misc_RNA (1)...(19): siRNA sense strand
gaacugcuggcgacagaua

SEQ ID NO: 387835 - RNA, 19 nt, Homo sapiens
  misc_RNA (1)...(19): siRNA sense strand
ggaagacugugaacaccaa

SEQ ID NO: 387836 - RNA, 19 nt, Homo sapiens
  misc_RNA (1)...(19): siRNA sense strand
uaaagucaauggucuaauc

SEQ ID NO: 387837 - RNA, 19 nt, Homo sapiens
  misc_RNA (1)...(19): siRNA sense strand
caagaagccagaacuaauu

SEQ ID NO: 387838 - RNA, 19 nt, Homo sapiens
  misc_RNA (1)...(19): siRNA sense strand
agaagagauuuccgacuua

SEQ ID NO: 387839 - RNA, 19 nt, Homo sapiens
  misc_RNA (1)...(19): siRNA sense strand
acacaagccugauaaauac

SEQ ID NO: 387840 - RNA, 19 nt, Homo sapiens
  misc_RNA (1)...(19): siRNA sense strand
uuaaugagauggagauuca

SEQ ID NO: 387841 - RNA, 19 nt, Homo sapiens
  misc_RNA (1)...(19): siRNA sense strand
gaagggcaguucauugaca

SEQ ID NO: 387842 - RNA, 19 nt, Homo sapiens
  misc_RNA (1)...(19): siRNA sense strand
ugagaaggaugaagaaauc

SEQ ID NO: 387843 - RNA, 19 nt, Homo sapiens
  misc_RNA (1)...(19): siRNA sense strand
ccaaagccgucuacgagaa

SEQ ID NO: 387844 - RNA, 19 nt, Homo sapiens
  misc_RNA (1)...(19): siRNA sense strand
gccagaagauggaagaaug

SEQ ID NO: 387845 - RNA, 19 nt, Homo sapiens
  misc_RNA (1)...(19): siRNA sense strand
gaacacaagccugauaaau

SEQ ID NO: 387846 - RNA, 19 nt, Homo sapiens
  misc_RNA (1)...(19): siRNA sense strand
agacacaguugauccauga

SEQ ID NO: 387847 - RNA, 19 nt, Homo sapiens
  misc_RNA (1)...(19): siRNA sense strand
gagccaagauugagaagca

SEQ ID NO: 387848 - RNA, 19 nt, Homo sapiens
  misc_RNA (1)...(19): siRNA sense strand
acaaguggcugccggugua

SEQ ID NO: 387849 - RNA, 19 nt, Homo sapiens
  misc_RNA (1)...(19): siRNA sense strand
gcaucaacuucaccaauga

SEQ ID NO: 387850 - RNA, 19 nt, Homo sapiens
  misc_RNA (1)...(19): siRNA sense strand
gaaagucgggaucuacaaa

SEQ ID NO: 387851 - RNA, 19 nt, Homo sapiens
  misc_RNA (1)...(19): siRNA sense strand
ggaaaugccaagacuguga

SEQ ID NO: 387852 - RNA, 19 nt, Homo sapiens
  misc_RNA (1)...(19): siRNA sense strand
gcaaggucauugagaagga

SEQ ID NO: 387853 - RNA, 19 nt, Homo sapiens
  misc_RNA (1)...(19): siRNA sense strand
gagaagagcgagcugaaga

SEQ ID NO: 387854 - RNA, 19 nt, Homo sapiens
  misc_RNA (1)...(19): siRNA sense strand
ggaagaagcaagcagauag

SEQ ID NO: 387855 - RNA, 19 nt, Homo sapiens
  misc_RNA (1)...(19): siRNA sense strand
agauugagaugaacaagaa

SEQ ID NO: 387856 - RNA, 19 nt, Homo sapiens
  misc_RNA (1)...(19): siRNA sense strand
gcaccgaaguggcugacaa

SEQ ID NO: 387857 - RNA, 19 nt, Homo sapiens
  misc_RNA (1)...(19): siRNA sense strand
aagaagagauuuccgacuu

SEQ ID NO: 387858 - RNA, 19 nt, Homo sapiens
  misc_RNA (1)...(19): siRNA sense strand
gcuggaagcugcucagaag

SEQ ID NO: 387859 - RNA, 19 nt, Homo sapiens
  misc_RNA (1)...(19): siRNA sense strand
gacgguagaagaucaauuu

SEQ ID NO: 387860 - RNA, 19 nt, Homo sapiens
  misc_RNA (1)...(19): siRNA sense strand
cagagaagcuccucaacuc

SEQ ID NO: 387861 - RNA, 19 nt, Homo sapiens
  misc_RNA (1)...(19): siRNA sense strand
caacuucaccaaugagaaa

SEQ ID NO: 387862 - RNA, 19 nt, Homo sapiens
  misc_RNA (1)...(19): siRNA sense strand
gcaguucauugacagcaaa

SEQ ID NO: 387863 - RNA, 19 nt, Homo sapiens
  misc_RNA (1)...(19): siRNA sense strand
ccacagagaacaagguaaa

SEQ ID NO: 387864 - RNA, 19 nt, Homo sapiens
  misc_RNA (1)...(19): siRNA sense strand
ggugguggcugccuacaga

SEQ ID NO: 387865 - RNA, 19 nt, Homo sapiens
  misc_RNA (1)...(19): siRNA sense strand
acacgcagcuguccagaug

SEQ ID NO: 387866 - RNA, 19 nt, Homo sapiens
  misc_RNA (1)...(19): siRNA sense strand
gaagaaaugacagcacuug

SEQ ID NO: 387867 - RNA, 19 nt, Homo sapiens
  misc_RNA (1)...(19): siRNA sense strand
gaugucugauucccaauga

SEQ ID NO: 387868 - RNA, 19 nt, Homo sapiens
  misc_RNA (1)...(19): siRNA sense strand
gacaacuccucaagauuug

SEQ ID NO: 387869 - RNA, 19 nt, Homo sapiens
  misc_RNA (1)...(19): siRNA sense strand
ccaagacugugaggaauga

SEQ ID NO: 387870 - RNA, 19 nt, Homo sapiens
  misc_RNA (1)...(19): siRNA sense strand
ucaaggagaugacuuacca

SEQ ID NO: 387871 - RNA, 19 nt, Homo sapiens
  misc_RNA (1)...(19): siRNA sense strand
aacacaagccugauaaaua

SEQ ID NO: 387872 - RNA, 19 nt, Homo sapiens
  misc_RNA (1)...(19): siRNA sense strand
cgggagccgugaugcauua

SEQ ID NO: 387873 - RNA, 19 nt, Homo sapiens
  misc_RNA (1)...(19): siRNA sense strand
agagugacguuucaauuau

SEQ ID NO: 387874 - RNA, 19 nt, Homo sapiens
  misc_RNA (1)...(19): siRNA sense strand
gacaaugccuaucaguuca

SEQ ID NO: 387875 - RNA, 19 nt, Homo sapiens
  misc_RNA (1)...(19): siRNA sense strand
gaagagggaggcugaguuc

SEQ ID NO: 387876 - RNA, 19 nt, Homo sapiens
  misc_RNA (1)...(19): siRNA sense strand
ggaaggagaucugaaaaug

SEQ ID NO: 387877 - RNA, 19 nt, Homo sapiens
  misc_RNA (1)...(19): siRNA sense strand
gaaaugacagcacuugaag

SEQ ID NO: 387878 - RNA, 19 nt, Homo sapiens
  misc_RNA (1)...(19): siRNA sense strand
acagacaccuccuucaaga

SEQ ID NO: 387879 - RNA, 19 nt, Homo sapiens
  misc_RNA (1)...(19): siRNA sense strand
ccaagcgugucauccagua

SEQ ID NO: 387880 - RNA, 19 nt, Homo sapiens
  misc_RNA (1)...(19): siRNA sense strand
ccugauaaauaccaagaaa

SEQ ID NO: 387881 - RNA, 19 nt, Homo sapiens
  misc_RNA (1)...(19): siRNA sense strand
uggaggagcuggaggaaau

SEQ ID NO: 387882 - RNA, 19 nt, Homo sapiens
  misc_RNA (1)...(19): siRNA sense strand
gaacaugcagaaagcaaga

SEQ ID NO: 387883 - RNA, 19 nt, Homo sapiens
  misc_RNA (1)...(19): siRNA sense strand
caaaauaaaugccaagcuu

SEQ ID NO: 387884 - RNA, 19 nt, Homo sapiens
  misc_RNA (1)...(19): siRNA sense strand
aagcuucucuccuuccuuu

SEQ ID NO: 387885 - RNA, 19 nt, Homo sapiens
  misc_RNA (1)...(19): siRNA sense strand
gaagguuggcaaugaauau

SEQ ID NO: 387886 - RNA, 19 nt, Homo sapiens
  misc_RNA (1)...(19): siRNA sense strand
ugagagaagcuaucauauu

SEQ ID NO: 387887 - RNA, 19 nt, Homo sapiens
  misc_RNA (1)...(19): siRNA sense strand
ggugaagguuggcaaugaa

SEQ ID NO: 387888 - RNA, 19 nt, Homo sapiens
  misc_RNA (1)...(19): siRNA sense strand
caugauggcugaggagcua

SEQ ID NO: 387889 - RNA, 19 nt, Homo sapiens
  misc_RNA (1)...(19): siRNA sense strand
ccaugaacccucccaaauu

SEQ ID NO: 387890 - RNA, 19 nt, Homo sapiens
  misc_RNA (1)...(19): siRNA sense strand
aggccaaagugaagucuua

SEQ ID NO: 387891 - RNA, 19 nt, Homo sapiens
  misc_RNA (1)...(19): siRNA sense strand
gaagaagcagauccagaaa

SEQ ID NO: 387892 - RNA, 19 nt, Homo sapiens
  misc_RNA (1)...(19): siRNA sense strand
gaacaaguccacaguuugc

SEQ ID NO: 387893 - RNA, 19 nt, Homo sapiens
  misc_RNA (1)...(19): siRNA sense strand
agaaugaccuccaauugca

SEQ ID NO: 387894 - RNA, 19 nt, Homo sapiens
  misc_RNA (1)...(19): siRNA sense strand
gggugaagguuggcaauga

SEQ ID NO: 387895 - RNA, 19 nt, Homo sapiens
  misc_RNA (1)...(19): siRNA sense strand
gaagauggagggagaccuu

SEQ ID NO: 387896 - RNA, 19 nt, Homo sapiens
  misc_RNA (1)...(19): siRNA sense strand
gauaaagucaauggucuaa

SEQ ID NO: 387897 - RNA, 19 nt, Homo sapiens
  misc_RNA (1)...(19): siRNA sense strand
ugacagcacuugaagaaaa

SEQ ID NO: 387898 - RNA, 19 nt, Homo sapiens
  misc_RNA (1)...(19): siRNA sense strand
gauccucuaugcugacuuc

SEQ ID NO: 387899 - RNA, 19 nt, Homo sapiens
  misc_RNA (1)...(19): siRNA sense strand
ucaagaacaagcuguauga

SEQ ID NO: 387900 - RNA, 19 nt, Homo sapiens
  misc_RNA (1)...(19): siRNA sense strand
ggaagaggagugcauguuc

SEQ ID NO: 387901 - RNA, 19 nt, Homo sapiens
  misc_RNA (1)...(19): siRNA sense strand
caagacuccuggugugaug

SEQ ID NO: 387902 - RNA, 19 nt, Homo sapiens
  misc_RNA (1)...(19): siRNA sense strand
ugacaaugccuaucaguuc

SEQ ID NO: 387903 - RNA, 19 nt, Homo sapiens
  misc_RNA (1)...(19): siRNA sense strand
gaagaaaccaaggccaaga

SEQ ID NO: 387904 - RNA, 19 nt, Homo sapiens
  misc_RNA (1)...(19): siRNA sense strand
acgaacaaguccacaguuu

SEQ ID NO: 387905 - RNA, 19 nt, Homo sapiens
  misc_RNA (1)...(19): siRNA sense strand
caagagagacauugaugau

SEQ ID NO: 387906 - RNA, 19 nt, Homo sapiens
  misc_RNA (1)...(19): siRNA sense strand
uaauugaccugcuucugau

SEQ ID NO: 387907 - RNA, 19 nt, Homo sapiens
  misc_RNA (1)...(19): siRNA sense strand
cugaggagcuaaagaagga

SEQ ID NO: 387908 - RNA, 19 nt, Homo sapiens
  misc_RNA (1)...(19): siRNA sense strand
gcucaaggcuucagaaaua

SEQ ID NO: 387909 - RNA, 19 nt, Homo sapiens
  misc_RNA (1)...(19): siRNA sense strand
gagcauggcuucuaucuga

SEQ ID NO: 387910 - RNA, 19 nt, Homo sapiens
  misc_RNA (1)...(19): siRNA sense strand
gcacggagcugacacuguu

SEQ ID NO: 387911 - RNA, 19 nt, Homo sapiens
  misc_RNA (1)...(19): siRNA sense strand
gaggagaagucaccaaaga

SEQ ID NO: 387912 - RNA, 19 nt, Homo sapiens
  misc_RNA (1)...(19): siRNA sense strand
caaagagacuacagagaaa

SEQ ID NO: 387913 - RNA, 19 nt, Homo sapiens
  misc_RNA (1)...(19): siRNA sense strand
ggaaucaacuuguaugagu

SEQ ID NO: 387914 - RNA, 19 nt, Homo sapiens
  misc_RNA (1)...(19): siRNA sense strand
agacagacauucuuugauu

SEQ ID NO: 387915 - RNA, 19 nt, Homo sapiens
  misc_RNA (1)...(19): siRNA sense strand
cgacacggcuccugagaaa

SEQ ID NO: 387916 - RNA, 19 nt, Homo sapiens
  misc_RNA (1)...(19): siRNA sense strand
gaaagaaggacaaagacaa

SEQ ID NO: 387917 - RNA, 19 nt, Homo sapiens
  misc_RNA (1)...(19): siRNA sense strand
ccaaagagacuacagagaa

SEQ ID NO: 387918 - RNA, 19 nt, Homo sapiens
  misc_RNA (1)...(19): siRNA sense strand
gcagaggcccuaaagcuuu

SEQ ID NO: 387919 - RNA, 19 nt, Homo sapiens
  misc_RNA (1)...(19): siRNA sense strand
agaaccagcugucuccaua

SEQ ID NO: 387920 - RNA, 19 nt, Homo sapiens
  misc_RNA (1)...(19): siRNA sense strand
ggagacagacauucuuuga

SEQ ID NO: 387921 - RNA, 19 nt, Homo sapiens
  misc_RNA (1)...(19): siRNA sense strand
ggaucaagcuguuaugaac

SEQ ID NO: 387922 - RNA, 19 nt, Homo sapiens
  misc_RNA (1)...(19): siRNA sense strand
uguaugaguugaugaagaa

SEQ ID NO: 387923 - RNA, 19 nt, Homo sapiens
  misc_RNA (1)...(19): siRNA sense strand
gguagacgcucccaagaag

SEQ ID NO: 387924 - RNA, 19 nt, Homo sapiens
  misc_RNA (1)...(19): siRNA sense strand
gggccaagccucuguuaaa

SEQ ID NO: 387925 - RNA, 19 nt, Homo sapiens
  misc_RNA (1)...(19): siRNA sense strand
cgaagcauguucagcauuc

SEQ ID NO: 387926 - RNA, 19 nt, Homo sapiens
  misc_RNA (1)...(19): siRNA sense strand
ccugagaaauuuagcaaga

SEQ ID NO: 387927 - RNA, 19 nt, Homo sapiens
  misc_RNA (1)...(19): siRNA sense strand
gcgcuucacucucucuguu

SEQ ID NO: 387928 - RNA, 19 nt, Homo sapiens
  misc_RNA (1)...(19): siRNA sense strand
ccaaggaccucacgauggu

SEQ ID NO: 387929 - RNA, 19 nt, Homo sapiens
  misc_RNA (1)...(19): siRNA sense strand
ucagaaagaaggacaaaga

SEQ ID NO: 387930 - RNA, 19 nt, Homo sapiens
  misc_RNA (1)...(19): siRNA sense strand
guucaaggcugucaucacu

SEQ ID NO: 387931 - RNA, 19 nt, Homo sapiens
  misc_RNA (1)...(19): siRNA sense strand
ugucaucacucgagcagaa

SEQ ID NO: 387932 - RNA, 19 nt, Homo sapiens
  misc_RNA (1)...(19): siRNA sense strand
ugaagguucugcaugauca

SEQ ID NO: 387933 - RNA, 19 nt, Homo sapiens
  misc_RNA (1)...(19): siRNA sense strand
ucagcugccucaacuggua

SEQ ID NO: 387934 - RNA, 19 nt, Homo sapiens
  misc_RNA (1)...(19): siRNA sense strand
ccaagccucuguuaaaguc

SEQ ID NO: 387935 - RNA, 19 nt, Homo sapiens
  misc_RNA (1)...(19): siRNA sense strand
ccagcugucuccauaugaa

SEQ ID NO: 387936 - RNA, 19 nt, Homo sapiens
  misc_RNA (1)...(19): siRNA sense strand
uuucaaggcuucagucugu

SEQ ID NO: 387937 - RNA, 19 nt, Homo sapiens
  misc_RNA (1)...(19): siRNA sense strand
gacagacauucuuugauuc

SEQ ID NO: 387938 - RNA, 19 nt, Homo sapiens
  misc_RNA (1)...(19): siRNA sense strand
acacggcuccugagaaauu

SEQ ID NO: 387939 - RNA, 19 nt, Homo sapiens
  misc_RNA (1)...(19): siRNA sense strand
guauacacguacauccaaa

SEQ ID NO: 387940 - RNA, 19 nt, Homo sapiens
  misc_RNA (1)...(19): siRNA sense strand
ccuggaagcucucagaaag

SEQ ID NO: 387941 - RNA, 19 nt, Homo sapiens
  misc_RNA (1)...(19): siRNA sense strand
uggaagcucucagaaagaa

SEQ ID NO: 387942 - RNA, 19 nt, Homo sapiens
  misc_RNA (1)...(19): siRNA sense strand
cgcaaucacuucugcauca

SEQ ID NO: 387943 - RNA, 19 nt, Homo sapiens
  misc_RNA (1)...(19): siRNA sense strand
acaauguggugcauaugaa

SEQ ID NO: 387944 - RNA, 19 nt, Homo sapiens
  misc_RNA (1)...(19): siRNA sense strand
gaaaguauacacguacauc

SEQ ID NO: 387945 - RNA, 19 nt, Homo sapiens
  misc_RNA (1)...(19): siRNA sense strand
ggagaagucaccaaagaag

SEQ ID NO: 387946 - RNA, 19 nt, Homo sapiens
  misc_RNA (1)...(19): siRNA sense strand
guucggcgcuucacucucu

SEQ ID NO: 387947 - RNA, 19 nt, Homo sapiens
  misc_RNA (1)...(19): siRNA sense strand
ccuacaauguggugcauau

SEQ ID NO: 387948 - RNA, 19 nt, Homo sapiens
  misc_RNA (1)...(19): siRNA sense strand
ucacauugccuaccgcuau

SEQ ID NO: 387949 - RNA, 19 nt, Homo sapiens
  misc_RNA (1)...(19): siRNA sense strand
aaagauacccagauuccaa

SEQ ID NO: 387950 - RNA, 19 nt, Homo sapiens
  misc_RNA (1)...(19): siRNA sense strand
ccagccggcuucauucaga

SEQ ID NO: 387951 - RNA, 19 nt, Homo sapiens
  misc_RNA (1)...(19): siRNA sense strand
gagcucaaggcuucagaaa

SEQ ID NO: 387952 - RNA, 19 nt, Homo sapiens
  misc_RNA (1)...(19): siRNA sense strand
cgacguggccauugacaug

SEQ ID NO: 387953 - RNA, 19 nt, Homo sapiens
  misc_RNA (1)...(19): siRNA sense strand
ggccaagccucuguuaaag

SEQ ID NO: 387954 - RNA, 19 nt, Homo sapiens
  misc_RNA (1)...(19): siRNA sense strand
aaagacaacaccuacaaug

SEQ ID NO: 387955 - RNA, 19 nt, Homo sapiens
  misc_RNA (1)...(19): siRNA sense strand
ggaacaagaagagguuuca

SEQ ID NO: 387956 - RNA, 19 nt, Homo sapiens
  misc_RNA (1)...(19): siRNA sense strand
caagaacacaaacguuuua

SEQ ID NO: 387957 - RNA, 19 nt, Homo sapiens
  misc_RNA (1)...(19): siRNA sense strand
caaggaaggacaagguuca

SEQ ID NO: 387958 - RNA, 19 nt, Homo sapiens
  misc_RNA (1)...(19): siRNA sense strand
ccuacgacguggccauuga

SEQ ID NO: 387959 - RNA, 19 nt, Homo sapiens
  misc_RNA (1)...(19): siRNA sense strand
agacaacaccuacaaugug

SEQ ID NO: 387960 - RNA, 19 nt, Homo sapiens
  misc_RNA (1)...(19): siRNA sense strand
acaaagacaacaccuacaa

SEQ ID NO: 387961 - RNA, 19 nt, Homo sapiens
  misc_RNA (1)...(19): siRNA sense strand
cagaggagaagucaccaaa

SEQ ID NO: 387962 - RNA, 19 nt, Homo sapiens
  misc_RNA (1)...(19): siRNA sense strand
gacuuuggaucaagcuguu

SEQ ID NO: 387963 - RNA, 19 nt, Homo sapiens
  misc_RNA (1)...(19): siRNA sense strand
ugaugagcauggcuucuau

SEQ ID NO: 387964 - RNA, 19 nt, Homo sapiens
  misc_RNA (1)...(19): siRNA sense strand
gaaccuucucuucgcauga

SEQ ID NO: 387965 - RNA, 19 nt, Homo sapiens
  misc_RNA (1)...(19): siRNA sense strand
cagaagguguuugguaugg

SEQ ID NO: 387966 - RNA, 19 nt, Homo sapiens
  misc_RNA (1)...(19): siRNA sense strand
gcaucacggcggaguugua

SEQ ID NO: 387967 - RNA, 19 nt, Homo sapiens
  misc_RNA (1)...(19): siRNA sense strand
guuaugaacaccagaaagu

SEQ ID NO: 387968 - RNA, 19 nt, Homo sapiens
  misc_RNA (1)...(19): siRNA sense strand
ccuuugagcuccugggaau

SEQ ID NO: 387969 - RNA, 19 nt, Homo sapiens
  misc_RNA (1)...(19): siRNA sense strand
caaagacaacaccuacaau

SEQ ID NO: 387970 - RNA, 19 nt, Homo sapiens
  misc_RNA (1)...(19): siRNA sense strand
gaaccagcugucuccauau

SEQ ID NO: 387971 - RNA, 19 nt, Homo sapiens
  misc_RNA (1)...(19): siRNA sense strand
gaagcauguucagcauuca

SEQ ID NO: 387972 - RNA, 19 nt, Homo sapiens
  misc_RNA (1)...(19): siRNA sense strand
ggaccaggcccucaagcau

SEQ ID NO: 387973 - RNA, 19 nt, Homo sapiens
  misc_RNA (1)...(19): siRNA sense strand
cucagaagguguuugguau

SEQ ID NO: 387974 - RNA, 19 nt, Homo sapiens
  misc_RNA (1)...(19): siRNA sense strand
ucucagaagguguuuggua

SEQ ID NO: 387975 - RNA, 19 nt, Homo sapiens
  misc_RNA (1)...(19): siRNA sense strand
gcagaugcuuucgguagag

SEQ ID NO: 387976 - RNA, 19 nt, Homo sapiens
  misc_RNA (1)...(19): siRNA sense strand
caggagacagacauucuuu

SEQ ID NO: 387977 - RNA, 19 nt, Homo sapiens
  misc_RNA (1)...(19): siRNA sense strand
cagaaaguauacacguaca

SEQ ID NO: 387978 - RNA, 19 nt, Homo sapiens
  misc_RNA (1)...(19): siRNA sense strand
aaauuuagcaagacgaguu

SEQ ID NO: 387979 - RNA, 19 nt, Homo sapiens
  misc_RNA (1)...(19): siRNA sense strand
gguucugcaugaucacauu

SEQ ID NO: 387980 - RNA, 19 nt, Homo sapiens
  misc_RNA (1)...(19): siRNA sense strand
gcaagacgaguuuugauga

SEQ ID NO: 387981 - RNA, 19 nt, Homo sapiens
  misc_RNA (1)...(19): siRNA sense strand
ccauaugaacaaagugaaa

SEQ ID NO: 387982 - RNA, 19 nt, Homo sapiens
  misc_RNA (1)...(19): siRNA sense strand
agacauucuuugauuccaa

SEQ ID NO: 387983 - RNA, 19 nt, Homo sapiens
  misc_RNA (1)...(19): siRNA sense strand
uaugaacaccagaaaguau

SEQ ID NO: 387984 - RNA, 19 nt, Homo sapiens
  misc_RNA (1)...(19): siRNA sense strand
accagaaaguauacacgua

SEQ ID NO: 387985 - RNA, 19 nt, Homo sapiens
  misc_RNA (1)...(19): siRNA sense strand
gacaaggaaggacaagguu

SEQ ID NO: 387986 - RNA, 19 nt, Homo sapiens
  misc_RNA (1)...(19): siRNA sense strand
cucaagaacacaaacguuu

SEQ ID NO: 387987 - RNA, 19 nt, Homo sapiens
  misc_RNA (1)...(19): siRNA sense strand
ggcagaggcccuaaagcuu

SEQ ID NO: 387988 - RNA, 19 nt, Homo sapiens
  misc_RNA (1)...(19): siRNA sense strand
gauccuggaagcucucaga

SEQ ID NO: 387989 - RNA, 19 nt, Homo sapiens
  misc_RNA (1)...(19): siRNA sense strand
aaccagcugucuccauaug

SEQ ID NO: 387990 - RNA, 19 nt, Homo sapiens
  misc_RNA (1)...(19): siRNA sense strand
ucacuucugcaucaccuuu

SEQ ID NO: 387991 - RNA, 19 nt, Homo sapiens
  misc_RNA (1)...(19): siRNA sense strand
uacaauguggugcauauga

SEQ ID NO: 387992 - RNA, 19 nt, Homo sapiens
  misc_RNA (1)...(19): siRNA sense strand
gagacagacauucuuugau

SEQ ID NO: 387993 - RNA, 19 nt, Homo sapiens
  misc_RNA (1)...(19): siRNA sense strand
ugauggagcugaagauccu

SEQ ID NO: 387994 - RNA, 19 nt, Homo sapiens
  misc_RNA (1)...(19): siRNA sense strand
cacauugccuaccgcuaug

SEQ ID NO: 387995 - RNA, 19 nt, Homo sapiens
  misc_RNA (1)...(19): siRNA sense strand
gagaucaccaaagagacua

SEQ ID NO: 387996 - RNA, 19 nt, Homo sapiens
  misc_RNA (1)...(19): siRNA sense strand
gaagucaccaaagaagcaa

SEQ ID NO: 387997 - RNA, 19 nt, Homo sapiens
  misc_RNA (1)...(19): siRNA sense strand
ucaggaacaagaagagguu

SEQ ID NO: 387998 - RNA, 19 nt, Homo sapiens
  misc_RNA (1)...(19): siRNA sense strand
ccuuuccacccuagcauua

SEQ ID NO: 387999 - RNA, 19 nt, Homo sapiens
  misc_RNA (1)...(19): siRNA sense strand
gcuucagucuguccauagu

SEQ ID NO: 388000 - RNA, 19 nt, Homo sapiens
  misc_RNA (1)...(19): siRNA sense strand
ucaccaaagagacuacaga

SEQ ID NO: 388001 - RNA, 19 nt, Homo sapiens
  misc_RNA (1)...(19): siRNA sense strand
gcagaggagaagucaccaa

SEQ ID NO: 388002 - RNA, 19 nt, Homo sapiens
  misc_RNA (1)...(19): siRNA sense strand
augaacaccagaaaguaua

SEQ ID NO: 388003 - RNA, 19 nt, Homo sapiens
  misc_RNA (1)...(19): siRNA sense strand
gaucucaagcccgaaaaua

SEQ ID NO: 388004 - RNA, 19 nt, Homo sapiens
  misc_RNA (1)...(19): siRNA sense strand
cagaugcuuucgguagaga

SEQ ID NO: 388005 - RNA, 19 nt, Homo sapiens
  misc_RNA (1)...(19): siRNA sense strand
cagaggcccuaaagcuuuu

SEQ ID NO: 388006 - RNA, 19 nt, Homo sapiens
  misc_RNA (1)...(19): siRNA sense strand
guaugggaaccuucucuuc

SEQ ID NO: 388007 - RNA, 19 nt, Homo sapiens
  misc_RNA (1)...(19): siRNA sense strand
ccaggagacagacauucuu

SEQ ID NO: 388008 - RNA, 19 nt, Homo sapiens
  misc_RNA (1)...(19): siRNA sense strand
guaccucgcuuaugcuuaa

SEQ ID NO: 388009 - RNA, 19 nt, Homo sapiens
  misc_RNA (1)...(19): siRNA sense strand
gcauguugcuuagauauuu

SEQ ID NO: 388010 - RNA, 19 nt, Homo sapiens
  misc_RNA (1)...(19): siRNA sense strand
gugaagaaccuuugugaua

SEQ ID NO: 388011 - RNA, 19 nt, Homo sapiens
  misc_RNA (1)...(19): siRNA sense strand
ugaagaaccuuugugauau

SEQ ID NO: 388012 - RNA, 19 nt, Homo sapiens
  misc_RNA (1)...(19): siRNA sense strand
gaagaaccuuugugauauc

SEQ ID NO: 388013 - RNA, 19 nt, Homo sapiens
  misc_RNA (1)...(19): siRNA sense strand
cagaauggcuccaauccuu

SEQ ID NO: 388014 - RNA, 19 nt, Homo sapiens
  misc_RNA (1)...(19): siRNA sense strand
gcccaaagcuggcaaagag

SEQ ID NO: 388015 - RNA, 19 nt, Homo sapiens
  misc_RNA (1)...(19): siRNA sense strand
uaaugaagcucaagaaacu

SEQ ID NO: 388016 - RNA, 19 nt, Homo sapiens
  misc_RNA (1)...(19): siRNA sense strand
ucagggaucuguaugaaau

SEQ ID NO: 388017 - RNA, 19 nt, Homo sapiens
  misc_RNA (1)...(19): siRNA sense strand
gcaaagagaaggugguaau

SEQ ID NO: 388018 - RNA, 19 nt, Homo sapiens
  misc_RNA (1)...(19): siRNA sense strand
gaaacagaauggcuccaau

SEQ ID NO: 388019 - RNA, 19 nt, Homo sapiens
  misc_RNA (1)...(19): siRNA sense strand
ugaaacgaguuacauguga

SEQ ID NO: 388020 - RNA, 19 nt, Homo sapiens
  misc_RNA (1)...(19): siRNA sense strand
aagagaaggugguaaugaa

SEQ ID NO: 388021 - RNA, 19 nt, Homo sapiens
  misc_RNA (1)...(19): siRNA sense strand
aaagagaaauggcgaacga

SEQ ID NO: 388022 - RNA, 19 nt, Homo sapiens
  misc_RNA (1)...(19): siRNA sense strand
ugaaccgugugauuuauuu

SEQ ID NO: 388023 - RNA, 19 nt, Homo sapiens
  misc_RNA (1)...(19): siRNA sense strand
ggucuuguguccucuauag

SEQ ID NO: 388024 - RNA, 19 nt, Homo sapiens
  misc_RNA (1)...(19): siRNA sense strand
gcacuggucguaaaugguu

SEQ ID NO: 388025 - RNA, 19 nt, Homo sapiens
  misc_RNA (1)...(19): siRNA sense strand
ucgcuuaugcuuaacauua

SEQ ID NO: 388026 - RNA, 19 nt, Homo sapiens
  misc_RNA (1)...(19): siRNA sense strand
gcucaccacuacuacuauu

SEQ ID NO: 388027 - RNA, 19 nt, Homo sapiens
  misc_RNA (1)...(19): siRNA sense strand
gugauauccugaacccuuu

SEQ ID NO: 388028 - RNA, 19 nt, Homo sapiens
  misc_RNA (1)...(19): siRNA sense strand
gagcacuggucguaaaugg

SEQ ID NO: 388029 - RNA, 19 nt, Homo sapiens
  misc_RNA (1)...(19): siRNA sense strand
caacugagcagagcauuca

SEQ ID NO: 388030 - RNA, 19 nt, Homo sapiens
  misc_RNA (1)...(19): siRNA sense strand
caugaucacuguggcauau

SEQ ID NO: 388031 - RNA, 19 nt, Homo sapiens
  misc_RNA (1)...(19): siRNA sense strand
gguaaugaagcucaagaaa

SEQ ID NO: 388032 - RNA, 19 nt, Homo sapiens
  misc_RNA (1)...(19): siRNA sense strand
ggacuuggaggucuugugu

SEQ ID NO: 388033 - RNA, 19 nt, Homo sapiens
  misc_RNA (1)...(19): siRNA sense strand
gcuccaauccuuucuacuu

SEQ ID NO: 388034 - RNA, 19 nt, Homo sapiens
  misc_RNA (1)...(19): siRNA sense strand
gaugaaacgaguuacaugu

SEQ ID NO: 388035 - RNA, 19 nt, Homo sapiens
  misc_RNA (1)...(19): siRNA sense strand
ccucuggcaucaacaaaga

SEQ ID NO: 388036 - RNA, 19 nt, Homo sapiens
  misc_RNA (1)...(19): siRNA sense strand
gggcaaagaaagagaaauc

SEQ ID NO: 388037 - RNA, 19 nt, Homo sapiens
  misc_RNA (1)...(19): siRNA sense strand
uggcauauccucagaugaa

SEQ ID NO: 388038 - RNA, 19 nt, Homo sapiens
  misc_RNA (1)...(19): siRNA sense strand
uagcaggcaugaucacugu

SEQ ID NO: 388039 - RNA, 19 nt, Homo sapiens
  misc_RNA (1)...(19): siRNA sense strand
cguaaaugguucagacuag

SEQ ID NO: 388040 - RNA, 19 nt, Homo sapiens
  misc_RNA (1)...(19): siRNA sense strand
ggucucaccucuggcauca

SEQ ID NO: 388041 - RNA, 19 nt, Homo sapiens
  misc_RNA (1)...(19): siRNA sense strand
ugugagcacuggucguaaa

SEQ ID NO: 388042 - RNA, 19 nt, Homo sapiens
  misc_RNA (1)...(19): siRNA sense strand
caaccugaaccgugugauu

SEQ ID NO: 388043 - RNA, 19 nt, Homo sapiens
  misc_RNA (1)...(19): siRNA sense strand
guaaugaagcucaagaaac

SEQ ID NO: 388044 - RNA, 19 nt, Homo sapiens
  misc_RNA (1)...(19): siRNA sense strand
ggaaacagaauggcuccaa

SEQ ID NO: 388045 - RNA, 19 nt, Homo sapiens
  misc_RNA (1)...(19): siRNA sense strand
gggcugcucaccacuacua

SEQ ID NO: 388046 - RNA, 19 nt, Homo sapiens
  misc_RNA (1)...(19): siRNA sense strand
ucaugccacugaccuggua

SEQ ID NO: 388047 - RNA, 19 nt, Homo sapiens
  misc_RNA (1)...(19): siRNA sense strand
aaagagaaggugguaauga

SEQ ID NO: 388048 - RNA, 19 nt, Homo sapiens
  misc_RNA (1)...(19): siRNA sense strand
caugcauguugcuuagaua

SEQ ID NO: 388049 - RNA, 19 nt, Homo sapiens
  misc_RNA (1)...(19): siRNA sense strand
ccaaagcuggcaaagagaa

SEQ ID NO: 388050 - RNA, 19 nt, Homo sapiens
  misc_RNA (1)...(19): siRNA sense strand
gcuuagauauuuguuagag

SEQ ID NO: 388051 - RNA, 19 nt, Homo sapiens
  misc_RNA (1)...(19): siRNA sense strand
cagacuaggcaauguggua

SEQ ID NO: 388052 - RNA, 19 nt, Homo sapiens
  misc_RNA (1)...(19): siRNA sense strand
gcagaugaaacgaguuaca

SEQ ID NO: 388053 - RNA, 19 nt, Homo sapiens
  misc_RNA (1)...(19): siRNA sense strand
ugucagggaucuguaugaa

SEQ ID NO: 388054 - RNA, 19 nt, Homo sapiens
  misc_RNA (1)...(19): siRNA sense strand
cuacuacuauucucuucug

SEQ ID NO: 388055 - RNA, 19 nt, Homo sapiens
  misc_RNA (1)...(19): siRNA sense strand
gaauggcuccaauccuuuc

SEQ ID NO: 388056 - RNA, 19 nt, Homo sapiens
  misc_RNA (1)...(19): siRNA sense strand
ccugguaccucgcuuaugc

SEQ ID NO: 388057 - RNA, 19 nt, Homo sapiens
  misc_RNA (1)...(19): siRNA sense strand
ccaauccuuucuacuucuu

SEQ ID NO: 388058 - RNA, 19 nt, Homo sapiens
  misc_RNA (1)...(19): siRNA sense strand
uaacauuagccaaccugaa

SEQ ID NO: 388059 - RNA, 19 nt, Homo sapiens
  misc_RNA (1)...(19): siRNA sense strand
gcaaagaaagagaaaucag

SEQ ID NO: 388060 - RNA, 19 nt, Homo sapiens
  misc_RNA (1)...(19): siRNA sense strand
cugcagaugaaacgaguua

SEQ ID NO: 388061 - RNA, 19 nt, Homo sapiens
  misc_RNA (1)...(19): siRNA sense strand
cauguugcuuagauauuug

SEQ ID NO: 388062 - RNA, 19 nt, Homo sapiens
  misc_RNA (1)...(19): siRNA sense strand
gcaugaucacuguggcaua

SEQ ID NO: 388063 - RNA, 19 nt, Homo sapiens
  misc_RNA (1)...(19): siRNA sense strand
caaagagaaggugguaaug

SEQ ID NO: 388064 - RNA, 19 nt, Homo sapiens
  misc_RNA (1)...(19): siRNA sense strand
gagggcugcucaccacuac

SEQ ID NO: 388065 - RNA, 19 nt, Homo sapiens
  misc_RNA (1)...(19): siRNA sense strand
gagccacucaguacacaug

SEQ ID NO: 388066 - RNA, 19 nt, Homo sapiens
  misc_RNA (1)...(19): siRNA sense strand
cagugaagaaccuuuguga

SEQ ID NO: 388067 - RNA, 19 nt, Homo sapiens
  misc_RNA (1)...(19): siRNA sense strand
gcaacugagcagagcauuc

SEQ ID NO: 388068 - RNA, 19 nt, Homo sapiens
  misc_RNA (1)...(19): siRNA sense strand
aaacagaauggcuccaauc

SEQ ID NO: 388069 - RNA, 19 nt, Homo sapiens
  misc_RNA (1)...(19): siRNA sense strand
ccacuacuacuauucucuu

SEQ ID NO: 388070 - RNA, 19 nt, Homo sapiens
  misc_RNA (1)...(19): siRNA sense strand
ccugaaccgugugauuuau

SEQ ID NO: 388071 - RNA, 19 nt, Homo sapiens
  misc_RNA (1)...(19): siRNA sense strand
caugugacagggcaaagaa

SEQ ID NO: 388072 - RNA, 19 nt, Homo sapiens
  misc_RNA (1)...(19): siRNA sense strand
aaccugaaccgugugauuu

SEQ ID NO: 388073 - RNA, 19 nt, Homo sapiens
  misc_RNA (1)...(19): siRNA sense strand
cuccaauccuuucuacuuc

SEQ ID NO: 388074 - RNA, 19 nt, Homo sapiens
  misc_RNA (1)...(19): siRNA sense strand
gcaucaacaaagagaaaug

SEQ ID NO: 388075 - RNA, 19 nt, Homo sapiens
  misc_RNA (1)...(19): siRNA sense strand
ugaccugguaccucgcuua

SEQ ID NO: 388076 - RNA, 19 nt, Homo sapiens
  misc_RNA (1)...(19): siRNA sense strand
ugaagcugaagacccguua

SEQ ID NO: 388077 - RNA, 19 nt, Homo sapiens
  misc_RNA (1)...(19): siRNA sense strand
gaccugguaccucgcuuau

SEQ ID NO: 388078 - RNA, 19 nt, Homo sapiens
  misc_RNA (1)...(19): siRNA sense strand
agaauggcuccaauccuuu

SEQ ID NO: 388079 - RNA, 19 nt, Homo sapiens
  misc_RNA (1)...(19): siRNA sense strand
gaaccgugugauuuauuuc

SEQ ID NO: 388080 - RNA, 19 nt, Homo sapiens
  misc_RNA (1)...(19): siRNA sense strand
cgagggcugcucaccacua

SEQ ID NO: 388081 - RNA, 19 nt, Homo sapiens
  misc_RNA (1)...(19): siRNA sense strand
uggcaucauuggacuugga

SEQ ID NO: 388082 - RNA, 19 nt, Homo sapiens
  misc_RNA (1)...(19): siRNA sense strand
cuucagagccacucaguac

SEQ ID NO: 388083 - RNA, 19 nt, Homo sapiens
  misc_RNA (1)...(19): siRNA sense strand
uguggcauauccucagaug

SEQ ID NO: 388084 - RNA, 19 nt, Homo sapiens
  misc_RNA (1)...(19): siRNA sense strand
acacagugaagaaccuuug

SEQ ID NO: 388085 - RNA, 19 nt, Homo sapiens
  misc_RNA (1)...(19): siRNA sense strand
uggcaucaacaaagagaaa

SEQ ID NO: 388086 - RNA, 19 nt, Homo sapiens
  misc_RNA (1)...(19): siRNA sense strand
cagagccacucaguacaca

SEQ ID NO: 388087 - RNA, 19 nt, Homo sapiens
  misc_RNA (1)...(19): siRNA sense strand
ggacacagugaagaaccuu

SEQ ID NO: 388088 - RNA, 19 nt, Homo sapiens
  misc_RNA (1)...(19): siRNA sense strand
cgcuuaugcuuaacauuag

SEQ ID NO: 388089 - RNA, 19 nt, Homo sapiens
  misc_RNA (1)...(19): siRNA sense strand
auccaauccuggcaucauu

SEQ ID NO: 388090 - RNA, 19 nt, Homo sapiens
  misc_RNA (1)...(19): siRNA sense strand
uggcugaggaggaaacaga

SEQ ID NO: 388091 - RNA, 19 nt, Homo sapiens
  misc_RNA (1)...(19): siRNA sense strand
gguaccucgcuuaugcuua

SEQ ID NO: 388092 - RNA, 19 nt, Homo sapiens
  misc_RNA (1)...(19): siRNA sense strand
ggcaaagaaagagaaauca

SEQ ID NO: 388093 - RNA, 19 nt, Homo sapiens
  misc_RNA (1)...(19): siRNA sense strand
cugcucaccacuacuacua

SEQ ID NO: 388094 - RNA, 19 nt, Homo sapiens
  misc_RNA (1)...(19): siRNA sense strand
ucucaccucuggcaucaac

SEQ ID NO: 388095 - RNA, 19 nt, Homo sapiens
  misc_RNA (1)...(19): siRNA sense strand
gaaaggagguguucauuua

SEQ ID NO: 388096 - RNA, 19 nt, Homo sapiens
  misc_RNA (1)...(19): siRNA sense strand
aaaggaagcucaaguauau

SEQ ID NO: 388097 - RNA, 19 nt, Homo sapiens
  misc_RNA (1)...(19): siRNA sense strand
aaaugaagcugccaaauau

SEQ ID NO: 388098 - RNA, 19 nt, Homo sapiens
  misc_RNA (1)...(19): siRNA sense strand
gcugaagccuuggauauuu

SEQ ID NO: 388099 - RNA, 19 nt, Homo sapiens
  misc_RNA (1)...(19): siRNA sense strand
uuacgaagcuguauaaucu

SEQ ID NO: 388100 - RNA, 19 nt, Homo sapiens
  misc_RNA (1)...(19): siRNA sense strand
gaacauugccugcuuugug

SEQ ID NO: 388101 - RNA, 19 nt, Homo sapiens
  misc_RNA (1)...(19): siRNA sense strand
ucaaguauaucaagcauuc

SEQ ID NO: 388102 - RNA, 19 nt, Homo sapiens
  misc_RNA (1)...(19): siRNA sense strand
uaaaggaagcucaaguaua

SEQ ID NO: 388103 - RNA, 19 nt, Homo sapiens
  misc_RNA (1)...(19): siRNA sense strand
gaaaaggugucuucaauag

SEQ ID NO: 388104 - RNA, 19 nt, Homo sapiens
  misc_RNA (1)...(19): siRNA sense strand
gguacaaucuagcgacaaa

SEQ ID NO: 388105 - RNA, 19 nt, Homo sapiens
  misc_RNA (1)...(19): siRNA sense strand
gcuaagagacuaaaugcaa

SEQ ID NO: 388106 - RNA, 19 nt, Homo sapiens
  misc_RNA (1)...(19): siRNA sense strand
gcucacagcugauccuaag

SEQ ID NO: 388107 - RNA, 19 nt, Homo sapiens
  misc_RNA (1)...(19): siRNA sense strand
aaaggugucuucaauagug

SEQ ID NO: 388108 - RNA, 19 nt, Homo sapiens
  misc_RNA (1)...(19): siRNA sense strand
gaagccauccuugucaaua

SEQ ID NO: 388109 - RNA, 19 nt, Homo sapiens
  misc_RNA (1)...(19): siRNA sense strand
aaagaaggugugaaaguua

SEQ ID NO: 388110 - RNA, 19 nt, Homo sapiens
  misc_RNA (1)...(19): siRNA sense strand
ccaagaggcccagaagaua

SEQ ID NO: 388111 - RNA, 19 nt, Homo sapiens
  misc_RNA (1)...(19): siRNA sense strand
gugaaucccuuuggugaaa

SEQ ID NO: 388112 - RNA, 19 nt, Homo sapiens
  misc_RNA (1)...(19): siRNA sense strand
aagaaggugugaaaguuaa

SEQ ID NO: 388113 - RNA, 19 nt, Homo sapiens
  misc_RNA (1)...(19): siRNA sense strand
cuaagagacuaaaugcaaa

SEQ ID NO: 388114 - RNA, 19 nt, Homo sapiens
  misc_RNA (1)...(19): siRNA sense strand
gucaauauauuugguggua

SEQ ID NO: 388115 - RNA, 19 nt, Homo sapiens
  misc_RNA (1)...(19): siRNA sense strand
caaauuacgaagcuguaua

SEQ ID NO: 388116 - RNA, 19 nt, Homo sapiens
  misc_RNA (1)...(19): siRNA sense strand
gagugagaguucaaagauu

SEQ ID NO: 388117 - RNA, 19 nt, Homo sapiens
  misc_RNA (1)...(19): siRNA sense strand
uguauaaucucuuccugaa

SEQ ID NO: 388118 - RNA, 19 nt, Homo sapiens
  misc_RNA (1)...(19): siRNA sense strand
ggagugagaguucaaagau

SEQ ID NO: 388119 - RNA, 19 nt, Homo sapiens
  misc_RNA (1)...(19): siRNA sense strand
ggaagugaaucccuuuggu

SEQ ID NO: 388120 - RNA, 19 nt, Homo sapiens
  misc_RNA (1)...(19): siRNA sense strand
aaaccuaccuggcaauucu

SEQ ID NO: 388121 - RNA, 19 nt, Homo sapiens
  misc_RNA (1)...(19): siRNA sense strand
cgucaacugugccaucauu

SEQ ID NO: 388122 - RNA, 19 nt, Homo sapiens
  misc_RNA (1)...(19): siRNA sense strand
gauaaacuuugaugacaac

SEQ ID NO: 388123 - RNA, 19 nt, Homo sapiens
  misc_RNA (1)...(19): siRNA sense strand
ggacagcuggcuaaacaga

SEQ ID NO: 388124 - RNA, 19 nt, Homo sapiens
  misc_RNA (1)...(19): siRNA sense strand
caauauauuuggugguauc

SEQ ID NO: 388125 - RNA, 19 nt, Homo sapiens
  misc_RNA (1)...(19): siRNA sense strand
guaaaggaagcucaaguau

SEQ ID NO: 388126 - RNA, 19 nt, Homo sapiens
  misc_RNA (1)...(19): siRNA sense strand
cagcugauccuaagguuga

SEQ ID NO: 388127 - RNA, 19 nt, Homo sapiens
  misc_RNA (1)...(19): siRNA sense strand
cuacucagguggaagugaa

SEQ ID NO: 388128 - RNA, 19 nt, Homo sapiens
  misc_RNA (1)...(19): siRNA sense strand
gagacuaaaugcaaaagaa

SEQ ID NO: 388129 - RNA, 19 nt, Homo sapiens
  misc_RNA (1)...(19): siRNA sense strand
ugggacagcuggcuaaaca

SEQ ID NO: 388130 - RNA, 19 nt, Homo sapiens
  misc_RNA (1)...(19): siRNA sense strand
ggaaaaggugucuucaaua

SEQ ID NO: 388131 - RNA, 19 nt, Homo sapiens
  misc_RNA (1)...(19): siRNA sense strand
ccaaugggaucaccaaagc

SEQ ID NO: 388132 - RNA, 19 nt, Homo sapiens
  misc_RNA (1)...(19): siRNA sense strand
aacauugccugcuuuguga

SEQ ID NO: 388133 - RNA, 19 nt, Homo sapiens
  misc_RNA (1)...(19): siRNA sense strand
caauagugguuugaaagga

SEQ ID NO: 388134 - RNA, 19 nt, Homo sapiens
  misc_RNA (1)...(19): siRNA sense strand
aaaaugaagcugccaaaua

SEQ ID NO: 388135 - RNA, 19 nt, Homo sapiens
  misc_RNA (1)...(19): siRNA sense strand
caaguugucuguuuugaug

SEQ ID NO: 388136 - RNA, 19 nt, Homo sapiens
  misc_RNA (1)...(19): siRNA sense strand
cagaagauacucaacaaca

SEQ ID NO: 388137 - RNA, 19 nt, Homo sapiens
  misc_RNA (1)...(19): siRNA sense strand
uguaaaggaagcucaagua

SEQ ID NO: 388138 - RNA, 19 nt, Homo sapiens
  misc_RNA (1)...(19): siRNA sense strand
gaucuuggaggugguguaa

SEQ ID NO: 388139 - RNA, 19 nt, Homo sapiens
  misc_RNA (1)...(19): siRNA sense strand
ggacgacaaaucagagaau

SEQ ID NO: 388140 - RNA, 19 nt, Homo sapiens
  misc_RNA (1)...(19): siRNA sense strand
ggacuagaugggaacauug

SEQ ID NO: 388141 - RNA, 19 nt, Homo sapiens
  misc_RNA (1)...(19): siRNA sense strand
aaaagaaggugugaaaguu

SEQ ID NO: 388142 - RNA, 19 nt, Homo sapiens
  misc_RNA (1)...(19): siRNA sense strand
agugagaguucaaagauuc

SEQ ID NO: 388143 - RNA, 19 nt, Homo sapiens
  misc_RNA (1)...(19): siRNA sense strand
caaaagacccuaauguugu

SEQ ID NO: 388144 - RNA, 19 nt, Homo sapiens
  misc_RNA (1)...(19): siRNA sense strand
cccagaagauacucaacaa

SEQ ID NO: 388145 - RNA, 19 nt, Homo sapiens
  misc_RNA (1)...(19): siRNA sense strand
gcucaaguauaucaagcau

SEQ ID NO: 388146 - RNA, 19 nt, Homo sapiens
  misc_RNA (1)...(19): siRNA sense strand
gacgacaaaucagagaaug

SEQ ID NO: 388147 - RNA, 19 nt, Homo sapiens
  misc_RNA (1)...(19): siRNA sense strand
caagauaaacuuugaugac

SEQ ID NO: 388148 - RNA, 19 nt, Homo sapiens
  misc_RNA (1)...(19): siRNA sense strand
caaaacaaacuccaaaaga

SEQ ID NO: 388149 - RNA, 19 nt, Homo sapiens
  misc_RNA (1)...(19): siRNA sense strand
uaucaagcauucaaauugc

SEQ ID NO: 388150 - RNA, 19 nt, Homo sapiens
  misc_RNA (1)...(19): siRNA sense strand
caacgcagaauuccgacaa

SEQ ID NO: 388151 - RNA, 19 nt, Homo sapiens
  misc_RNA (1)...(19): siRNA sense strand
aaaggagguguucauuuaa

SEQ ID NO: 388152 - RNA, 19 nt, Homo sapiens
  misc_RNA (1)...(19): siRNA sense strand
aagccauccuugucaauau

SEQ ID NO: 388153 - RNA, 19 nt, Homo sapiens
  misc_RNA (1)...(19): siRNA sense strand
agccauccuugucaauaua

SEQ ID NO: 388154 - RNA, 19 nt, Homo sapiens
  misc_RNA (1)...(19): siRNA sense strand
gccgggagcuagaacucaa

SEQ ID NO: 388155 - RNA, 19 nt, Homo sapiens
  misc_RNA (1)...(19): siRNA sense strand
acagcuggcuaaacagaug

SEQ ID NO: 388156 - RNA, 19 nt, Homo sapiens
  misc_RNA (1)...(19): siRNA sense strand
ugaaggaaccaacguccaa

SEQ ID NO: 388157 - RNA, 19 nt, Homo sapiens
  misc_RNA (1)...(19): siRNA sense strand
uggugaaacuccagaagga

SEQ ID NO: 388158 - RNA, 19 nt, Homo sapiens
  misc_RNA (1)...(19): siRNA sense strand
agagguggcugcuucaaac

SEQ ID NO: 388159 - RNA, 19 nt, Homo sapiens
  misc_RNA (1)...(19): siRNA sense strand
agaaggcuguggccagugu

SEQ ID NO: 388160 - RNA, 19 nt, Homo sapiens
  misc_RNA (1)...(19): siRNA sense strand
cagaucaaauuacgaagcu

SEQ ID NO: 388161 - RNA, 19 nt, Homo sapiens
  misc_RNA (1)...(19): siRNA sense strand
caagaggcccagaagauac

SEQ ID NO: 388162 - RNA, 19 nt, Homo sapiens
  misc_RNA (1)...(19): siRNA sense strand
ccaagauaaacuuugauga

SEQ ID NO: 388163 - RNA, 19 nt, Homo sapiens
  misc_RNA (1)...(19): siRNA sense strand
gaaaccuaccuggcaauuc

SEQ ID NO: 388164 - RNA, 19 nt, Homo sapiens
  misc_RNA (1)...(19): siRNA sense strand
agaagauacucaacaacag

SEQ ID NO: 388165 - RNA, 19 nt, Homo sapiens
  misc_RNA (1)...(19): siRNA sense strand
gcugccaaauaugaucuaa

SEQ ID NO: 388166 - RNA, 19 nt, Homo sapiens
  misc_RNA (1)...(19): siRNA sense strand
gugugaaaguuaacaaggu

SEQ ID NO: 388167 - RNA, 19 nt, Homo sapiens
  misc_RNA (1)...(19): siRNA sense strand
gaagcucaaguauaucaag

SEQ ID NO: 388168 - RNA, 19 nt, Homo sapiens
  misc_RNA (1)...(19): siRNA sense strand
caacggagugagaguucaa

SEQ ID NO: 388169 - RNA, 19 nt, Homo sapiens
  misc_RNA (1)...(19): siRNA sense strand
gaagcugccaaauaugauc

SEQ ID NO: 388170 - RNA, 19 nt, Homo sapiens
  misc_RNA (1)...(19): siRNA sense strand
gaaaguuaacaaggugaug

SEQ ID NO: 388171 - RNA, 19 nt, Homo sapiens
  misc_RNA (1)...(19): siRNA sense strand
augccaagauaaacuuuga

SEQ ID NO: 388172 - RNA, 19 nt, Homo sapiens
  misc_RNA (1)...(19): siRNA sense strand
uggaggugguguaaaggaa

SEQ ID NO: 388173 - RNA, 19 nt, Homo sapiens
  misc_RNA (1)...(19): siRNA sense strand
ugggaacauugccugcuuu

SEQ ID NO: 388174 - RNA, 19 nt, Homo sapiens
  misc_RNA (1)...(19): siRNA sense strand
aggacuagaugggaacauu

SEQ ID NO: 388175 - RNA, 19 nt, Homo sapiens
  misc_RNA (1)...(19): siRNA sense strand
cgacaaaucagagaaugag

SEQ ID NO: 388176 - RNA, 19 nt, Homo sapiens
  misc_RNA (1)...(19): siRNA sense strand
uaacaaaagacccuaaugu

SEQ ID NO: 388177 - RNA, 19 nt, Homo sapiens
  misc_RNA (1)...(19): siRNA sense strand
gccaagauaaacuuugaug

SEQ ID NO: 388178 - RNA, 19 nt, Homo sapiens
  misc_RNA (1)...(19): siRNA sense strand
gacaacggagugagaguuc

SEQ ID NO: 388179 - RNA, 19 nt, Homo sapiens
  misc_RNA (1)...(19): siRNA sense strand
uuuaaaagcccagaucuua

SEQ ID NO: 388180 - RNA, 19 nt, Homo sapiens
  misc_RNA (1)...(19): siRNA sense strand
ucuuggaggugguguaaag

SEQ ID NO: 388181 - RNA, 19 nt, Homo sapiens
  misc_RNA (1)...(19): siRNA sense strand
gugggaagccagccaacuu

SEQ ID NO: 388182 - RNA, 19 nt, Homo sapiens
  misc_RNA (1)...(19): siRNA sense strand
cugaagccuuggauauuuc

SEQ ID NO: 388183 - RNA, 19 nt, Homo sapiens
  misc_RNA (1)...(19): siRNA sense strand
caaaagaaggugugaaagu

SEQ ID NO: 388184 - RNA, 19 nt, Homo sapiens
  misc_RNA (1)...(19): siRNA sense strand
ggaggaugcagccaagaag

SEQ ID NO: 388185 - RNA, 19 nt, Homo sapiens
  misc_RNA (1)...(19): siRNA sense strand
ugucuucaauagugguuug

SEQ ID NO: 388186 - RNA, 19 nt, Homo sapiens
  misc_RNA (1)...(19): siRNA sense strand
uaaggagcaaauugacauu

SEQ ID NO: 388187 - RNA, 19 nt, Homo sapiens
  misc_RNA (1)...(19): siRNA sense strand
gcugcuaagagacuaaaug

SEQ ID NO: 388188 - RNA, 19 nt, Homo sapiens
  misc_RNA (1)...(19): siRNA sense strand
cgccauggcuacuugugau

SEQ ID NO: 388189 - RNA, 19 nt, Homo sapiens
  misc_RNA (1)...(19): siRNA sense strand
guauaaucucuuccugaaa

SEQ ID NO: 388190 - RNA, 19 nt, Homo sapiens
  misc_RNA (1)...(19): siRNA sense strand
acaaaagacccuaauguug

SEQ ID NO: 388191 - RNA, 19 nt, Homo sapiens
  misc_RNA (1)...(19): siRNA sense strand
cugcagaucaaauuacgaa

SEQ ID NO: 388192 - RNA, 19 nt, Homo sapiens
  misc_RNA (1)...(19): siRNA sense strand
gcccagaagauacucaaca

SEQ ID NO: 388193 - RNA, 19 nt, Homo sapiens
  misc_RNA (1)...(19): siRNA sense strand
caacuucuuggaucuugga

SEQ ID NO: 388194 - RNA, 19 nt, Homo sapiens
  misc_RNA (1)...(19): siRNA sense strand
gguggaagugaaucccuuu

SEQ ID NO: 388195 - RNA, 19 nt, Homo sapiens
  misc_RNA (1)...(19): siRNA sense strand
gaucaugccuggccauauu

SEQ ID NO: 388196 - RNA, 19 nt, Homo sapiens
  misc_RNA (1)...(19): siRNA sense strand
gaaccacgaucuacaagga

SEQ ID NO: 388197 - RNA, 19 nt, Homo sapiens
  misc_RNA (1)...(19): siRNA sense strand
gaaauucccuugguugugu

SEQ ID NO: 388198 - RNA, 19 nt, Homo sapiens
  misc_RNA (1)...(19): siRNA sense strand
agagaaugcugcagaauuu

SEQ ID NO: 388199 - RNA, 19 nt, Homo sapiens
  misc_RNA (1)...(19): siRNA sense strand
gggcuuaccugucuuuaau

SEQ ID NO: 388200 - RNA, 19 nt, Homo sapiens
  misc_RNA (1)...(19): siRNA sense strand
gaucuggcacccugacuua

SEQ ID NO: 388201 - RNA, 19 nt, Homo sapiens
  misc_RNA (1)...(19): siRNA sense strand
caacggcuucugucauuua

SEQ ID NO: 388202 - RNA, 19 nt, Homo sapiens
  misc_RNA (1)...(19): siRNA sense strand
caacugcccuggagucauc

SEQ ID NO: 388203 - RNA, 19 nt, Homo sapiens
  misc_RNA (1)...(19): siRNA sense strand
caucaauccuggagaaugu

SEQ ID NO: 388204 - RNA, 19 nt, Homo sapiens
  misc_RNA (1)...(19): siRNA sense strand
caacauaauucagguccaa

SEQ ID NO: 388205 - RNA, 19 nt, Homo sapiens
  misc_RNA (1)...(19): siRNA sense strand
gaaaagacaaggcuaauug

SEQ ID NO: 388206 - RNA, 19 nt, Homo sapiens
  misc_RNA (1)...(19): siRNA sense strand
gcaaacagggcaccuuuca

SEQ ID NO: 388207 - RNA, 19 nt, Homo sapiens
  misc_RNA (1)...(19): siRNA sense strand
guguaucacugaaggaauu

SEQ ID NO: 388208 - RNA, 19 nt, Homo sapiens
  misc_RNA (1)...(19): siRNA sense strand
ccacagaaggcaucauauu

SEQ ID NO: 388209 - RNA, 19 nt, Homo sapiens
  misc_RNA (1)...(19): siRNA sense strand
caucugggcuuaccugucu

SEQ ID NO: 388210 - RNA, 19 nt, Homo sapiens
  misc_RNA (1)...(19): siRNA sense strand
gcaacggcuucugucauuu

SEQ ID NO: 388211 - RNA, 19 nt, Homo sapiens
  misc_RNA (1)...(19): siRNA sense strand
acagaaggcaucauauuga

SEQ ID NO: 388212 - RNA, 19 nt, Homo sapiens
  misc_RNA (1)...(19): siRNA sense strand
agaagagaaugcugcagaa

SEQ ID NO: 388213 - RNA, 19 nt, Homo sapiens
  misc_RNA (1)...(19): siRNA sense strand
caaacucguuggaggaaca

SEQ ID NO: 388214 - RNA, 19 nt, Homo sapiens
  misc_RNA (1)...(19): siRNA sense strand
gaaaggaggccagacacau

SEQ ID NO: 388215 - RNA, 19 nt, Homo sapiens
  misc_RNA (1)...(19): siRNA sense strand
ugaaauuggugguaaugca

SEQ ID NO: 388216 - RNA, 19 nt, Homo sapiens
  misc_RNA (1)...(19): siRNA sense strand
cggcuucugucauuuaugu

SEQ ID NO: 388217 - RNA, 19 nt, Homo sapiens
  misc_RNA (1)...(19): siRNA sense strand
ggcagaaauucccuugguu

SEQ ID NO: 388218 - RNA, 19 nt, Homo sapiens
  misc_RNA (1)...(19): siRNA sense strand
aaacagggcaccuuucaca

SEQ ID NO: 388219 - RNA, 19 nt, Homo sapiens
  misc_RNA (1)...(19): siRNA sense strand
gaucuacaaggaauuugaa

SEQ ID NO: 388220 - RNA, 19 nt, Homo sapiens
  misc_RNA (1)...(19): siRNA sense strand
guccuucauugcugguuua

SEQ ID NO: 388221 - RNA, 19 nt, Homo sapiens
  misc_RNA (1)...(19): siRNA sense strand
gaaggaggccaaagaacag

SEQ ID NO: 388222 - RNA, 19 nt, Homo sapiens
  misc_RNA (1)...(19): siRNA sense strand
cacagaaggcaucauauug

SEQ ID NO: 388223 - RNA, 19 nt, Homo sapiens
  misc_RNA (1)...(19): siRNA sense strand
ggaaggauuggcauugugu

SEQ ID NO: 388224 - RNA, 19 nt, Homo sapiens
  misc_RNA (1)...(19): siRNA sense strand
uuaccugucuuuaauacug

SEQ ID NO: 388225 - RNA, 19 nt, Homo sapiens
  misc_RNA (1)...(19): siRNA sense strand
gaaaagaggaagaugcuau

SEQ ID NO: 388226 - RNA, 19 nt, Homo sapiens
  misc_RNA (1)...(19): siRNA sense strand
ugaaggaggccaaagaaca

SEQ ID NO: 388227 - RNA, 19 nt, Homo sapiens
  misc_RNA (1)...(19): siRNA sense strand
cagcaggcauuggaauaug

SEQ ID NO: 388228 - RNA, 19 nt, Homo sapiens
  misc_RNA (1)...(19): siRNA sense strand
ggaguuguggucaguaugu

SEQ ID NO: 388229 - RNA, 19 nt, Homo sapiens
  misc_RNA (1)...(19): siRNA sense strand
agcaacggcuucugucauu

SEQ ID NO: 388230 - RNA, 19 nt, Homo sapiens
  misc_RNA (1)...(19): siRNA sense strand
ggaaaggaggccagacaca

SEQ ID NO: 388231 - RNA, 19 nt, Homo sapiens
  misc_RNA (1)...(19): siRNA sense strand
gaagagaaugcugcagaau

SEQ ID NO: 388232 - RNA, 19 nt, Homo sapiens
  misc_RNA (1)...(19): siRNA sense strand
uuuauugacugccucgaaa

SEQ ID NO: 388233 - RNA, 19 nt, Homo sapiens
  misc_RNA (1)...(19): siRNA sense strand
ggacaugguacgagucaag

SEQ ID NO: 388234 - RNA, 19 nt, Homo sapiens
  misc_RNA (1)...(19): siRNA sense strand
agucaucaauccuggagaa

SEQ ID NO: 388235 - RNA, 19 nt, Homo sapiens
  misc_RNA (1)...(19): siRNA sense strand
caggaguuguggucaguau

SEQ ID NO: 388236 - RNA, 19 nt, Homo sapiens
  misc_RNA (1)...(19): siRNA sense strand
ccuguaguguccuucauug

SEQ ID NO: 388237 - RNA, 19 nt, Homo sapiens
  misc_RNA (1)...(19): siRNA sense strand
ugacugccucgaaaucuuu

SEQ ID NO: 388238 - RNA, 19 nt, Homo sapiens
  misc_RNA (1)...(19): siRNA sense strand
gccagcaggcauuggaaua

SEQ ID NO: 388239 - RNA, 19 nt, Homo sapiens
  misc_RNA (1)...(19): siRNA sense strand
gaauucggcauuguuccua

SEQ ID NO: 388240 - RNA, 19 nt, Homo sapiens
  misc_RNA (1)...(19): siRNA sense strand
cuucauugcugguuuaacu

SEQ ID NO: 388241 - RNA, 19 nt, Homo sapiens
  misc_RNA (1)...(19): siRNA sense strand
aagagaaugcugcagaauu

SEQ ID NO: 388242 - RNA, 19 nt, Homo sapiens
  misc_RNA (1)...(19): siRNA sense strand
gcuuaccugucuuuaauac

SEQ ID NO: 388243 - RNA, 19 nt, Homo sapiens
  misc_RNA (1)...(19): siRNA sense strand
gcauuggaggugauccuuu

SEQ ID NO: 388244 - RNA, 19 nt, Homo sapiens
  misc_RNA (1)...(19): siRNA sense strand
gagcaacggcuucugucau

SEQ ID NO: 388245 - RNA, 19 nt, Homo sapiens
  misc_RNA (1)...(19): siRNA sense strand
cuggcacccugacuuauga

SEQ ID NO: 388246 - RNA, 19 nt, Homo sapiens
  misc_RNA (1)...(19): siRNA sense strand
aaacugcugcgccaggaaa

SEQ ID NO: 388247 - RNA, 19 nt, Homo sapiens
  misc_RNA (1)...(19): siRNA sense strand
gaaaagguggagcuaaaga

SEQ ID NO: 388248 - RNA, 19 nt, Homo sapiens
  misc_RNA (1)...(19): siRNA sense strand
aaaggaaggauuggcauug

SEQ ID NO: 388249 - RNA, 19 nt, Homo sapiens
  misc_RNA (1)...(19): siRNA sense strand
ggagcaacggcuucuguca

SEQ ID NO: 388250 - RNA, 19 nt, Homo sapiens
  misc_RNA (1)...(19): siRNA sense strand
aaagguggagcuaaagaga

SEQ ID NO: 388251 - RNA, 19 nt, Homo sapiens
  misc_RNA (1)...(19): siRNA sense strand
cacccugacuuaugaagca

SEQ ID NO: 388252 - RNA, 19 nt, Homo sapiens
  misc_RNA (1)...(19): siRNA sense strand
cagaaauucccuugguugu

SEQ ID NO: 388253 - RNA, 19 nt, Homo sapiens
  misc_RNA (1)...(19): siRNA sense strand
gggagaagaaugggucaug

SEQ ID NO: 388254 - RNA, 19 nt, Homo sapiens
  misc_RNA (1)...(19): siRNA sense strand
aaggaaggauuggcauugu

SEQ ID NO: 388255 - RNA, 19 nt, Homo sapiens
  misc_RNA (1)...(19): siRNA sense strand
ccauuaaugaagcuauuga

SEQ ID NO: 388256 - RNA, 19 nt, Homo sapiens
  misc_RNA (1)...(19): siRNA sense strand
uggcaaacagggcaccuuu

SEQ ID NO: 388257 - RNA, 19 nt, Homo sapiens
  misc_RNA (1)...(19): siRNA sense strand
ccaagccuguaguguccuu

SEQ ID NO: 388258 - RNA, 19 nt, Homo sapiens
  misc_RNA (1)...(19): siRNA sense strand
cauuggaggugauccuuuu

SEQ ID NO: 388259 - RNA, 19 nt, Homo sapiens
  misc_RNA (1)...(19): siRNA sense strand
gaagcaguucaccaaacaa

SEQ ID NO: 388260 - RNA, 19 nt, Homo sapiens
  misc_RNA (1)...(19): siRNA sense strand
ggcauuguguccagaucug

SEQ ID NO: 388261 - RNA, 19 nt, Homo sapiens
  misc_RNA (1)...(19): siRNA sense strand
ggaaaagacaaggcuaauu

SEQ ID NO: 388262 - RNA, 19 nt, Homo sapiens
  misc_RNA (1)...(19): siRNA sense strand
aggcagaaauucccuuggu

SEQ ID NO: 388263 - RNA, 19 nt, Homo sapiens
  misc_RNA (1)...(19): siRNA sense strand
ugccauuaaugaagcuauu

SEQ ID NO: 388264 - RNA, 19 nt, Homo sapiens
  misc_RNA (1)...(19): siRNA sense strand
aggaaaagguggagcuaaa

SEQ ID NO: 388265 - RNA, 19 nt, Homo sapiens
  misc_RNA (1)...(19): siRNA sense strand
ggaauauggcaccaaacuc

SEQ ID NO: 388266 - RNA, 19 nt, Homo sapiens
  misc_RNA (1)...(19): siRNA sense strand
gaggugauccuuuuaaugg

SEQ ID NO: 388267 - RNA, 19 nt, Homo sapiens
  misc_RNA (1)...(19): siRNA sense strand
gggaucaugccuggccaua

SEQ ID NO: 388268 - RNA, 19 nt, Homo sapiens
  misc_RNA (1)...(19): siRNA sense strand
ccagcaggcauuggaauau

SEQ ID NO: 388269 - RNA, 19 nt, Homo sapiens
  misc_RNA (1)...(19): siRNA sense strand
aaaggaggccagacacauc

SEQ ID NO: 388270 - RNA, 19 nt, Homo sapiens
  misc_RNA (1)...(19): siRNA sense strand
cgaucuacaaggaauuuga

SEQ ID NO: 388271 - RNA, 19 nt, Homo sapiens
  misc_RNA (1)...(19): siRNA sense strand
cugcugcugccauuaauga

SEQ ID NO: 388272 - RNA, 19 nt, Homo sapiens
  misc_RNA (1)...(19): siRNA sense strand
caaauuccaagccuguagu

SEQ ID NO: 388273 - RNA, 19 nt, Homo sapiens
  misc_RNA (1)...(19): siRNA sense strand
ccaaauuccaagccuguag

SEQ ID NO: 388274 - RNA, 19 nt, Homo sapiens
  misc_RNA (1)...(19): siRNA sense strand
ggugaaauuggugguaaug

SEQ ID NO: 388275 - RNA, 19 nt, Homo sapiens
  misc_RNA (1)...(19): siRNA sense strand
uuggugaaauuggugguaa

SEQ ID NO: 388276 - RNA, 19 nt, Homo sapiens
  misc_RNA (1)...(19): siRNA sense strand
gccuggccauauucacaaa

SEQ ID NO: 388277 - RNA, 19 nt, Homo sapiens
  misc_RNA (1)...(19): siRNA sense strand
ucaauccuggagaauguaa

SEQ ID NO: 388278 - RNA, 19 nt, Homo sapiens
  misc_RNA (1)...(19): siRNA sense strand
gguuguguguaucacugaa

SEQ ID NO: 388279 - RNA, 19 nt, Homo sapiens
  misc_RNA (1)...(19): siRNA sense strand
gaagcuauugaggcagaaa

SEQ ID NO: 388280 - RNA, 19 nt, Homo sapiens
  misc_RNA (1)...(19): siRNA sense strand
gcaggaguuguggucagua

SEQ ID NO: 388281 - RNA, 19 nt, Homo sapiens
  misc_RNA (1)...(19): siRNA sense strand
ggugauccuuuuaauggaa

SEQ ID NO: 388282 - RNA, 19 nt, Homo sapiens
  misc_RNA (1)...(19): siRNA sense strand
gcuauugaggcagaaauuc

SEQ ID NO: 388283 - RNA, 19 nt, Homo sapiens
  misc_RNA (1)...(19): siRNA sense strand
ugugaaggaggccaaagaa

SEQ ID NO: 388284 - RNA, 19 nt, Homo sapiens
  misc_RNA (1)...(19): siRNA sense strand
aaagaggaagaugcuauga

SEQ ID NO: 388285 - RNA, 19 nt, Homo sapiens
  misc_RNA (1)...(19): siRNA sense strand
gcaaaggaaucucucacua

SEQ ID NO: 388286 - RNA, 19 nt, Homo sapiens
  misc_RNA (1)...(19): siRNA sense strand
ggaugaagcugcuagaaug

SEQ ID NO: 388287 - RNA, 19 nt, Homo sapiens
  misc_RNA (1)...(19): siRNA sense strand
ggacaaagaugcugcuaag

SEQ ID NO: 388288 - RNA, 19 nt, Homo sapiens
  misc_RNA (1)...(19): siRNA sense strand
ucaagguccuguauuaaua

SEQ ID NO: 388289 - RNA, 19 nt, Homo sapiens
  misc_RNA (1)...(19): siRNA sense strand
gggaaguucuggauuguuu

SEQ ID NO: 388290 - RNA, 19 nt, Homo sapiens
  misc_RNA (1)...(19): siRNA sense strand
guaaagcucucugaaauag

SEQ ID NO: 388291 - RNA, 19 nt, Homo sapiens
  misc_RNA (1)...(19): siRNA sense strand
agaugaagcuuaugcaauu

SEQ ID NO: 388292 - RNA, 19 nt, Homo sapiens
  misc_RNA (1)...(19): siRNA sense strand
caaaagaugucgugauaaa

SEQ ID NO: 388293 - RNA, 19 nt, Homo sapiens
  misc_RNA (1)...(19): siRNA sense strand
cauuuaagcuuaucacuuc

SEQ ID NO: 388294 - RNA, 19 nt, Homo sapiens
  misc_RNA (1)...(19): siRNA sense strand
gcaaaucucaacuacauug

SEQ ID NO: 388295 - RNA, 19 nt, Homo sapiens
  misc_RNA (1)...(19): siRNA sense strand
ucaaguaacagaagcauuu

SEQ ID NO: 388296 - RNA, 19 nt, Homo sapiens
  misc_RNA (1)...(19): siRNA sense strand
caaaggaggagugaagaua

SEQ ID NO: 388297 - RNA, 19 nt, Homo sapiens
  misc_RNA (1)...(19): siRNA sense strand
cagaauaugcaaucaagua

SEQ ID NO: 388298 - RNA, 19 nt, Homo sapiens
  misc_RNA (1)...(19): siRNA sense strand
gguggaagauucagaugga

SEQ ID NO: 388299 - RNA, 19 nt, Homo sapiens
  misc_RNA (1)...(19): siRNA sense strand
gaaguucuggauuguuuaa

SEQ ID NO: 388300 - RNA, 19 nt, Homo sapiens
  misc_RNA (1)...(19): siRNA sense strand
caggagagaauacuacuuu

SEQ ID NO: 388301 - RNA, 19 nt, Homo sapiens
  misc_RNA (1)...(19): siRNA sense strand
aaaggaaucucucacuaca

SEQ ID NO: 388302 - RNA, 19 nt, Homo sapiens
  misc_RNA (1)...(19): siRNA sense strand
agauggagcuguauugugu

SEQ ID NO: 388303 - RNA, 19 nt, Homo sapiens
  misc_RNA (1)...(19): siRNA sense strand
gugguacgguuacaaggua

SEQ ID NO: 388304 - RNA, 19 nt, Homo sapiens
  misc_RNA (1)...(19): siRNA sense strand
caaaggauauguggcaaag

SEQ ID NO: 388305 - RNA, 19 nt, Homo sapiens
  misc_RNA (1)...(19): siRNA sense strand
gaagcaagcacauguggau

SEQ ID NO: 388306 - RNA, 19 nt, Homo sapiens
  misc_RNA (1)...(19): siRNA sense strand
ggauuuccaccuaauauug

SEQ ID NO: 388307 - RNA, 19 nt, Homo sapiens
  misc_RNA (1)...(19): siRNA sense strand
gaaauuucaguugccaaua

SEQ ID NO: 388308 - RNA, 19 nt, Homo sapiens
  misc_RNA (1)...(19): siRNA sense strand
ugagucuccugaagcaaua

SEQ ID NO: 388309 - RNA, 19 nt, Homo sapiens
  misc_RNA (1)...(19): siRNA sense strand
aaagcucucugaaauagug

SEQ ID NO: 388310 - RNA, 19 nt, Homo sapiens
  misc_RNA (1)...(19): siRNA sense strand
ggagcuguauuguguaugg

SEQ ID NO: 388311 - RNA, 19 nt, Homo sapiens
  misc_RNA (1)...(19): siRNA sense strand
gaaaauaucccaggagaga

SEQ ID NO: 388312 - RNA, 19 nt, Homo sapiens
  misc_RNA (1)...(19): siRNA sense strand
uggccucgauggaaauaua

SEQ ID NO: 388313 - RNA, 19 nt, Homo sapiens
  misc_RNA (1)...(19): siRNA sense strand
aggcaaaucucaacuacau

SEQ ID NO: 388314 - RNA, 19 nt, Homo sapiens
  misc_RNA (1)...(19): siRNA sense strand
gaugcaaccaugauagaaa

SEQ ID NO: 388315 - RNA, 19 nt, Homo sapiens
  misc_RNA (1)...(19): siRNA sense strand
aagaugggauuuccaccua

SEQ ID NO: 388316 - RNA, 19 nt, Homo sapiens
  misc_RNA (1)...(19): siRNA sense strand
aaaggaacauuugaaagug

SEQ ID NO: 388317 - RNA, 19 nt, Homo sapiens
  misc_RNA (1)...(19): siRNA sense strand
gcaaccaugauagaaauaa

SEQ ID NO: 388318 - RNA, 19 nt, Homo sapiens
  misc_RNA (1)...(19): siRNA sense strand
aggaaucucucacuacaug

SEQ ID NO: 388319 - RNA, 19 nt, Homo sapiens
  misc_RNA (1)...(19): siRNA sense strand
ggacaguggacuuaaaaua

SEQ ID NO: 388320 - RNA, 19 nt, Homo sapiens
  misc_RNA (1)...(19): siRNA sense strand
caaguaacagaagcauuua

SEQ ID NO: 388321 - RNA, 19 nt, Homo sapiens
  misc_RNA (1)...(19): siRNA sense strand
gcuauggccacaauggaua

SEQ ID NO: 388322 - RNA, 19 nt, Homo sapiens
  misc_RNA (1)...(19): siRNA sense strand
gaugaagcuuaugcaauug

SEQ ID NO: 388323 - RNA, 19 nt, Homo sapiens
  misc_RNA (1)...(19): siRNA sense strand
ggaaaaggaacauuugaaa

SEQ ID NO: 388324 - RNA, 19 nt, Homo sapiens
  misc_RNA (1)...(19): siRNA sense strand
gcauuuaagcuuaucacuu

SEQ ID NO: 388325 - RNA, 19 nt, Homo sapiens
  misc_RNA (1)...(19): siRNA sense strand
ccagccaacuuccuugaug

SEQ ID NO: 388326 - RNA, 19 nt, Homo sapiens
  misc_RNA (1)...(19): siRNA sense strand
gaugaaagggacaaagaug

SEQ ID NO: 388327 - RNA, 19 nt, Homo sapiens
  misc_RNA (1)...(19): siRNA sense strand
ggaaguucuggauuguuua

SEQ ID NO: 388328 - RNA, 19 nt, Homo sapiens
  misc_RNA (1)...(19): siRNA sense strand
gaugggauuuccaccuaau

SEQ ID NO: 388329 - RNA, 19 nt, Homo sapiens
  misc_RNA (1)...(19): siRNA sense strand
gcacagaagaugggauuuc

SEQ ID NO: 388330 - RNA, 19 nt, Homo sapiens
  misc_RNA (1)...(19): siRNA sense strand
ggcagaauaugcaaucaag

SEQ ID NO: 388331 - RNA, 19 nt, Homo sapiens
  misc_RNA (1)...(19): siRNA sense strand
caccuaauauuguggaauc

SEQ ID NO: 388332 - RNA, 19 nt, Homo sapiens
  misc_RNA (1)...(19): siRNA sense strand
uuguaaagcucucugaaau

SEQ ID NO: 388333 - RNA, 19 nt, Homo sapiens
  misc_RNA (1)...(19): siRNA sense strand
gcuauucuggucaacauuu

SEQ ID NO: 388334 - RNA, 19 nt, Homo sapiens
  misc_RNA (1)...(19): siRNA sense strand
caacuacauuggccucgau

SEQ ID NO: 388335 - RNA, 19 nt, Homo sapiens
  misc_RNA (1)...(19): siRNA sense strand
uaaggcaaaucucaacuac

SEQ ID NO: 388336 - RNA, 19 nt, Homo sapiens
  misc_RNA (1)...(19): siRNA sense strand
gcuguuucuucacaaauga

SEQ ID NO: 388337 - RNA, 19 nt, Homo sapiens
  misc_RNA (1)...(19): siRNA sense strand
guauagucauggcaguaaa

SEQ ID NO: 388338 - RNA, 19 nt, Homo sapiens
  misc_RNA (1)...(19): siRNA sense strand
ggccacaauggauauaaua

SEQ ID NO: 388339 - RNA, 19 nt, Homo sapiens
  misc_RNA (1)...(19): siRNA sense strand
auuucaagguccuguauua

SEQ ID NO: 388340 - RNA, 19 nt, Homo sapiens
  misc_RNA (1)...(19): siRNA sense strand
gagagaauacuacuuugca

SEQ ID NO: 388341 - RNA, 19 nt, Homo sapiens
  misc_RNA (1)...(19): siRNA sense strand
uguaaagcucucugaaaua

SEQ ID NO: 388342 - RNA, 19 nt, Homo sapiens
  misc_RNA (1)...(19): siRNA sense strand
guauggaauuauugcaaga

SEQ ID NO: 388343 - RNA, 19 nt, Homo sapiens
  misc_RNA (1)...(19): siRNA sense strand
gaaaacauggucaagcuuu

SEQ ID NO: 388344 - RNA, 19 nt, Homo sapiens
  misc_RNA (1)...(19): siRNA sense strand
gcuacaguccaucaaguaa

SEQ ID NO: 388345 - RNA, 19 nt, Homo sapiens
  misc_RNA (1)...(19): siRNA sense strand
ggaggagugaagauaguuu

SEQ ID NO: 388346 - RNA, 19 nt, Homo sapiens
  misc_RNA (1)...(19): siRNA sense strand
agauucagauggagcugua

SEQ ID NO: 388347 - RNA, 19 nt, Homo sapiens
  misc_RNA (1)...(19): siRNA sense strand
gagaauacuacuuugcaau

SEQ ID NO: 388348 - RNA, 19 nt, Homo sapiens
  misc_RNA (1)...(19): siRNA sense strand
ucugggaaguucuggauug

SEQ ID NO: 388349 - RNA, 19 nt, Homo sapiens
  misc_RNA (1)...(19): siRNA sense strand
ugaagcugcuagaaugguu

SEQ ID NO: 388350 - RNA, 19 nt, Homo sapiens
  misc_RNA (1)...(19): siRNA sense strand
gaggaaucaugcgcuguga

SEQ ID NO: 388351 - RNA, 19 nt, Homo sapiens
  misc_RNA (1)...(19): siRNA sense strand
gaaaaucuuugaucuacag

SEQ ID NO: 388352 - RNA, 19 nt, Homo sapiens
  misc_RNA (1)...(19): siRNA sense strand
guacagcagcaacagcaaa

SEQ ID NO: 388353 - RNA, 19 nt, Homo sapiens
  misc_RNA (1)...(19): siRNA sense strand
gaaucucucacuacaugaa

SEQ ID NO: 388354 - RNA, 19 nt, Homo sapiens
  misc_RNA (1)...(19): siRNA sense strand
aaagcuguuucuucacaaa

SEQ ID NO: 388355 - RNA, 19 nt, Homo sapiens
  misc_RNA (1)...(19): siRNA sense strand
caaaagcuguuucuucaca

SEQ ID NO: 388356 - RNA, 19 nt, Homo sapiens
  misc_RNA (1)...(19): siRNA sense strand
aaggauauguggcaaaguc

SEQ ID NO: 388357 - RNA, 19 nt, Homo sapiens
  misc_RNA (1)...(19): siRNA sense strand
gguauagucauggcaguaa

SEQ ID NO: 388358 - RNA, 19 nt, Homo sapiens
  misc_RNA (1)...(19): siRNA sense strand
caaaggaaucucucacuac

SEQ ID NO: 388359 - RNA, 19 nt, Homo sapiens
  misc_RNA (1)...(19): siRNA sense strand
guuguaaagcucucugaaa

SEQ ID NO: 388360 - RNA, 19 nt, Homo sapiens
  misc_RNA (1)...(19): siRNA sense strand
gaaaagggcagaauaugca

SEQ ID NO: 388361 - RNA, 19 nt, Homo sapiens
  misc_RNA (1)...(19): siRNA sense strand
acauuggccucgauggaaa

SEQ ID NO: 388362 - RNA, 19 nt, Homo sapiens
  misc_RNA (1)...(19): siRNA sense strand
guguauggaugcaaagauc

SEQ ID NO: 388363 - RNA, 19 nt, Homo sapiens
  misc_RNA (1)...(19): siRNA sense strand
ugaaaguggccucaaagga

SEQ ID NO: 388364 - RNA, 19 nt, Homo sapiens
  misc_RNA (1)...(19): siRNA sense strand
caugcgcugugauguuauu

SEQ ID NO: 388365 - RNA, 19 nt, Homo sapiens
  misc_RNA (1)...(19): siRNA sense strand
uaacagaagcauuuaagcu

SEQ ID NO: 388366 - RNA, 19 nt, Homo sapiens
  misc_RNA (1)...(19): siRNA sense strand
ggagaaaagggcagaauau

SEQ ID NO: 388367 - RNA, 19 nt, Homo sapiens
  misc_RNA (1)...(19): siRNA sense strand
gugauaaaggcacagguuu

SEQ ID NO: 388368 - RNA, 19 nt, Homo sapiens
  misc_RNA (1)...(19): siRNA sense strand
caacagcaaaggaaucucu

SEQ ID NO: 388369 - RNA, 19 nt, Homo sapiens
  misc_RNA (1)...(19): siRNA sense strand
gaguauggaauuauugcaa

SEQ ID NO: 388370 - RNA, 19 nt, Homo sapiens
  misc_RNA (1)...(19): siRNA sense strand
gcgcugugauguuauugca

SEQ ID NO: 388371 - RNA, 19 nt, Homo sapiens
  misc_RNA (1)...(19): siRNA sense strand
gccacaauggauauaauaa

SEQ ID NO: 388372 - RNA, 19 nt, Homo sapiens
  misc_RNA (1)...(19): siRNA sense strand
gggauuuccaccuaauauu

SEQ ID NO: 388373 - RNA, 19 nt, Homo sapiens
  misc_RNA (1)...(19): siRNA sense strand
gcaauaacaauggaaaggu

SEQ ID NO: 388374 - RNA, 19 nt, Homo sapiens
  misc_RNA (1)...(19): siRNA sense strand
agagaauacuacuuugcaa

SEQ ID NO: 388375 - RNA, 19 nt, Homo sapiens
  misc_RNA (1)...(19): siRNA sense strand
aaaacauggucaagcuuua

SEQ ID NO: 388376 - RNA, 19 nt, Homo sapiens
  misc_RNA (1)...(19): siRNA sense strand
ggcaaagucaccagaugaa

SEQ ID NO: 388377 - RNA, 19 nt, Homo sapiens
  misc_RNA (1)...(19): siRNA sense strand
cagccaacuuccuugaugu

SEQ ID NO: 388378 - RNA, 19 nt, Homo sapiens
  misc_RNA (1)...(19): siRNA sense strand
uucaaaagaugucgugaua

SEQ ID NO: 388379 - RNA, 19 nt, Homo sapiens
  misc_RNA (1)...(19): siRNA sense strand
cugcuagaaugguuguaaa

SEQ ID NO: 388380 - RNA, 19 nt, Homo sapiens
  misc_RNA (1)...(19): siRNA sense strand
cagaugaagcuuaugcaau

SEQ ID NO: 388381 - RNA, 19 nt, Homo sapiens
  misc_RNA (1)...(19): siRNA sense strand
uacaguccaucaaguaaca

SEQ ID NO: 388382 - RNA, 19 nt, Homo sapiens
  misc_RNA (1)...(19): siRNA sense strand
aguaaauggugcugguuug

SEQ ID NO: 388383 - RNA, 19 nt, Homo sapiens
  misc_RNA (1)...(19): siRNA sense strand
cuaaggcaaaucucaacua

SEQ ID NO: 388384 - RNA, 19 nt, Homo sapiens
  misc_RNA (1)...(19): siRNA sense strand
gggacaaagaugcugcuaa

SEQ ID NO: 388385 - RNA, 19 nt, Homo sapiens
  misc_RNA (1)...(19): siRNA sense strand
ggaaagcucuggcaauuua

SEQ ID NO: 388386 - RNA, 19 nt, Homo sapiens
  misc_RNA (1)...(19): siRNA sense strand
ggagagaccuugacugaaa

SEQ ID NO: 388387 - RNA, 19 nt, Homo sapiens
  misc_RNA (1)...(19): siRNA sense strand
gaaagaacaugccaagaug

SEQ ID NO: 388388 - RNA, 19 nt, Homo sapiens
  misc_RNA (1)...(19): siRNA sense strand
gagagaaguuggaagcuua

SEQ ID NO: 388389 - RNA, 19 nt, Homo sapiens
  misc_RNA (1)...(19): siRNA sense strand
gaacguggcuuaugaguac

SEQ ID NO: 388390 - RNA, 19 nt, Homo sapiens
  misc_RNA (1)...(19): siRNA sense strand
gcagguggauuacuauaaa

SEQ ID NO: 388391 - RNA, 19 nt, Homo sapiens
  misc_RNA (1)...(19): siRNA sense strand
gaacaguugucugauauga

SEQ ID NO: 388392 - RNA, 19 nt, Homo sapiens
  misc_RNA (1)...(19): siRNA sense strand
caagcaaacugcccuauga

SEQ ID NO: 388393 - RNA, 19 nt, Homo sapiens
  misc_RNA (1)...(19): siRNA sense strand
gagauuggauugccuaaga

SEQ ID NO: 388394 - RNA, 19 nt, Homo sapiens
  misc_RNA (1)...(19): siRNA sense strand
cgaaccaucuuacugaaua

SEQ ID NO: 388395 - RNA, 19 nt, Homo sapiens
  misc_RNA (1)...(19): siRNA sense strand
gaagaaaucaacaacauga

SEQ ID NO: 388396 - RNA, 19 nt, Homo sapiens
  misc_RNA (1)...(19): siRNA sense strand
caauugagcaguucaguua

SEQ ID NO: 388397 - RNA, 19 nt, Homo sapiens
  misc_RNA (1)...(19): siRNA sense strand
gggaugaaccuccaaauuu

SEQ ID NO: 388398 - RNA, 19 nt, Homo sapiens
  misc_RNA (1)...(19): siRNA sense strand
ugacaaaucucucaacauc

SEQ ID NO: 388399 - RNA, 19 nt, Homo sapiens
  misc_RNA (1)...(19): siRNA sense strand
ugaaggaaauuauggauga

SEQ ID NO: 388400 - RNA, 19 nt, Homo sapiens
  misc_RNA (1)...(19): siRNA sense strand
gaagguagaucagauucaa

SEQ ID NO: 388401 - RNA, 19 nt, Homo sapiens
  misc_RNA (1)...(19): siRNA sense strand
ugaagcagcuccugaguga

SEQ ID NO: 388402 - RNA, 19 nt, Homo sapiens
  misc_RNA (1)...(19): siRNA sense strand
gaagauuauugguaacuug

SEQ ID NO: 388403 - RNA, 19 nt, Homo sapiens
  misc_RNA (1)...(19): siRNA sense strand
agacugaguuggagaagua

SEQ ID NO: 388404 - RNA, 19 nt, Homo sapiens
  misc_RNA (1)...(19): siRNA sense strand
ucccagagcuucaggauaa

SEQ ID NO: 388405 - RNA, 19 nt, Homo sapiens
  misc_RNA (1)...(19): siRNA sense strand
gaagaaggcauaucaagau

SEQ ID NO: 388406 - RNA, 19 nt, Homo sapiens
  misc_RNA (1)...(19): siRNA sense strand
caacaaagacacccaagaa

SEQ ID NO: 388407 - RNA, 19 nt, Homo sapiens
  misc_RNA (1)...(19): siRNA sense strand
gcaagugaaucaguuuaaa

SEQ ID NO: 388408 - RNA, 19 nt, Homo sapiens
  misc_RNA (1)...(19): siRNA sense strand
gaaauccuacgguuauuaa

SEQ ID NO: 388409 - RNA, 19 nt, Homo sapiens
  misc_RNA (1)...(19): siRNA sense strand
gacaaaguccugaacauaa

SEQ ID NO: 388410 - RNA, 19 nt, Homo sapiens
  misc_RNA (1)...(19): siRNA sense strand
uuaggaaucuuugccauua

SEQ ID NO: 388411 - RNA, 19 nt, Homo sapiens
  misc_RNA (1)...(19): siRNA sense strand
gaugagcugcugaagauua

SEQ ID NO: 388412 - RNA, 19 nt, Homo sapiens
  misc_RNA (1)...(19): siRNA sense strand
gggagcagguggauuacua

SEQ ID NO: 388413 - RNA, 19 nt, Homo sapiens
  misc_RNA (1)...(19): siRNA sense strand
gaccuugacugaaauccua

SEQ ID NO: 388414 - RNA, 19 nt, Homo sapiens
  misc_RNA (1)...(19): siRNA sense strand
gagaugcacuggccuuguu

SEQ ID NO: 388415 - RNA, 19 nt, Homo sapiens
  misc_RNA (1)...(19): siRNA sense strand
ggaugaauuuccugaagaa

SEQ ID NO: 388416 - RNA, 19 nt, Homo sapiens
  misc_RNA (1)...(19): siRNA sense strand
ggaaaugaaaggaaagaaa

SEQ ID NO: 388417 - RNA, 19 nt, Homo sapiens
  misc_RNA (1)...(19): siRNA sense strand
gagaaaggccgaacuagug

SEQ ID NO: 388418 - RNA, 19 nt, Homo sapiens
  misc_RNA (1)...(19): siRNA sense strand
cgaccuggcuuuagaacaa

SEQ ID NO: 388419 - RNA, 19 nt, Homo sapiens
  misc_RNA (1)...(19): siRNA sense strand
gcucuguccuggauaauga

SEQ ID NO: 388420 - RNA, 19 nt, Homo sapiens
  misc_RNA (1)...(19): siRNA sense strand
gcaaaccaaucccaccuau

SEQ ID NO: 388421 - RNA, 19 nt, Homo sapiens
  misc_RNA (1)...(19): siRNA sense strand
cuacaagacucucaucaau

SEQ ID NO: 388422 - RNA, 19 nt, Homo sapiens
  misc_RNA (1)...(19): siRNA sense strand
gggaggagauccagaguuc

SEQ ID NO: 388423 - RNA, 19 nt, Homo sapiens
  misc_RNA (1)...(19): siRNA sense strand
gcacagaaguuugccuuag

SEQ ID NO: 388424 - RNA, 19 nt, Homo sapiens
  misc_RNA (1)...(19): siRNA sense strand
gaucuuccuucucaacaaa

SEQ ID NO: 388425 - RNA, 19 nt, Homo sapiens
  misc_RNA (1)...(19): siRNA sense strand
gggagauaaugcccacuua

SEQ ID NO: 388426 - RNA, 19 nt, Homo sapiens
  misc_RNA (1)...(19): siRNA sense strand
gagaaagagauguuuauga

SEQ ID NO: 388427 - RNA, 19 nt, Homo sapiens
  misc_RNA (1)...(19): siRNA sense strand
ugaaaucaguccaacagaa

SEQ ID NO: 388428 - RNA, 19 nt, Homo sapiens
  misc_RNA (1)...(19): siRNA sense strand
acaaaucucucaacaucaa

SEQ ID NO: 388429 - RNA, 19 nt, Homo sapiens
  misc_RNA (1)...(19): siRNA sense strand
ggaaauccuacgguuauua

SEQ ID NO: 388430 - RNA, 19 nt, Homo sapiens
  misc_RNA (1)...(19): siRNA sense strand
cgaaagcgcuaucgagauc

SEQ ID NO: 388431 - RNA, 19 nt, Homo sapiens
  misc_RNA (1)...(19): siRNA sense strand
ucaacaacaugaagacuga

SEQ ID NO: 388432 - RNA, 19 nt, Homo sapiens
  misc_RNA (1)...(19): siRNA sense strand
gcagcaagacuacaugaaa

SEQ ID NO: 388433 - RNA, 19 nt, Homo sapiens
  misc_RNA (1)...(19): siRNA sense strand
ggaugaguacucugauuua

SEQ ID NO: 388434 - RNA, 19 nt, Homo sapiens
  misc_RNA (1)...(19): siRNA sense strand
gaaaucaacaacaugaaga

SEQ ID NO: 388435 - RNA, 19 nt, Homo sapiens
  misc_RNA (1)...(19): siRNA sense strand
gaguucaaauggagacuuu

SEQ ID NO: 388436 - RNA, 19 nt, Homo sapiens
  misc_RNA (1)...(19): siRNA sense strand
gaagauccagacagguuua

SEQ ID NO: 388437 - RNA, 19 nt, Homo sapiens
  misc_RNA (1)...(19): siRNA sense strand
ggaugaaccuccaaauuuu

SEQ ID NO: 388438 - RNA, 19 nt, Homo sapiens
  misc_RNA (1)...(19): siRNA sense strand
agaaagagauguuuaugag

SEQ ID NO: 388439 - RNA, 19 nt, Homo sapiens
  misc_RNA (1)...(19): siRNA sense strand
cgacaaaguccugaacaua

SEQ ID NO: 388440 - RNA, 19 nt, Homo sapiens
  misc_RNA (1)...(19): siRNA sense strand
gaguugcagucaugaaauu

SEQ ID NO: 388441 - RNA, 19 nt, Homo sapiens
  misc_RNA (1)...(19): siRNA sense strand
gagaagauccagacagguu

SEQ ID NO: 388442 - RNA, 19 nt, Homo sapiens
  misc_RNA (1)...(19): siRNA sense strand
gguaaaagguggauauuau

SEQ ID NO: 388443 - RNA, 19 nt, Homo sapiens
  misc_RNA (1)...(19): siRNA sense strand
ggaugagucagcuguguua

SEQ ID NO: 388444 - RNA, 19 nt, Homo sapiens
  misc_RNA (1)...(19): siRNA sense strand
gaacaaauaccaggaacug

SEQ ID NO: 388445 - RNA, 19 nt, Homo sapiens
  misc_RNA (1)...(19): siRNA sense strand
ccaagaagcacagaaguuu

SEQ ID NO: 388446 - RNA, 19 nt, Homo sapiens
  misc_RNA (1)...(19): siRNA sense strand
cgaaugccaugcuuguaaa

SEQ ID NO: 388447 - RNA, 19 nt, Homo sapiens
  misc_RNA (1)...(19): siRNA sense strand
ugaaggaguugcagucaug

SEQ ID NO: 388448 - RNA, 19 nt, Homo sapiens
  misc_RNA (1)...(19): siRNA sense strand
uaaaugacccaaauaagga

SEQ ID NO: 388449 - RNA, 19 nt, Homo sapiens
  misc_RNA (1)...(19): siRNA sense strand
ggcgcuagcucaugaagaa

SEQ ID NO: 388450 - RNA, 19 nt, Homo sapiens
  misc_RNA (1)...(19): siRNA sense strand
aaacugacccuguggauau

SEQ ID NO: 388451 - RNA, 19 nt, Homo sapiens
  misc_RNA (1)...(19): siRNA sense strand
gaugacaaaucucucaaca

SEQ ID NO: 388452 - RNA, 19 nt, Homo sapiens
  misc_RNA (1)...(19): siRNA sense strand
agagguaucucgaugaguu

SEQ ID NO: 388453 - RNA, 19 nt, Homo sapiens
  misc_RNA (1)...(19): siRNA sense strand
ggacugcagcaacagaaua

SEQ ID NO: 388454 - RNA, 19 nt, Homo sapiens
  misc_RNA (1)...(19): siRNA sense strand
cuucuucucucccaaagua

SEQ ID NO: 388455 - RNA, 19 nt, Homo sapiens
  misc_RNA (1)...(19): siRNA sense strand
gaacugaucaacgacauug

SEQ ID NO: 388456 - RNA, 19 nt, Homo sapiens
  misc_RNA (1)...(19): siRNA sense strand
ccagacagguuuaaagaag

SEQ ID NO: 388457 - RNA, 19 nt, Homo sapiens
  misc_RNA (1)...(19): siRNA sense strand
gaggccagcuuaccacaga

SEQ ID NO: 388458 - RNA, 19 nt, Homo sapiens
  misc_RNA (1)...(19): siRNA sense strand
ggaccaaagugaccaggau

SEQ ID NO: 388459 - RNA, 19 nt, Homo sapiens
  misc_RNA (1)...(19): siRNA sense strand
gagaucgccugcaguacuu

SEQ ID NO: 388460 - RNA, 19 nt, Homo sapiens
  misc_RNA (1)...(19): siRNA sense strand
caaaguagugucccugaaa

SEQ ID NO: 388461 - RNA, 19 nt, Homo sapiens
  misc_RNA (1)...(19): siRNA sense strand
gagcuaaaguaaaugucaa

SEQ ID NO: 388462 - RNA, 19 nt, Homo sapiens
  misc_RNA (1)...(19): siRNA sense strand
gaaauauacagcagcaaga

SEQ ID NO: 388463 - RNA, 19 nt, Homo sapiens
  misc_RNA (1)...(19): siRNA sense strand
gagcuugaccuuaugaaga

SEQ ID NO: 388464 - RNA, 19 nt, Homo sapiens
  misc_RNA (1)...(19): siRNA sense strand
cgacuggccuccacuuuag

SEQ ID NO: 388465 - RNA, 19 nt, Homo sapiens
  misc_RNA (1)...(19): siRNA sense strand
cgaaagaacaugccaagau

SEQ ID NO: 388466 - RNA, 19 nt, Homo sapiens
  misc_RNA (1)...(19): siRNA sense strand
caaaacaccugacaagaug

SEQ ID NO: 388467 - RNA, 19 nt, Homo sapiens
  misc_RNA (1)...(19): siRNA sense strand
gagcuucaggauaaauuua

SEQ ID NO: 388468 - RNA, 19 nt, Homo sapiens
  misc_RNA (1)...(19): siRNA sense strand
caugagaaguucccugaug

SEQ ID NO: 388469 - RNA, 19 nt, Homo sapiens
  misc_RNA (1)...(19): siRNA sense strand
aaggaacaguugucugaua

SEQ ID NO: 388470 - RNA, 19 nt, Homo sapiens
  misc_RNA (1)...(19): siRNA sense strand
gucagaacguggcuuauga

SEQ ID NO: 388471 - RNA, 19 nt, Homo sapiens
  misc_RNA (1)...(19): siRNA sense strand
gaggagauccagaguucua

SEQ ID NO: 388472 - RNA, 19 nt, Homo sapiens
  misc_RNA (1)...(19): siRNA sense strand
gaaguuugccuuaggaauc

SEQ ID NO: 388473 - RNA, 19 nt, Homo sapiens
  misc_RNA (1)...(19): siRNA sense strand
gcgacuggccuccacuuua

SEQ ID NO: 388474 - RNA, 19 nt, Homo sapiens
  misc_RNA (1)...(19): siRNA sense strand
ggagauaaugcccacuuaa

SEQ ID NO: 388475 - RNA, 19 nt, Homo sapiens
  misc_RNA (1)...(19): siRNA sense strand
guaacuugcuuuauuaucg

SEQ ID NO: 388476 - RNA, 19 nt, Homo sapiens
  misc_RNA (1)...(19): siRNA sense strand
gcaaacugcccuaugaugu

SEQ ID NO: 388477 - RNA, 19 nt, Homo sapiens
  misc_RNA (1)...(19): siRNA sense strand
ccacagugaucuugcugaa

SEQ ID NO: 388478 - RNA, 19 nt, Homo sapiens
  misc_RNA (1)...(19): siRNA sense strand
gaacuucuucucucccaaa

SEQ ID NO: 388479 - RNA, 19 nt, Homo sapiens
  misc_RNA (1)...(19): siRNA sense strand
cagaggagauggaugaaag

SEQ ID NO: 388480 - RNA, 19 nt, Homo sapiens
  misc_RNA (1)...(19): siRNA sense strand
caacagggcauuggaauca

SEQ ID NO: 388481 - RNA, 19 nt, Homo sapiens
  misc_RNA (1)...(19): siRNA sense strand
cgacacauuugcagcuuug

SEQ ID NO: 388482 - RNA, 19 nt, Homo sapiens
  misc_RNA (1)...(19): siRNA sense strand
gagaugagaaugcagaaau

SEQ ID NO: 388483 - RNA, 19 nt, Homo sapiens
  misc_RNA (1)...(19): siRNA sense strand
cuagggaaaugaaaggaaa

SEQ ID NO: 388484 - RNA, 19 nt, Homo sapiens
  misc_RNA (1)...(19): siRNA sense strand
gcucgaaccaucuuacuga

SEQ ID NO: 388485 - RNA, 19 nt, Homo sapiens
  misc_RNA (1)...(19): siRNA sense strand
gaacuacaaucuggucauu

SEQ ID NO: 388486 - RNA, 19 nt, Homo sapiens
  misc_RNA (1)...(19): siRNA sense strand
gaagugcaguuugcugaua

SEQ ID NO: 388487 - RNA, 19 nt, Homo sapiens
  misc_RNA (1)...(19): siRNA sense strand
gcuaugaaauugugaucua

SEQ ID NO: 388488 - RNA, 19 nt, Homo sapiens
  misc_RNA (1)...(19): siRNA sense strand
gcaguuugcugauaagaug

SEQ ID NO: 388489 - RNA, 19 nt, Homo sapiens
  misc_RNA (1)...(19): siRNA sense strand
gcaaugggcuuccguacuc

SEQ ID NO: 388490 - RNA, 19 nt, Homo sapiens
  misc_RNA (1)...(19): siRNA sense strand
gcuacaaccugcaaaucua

SEQ ID NO: 388491 - RNA, 19 nt, Homo sapiens
  misc_RNA (1)...(19): siRNA sense strand
caagaaccacggcaaguua

SEQ ID NO: 388492 - RNA, 19 nt, Homo sapiens
  misc_RNA (1)...(19): siRNA sense strand
cuacaaagcagacauaaau

SEQ ID NO: 388493 - RNA, 19 nt, Homo sapiens
  misc_RNA (1)...(19): siRNA sense strand
cagaaucuaugaugaaauc

SEQ ID NO: 388494 - RNA, 19 nt, Homo sapiens
  misc_RNA (1)...(19): siRNA sense strand
gaaacagcacccguaguua

SEQ ID NO: 388495 - RNA, 19 nt, Homo sapiens
  misc_RNA (1)...(19): siRNA sense strand
guaauguccuucaaaucuu

SEQ ID NO: 388496 - RNA, 19 nt, Homo sapiens
  misc_RNA (1)...(19): siRNA sense strand
cuauggaucuugcuccuuu

SEQ ID NO: 388497 - RNA, 19 nt, Homo sapiens
  misc_RNA (1)...(19): siRNA sense strand
gacaagaugcugccucaaa

SEQ ID NO: 388498 - RNA, 19 nt, Homo sapiens
  misc_RNA (1)...(19): siRNA sense strand
gguaauguccuucaaaucu

SEQ ID NO: 388499 - RNA, 19 nt, Homo sapiens
  misc_RNA (1)...(19): siRNA sense strand
ccaaggugcuucccuccaa

SEQ ID NO: 388500 - RNA, 19 nt, Homo sapiens
  misc_RNA (1)...(19): siRNA sense strand
acacugacaugcucuguag

SEQ ID NO: 388501 - RNA, 19 nt, Homo sapiens
  misc_RNA (1)...(19): siRNA sense strand
ucagucacuuucccuguaa

SEQ ID NO: 388502 - RNA, 19 nt, Homo sapiens
  misc_RNA (1)...(19): siRNA sense strand
agaaacagcacccguaguu

SEQ ID NO: 388503 - RNA, 19 nt, Homo sapiens
  misc_RNA (1)...(19): siRNA sense strand
cauucugucuucaguguuu

SEQ ID NO: 388504 - RNA, 19 nt, Homo sapiens
  misc_RNA (1)...(19): siRNA sense strand
gucagucacuuucccugua

SEQ ID NO: 388505 - RNA, 19 nt, Homo sapiens
  misc_RNA (1)...(19): siRNA sense strand
ggaagacgcaggagacuac

SEQ ID NO: 388506 - RNA, 19 nt, Homo sapiens
  misc_RNA (1)...(19): siRNA sense strand
ucacuuucccuguaaauau

SEQ ID NO: 388507 - RNA, 19 nt, Homo sapiens
  misc_RNA (1)...(19): siRNA sense strand
ggaaaagacucagaaaucu

SEQ ID NO: 388508 - RNA, 19 nt, Homo sapiens
  misc_RNA (1)...(19): siRNA sense strand
caaagcagacauaaauaca

SEQ ID NO: 388509 - RNA, 19 nt, Homo sapiens
  misc_RNA (1)...(19): siRNA sense strand
aagcagacauaaauacaca

SEQ ID NO: 388510 - RNA, 19 nt, Homo sapiens
  misc_RNA (1)...(19): siRNA sense strand
ggaagcagcuggaaaagac

SEQ ID NO: 388511 - RNA, 19 nt, Homo sapiens
  misc_RNA (1)...(19): siRNA sense strand
acaagaugcugccucaaag

SEQ ID NO: 388512 - RNA, 19 nt, Homo sapiens
  misc_RNA (1)...(19): siRNA sense strand
ugacccacagaaauuauua

SEQ ID NO: 388513 - RNA, 19 nt, Homo sapiens
  misc_RNA (1)...(19): siRNA sense strand
acucagaaaucuucacagu

SEQ ID NO: 388514 - RNA, 19 nt, Homo sapiens
  misc_RNA (1)...(19): siRNA sense strand
uaauguccuucaaaucuuc

SEQ ID NO: 388515 - RNA, 19 nt, Homo sapiens
  misc_RNA (1)...(19): siRNA sense strand
ccaagaaccacggcaaguu

SEQ ID NO: 388516 - RNA, 19 nt, Homo sapiens
  misc_RNA (1)...(19): siRNA sense strand
ccagugaacacaguuuauu

SEQ ID NO: 388517 - RNA, 19 nt, Homo sapiens
  misc_RNA (1)...(19): siRNA sense strand
agaagaggguaauguccuu

SEQ ID NO: 388518 - RNA, 19 nt, Homo sapiens
  misc_RNA (1)...(19): siRNA sense strand
agacuacaaagcagacaua

SEQ ID NO: 388519 - RNA, 19 nt, Homo sapiens
  misc_RNA (1)...(19): siRNA sense strand
acuacaaucuggucauuag

SEQ ID NO: 388520 - RNA, 19 nt, Homo sapiens
  misc_RNA (1)...(19): siRNA sense strand
gaggguaauguccuucaaa

SEQ ID NO: 388521 - RNA, 19 nt, Homo sapiens
  misc_RNA (1)...(19): siRNA sense strand
gaacggauacaugccuuag

SEQ ID NO: 388522 - RNA, 19 nt, Homo sapiens
  misc_RNA (1)...(19): siRNA sense strand
ugagcgugcuggcuauguu

SEQ ID NO: 388523 - RNA, 19 nt, Homo sapiens
  misc_RNA (1)...(19): siRNA sense strand
aagugcaguuugcugauaa

SEQ ID NO: 388524 - RNA, 19 nt, Homo sapiens
  misc_RNA (1)...(19): siRNA sense strand
gcagaguccagaaucuaug

SEQ ID NO: 388525 - RNA, 19 nt, Homo sapiens
  misc_RNA (1)...(19): siRNA sense strand
caagaugcugccucaaaga

SEQ ID NO: 388526 - RNA, 19 nt, Homo sapiens
  misc_RNA (1)...(19): siRNA sense strand
aaacagcacccguaguuac

SEQ ID NO: 388527 - RNA, 19 nt, Homo sapiens
  misc_RNA (1)...(19): siRNA sense strand
uccagaaucuaugaugaaa

SEQ ID NO: 388528 - RNA, 19 nt, Homo sapiens
  misc_RNA (1)...(19): siRNA sense strand
cagcagaguccagaaucua

SEQ ID NO: 388529 - RNA, 19 nt, Homo sapiens
  misc_RNA (1)...(19): siRNA sense strand
gaugcugccucaaagaaaa

SEQ ID NO: 388530 - RNA, 19 nt, Homo sapiens
  misc_RNA (1)...(19): siRNA sense strand
guaaaccuccugggacuuc

SEQ ID NO: 388531 - RNA, 19 nt, Homo sapiens
  misc_RNA (1)...(19): siRNA sense strand
ccagcacacaggacaguaa

SEQ ID NO: 388532 - RNA, 19 nt, Homo sapiens
  misc_RNA (1)...(19): siRNA sense strand
gcucagcaccaccuaugga

SEQ ID NO: 388533 - RNA, 19 nt, Homo sapiens
  misc_RNA (1)...(19): siRNA sense strand
gaccaagagcugacuuaca

SEQ ID NO: 388534 - RNA, 19 nt, Homo sapiens
  misc_RNA (1)...(19): siRNA sense strand
agacgcaggagacuacaaa

SEQ ID NO: 388535 - RNA, 19 nt, Homo sapiens
  misc_RNA (1)...(19): siRNA sense strand
cauauaucauggcuucaag

SEQ ID NO: 388536 - RNA, 19 nt, Homo sapiens
  misc_RNA (1)...(19): siRNA sense strand
gcacccguaguuacuguga

SEQ ID NO: 388537 - RNA, 19 nt, Homo sapiens
  misc_RNA (1)...(19): siRNA sense strand
ggaagagccagugaacaca

SEQ ID NO: 388538 - RNA, 19 nt, Homo sapiens
  misc_RNA (1)...(19): siRNA sense strand
ccaaggaagagccagugaa

SEQ ID NO: 388539 - RNA, 19 nt, Homo sapiens
  misc_RNA (1)...(19): siRNA sense strand
aguccagaaucuaugauga

SEQ ID NO: 388540 - RNA, 19 nt, Homo sapiens
  misc_RNA (1)...(19): siRNA sense strand
ccagcagaguccagaaucu

SEQ ID NO: 388541 - RNA, 19 nt, Homo sapiens
  misc_RNA (1)...(19): siRNA sense strand
cgugcuggcuauguucuuu

SEQ ID NO: 388542 - RNA, 19 nt, Homo sapiens
  misc_RNA (1)...(19): siRNA sense strand
gcaacaauucugacuccau

SEQ ID NO: 388543 - RNA, 19 nt, Homo sapiens
  misc_RNA (1)...(19): siRNA sense strand
accaagagcugacuuacac

SEQ ID NO: 388544 - RNA, 19 nt, Homo sapiens
  misc_RNA (1)...(19): siRNA sense strand
aggguaauguccuucaaau

SEQ ID NO: 388545 - RNA, 19 nt, Homo sapiens
  misc_RNA (1)...(19): siRNA sense strand
cagcacccguaguuacugu

SEQ ID NO: 388546 - RNA, 19 nt, Homo sapiens
  misc_RNA (1)...(19): siRNA sense strand
caaggaagagccagugaac

SEQ ID NO: 388547 - RNA, 19 nt, Homo sapiens
  misc_RNA (1)...(19): siRNA sense strand
guccagaaucuaugaugaa

SEQ ID NO: 388548 - RNA, 19 nt, Homo sapiens
  misc_RNA (1)...(19): siRNA sense strand
gggagaagaggguaauguc

SEQ ID NO: 388549 - RNA, 19 nt, Homo sapiens
  misc_RNA (1)...(19): siRNA sense strand
acaaagcagacauaaauac

SEQ ID NO: 388550 - RNA, 19 nt, Homo sapiens
  misc_RNA (1)...(19): siRNA sense strand
cacuuucccuguaaauauc

SEQ ID NO: 388551 - RNA, 19 nt, Homo sapiens
  misc_RNA (1)...(19): siRNA sense strand
cagcacacaggacaguaaa

SEQ ID NO: 388552 - RNA, 19 nt, Homo sapiens
  misc_RNA (1)...(19): siRNA sense strand
cacaguuuauuccgaagug

SEQ ID NO: 388553 - RNA, 19 nt, Homo sapiens
  misc_RNA (1)...(19): siRNA sense strand
cuacaaccugcaaaucuau

SEQ ID NO: 388554 - RNA, 19 nt, Homo sapiens
  misc_RNA (1)...(19): siRNA sense strand
gagccagugaacacaguuu

SEQ ID NO: 388555 - RNA, 19 nt, Homo sapiens
  misc_RNA (1)...(19): siRNA sense strand
cagaguccagaaucuauga

SEQ ID NO: 388556 - RNA, 19 nt, Homo sapiens
  misc_RNA (1)...(19): siRNA sense strand
gggagagucagucacuuuc

SEQ ID NO: 388557 - RNA, 19 nt, Homo sapiens
  misc_RNA (1)...(19): siRNA sense strand
cagcaccuguaaugucaca

SEQ ID NO: 388558 - RNA, 19 nt, Homo sapiens
  misc_RNA (1)...(19): siRNA sense strand
agaguuuaauggcaucugu

SEQ ID NO: 388559 - RNA, 19 nt, Homo sapiens
  misc_RNA (1)...(19): siRNA sense strand
ccaggagacucagaaacag

SEQ ID NO: 388560 - RNA, 19 nt, Homo sapiens
  misc_RNA (1)...(19): siRNA sense strand
ugggagagucagucacuuu

SEQ ID NO: 388561 - RNA, 19 nt, Homo sapiens
  misc_RNA (1)...(19): siRNA sense strand
aagaaccacggcaaguuaa

SEQ ID NO: 388562 - RNA, 19 nt, Homo sapiens
  misc_RNA (1)...(19): siRNA sense strand
acggauacaugccuuaggu

SEQ ID NO: 388563 - RNA, 19 nt, Homo sapiens
  misc_RNA (1)...(19): siRNA sense strand
aagaugcugccucaaagaa

SEQ ID NO: 388564 - RNA, 19 nt, Homo sapiens
  misc_RNA (1)...(19): siRNA sense strand
ugaacggauacaugccuua

SEQ ID NO: 388565 - RNA, 19 nt, Homo sapiens
  misc_RNA (1)...(19): siRNA sense strand
caagagaagacaagaugcu

SEQ ID NO: 388566 - RNA, 19 nt, Homo sapiens
  misc_RNA (1)...(19): siRNA sense strand
cccuguaaauauccaagaa

SEQ ID NO: 388567 - RNA, 19 nt, Homo sapiens
  misc_RNA (1)...(19): siRNA sense strand
uuaauggcaucugugaaca

SEQ ID NO: 388568 - RNA, 19 nt, Homo sapiens
  misc_RNA (1)...(19): siRNA sense strand
aaucauugcuuggacuucu

SEQ ID NO: 388569 - RNA, 19 nt, Homo sapiens
  misc_RNA (1)...(19): siRNA sense strand
ccucaaagaaaaccauaua

SEQ ID NO: 388570 - RNA, 19 nt, Homo sapiens
  misc_RNA (1)...(19): siRNA sense strand
uuagcgaucugaggaugga

SEQ ID NO: 388571 - RNA, 19 nt, Homo sapiens
  misc_RNA (1)...(19): siRNA sense strand
ccugggacuucaagcuaug

SEQ ID NO: 388572 - RNA, 19 nt, Homo sapiens
  misc_RNA (1)...(19): siRNA sense strand
cagcaccaccuauggaucu

SEQ ID NO: 388573 - RNA, 19 nt, Homo sapiens
  misc_RNA (1)...(19): siRNA sense strand
cagugaacacaguuuauuc

SEQ ID NO: 388574 - RNA, 19 nt, Homo sapiens
  misc_RNA (1)...(19): siRNA sense strand
gaaccacggcaaguuaaaa

SEQ ID NO: 388575 - RNA, 19 nt, Homo sapiens
  misc_RNA (1)...(19): siRNA sense strand
uguaacaccaggagacuca

SEQ ID NO: 388576 - RNA, 19 nt, Homo sapiens
  misc_RNA (1)...(19): siRNA sense strand
ccuuagguccgaacuacaa

SEQ ID NO: 388577 - RNA, 19 nt, Homo sapiens
  misc_RNA (1)...(19): siRNA sense strand
cuaugaaauugugaucuag

SEQ ID NO: 388578 - RNA, 19 nt, Homo sapiens
  misc_RNA (1)...(19): siRNA sense strand
gacuacaaagcagacauaa

SEQ ID NO: 388579 - RNA, 19 nt, Homo sapiens
  misc_RNA (1)...(19): siRNA sense strand
gcauugaucuuacuuauga

SEQ ID NO: 388580 - RNA, 19 nt, Homo sapiens
  misc_RNA (1)...(19): siRNA sense strand
gaagaaacaucccuuugau

SEQ ID NO: 388581 - RNA, 19 nt, Homo sapiens
  misc_RNA (1)...(19): siRNA sense strand
agacagagcagaugauuua

SEQ ID NO: 388582 - RNA, 19 nt, Homo sapiens
  misc_RNA (1)...(19): siRNA sense strand
ggacagcacugcagguguu

SEQ ID NO: 388583 - RNA, 19 nt, Homo sapiens
  misc_RNA (1)...(19): siRNA sense strand
ccucauagcuuugaagaaa

SEQ ID NO: 388584 - RNA, 19 nt, Homo sapiens
  misc_RNA (1)...(19): siRNA sense strand
ggaagaaacaucccuuuga

SEQ ID NO: 388585 - RNA, 19 nt, Homo sapiens
  misc_RNA (1)...(19): siRNA sense strand
cgaaggagccauuaacuuu

SEQ ID NO: 388586 - RNA, 19 nt, Homo sapiens
  misc_RNA (1)...(19): siRNA sense strand
ggaugccacuguuguagua

SEQ ID NO: 388587 - RNA, 19 nt, Homo sapiens
  misc_RNA (1)...(19): siRNA sense strand
cuacagaaaucaaguggaa

SEQ ID NO: 388588 - RNA, 19 nt, Homo sapiens
  misc_RNA (1)...(19): siRNA sense strand
gugggaagcuagagaaauu

SEQ ID NO: 388589 - RNA, 19 nt, Homo sapiens
  misc_RNA (1)...(19): siRNA sense strand
gacaaucagugaccaagaa

SEQ ID NO: 388590 - RNA, 19 nt, Homo sapiens
  misc_RNA (1)...(19): siRNA sense strand
ucacaaguuuggacuauga

SEQ ID NO: 388591 - RNA, 19 nt, Homo sapiens
  misc_RNA (1)...(19): siRNA sense strand
cgacagcgauggcaccaaa

SEQ ID NO: 388592 - RNA, 19 nt, Homo sapiens
  misc_RNA (1)...(19): siRNA sense strand
gaauugagcgcagggaaua

SEQ ID NO: 388593 - RNA, 19 nt, Homo sapiens
  misc_RNA (1)...(19): siRNA sense strand
gcagagcagugaagauuag

SEQ ID NO: 388594 - RNA, 19 nt, Homo sapiens
  misc_RNA (1)...(19): siRNA sense strand
agaaacaucccuuugauaa

SEQ ID NO: 388595 - RNA, 19 nt, Homo sapiens
  misc_RNA (1)...(19): siRNA sense strand
gaacucaaccuucuagaca

SEQ ID NO: 388596 - RNA, 19 nt, Homo sapiens
  misc_RNA (1)...(19): siRNA sense strand
acccuaaacuguugaauaa

SEQ ID NO: 388597 - RNA, 19 nt, Homo sapiens
  misc_RNA (1)...(19): siRNA sense strand
gaaacaucccuuugauaaa

SEQ ID NO: 388598 - RNA, 19 nt, Homo sapiens
  misc_RNA (1)...(19): siRNA sense strand
ggcagaugcugguaacuuu

SEQ ID NO: 388599 - RNA, 19 nt, Homo sapiens
  misc_RNA (1)...(19): siRNA sense strand
acaaggagaucacccagaa

SEQ ID NO: 388600 - RNA, 19 nt, Homo sapiens
  misc_RNA (1)...(19): siRNA sense strand
uugaagagaugguggaauu

SEQ ID NO: 388601 - RNA, 19 nt, Homo sapiens
  misc_RNA (1)...(19): siRNA sense strand
gaauaacacuuggcuuucu

SEQ ID NO: 388602 - RNA, 19 nt, Homo sapiens
  misc_RNA (1)...(19): siRNA sense strand
acacgccuaugaucaauuu

SEQ ID NO: 388603 - RNA, 19 nt, Homo sapiens
  misc_RNA (1)...(19): siRNA sense strand
ggacguagccaucgacaca

SEQ ID NO: 388604 - RNA, 19 nt, Homo sapiens
  misc_RNA (1)...(19): siRNA sense strand
gaagagaugguggaauuga

SEQ ID NO: 388605 - RNA, 19 nt, Homo sapiens
  misc_RNA (1)...(19): siRNA sense strand
gaaauuggagacccucuug

SEQ ID NO: 388606 - RNA, 19 nt, Homo sapiens
  misc_RNA (1)...(19): siRNA sense strand
gagaggaggugcucaacag

SEQ ID NO: 388607 - RNA, 19 nt, Homo sapiens
  misc_RNA (1)...(19): siRNA sense strand
cuggugcccugcaguauua

SEQ ID NO: 388608 - RNA, 19 nt, Homo sapiens
  misc_RNA (1)...(19): siRNA sense strand
gaaggagccauuaacuuug

SEQ ID NO: 388609 - RNA, 19 nt, Homo sapiens
  misc_RNA (1)...(19): siRNA sense strand
ggaauuugaucaacuacag

SEQ ID NO: 388610 - RNA, 19 nt, Homo sapiens
  misc_RNA (1)...(19): siRNA sense strand
ggaaugaagacuacaagga

SEQ ID NO: 388611 - RNA, 19 nt, Homo sapiens
  misc_RNA (1)...(19): siRNA sense strand
gcgaggagguggcagacaa

SEQ ID NO: 388612 - RNA, 19 nt, Homo sapiens
  misc_RNA (1)...(19): siRNA sense strand
gaaagcaguuccggagcaa

SEQ ID NO: 388613 - RNA, 19 nt, Homo sapiens
  misc_RNA (1)...(19): siRNA sense strand
acacuuggcuuucuaagag

SEQ ID NO: 388614 - RNA, 19 nt, Homo sapiens
  misc_RNA (1)...(19): siRNA sense strand
cauggacaguauucaauuu

SEQ ID NO: 388615 - RNA, 19 nt, Homo sapiens
  misc_RNA (1)...(19): siRNA sense strand
gauacauucuguugacuuc

SEQ ID NO: 388616 - RNA, 19 nt, Homo sapiens
  misc_RNA (1)...(19): siRNA sense strand
cagaggaccugcguacuga

SEQ ID NO: 388617 - RNA, 19 nt, Homo sapiens
  misc_RNA (1)...(19): siRNA sense strand
ucucauagauacauucugu

SEQ ID NO: 388618 - RNA, 19 nt, Homo sapiens
  misc_RNA (1)...(19): siRNA sense strand
gauuucaacuaccgcauug

SEQ ID NO: 388619 - RNA, 19 nt, Homo sapiens
  misc_RNA (1)...(19): siRNA sense strand
ggaacuccuucuucuggaa

SEQ ID NO: 388620 - RNA, 19 nt, Homo sapiens
  misc_RNA (1)...(19): siRNA sense strand
acagugaucuagauguuga

SEQ ID NO: 388621 - RNA, 19 nt, Homo sapiens
  misc_RNA (1)...(19): siRNA sense strand
agacagugaucuagauguu

SEQ ID NO: 388622 - RNA, 19 nt, Homo sapiens
  misc_RNA (1)...(19): siRNA sense strand
ugaaggagcggaaugaaga

SEQ ID NO: 388623 - RNA, 19 nt, Homo sapiens
  misc_RNA (1)...(19): siRNA sense strand
gaacgacgacggccaugug

SEQ ID NO: 388624 - RNA, 19 nt, Homo sapiens
  misc_RNA (1)...(19): siRNA sense strand
ggacccaccuacaaguaug

SEQ ID NO: 388625 - RNA, 19 nt, Homo sapiens
  misc_RNA (1)...(19): siRNA sense strand
gugggcgucugucuuuaua

SEQ ID NO: 388626 - RNA, 19 nt, Homo sapiens
  misc_RNA (1)...(19): siRNA sense strand
gaagccagcaucagacgaa

SEQ ID NO: 388627 - RNA, 19 nt, Homo sapiens
  misc_RNA (1)...(19): siRNA sense strand
ggaagaacaguuugagcaa

SEQ ID NO: 388628 - RNA, 19 nt, Homo sapiens
  misc_RNA (1)...(19): siRNA sense strand
ugaagacgaugaagacuac

SEQ ID NO: 388629 - RNA, 19 nt, Homo sapiens
  misc_RNA (1)...(19): siRNA sense strand
cagagcagaugauuuacau

SEQ ID NO: 388630 - RNA, 19 nt, Homo sapiens
  misc_RNA (1)...(19): siRNA sense strand
gaaacucugcuucccaaug

SEQ ID NO: 388631 - RNA, 19 nt, Homo sapiens
  misc_RNA (1)...(19): siRNA sense strand
gcugaaaucuacaaaauca

SEQ ID NO: 388632 - RNA, 19 nt, Homo sapiens
  misc_RNA (1)...(19): siRNA sense strand
gaacgugaacggaggaaag

SEQ ID NO: 388633 - RNA, 19 nt, Homo sapiens
  misc_RNA (1)...(19): siRNA sense strand
caaaagagaucccauagac

SEQ ID NO: 388634 - RNA, 19 nt, Homo sapiens
  misc_RNA (1)...(19): siRNA sense strand
ucaccacccuaaacuguug

SEQ ID NO: 388635 - RNA, 19 nt, Homo sapiens
  misc_RNA (1)...(19): siRNA sense strand
ucaccgaccuuagaagaga

SEQ ID NO: 388636 - RNA, 19 nt, Homo sapiens
  misc_RNA (1)...(19): siRNA sense strand
caacuacagcuacagaaau

SEQ ID NO: 388637 - RNA, 19 nt, Homo sapiens
  misc_RNA (1)...(19): siRNA sense strand
aaacucugcuucccaaugg

SEQ ID NO: 388638 - RNA, 19 nt, Homo sapiens
  misc_RNA (1)...(19): siRNA sense strand
agaagcagcauccaacgua

SEQ ID NO: 388639 - RNA, 19 nt, Homo sapiens
  misc_RNA (1)...(19): siRNA sense strand
gugacuggcugcugaagau

SEQ ID NO: 388640 - RNA, 19 nt, Homo sapiens
  misc_RNA (1)...(19): siRNA sense strand
ggacguggacgguaugaag

SEQ ID NO: 388641 - RNA, 19 nt, Homo sapiens
  misc_RNA (1)...(19): siRNA sense strand
gaacgccucauagcuuuga

SEQ ID NO: 388642 - RNA, 19 nt, Homo sapiens
  misc_RNA (1)...(19): siRNA sense strand
ggaguuaugggacaauugu

SEQ ID NO: 388643 - RNA, 19 nt, Homo sapiens
  misc_RNA (1)...(19): siRNA sense strand
ccgcauugaucuuacuuau

SEQ ID NO: 388644 - RNA, 19 nt, Homo sapiens
  misc_RNA (1)...(19): siRNA sense strand
gggcgucugucuuuauauc

SEQ ID NO: 388645 - RNA, 19 nt, Homo sapiens
  misc_RNA (1)...(19): siRNA sense strand
cagguuggcucccaucauc

SEQ ID NO: 388646 - RNA, 19 nt, Homo sapiens
  misc_RNA (1)...(19): siRNA sense strand
ggagacagagcagaugauu

SEQ ID NO: 388647 - RNA, 19 nt, Homo sapiens
  misc_RNA (1)...(19): siRNA sense strand
gagcugaggcugaaaucug

SEQ ID NO: 388648 - RNA, 19 nt, Homo sapiens
  misc_RNA (1)...(19): siRNA sense strand
aauaacacuuggcuuucua

SEQ ID NO: 388649 - RNA, 19 nt, Homo sapiens
  misc_RNA (1)...(19): siRNA sense strand
gcucggacuggaauaagua

SEQ ID NO: 388650 - RNA, 19 nt, Homo sapiens
  misc_RNA (1)...(19): siRNA sense strand
uaaaacagcuggagaacuc

SEQ ID NO: 388651 - RNA, 19 nt, Homo sapiens
  misc_RNA (1)...(19): siRNA sense strand
uaaggacuuucacgaagga

SEQ ID NO: 388652 - RNA, 19 nt, Homo sapiens
  misc_RNA (1)...(19): siRNA sense strand
gaucaacuacagcuacaga

SEQ ID NO: 388653 - RNA, 19 nt, Homo sapiens
  misc_RNA (1)...(19): siRNA sense strand
caggugagcugcugugacu

SEQ ID NO: 388654 - RNA, 19 nt, Homo sapiens
  misc_RNA (1)...(19): siRNA sense strand
gcagacggcaagacuucua

SEQ ID NO: 388655 - RNA, 19 nt, Homo sapiens
  misc_RNA (1)...(19): siRNA sense strand
gaggaagaaacaucccuuu

SEQ ID NO: 388656 - RNA, 19 nt, Homo sapiens
  misc_RNA (1)...(19): siRNA sense strand
ucuggaauuugaucaacua

SEQ ID NO: 388657 - RNA, 19 nt, Homo sapiens
  misc_RNA (1)...(19): siRNA sense strand
cauggacgauggaguguca

SEQ ID NO: 388658 - RNA, 19 nt, Homo sapiens
  misc_RNA (1)...(19): siRNA sense strand
gcacuuugcggaugaacug

SEQ ID NO: 388659 - RNA, 19 nt, Homo sapiens
  misc_RNA (1)...(19): siRNA sense strand
ggagaucauucggaaacga

SEQ ID NO: 388660 - RNA, 19 nt, Homo sapiens
  misc_RNA (1)...(19): siRNA sense strand
aggacuggcugaaagguuu

SEQ ID NO: 388661 - RNA, 19 nt, Homo sapiens
  misc_RNA (1)...(19): siRNA sense strand
ggagguggaaguucaggaa

SEQ ID NO: 388662 - RNA, 19 nt, Homo sapiens
  misc_RNA (1)...(19): siRNA sense strand
gagcgucaguccgaauuca

SEQ ID NO: 388663 - RNA, 19 nt, Homo sapiens
  misc_RNA (1)...(19): siRNA sense strand
gaagaaaaggaagucauua

SEQ ID NO: 388664 - RNA, 19 nt, Homo sapiens
  misc_RNA (1)...(19): siRNA sense strand
aggaacgccucauagcuuu

SEQ ID NO: 388665 - RNA, 19 nt, Homo sapiens
  misc_RNA (1)...(19): siRNA sense strand
gacagucacucggcucuca

SEQ ID NO: 388666 - RNA, 19 nt, Homo sapiens
  misc_RNA (1)...(19): siRNA sense strand
caauuguucuugucaggau

SEQ ID NO: 388667 - RNA, 19 nt, Homo sapiens
  misc_RNA (1)...(19): siRNA sense strand
aaagccauguggucucuga

SEQ ID NO: 388668 - RNA, 19 nt, Homo sapiens
  misc_RNA (1)...(19): siRNA sense strand
cggaugaacugucuugacu

SEQ ID NO: 388669 - RNA, 19 nt, Homo sapiens
  misc_RNA (1)...(19): siRNA sense strand
uaagagcucagacccuuug

SEQ ID NO: 388670 - RNA, 19 nt, Homo sapiens
  misc_RNA (1)...(19): siRNA sense strand
cacccuaaacuguugaaua

SEQ ID NO: 388671 - RNA, 19 nt, Homo sapiens
  misc_RNA (1)...(19): siRNA sense strand
ggcagagcagugaagauua

SEQ ID NO: 388672 - RNA, 19 nt, Homo sapiens
  misc_RNA (1)...(19): siRNA sense strand
ggagcggaaugaagacuac

SEQ ID NO: 388673 - RNA, 19 nt, Homo sapiens
  misc_RNA (1)...(19): siRNA sense strand
ggaauugagcgcagggaau

SEQ ID NO: 388674 - RNA, 19 nt, Homo sapiens
  misc_RNA (1)...(19): siRNA sense strand
aagaacaguuugagcaaca

SEQ ID NO: 388675 - RNA, 19 nt, Homo sapiens
  misc_RNA (1)...(19): siRNA sense strand
gaccaaggacuggcugaaa

SEQ ID NO: 388676 - RNA, 19 nt, Homo sapiens
  misc_RNA (1)...(19): siRNA sense strand
aagaaacaucccuuugaua

SEQ ID NO: 388677 - RNA, 19 nt, Homo sapiens
  misc_RNA (1)...(19): siRNA sense strand
cgucugucuuuauaucuuu

SEQ ID NO: 388678 - RNA, 19 nt, Homo sapiens
  misc_RNA (1)...(19): siRNA sense strand
ccaguacuaccaacaagaa

SEQ ID NO: 388679 - RNA, 19 nt, Homo sapiens
  misc_RNA (1)...(19): siRNA sense strand
ucagagaucuaccgauuug

SEQ ID NO: 388680 - RNA, 19 nt, Homo sapiens
  misc_RNA (1)...(19): siRNA sense strand
cgucagagaucuaccgauu

SEQ ID NO: 388681 - RNA, 19 nt, Homo sapiens
  misc_RNA (1)...(19): siRNA sense strand
gcugauaccugcacacauc

SEQ ID NO: 388682 - RNA, 19 nt, Homo sapiens
  misc_RNA (1)...(19): siRNA sense strand
gagcuucgauucaauaaaa

SEQ ID NO: 388683 - RNA, 19 nt, Homo sapiens
  misc_RNA (1)...(19): siRNA sense strand
ucaugaugcucuccuuaua

SEQ ID NO: 388684 - RNA, 19 nt, Homo sapiens
  misc_RNA (1)...(19): siRNA sense strand
gcuaugggcugcuuugucu

SEQ ID NO: 388685 - RNA, 19 nt, Homo sapiens
  misc_RNA (1)...(19): siRNA sense strand
ggacucuucugccuuggaa

SEQ ID NO: 388686 - RNA, 19 nt, Homo sapiens
  misc_RNA (1)...(19): siRNA sense strand
cugcugugcucuccuguua

SEQ ID NO: 388687 - RNA, 19 nt, Homo sapiens
  misc_RNA (1)...(19): siRNA sense strand
ccucgacacuggccuguuu

SEQ ID NO: 388688 - RNA, 19 nt, Homo sapiens
  misc_RNA (1)...(19): siRNA sense strand
gaacugugaccuucaucuu

SEQ ID NO: 388689 - RNA, 19 nt, Homo sapiens
  misc_RNA (1)...(19): siRNA sense strand
gcugugcucuccuguuaug

SEQ ID NO: 388690 - RNA, 19 nt, Homo sapiens
  misc_RNA (1)...(19): siRNA sense strand
gcucuaugcuccgucauug

SEQ ID NO: 388691 - RNA, 19 nt, Homo sapiens
  misc_RNA (1)...(19): siRNA sense strand
gaccuugguucccugaguu

SEQ ID NO: 388692 - RNA, 19 nt, Homo sapiens
  misc_RNA (1)...(19): siRNA sense strand
gucauggccuucuggauug

SEQ ID NO: 388693 - RNA, 19 nt, Homo sapiens
  misc_RNA (1)...(19): siRNA sense strand
gcagcaaucagcaucuuug

SEQ ID NO: 388694 - RNA, 19 nt, Homo sapiens
  misc_RNA (1)...(19): siRNA sense strand
ccugaacccugcaaccauu

SEQ ID NO: 388695 - RNA, 19 nt, Homo sapiens
  misc_RNA (1)...(19): siRNA sense strand
cagcaucuuuggcaugguu

SEQ ID NO: 388696 - RNA, 19 nt, Homo sapiens
  misc_RNA (1)...(19): siRNA sense strand
cgucauggccuucuggauu

SEQ ID NO: 388697 - RNA, 19 nt, Homo sapiens
  misc_RNA (1)...(19): siRNA sense strand
gugcagcgguaccucaguu

SEQ ID NO: 388698 - RNA, 19 nt, Homo sapiens
  misc_RNA (1)...(19): siRNA sense strand
gggcugcuuugucuaggaa

SEQ ID NO: 388699 - RNA, 19 nt, Homo sapiens
  misc_RNA (1)...(19): siRNA sense strand
gcacaagcgugggcauguc

SEQ ID NO: 388700 - RNA, 19 nt, Homo sapiens
  misc_RNA (1)...(19): siRNA sense strand
caacuccaccacagugauu

SEQ ID NO: 388701 - RNA, 19 nt, Homo sapiens
  misc_RNA (1)...(19): siRNA sense strand
ucauuggccuggucauguu

SEQ ID NO: 388702 - RNA, 19 nt, Homo sapiens
  misc_RNA (1)...(19): siRNA sense strand
gcacuauauccucugcuuu

SEQ ID NO: 388703 - RNA, 19 nt, Homo sapiens
  misc_RNA (1)...(19): siRNA sense strand
gcaaccauuuacccagugu

SEQ ID NO: 388704 - RNA, 19 nt, Homo sapiens
  misc_RNA (1)...(19): siRNA sense strand
acacugaugcccuugacua

SEQ ID NO: 388705 - RNA, 19 nt, Homo sapiens
  misc_RNA (1)...(19): siRNA sense strand
caugggaguugugcucuau

SEQ ID NO: 388706 - RNA, 19 nt, Homo sapiens
  misc_RNA (1)...(19): siRNA sense strand
gguucuauuccuugucuua

SEQ ID NO: 388707 - RNA, 19 nt, Homo sapiens
  misc_RNA (1)...(19): siRNA sense strand
caacuguuacgauggaaga

SEQ ID NO: 388708 - RNA, 19 nt, Homo sapiens
  misc_RNA (1)...(19): siRNA sense strand
cagaccaguucguccugua

SEQ ID NO: 388709 - RNA, 19 nt, Homo sapiens
  misc_RNA (1)...(19): siRNA sense strand
gguucucucucuugccauu

SEQ ID NO: 388710 - RNA, 19 nt, Homo sapiens
  misc_RNA (1)...(19): siRNA sense strand
gugacuggcuuugaucugu

SEQ ID NO: 388711 - RNA, 19 nt, Homo sapiens
  misc_RNA (1)...(19): siRNA sense strand
uuaauucauuggcaacugu

SEQ ID NO: 388712 - RNA, 19 nt, Homo sapiens
  misc_RNA (1)...(19): siRNA sense strand
uaccaggaguaucccauga

SEQ ID NO: 388713 - RNA, 19 nt, Homo sapiens
  misc_RNA (1)...(19): siRNA sense strand
gcagcuggcaguuaucauc

SEQ ID NO: 388714 - RNA, 19 nt, Homo sapiens
  misc_RNA (1)...(19): siRNA sense strand
acugugaccuucaucuuuc

SEQ ID NO: 388715 - RNA, 19 nt, Homo sapiens
  misc_RNA (1)...(19): siRNA sense strand
gaagaccugauucgaccuu

SEQ ID NO: 388716 - RNA, 19 nt, Homo sapiens
  misc_RNA (1)...(19): siRNA sense strand
gaguaucccaugagcauuc

SEQ ID NO: 388717 - RNA, 19 nt, Homo sapiens
  misc_RNA (1)...(19): siRNA sense strand
ucgggcagcuggcaguuau

SEQ ID NO: 388718 - RNA, 19 nt, Homo sapiens
  misc_RNA (1)...(19): siRNA sense strand
gcgguucuauuccuugucu

SEQ ID NO: 388719 - RNA, 19 nt, Homo sapiens
  misc_RNA (1)...(19): siRNA sense strand
uggcaacuguuacgaugga

SEQ ID NO: 388720 - RNA, 19 nt, Homo sapiens
  misc_RNA (1)...(19): siRNA sense strand
ucaccagugccuaugagua

SEQ ID NO: 388721 - RNA, 19 nt, Homo sapiens
  misc_RNA (1)...(19): siRNA sense strand
ugcgugggcugccucauug

SEQ ID NO: 388722 - RNA, 19 nt, Homo sapiens
  misc_RNA (1)...(19): siRNA sense strand
ggccgcaucucuggguuug

SEQ ID NO: 388723 - RNA, 19 nt, Homo sapiens
  misc_RNA (1)...(19): siRNA sense strand
ugugauggaucuccugaag

SEQ ID NO: 388724 - RNA, 19 nt, Homo sapiens
  misc_RNA (1)...(19): siRNA sense strand
ucuauuccuugucuuacuu

SEQ ID NO: 388725 - RNA, 19 nt, Homo sapiens
  misc_RNA (1)...(19): siRNA sense strand
guaccuggagcuucgauuc

SEQ ID NO: 388726 - RNA, 19 nt, Homo sapiens
  misc_RNA (1)...(19): siRNA sense strand
gcggcucucucagcacuau

SEQ ID NO: 388727 - RNA, 19 nt, Homo sapiens
  misc_RNA (1)...(19): siRNA sense strand
ccaguucguccuguacuuu

SEQ ID NO: 388728 - RNA, 19 nt, Homo sapiens
  misc_RNA (1)...(19): siRNA sense strand
guggugggccugauuguca

SEQ ID NO: 388729 - RNA, 19 nt, Homo sapiens
  misc_RNA (1)...(19): siRNA sense strand
cgaccuugguucccugagu

SEQ ID NO: 388730 - RNA, 19 nt, Homo sapiens
  misc_RNA (1)...(19): siRNA sense strand
gauugucagucuacucacu

SEQ ID NO: 388731 - RNA, 19 nt, Homo sapiens
  misc_RNA (1)...(19): siRNA sense strand
gggcugcagcgguucuauu

SEQ ID NO: 388732 - RNA, 19 nt, Homo sapiens
  misc_RNA (1)...(19): siRNA sense strand
ggccuugccuuuggcuaug

SEQ ID NO: 388733 - RNA, 19 nt, Homo sapiens
  misc_RNA (1)...(19): siRNA sense strand
ugccagggcucuucauugc

SEQ ID NO: 388734 - RNA, 19 nt, Homo sapiens
  misc_RNA (1)...(19): siRNA sense strand
ugaacccugcaaccauuua

SEQ ID NO: 388735 - RNA, 19 nt, Homo sapiens
  misc_RNA (1)...(19): siRNA sense strand
uaacccuccuggugcuguu

SEQ ID NO: 388736 - RNA, 19 nt, Homo sapiens
  misc_RNA (1)...(19): siRNA sense strand
gauggaagaccugauucga

SEQ ID NO: 388737 - RNA, 19 nt, Homo sapiens
  misc_RNA (1)...(19): siRNA sense strand
ggagcuucgauucaauaaa

SEQ ID NO: 388738 - RNA, 19 nt, Homo sapiens
  misc_RNA (1)...(19): siRNA sense strand
cagcgguucuauuccuugu

SEQ ID NO: 388739 - RNA, 19 nt, Homo sapiens
  misc_RNA (1)...(19): siRNA sense strand
guggaacugugaccuucau

SEQ ID NO: 388740 - RNA, 19 nt, Homo sapiens
  misc_RNA (1)...(19): siRNA sense strand
cauggacuaugugguguuc

SEQ ID NO: 388741 - RNA, 19 nt, Homo sapiens
  misc_RNA (1)...(19): siRNA sense strand
uuccuugucuuacuuaugg

SEQ ID NO: 388742 - RNA, 19 nt, Homo sapiens
  misc_RNA (1)...(19): siRNA sense strand
uggucauguucgcguauua

SEQ ID NO: 388743 - RNA, 19 nt, Homo sapiens
  misc_RNA (1)...(19): siRNA sense strand
cauugucuguaccgucuau

SEQ ID NO: 388744 - RNA, 19 nt, Homo sapiens
  misc_RNA (1)...(19): siRNA sense strand
gcugcuuugucuaggaaug

SEQ ID NO: 388745 - RNA, 19 nt, Homo sapiens
  misc_RNA (1)...(19): siRNA sense strand
ccugagaagccgaggaaug

SEQ ID NO: 388746 - RNA, 19 nt, Homo sapiens
  misc_RNA (1)...(19): siRNA sense strand
acaugggaguugugcucua

SEQ ID NO: 388747 - RNA, 19 nt, Homo sapiens
  misc_RNA (1)...(19): siRNA sense strand
gcgugggcaugucuaccuu

SEQ ID NO: 388748 - RNA, 19 nt, Homo sapiens
  misc_RNA (1)...(19): siRNA sense strand
gauaccugcacacaucuuc

SEQ ID NO: 388749 - RNA, 19 nt, Homo sapiens
  misc_RNA (1)...(19): siRNA sense strand
ccacacugaugcccuugac

SEQ ID NO: 388750 - RNA, 19 nt, Homo sapiens
  misc_RNA (1)...(19): siRNA sense strand
cuucauugccugccucuuc

SEQ ID NO: 388751 - RNA, 19 nt, Homo sapiens
  misc_RNA (1)...(19): siRNA sense strand
ggaacugugaccuucaucu

SEQ ID NO: 388752 - RNA, 19 nt, Homo sapiens
  misc_RNA (1)...(19): siRNA sense strand
caccagugccuaugaguac

SEQ ID NO: 388753 - RNA, 19 nt, Homo sapiens
  misc_RNA (1)...(19): siRNA sense strand
gucagagaucuaccgauuu

SEQ ID NO: 388754 - RNA, 19 nt, Homo sapiens
  misc_RNA (1)...(19): siRNA sense strand
ucaguucccgcacggagaa

SEQ ID NO: 388755 - RNA, 19 nt, Homo sapiens
  misc_RNA (1)...(19): siRNA sense strand
cuucaugaugcucuccuua

SEQ ID NO: 388756 - RNA, 19 nt, Homo sapiens
  misc_RNA (1)...(19): siRNA sense strand
ccgcaucucuggguuugag

SEQ ID NO: 388757 - RNA, 19 nt, Homo sapiens
  misc_RNA (1)...(19): siRNA sense strand
gaaagcugcucaaaucaaa

SEQ ID NO: 388758 - RNA, 19 nt, Homo sapiens
  misc_RNA (1)...(19): siRNA sense strand
gaaaucaacucucucaagu

SEQ ID NO: 388759 - RNA, 19 nt, Homo sapiens
  misc_RNA (1)...(19): siRNA sense strand
gcacaacucuuuacagaca

SEQ ID NO: 388760 - RNA, 19 nt, Homo sapiens
  misc_RNA (1)...(19): siRNA sense strand
gcaugaagcucuugguauu

SEQ ID NO: 388761 - RNA, 19 nt, Homo sapiens
  misc_RNA (1)...(19): siRNA sense strand
caaacaggguucuccauuu

SEQ ID NO: 388762 - RNA, 19 nt, Homo sapiens
  misc_RNA (1)...(19): siRNA sense strand
caaagaacauuuacugaag

SEQ ID NO: 388763 - RNA, 19 nt, Homo sapiens
  misc_RNA (1)...(19): siRNA sense strand
gcaaagaggagaacauuuc

SEQ ID NO: 388764 - RNA, 19 nt, Homo sapiens
  misc_RNA (1)...(19): siRNA sense strand
gaagaggagucaucugaag

SEQ ID NO: 388765 - RNA, 19 nt, Homo sapiens
  misc_RNA (1)...(19): siRNA sense strand
gauaugauuuacuggauug

SEQ ID NO: 388766 - RNA, 19 nt, Homo sapiens
  misc_RNA (1)...(19): siRNA sense strand
caaugugguucgaauaauu

SEQ ID NO: 388767 - RNA, 19 nt, Homo sapiens
  misc_RNA (1)...(19): siRNA sense strand
gcacguaacagcuaaggaa

SEQ ID NO: 388768 - RNA, 19 nt, Homo sapiens
  misc_RNA (1)...(19): siRNA sense strand
ucaaaguguuccagaauga

SEQ ID NO: 388769 - RNA, 19 nt, Homo sapiens
  misc_RNA (1)...(19): siRNA sense strand
gaagagagugaaagugaaa

SEQ ID NO: 388770 - RNA, 19 nt, Homo sapiens
  misc_RNA (1)...(19): siRNA sense strand
gaugaaagguuacaaucca

SEQ ID NO: 388771 - RNA, 19 nt, Homo sapiens
  misc_RNA (1)...(19): siRNA sense strand
aaucaacucucucaaguau

SEQ ID NO: 388772 - RNA, 19 nt, Homo sapiens
  misc_RNA (1)...(19): siRNA sense strand
gaguggagguucgauauga

SEQ ID NO: 388773 - RNA, 19 nt, Homo sapiens
  misc_RNA (1)...(19): siRNA sense strand
ccaagguacugauggcuuu

SEQ ID NO: 388774 - RNA, 19 nt, Homo sapiens
  misc_RNA (1)...(19): siRNA sense strand
caaguaugccuauaacgua

SEQ ID NO: 388775 - RNA, 19 nt, Homo sapiens
  misc_RNA (1)...(19): siRNA sense strand
gcaauugcuuuaucaccaa

SEQ ID NO: 388776 - RNA, 19 nt, Homo sapiens
  misc_RNA (1)...(19): siRNA sense strand
aagugaagaugaaagguua

SEQ ID NO: 388777 - RNA, 19 nt, Homo sapiens
  misc_RNA (1)...(19): siRNA sense strand
cguaacagcuaaggaauau

SEQ ID NO: 388778 - RNA, 19 nt, Homo sapiens
  misc_RNA (1)...(19): siRNA sense strand
cuggaaagcugcucaaauc

SEQ ID NO: 388779 - RNA, 19 nt, Homo sapiens
  misc_RNA (1)...(19): siRNA sense strand
gaagaugaaagguuacaau

SEQ ID NO: 388780 - RNA, 19 nt, Homo sapiens
  misc_RNA (1)...(19): siRNA sense strand
acccagagcugcacucauu

SEQ ID NO: 388781 - RNA, 19 nt, Homo sapiens
  misc_RNA (1)...(19): siRNA sense strand
ggaaagcugcucaaaucaa

SEQ ID NO: 388782 - RNA, 19 nt, Homo sapiens
  misc_RNA (1)...(19): siRNA sense strand
ugacuacacucuggaauuc

SEQ ID NO: 388783 - RNA, 19 nt, Homo sapiens
  misc_RNA (1)...(19): siRNA sense strand
uggcacaacucuuuacaga

SEQ ID NO: 388784 - RNA, 19 nt, Homo sapiens
  misc_RNA (1)...(19): siRNA sense strand
ccagagcccuugaggaaca

SEQ ID NO: 388785 - RNA, 19 nt, Homo sapiens
  misc_RNA (1)...(19): siRNA sense strand
ggaaaucaacucucucaag

SEQ ID NO: 388786 - RNA, 19 nt, Homo sapiens
  misc_RNA (1)...(19): siRNA sense strand
gaggcgaacuucacugaca

SEQ ID NO: 388787 - RNA, 19 nt, Homo sapiens
  misc_RNA (1)...(19): siRNA sense strand
gaacauuuacugaagucaa

SEQ ID NO: 388788 - RNA, 19 nt, Homo sapiens
  misc_RNA (1)...(19): siRNA sense strand
ggaagaagagagugaaagu

SEQ ID NO: 388789 - RNA, 19 nt, Homo sapiens
  misc_RNA (1)...(19): siRNA sense strand
ggaaccagauccacaugca

SEQ ID NO: 388790 - RNA, 19 nt, Homo sapiens
  misc_RNA (1)...(19): siRNA sense strand
ggagguucgauaugauuua

SEQ ID NO: 388791 - RNA, 19 nt, Homo sapiens
  misc_RNA (1)...(19): siRNA sense strand
ggacaaagugaagaugaaa

SEQ ID NO: 388792 - RNA, 19 nt, Homo sapiens
  misc_RNA (1)...(19): siRNA sense strand
acaggaaacauuugucuuu

SEQ ID NO: 388793 - RNA, 19 nt, Homo sapiens
  misc_RNA (1)...(19): siRNA sense strand
aaacaauucugagcugguu

SEQ ID NO: 388794 - RNA, 19 nt, Homo sapiens
  misc_RNA (1)...(19): siRNA sense strand
gaaagugagcaaaguaugg

SEQ ID NO: 388795 - RNA, 19 nt, Homo sapiens
  misc_RNA (1)...(19): siRNA sense strand
ugacgaugaucuucaagga

SEQ ID NO: 388796 - RNA, 19 nt, Homo sapiens
  misc_RNA (1)...(19): siRNA sense strand
caccagagcccuugaggaa

SEQ ID NO: 388797 - RNA, 19 nt, Homo sapiens
  misc_RNA (1)...(19): siRNA sense strand
agaggaagaugaagaugau

SEQ ID NO: 388798 - RNA, 19 nt, Homo sapiens
  misc_RNA (1)...(19): siRNA sense strand
aaacaggguucuccauuuu

SEQ ID NO: 388799 - RNA, 19 nt, Homo sapiens
  misc_RNA (1)...(19): siRNA sense strand
gccuauaacguaagucuaa

SEQ ID NO: 388800 - RNA, 19 nt, Homo sapiens
  misc_RNA (1)...(19): siRNA sense strand
aagaagagagugaaaguga

SEQ ID NO: 388801 - RNA, 19 nt, Homo sapiens
  misc_RNA (1)...(19): siRNA sense strand
cgauaugauuuacuggauu

SEQ ID NO: 388802 - RNA, 19 nt, Homo sapiens
  misc_RNA (1)...(19): siRNA sense strand
caacauggaagaagagagu

SEQ ID NO: 388803 - RNA, 19 nt, Homo sapiens
  misc_RNA (1)...(19): siRNA sense strand
ugaagaugauggcgaguuc

SEQ ID NO: 388804 - RNA, 19 nt, Homo sapiens
  misc_RNA (1)...(19): siRNA sense strand
ucagguggcacaacucuuu

SEQ ID NO: 388805 - RNA, 19 nt, Homo sapiens
  misc_RNA (1)...(19): siRNA sense strand
ggaaacauuugucuuuugu

SEQ ID NO: 388806 - RNA, 19 nt, Homo sapiens
  misc_RNA (1)...(19): siRNA sense strand
gggcaaagaggagaacauu

SEQ ID NO: 388807 - RNA, 19 nt, Homo sapiens
  misc_RNA (1)...(19): siRNA sense strand
cgaggucucuuagugaaug

SEQ ID NO: 388808 - RNA, 19 nt, Homo sapiens
  misc_RNA (1)...(19): siRNA sense strand
gguaguggcuguggauagu

SEQ ID NO: 388809 - RNA, 19 nt, Homo sapiens
  misc_RNA (1)...(19): siRNA sense strand
gcucaaaucaaagaacauu

SEQ ID NO: 388810 - RNA, 19 nt, Homo sapiens
  misc_RNA (1)...(19): siRNA sense strand
gaaagugaaagugagcaaa

SEQ ID NO: 388811 - RNA, 19 nt, Homo sapiens
  misc_RNA (1)...(19): siRNA sense strand
gacaaucucguccuggaaa

SEQ ID NO: 388812 - RNA, 19 nt, Homo sapiens
  misc_RNA (1)...(19): siRNA sense strand
uuacuggauugucauauca

SEQ ID NO: 388813 - RNA, 19 nt, Homo sapiens
  misc_RNA (1)...(19): siRNA sense strand
ggccagcaguugcgcaaga

SEQ ID NO: 388814 - RNA, 19 nt, Homo sapiens
  misc_RNA (1)...(19): siRNA sense strand
ucaacucucucaaguaugc

SEQ ID NO: 388815 - RNA, 19 nt, Homo sapiens
  misc_RNA (1)...(19): siRNA sense strand
agaagagagugaaagugaa

SEQ ID NO: 388816 - RNA, 19 nt, Homo sapiens
  misc_RNA (1)...(19): siRNA sense strand
cgaagacaaugugguagug

SEQ ID NO: 388817 - RNA, 19 nt, Homo sapiens
  misc_RNA (1)...(19): siRNA sense strand
gaaugaaguuuuaggaaca

SEQ ID NO: 388818 - RNA, 19 nt, Homo sapiens
  misc_RNA (1)...(19): siRNA sense strand
agacaacuuugacuaccaa

SEQ ID NO: 388819 - RNA, 19 nt, Homo sapiens
  misc_RNA (1)...(19): siRNA sense strand
uuacagacaacuuugacua

SEQ ID NO: 388820 - RNA, 19 nt, Homo sapiens
  misc_RNA (1)...(19): siRNA sense strand
aaguaugccuauaacguaa

SEQ ID NO: 388821 - RNA, 19 nt, Homo sapiens
  misc_RNA (1)...(19): siRNA sense strand
gagauguccuccgugaugu

SEQ ID NO: 388822 - RNA, 19 nt, Homo sapiens
  misc_RNA (1)...(19): siRNA sense strand
uagcagccauugaggacuu

SEQ ID NO: 388823 - RNA, 19 nt, Homo sapiens
  misc_RNA (1)...(19): siRNA sense strand
gaagaagagagugaaagug

SEQ ID NO: 388824 - RNA, 19 nt, Homo sapiens
  misc_RNA (1)...(19): siRNA sense strand
uuacaauccagcagaagua

SEQ ID NO: 388825 - RNA, 19 nt, Homo sapiens
  misc_RNA (1)...(19): siRNA sense strand
gauggcgaguucagugaug

SEQ ID NO: 388826 - RNA, 19 nt, Homo sapiens
  misc_RNA (1)...(19): siRNA sense strand
uaacagcuaaggaauaugg

SEQ ID NO: 388827 - RNA, 19 nt, Homo sapiens
  misc_RNA (1)...(19): siRNA sense strand
ugaugacgaugaucuucaa

SEQ ID NO: 388828 - RNA, 19 nt, Homo sapiens
  misc_RNA (1)...(19): siRNA sense strand
caucaaaguguuccagaau

SEQ ID NO: 388829 - RNA, 19 nt, Homo sapiens
  misc_RNA (1)...(19): siRNA sense strand
gacucaagaucaacaugga

SEQ ID NO: 388830 - RNA, 19 nt, Homo sapiens
  misc_RNA (1)...(19): siRNA sense strand
cagaggaagaugaagauga

SEQ ID NO: 388831 - RNA, 19 nt, Homo sapiens
  misc_RNA (1)...(19): siRNA sense strand
cgaguucagugaugauucu

SEQ ID NO: 388832 - RNA, 19 nt, Homo sapiens
  misc_RNA (1)...(19): siRNA sense strand
agcaaaguauggauucuga

SEQ ID NO: 388833 - RNA, 19 nt, Homo sapiens
  misc_RNA (1)...(19): siRNA sense strand
ucaaugugguucgaauaau

SEQ ID NO: 388834 - RNA, 19 nt, Homo sapiens
  misc_RNA (1)...(19): siRNA sense strand
gcugaggaaacaauucuga

SEQ ID NO: 388835 - RNA, 19 nt, Homo sapiens
  misc_RNA (1)...(19): siRNA sense strand
ugccacagguguacaggaa

SEQ ID NO: 388836 - RNA, 19 nt, Homo sapiens
  misc_RNA (1)...(19): siRNA sense strand
gcacugucauuggcagcaa

SEQ ID NO: 388837 - RNA, 19 nt, Homo sapiens
  misc_RNA (1)...(19): siRNA sense strand
acaaacaggguucuccauu

SEQ ID NO: 388838 - RNA, 19 nt, Homo sapiens
  misc_RNA (1)...(19): siRNA sense strand
ggugcgcucugacuuucuu

SEQ ID NO: 388839 - RNA, 19 nt, Homo sapiens
  misc_RNA (1)...(19): siRNA sense strand
aaagagauacaacugacaa

SEQ ID NO: 388840 - RNA, 19 nt, Homo sapiens
  misc_RNA (1)...(19): siRNA sense strand
caagggcuaccucuggaaa

SEQ ID NO: 388841 - RNA, 19 nt, Homo sapiens
  misc_RNA (1)...(19): siRNA sense strand
gcugccacauuggugauaa

SEQ ID NO: 388842 - RNA, 19 nt, Homo sapiens
  misc_RNA (1)...(19): siRNA sense strand
guacaggaaacauuugucu

SEQ ID NO: 388843 - RNA, 19 nt, Homo sapiens
  misc_RNA (1)...(19): siRNA sense strand
ugacaagggccagcaguug

SEQ ID NO: 388844 - RNA, 19 nt, Homo sapiens
  misc_RNA (1)...(19): siRNA sense strand
gccaaagagauacaacuga

SEQ ID NO: 388845 - RNA, 19 nt, Homo sapiens
  misc_RNA (1)...(19): siRNA sense strand
guuccagaaugaaguuuua

SEQ ID NO: 388846 - RNA, 19 nt, Homo sapiens
  misc_RNA (1)...(19): siRNA sense strand
caagaucaacauggaagaa

SEQ ID NO: 388847 - RNA, 19 nt, Homo sapiens
  misc_RNA (1)...(19): siRNA sense strand
aaagugaagaugaaagguu

SEQ ID NO: 388848 - RNA, 19 nt, Homo sapiens
  misc_RNA (1)...(19): siRNA sense strand
gguucgauaugauuuacug

SEQ ID NO: 388849 - RNA, 19 nt, Homo sapiens
  misc_RNA (1)...(19): siRNA sense strand
ccacagguguacaggaaac

SEQ ID NO: 388850 - RNA, 19 nt, Homo sapiens
  misc_RNA (1)...(19): siRNA sense strand
gagguucgauaugauuuac

SEQ ID NO: 388851 - RNA, 19 nt, Homo sapiens
  misc_RNA (1)...(19): siRNA sense strand
ccuauaacguaagucuaaa

SEQ ID NO: 388852 - RNA, 19 nt, Homo sapiens
  misc_RNA (1)...(19): siRNA sense strand
ggaaagcugcaggcaugaa

SEQ ID NO: 388853 - RNA, 19 nt, Homo sapiens
  misc_RNA (1)...(19): siRNA sense strand
gcuggaaagcugcucaaau

SEQ ID NO: 388854 - RNA, 19 nt, Homo sapiens
  misc_RNA (1)...(19): siRNA sense strand
caacagcugcagagguuca

SEQ ID NO: 388855 - RNA, 19 nt, Homo sapiens
  misc_RNA (1)...(19): siRNA sense strand
aucaacagcugcagagguu

SEQ ID NO: 388856 - RNA, 19 nt, Homo sapiens
  misc_RNA (1)...(19): siRNA sense strand
guauuuccauggccaaggu

SEQ ID NO: 388857 - RNA, 19 nt, Homo sapiens
  misc_RNA (1)...(19): siRNA sense strand
gaccaaggcuuacugaaua

SEQ ID NO: 388858 - RNA, 19 nt, Homo sapiens
  misc_RNA (1)...(19): siRNA sense strand
guaacacgauguacacuua

SEQ ID NO: 388859 - RNA, 19 nt, Homo sapiens
  misc_RNA (1)...(19): siRNA sense strand
caaauaaagucgaaagugu

SEQ ID NO: 388860 - RNA, 19 nt, Homo sapiens
  misc_RNA (1)...(19): siRNA sense strand
ucaccaagcuucacuguug

SEQ ID NO: 388861 - RNA, 19 nt, Homo sapiens
  misc_RNA (1)...(19): siRNA sense strand
gaagugaaucuaaucgaua

SEQ ID NO: 388862 - RNA, 19 nt, Homo sapiens
  misc_RNA (1)...(19): siRNA sense strand
uaugauagcuuguccugaa

SEQ ID NO: 388863 - RNA, 19 nt, Homo sapiens
  misc_RNA (1)...(19): siRNA sense strand
cgaggaagcuggugguguu

SEQ ID NO: 388864 - RNA, 19 nt, Homo sapiens
  misc_RNA (1)...(19): siRNA sense strand
ccaaagugcuggaaugaca

SEQ ID NO: 388865 - RNA, 19 nt, Homo sapiens
  misc_RNA (1)...(19): siRNA sense strand
aagagaaggugaaggaauu

SEQ ID NO: 388866 - RNA, 19 nt, Homo sapiens
  misc_RNA (1)...(19): siRNA sense strand
ccacagacauccacaagca

SEQ ID NO: 388867 - RNA, 19 nt, Homo sapiens
  misc_RNA (1)...(19): siRNA sense strand
gaggaaaccuucgaaccaa

SEQ ID NO: 388868 - RNA, 19 nt, Homo sapiens
  misc_RNA (1)...(19): siRNA sense strand
ggacgccguucagaagaua

SEQ ID NO: 388869 - RNA, 19 nt, Homo sapiens
  misc_RNA (1)...(19): siRNA sense strand
gugcaaaggucguccacuu

SEQ ID NO: 388870 - RNA, 19 nt, Homo sapiens
  misc_RNA (1)...(19): siRNA sense strand
caaugucgaugagcuguuu

SEQ ID NO: 388871 - RNA, 19 nt, Homo sapiens
  misc_RNA (1)...(19): siRNA sense strand
gacacaggcugacgaggaa

SEQ ID NO: 388872 - RNA, 19 nt, Homo sapiens
  misc_RNA (1)...(19): siRNA sense strand
gaaggacgccguucagaag

SEQ ID NO: 388873 - RNA, 19 nt, Homo sapiens
  misc_RNA (1)...(19): siRNA sense strand
gaagagaaggugaaggaau

SEQ ID NO: 388874 - RNA, 19 nt, Homo sapiens
  misc_RNA (1)...(19): siRNA sense strand
gcaaauaaagucgaaagug

SEQ ID NO: 388875 - RNA, 19 nt, Homo sapiens
  misc_RNA (1)...(19): siRNA sense strand
ugagacuccugccgugaua

SEQ ID NO: 388876 - RNA, 19 nt, Homo sapiens
  misc_RNA (1)...(19): siRNA sense strand
cgacccagauaguggauga

SEQ ID NO: 388877 - RNA, 19 nt, Homo sapiens
  misc_RNA (1)...(19): siRNA sense strand
guuggacucucacucacua

SEQ ID NO: 388878 - RNA, 19 nt, Homo sapiens
  misc_RNA (1)...(19): siRNA sense strand
gguggacggucuaccagaa

SEQ ID NO: 388879 - RNA, 19 nt, Homo sapiens
  misc_RNA (1)...(19): siRNA sense strand
caaguacaauccacagagu

SEQ ID NO: 388880 - RNA, 19 nt, Homo sapiens
  misc_RNA (1)...(19): siRNA sense strand
ugaagugaaucuaaucgau

SEQ ID NO: 388881 - RNA, 19 nt, Homo sapiens
  misc_RNA (1)...(19): siRNA sense strand
caccugccguucaucuaua

SEQ ID NO: 388882 - RNA, 19 nt, Homo sapiens
  misc_RNA (1)...(19): siRNA sense strand
caugaaaccuuggaacuac

SEQ ID NO: 388883 - RNA, 19 nt, Homo sapiens
  misc_RNA (1)...(19): siRNA sense strand
ugaagucauugaagugaau

SEQ ID NO: 388884 - RNA, 19 nt, Homo sapiens
  misc_RNA (1)...(19): siRNA sense strand
ggaaggccguaucgacuac

SEQ ID NO: 388885 - RNA, 19 nt, Homo sapiens
  misc_RNA (1)...(19): siRNA sense strand
gcaccugccguucaucuau

SEQ ID NO: 388886 - RNA, 19 nt, Homo sapiens
  misc_RNA (1)...(19): siRNA sense strand
caccuggccuuucugaaga

SEQ ID NO: 388887 - RNA, 19 nt, Homo sapiens
  misc_RNA (1)...(19): siRNA sense strand
ggaagcuggugguguugau

SEQ ID NO: 388888 - RNA, 19 nt, Homo sapiens
  misc_RNA (1)...(19): siRNA sense strand
ggauucagccucugguguu

SEQ ID NO: 388889 - RNA, 19 nt, Homo sapiens
  misc_RNA (1)...(19): siRNA sense strand
uuacagcccugccuucaag

SEQ ID NO: 388890 - RNA, 19 nt, Homo sapiens
  misc_RNA (1)...(19): siRNA sense strand
ucacagagacugaaaccau

SEQ ID NO: 388891 - RNA, 19 nt, Homo sapiens
  misc_RNA (1)...(19): siRNA sense strand
cuccugaggucaagcaauu

SEQ ID NO: 388892 - RNA, 19 nt, Homo sapiens
  misc_RNA (1)...(19): siRNA sense strand
gaccuggccgucucuguuu

SEQ ID NO: 388893 - RNA, 19 nt, Homo sapiens
  misc_RNA (1)...(19): siRNA sense strand
uagcuuguccugaaacuga

SEQ ID NO: 388894 - RNA, 19 nt, Homo sapiens
  misc_RNA (1)...(19): siRNA sense strand
gcagaccaaggcuuacuga

SEQ ID NO: 388895 - RNA, 19 nt, Homo sapiens
  misc_RNA (1)...(19): siRNA sense strand
gaagauaugauagcuuguc

SEQ ID NO: 388896 - RNA, 19 nt, Homo sapiens
  misc_RNA (1)...(19): siRNA sense strand
ggagagccgugugaaaauu

SEQ ID NO: 388897 - RNA, 19 nt, Homo sapiens
  misc_RNA (1)...(19): siRNA sense strand
ccaugaaaccuuggaacua

SEQ ID NO: 388898 - RNA, 19 nt, Homo sapiens
  misc_RNA (1)...(19): siRNA sense strand
guucaucuauaacuugagu

SEQ ID NO: 388899 - RNA, 19 nt, Homo sapiens
  misc_RNA (1)...(19): siRNA sense strand
gcaccaggcggcauuccuu

SEQ ID NO: 388900 - RNA, 19 nt, Homo sapiens
  misc_RNA (1)...(19): siRNA sense strand
ucacacacuuugccacagu

SEQ ID NO: 388901 - RNA, 19 nt, Homo sapiens
  misc_RNA (1)...(19): siRNA sense strand
gcccugccuucaagcaauu

SEQ ID NO: 388902 - RNA, 19 nt, Homo sapiens
  misc_RNA (1)...(19): siRNA sense strand
gccagcaaauaaagucgaa

SEQ ID NO: 388903 - RNA, 19 nt, Homo sapiens
  misc_RNA (1)...(19): siRNA sense strand
gaagguguucgaugaaguc

SEQ ID NO: 388904 - RNA, 19 nt, Homo sapiens
  misc_RNA (1)...(19): siRNA sense strand
gaacuacaaguacaaucca

SEQ ID NO: 388905 - RNA, 19 nt, Homo sapiens
  misc_RNA (1)...(19): siRNA sense strand
ggagacagaguuucaccau

SEQ ID NO: 388906 - RNA, 19 nt, Homo sapiens
  misc_RNA (1)...(19): siRNA sense strand
aaggcuuacugaauaguuu

SEQ ID NO: 388907 - RNA, 19 nt, Homo sapiens
  misc_RNA (1)...(19): siRNA sense strand
cgcauaaacuccugcuaca

SEQ ID NO: 388908 - RNA, 19 nt, Homo sapiens
  misc_RNA (1)...(19): siRNA sense strand
gauucagccucugguguug

SEQ ID NO: 388909 - RNA, 19 nt, Homo sapiens
  misc_RNA (1)...(19): siRNA sense strand
cauggaacacggcagcuuu

SEQ ID NO: 388910 - RNA, 19 nt, Homo sapiens
  misc_RNA (1)...(19): siRNA sense strand
uaaagucgaaagugucuca

SEQ ID NO: 388911 - RNA, 19 nt, Homo sapiens
  misc_RNA (1)...(19): siRNA sense strand
acaagcaccugccguucau

SEQ ID NO: 388912 - RNA, 19 nt, Homo sapiens
  misc_RNA (1)...(19): siRNA sense strand
aagugaaucuaaucgauag

SEQ ID NO: 388913 - RNA, 19 nt, Homo sapiens
  misc_RNA (1)...(19): siRNA sense strand
cgaggaaaccuucgaacca

SEQ ID NO: 388914 - RNA, 19 nt, Homo sapiens
  misc_RNA (1)...(19): siRNA sense strand
agaccaaggcuuacugaau

SEQ ID NO: 388915 - RNA, 19 nt, Homo sapiens
  misc_RNA (1)...(19): siRNA sense strand
ccaccuggccuuucugaag

SEQ ID NO: 388916 - RNA, 19 nt, Homo sapiens
  misc_RNA (1)...(19): siRNA sense strand
ucgaagagaaggugaagga

SEQ ID NO: 388917 - RNA, 19 nt, Homo sapiens
  misc_RNA (1)...(19): siRNA sense strand
cgaccuggccgucucuguu

SEQ ID NO: 388918 - RNA, 19 nt, Homo sapiens
  misc_RNA (1)...(19): siRNA sense strand
caauucgguuccagugcaa

SEQ ID NO: 388919 - RNA, 19 nt, Homo sapiens
  misc_RNA (1)...(19): siRNA sense strand
gaacuccugaggucaagca

SEQ ID NO: 388920 - RNA, 19 nt, Homo sapiens
  misc_RNA (1)...(19): siRNA sense strand
ucacacuagccaccaauga

SEQ ID NO: 388921 - RNA, 19 nt, Homo sapiens
  misc_RNA (1)...(19): siRNA sense strand
ugaguaguaacacgaugua

SEQ ID NO: 388922 - RNA, 19 nt, Homo sapiens
  misc_RNA (1)...(19): siRNA sense strand
ccugcagacuucacagaga

SEQ ID NO: 388923 - RNA, 19 nt, Homo sapiens
  misc_RNA (1)...(19): siRNA sense strand
gauagcuuguccugaaacu

SEQ ID NO: 388924 - RNA, 19 nt, Homo sapiens
  misc_RNA (1)...(19): siRNA sense strand
gucauugaagugaaucuaa

SEQ ID NO: 388925 - RNA, 19 nt, Homo sapiens
  misc_RNA (1)...(19): siRNA sense strand
gcagccagcaaauaaaguc

SEQ ID NO: 388926 - RNA, 19 nt, Homo sapiens
  misc_RNA (1)...(19): siRNA sense strand
ccguucaucuauaacuuga

SEQ ID NO: 388927 - RNA, 19 nt, Homo sapiens
  misc_RNA (1)...(19): siRNA sense strand
caaggcuuacugaauaguu

SEQ ID NO: 388928 - RNA, 19 nt, Homo sapiens
  misc_RNA (1)...(19): siRNA sense strand
ggaccgguuccugcaguaa

SEQ ID NO: 388929 - RNA, 19 nt, Homo sapiens
  misc_RNA (1)...(19): siRNA sense strand
gagaaggugaaggaauuga

SEQ ID NO: 388930 - RNA, 19 nt, Homo sapiens
  misc_RNA (1)...(19): siRNA sense strand
ucagggucauccucucgaa

SEQ ID NO: 388931 - RNA, 19 nt, Homo sapiens
  misc_RNA (1)...(19): siRNA sense strand
caccucagccucccaaagu

SEQ ID NO: 388932 - RNA, 19 nt, Homo sapiens
  misc_RNA (1)...(19): siRNA sense strand
ggcgugccgugugcaaauu

SEQ ID NO: 388933 - RNA, 19 nt, Homo sapiens
  misc_RNA (1)...(19): siRNA sense strand
ggaacuacaaguacaaucc

SEQ ID NO: 388934 - RNA, 19 nt, Homo sapiens
  misc_RNA (1)...(19): siRNA sense strand
cuacagcaagugugucuuc

SEQ ID NO: 388935 - RNA, 19 nt, Homo sapiens
  misc_RNA (1)...(19): siRNA sense strand
auucaccacuggguucuaa

SEQ ID NO: 388936 - RNA, 19 nt, Homo sapiens
  misc_RNA (1)...(19): siRNA sense strand
gaccacagacauccacaag

SEQ ID NO: 388937 - RNA, 19 nt, Homo sapiens
  misc_RNA (1)...(19): siRNA sense strand
acaacgugcugccccuuua

SEQ ID NO: 388938 - RNA, 19 nt, Homo sapiens
  misc_RNA (1)...(19): siRNA sense strand
ccagaucuccaucgaagag

SEQ ID NO: 388939 - RNA, 19 nt, Homo sapiens
  misc_RNA (1)...(19): siRNA sense strand
gacagaguuucaccauggu

SEQ ID NO: 388940 - RNA, 19 nt, Homo sapiens
  misc_RNA (1)...(19): siRNA sense strand
gggcgugccgugugcaaau

SEQ ID NO: 388941 - RNA, 19 nt, Homo sapiens
  misc_RNA (1)...(19): siRNA sense strand
ccguucagaagauaugaua

SEQ ID NO: 388942 - RNA, 19 nt, Homo sapiens
  misc_RNA (1)...(19): siRNA sense strand
cuacauccaccuggccuuu

SEQ ID NO: 388943 - RNA, 19 nt, Homo sapiens
  misc_RNA (1)...(19): siRNA sense strand
cacaagcaccugccguuca

SEQ ID NO: 388944 - RNA, 19 nt, Homo sapiens
  misc_RNA (1)...(19): siRNA sense strand
cagcaaauaaagucgaaag

SEQ ID NO: 388945 - RNA, 19 nt, Homo sapiens
  misc_RNA (1)...(19): siRNA sense strand
agacugaaaccaucuugca

SEQ ID NO: 388946 - RNA, 19 nt, Homo sapiens
  misc_RNA (1)...(19): siRNA sense strand
guaguaacacgauguacac

SEQ ID NO: 388947 - RNA, 19 nt, Homo sapiens
  misc_RNA (1)...(19): siRNA sense strand
acacucuggugcuguccaa

SEQ ID NO: 388948 - RNA, 19 nt, Homo sapiens
  misc_RNA (1)...(19): siRNA sense strand
gacccugucccuaccugaa

SEQ ID NO: 388949 - RNA, 19 nt, Homo sapiens
  misc_RNA (1)...(19): siRNA sense strand
ccaccaaugacaucuacug

SEQ ID NO: 388950 - RNA, 19 nt, Homo sapiens
  misc_RNA (1)...(19): siRNA sense strand
gugcugccccuuuauaaaa

SEQ ID NO: 388951 - RNA, 19 nt, Homo sapiens
  misc_RNA (1)...(19): siRNA sense strand
gaggaagagaggaggaagu

SEQ ID NO: 388952 - RNA, 19 nt, Homo sapiens
  misc_RNA (1)...(19): siRNA sense strand
gcacaaacaugccauugau

SEQ ID NO: 388953 - RNA, 19 nt, Homo sapiens
  misc_RNA (1)...(19): siRNA sense strand
caagcagaauucuucauua

SEQ ID NO: 388954 - RNA, 19 nt, Homo sapiens
  misc_RNA (1)...(19): siRNA sense strand
cgagacauguccaagaaua

SEQ ID NO: 388955 - RNA, 19 nt, Homo sapiens
  misc_RNA (1)...(19): siRNA sense strand
cagaaucaauugagaugua

SEQ ID NO: 388956 - RNA, 19 nt, Homo sapiens
  misc_RNA (1)...(19): siRNA sense strand
gaaauggagccuguaauaa

SEQ ID NO: 388957 - RNA, 19 nt, Homo sapiens
  misc_RNA (1)...(19): siRNA sense strand
gaauguagaagaaauguug

SEQ ID NO: 388958 - RNA, 19 nt, Homo sapiens
  misc_RNA (1)...(19): siRNA sense strand
ucacagugcuauucagaaa

SEQ ID NO: 388959 - RNA, 19 nt, Homo sapiens
  misc_RNA (1)...(19): siRNA sense strand
caaagcaaguguccaccua

SEQ ID NO: 388960 - RNA, 19 nt, Homo sapiens
  misc_RNA (1)...(19): siRNA sense strand
uuacacggauuuccuaauu

SEQ ID NO: 388961 - RNA, 19 nt, Homo sapiens
  misc_RNA (1)...(19): siRNA sense strand
ggaaaucauaccuccuuua

SEQ ID NO: 388962 - RNA, 19 nt, Homo sapiens
  misc_RNA (1)...(19): siRNA sense strand
cagcagaacuugccacauc

SEQ ID NO: 388963 - RNA, 19 nt, Homo sapiens
  misc_RNA (1)...(19): siRNA sense strand
agaaauggagccuguaaua

SEQ ID NO: 388964 - RNA, 19 nt, Homo sapiens
  misc_RNA (1)...(19): siRNA sense strand
gagauguagucaagaaaug

SEQ ID NO: 388965 - RNA, 19 nt, Homo sapiens
  misc_RNA (1)...(19): siRNA sense strand
ggagggcguuuaugucaug

SEQ ID NO: 388966 - RNA, 19 nt, Homo sapiens
  misc_RNA (1)...(19): siRNA sense strand
caaaggacaccauauagug

SEQ ID NO: 388967 - RNA, 19 nt, Homo sapiens
  misc_RNA (1)...(19): siRNA sense strand
ugagauaacugccuacaac

SEQ ID NO: 388968 - RNA, 19 nt, Homo sapiens
  misc_RNA (1)...(19): siRNA sense strand
gcaaacaccagacauccaa

SEQ ID NO: 388969 - RNA, 19 nt, Homo sapiens
  misc_RNA (1)...(19): siRNA sense strand
gaaaucauaccuccuuuac

SEQ ID NO: 388970 - RNA, 19 nt, Homo sapiens
  misc_RNA (1)...(19): siRNA sense strand
caacagcagacuacaggua

SEQ ID NO: 388971 - RNA, 19 nt, Homo sapiens
  misc_RNA (1)...(19): siRNA sense strand
caagaaauggagccuguaa

SEQ ID NO: 388972 - RNA, 19 nt, Homo sapiens
  misc_RNA (1)...(19): siRNA sense strand
guccaagaauagagagaua

SEQ ID NO: 388973 - RNA, 19 nt, Homo sapiens
  misc_RNA (1)...(19): siRNA sense strand
gcagguguccucuuuguuc

SEQ ID NO: 388974 - RNA, 19 nt, Homo sapiens
  misc_RNA (1)...(19): siRNA sense strand
ugucaacgcuuccuguguu

SEQ ID NO: 388975 - RNA, 19 nt, Homo sapiens
  misc_RNA (1)...(19): siRNA sense strand
ccaaggagcuucgagacau

SEQ ID NO: 388976 - RNA, 19 nt, Homo sapiens
  misc_RNA (1)...(19): siRNA sense strand
uacacggauuuccuaauua

SEQ ID NO: 388977 - RNA, 19 nt, Homo sapiens
  misc_RNA (1)...(19): siRNA sense strand
gggaaaucauaccuccuuu

SEQ ID NO: 388978 - RNA, 19 nt, Homo sapiens
  misc_RNA (1)...(19): siRNA sense strand
gaaaagagaaacaugcaaa

SEQ ID NO: 388979 - RNA, 19 nt, Homo sapiens
  misc_RNA (1)...(19): siRNA sense strand
gcacauucuugcugacagu

SEQ ID NO: 388980 - RNA, 19 nt, Homo sapiens
  misc_RNA (1)...(19): siRNA sense strand
cagcagguguccucuuugu

SEQ ID NO: 388981 - RNA, 19 nt, Homo sapiens
  misc_RNA (1)...(19): siRNA sense strand
gcaaggcauaauuugauaa

SEQ ID NO: 388982 - RNA, 19 nt, Homo sapiens
  misc_RNA (1)...(19): siRNA sense strand
gggugccacuucccauuaa

SEQ ID NO: 388983 - RNA, 19 nt, Homo sapiens
  misc_RNA (1)...(19): siRNA sense strand
cuggauggcuucgauauau

SEQ ID NO: 388984 - RNA, 19 nt, Homo sapiens
  misc_RNA (1)...(19): siRNA sense strand
ucaagcagaauucuucauu

SEQ ID NO: 388985 - RNA, 19 nt, Homo sapiens
  misc_RNA (1)...(19): siRNA sense strand
ugcaaggcauaauuugaua

SEQ ID NO: 388986 - RNA, 19 nt, Homo sapiens
  misc_RNA (1)...(19): siRNA sense strand
aaaccuggcgagauuagua

SEQ ID NO: 388987 - RNA, 19 nt, Homo sapiens
  misc_RNA (1)...(19): siRNA sense strand
aaucauaccuccuuuacac

SEQ ID NO: 388988 - RNA, 19 nt, Homo sapiens
  misc_RNA (1)...(19): siRNA sense strand
caaggagcuucgagacaug

SEQ ID NO: 388989 - RNA, 19 nt, Homo sapiens
  misc_RNA (1)...(19): siRNA sense strand
gaaggagggcguuuauguc

SEQ ID NO: 388990 - RNA, 19 nt, Homo sapiens
  misc_RNA (1)...(19): siRNA sense strand
ugaaggagggcguuuaugu

SEQ ID NO: 388991 - RNA, 19 nt, Homo sapiens
  misc_RNA (1)...(19): siRNA sense strand
gagacuauuacacggauuu

SEQ ID NO: 388992 - RNA, 19 nt, Homo sapiens
  misc_RNA (1)...(19): siRNA sense strand
gacuacagguaaaugguau

SEQ ID NO: 388993 - RNA, 19 nt, Homo sapiens
  misc_RNA (1)...(19): siRNA sense strand
gaacuugccacaucagacu

SEQ ID NO: 388994 - RNA, 19 nt, Homo sapiens
  misc_RNA (1)...(19): siRNA sense strand
agacugcaaggcauaauuu

SEQ ID NO: 388995 - RNA, 19 nt, Homo sapiens
  misc_RNA (1)...(19): siRNA sense strand
gggcguuuaugucaugguu

SEQ ID NO: 388996 - RNA, 19 nt, Homo sapiens
  misc_RNA (1)...(19): siRNA sense strand
aagaaauguuggccaguga

SEQ ID NO: 388997 - RNA, 19 nt, Homo sapiens
  misc_RNA (1)...(19): siRNA sense strand
acagugcuauucagaaauc

SEQ ID NO: 388998 - RNA, 19 nt, Homo sapiens
  misc_RNA (1)...(19): siRNA sense strand
aauggagccuguaauaaca

SEQ ID NO: 388999 - RNA, 19 nt, Homo sapiens
  misc_RNA (1)...(19): siRNA sense strand
cgaccuggauggcuucgau

SEQ ID NO: 389000 - RNA, 19 nt, Homo sapiens
  misc_RNA (1)...(19): siRNA sense strand
acacggauuuccuaauuac

SEQ ID NO: 389001 - RNA, 19 nt, Homo sapiens
  misc_RNA (1)...(19): siRNA sense strand
gugauggaguccuauaugg

SEQ ID NO: 389002 - RNA, 19 nt, Homo sapiens
  misc_RNA (1)...(19): siRNA sense strand
aaaggacaccauauaguga

SEQ ID NO: 389003 - RNA, 19 nt, Homo sapiens
  misc_RNA (1)...(19): siRNA sense strand
ccaaaggacaccauauagu

SEQ ID NO: 389004 - RNA, 19 nt, Homo sapiens
  misc_RNA (1)...(19): siRNA sense strand
gagacugcaaggcauaauu

SEQ ID NO: 389005 - RNA, 19 nt, Homo sapiens
  misc_RNA (1)...(19): siRNA sense strand
ccuguaauaacaugugaua

SEQ ID NO: 389006 - RNA, 19 nt, Homo sapiens
  misc_RNA (1)...(19): siRNA sense strand
uggcuucgauauauccaaa

SEQ ID NO: 389007 - RNA, 19 nt, Homo sapiens
  misc_RNA (1)...(19): siRNA sense strand
ugagguucuuggagacuuu

SEQ ID NO: 389008 - RNA, 19 nt, Homo sapiens
  misc_RNA (1)...(19): siRNA sense strand
ccacaucagacucagauuc

SEQ ID NO: 389009 - RNA, 19 nt, Homo sapiens
  misc_RNA (1)...(19): siRNA sense strand
uaguaaugaucccauaaca

SEQ ID NO: 389010 - RNA, 19 nt, Homo sapiens
  misc_RNA (1)...(19): siRNA sense strand
agacuacagguaaauggua

SEQ ID NO: 389011 - RNA, 19 nt, Homo sapiens
  misc_RNA (1)...(19): siRNA sense strand
cauucuugcugacagugua

SEQ ID NO: 389012 - RNA, 19 nt, Homo sapiens
  misc_RNA (1)...(19): siRNA sense strand
gaaaauccacagaaucaau

SEQ ID NO: 389013 - RNA, 19 nt, Homo sapiens
  misc_RNA (1)...(19): siRNA sense strand
ccacagaaucaauugagau

SEQ ID NO: 389014 - RNA, 19 nt, Homo sapiens
  misc_RNA (1)...(19): siRNA sense strand
gguguccucuuuguucaug

SEQ ID NO: 389015 - RNA, 19 nt, Homo sapiens
  misc_RNA (1)...(19): siRNA sense strand
gcaaacgcagcagaacuug

SEQ ID NO: 389016 - RNA, 19 nt, Homo sapiens
  misc_RNA (1)...(19): siRNA sense strand
aaauggagccuguaauaac

SEQ ID NO: 389017 - RNA, 19 nt, Homo sapiens
  misc_RNA (1)...(19): siRNA sense strand
cugacaguguacaguauuu

SEQ ID NO: 389018 - RNA, 19 nt, Homo sapiens
  misc_RNA (1)...(19): siRNA sense strand
caucacagugcuauucaga

SEQ ID NO: 389019 - RNA, 19 nt, Homo sapiens
  misc_RNA (1)...(19): siRNA sense strand
gagauaacugccuacaaca

SEQ ID NO: 389020 - RNA, 19 nt, Homo sapiens
  misc_RNA (1)...(19): siRNA sense strand
cccaaaaccuggcgagauu

SEQ ID NO: 389021 - RNA, 19 nt, Homo sapiens
  misc_RNA (1)...(19): siRNA sense strand
aacaugccauugaugcaaa

SEQ ID NO: 389022 - RNA, 19 nt, Homo sapiens
  misc_RNA (1)...(19): siRNA sense strand
uucgagacauguccaagaa

SEQ ID NO: 389023 - RNA, 19 nt, Homo sapiens
  misc_RNA (1)...(19): siRNA sense strand
gugcaaaauuucauugguu

SEQ ID NO: 389024 - RNA, 19 nt, Homo sapiens
  misc_RNA (1)...(19): siRNA sense strand
acaacaggcgcaccuuuga

SEQ ID NO: 389025 - RNA, 19 nt, Homo sapiens
  misc_RNA (1)...(19): siRNA sense strand
cuacaacaggcgcaccuuu

SEQ ID NO: 389026 - RNA, 19 nt, Homo sapiens
  misc_RNA (1)...(19): siRNA sense strand
auauagugauggaguccua

SEQ ID NO: 389027 - RNA, 19 nt, Homo sapiens
  misc_RNA (1)...(19): siRNA sense strand
gcagacuacagguaaaugg

SEQ ID NO: 389028 - RNA, 19 nt, Homo sapiens
  misc_RNA (1)...(19): siRNA sense strand
acagcagacuacagguaaa

SEQ ID NO: 389029 - RNA, 19 nt, Homo sapiens
  misc_RNA (1)...(19): siRNA sense strand
ugaaaagcagagacuauua

SEQ ID NO: 389030 - RNA, 19 nt, Homo sapiens
  misc_RNA (1)...(19): siRNA sense strand
cagguguccucuuuguuca

SEQ ID NO: 389031 - RNA, 19 nt, Homo sapiens
  misc_RNA (1)...(19): siRNA sense strand
ugucaugguuggugcagau

SEQ ID NO: 389032 - RNA, 19 nt, Homo sapiens
  misc_RNA (1)...(19): siRNA sense strand
aauauaaugucugcagaag

SEQ ID NO: 389033 - RNA, 19 nt, Homo sapiens
  misc_RNA (1)...(19): siRNA sense strand
aaacaugccauugaugcaa

SEQ ID NO: 389034 - RNA, 19 nt, Homo sapiens
  misc_RNA (1)...(19): siRNA sense strand
gcugacaguguacaguauu

SEQ ID NO: 389035 - RNA, 19 nt, Homo sapiens
  misc_RNA (1)...(19): siRNA sense strand
guugccauaucaagcagaa

SEQ ID NO: 389036 - RNA, 19 nt, Homo sapiens
  misc_RNA (1)...(19): siRNA sense strand
ugagauguagucaagaaau

SEQ ID NO: 389037 - RNA, 19 nt, Homo sapiens
  misc_RNA (1)...(19): siRNA sense strand
aagcaaguguccaccuauc

SEQ ID NO: 389038 - RNA, 19 nt, Homo sapiens
  misc_RNA (1)...(19): siRNA sense strand
uggugcagaugucccguuu

SEQ ID NO: 389039 - RNA, 19 nt, Homo sapiens
  misc_RNA (1)...(19): siRNA sense strand
acacacagacaacuaugau

SEQ ID NO: 389040 - RNA, 19 nt, Homo sapiens
  misc_RNA (1)...(19): siRNA sense strand
gagacauguccaagaauag

SEQ ID NO: 389041 - RNA, 19 nt, Homo sapiens
  misc_RNA (1)...(19): siRNA sense strand
aucagcagguguccucuuu

SEQ ID NO: 389042 - RNA, 19 nt, Homo sapiens
  misc_RNA (1)...(19): siRNA sense strand
gcaaguguccaccuaucag

SEQ ID NO: 389043 - RNA, 19 nt, Homo sapiens
  misc_RNA (1)...(19): siRNA sense strand
gauguagucaagaaaugga

SEQ ID NO: 389044 - RNA, 19 nt, Homo sapiens
  misc_RNA (1)...(19): siRNA sense strand
agaaucaauugagauguag

SEQ ID NO: 389045 - RNA, 19 nt, Homo sapiens
  misc_RNA (1)...(19): siRNA sense strand
gugcagaugucccguuuuc

SEQ ID NO: 389046 - RNA, 19 nt, Homo sapiens
  misc_RNA (1)...(19): siRNA sense strand
gcagaugucccguuuucuu

SEQ ID NO: 389047 - RNA, 19 nt, Homo sapiens
  misc_RNA (1)...(19): siRNA sense strand
agacauguccaagaauaga

SEQ ID NO: 389048 - RNA, 19 nt, Homo sapiens
  misc_RNA (1)...(19): siRNA sense strand
auccaaaggacaccauaua

SEQ ID NO: 389049 - RNA, 19 nt, Homo sapiens
  misc_RNA (1)...(19): siRNA sense strand
acauccaacugguccauca

SEQ ID NO: 389050 - RNA, 19 nt, Homo sapiens
  misc_RNA (1)...(19): siRNA sense strand
aaagagaaacaugcaaaca

SEQ ID NO: 389051 - RNA, 19 nt, Homo sapiens
  misc_RNA (1)...(19): siRNA sense strand
cacagaaucaauugagaug

SEQ ID NO: 389052 - RNA, 19 nt, Homo sapiens
  misc_RNA (1)...(19): siRNA sense strand
ccagaaaccucuuguguuc

SEQ ID NO: 389053 - RNA, 19 nt, Homo sapiens
  misc_RNA (1)...(19): siRNA sense strand
gggaggguccgcuguguua

SEQ ID NO: 389054 - RNA, 19 nt, Homo sapiens
  misc_RNA (1)...(19): siRNA sense strand
gcaagcugggcuccuguua

SEQ ID NO: 389055 - RNA, 19 nt, Homo sapiens
  misc_RNA (1)...(19): siRNA sense strand
ccagacgacuacaucauuc

SEQ ID NO: 389056 - RNA, 19 nt, Homo sapiens
  misc_RNA (1)...(19): siRNA sense strand
gcguagugcuugccuuugu

SEQ ID NO: 389057 - RNA, 19 nt, Homo sapiens
  misc_RNA (1)...(19): siRNA sense strand
aagcugggcuccuguuaca

SEQ ID NO: 389058 - RNA, 19 nt, Homo sapiens
  misc_RNA (1)...(19): siRNA sense strand
gccagacgacuacaucauu

SEQ ID NO: 389059 - RNA, 19 nt, Homo sapiens
  misc_RNA (1)...(19): siRNA sense strand
ggaggacgaggacuucuag

SEQ ID NO: 389060 - RNA, 19 nt, Homo sapiens
  misc_RNA (1)...(19): siRNA sense strand
gaaaccucuuguguucuug

SEQ ID NO: 389061 - RNA, 19 nt, Homo sapiens
  misc_RNA (1)...(19): siRNA sense strand
ccacagccaucgccaucca

SEQ ID NO: 389062 - RNA, 19 nt, Homo sapiens
  misc_RNA (1)...(19): siRNA sense strand
ggaggaggacgaggacuuc

SEQ ID NO: 389063 - RNA, 19 nt, Homo sapiens
  misc_RNA (1)...(19): siRNA sense strand
agacugcugcuccuaguga

SEQ ID NO: 389064 - RNA, 19 nt, Homo sapiens
  misc_RNA (1)...(19): siRNA sense strand
cguagugcuugccuuuguu

SEQ ID NO: 389065 - RNA, 19 nt, Homo sapiens
  misc_RNA (1)...(19): siRNA sense strand
gggaggaggacgaggacuu

SEQ ID NO: 389066 - RNA, 19 nt, Homo sapiens
  misc_RNA (1)...(19): siRNA sense strand
gcugggcuccuguuacaca

SEQ ID NO: 389067 - RNA, 19 nt, Homo sapiens
  misc_RNA (1)...(19): siRNA sense strand
cccagaaaccucuuguguu

SEQ ID NO: 389068 - RNA, 19 nt, Homo sapiens
  misc_RNA (1)...(19): siRNA sense strand
ccagacugccagacgacua

SEQ ID NO: 389069 - RNA, 19 nt, Homo sapiens
  misc_RNA (1)...(19): siRNA sense strand
ccgcguagugcuugccuuu

SEQ ID NO: 389070 - RNA, 19 nt, Homo sapiens
  misc_RNA (1)...(19): siRNA sense strand
cgacagacugcugcuccua

SEQ ID NO: 389071 - RNA, 19 nt, Homo sapiens
  misc_RNA (1)...(19): siRNA sense strand
acagacugcugcuccuagu

SEQ ID NO: 389072 - RNA, 19 nt, Homo sapiens
  misc_RNA (1)...(19): siRNA sense strand
gcgaagaaguccugguuug

SEQ ID NO: 389073 - RNA, 19 nt, Homo sapiens
  misc_RNA (1)...(19): siRNA sense strand
guggugagcucuucgacua

SEQ ID NO: 389074 - RNA, 19 nt, Homo sapiens
  misc_RNA (1)...(19): siRNA sense strand
gcgagucggugcugaugaa

SEQ ID NO: 389075 - RNA, 19 nt, Homo sapiens
  misc_RNA (1)...(19): siRNA sense strand
cagaaacacauaugguaua

SEQ ID NO: 389076 - RNA, 19 nt, Homo sapiens
  misc_RNA (1)...(19): siRNA sense strand
ggaauuaucccgaaaaguu

SEQ ID NO: 389077 - RNA, 19 nt, Homo sapiens
  misc_RNA (1)...(19): siRNA sense strand
gcacauucagaaacacaua

SEQ ID NO: 389078 - RNA, 19 nt, Homo sapiens
  misc_RNA (1)...(19): siRNA sense strand
gaagguggccaucaagauc

SEQ ID NO: 389079 - RNA, 19 nt, Homo sapiens
  misc_RNA (1)...(19): siRNA sense strand
aggagaagaugauuuacuu

SEQ ID NO: 389080 - RNA, 19 nt, Homo sapiens
  misc_RNA (1)...(19): siRNA sense strand
uaaggaggcucggaaguuc

SEQ ID NO: 389081 - RNA, 19 nt, Homo sapiens
  misc_RNA (1)...(19): siRNA sense strand
ucgacuaccuggugaagaa

SEQ ID NO: 389082 - RNA, 19 nt, Homo sapiens
  misc_RNA (1)...(19): siRNA sense strand
cggcucaacuccaucaaga

SEQ ID NO: 389083 - RNA, 19 nt, Homo sapiens
  misc_RNA (1)...(19): siRNA sense strand
gaucuucguggucaucaaa

SEQ ID NO: 389084 - RNA, 19 nt, Homo sapiens
  misc_RNA (1)...(19): siRNA sense strand
gaauuaucccgaaaaguua

SEQ ID NO: 389085 - RNA, 19 nt, Homo sapiens
  misc_RNA (1)...(19): siRNA sense strand
cuucgacgaugacaacuug

SEQ ID NO: 389086 - RNA, 19 nt, Homo sapiens
  misc_RNA (1)...(19): siRNA sense strand
ggccagccguguuccagaa

SEQ ID NO: 389087 - RNA, 19 nt, Homo sapiens
  misc_RNA (1)...(19): siRNA sense strand
uagagcacauucagaaaca

SEQ ID NO: 389088 - RNA, 19 nt, Homo sapiens
  misc_RNA (1)...(19): siRNA sense strand
gaaggagaacggcaucuac

SEQ ID NO: 389089 - RNA, 19 nt, Homo sapiens
  misc_RNA (1)...(19): siRNA sense strand
ucagacaccacuaacugua

SEQ ID NO: 389090 - RNA, 19 nt, Homo sapiens
  misc_RNA (1)...(19): siRNA sense strand
agacaccacuaacuguaug

SEQ ID NO: 389091 - RNA, 19 nt, Homo sapiens
  misc_RNA (1)...(19): siRNA sense strand
ccacaugccgcacuuuauc

SEQ ID NO: 389092 - RNA, 19 nt, Homo sapiens
  misc_RNA (1)...(19): siRNA sense strand
gggaggcgcagaaggagaa

SEQ ID NO: 389093 - RNA, 19 nt, Homo sapiens
  misc_RNA (1)...(19): siRNA sense strand
gaggagaaccaggagaaga

SEQ ID NO: 389094 - RNA, 19 nt, Homo sapiens
  misc_RNA (1)...(19): siRNA sense strand
ucagaaacacauaugguau

SEQ ID NO: 389095 - RNA, 19 nt, Homo sapiens
  misc_RNA (1)...(19): siRNA sense strand
gaaccaggagaagaugauu

SEQ ID NO: 389096 - RNA, 19 nt, Homo sapiens
  misc_RNA (1)...(19): siRNA sense strand
accaggagaagaugauuua

SEQ ID NO: 389097 - RNA, 19 nt, Homo sapiens
  misc_RNA (1)...(19): siRNA sense strand
uccagaagccggucaaguu

SEQ ID NO: 389098 - RNA, 19 nt, Homo sapiens
  misc_RNA (1)...(19): siRNA sense strand
cuaaggaggcucggaaguu

SEQ ID NO: 389099 - RNA, 19 nt, Homo sapiens
  misc_RNA (1)...(19): siRNA sense strand
ccagaagccggucaaguuc

SEQ ID NO: 389100 - RNA, 19 nt, Homo sapiens
  misc_RNA (1)...(19): siRNA sense strand
gaaccagagcagcccauuc

SEQ ID NO: 389101 - RNA, 19 nt, Homo sapiens
  misc_RNA (1)...(19): siRNA sense strand
gcuagagcacauucagaaa

SEQ ID NO: 389102 - RNA, 19 nt, Homo sapiens
  misc_RNA (1)...(19): siRNA sense strand
accacuaacuguauggaaa

SEQ ID NO: 389103 - RNA, 19 nt, Homo sapiens
  misc_RNA (1)...(19): siRNA sense strand
cuaacuguauggaaaugau

SEQ ID NO: 389104 - RNA, 19 nt, Homo sapiens
  misc_RNA (1)...(19): siRNA sense strand
ccacuaacuguauggaaau

SEQ ID NO: 389105 - RNA, 19 nt, Homo sapiens
  misc_RNA (1)...(19): siRNA sense strand
ucucugcgcuggacuucug

SEQ ID NO: 389106 - RNA, 19 nt, Homo sapiens
  misc_RNA (1)...(19): siRNA sense strand
ccacagggaucugaaaccu

SEQ ID NO: 389107 - RNA, 19 nt, Homo sapiens
  misc_RNA (1)...(19): siRNA sense strand
ucaucagccuggagaagga

SEQ ID NO: 389108 - RNA, 19 nt, Homo sapiens
  misc_RNA (1)...(19): siRNA sense strand
gagaaccaggagaagauga

SEQ ID NO: 389109 - RNA, 19 nt, Homo sapiens
  misc_RNA (1)...(19): siRNA sense strand
ccacagccacuccauaugc

SEQ ID NO: 389110 - RNA, 19 nt, Homo sapiens
  misc_RNA (1)...(19): siRNA sense strand
gaucgucaaccgugagaag

SEQ ID NO: 389111 - RNA, 19 nt, Homo sapiens
  misc_RNA (1)...(19): siRNA sense strand
ggacgagaagaacaacauc

SEQ ID NO: 389112 - RNA, 19 nt, Homo sapiens
  misc_RNA (1)...(19): siRNA sense strand
ggagaaccaggagaagaug

SEQ ID NO: 389113 - RNA, 19 nt, Homo sapiens
  misc_RNA (1)...(19): siRNA sense strand
gagcacauucagaaacaca

SEQ ID NO: 389114 - RNA, 19 nt, Homo sapiens
  misc_RNA (1)...(19): siRNA sense strand
agaaggaggagcagaucuu

SEQ ID NO: 389115 - RNA, 19 nt, Homo sapiens
  misc_RNA (1)...(19): siRNA sense strand
ggagaaggaggagcagauc

SEQ ID NO: 389116 - RNA, 19 nt, Homo sapiens
  misc_RNA (1)...(19): siRNA sense strand
gcucaacuccaucaagaac

SEQ ID NO: 389117 - RNA, 19 nt, Homo sapiens
  misc_RNA (1)...(19): siRNA sense strand
gcugcacgacguuuaugaa

SEQ ID NO: 389118 - RNA, 19 nt, Homo sapiens
  misc_RNA (1)...(19): siRNA sense strand
cggaggagauguccaaccu

SEQ ID NO: 389119 - RNA, 19 nt, Homo sapiens
  misc_RNA (1)...(19): siRNA sense strand
ucaacuccaucaagaacag

SEQ ID NO: 389120 - RNA, 19 nt, Homo sapiens
  misc_RNA (1)...(19): siRNA sense strand
gcagcacgcgcaguauguu

SEQ ID NO: 389121 - RNA, 19 nt, Homo sapiens
  misc_RNA (1)...(19): siRNA sense strand
cagaagguggccaucaaga

SEQ ID NO: 389122 - RNA, 19 nt, Homo sapiens
  misc_RNA (1)...(19): siRNA sense strand
ggccagaacgcaaauccau

SEQ ID NO: 389123 - RNA, 19 nt, Homo sapiens
  misc_RNA (1)...(19): siRNA sense strand
caaguuccagguugauauc

SEQ ID NO: 389124 - RNA, 19 nt, Homo sapiens
  misc_RNA (1)...(19): siRNA sense strand
uucagaaacacauauggua

SEQ ID NO: 389125 - RNA, 19 nt, Homo sapiens
  misc_RNA (1)...(19): siRNA sense strand
cagacaccacuaacuguau

SEQ ID NO: 389126 - RNA, 19 nt, Homo sapiens
  misc_RNA (1)...(19): siRNA sense strand
agaaggagaacggcaucua

SEQ ID NO: 389127 - RNA, 19 nt, Homo sapiens
  misc_RNA (1)...(19): siRNA sense strand
gaagguggagcgggagauc

SEQ ID NO: 389128 - RNA, 19 nt, Homo sapiens
  misc_RNA (1)...(19): siRNA sense strand
ggugcuagaacacguguca

SEQ ID NO: 389129 - RNA, 19 nt, Homo sapiens
  misc_RNA (1)...(19): siRNA sense strand
cgcuagagcacauucagaa

SEQ ID NO: 389130 - RNA, 19 nt, Homo sapiens
  misc_RNA (1)...(19): siRNA sense strand
acaaaccucugagcuccau

SEQ ID NO: 389131 - RNA, 19 nt, Homo sapiens
  misc_RNA (1)...(19): siRNA sense strand
ugccacagccacuccauau

SEQ ID NO: 389132 - RNA, 19 nt, Homo sapiens
  misc_RNA (1)...(19): siRNA sense strand
cgaagaaguccugguuugg

SEQ ID NO: 389133 - RNA, 19 nt, Homo sapiens
  misc_RNA (1)...(19): siRNA sense strand
ggcgaagaaguccugguuu

SEQ ID NO: 389134 - RNA, 19 nt, Homo sapiens
  misc_RNA (1)...(19): siRNA sense strand
agucggugcugaugaaggu

SEQ ID NO: 389135 - RNA, 19 nt, Homo sapiens
  misc_RNA (1)...(19): siRNA sense strand
gagauuagauggcagcaua

SEQ ID NO: 389136 - RNA, 19 nt, Homo sapiens
  misc_RNA (1)...(19): siRNA sense strand
ggauggaacuguugaguaa

SEQ ID NO: 389137 - RNA, 19 nt, Homo sapiens
  misc_RNA (1)...(19): siRNA sense strand
gaacaaagcuaaaagaaug

SEQ ID NO: 389138 - RNA, 19 nt, Homo sapiens
  misc_RNA (1)...(19): siRNA sense strand
ggaauacaaucgacauaaa

SEQ ID NO: 389139 - RNA, 19 nt, Homo sapiens
  misc_RNA (1)...(19): siRNA sense strand
gcacagagguauaauuaca

SEQ ID NO: 389140 - RNA, 19 nt, Homo sapiens
  misc_RNA (1)...(19): siRNA sense strand
gcacuuuguugcuguauuu

SEQ ID NO: 389141 - RNA, 19 nt, Homo sapiens
  misc_RNA (1)...(19): siRNA sense strand
gagcaugacuggaauccua

SEQ ID NO: 389142 - RNA, 19 nt, Homo sapiens
  misc_RNA (1)...(19): siRNA sense strand
ccagacagcucuuccuuaa

SEQ ID NO: 389143 - RNA, 19 nt, Homo sapiens
  misc_RNA (1)...(19): siRNA sense strand
gcacauggcugcucguugu

SEQ ID NO: 389144 - RNA, 19 nt, Homo sapiens
  misc_RNA (1)...(19): siRNA sense strand
ggacuuagggaaauucuua

SEQ ID NO: 389145 - RNA, 19 nt, Homo sapiens
  misc_RNA (1)...(19): siRNA sense strand
gaagaaacuuggccuuaau

SEQ ID NO: 389146 - RNA, 19 nt, Homo sapiens
  misc_RNA (1)...(19): siRNA sense strand
aaacaugucagcagaauua

SEQ ID NO: 389147 - RNA, 19 nt, Homo sapiens
  misc_RNA (1)...(19): siRNA sense strand
agacagcucuuccuuaauu

SEQ ID NO: 389148 - RNA, 19 nt, Homo sapiens
  misc_RNA (1)...(19): siRNA sense strand
gaacaccaauccagaacaa

SEQ ID NO: 389149 - RNA, 19 nt, Homo sapiens
  misc_RNA (1)...(19): siRNA sense strand
gaugcagccuucucauuua

SEQ ID NO: 389150 - RNA, 19 nt, Homo sapiens
  misc_RNA (1)...(19): siRNA sense strand
caagaacaaugggaaguua

SEQ ID NO: 389151 - RNA, 19 nt, Homo sapiens
  misc_RNA (1)...(19): siRNA sense strand
cacaucaucuuucgauuua

SEQ ID NO: 389152 - RNA, 19 nt, Homo sapiens
  misc_RNA (1)...(19): siRNA sense strand
gugaagaacuuugcaauga

SEQ ID NO: 389153 - RNA, 19 nt, Homo sapiens
  misc_RNA (1)...(19): siRNA sense strand
ggaaugagcaauagacaaa

SEQ ID NO: 389154 - RNA, 19 nt, Homo sapiens
  misc_RNA (1)...(19): siRNA sense strand
gacaggcgcugacacagua

SEQ ID NO: 389155 - RNA, 19 nt, Homo sapiens
  misc_RNA (1)...(19): siRNA sense strand
gaccagaacucuucaucuu

SEQ ID NO: 389156 - RNA, 19 nt, Homo sapiens
  misc_RNA (1)...(19): siRNA sense strand
gugcaaccauccagcauua

SEQ ID NO: 389157 - RNA, 19 nt, Homo sapiens
  misc_RNA (1)...(19): siRNA sense strand
uaacguauaccgauugaua

SEQ ID NO: 389158 - RNA, 19 nt, Homo sapiens
  misc_RNA (1)...(19): siRNA sense strand
ugaaugggcugcuuuacaa

SEQ ID NO: 389159 - RNA, 19 nt, Homo sapiens
  misc_RNA (1)...(19): siRNA sense strand
ggaaugacauagauuucuu

SEQ ID NO: 389160 - RNA, 19 nt, Homo sapiens
  misc_RNA (1)...(19): siRNA sense strand
cuacagagcgauugaauuu

SEQ ID NO: 389161 - RNA, 19 nt, Homo sapiens
  misc_RNA (1)...(19): siRNA sense strand
gaauuugcuuugacaacua

SEQ ID NO: 389162 - RNA, 19 nt, Homo sapiens
  misc_RNA (1)...(19): siRNA sense strand
agacagauuuggagacuuu

SEQ ID NO: 389163 - RNA, 19 nt, Homo sapiens
  misc_RNA (1)...(19): siRNA sense strand
gggaugcucuucuggaauu

SEQ ID NO: 389164 - RNA, 19 nt, Homo sapiens
  misc_RNA (1)...(19): siRNA sense strand
caucuuggcuuauaccuau

SEQ ID NO: 389165 - RNA, 19 nt, Homo sapiens
  misc_RNA (1)...(19): siRNA sense strand
gaaagcaaguaugaaauca

SEQ ID NO: 389166 - RNA, 19 nt, Homo sapiens
  misc_RNA (1)...(19): siRNA sense strand
caaaauagcuaccauggaa

SEQ ID NO: 389167 - RNA, 19 nt, Homo sapiens
  misc_RNA (1)...(19): siRNA sense strand
gauaugcuccgacacauuu

SEQ ID NO: 389168 - RNA, 19 nt, Homo sapiens
  misc_RNA (1)...(19): siRNA sense strand
gggaugcaguggaaacuaa

SEQ ID NO: 389169 - RNA, 19 nt, Homo sapiens
  misc_RNA (1)...(19): siRNA sense strand
gagcuguggucauuauuug

SEQ ID NO: 389170 - RNA, 19 nt, Homo sapiens
  misc_RNA (1)...(19): siRNA sense strand
gaaaagagacggaaaauag

SEQ ID NO: 389171 - RNA, 19 nt, Homo sapiens
  misc_RNA (1)...(19): siRNA sense strand
ggaaguaguggaaauauuc

SEQ ID NO: 389172 - RNA, 19 nt, Homo sapiens
  misc_RNA (1)...(19): siRNA sense strand
gugcauagcuaaacuccuu

SEQ ID NO: 389173 - RNA, 19 nt, Homo sapiens
  misc_RNA (1)...(19): siRNA sense strand
gaaaaguggugguaaaaug

SEQ ID NO: 389174 - RNA, 19 nt, Homo sapiens
  misc_RNA (1)...(19): siRNA sense strand
ccaaagucuugauugauaa

SEQ ID NO: 389175 - RNA, 19 nt, Homo sapiens
  misc_RNA (1)...(19): siRNA sense strand
uccaaagucuugauugaua

SEQ ID NO: 389176 - RNA, 19 nt, Homo sapiens
  misc_RNA (1)...(19): siRNA sense strand
ugugguaacucaagaaauu

SEQ ID NO: 389177 - RNA, 19 nt, Homo sapiens
  misc_RNA (1)...(19): siRNA sense strand
ggacugaucagcuucuuga

SEQ ID NO: 389178 - RNA, 19 nt, Homo sapiens
  misc_RNA (1)...(19): siRNA sense strand
gagaggagcugaauuugcu

SEQ ID NO: 389179 - RNA, 19 nt, Homo sapiens
  misc_RNA (1)...(19): siRNA sense strand
gaaugcagaaugaauguaa

SEQ ID NO: 389180 - RNA, 19 nt, Homo sapiens
  misc_RNA (1)...(19): siRNA sense strand
uuacuacucuuccauuuga

SEQ ID NO: 389181 - RNA, 19 nt, Homo sapiens
  misc_RNA (1)...(19): siRNA sense strand
gcaaaugauuccaaagucu

SEQ ID NO: 389182 - RNA, 19 nt, Homo sapiens
  misc_RNA (1)...(19): siRNA sense strand
ucacacgaaugcagaauga

SEQ ID NO: 389183 - RNA, 19 nt, Homo sapiens
  misc_RNA (1)...(19): siRNA sense strand
gaaauugccguuccauuca

SEQ ID NO: 389184 - RNA, 19 nt, Homo sapiens
  misc_RNA (1)...(19): siRNA sense strand
ucuaacagcuucaacaaau

SEQ ID NO: 389185 - RNA, 19 nt, Homo sapiens
  misc_RNA (1)...(19): siRNA sense strand
gaaacaggaguucauaaga

SEQ ID NO: 389186 - RNA, 19 nt, Homo sapiens
  misc_RNA (1)...(19): siRNA sense strand
gcacuggacuuagggaaau

SEQ ID NO: 389187 - RNA, 19 nt, Homo sapiens
  misc_RNA (1)...(19): siRNA sense strand
agaagaaacuuggccuuaa

SEQ ID NO: 389188 - RNA, 19 nt, Homo sapiens
  misc_RNA (1)...(19): siRNA sense strand
caacugacugcuaauuaua

SEQ ID NO: 389189 - RNA, 19 nt, Homo sapiens
  misc_RNA (1)...(19): siRNA sense strand
uaaaacaacugacugcuaa

SEQ ID NO: 389190 - RNA, 19 nt, Homo sapiens
  misc_RNA (1)...(19): siRNA sense strand
cauaugauguugugaggaa

SEQ ID NO: 389191 - RNA, 19 nt, Homo sapiens
  misc_RNA (1)...(19): siRNA sense strand
ggaugaaguagguaaauuu

SEQ ID NO: 389192 - RNA, 19 nt, Homo sapiens
  misc_RNA (1)...(19): siRNA sense strand
gcagugaaguugccacauc

SEQ ID NO: 389193 - RNA, 19 nt, Homo sapiens
  misc_RNA (1)...(19): siRNA sense strand
gaugaggauuuggauuaua

SEQ ID NO: 389194 - RNA, 19 nt, Homo sapiens
  misc_RNA (1)...(19): siRNA sense strand
gaaagcagccaggaaauuc

SEQ ID NO: 389195 - RNA, 19 nt, Homo sapiens
  misc_RNA (1)...(19): siRNA sense strand
ccaagagaauucuaguuug

SEQ ID NO: 389196 - RNA, 19 nt, Homo sapiens
  misc_RNA (1)...(19): siRNA sense strand
gcucucagcuuugaaacaa

SEQ ID NO: 389197 - RNA, 19 nt, Homo sapiens
  misc_RNA (1)...(19): siRNA sense strand
gcacuugccuguguaaugg

SEQ ID NO: 389198 - RNA, 19 nt, Homo sapiens
  misc_RNA (1)...(19): siRNA sense strand
guggaaauauucuuguuga

SEQ ID NO: 389199 - RNA, 19 nt, Homo sapiens
  misc_RNA (1)...(19): siRNA sense strand
aagcacagagguauaauua

SEQ ID NO: 389200 - RNA, 19 nt, Homo sapiens
  misc_RNA (1)...(19): siRNA sense strand
gaacuccaagucugcuuua

SEQ ID NO: 389201 - RNA, 19 nt, Homo sapiens
  misc_RNA (1)...(19): siRNA sense strand
ugacagcacuuuagaagag

SEQ ID NO: 389202 - RNA, 19 nt, Homo sapiens
  misc_RNA (1)...(19): siRNA sense strand
gccaagagaauucuaguuu

SEQ ID NO: 389203 - RNA, 19 nt, Homo sapiens
  misc_RNA (1)...(19): siRNA sense strand
cagcuacacuuucugaaga

SEQ ID NO: 389204 - RNA, 19 nt, Homo sapiens
  misc_RNA (1)...(19): siRNA sense strand
gaaauuaaaccagcugaau

SEQ ID NO: 389205 - RNA, 19 nt, Homo sapiens
  misc_RNA (1)...(19): siRNA sense strand
ccaggaauaugcaagauca

SEQ ID NO: 389206 - RNA, 19 nt, Homo sapiens
  misc_RNA (1)...(19): siRNA sense strand
gauauucugucagcugaaa

SEQ ID NO: 389207 - RNA, 19 nt, Homo sapiens
  misc_RNA (1)...(19): siRNA sense strand
gcauuacaguacuuacgua

SEQ ID NO: 389208 - RNA, 19 nt, Homo sapiens
  misc_RNA (1)...(19): siRNA sense strand
ugaaggccaugucaucaaa

SEQ ID NO: 389209 - RNA, 19 nt, Homo sapiens
  misc_RNA (1)...(19): siRNA sense strand
ggacugcgguuugggaaau

SEQ ID NO: 389210 - RNA, 19 nt, Homo sapiens
  misc_RNA (1)...(19): siRNA sense strand
caagugugauguugaugaa

SEQ ID NO: 389211 - RNA, 19 nt, Homo sapiens
  misc_RNA (1)...(19): siRNA sense strand
ugagaagaaugaaagaaga

SEQ ID NO: 389212 - RNA, 19 nt, Homo sapiens
  misc_RNA (1)...(19): siRNA sense strand
ccaguuugcugcucgauau

SEQ ID NO: 389213 - RNA, 19 nt, Homo sapiens
  misc_RNA (1)...(19): siRNA sense strand
gagcaggaaugagcaauag

SEQ ID NO: 389214 - RNA, 19 nt, Homo sapiens
  misc_RNA (1)...(19): siRNA sense strand
gcaaguaugaaaucaauuc

SEQ ID NO: 389215 - RNA, 19 nt, Homo sapiens
  misc_RNA (1)...(19): siRNA sense strand
ccggagaaauuaaauccua

SEQ ID NO: 389216 - RNA, 19 nt, Homo sapiens
  misc_RNA (1)...(19): siRNA sense strand
ggaaagcagccaggaaauu

SEQ ID NO: 389217 - RNA, 19 nt, Homo sapiens
  misc_RNA (1)...(19): siRNA sense strand
cuaacagcuucaacaaaua

SEQ ID NO: 389218 - RNA, 19 nt, Homo sapiens
  misc_RNA (1)...(19): siRNA sense strand
ucuuaaagcucaugggaaa

SEQ ID NO: 389219 - RNA, 19 nt, Homo sapiens
  misc_RNA (1)...(19): siRNA sense strand
gcaggaaguaguggaaaua

SEQ ID NO: 389220 - RNA, 19 nt, Homo sapiens
  misc_RNA (1)...(19): siRNA sense strand
ggaaagcaaguaugaaauc

SEQ ID NO: 389221 - RNA, 19 nt, Homo sapiens
  misc_RNA (1)...(19): siRNA sense strand
cagcuucaauggauucuga

SEQ ID NO: 389222 - RNA, 19 nt, Homo sapiens
  misc_RNA (1)...(19): siRNA sense strand
caggugaaguggauccuaa

SEQ ID NO: 389223 - RNA, 19 nt, Homo sapiens
  misc_RNA (1)...(19): siRNA sense strand
caaguacuaccguuucuuu

SEQ ID NO: 389224 - RNA, 19 nt, Homo sapiens
  misc_RNA (1)...(19): siRNA sense strand
uuggaagacuugguuauua

SEQ ID NO: 389225 - RNA, 19 nt, Homo sapiens
  misc_RNA (1)...(19): siRNA sense strand
aaacuuggccuuaauaugg

SEQ ID NO: 389226 - RNA, 19 nt, Homo sapiens
  misc_RNA (1)...(19): siRNA sense strand
uugcagaaauucaagauga

SEQ ID NO: 389227 - RNA, 19 nt, Homo sapiens
  misc_RNA (1)...(19): siRNA sense strand
ggucagaggcauuccauug

SEQ ID NO: 389228 - RNA, 19 nt, Homo sapiens
  misc_RNA (1)...(19): siRNA sense strand
acaacugacugcuaauuau

SEQ ID NO: 389229 - RNA, 19 nt, Homo sapiens
  misc_RNA (1)...(19): siRNA sense strand
ccacaucaucuuucgauuu

SEQ ID NO: 389230 - RNA, 19 nt, Homo sapiens
  misc_RNA (1)...(19): siRNA sense strand
uagcugauguacauauuga

SEQ ID NO: 389231 - RNA, 19 nt, Homo sapiens
  misc_RNA (1)...(19): siRNA sense strand
gaaauucuggaccuuauuc

SEQ ID NO: 389232 - RNA, 19 nt, Homo sapiens
  misc_RNA (1)...(19): siRNA sense strand
caagagaauucuaguuugc

SEQ ID NO: 389233 - RNA, 19 nt, Homo sapiens
  misc_RNA (1)...(19): siRNA sense strand
caaaugacaguuacagaga

SEQ ID NO: 389234 - RNA, 19 nt, Homo sapiens
  misc_RNA (1)...(19): siRNA sense strand
uaaaugugguaacucaaga

SEQ ID NO: 389235 - RNA, 19 nt, Homo sapiens
  misc_RNA (1)...(19): siRNA sense strand
caaaggagcugacaucaug

SEQ ID NO: 389236 - RNA, 19 nt, Homo sapiens
  misc_RNA (1)...(19): siRNA sense strand
caacgucauucgcuacuuc

SEQ ID NO: 389237 - RNA, 19 nt, Homo sapiens
  misc_RNA (1)...(19): siRNA sense strand
gagacugccuggugaagau

SEQ ID NO: 389238 - RNA, 19 nt, Homo sapiens
  misc_RNA (1)...(19): siRNA sense strand
gggcaaggccuucuucaag

SEQ ID NO: 389239 - RNA, 19 nt, Homo sapiens
  misc_RNA (1)...(19): siRNA sense strand
uaccagggcuucagugucu

SEQ ID NO: 389240 - RNA, 19 nt, Homo sapiens
  misc_RNA (1)...(19): siRNA sense strand
gcaaaggagcugacaucau

SEQ ID NO: 389241 - RNA, 19 nt, Homo sapiens
  misc_RNA (1)...(19): siRNA sense strand
caaccuugccaacgucauu

SEQ ID NO: 389242 - RNA, 19 nt, Homo sapiens
  misc_RNA (1)...(19): siRNA sense strand
gcgcaaaggagcugacauc

SEQ ID NO: 389243 - RNA, 19 nt, Homo sapiens
  misc_RNA (1)...(19): siRNA sense strand
ggccaucuccuucgccaaa

SEQ ID NO: 389244 - RNA, 19 nt, Homo sapiens
  misc_RNA (1)...(19): siRNA sense strand
acacgcaguucuggaggua

SEQ ID NO: 389245 - RNA, 19 nt, Homo sapiens
  misc_RNA (1)...(19): siRNA sense strand
ccacucaagcccucaacuu

SEQ ID NO: 389246 - RNA, 19 nt, Homo sapiens
  misc_RNA (1)...(19): siRNA sense strand
acgacgagcucaagaaggu

SEQ ID NO: 389247 - RNA, 19 nt, Homo sapiens
  misc_RNA (1)...(19): siRNA sense strand
ggagacugccuggugaaga

SEQ ID NO: 389248 - RNA, 19 nt, Homo sapiens
  misc_RNA (1)...(19): siRNA sense strand
ggacaagcacacgcaguuc

SEQ ID NO: 389249 - RNA, 19 nt, Homo sapiens
  misc_RNA (1)...(19): siRNA sense strand
ucaaggauaaguacaagca

SEQ ID NO: 389250 - RNA, 19 nt, Homo sapiens
  misc_RNA (1)...(19): siRNA sense strand
guacgacgagcucaagaag

SEQ ID NO: 389251 - RNA, 19 nt, Homo sapiens
  misc_RNA (1)...(19): siRNA sense strand
gggcaucguggacugcauu

SEQ ID NO: 389252 - RNA, 19 nt, Homo sapiens
  misc_RNA (1)...(19): siRNA sense strand
gugcagggcaucaucaucu

SEQ ID NO: 389253 - RNA, 19 nt, Homo sapiens
  misc_RNA (1)...(19): siRNA sense strand
cagcggacgugggaaaguc

SEQ ID NO: 389254 - RNA, 19 nt, Homo sapiens
  misc_RNA (1)...(19): siRNA sense strand
gcaguucuggagguacuuu

SEQ ID NO: 389255 - RNA, 19 nt, Homo sapiens
  misc_RNA (1)...(19): siRNA sense strand
ucguguacccgcuggauuu

SEQ ID NO: 389256 - RNA, 19 nt, Homo sapiens
  misc_RNA (1)...(19): siRNA sense strand
gauaaguacaagcagaucu

SEQ ID NO: 389257 - RNA, 19 nt, Homo sapiens
  misc_RNA (1)...(19): siRNA sense strand
ugcagggcaucaucaucua

SEQ ID NO: 389258 - RNA, 19 nt, Homo sapiens
  misc_RNA (1)...(19): siRNA sense strand
cggaacaggccaucuccuu

SEQ ID NO: 389259 - RNA, 19 nt, Homo sapiens
  misc_RNA (1)...(19): siRNA sense strand
ccaucuccuucgccaaaga

SEQ ID NO: 389260 - RNA, 19 nt, Homo sapiens
  misc_RNA (1)...(19): siRNA sense strand
uggacaagcacacgcaguu

SEQ ID NO: 389261 - RNA, 19 nt, Homo sapiens
  misc_RNA (1)...(19): siRNA sense strand
ccaagaacacgcacaucgu

SEQ ID NO: 389262 - RNA, 19 nt, Homo sapiens
  misc_RNA (1)...(19): siRNA sense strand
gacaagcacacgcaguucu

SEQ ID NO: 389263 - RNA, 19 nt, Homo sapiens
  misc_RNA (1)...(19): siRNA sense strand
gaacaaagaucgcuuacau

SEQ ID NO: 389264 - RNA, 19 nt, Homo sapiens
  misc_RNA (1)...(19): siRNA sense strand
ggaccgagauuacuacuau

SEQ ID NO: 389265 - RNA, 19 nt, Homo sapiens
  misc_RNA (1)...(19): siRNA sense strand
caaaggagaugacuacaau

SEQ ID NO: 389266 - RNA, 19 nt, Homo sapiens
  misc_RNA (1)...(19): siRNA sense strand
ggaagacuaugauguuuau

SEQ ID NO: 389267 - RNA, 19 nt, Homo sapiens
  misc_RNA (1)...(19): siRNA sense strand
ggaaugaccuuauauagcu

SEQ ID NO: 389268 - RNA, 19 nt, Homo sapiens
  misc_RNA (1)...(19): siRNA sense strand
ccaaugauguugaugugua

SEQ ID NO: 389269 - RNA, 19 nt, Homo sapiens
  misc_RNA (1)...(19): siRNA sense strand
ggagauguauccagagcua

SEQ ID NO: 389270 - RNA, 19 nt, Homo sapiens
  misc_RNA (1)...(19): siRNA sense strand
gaagaaaggaggaaccaaa

SEQ ID NO: 389271 - RNA, 19 nt, Homo sapiens
  misc_RNA (1)...(19): siRNA sense strand
ggauggcucuggagaacua

SEQ ID NO: 389272 - RNA, 19 nt, Homo sapiens
  misc_RNA (1)...(19): siRNA sense strand
acaaggaaauuacucauga

SEQ ID NO: 389273 - RNA, 19 nt, Homo sapiens
  misc_RNA (1)...(19): siRNA sense strand
ggaaauuacucaugauguc

SEQ ID NO: 389274 - RNA, 19 nt, Homo sapiens
  misc_RNA (1)...(19): siRNA sense strand
gaagagaaagugauuaaca

SEQ ID NO: 389275 - RNA, 19 nt, Homo sapiens
  misc_RNA (1)...(19): siRNA sense strand
gaggaagacuaugauguuu

SEQ ID NO: 389276 - RNA, 19 nt, Homo sapiens
  misc_RNA (1)...(19): siRNA sense strand
uggagcagaugcagauuua

SEQ ID NO: 389277 - RNA, 19 nt, Homo sapiens
  misc_RNA (1)...(19): siRNA sense strand
caaaugugauggaggcaaa

SEQ ID NO: 389278 - RNA, 19 nt, Homo sapiens
  misc_RNA (1)...(19): siRNA sense strand
acaaauaccuggagcagau

SEQ ID NO: 389279 - RNA, 19 nt, Homo sapiens
  misc_RNA (1)...(19): siRNA sense strand
ccaagaaauucaagaggaa

SEQ ID NO: 389280 - RNA, 19 nt, Homo sapiens
  misc_RNA (1)...(19): siRNA sense strand
accaagagcugcuuugaaa

SEQ ID NO: 389281 - RNA, 19 nt, Homo sapiens
  misc_RNA (1)...(19): siRNA sense strand
aaagaucgcuuacauacca

SEQ ID NO: 389282 - RNA, 19 nt, Homo sapiens
  misc_RNA (1)...(19): siRNA sense strand
aaagugaauuuccuacuga

SEQ ID NO: 389283 - RNA, 19 nt, Homo sapiens
  misc_RNA (1)...(19): siRNA sense strand
gagaaagugauuaacagua

SEQ ID NO: 389284 - RNA, 19 nt, Homo sapiens
  misc_RNA (1)...(19): siRNA sense strand
gugcagauauggaccaguu

SEQ ID NO: 389285 - RNA, 19 nt, Homo sapiens
  misc_RNA (1)...(19): siRNA sense strand
gaaguuaaauaugcaugug

SEQ ID NO: 389286 - RNA, 19 nt, Homo sapiens
  misc_RNA (1)...(19): siRNA sense strand
agaggaagaugaagaggaa

SEQ ID NO: 389287 - RNA, 19 nt, Homo sapiens
  misc_RNA (1)...(19): siRNA sense strand
ggaaauugaugagcuccuu

SEQ ID NO: 389288 - RNA, 19 nt, Homo sapiens
  misc_RNA (1)...(19): siRNA sense strand
aagcagaucuggaagacuu

SEQ ID NO: 389289 - RNA, 19 nt, Homo sapiens
  misc_RNA (1)...(19): siRNA sense strand
ggauggaggugugugagaa

SEQ ID NO: 389290 - RNA, 19 nt, Homo sapiens
  misc_RNA (1)...(19): siRNA sense strand
uggaagcuaugcugaauga

SEQ ID NO: 389291 - RNA, 19 nt, Homo sapiens
  misc_RNA (1)...(19): siRNA sense strand
caacuccucugccaaccaa

SEQ ID NO: 389292 - RNA, 19 nt, Homo sapiens
  misc_RNA (1)...(19): siRNA sense strand
gaaugaccuuauauagcua

SEQ ID NO: 389293 - RNA, 19 nt, Homo sapiens
  misc_RNA (1)...(19): siRNA sense strand
gaauggacaggguaaagaa

SEQ ID NO: 389294 - RNA, 19 nt, Homo sapiens
  misc_RNA (1)...(19): siRNA sense strand
ucucgugggugaauuugua

SEQ ID NO: 389295 - RNA, 19 nt, Homo sapiens
  misc_RNA (1)...(19): siRNA sense strand
ggaugaggaugaugaggau

SEQ ID NO: 389296 - RNA, 19 nt, Homo sapiens
  misc_RNA (1)...(19): siRNA sense strand
gaaagugauuaacaguaag

SEQ ID NO: 389297 - RNA, 19 nt, Homo sapiens
  misc_RNA (1)...(19): siRNA sense strand
uuauguagcccaagaaauu

SEQ ID NO: 389298 - RNA, 19 nt, Homo sapiens
  misc_RNA (1)...(19): siRNA sense strand
uuacauaccauccgucauu

SEQ ID NO: 389299 - RNA, 19 nt, Homo sapiens
  misc_RNA (1)...(19): siRNA sense strand
gcagaaccauggcuaugag

SEQ ID NO: 389300 - RNA, 19 nt, Homo sapiens
  misc_RNA (1)...(19): siRNA sense strand
gagcgucaccugaacaaga

SEQ ID NO: 389301 - RNA, 19 nt, Homo sapiens
  misc_RNA (1)...(19): siRNA sense strand
ugacacaucuccacgugau

SEQ ID NO: 389302 - RNA, 19 nt, Homo sapiens
  misc_RNA (1)...(19): siRNA sense strand
gaugaaaucccaggugaug

SEQ ID NO: 389303 - RNA, 19 nt, Homo sapiens
  misc_RNA (1)...(19): siRNA sense strand
guaagaauaaaguggauga

SEQ ID NO: 389304 - RNA, 19 nt, Homo sapiens
  misc_RNA (1)...(19): siRNA sense strand
cagaagagcgucaccugaa

SEQ ID NO: 389305 - RNA, 19 nt, Homo sapiens
  misc_RNA (1)...(19): siRNA sense strand
ugcaagagucgcuuuguua

SEQ ID NO: 389306 - RNA, 19 nt, Homo sapiens
  misc_RNA (1)...(19): siRNA sense strand
ggaacaauuuugagucuga

SEQ ID NO: 389307 - RNA, 19 nt, Homo sapiens
  misc_RNA (1)...(19): siRNA sense strand
ugaacaagaugcagaacca

SEQ ID NO: 389308 - RNA, 19 nt, Homo sapiens
  misc_RNA (1)...(19): siRNA sense strand
acgagacucuggauguuaa

SEQ ID NO: 389309 - RNA, 19 nt, Homo sapiens
  misc_RNA (1)...(19): siRNA sense strand
ccgaagagaaagugauuaa

SEQ ID NO: 389310 - RNA, 19 nt, Homo sapiens
  misc_RNA (1)...(19): siRNA sense strand
ggagcagcgugcagauaug

SEQ ID NO: 389311 - RNA, 19 nt, Homo sapiens
  misc_RNA (1)...(19): siRNA sense strand
ggaagcagccagugagaag

SEQ ID NO: 389312 - RNA, 19 nt, Homo sapiens
  misc_RNA (1)...(19): siRNA sense strand
caagagcugcuuugaaaca

SEQ ID NO: 389313 - RNA, 19 nt, Homo sapiens
  misc_RNA (1)...(19): siRNA sense strand
caaugauguugauguguau

SEQ ID NO: 389314 - RNA, 19 nt, Homo sapiens
  misc_RNA (1)...(19): siRNA sense strand
uaagugauguccugcuagu

SEQ ID NO: 389315 - RNA, 19 nt, Homo sapiens
  misc_RNA (1)...(19): siRNA sense strand
ugacgagacucuggauguu

SEQ ID NO: 389316 - RNA, 19 nt, Homo sapiens
  misc_RNA (1)...(19): siRNA sense strand
uaaaguggaugaaaacaug

SEQ ID NO: 389317 - RNA, 19 nt, Homo sapiens
  misc_RNA (1)...(19): siRNA sense strand
uacauaccauccgucauua

SEQ ID NO: 389318 - RNA, 19 nt, Homo sapiens
  misc_RNA (1)...(19): siRNA sense strand
ugagaacaaagaucgcuua

SEQ ID NO: 389319 - RNA, 19 nt, Homo sapiens
  misc_RNA (1)...(19): siRNA sense strand
gaaauuacucaugauguca

SEQ ID NO: 389320 - RNA, 19 nt, Homo sapiens
  misc_RNA (1)...(19): siRNA sense strand
caaggaaauuacucaugau

SEQ ID NO: 389321 - RNA, 19 nt, Homo sapiens
  misc_RNA (1)...(19): siRNA sense strand
gaagaggaagacuaugaug

SEQ ID NO: 389322 - RNA, 19 nt, Homo sapiens
  misc_RNA (1)...(19): siRNA sense strand
uguaagugauguccugcua

SEQ ID NO: 389323 - RNA, 19 nt, Homo sapiens
  misc_RNA (1)...(19): siRNA sense strand
gcaccaagagcugcuuuga

SEQ ID NO: 389324 - RNA, 19 nt, Homo sapiens
  misc_RNA (1)...(19): siRNA sense strand
gacgagacucuggauguua

SEQ ID NO: 389325 - RNA, 19 nt, Homo sapiens
  misc_RNA (1)...(19): siRNA sense strand
cgagaccucugcagaugau

SEQ ID NO: 389326 - RNA, 19 nt, Homo sapiens
  misc_RNA (1)...(19): siRNA sense strand
cgagauuacuacuaugaca

SEQ ID NO: 389327 - RNA, 19 nt, Homo sapiens
  misc_RNA (1)...(19): siRNA sense strand
gagcuacagaucacaaaug

SEQ ID NO: 389328 - RNA, 19 nt, Homo sapiens
  misc_RNA (1)...(19): siRNA sense strand
ggaagaggaagaugaagag

SEQ ID NO: 389329 - RNA, 19 nt, Homo sapiens
  misc_RNA (1)...(19): siRNA sense strand
ccauggcacugaauaugug

SEQ ID NO: 389330 - RNA, 19 nt, Homo sapiens
  misc_RNA (1)...(19): siRNA sense strand
cagggaaugaccuuauaua

SEQ ID NO: 389331 - RNA, 19 nt, Homo sapiens
  misc_RNA (1)...(19): siRNA sense strand
gaacauucagacugggaaa

SEQ ID NO: 389332 - RNA, 19 nt, Homo sapiens
  misc_RNA (1)...(19): siRNA sense strand
gcaaugcaagagucgcuuu

SEQ ID NO: 389333 - RNA, 19 nt, Homo sapiens
  misc_RNA (1)...(19): siRNA sense strand
ggaguuguaccacccaaug

SEQ ID NO: 389334 - RNA, 19 nt, Homo sapiens
  misc_RNA (1)...(19): siRNA sense strand
acaaagaucgcuuacauac

SEQ ID NO: 389335 - RNA, 19 nt, Homo sapiens
  misc_RNA (1)...(19): siRNA sense strand
agaggaagacuaugauguu

SEQ ID NO: 389336 - RNA, 19 nt, Homo sapiens
  misc_RNA (1)...(19): siRNA sense strand
gcacuuccaagccaugguu

SEQ ID NO: 389337 - RNA, 19 nt, Homo sapiens
  misc_RNA (1)...(19): siRNA sense strand
cagaagcagcuguggauga

SEQ ID NO: 389338 - RNA, 19 nt, Homo sapiens
  misc_RNA (1)...(19): siRNA sense strand
gaagagcgucaccugaaca

SEQ ID NO: 389339 - RNA, 19 nt, Homo sapiens
  misc_RNA (1)...(19): siRNA sense strand
gcaagagucgcuuuguuac

SEQ ID NO: 389340 - RNA, 19 nt, Homo sapiens
  misc_RNA (1)...(19): siRNA sense strand
gaaaugggaaccugaucca

SEQ ID NO: 389341 - RNA, 19 nt, Homo sapiens
  misc_RNA (1)...(19): siRNA sense strand
ugggugaauuuguaaguga

SEQ ID NO: 389342 - RNA, 19 nt, Homo sapiens
  misc_RNA (1)...(19): siRNA sense strand
caaagaggcaugucugacu

SEQ ID NO: 389343 - RNA, 19 nt, Homo sapiens
  misc_RNA (1)...(19): siRNA sense strand
ccacgugauugaagaaagg

SEQ ID NO: 389344 - RNA, 19 nt, Homo sapiens
  misc_RNA (1)...(19): siRNA sense strand
gcggcaacaggaacaauuu

SEQ ID NO: 389345 - RNA, 19 nt, Homo sapiens
  misc_RNA (1)...(19): siRNA sense strand
gacaaggaaauuacucaug

SEQ ID NO: 389346 - RNA, 19 nt, Homo sapiens
  misc_RNA (1)...(19): siRNA sense strand
ugacuacaaugaggagaau

SEQ ID NO: 389347 - RNA, 19 nt, Homo sapiens
  misc_RNA (1)...(19): siRNA sense strand
ggaaguuaaauaugcaugu

SEQ ID NO: 389348 - RNA, 19 nt, Homo sapiens
  misc_RNA (1)...(19): siRNA sense strand
ccucagacaaagauuauug

SEQ ID NO: 389349 - RNA, 19 nt, Homo sapiens
  misc_RNA (1)...(19): siRNA sense strand
uaugugugcugcccucaga

SEQ ID NO: 389350 - RNA, 19 nt, Homo sapiens
  misc_RNA (1)...(19): siRNA sense strand
ggcacacgguagucaaaga

SEQ ID NO: 389351 - RNA, 19 nt, Homo sapiens
  misc_RNA (1)...(19): siRNA sense strand
gacucuggauguuaaggaa

SEQ ID NO: 389352 - RNA, 19 nt, Homo sapiens
  misc_RNA (1)...(19): siRNA sense strand
gcagauauggaccaguuca

SEQ ID NO: 389353 - RNA, 19 nt, Homo sapiens
  misc_RNA (1)...(19): siRNA sense strand
ugaugaggaugaggaagaa

SEQ ID NO: 389354 - RNA, 19 nt, Homo sapiens
  misc_RNA (1)...(19): siRNA sense strand
ugaauuuccuacugaagca

SEQ ID NO: 389355 - RNA, 19 nt, Homo sapiens
  misc_RNA (1)...(19): siRNA sense strand
cucagggaaugaccuuaua

SEQ ID NO: 389356 - RNA, 19 nt, Homo sapiens
  misc_RNA (1)...(19): siRNA sense strand
ucaaaggagaugacuacaa

SEQ ID NO: 389357 - RNA, 19 nt, Homo sapiens
  misc_RNA (1)...(19): siRNA sense strand
aagagaaagugauuaacag

SEQ ID NO: 389358 - RNA, 19 nt, Homo sapiens
  misc_RNA (1)...(19): siRNA sense strand
gccacggccucaucgcauu

SEQ ID NO: 389359 - RNA, 19 nt, Homo sapiens
  misc_RNA (1)...(19): siRNA sense strand
ugcgugcgcuuuauauaug

SEQ ID NO: 389360 - RNA, 19 nt, Homo sapiens
  misc_RNA (1)...(19): siRNA sense strand
gugcgugcgcuuuauauau

SEQ ID NO: 389361 - RNA, 19 nt, Homo sapiens
  misc_RNA (1)...(19): siRNA sense strand
aaggagaugacuacaauga

SEQ ID NO: 389362 - RNA, 19 nt, Homo sapiens
  misc_RNA (1)...(19): siRNA sense strand
cuaaggagcagcuggagau

SEQ ID NO: 389363 - RNA, 19 nt, Homo sapiens
  misc_RNA (1)...(19): siRNA sense strand
ggaaguccuuggccgauga

SEQ ID NO: 389364 - RNA, 19 nt, Homo sapiens
  misc_RNA (1)...(19): siRNA sense strand
gaucucaagucuaacaaca

SEQ ID NO: 389365 - RNA, 19 nt, Homo sapiens
  misc_RNA (1)...(19): siRNA sense strand
cagcugaggugauccguau

SEQ ID NO: 389366 - RNA, 19 nt, Homo sapiens
  misc_RNA (1)...(19): siRNA sense strand
accgagaucucaagucuaa

SEQ ID NO: 389367 - RNA, 19 nt, Homo sapiens
  misc_RNA (1)...(19): siRNA sense strand
ccaccgagaucucaagucu

SEQ ID NO: 389368 - RNA, 19 nt, Homo sapiens
  misc_RNA (1)...(19): siRNA sense strand
gaacaucauccaccgagau

SEQ ID NO: 389369 - RNA, 19 nt, Homo sapiens
  misc_RNA (1)...(19): siRNA sense strand
aacaacaucuuccuacaug

SEQ ID NO: 389370 - RNA, 19 nt, Homo sapiens
  misc_RNA (1)...(19): siRNA sense strand
aaguauaccugcccaacaa

SEQ ID NO: 389371 - RNA, 19 nt, Homo sapiens
  misc_RNA (1)...(19): siRNA sense strand
gcuccagccucuaccauca

SEQ ID NO: 389372 - RNA, 19 nt, Homo sapiens
  misc_RNA (1)...(19): siRNA sense strand
cuacgacucucuagacaag

SEQ ID NO: 389373 - RNA, 19 nt, Homo sapiens
  misc_RNA (1)...(19): siRNA sense strand
gauggcagcugaggugauc

SEQ ID NO: 389374 - RNA, 19 nt, Homo sapiens
  misc_RNA (1)...(19): siRNA sense strand
ggcccaggcuuucaagaau

SEQ ID NO: 389375 - RNA, 19 nt, Homo sapiens
  misc_RNA (1)...(19): siRNA sense strand
gaucgggacgggcucguuu

SEQ ID NO: 389376 - RNA, 19 nt, Homo sapiens
  misc_RNA (1)...(19): siRNA sense strand
gagcagcccucaggaucug

SEQ ID NO: 389377 - RNA, 19 nt, Homo sapiens
  misc_RNA (1)...(19): siRNA sense strand
uagaggagguagugaugga

SEQ ID NO: 389378 - RNA, 19 nt, Homo sapiens
  misc_RNA (1)...(19): siRNA sense strand
gcacccaggccgaugaguu

SEQ ID NO: 389379 - RNA, 19 nt, Homo sapiens
  misc_RNA (1)...(19): siRNA sense strand
ggacugcuguguggucuac

SEQ ID NO: 389380 - RNA, 19 nt, Homo sapiens
  misc_RNA (1)...(19): siRNA sense strand
guaccaaccgccaacaguu

SEQ ID NO: 389381 - RNA, 19 nt, Homo sapiens
  misc_RNA (1)...(19): siRNA sense strand
ccaaaccuguggcuacaag

SEQ ID NO: 389382 - RNA, 19 nt, Homo sapiens
  misc_RNA (1)...(19): siRNA sense strand
acaagaagaaagugaagaa

SEQ ID NO: 389383 - RNA, 19 nt, Homo sapiens
  misc_RNA (1)...(19): siRNA sense strand
gcccaggcuuucaagaaug

SEQ ID NO: 389384 - RNA, 19 nt, Homo sapiens
  misc_RNA (1)...(19): siRNA sense strand
ucucaagucuaacaacauc

SEQ ID NO: 389385 - RNA, 19 nt, Homo sapiens
  misc_RNA (1)...(19): siRNA sense strand
cgacacacgcuucgacaug

SEQ ID NO: 389386 - RNA, 19 nt, Homo sapiens
  misc_RNA (1)...(19): siRNA sense strand
ggaagacgcgacaugucaa

SEQ ID NO: 389387 - RNA, 19 nt, Homo sapiens
  misc_RNA (1)...(19): siRNA sense strand
ggugaagaucggugacuuu

SEQ ID NO: 389388 - RNA, 19 nt, Homo sapiens
  misc_RNA (1)...(19): siRNA sense strand
gauuugccaucaucacaca

SEQ ID NO: 389389 - RNA, 19 nt, Homo sapiens
  misc_RNA (1)...(19): siRNA sense strand
gaugacaagaagaaaguga

SEQ ID NO: 389390 - RNA, 19 nt, Homo sapiens
  misc_RNA (1)...(19): siRNA sense strand
cuaacaacaucuuccuaca

SEQ ID NO: 389391 - RNA, 19 nt, Homo sapiens
  misc_RNA (1)...(19): siRNA sense strand
uaacaacaucuuccuacau

SEQ ID NO: 389392 - RNA, 19 nt, Homo sapiens
  misc_RNA (1)...(19): siRNA sense strand
ccgcugaccaugcacaauu

SEQ ID NO: 389393 - RNA, 19 nt, Homo sapiens
  misc_RNA (1)...(19): siRNA sense strand
agaagaaagugaagaaccu

SEQ ID NO: 389394 - RNA, 19 nt, Homo sapiens
  misc_RNA (1)...(19): siRNA sense strand
caggaucugugcuguggau

SEQ ID NO: 389395 - RNA, 19 nt, Homo sapiens
  misc_RNA (1)...(19): siRNA sense strand
gggauggcaugagugucua

SEQ ID NO: 389396 - RNA, 19 nt, Homo sapiens
  misc_RNA (1)...(19): siRNA sense strand
cccaggcuuucaagaauga

SEQ ID NO: 389397 - RNA, 19 nt, Homo sapiens
  misc_RNA (1)...(19): siRNA sense strand
agaugcaggugcucaggaa

SEQ ID NO: 389398 - RNA, 19 nt, Homo sapiens
  misc_RNA (1)...(19): siRNA sense strand
guaccgggacucaggcuau

SEQ ID NO: 389399 - RNA, 19 nt, Homo sapiens
  misc_RNA (1)...(19): siRNA sense strand
uggcugccgugaccagauu

SEQ ID NO: 389400 - RNA, 19 nt, Homo sapiens
  misc_RNA (1)...(19): siRNA sense strand
cgagaucucaagucuaaca

SEQ ID NO: 389401 - RNA, 19 nt, Homo sapiens
  misc_RNA (1)...(19): siRNA sense strand
gugaagaucggugacuuug

SEQ ID NO: 389402 - RNA, 19 nt, Homo sapiens
  misc_RNA (1)...(19): siRNA sense strand
caacaucuuccuacaugag

SEQ ID NO: 389403 - RNA, 19 nt, Homo sapiens
  misc_RNA (1)...(19): siRNA sense strand
cgcugaccaugcacaauuu

SEQ ID NO: 389404 - RNA, 19 nt, Homo sapiens
  misc_RNA (1)...(19): siRNA sense strand
gguaguagaggagguagug

SEQ ID NO: 389405 - RNA, 19 nt, Homo sapiens
  misc_RNA (1)...(19): siRNA sense strand
ucgagguccuugaagaugu

SEQ ID NO: 389406 - RNA, 19 nt, Homo sapiens
  misc_RNA (1)...(19): siRNA sense strand
gagcaggcccaggcuuuca

SEQ ID NO: 389407 - RNA, 19 nt, Homo sapiens
  misc_RNA (1)...(19): siRNA sense strand
ugacuggcucacugccuua

SEQ ID NO: 389408 - RNA, 19 nt, Homo sapiens
  misc_RNA (1)...(19): siRNA sense strand
acaacaucuuccuacauga

SEQ ID NO: 389409 - RNA, 19 nt, Homo sapiens
  misc_RNA (1)...(19): siRNA sense strand
cacccaggccgaugaguug

SEQ ID NO: 389410 - RNA, 19 nt, Homo sapiens
  misc_RNA (1)...(19): siRNA sense strand
uucugugacuucugccuua

SEQ ID NO: 389411 - RNA, 19 nt, Homo sapiens
  misc_RNA (1)...(19): siRNA sense strand
ggagcagcccucaggaucu

SEQ ID NO: 389412 - RNA, 19 nt, Homo sapiens
  misc_RNA (1)...(19): siRNA sense strand
gggauuugccaucaucaca

SEQ ID NO: 389413 - RNA, 19 nt, Homo sapiens
  misc_RNA (1)...(19): siRNA sense strand
uaaaucaggacugcugugu

SEQ ID NO: 389414 - RNA, 19 nt, Homo sapiens
  misc_RNA (1)...(19): siRNA sense strand
gacaagaagaaagugaaga

SEQ ID NO: 389415 - RNA, 19 nt, Homo sapiens
  misc_RNA (1)...(19): siRNA sense strand
aaaccuguggcuacaaguu

SEQ ID NO: 389416 - RNA, 19 nt, Homo sapiens
  misc_RNA (1)...(19): siRNA sense strand
agugggcaccgucaaagua

SEQ ID NO: 389417 - RNA, 19 nt, Homo sapiens
  misc_RNA (1)...(19): siRNA sense strand
ugggcaccgucaaaguaua

SEQ ID NO: 389418 - RNA, 19 nt, Homo sapiens
  misc_RNA (1)...(19): siRNA sense strand
gccgggauuugccaucauc

SEQ ID NO: 389419 - RNA, 19 nt, Homo sapiens
  misc_RNA (1)...(19): siRNA sense strand
ccgugaaggugcucaaggu

SEQ ID NO: 389420 - RNA, 19 nt, Homo sapiens
  misc_RNA (1)...(19): siRNA sense strand
cgagguccuugaagauguc

SEQ ID NO: 389421 - RNA, 19 nt, Homo sapiens
  misc_RNA (1)...(19): siRNA sense strand
gauccuggccacaauugag

SEQ ID NO: 389422 - RNA, 19 nt, Homo sapiens
  misc_RNA (1)...(19): siRNA sense strand
gcagugggcaccgucaaag

SEQ ID NO: 389423 - RNA, 19 nt, Homo sapiens
  misc_RNA (1)...(19): siRNA sense strand
ucaagucuaacaacaucuu

SEQ ID NO: 389424 - RNA, 19 nt, Homo sapiens
  misc_RNA (1)...(19): siRNA sense strand
gggagguaccacccaguga

SEQ ID NO: 389425 - RNA, 19 nt, Homo sapiens
  misc_RNA (1)...(19): siRNA sense strand
uaccgggacucaggcuauu

SEQ ID NO: 389426 - RNA, 19 nt, Homo sapiens
  misc_RNA (1)...(19): siRNA sense strand
ccacaguguccaggauuug

SEQ ID NO: 389427 - RNA, 19 nt, Homo sapiens
  misc_RNA (1)...(19): siRNA sense strand
cuaccacaguguccaggau

SEQ ID NO: 389428 - RNA, 19 nt, Homo sapiens
  misc_RNA (1)...(19): siRNA sense strand
acaaguuccaccagcauug

SEQ ID NO: 389429 - RNA, 19 nt, Homo sapiens
  misc_RNA (1)...(19): siRNA sense strand
ggauggcgaggagcucauu

SEQ ID NO: 389430 - RNA, 19 nt, Homo sapiens
  misc_RNA (1)...(19): siRNA sense strand
gaagacgcgacaugucaac

SEQ ID NO: 389431 - RNA, 19 nt, Homo sapiens
  misc_RNA (1)...(19): siRNA sense strand
ucaggaagacgcgacaugu

SEQ ID NO: 389432 - RNA, 19 nt, Homo sapiens
  misc_RNA (1)...(19): siRNA sense strand
ggcagugggcaccgucaaa

SEQ ID NO: 389433 - RNA, 19 nt, Homo sapiens
  misc_RNA (1)...(19): siRNA sense strand
ucugugacuucugccuuaa

SEQ ID NO: 389434 - RNA, 19 nt, Homo sapiens
  misc_RNA (1)...(19): siRNA sense strand
uguguggucuaccgacuca

SEQ ID NO: 389435 - RNA, 19 nt, Homo sapiens
  misc_RNA (1)...(19): siRNA sense strand
aggaagacgcgacauguca

SEQ ID NO: 389436 - RNA, 19 nt, Homo sapiens
  misc_RNA (1)...(19): siRNA sense strand
cgacagcccugauaguuua

SEQ ID NO: 389437 - RNA, 19 nt, Homo sapiens
  misc_RNA (1)...(19): siRNA sense strand
ggaagaaacuggugauugu

SEQ ID NO: 389438 - RNA, 19 nt, Homo sapiens
  misc_RNA (1)...(19): siRNA sense strand
gaccaaagauggagugaga

SEQ ID NO: 389439 - RNA, 19 nt, Homo sapiens
  misc_RNA (1)...(19): siRNA sense strand
ggacacagcugggcaggaa

SEQ ID NO: 389440 - RNA, 19 nt, Homo sapiens
  misc_RNA (1)...(19): siRNA sense strand
ccacaguguuugagaacua

SEQ ID NO: 389441 - RNA, 19 nt, Homo sapiens
  misc_RNA (1)...(19): siRNA sense strand
gcagagauauggcaaacag

SEQ ID NO: 389442 - RNA, 19 nt, Homo sapiens
  misc_RNA (1)...(19): siRNA sense strand
cagcugggcaggaagauua

SEQ ID NO: 389443 - RNA, 19 nt, Homo sapiens
  misc_RNA (1)...(19): siRNA sense strand
caaacaggauuggcgcuuu

SEQ ID NO: 389444 - RNA, 19 nt, Homo sapiens
  misc_RNA (1)...(19): siRNA sense strand
gauggagccuguggaaaga

SEQ ID NO: 389445 - RNA, 19 nt, Homo sapiens
  misc_RNA (1)...(19): siRNA sense strand
gaagaaggcagagauaugg

SEQ ID NO: 389446 - RNA, 19 nt, Homo sapiens
  misc_RNA (1)...(19): siRNA sense strand
agaacuauguggcagauau

SEQ ID NO: 389447 - RNA, 19 nt, Homo sapiens
  misc_RNA (1)...(19): siRNA sense strand
gauguuauacugauguguu

SEQ ID NO: 389448 - RNA, 19 nt, Homo sapiens
  misc_RNA (1)...(19): siRNA sense strand
gaagaaacuggugauuguu

SEQ ID NO: 389449 - RNA, 19 nt, Homo sapiens
  misc_RNA (1)...(19): siRNA sense strand
uagaaaacaucccagaaaa

SEQ ID NO: 389450 - RNA, 19 nt, Homo sapiens
  misc_RNA (1)...(19): siRNA sense strand
ggaaugaugagcacacaag

SEQ ID NO: 389451 - RNA, 19 nt, Homo sapiens
  misc_RNA (1)...(19): siRNA sense strand
ggcgggagcuagccaagau

SEQ ID NO: 389452 - RNA, 19 nt, Homo sapiens
  misc_RNA (1)...(19): siRNA sense strand
aaagacaugcuugcucaua

SEQ ID NO: 389453 - RNA, 19 nt, Homo sapiens
  misc_RNA (1)...(19): siRNA sense strand
ugaagaaggcagagauaug

SEQ ID NO: 389454 - RNA, 19 nt, Homo sapiens
  misc_RNA (1)...(19): siRNA sense strand
gcagguagaguuggcuuug

SEQ ID NO: 389455 - RNA, 19 nt, Homo sapiens
  misc_RNA (1)...(19): siRNA sense strand
ccaaagauggagugagaga

SEQ ID NO: 389456 - RNA, 19 nt, Homo sapiens
  misc_RNA (1)...(19): siRNA sense strand
gaaaacaucccagaaaagu

SEQ ID NO: 389457 - RNA, 19 nt, Homo sapiens
  misc_RNA (1)...(19): siRNA sense strand
gaacuauguggcagauauc

SEQ ID NO: 389458 - RNA, 19 nt, Homo sapiens
  misc_RNA (1)...(19): siRNA sense strand
ggugauuguuggugaugga

SEQ ID NO: 389459 - RNA, 19 nt, Homo sapiens
  misc_RNA (1)...(19): siRNA sense strand
agacaugcuugcucauagu

SEQ ID NO: 389460 - RNA, 19 nt, Homo sapiens
  misc_RNA (1)...(19): siRNA sense strand
cuacccagauaccgauguu

SEQ ID NO: 389461 - RNA, 19 nt, Homo sapiens
  misc_RNA (1)...(19): siRNA sense strand
gauauggcaaacaggauug

SEQ ID NO: 389462 - RNA, 19 nt, Homo sapiens
  misc_RNA (1)...(19): siRNA sense strand
gcacacaaggcgggagcua

SEQ ID NO: 389463 - RNA, 19 nt, Homo sapiens
  misc_RNA (1)...(19): siRNA sense strand
guucagcaaagaccaaaga

SEQ ID NO: 389464 - RNA, 19 nt, Homo sapiens
  misc_RNA (1)...(19): siRNA sense strand
agauaccgauguuauacug

SEQ ID NO: 389465 - RNA, 19 nt, Homo sapiens
  misc_RNA (1)...(19): siRNA sense strand
aagacaugcuugcucauag

SEQ ID NO: 389466 - RNA, 19 nt, Homo sapiens
  misc_RNA (1)...(19): siRNA sense strand
cggaagaaacuggugauug

SEQ ID NO: 389467 - RNA, 19 nt, Homo sapiens
  misc_RNA (1)...(19): siRNA sense strand
caagcuagacgugggaaga

SEQ ID NO: 389468 - RNA, 19 nt, Homo sapiens
  misc_RNA (1)...(19): siRNA sense strand
gaagcaggagccggugaaa

SEQ ID NO: 389469 - RNA, 19 nt, Homo sapiens
  misc_RNA (1)...(19): siRNA sense strand
ggugauggagccuguggaa

SEQ ID NO: 389470 - RNA, 19 nt, Homo sapiens
  misc_RNA (1)...(19): siRNA sense strand
ccccagaagucaagcauuu

SEQ ID NO: 389471 - RNA, 19 nt, Homo sapiens
  misc_RNA (1)...(19): siRNA sense strand
aaacaggauuggcgcuuuu

SEQ ID NO: 389472 - RNA, 19 nt, Homo sapiens
  misc_RNA (1)...(19): siRNA sense strand
ugauggagccuguggaaag

SEQ ID NO: 389473 - RNA, 19 nt, Homo sapiens
  misc_RNA (1)...(19): siRNA sense strand
ugagaacuauguggcagau

SEQ ID NO: 389474 - RNA, 19 nt, Homo sapiens
  misc_RNA (1)...(19): siRNA sense strand
cauggaguguucagcaaag

SEQ ID NO: 389475 - RNA, 19 nt, Homo sapiens
  misc_RNA (1)...(19): siRNA sense strand
ccugaagaaggcagagaua

SEQ ID NO: 389476 - RNA, 19 nt, Homo sapiens
  misc_RNA (1)...(19): siRNA sense strand
auaucgagguggauggaaa

SEQ ID NO: 389477 - RNA, 19 nt, Homo sapiens
  misc_RNA (1)...(19): siRNA sense strand
ggagcuagccaagaugaag

SEQ ID NO: 389478 - RNA, 19 nt, Homo sapiens
  misc_RNA (1)...(19): siRNA sense strand
cccagauaccgauguuaua

SEQ ID NO: 389479 - RNA, 19 nt, Homo sapiens
  misc_RNA (1)...(19): siRNA sense strand
aagaaacuggugauuguug

SEQ ID NO: 389480 - RNA, 19 nt, Homo sapiens
  misc_RNA (1)...(19): siRNA sense strand
ucgacagcccugauaguuu

SEQ ID NO: 389481 - RNA, 19 nt, Homo sapiens
  misc_RNA (1)...(19): siRNA sense strand
uacauggaguguucagcaa

SEQ ID NO: 389482 - RNA, 19 nt, Homo sapiens
  misc_RNA (1)...(19): siRNA sense strand
ccagauaccgauguuauac

SEQ ID NO: 389483 - RNA, 19 nt, Homo sapiens
  misc_RNA (1)...(19): siRNA sense strand
caugcuugcucauagucuu

SEQ ID NO: 389484 - RNA, 19 nt, Homo sapiens
  misc_RNA (1)...(19): siRNA sense strand
auaccgauguuauacugau

SEQ ID NO: 389485 - RNA, 19 nt, Homo sapiens
  misc_RNA (1)...(19): siRNA sense strand
cagcccugauaguuuagaa

SEQ ID NO: 389486 - RNA, 19 nt, Homo sapiens
  misc_RNA (1)...(19): siRNA sense strand
cacaguguuugagaacuau

SEQ ID NO: 389487 - RNA, 19 nt, Homo sapiens
  misc_RNA (1)...(19): siRNA sense strand
uuggguacauggaguguuc

SEQ ID NO: 389488 - RNA, 19 nt, Homo sapiens
  misc_RNA (1)...(19): siRNA sense strand
gagauauggcaaacaggau

SEQ ID NO: 389489 - RNA, 19 nt, Homo sapiens
  misc_RNA (1)...(19): siRNA sense strand
gaaagacaugcuugcucau

SEQ ID NO: 389490 - RNA, 19 nt, Homo sapiens
  misc_RNA (1)...(19): siRNA sense strand
agauauggcaaacaggauu

SEQ ID NO: 389491 - RNA, 19 nt, Homo sapiens
  misc_RNA (1)...(19): siRNA sense strand
cagguagaguuggcuuugu

SEQ ID NO: 389492 - RNA, 19 nt, Homo sapiens
  misc_RNA (1)...(19): siRNA sense strand
cugguugccuugucuugug

SEQ ID NO: 389493 - RNA, 19 nt, Homo sapiens
  misc_RNA (1)...(19): siRNA sense strand
gaagaaagcugugauugga

SEQ ID NO: 389494 - RNA, 19 nt, Homo sapiens
  misc_RNA (1)...(19): siRNA sense strand
gagcuuuccuuguguauuu

SEQ ID NO: 389495 - RNA, 19 nt, Homo sapiens
  misc_RNA (1)...(19): siRNA sense strand
gcacaucgccucaacauug

SEQ ID NO: 389496 - RNA, 19 nt, Homo sapiens
  misc_RNA (1)...(19): siRNA sense strand
gggauaagaacauguauua

SEQ ID NO: 389497 - RNA, 19 nt, Homo sapiens
  misc_RNA (1)...(19): siRNA sense strand
gaccaaagcucuaggacuu

SEQ ID NO: 389498 - RNA, 19 nt, Homo sapiens
  misc_RNA (1)...(19): siRNA sense strand
ccagaaaccuacucauuug

SEQ ID NO: 389499 - RNA, 19 nt, Homo sapiens
  misc_RNA (1)...(19): siRNA sense strand
ucaagaagacuauugcuua

SEQ ID NO: 389500 - RNA, 19 nt, Homo sapiens
  misc_RNA (1)...(19): siRNA sense strand
cagggucucuucagaaaua

SEQ ID NO: 389501 - RNA, 19 nt, Homo sapiens
  misc_RNA (1)...(19): siRNA sense strand
gaucuuugcuuauuaccaa

SEQ ID NO: 389502 - RNA, 19 nt, Homo sapiens
  misc_RNA (1)...(19): siRNA sense strand
caagaagacuauugcuuau

SEQ ID NO: 389503 - RNA, 19 nt, Homo sapiens
  misc_RNA (1)...(19): siRNA sense strand
gaaggucgccugaucuuug

SEQ ID NO: 389504 - RNA, 19 nt, Homo sapiens
  misc_RNA (1)...(19): siRNA sense strand
gaucaagguuauuaugguu

SEQ ID NO: 389505 - RNA, 19 nt, Homo sapiens
  misc_RNA (1)...(19): siRNA sense strand
gaacuaaggacaucgugaa

SEQ ID NO: 389506 - RNA, 19 nt, Homo sapiens
  misc_RNA (1)...(19): siRNA sense strand
ggaggaaggucgccugauc

SEQ ID NO: 389507 - RNA, 19 nt, Homo sapiens
  misc_RNA (1)...(19): siRNA sense strand
guggauaacucaucucuca

SEQ ID NO: 389508 - RNA, 19 nt, Homo sapiens
  misc_RNA (1)...(19): siRNA sense strand
ccuggaagcuggugggaua

SEQ ID NO: 389509 - RNA, 19 nt, Homo sapiens
  misc_RNA (1)...(19): siRNA sense strand
cuacacggcuuucuuuguu

SEQ ID NO: 389510 - RNA, 19 nt, Homo sapiens
  misc_RNA (1)...(19): siRNA sense strand
gcagggaucaagguuauua

SEQ ID NO: 389511 - RNA, 19 nt, Homo sapiens
  misc_RNA (1)...(19): siRNA sense strand
cagaacagcuggaugagau

SEQ ID NO: 389512 - RNA, 19 nt, Homo sapiens
  misc_RNA (1)...(19): siRNA sense strand
gauuggagaugccucagaa

SEQ ID NO: 389513 - RNA, 19 nt, Homo sapiens
  misc_RNA (1)...(19): siRNA sense strand
gcauggagcugaaggacau

SEQ ID NO: 389514 - RNA, 19 nt, Homo sapiens
  misc_RNA (1)...(19): siRNA sense strand
gaagaacaacugccuggaa

SEQ ID NO: 389515 - RNA, 19 nt, Homo sapiens
  misc_RNA (1)...(19): siRNA sense strand
gaccacaaacucagcaaua

SEQ ID NO: 389516 - RNA, 19 nt, Homo sapiens
  misc_RNA (1)...(19): siRNA sense strand
gaaagugacaucaugaaca

SEQ ID NO: 389517 - RNA, 19 nt, Homo sapiens
  misc_RNA (1)...(19): siRNA sense strand
gaaaauguccccaucauga

SEQ ID NO: 389518 - RNA, 19 nt, Homo sapiens
  misc_RNA (1)...(19): siRNA sense strand
gugggacucuugucaauga

SEQ ID NO: 389519 - RNA, 19 nt, Homo sapiens
  misc_RNA (1)...(19): siRNA sense strand
gugaaugacuugaaagaca

SEQ ID NO: 389520 - RNA, 19 nt, Homo sapiens
  misc_RNA (1)...(19): siRNA sense strand
gcucagaacagcuggauga

SEQ ID NO: 389521 - RNA, 19 nt, Homo sapiens
  misc_RNA (1)...(19): siRNA sense strand
ggagaugccucagaaacug

SEQ ID NO: 389522 - RNA, 19 nt, Homo sapiens
  misc_RNA (1)...(19): siRNA sense strand
cuacgugaaugacuugaaa

SEQ ID NO: 389523 - RNA, 19 nt, Homo sapiens
  misc_RNA (1)...(19): siRNA sense strand
agaagacuauugcuuauuc

SEQ ID NO: 389524 - RNA, 19 nt, Homo sapiens
  misc_RNA (1)...(19): siRNA sense strand
uaacggggaucuuugcuua

SEQ ID NO: 389525 - RNA, 19 nt, Homo sapiens
  misc_RNA (1)...(19): siRNA sense strand
ggagaaggacuacgugaau

SEQ ID NO: 389526 - RNA, 19 nt, Homo sapiens
  misc_RNA (1)...(19): siRNA sense strand
ggaauuggaagagaaauau

SEQ ID NO: 389527 - RNA, 19 nt, Homo sapiens
  misc_RNA (1)...(19): siRNA sense strand
gagaaggacuacgugaaug

SEQ ID NO: 389528 - RNA, 19 nt, Homo sapiens
  misc_RNA (1)...(19): siRNA sense strand
gaaaccuacucauuugaca

SEQ ID NO: 389529 - RNA, 19 nt, Homo sapiens
  misc_RNA (1)...(19): siRNA sense strand
ccucugaguuuacccauga

SEQ ID NO: 389530 - RNA, 19 nt, Homo sapiens
  misc_RNA (1)...(19): siRNA sense strand
gugcagggaucaagguuau

SEQ ID NO: 389531 - RNA, 19 nt, Homo sapiens
  misc_RNA (1)...(19): siRNA sense strand
gauagcagguucugaugca

SEQ ID NO: 389532 - RNA, 19 nt, Homo sapiens
  misc_RNA (1)...(19): siRNA sense strand
ccagaucccugcagacauc

SEQ ID NO: 389533 - RNA, 19 nt, Homo sapiens
  misc_RNA (1)...(19): siRNA sense strand
ccaaagcuauugccaagag

SEQ ID NO: 389534 - RNA, 19 nt, Homo sapiens
  misc_RNA (1)...(19): siRNA sense strand
aaacaaagaacaucugcuu

SEQ ID NO: 389535 - RNA, 19 nt, Homo sapiens
  misc_RNA (1)...(19): siRNA sense strand
caagguaccagagggaaua

SEQ ID NO: 389536 - RNA, 19 nt, Homo sapiens
  misc_RNA (1)...(19): siRNA sense strand
gaugagaucuuagccaacu

SEQ ID NO: 389537 - RNA, 19 nt, Homo sapiens
  misc_RNA (1)...(19): siRNA sense strand
cagaugcagucaccaaaug

SEQ ID NO: 389538 - RNA, 19 nt, Homo sapiens
  misc_RNA (1)...(19): siRNA sense strand
ucagcaagcucucgucauc

SEQ ID NO: 389539 - RNA, 19 nt, Homo sapiens
  misc_RNA (1)...(19): siRNA sense strand
ucaccauucuguucauuga

SEQ ID NO: 389540 - RNA, 19 nt, Homo sapiens
  misc_RNA (1)...(19): siRNA sense strand
gaaggcagacauugggauu

SEQ ID NO: 389541 - RNA, 19 nt, Homo sapiens
  misc_RNA (1)...(19): siRNA sense strand
ggaucaagguuauuauggu

SEQ ID NO: 389542 - RNA, 19 nt, Homo sapiens
  misc_RNA (1)...(19): siRNA sense strand
agaacugccuggugaagaa

SEQ ID NO: 389543 - RNA, 19 nt, Homo sapiens
  misc_RNA (1)...(19): siRNA sense strand
cgccugagaucgucaaguu

SEQ ID NO: 389544 - RNA, 19 nt, Homo sapiens
  misc_RNA (1)...(19): siRNA sense strand
gaaaugcagcaccaucaug

SEQ ID NO: 389545 - RNA, 19 nt, Homo sapiens
  misc_RNA (1)...(19): siRNA sense strand
ccauugagaucgagcacuu

SEQ ID NO: 389546 - RNA, 19 nt, Homo sapiens
  misc_RNA (1)...(19): siRNA sense strand
acaaagaggaguuucagaa

SEQ ID NO: 389547 - RNA, 19 nt, Homo sapiens
  misc_RNA (1)...(19): siRNA sense strand
gggaauuggaagagaaaua

SEQ ID NO: 389548 - RNA, 19 nt, Homo sapiens
  misc_RNA (1)...(19): siRNA sense strand
gaagacgcccauugccauu

SEQ ID NO: 389549 - RNA, 19 nt, Homo sapiens
  misc_RNA (1)...(19): siRNA sense strand
ggaagcuggugggauaaga

SEQ ID NO: 389550 - RNA, 19 nt, Homo sapiens
  misc_RNA (1)...(19): siRNA sense strand
gcacauuggccucaugcaa

SEQ ID NO: 389551 - RNA, 19 nt, Homo sapiens
  misc_RNA (1)...(19): siRNA sense strand
cuuauucccugaccaagaa

SEQ ID NO: 389552 - RNA, 19 nt, Homo sapiens
  misc_RNA (1)...(19): siRNA sense strand
gaggcaggaugcuguuguu

SEQ ID NO: 389553 - RNA, 19 nt, Homo sapiens
  misc_RNA (1)...(19): siRNA sense strand
gagaaaugcagcaccauca

SEQ ID NO: 389554 - RNA, 19 nt, Homo sapiens
  misc_RNA (1)...(19): siRNA sense strand
caaaacggauggccaagaa

SEQ ID NO: 389555 - RNA, 19 nt, Homo sapiens
  misc_RNA (1)...(19): siRNA sense strand
guucgacaaucagaucuuu

SEQ ID NO: 389556 - RNA, 19 nt, Homo sapiens
  misc_RNA (1)...(19): siRNA sense strand
gggcuacacggcuuucuuu

SEQ ID NO: 389557 - RNA, 19 nt, Homo sapiens
  misc_RNA (1)...(19): siRNA sense strand
ccugggagcuuuccuugug

SEQ ID NO: 389558 - RNA, 19 nt, Homo sapiens
  misc_RNA (1)...(19): siRNA sense strand
acagcuggaugagaucuua

SEQ ID NO: 389559 - RNA, 19 nt, Homo sapiens
  misc_RNA (1)...(19): siRNA sense strand
caucacagccaaagcuauu

SEQ ID NO: 389560 - RNA, 19 nt, Homo sapiens
  misc_RNA (1)...(19): siRNA sense strand
ggugaugugauggaaauua

SEQ ID NO: 389561 - RNA, 19 nt, Homo sapiens
  misc_RNA (1)...(19): siRNA sense strand
ggacuugggccuccuuauc

SEQ ID NO: 389562 - RNA, 19 nt, Homo sapiens
  misc_RNA (1)...(19): siRNA sense strand
ccucaggaguuggaaauga

SEQ ID NO: 389563 - RNA, 19 nt, Homo sapiens
  misc_RNA (1)...(19): siRNA sense strand
ggaagccucgccacaagaa

SEQ ID NO: 389564 - RNA, 19 nt, Homo sapiens
  misc_RNA (1)...(19): siRNA sense strand
ugaaggacaugagcucaga

SEQ ID NO: 389565 - RNA, 19 nt, Homo sapiens
  misc_RNA (1)...(19): siRNA sense strand
gcagcaccaucaugaucaa

SEQ ID NO: 389566 - RNA, 19 nt, Homo sapiens
  misc_RNA (1)...(19): siRNA sense strand
ccagugaggaccauucaaa

SEQ ID NO: 389567 - RNA, 19 nt, Homo sapiens
  misc_RNA (1)...(19): siRNA sense strand
caaaggaggagaccagauc

SEQ ID NO: 389568 - RNA, 19 nt, Homo sapiens
  misc_RNA (1)...(19): siRNA sense strand
ggucugauccucuccuaug

SEQ ID NO: 389569 - RNA, 19 nt, Homo sapiens
  misc_RNA (1)...(19): siRNA sense strand
ccucacagaucaucauugg

SEQ ID NO: 389570 - RNA, 19 nt, Homo sapiens
  misc_RNA (1)...(19): siRNA sense strand
gggcaggaauggacaaggu

SEQ ID NO: 389571 - RNA, 19 nt, Homo sapiens
  misc_RNA (1)...(19): siRNA sense strand
gacaagagcacugccaaga

SEQ ID NO: 389572 - RNA, 19 nt, Homo sapiens
  misc_RNA (1)...(19): siRNA sense strand
gaacaucugcuucuauucc

SEQ ID NO: 389573 - RNA, 19 nt, Homo sapiens
  misc_RNA (1)...(19): siRNA sense strand
ucagggugcugucuucuca

SEQ ID NO: 389574 - RNA, 19 nt, Homo sapiens
  misc_RNA (1)...(19): siRNA sense strand
cauaugggauucaguacuc

SEQ ID NO: 389575 - RNA, 19 nt, Homo sapiens
  misc_RNA (1)...(19): siRNA sense strand
ccagagggaauaccuagaa

SEQ ID NO: 389576 - RNA, 19 nt, Homo sapiens
  misc_RNA (1)...(19): siRNA sense strand
acucauaccugcacauugg

SEQ ID NO: 389577 - RNA, 19 nt, Homo sapiens
  misc_RNA (1)...(19): siRNA sense strand
agcagaagcugaucauugu

SEQ ID NO: 389578 - RNA, 19 nt, Homo sapiens
  misc_RNA (1)...(19): siRNA sense strand
gccuuucucuguuggauug

SEQ ID NO: 389579 - RNA, 19 nt, Homo sapiens
  misc_RNA (1)...(19): siRNA sense strand
caccaucauuggccauauu

SEQ ID NO: 389580 - RNA, 19 nt, Homo sapiens
  misc_RNA (1)...(19): siRNA sense strand
gaaauauggcacagacauc

SEQ ID NO: 389581 - RNA, 19 nt, Homo sapiens
  misc_RNA (1)...(19): siRNA sense strand
cauccgagauuccgagaag

SEQ ID NO: 389582 - RNA, 19 nt, Homo sapiens
  misc_RNA (1)...(19): siRNA sense strand
ccagcagggucucuucaga

SEQ ID NO: 389583 - RNA, 19 nt, Homo sapiens
  misc_RNA (1)...(19): siRNA sense strand
aaagugacaucaugaacag

SEQ ID NO: 389584 - RNA, 19 nt, Homo sapiens
  misc_RNA (1)...(19): siRNA sense strand
gcaggaugcuguuguugcu

SEQ ID NO: 389585 - RNA, 19 nt, Homo sapiens
  misc_RNA (1)...(19): siRNA sense strand
ugaaacaguggaagacauu

SEQ ID NO: 389586 - RNA, 19 nt, Homo sapiens
  misc_RNA (1)...(19): siRNA sense strand
uccagaaaccuacucauuu

SEQ ID NO: 389587 - RNA, 19 nt, Homo sapiens
  misc_RNA (1)...(19): siRNA sense strand
gaugugauggaaauuagaa

SEQ ID NO: 389588 - RNA, 19 nt, Homo sapiens
  misc_RNA (1)...(19): siRNA sense strand
uccaucaucuuccucauug

SEQ ID NO: 389589 - RNA, 19 nt, Homo sapiens
  misc_RNA (1)...(19): siRNA sense strand
ggacuacgugaaugacuug

SEQ ID NO: 389590 - RNA, 19 nt, Homo sapiens
  misc_RNA (1)...(19): siRNA sense strand
gaagcuggugggauaagaa

SEQ ID NO: 389591 - RNA, 19 nt, Homo sapiens
  misc_RNA (1)...(19): siRNA sense strand
ugaucuggguguaugauga

SEQ ID NO: 389592 - RNA, 19 nt, Homo sapiens
  misc_RNA (1)...(19): siRNA sense strand
gagggaauaccuagaaugg

SEQ ID NO: 389593 - RNA, 19 nt, Homo sapiens
  misc_RNA (1)...(19): siRNA sense strand
ggaaagaaguaacaguuga

SEQ ID NO: 389594 - RNA, 19 nt, Homo sapiens
  misc_RNA (1)...(19): siRNA sense strand
gaacagaaggguccaguuu

SEQ ID NO: 389595 - RNA, 19 nt, Homo sapiens
  misc_RNA (1)...(19): siRNA sense strand
gcaugucaguuuccuauuu

SEQ ID NO: 389596 - RNA, 19 nt, Homo sapiens
  misc_RNA (1)...(19): siRNA sense strand
gaagauauaccaaauguag

SEQ ID NO: 389597 - RNA, 19 nt, Homo sapiens
  misc_RNA (1)...(19): siRNA sense strand
uaacaacacugggaaagaa

SEQ ID NO: 389598 - RNA, 19 nt, Homo sapiens
  misc_RNA (1)...(19): siRNA sense strand
ggaaacccuuguauucuug

SEQ ID NO: 389599 - RNA, 19 nt, Homo sapiens
  misc_RNA (1)...(19): siRNA sense strand
uugaagaccuuaagaaguu

SEQ ID NO: 389600 - RNA, 19 nt, Homo sapiens
  misc_RNA (1)...(19): siRNA sense strand
uaccaaauguagcaguuua

SEQ ID NO: 389601 - RNA, 19 nt, Homo sapiens
  misc_RNA (1)...(19): siRNA sense strand
acagaaggguccaguuuau

SEQ ID NO: 389602 - RNA, 19 nt, Homo sapiens
  misc_RNA (1)...(19): siRNA sense strand
ggaugaucgugacaaguuu

SEQ ID NO: 389603 - RNA, 19 nt, Homo sapiens
  misc_RNA (1)...(19): siRNA sense strand
ggucugauccaacuucgua

SEQ ID NO: 389604 - RNA, 19 nt, Homo sapiens
  misc_RNA (1)...(19): siRNA sense strand
ggauagauuguguuucaaa

SEQ ID NO: 389605 - RNA, 19 nt, Homo sapiens
  misc_RNA (1)...(19): siRNA sense strand
uggcugcacucuucucauu

SEQ ID NO: 389606 - RNA, 19 nt, Homo sapiens
  misc_RNA (1)...(19): siRNA sense strand
gauagauuguguuucaaag

SEQ ID NO: 389607 - RNA, 19 nt, Homo sapiens
  misc_RNA (1)...(19): siRNA sense strand
guuccuggcugcacucuuc

SEQ ID NO: 389608 - RNA, 19 nt, Homo sapiens
  misc_RNA (1)...(19): siRNA sense strand
guagcaguuuauccucaua

SEQ ID NO: 389609 - RNA, 19 nt, Homo sapiens
  misc_RNA (1)...(19): siRNA sense strand
guaugaaugauccugauuu

SEQ ID NO: 389610 - RNA, 19 nt, Homo sapiens
  misc_RNA (1)...(19): siRNA sense strand
cuucaagcaugcaguggua

SEQ ID NO: 389611 - RNA, 19 nt, Homo sapiens
  misc_RNA (1)...(19): siRNA sense strand
caggucagcuuugcuccua

SEQ ID NO: 389612 - RNA, 19 nt, Homo sapiens
  misc_RNA (1)...(19): siRNA sense strand
gcugcacucuucucauuca

SEQ ID NO: 389613 - RNA, 19 nt, Homo sapiens
  misc_RNA (1)...(19): siRNA sense strand
gggaaagaaguaacaguug

SEQ ID NO: 389614 - RNA, 19 nt, Homo sapiens
  misc_RNA (1)...(19): siRNA sense strand
gaaggguccaguuuauguu

SEQ ID NO: 389615 - RNA, 19 nt, Homo sapiens
  misc_RNA (1)...(19): siRNA sense strand
cagaagaaccucacagucu

SEQ ID NO: 389616 - RNA, 19 nt, Homo sapiens
  misc_RNA (1)...(19): siRNA sense strand
acgaugagguuccaaaaua

SEQ ID NO: 389617 - RNA, 19 nt, Homo sapiens
  misc_RNA (1)...(19): siRNA sense strand
gauuguguuucaaagaaug

SEQ ID NO: 389618 - RNA, 19 nt, Homo sapiens
  misc_RNA (1)...(19): siRNA sense strand
caugucaguuuccuauuuc

SEQ ID NO: 389619 - RNA, 19 nt, Homo sapiens
  misc_RNA (1)...(19): siRNA sense strand
caguuuauguugcauguca

SEQ ID NO: 389620 - RNA, 19 nt, Homo sapiens
  misc_RNA (1)...(19): siRNA sense strand
aggaaacccuuguauucuu

SEQ ID NO: 389621 - RNA, 19 nt, Homo sapiens
  misc_RNA (1)...(19): siRNA sense strand
cgaguuauguucaaaauca

SEQ ID NO: 389622 - RNA, 19 nt, Homo sapiens
  misc_RNA (1)...(19): siRNA sense strand
caacacugggaaagaagua

SEQ ID NO: 389623 - RNA, 19 nt, Homo sapiens
  misc_RNA (1)...(19): siRNA sense strand
gguuugaucuugcucuucu

SEQ ID NO: 389624 - RNA, 19 nt, Homo sapiens
  misc_RNA (1)...(19): siRNA sense strand
gaucuugcucuucuaccua

SEQ ID NO: 389625 - RNA, 19 nt, Homo sapiens
  misc_RNA (1)...(19): siRNA sense strand
cgauguggguuaugcuuca

SEQ ID NO: 389626 - RNA, 19 nt, Homo sapiens
  misc_RNA (1)...(19): siRNA sense strand
gggacgaguuauguucaaa

SEQ ID NO: 389627 - RNA, 19 nt, Homo sapiens
  misc_RNA (1)...(19): siRNA sense strand
ugaagaccuuaagaaguuu

SEQ ID NO: 389628 - RNA, 19 nt, Homo sapiens
  misc_RNA (1)...(19): siRNA sense strand
uauaccaaauguagcaguu

SEQ ID NO: 389629 - RNA, 19 nt, Homo sapiens
  misc_RNA (1)...(19): siRNA sense strand
gccaagagcugggguuuga

SEQ ID NO: 389630 - RNA, 19 nt, Homo sapiens
  misc_RNA (1)...(19): siRNA sense strand
cagcuuugcuccuaacaac

SEQ ID NO: 389631 - RNA, 19 nt, Homo sapiens
  misc_RNA (1)...(19): siRNA sense strand
gcccaggacucaugguuuu

SEQ ID NO: 389632 - RNA, 19 nt, Homo sapiens
  misc_RNA (1)...(19): siRNA sense strand
aacagaaggguccaguuua

SEQ ID NO: 389633 - RNA, 19 nt, Homo sapiens
  misc_RNA (1)...(19): siRNA sense strand
aaaauaccgugaccagauu

SEQ ID NO: 389634 - RNA, 19 nt, Homo sapiens
  misc_RNA (1)...(19): siRNA sense strand
uucagacucucaacgauga

SEQ ID NO: 389635 - RNA, 19 nt, Homo sapiens
  misc_RNA (1)...(19): siRNA sense strand
guacauugaagaccuuaag

SEQ ID NO: 389636 - RNA, 19 nt, Homo sapiens
  misc_RNA (1)...(19): siRNA sense strand
caaaaccagugaccgcauu

SEQ ID NO: 389637 - RNA, 19 nt, Homo sapiens
  misc_RNA (1)...(19): siRNA sense strand
ggguuaugcuucagacucu

SEQ ID NO: 389638 - RNA, 19 nt, Homo sapiens
  misc_RNA (1)...(19): siRNA sense strand
cgaagaacgagaagaaguc

SEQ ID NO: 389639 - RNA, 19 nt, Homo sapiens
  misc_RNA (1)...(19): siRNA sense strand
agaaggguccaguuuaugu

SEQ ID NO: 389640 - RNA, 19 nt, Homo sapiens
  misc_RNA (1)...(19): siRNA sense strand
gagcugggguuugaucuug

SEQ ID NO: 389641 - RNA, 19 nt, Homo sapiens
  misc_RNA (1)...(19): siRNA sense strand
aaucacagcacgugcauag

SEQ ID NO: 389642 - RNA, 19 nt, Homo sapiens
  misc_RNA (1)...(19): siRNA sense strand
uauguugcaugucaguuuc

SEQ ID NO: 389643 - RNA, 19 nt, Homo sapiens
  misc_RNA (1)...(19): siRNA sense strand
caaaauaccgugaccagau

SEQ ID NO: 389644 - RNA, 19 nt, Homo sapiens
  misc_RNA (1)...(19): siRNA sense strand
gguaugaaugauccugauu

SEQ ID NO: 389645 - RNA, 19 nt, Homo sapiens
  misc_RNA (1)...(19): siRNA sense strand
ugaccgcauuggaauauac

SEQ ID NO: 389646 - RNA, 19 nt, Homo sapiens
  misc_RNA (1)...(19): siRNA sense strand
ccagugaccgcauuggaau

SEQ ID NO: 389647 - RNA, 19 nt, Homo sapiens
  misc_RNA (1)...(19): siRNA sense strand
caguaggucugauccaacu

SEQ ID NO: 389648 - RNA, 19 nt, Homo sapiens
  misc_RNA (1)...(19): siRNA sense strand
aggaugaucgugacaaguu

SEQ ID NO: 389649 - RNA, 19 nt, Homo sapiens
  misc_RNA (1)...(19): siRNA sense strand
ucaggaugaucgugacaag

SEQ ID NO: 389650 - RNA, 19 nt, Homo sapiens
  misc_RNA (1)...(19): siRNA sense strand
ugggaaagaaguaacaguu

SEQ ID NO: 389651 - RNA, 19 nt, Homo sapiens
  misc_RNA (1)...(19): siRNA sense strand
gugaccgcauuggaauaua

SEQ ID NO: 389652 - RNA, 19 nt, Homo sapiens
  misc_RNA (1)...(19): siRNA sense strand
gucaguuuccuauuucauu

SEQ ID NO: 389653 - RNA, 19 nt, Homo sapiens
  misc_RNA (1)...(19): siRNA sense strand
guaugcaggguacauugaa

SEQ ID NO: 389654 - RNA, 19 nt, Homo sapiens
  misc_RNA (1)...(19): siRNA sense strand
gcuucagacucucaacgau

SEQ ID NO: 389655 - RNA, 19 nt, Homo sapiens
  misc_RNA (1)...(19): siRNA sense strand
uuggguaucuacagccauu

SEQ ID NO: 389656 - RNA, 19 nt, Homo sapiens
  misc_RNA (1)...(19): siRNA sense strand
gcaugcagugguaugaaug

SEQ ID NO: 389657 - RNA, 19 nt, Homo sapiens
  misc_RNA (1)...(19): siRNA sense strand
caagcaugcagugguauga

SEQ ID NO: 389658 - RNA, 19 nt, Homo sapiens
  misc_RNA (1)...(19): siRNA sense strand
ccauauacuuuagaagaac

SEQ ID NO: 389659 - RNA, 19 nt, Homo sapiens
  misc_RNA (1)...(19): siRNA sense strand
ggucagcuuugcuccuaac

SEQ ID NO: 389660 - RNA, 19 nt, Homo sapiens
  misc_RNA (1)...(19): siRNA sense strand
ucaacgaugagguuccaaa

SEQ ID NO: 389661 - RNA, 19 nt, Homo sapiens
  misc_RNA (1)...(19): siRNA sense strand
cauaauggaaugauagacu

SEQ ID NO: 389662 - RNA, 19 nt, Homo sapiens
  misc_RNA (1)...(19): siRNA sense strand
ccuauuucauuacuucaag

SEQ ID NO: 389663 - RNA, 19 nt, Homo sapiens
  misc_RNA (1)...(19): siRNA sense strand
guaggucugauccaacuuc

SEQ ID NO: 389664 - RNA, 19 nt, Homo sapiens
  misc_RNA (1)...(19): siRNA sense strand
ucauucacgauguggguua

SEQ ID NO: 389665 - RNA, 19 nt, Homo sapiens
  misc_RNA (1)...(19): siRNA sense strand
cauugaagaccuuaagaag

SEQ ID NO: 389666 - RNA, 19 nt, Homo sapiens
  misc_RNA (1)...(19): siRNA sense strand
acauugaagaccuuaagaa

SEQ ID NO: 389667 - RNA, 19 nt, Homo sapiens
  misc_RNA (1)...(19): siRNA sense strand
uuauguugcaugucaguuu

SEQ ID NO: 389668 - RNA, 19 nt, Homo sapiens
  misc_RNA (1)...(19): siRNA sense strand
gauggaucagccaaccuaa

SEQ ID NO: 389669 - RNA, 19 nt, Homo sapiens
  misc_RNA (1)...(19): siRNA sense strand
cuaacaacacugggaaaga

SEQ ID NO: 389670 - RNA, 19 nt, Homo sapiens
  misc_RNA (1)...(19): siRNA sense strand
gaagaccuuaagaaguuuc

SEQ ID NO: 389671 - RNA, 19 nt, Homo sapiens
  misc_RNA (1)...(19): siRNA sense strand
ccaaauguagcaguuuauc

SEQ ID NO: 389672 - RNA, 19 nt, Homo sapiens
  misc_RNA (1)...(19): siRNA sense strand
uagaagaacagaagaaccu

SEQ ID NO: 389673 - RNA, 19 nt, Homo sapiens
  misc_RNA (1)...(19): siRNA sense strand
gacgaguuauguucaaaau

SEQ ID NO: 389674 - RNA, 19 nt, Homo sapiens
  misc_RNA (1)...(19): siRNA sense strand
cagaaggguccaguuuaug

SEQ ID NO: 389675 - RNA, 19 nt, Homo sapiens
  misc_RNA (1)...(19): siRNA sense strand
gaacagcaauggcgaacuc

SEQ ID NO: 389676 - RNA, 19 nt, Homo sapiens
  misc_RNA (1)...(19): siRNA sense strand
gugaguaccuucaagagaa

SEQ ID NO: 389677 - RNA, 19 nt, Homo sapiens
  misc_RNA (1)...(19): siRNA sense strand
gaauugagcaggagcagaa

SEQ ID NO: 389678 - RNA, 19 nt, Homo sapiens
  misc_RNA (1)...(19): siRNA sense strand
ccaaugaccucaagaucga

SEQ ID NO: 389679 - RNA, 19 nt, Homo sapiens
  misc_RNA (1)...(19): siRNA sense strand
cauggaagguucuggaaga

SEQ ID NO: 389680 - RNA, 19 nt, Homo sapiens
  misc_RNA (1)...(19): siRNA sense strand
ggaagacaagcuuuacaaa

SEQ ID NO: 389681 - RNA, 19 nt, Homo sapiens
  misc_RNA (1)...(19): siRNA sense strand
ucaaagccgugcagauguu

SEQ ID NO: 389682 - RNA, 19 nt, Homo sapiens
  misc_RNA (1)...(19): siRNA sense strand
gaaaguccaugagcacagu

SEQ ID NO: 389683 - RNA, 19 nt, Homo sapiens
  misc_RNA (1)...(19): siRNA sense strand
caagagaagcgguucaguu

SEQ ID NO: 389684 - RNA, 19 nt, Homo sapiens
  misc_RNA (1)...(19): siRNA sense strand
gcgagcagaucccggaaga

SEQ ID NO: 389685 - RNA, 19 nt, Homo sapiens
  misc_RNA (1)...(19): siRNA sense strand
gcaccaacaucuugaacag

SEQ ID NO: 389686 - RNA, 19 nt, Homo sapiens
  misc_RNA (1)...(19): siRNA sense strand
gaagagaagaaagauaaga

SEQ ID NO: 389687 - RNA, 19 nt, Homo sapiens
  misc_RNA (1)...(19): siRNA sense strand
gcacuacaccaucaucuuc

SEQ ID NO: 389688 - RNA, 19 nt, Homo sapiens
  misc_RNA (1)...(19): siRNA sense strand
ccaaguuccugcaguuuca

SEQ ID NO: 389689 - RNA, 19 nt, Homo sapiens
  misc_RNA (1)...(19): siRNA sense strand
gagaagcgguucaguucag

SEQ ID NO: 389690 - RNA, 19 nt, Homo sapiens
  misc_RNA (1)...(19): siRNA sense strand
ggacgugacccucaucauc

SEQ ID NO: 389691 - RNA, 19 nt, Homo sapiens
  misc_RNA (1)...(19): siRNA sense strand
gcaccaugaugaagaacau

SEQ ID NO: 389692 - RNA, 19 nt, Homo sapiens
  misc_RNA (1)...(19): siRNA sense strand
caaagcaacccaagaccuu

SEQ ID NO: 389693 - RNA, 19 nt, Homo sapiens
  misc_RNA (1)...(19): siRNA sense strand
ucagagcacuacaccauca

SEQ ID NO: 389694 - RNA, 19 nt, Homo sapiens
  misc_RNA (1)...(19): siRNA sense strand
gcacgccggucuauguaca

SEQ ID NO: 389695 - RNA, 19 nt, Homo sapiens
  misc_RNA (1)...(19): siRNA sense strand
gagaguagccagaccaaag

SEQ ID NO: 389696 - RNA, 19 nt, Homo sapiens
  misc_RNA (1)...(19): siRNA sense strand
gagaggaggaagagaagaa

SEQ ID NO: 389697 - RNA, 19 nt, Homo sapiens
  misc_RNA (1)...(19): siRNA sense strand
gaaagccaacgcacccaaa

SEQ ID NO: 389698 - RNA, 19 nt, Homo sapiens
  misc_RNA (1)...(19): siRNA sense strand
ugaugcagcucuuuaacga

SEQ ID NO: 389699 - RNA, 19 nt, Homo sapiens
  misc_RNA (1)...(19): siRNA sense strand
gggacgacauggugaggaa

SEQ ID NO: 389700 - RNA, 19 nt, Homo sapiens
  misc_RNA (1)...(19): siRNA sense strand
cgacauggccaauaguuca

SEQ ID NO: 389701 - RNA, 19 nt, Homo sapiens
  misc_RNA (1)...(19): siRNA sense strand
aggaagagaagaaagauaa

SEQ ID NO: 389702 - RNA, 19 nt, Homo sapiens
  misc_RNA (1)...(19): siRNA sense strand
gaggaagagaagaaagaua

SEQ ID NO: 389703 - RNA, 19 nt, Homo sapiens
  misc_RNA (1)...(19): siRNA sense strand
ccgaggcgcugcagaagau

SEQ ID NO: 389704 - RNA, 19 nt, Homo sapiens
  misc_RNA (1)...(19): siRNA sense strand
ugagaaaggcgagauagaa

SEQ ID NO: 389705 - RNA, 19 nt, Homo sapiens
  misc_RNA (1)...(19): siRNA sense strand
gagcagaucccggaagaca

SEQ ID NO: 389706 - RNA, 19 nt, Homo sapiens
  misc_RNA (1)...(19): siRNA sense strand
caucacaguccgcauggua

SEQ ID NO: 389707 - RNA, 19 nt, Homo sapiens
  misc_RNA (1)...(19): siRNA sense strand
gagaagcgcaggcagaucu

SEQ ID NO: 389708 - RNA, 19 nt, Homo sapiens
  misc_RNA (1)...(19): siRNA sense strand
gagugaagccugugggaau

SEQ ID NO: 389709 - RNA, 19 nt, Homo sapiens
  misc_RNA (1)...(19): siRNA sense strand
ggauucagauugucaucgu

SEQ ID NO: 389710 - RNA, 19 nt, Homo sapiens
  misc_RNA (1)...(19): siRNA sense strand
aagcagggcuggugauguc

SEQ ID NO: 389711 - RNA, 19 nt, Homo sapiens
  misc_RNA (1)...(19): siRNA sense strand
gaaagcagggcuggugaug

SEQ ID NO: 389712 - RNA, 19 nt, Homo sapiens
  misc_RNA (1)...(19): siRNA sense strand
gagaagaaagauaagaaag

SEQ ID NO: 389713 - RNA, 19 nt, Homo sapiens
  misc_RNA (1)...(19): siRNA sense strand
ggagcaaggagaagcaguu

SEQ ID NO: 389714 - RNA, 19 nt, Homo sapiens
  misc_RNA (1)...(19): siRNA sense strand
gcagauggagguagugagu

SEQ ID NO: 389715 - RNA, 19 nt, Homo sapiens
  misc_RNA (1)...(19): siRNA sense strand
gcggagaggaggaagagaa

SEQ ID NO: 389716 - RNA, 19 nt, Homo sapiens
  misc_RNA (1)...(19): siRNA sense strand
ggacuuccugugccuagaa

SEQ ID NO: 389717 - RNA, 19 nt, Homo sapiens
  misc_RNA (1)...(19): siRNA sense strand
cgaggucccugaagcuauc

SEQ ID NO: 389718 - RNA, 19 nt, Homo sapiens
  misc_RNA (1)...(19): siRNA sense strand
gcagaucccggaagacaag

SEQ ID NO: 389719 - RNA, 19 nt, Homo sapiens
  misc_RNA (1)...(19): siRNA sense strand
ggacauugcccaggucaag

SEQ ID NO: 389720 - RNA, 19 nt, Homo sapiens
  misc_RNA (1)...(19): siRNA sense strand
guagugaguaccuucaaga

SEQ ID NO: 389721 - RNA, 19 nt, Homo sapiens
  misc_RNA (1)...(19): siRNA sense strand
caaugagaaaggcgagaua

SEQ ID NO: 389722 - RNA, 19 nt, Homo sapiens
  misc_RNA (1)...(19): siRNA sense strand
ggacacccacuacaaagag

SEQ ID NO: 389723 - RNA, 19 nt, Homo sapiens
  misc_RNA (1)...(19): siRNA sense strand
caucuucacccugcuguuu

SEQ ID NO: 389724 - RNA, 19 nt, Homo sapiens
  misc_RNA (1)...(19): siRNA sense strand
aauacuaccuccugagaag

SEQ ID NO: 389725 - RNA, 19 nt, Homo sapiens
  misc_RNA (1)...(19): siRNA sense strand
aagagaagcgguucaguuc

SEQ ID NO: 389726 - RNA, 19 nt, Homo sapiens
  misc_RNA (1)...(19): siRNA sense strand
uggaggagcgggagaagaa

SEQ ID NO: 389727 - RNA, 19 nt, Homo sapiens
  misc_RNA (1)...(19): siRNA sense strand
gacguaaccaaucuuucua

SEQ ID NO: 389728 - RNA, 19 nt, Homo sapiens
  misc_RNA (1)...(19): siRNA sense strand
cagccagcuucaugacgua

SEQ ID NO: 389729 - RNA, 19 nt, Homo sapiens
  misc_RNA (1)...(19): siRNA sense strand
gagaaaggcgagauagaac

SEQ ID NO: 389730 - RNA, 19 nt, Homo sapiens
  misc_RNA (1)...(19): siRNA sense strand
aaagugcaccaacaucuug

SEQ ID NO: 389731 - RNA, 19 nt, Homo sapiens
  misc_RNA (1)...(19): siRNA sense strand
uagcuuacucugucaagaa

SEQ ID NO: 389732 - RNA, 19 nt, Homo sapiens
  misc_RNA (1)...(19): siRNA sense strand
ugacguaaccaaucuuucu

SEQ ID NO: 389733 - RNA, 19 nt, Homo sapiens
  misc_RNA (1)...(19): siRNA sense strand
ggauucagacgcagaugga

SEQ ID NO: 389734 - RNA, 19 nt, Homo sapiens
  misc_RNA (1)...(19): siRNA sense strand
caacacguucgucaugaug

SEQ ID NO: 389735 - RNA, 19 nt, Homo sapiens
  misc_RNA (1)...(19): siRNA sense strand
ccugaccgaugacaacuuc

SEQ ID NO: 389736 - RNA, 19 nt, Homo sapiens
  misc_RNA (1)...(19): siRNA sense strand
gaaaggcgagauagaacag

SEQ ID NO: 389737 - RNA, 19 nt, Homo sapiens
  misc_RNA (1)...(19): siRNA sense strand
ccagacaggcaucaucuuc

SEQ ID NO: 389738 - RNA, 19 nt, Homo sapiens
  misc_RNA (1)...(19): siRNA sense strand
gucaugaugcagcucuuua

SEQ ID NO: 389739 - RNA, 19 nt, Homo sapiens
  misc_RNA (1)...(19): siRNA sense strand
ucucaaagccgugcagaug

SEQ ID NO: 389740 - RNA, 19 nt, Homo sapiens
  misc_RNA (1)...(19): siRNA sense strand
gacacccacuacaaagaga

SEQ ID NO: 389741 - RNA, 19 nt, Homo sapiens
  misc_RNA (1)...(19): siRNA sense strand
gguccucuacuuugugauu

SEQ ID NO: 389742 - RNA, 19 nt, Homo sapiens
  misc_RNA (1)...(19): siRNA sense strand
agacgcagauggagguagu

SEQ ID NO: 389743 - RNA, 19 nt, Homo sapiens
  misc_RNA (1)...(19): siRNA sense strand
ugagacguuugucguggaa

SEQ ID NO: 389744 - RNA, 19 nt, Homo sapiens
  misc_RNA (1)...(19): siRNA sense strand
gauugucaucguccaguuu

SEQ ID NO: 389745 - RNA, 19 nt, Homo sapiens
  misc_RNA (1)...(19): siRNA sense strand
ucaacacguucgucaugau

SEQ ID NO: 389746 - RNA, 19 nt, Homo sapiens
  misc_RNA (1)...(19): siRNA sense strand
ucuccaaguuccugcaguu

SEQ ID NO: 389747 - RNA, 19 nt, Homo sapiens
  misc_RNA (1)...(19): siRNA sense strand
cggaagacaagcuuuacaa

SEQ ID NO: 389748 - RNA, 19 nt, Homo sapiens
  misc_RNA (1)...(19): siRNA sense strand
caugccaucuccaucaaca

SEQ ID NO: 389749 - RNA, 19 nt, Homo sapiens
  misc_RNA (1)...(19): siRNA sense strand
gccggucuauguacaauac

SEQ ID NO: 389750 - RNA, 19 nt, Homo sapiens
  misc_RNA (1)...(19): siRNA sense strand
ggaggaagagaagaaagau

SEQ ID NO: 389751 - RNA, 19 nt, Homo sapiens
  misc_RNA (1)...(19): siRNA sense strand
ucaugaugcagcucuuuaa

SEQ ID NO: 389752 - RNA, 19 nt, Homo sapiens
  misc_RNA (1)...(19): siRNA sense strand
gggugaacuugaucaugga

SEQ ID NO: 389753 - RNA, 19 nt, Homo sapiens
  misc_RNA (1)...(19): siRNA sense strand
gggacacccacuacaaaga

SEQ ID NO: 389754 - RNA, 19 nt, Homo sapiens
  misc_RNA (1)...(19): siRNA sense strand
cauccugguccucuacuuu

SEQ ID NO: 389755 - RNA, 19 nt, Homo sapiens
  misc_RNA (1)...(19): siRNA sense strand
gagcaggagcagaaguuca

SEQ ID NO: 389756 - RNA, 19 nt, Homo sapiens
  misc_RNA (1)...(19): siRNA sense strand
ugacagcaucuccaaguuc

SEQ ID NO: 389757 - RNA, 19 nt, Homo sapiens
  misc_RNA (1)...(19): siRNA sense strand
acacuggucaaagggauua

SEQ ID NO: 389758 - RNA, 19 nt, Homo sapiens
  misc_RNA (1)...(19): siRNA sense strand
cgacugggacaacgagaau

SEQ ID NO: 389759 - RNA, 19 nt, Homo sapiens
  misc_RNA (1)...(19): siRNA sense strand
ggaaagcagggcuggugau

SEQ ID NO: 389760 - RNA, 19 nt, Homo sapiens
  misc_RNA (1)...(19): siRNA sense strand
ggaagagaagaaagauaag

SEQ ID NO: 389761 - RNA, 19 nt, Homo sapiens
  misc_RNA (1)...(19): siRNA sense strand
gaggagcgggagaagaaga

SEQ ID NO: 389762 - RNA, 19 nt, Homo sapiens
  misc_RNA (1)...(19): siRNA sense strand
ccucagagcacuacaccau

SEQ ID NO: 389763 - RNA, 19 nt, Homo sapiens
  misc_RNA (1)...(19): siRNA sense strand
gcaaugagaaaggcgagau

SEQ ID NO: 389764 - RNA, 19 nt, Homo sapiens
  misc_RNA (1)...(19): siRNA sense strand
gugcacgccggucuaugua

SEQ ID NO: 389765 - RNA, 19 nt, Homo sapiens
  misc_RNA (1)...(19): siRNA sense strand
cacgccaggugggcaauaa

SEQ ID NO: 389766 - RNA, 19 nt, Homo sapiens
  misc_RNA (1)...(19): siRNA sense strand
gaauccggguggugaaagc

SEQ ID NO: 389767 - RNA, 19 nt, Homo sapiens
  misc_RNA (1)...(19): siRNA sense strand
caugacguaaccaaucuuu

SEQ ID NO: 389768 - RNA, 19 nt, Homo sapiens
  misc_RNA (1)...(19): siRNA sense strand
gcagcucuuuaacgagauc

SEQ ID NO: 389769 - RNA, 19 nt, Homo sapiens
  misc_RNA (1)...(19): siRNA sense strand
gaucuacgggcagaacuuc

SEQ ID NO: 389770 - RNA, 19 nt, Homo sapiens
  misc_RNA (1)...(19): siRNA sense strand
gcucaagugccugaaggaa

SEQ ID NO: 389771 - RNA, 19 nt, Homo sapiens
  misc_RNA (1)...(19): siRNA sense strand
ggccguaacgucuaugaca

SEQ ID NO: 389772 - RNA, 19 nt, Homo sapiens
  misc_RNA (1)...(19): siRNA sense strand
gucaccaucuccuuagcuu

SEQ ID NO: 389773 - RNA, 19 nt, Homo sapiens
  misc_RNA (1)...(19): siRNA sense strand
gaaaggcaagcagcaggau

SEQ ID NO: 389774 - RNA, 19 nt, Homo sapiens
  misc_RNA (1)...(19): siRNA sense strand
cgaaggcgaggaagagauc

SEQ ID NO: 389775 - RNA, 19 nt, Homo sapiens
  misc_RNA (1)...(19): siRNA sense strand
gaagagagaucgugcuguu

SEQ ID NO: 389776 - RNA, 19 nt, Homo sapiens
  misc_RNA (1)...(19): siRNA sense strand
gaacuauguugacuggaua

SEQ ID NO: 389777 - RNA, 19 nt, Homo sapiens
  misc_RNA (1)...(19): siRNA sense strand
ccaauuaucccaaaccaua

SEQ ID NO: 389778 - RNA, 19 nt, Homo sapiens
  misc_RNA (1)...(19): siRNA sense strand
agagaaaucuugggacaua

SEQ ID NO: 389779 - RNA, 19 nt, Homo sapiens
  misc_RNA (1)...(19): siRNA sense strand
gauaucaucuuccaaacug

SEQ ID NO: 389780 - RNA, 19 nt, Homo sapiens
  misc_RNA (1)...(19): siRNA sense strand
ccacagacauaaaugaaug

SEQ ID NO: 389781 - RNA, 19 nt, Homo sapiens
  misc_RNA (1)...(19): siRNA sense strand
gauggaagcugcuggaagu

SEQ ID NO: 389782 - RNA, 19 nt, Homo sapiens
  misc_RNA (1)...(19): siRNA sense strand
ggaagacacucccaauucu

SEQ ID NO: 389783 - RNA, 19 nt, Homo sapiens
  misc_RNA (1)...(19): siRNA sense strand
gcaauuugguccuuacugu

SEQ ID NO: 389784 - RNA, 19 nt, Homo sapiens
  misc_RNA (1)...(19): siRNA sense strand
gagcauguguuuauucauc

SEQ ID NO: 389785 - RNA, 19 nt, Homo sapiens
  misc_RNA (1)...(19): siRNA sense strand
ggacauagaaguuccugaa

SEQ ID NO: 389786 - RNA, 19 nt, Homo sapiens
  misc_RNA (1)...(19): siRNA sense strand
gaaauguguuccagucugu

SEQ ID NO: 389787 - RNA, 19 nt, Homo sapiens
  misc_RNA (1)...(19): siRNA sense strand
ggacagaggagcaguaaca

SEQ ID NO: 389788 - RNA, 19 nt, Homo sapiens
  misc_RNA (1)...(19): siRNA sense strand
uauguugacuggauaauga

SEQ ID NO: 389789 - RNA, 19 nt, Homo sapiens
  misc_RNA (1)...(19): siRNA sense strand
guaaugcucuugauaucau

SEQ ID NO: 389790 - RNA, 19 nt, Homo sapiens
  misc_RNA (1)...(19): siRNA sense strand
ggagagaagggcauggaua

SEQ ID NO: 389791 - RNA, 19 nt, Homo sapiens
  misc_RNA (1)...(19): siRNA sense strand
ggagaaaggguuccaagug

SEQ ID NO: 389792 - RNA, 19 nt, Homo sapiens
  misc_RNA (1)...(19): siRNA sense strand
gggcauggauagcuguaaa

SEQ ID NO: 389793 - RNA, 19 nt, Homo sapiens
  misc_RNA (1)...(19): siRNA sense strand
gcugaaagacccagugaaa

SEQ ID NO: 389794 - RNA, 19 nt, Homo sapiens
  misc_RNA (1)...(19): siRNA sense strand
gguaugggauucaccucua

SEQ ID NO: 389795 - RNA, 19 nt, Homo sapiens
  misc_RNA (1)...(19): siRNA sense strand
ccagagaacccuuugaaga

SEQ ID NO: 389796 - RNA, 19 nt, Homo sapiens
  misc_RNA (1)...(19): siRNA sense strand
gaguaucacugugcuggua

SEQ ID NO: 389797 - RNA, 19 nt, Homo sapiens
  misc_RNA (1)...(19): siRNA sense strand
gaacugugcguaugacuca

SEQ ID NO: 389798 - RNA, 19 nt, Homo sapiens
  misc_RNA (1)...(19): siRNA sense strand
acauugagcugucagagaa

SEQ ID NO: 389799 - RNA, 19 nt, Homo sapiens
  misc_RNA (1)...(19): siRNA sense strand
ccagagagcacuuuguuug

SEQ ID NO: 389800 - RNA, 19 nt, Homo sapiens
  misc_RNA (1)...(19): siRNA sense strand
cagagaacccuuugaagaa

SEQ ID NO: 389801 - RNA, 19 nt, Homo sapiens
  misc_RNA (1)...(19): siRNA sense strand
ucacccaucuggacauuga

SEQ ID NO: 389802 - RNA, 19 nt, Homo sapiens
  misc_RNA (1)...(19): siRNA sense strand
gcuggaaacuucgcuauca

SEQ ID NO: 389803 - RNA, 19 nt, Homo sapiens
  misc_RNA (1)...(19): siRNA sense strand
gaguaaugcucuugauauc

SEQ ID NO: 389804 - RNA, 19 nt, Homo sapiens
  misc_RNA (1)...(19): siRNA sense strand
ccagugagguagagaaauc

SEQ ID NO: 389805 - RNA, 19 nt, Homo sapiens
  misc_RNA (1)...(19): siRNA sense strand
gcugacggcugcucauguu

SEQ ID NO: 389806 - RNA, 19 nt, Homo sapiens
  misc_RNA (1)...(19): siRNA sense strand
aauggaaaguggaguaauu

SEQ ID NO: 389807 - RNA, 19 nt, Homo sapiens
  misc_RNA (1)...(19): siRNA sense strand
gaauauuuccuccaugaug

SEQ ID NO: 389808 - RNA, 19 nt, Homo sapiens
  misc_RNA (1)...(19): siRNA sense strand
guaaagaacuauguugacu

SEQ ID NO: 389809 - RNA, 19 nt, Homo sapiens
  misc_RNA (1)...(19): siRNA sense strand
gagagcacuuuguuugguu

SEQ ID NO: 389810 - RNA, 19 nt, Homo sapiens
  misc_RNA (1)...(19): siRNA sense strand
uguauucacugcacugauu

SEQ ID NO: 389811 - RNA, 19 nt, Homo sapiens
  misc_RNA (1)...(19): siRNA sense strand
gcacagauuuuguagaugu

SEQ ID NO: 389812 - RNA, 19 nt, Homo sapiens
  misc_RNA (1)...(19): siRNA sense strand
acacacggguaaagaacua

SEQ ID NO: 389813 - RNA, 19 nt, Homo sapiens
  misc_RNA (1)...(19): siRNA sense strand
agagaacccuuugaagaaa

SEQ ID NO: 389814 - RNA, 19 nt, Homo sapiens
  misc_RNA (1)...(19): siRNA sense strand
gcgggaaacugccuugaca

SEQ ID NO: 389815 - RNA, 19 nt, Homo sapiens
  misc_RNA (1)...(19): siRNA sense strand
ccagaaggacgaaccaauu

SEQ ID NO: 389816 - RNA, 19 nt, Homo sapiens
  misc_RNA (1)...(19): siRNA sense strand
cuaacuauccucaggcaua

SEQ ID NO: 389817 - RNA, 19 nt, Homo sapiens
  misc_RNA (1)...(19): siRNA sense strand
ccucaaggcggcaagguua

SEQ ID NO: 389818 - RNA, 19 nt, Homo sapiens
  misc_RNA (1)...(19): siRNA sense strand
uaacuauccucaggcauau

SEQ ID NO: 389819 - RNA, 19 nt, Homo sapiens
  misc_RNA (1)...(19): siRNA sense strand
gauccgaugcagauauuaa

SEQ ID NO: 389820 - RNA, 19 nt, Homo sapiens
  misc_RNA (1)...(19): siRNA sense strand
gaacucaaggugugaauac

SEQ ID NO: 389821 - RNA, 19 nt, Homo sapiens
  misc_RNA (1)...(19): siRNA sense strand
ggugcaacaucuuucuauu

SEQ ID NO: 389822 - RNA, 19 nt, Homo sapiens
  misc_RNA (1)...(19): siRNA sense strand
ggagaaacccacagcagau

SEQ ID NO: 389823 - RNA, 19 nt, Homo sapiens
  misc_RNA (1)...(19): siRNA sense strand
cagaaggacgaaccaauuu

SEQ ID NO: 389824 - RNA, 19 nt, Homo sapiens
  misc_RNA (1)...(19): siRNA sense strand
ucagagaacugugcguaug

SEQ ID NO: 389825 - RNA, 19 nt, Homo sapiens
  misc_RNA (1)...(19): siRNA sense strand
gagagaagauuuugaugug

SEQ ID NO: 389826 - RNA, 19 nt, Homo sapiens
  misc_RNA (1)...(19): siRNA sense strand
gaagaauugcggaguuaau

SEQ ID NO: 389827 - RNA, 19 nt, Homo sapiens
  misc_RNA (1)...(19): siRNA sense strand
caugaagaauugcggaguu

SEQ ID NO: 389828 - RNA, 19 nt, Homo sapiens
  misc_RNA (1)...(19): siRNA sense strand
aauauuuccuccaugauga

SEQ ID NO: 389829 - RNA, 19 nt, Homo sapiens
  misc_RNA (1)...(19): siRNA sense strand
ccaagucccauacaacaaa

SEQ ID NO: 389830 - RNA, 19 nt, Homo sapiens
  misc_RNA (1)...(19): siRNA sense strand
ccaaugcccugcccuaagg

SEQ ID NO: 389831 - RNA, 19 nt, Homo sapiens
  misc_RNA (1)...(19): siRNA sense strand
ggaaacagggagccaacaa

SEQ ID NO: 389832 - RNA, 19 nt, Homo sapiens
  misc_RNA (1)...(19): siRNA sense strand
ggacgaaccaauuuugaua

SEQ ID NO: 389833 - RNA, 19 nt, Homo sapiens
  misc_RNA (1)...(19): siRNA sense strand
gagagaagggcauggauag

SEQ ID NO: 389834 - RNA, 19 nt, Homo sapiens
  misc_RNA (1)...(19): siRNA sense strand
augaugacaugaagaauug

SEQ ID NO: 389835 - RNA, 19 nt, Homo sapiens
  misc_RNA (1)...(19): siRNA sense strand
acagggagccaacaaugua

SEQ ID NO: 389836 - RNA, 19 nt, Homo sapiens
  misc_RNA (1)...(19): siRNA sense strand
gaaacagggagccaacaau

SEQ ID NO: 389837 - RNA, 19 nt, Homo sapiens
  misc_RNA (1)...(19): siRNA sense strand
gcaauggaaaguggaguaa

SEQ ID NO: 389838 - RNA, 19 nt, Homo sapiens
  misc_RNA (1)...(19): siRNA sense strand
ugcaggagaucggcaauuu

SEQ ID NO: 389839 - RNA, 19 nt, Homo sapiens
  misc_RNA (1)...(19): siRNA sense strand
gcugguggagcgcucauua

SEQ ID NO: 389840 - RNA, 19 nt, Homo sapiens
  misc_RNA (1)...(19): siRNA sense strand
uggcaagucuucuuugaca

SEQ ID NO: 389841 - RNA, 19 nt, Homo sapiens
  misc_RNA (1)...(19): siRNA sense strand
gcacuuuguuugguucugu

SEQ ID NO: 389842 - RNA, 19 nt, Homo sapiens
  misc_RNA (1)...(19): siRNA sense strand
ugagaaugguaaaguugaa

SEQ ID NO: 389843 - RNA, 19 nt, Homo sapiens
  misc_RNA (1)...(19): siRNA sense strand
ggaguaauuccaaacugaa

SEQ ID NO: 389844 - RNA, 19 nt, Homo sapiens
  misc_RNA (1)...(19): siRNA sense strand
gaaaucuugggacauagaa

SEQ ID NO: 389845 - RNA, 19 nt, Homo sapiens
  misc_RNA (1)...(19): siRNA sense strand
cuuccaaacugaucuaaca

SEQ ID NO: 389846 - RNA, 19 nt, Homo sapiens
  misc_RNA (1)...(19): siRNA sense strand
agaaguuccugaaggguau

SEQ ID NO: 389847 - RNA, 19 nt, Homo sapiens
  misc_RNA (1)...(19): siRNA sense strand
cagaggagcaguaacaauc

SEQ ID NO: 389848 - RNA, 19 nt, Homo sapiens
  misc_RNA (1)...(19): siRNA sense strand
ggguaaagaacuauguuga

SEQ ID NO: 389849 - RNA, 19 nt, Homo sapiens
  misc_RNA (1)...(19): siRNA sense strand
aaacagggagccaacaaug

SEQ ID NO: 389850 - RNA, 19 nt, Homo sapiens
  misc_RNA (1)...(19): siRNA sense strand
uuagagauguggugcagau

SEQ ID NO: 389851 - RNA, 19 nt, Homo sapiens
  misc_RNA (1)...(19): siRNA sense strand
acaacaaacuccaggugau

SEQ ID NO: 389852 - RNA, 19 nt, Homo sapiens
  misc_RNA (1)...(19): siRNA sense strand
gagauguggugcagauaac

SEQ ID NO: 389853 - RNA, 19 nt, Homo sapiens
  misc_RNA (1)...(19): siRNA sense strand
ggcaaaauaugucuuuaga

SEQ ID NO: 389854 - RNA, 19 nt, Homo sapiens
  misc_RNA (1)...(19): siRNA sense strand
gaucggcaauuugguccuu

SEQ ID NO: 389855 - RNA, 19 nt, Homo sapiens
  misc_RNA (1)...(19): siRNA sense strand
caaaccauauccagagaac

SEQ ID NO: 389856 - RNA, 19 nt, Homo sapiens
  misc_RNA (1)...(19): siRNA sense strand
augaagaauugcggaguua

SEQ ID NO: 389857 - RNA, 19 nt, Homo sapiens
  misc_RNA (1)...(19): siRNA sense strand
agaacuauguugacuggau

SEQ ID NO: 389858 - RNA, 19 nt, Homo sapiens
  misc_RNA (1)...(19): siRNA sense strand
gcaggagaucggcaauuug

SEQ ID NO: 389859 - RNA, 19 nt, Homo sapiens
  misc_RNA (1)...(19): siRNA sense strand
ggccuuugcuguacaggau

SEQ ID NO: 389860 - RNA, 19 nt, Homo sapiens
  misc_RNA (1)...(19): siRNA sense strand
guggugcauuguccuguuu

SEQ ID NO: 389861 - RNA, 19 nt, Homo sapiens
  misc_RNA (1)...(19): siRNA sense strand
uuacuguggucauggauuc

SEQ ID NO: 389862 - RNA, 19 nt, Homo sapiens
  misc_RNA (1)...(19): siRNA sense strand
aaacuccaggugaucuuua

SEQ ID NO: 389863 - RNA, 19 nt, Homo sapiens
  misc_RNA (1)...(19): siRNA sense strand
accuguagcuccuuuaaga

SEQ ID NO: 389864 - RNA, 19 nt, Homo sapiens
  misc_RNA (1)...(19): siRNA sense strand
ccuggcaagucuucuuuga

SEQ ID NO: 389865 - RNA, 19 nt, Homo sapiens
  misc_RNA (1)...(19): siRNA sense strand
gggauucaccucuacuuca

SEQ ID NO: 389866 - RNA, 19 nt, Homo sapiens
  misc_RNA (1)...(19): siRNA sense strand
guaauuccaaacugaaaug

SEQ ID NO: 389867 - RNA, 19 nt, Homo sapiens
  misc_RNA (1)...(19): siRNA sense strand
gaguaauuccaaacugaaa

SEQ ID NO: 389868 - RNA, 19 nt, Homo sapiens
  misc_RNA (1)...(19): siRNA sense strand
ggauggguuugaaguugug

SEQ ID NO: 389869 - RNA, 19 nt, Homo sapiens
  misc_RNA (1)...(19): siRNA sense strand
gaagacacucccaauucug

SEQ ID NO: 389870 - RNA, 19 nt, Homo sapiens
  misc_RNA (1)...(19): siRNA sense strand
gaggauccgaugcagauau

SEQ ID NO: 389871 - RNA, 19 nt, Homo sapiens
  misc_RNA (1)...(19): siRNA sense strand
augcugagccuaccaugua

SEQ ID NO: 389872 - RNA, 19 nt, Homo sapiens
  misc_RNA (1)...(19): siRNA sense strand
gagaaacccacagcagaug

SEQ ID NO: 389873 - RNA, 19 nt, Homo sapiens
  misc_RNA (1)...(19): siRNA sense strand
gaaggcaaaauaugucuuu

SEQ ID NO: 389874 - RNA, 19 nt, Homo sapiens
  misc_RNA (1)...(19): siRNA sense strand
gaaacuucgcuaucaugga

SEQ ID NO: 389875 - RNA, 19 nt, Homo sapiens
  misc_RNA (1)...(19): siRNA sense strand
gcacuaugaugacaaggau

SEQ ID NO: 389876 - RNA, 19 nt, Homo sapiens
  misc_RNA (1)...(19): siRNA sense strand
ggacuacagccacgacaaa

SEQ ID NO: 389877 - RNA, 19 nt, Homo sapiens
  misc_RNA (1)...(19): siRNA sense strand
gaggaguacuuuccaccaa

SEQ ID NO: 389878 - RNA, 19 nt, Homo sapiens
  misc_RNA (1)...(19): siRNA sense strand
ggaacguguugacugaaga

SEQ ID NO: 389879 - RNA, 19 nt, Homo sapiens
  misc_RNA (1)...(19): siRNA sense strand
caucaccacuggcccuuug

SEQ ID NO: 389880 - RNA, 19 nt, Homo sapiens
  misc_RNA (1)...(19): siRNA sense strand
gcuuucugcugguguuuaa

SEQ ID NO: 389881 - RNA, 19 nt, Homo sapiens
  misc_RNA (1)...(19): siRNA sense strand
uacaucaacugcugcauca

SEQ ID NO: 389882 - RNA, 19 nt, Homo sapiens
  misc_RNA (1)...(19): siRNA sense strand
cuacucacgcucacgauuu

SEQ ID NO: 389883 - RNA, 19 nt, Homo sapiens
  misc_RNA (1)...(19): siRNA sense strand
caacaccccuguggauaaa

SEQ ID NO: 389884 - RNA, 19 nt, Homo sapiens
  misc_RNA (1)...(19): siRNA sense strand
ucacgcucacgauuuguua

SEQ ID NO: 389885 - RNA, 19 nt, Homo sapiens
  misc_RNA (1)...(19): siRNA sense strand
gauuaugggcacuaugaug

SEQ ID NO: 389886 - RNA, 19 nt, Homo sapiens
  misc_RNA (1)...(19): siRNA sense strand
gugguggccaguuucuuua

SEQ ID NO: 389887 - RNA, 19 nt, Homo sapiens
  misc_RNA (1)...(19): siRNA sense strand
ccaccuuccugcugcugaa

SEQ ID NO: 389888 - RNA, 19 nt, Homo sapiens
  misc_RNA (1)...(19): siRNA sense strand
gaagacccaggcaguguag

SEQ ID NO: 389889 - RNA, 19 nt, Homo sapiens
  misc_RNA (1)...(19): siRNA sense strand
ucauccugcucaacaugua

SEQ ID NO: 389890 - RNA, 19 nt, Homo sapiens
  misc_RNA (1)...(19): siRNA sense strand
uuagggagagcaagucauu

SEQ ID NO: 389891 - RNA, 19 nt, Homo sapiens
  misc_RNA (1)...(19): siRNA sense strand
aggaguacuuuccaccaaa

SEQ ID NO: 389892 - RNA, 19 nt, Homo sapiens
  misc_RNA (1)...(19): siRNA sense strand
gccaguuucuuuaucuucu

SEQ ID NO: 389893 - RNA, 19 nt, Homo sapiens
  misc_RNA (1)...(19): siRNA sense strand
acugaagaguccgugguua

SEQ ID NO: 389894 - RNA, 19 nt, Homo sapiens
  misc_RNA (1)...(19): siRNA sense strand
ggauaaugauguccuuccu

SEQ ID NO: 389895 - RNA, 19 nt, Homo sapiens
  misc_RNA (1)...(19): siRNA sense strand
uccggaacguguugacuga

SEQ ID NO: 389896 - RNA, 19 nt, Homo sapiens
  misc_RNA (1)...(19): siRNA sense strand
ccuuccugcugcugaauaa

SEQ ID NO: 389897 - RNA, 19 nt, Homo sapiens
  misc_RNA (1)...(19): siRNA sense strand
ccaucugguuccucaacuu

SEQ ID NO: 389898 - RNA, 19 nt, Homo sapiens
  misc_RNA (1)...(19): siRNA sense strand
agaagacccaggcagugua

SEQ ID NO: 389899 - RNA, 19 nt, Homo sapiens
  misc_RNA (1)...(19): siRNA sense strand
cugauuaugggcacuauga

SEQ ID NO: 389900 - RNA, 19 nt, Homo sapiens
  misc_RNA (1)...(19): siRNA sense strand
gguggccaguuucuuuauc

SEQ ID NO: 389901 - RNA, 19 nt, Homo sapiens
  misc_RNA (1)...(19): siRNA sense strand
uacucacgcucacgauuug

SEQ ID NO: 389902 - RNA, 19 nt, Homo sapiens
  misc_RNA (1)...(19): siRNA sense strand
caucuuugcagucgucuuc

SEQ ID NO: 389903 - RNA, 19 nt, Homo sapiens
  misc_RNA (1)...(19): siRNA sense strand
gcucacgauuuguuacacu

SEQ ID NO: 389904 - RNA, 19 nt, Homo sapiens
  misc_RNA (1)...(19): siRNA sense strand
gccaagcggaccaucaaug

SEQ ID NO: 389905 - RNA, 19 nt, Homo sapiens
  misc_RNA (1)...(19): siRNA sense strand
caucugguuccucaacuug

SEQ ID NO: 389906 - RNA, 19 nt, Homo sapiens
  misc_RNA (1)...(19): siRNA sense strand
ucacgauuuguuacacuuu

SEQ ID NO: 389907 - RNA, 19 nt, Homo sapiens
  misc_RNA (1)...(19): siRNA sense strand
cagaagacccaggcagugu

SEQ ID NO: 389908 - RNA, 19 nt, Homo sapiens
  misc_RNA (1)...(19): siRNA sense strand
gaacguguugacugaagag

SEQ ID NO: 389909 - RNA, 19 nt, Homo sapiens
  misc_RNA (1)...(19): siRNA sense strand
cggaacguguugacugaag

SEQ ID NO: 389910 - RNA, 19 nt, Homo sapiens
  misc_RNA (1)...(19): siRNA sense strand
uaagcuggacucccugugu

SEQ ID NO: 389911 - RNA, 19 nt, Homo sapiens
  misc_RNA (1)...(19): siRNA sense strand
ccaccaagacacucaaggu

SEQ ID NO: 389912 - RNA, 19 nt, Homo sapiens
  misc_RNA (1)...(19): siRNA sense strand
cacgauuuguuacacuuuc

SEQ ID NO: 389913 - RNA, 19 nt, Homo sapiens
  misc_RNA (1)...(19): siRNA sense strand
gcgcugcccaucuuguuca

SEQ ID NO: 389914 - RNA, 19 nt, Homo sapiens
  misc_RNA (1)...(19): siRNA sense strand
gacacuauggcccagaaga

SEQ ID NO: 389915 - RNA, 19 nt, Homo sapiens
  misc_RNA (1)...(19): siRNA sense strand
agugguggccaguuucuuu

SEQ ID NO: 389916 - RNA, 19 nt, Homo sapiens
  misc_RNA (1)...(19): siRNA sense strand
guggccaguuucuuuaucu

SEQ ID NO: 389917 - RNA, 19 nt, Homo sapiens
  misc_RNA (1)...(19): siRNA sense strand
ccaagcggaccaucaaugc

SEQ ID NO: 389918 - RNA, 19 nt, Homo sapiens
  misc_RNA (1)...(19): siRNA sense strand
aggauacccuggaccucaa

SEQ ID NO: 389919 - RNA, 19 nt, Homo sapiens
  misc_RNA (1)...(19): siRNA sense strand
auuaugggcacuaugauga

SEQ ID NO: 389920 - RNA, 19 nt, Homo sapiens
  misc_RNA (1)...(19): siRNA sense strand
ggagacaaacuuaauguua

SEQ ID NO: 389921 - RNA, 19 nt, Homo sapiens
  misc_RNA (1)...(19): siRNA sense strand
cacaugacauuaccaaaua

SEQ ID NO: 389922 - RNA, 19 nt, Homo sapiens
  misc_RNA (1)...(19): siRNA sense strand
caucagggaucccauauug

SEQ ID NO: 389923 - RNA, 19 nt, Homo sapiens
  misc_RNA (1)...(19): siRNA sense strand
ggaauccaguuaauuacuu

SEQ ID NO: 389924 - RNA, 19 nt, Homo sapiens
  misc_RNA (1)...(19): siRNA sense strand
gagcacagcauccaauauu

SEQ ID NO: 389925 - RNA, 19 nt, Homo sapiens
  misc_RNA (1)...(19): siRNA sense strand
ggacaucgccacaugaaug

SEQ ID NO: 389926 - RNA, 19 nt, Homo sapiens
  misc_RNA (1)...(19): siRNA sense strand
ggaaacgucugugugagaa

SEQ ID NO: 389927 - RNA, 19 nt, Homo sapiens
  misc_RNA (1)...(19): siRNA sense strand
ggaggcaguuuauugcaaa

SEQ ID NO: 389928 - RNA, 19 nt, Homo sapiens
  misc_RNA (1)...(19): siRNA sense strand
ggacccaauuaucuucaua

SEQ ID NO: 389929 - RNA, 19 nt, Homo sapiens
  misc_RNA (1)...(19): siRNA sense strand
gaagaaagcggucaagaac

SEQ ID NO: 389930 - RNA, 19 nt, Homo sapiens
  misc_RNA (1)...(19): siRNA sense strand
gaagaugcggcgagacuuu

SEQ ID NO: 389931 - RNA, 19 nt, Homo sapiens
  misc_RNA (1)...(19): siRNA sense strand
agaaagcggucaagaacuu

SEQ ID NO: 389932 - RNA, 19 nt, Homo sapiens
  misc_RNA (1)...(19): siRNA sense strand
ccugaaggaugcacaaauu

SEQ ID NO: 389933 - RNA, 19 nt, Homo sapiens
  misc_RNA (1)...(19): siRNA sense strand
ccacaugaauggauaugga

SEQ ID NO: 389934 - RNA, 19 nt, Homo sapiens
  misc_RNA (1)...(19): siRNA sense strand
ggagaaggcaaaucuguga

SEQ ID NO: 389935 - RNA, 19 nt, Homo sapiens
  misc_RNA (1)...(19): siRNA sense strand
uaacugggaucucguugga

SEQ ID NO: 389936 - RNA, 19 nt, Homo sapiens
  misc_RNA (1)...(19): siRNA sense strand
gaauggauauggaucacau

SEQ ID NO: 389937 - RNA, 19 nt, Homo sapiens
  misc_RNA (1)...(19): siRNA sense strand
aaagagaaauccucagaca

SEQ ID NO: 389938 - RNA, 19 nt, Homo sapiens
  misc_RNA (1)...(19): siRNA sense strand
gagaauuccugagagaguu

SEQ ID NO: 389939 - RNA, 19 nt, Homo sapiens
  misc_RNA (1)...(19): siRNA sense strand
ccauauuguuuccaucuuu

SEQ ID NO: 389940 - RNA, 19 nt, Homo sapiens
  misc_RNA (1)...(19): siRNA sense strand
gcaucagguuucuuucuug

SEQ ID NO: 389941 - RNA, 19 nt, Homo sapiens
  misc_RNA (1)...(19): siRNA sense strand
ccaauuaucuucauauacc

SEQ ID NO: 389942 - RNA, 19 nt, Homo sapiens
  misc_RNA (1)...(19): siRNA sense strand
ggguucagcugacacaguu

SEQ ID NO: 389943 - RNA, 19 nt, Homo sapiens
  misc_RNA (1)...(19): siRNA sense strand
ccaaauacuccaaggcaaa

SEQ ID NO: 389944 - RNA, 19 nt, Homo sapiens
  misc_RNA (1)...(19): siRNA sense strand
gagcauauuggaaagaaga

SEQ ID NO: 389945 - RNA, 19 nt, Homo sapiens
  misc_RNA (1)...(19): siRNA sense strand
ucauauaccugugaacugu

SEQ ID NO: 389946 - RNA, 19 nt, Homo sapiens
  misc_RNA (1)...(19): siRNA sense strand
caaguacaaugcugagaag

SEQ ID NO: 389947 - RNA, 19 nt, Homo sapiens
  misc_RNA (1)...(19): siRNA sense strand
cgagagagaauuccugaga

SEQ ID NO: 389948 - RNA, 19 nt, Homo sapiens
  misc_RNA (1)...(19): siRNA sense strand
uugguaaacuggucuuaaa

SEQ ID NO: 389949 - RNA, 19 nt, Homo sapiens
  misc_RNA (1)...(19): siRNA sense strand
agagagaauuccugagaga

SEQ ID NO: 389950 - RNA, 19 nt, Homo sapiens
  misc_RNA (1)...(19): siRNA sense strand
gggaggcaguuuauugcaa

SEQ ID NO: 389951 - RNA, 19 nt, Homo sapiens
  misc_RNA (1)...(19): siRNA sense strand
ccaguaggagacaaacuua

SEQ ID NO: 389952 - RNA, 19 nt, Homo sapiens
  misc_RNA (1)...(19): siRNA sense strand
gugcgggcauucuauguga

SEQ ID NO: 389953 - RNA, 19 nt, Homo sapiens
  misc_RNA (1)...(19): siRNA sense strand
ggagaagugcggagauuca

SEQ ID NO: 389954 - RNA, 19 nt, Homo sapiens
  misc_RNA (1)...(19): siRNA sense strand
ucagguuucuuucuuguuc

SEQ ID NO: 389955 - RNA, 19 nt, Homo sapiens
  misc_RNA (1)...(19): siRNA sense strand
guucgguucuccacuguug

SEQ ID NO: 389956 - RNA, 19 nt, Homo sapiens
  misc_RNA (1)...(19): siRNA sense strand
aaaccuuucuguugaagau

SEQ ID NO: 389957 - RNA, 19 nt, Homo sapiens
  misc_RNA (1)...(19): siRNA sense strand
ucagggaucccauauuguu

SEQ ID NO: 389958 - RNA, 19 nt, Homo sapiens
  misc_RNA (1)...(19): siRNA sense strand
gaagugcggagauucaaca

SEQ ID NO: 389959 - RNA, 19 nt, Homo sapiens
  misc_RNA (1)...(19): siRNA sense strand
gcugagaagccuaagaaug

SEQ ID NO: 389960 - RNA, 19 nt, Homo sapiens
  misc_RNA (1)...(19): siRNA sense strand
agaagaaagcggucaagaa

SEQ ID NO: 389961 - RNA, 19 nt, Homo sapiens
  misc_RNA (1)...(19): siRNA sense strand
gaaauccucagacacaucu

SEQ ID NO: 389962 - RNA, 19 nt, Homo sapiens
  misc_RNA (1)...(19): siRNA sense strand
ggcaguuuauugcaaauuc

SEQ ID NO: 389963 - RNA, 19 nt, Homo sapiens
  misc_RNA (1)...(19): siRNA sense strand
ucaagcugguuaaugcaaa

SEQ ID NO: 389964 - RNA, 19 nt, Homo sapiens
  misc_RNA (1)...(19): siRNA sense strand
gagccuacguccugagucu

SEQ ID NO: 389965 - RNA, 19 nt, Homo sapiens
  misc_RNA (1)...(19): siRNA sense strand
agagaguugugcaugcuaa

SEQ ID NO: 389966 - RNA, 19 nt, Homo sapiens
  misc_RNA (1)...(19): siRNA sense strand
aaaccggaauccaguuaau

SEQ ID NO: 389967 - RNA, 19 nt, Homo sapiens
  misc_RNA (1)...(19): siRNA sense strand
gcaaauuccauuauaagac

SEQ ID NO: 389968 - RNA, 19 nt, Homo sapiens
  misc_RNA (1)...(19): siRNA sense strand
caucagguuucuuucuugu

SEQ ID NO: 389969 - RNA, 19 nt, Homo sapiens
  misc_RNA (1)...(19): siRNA sense strand
caagggagaaggcaaaucu

SEQ ID NO: 389970 - RNA, 19 nt, Homo sapiens
  misc_RNA (1)...(19): siRNA sense strand
gauucaacacugccaauga

SEQ ID NO: 389971 - RNA, 19 nt, Homo sapiens
  misc_RNA (1)...(19): siRNA sense strand
gcacagcauccaauauucu

SEQ ID NO: 389972 - RNA, 19 nt, Homo sapiens
  misc_RNA (1)...(19): siRNA sense strand
cacaaggacuacccucuca

SEQ ID NO: 389973 - RNA, 19 nt, Homo sapiens
  misc_RNA (1)...(19): siRNA sense strand
gggaucucguuggaaauaa

SEQ ID NO: 389974 - RNA, 19 nt, Homo sapiens
  misc_RNA (1)...(19): siRNA sense strand
uuaaucaggcagaaacuuu

SEQ ID NO: 389975 - RNA, 19 nt, Homo sapiens
  misc_RNA (1)...(19): siRNA sense strand
ggacauggucugggacuuc

SEQ ID NO: 389976 - RNA, 19 nt, Homo sapiens
  misc_RNA (1)...(19): siRNA sense strand
gagaaauccucagacacau

SEQ ID NO: 389977 - RNA, 19 nt, Homo sapiens
  misc_RNA (1)...(19): siRNA sense strand
agagaaauccucagacaca

SEQ ID NO: 389978 - RNA, 19 nt, Homo sapiens
  misc_RNA (1)...(19): siRNA sense strand
gaucccauauuguuuccau

SEQ ID NO: 389979 - RNA, 19 nt, Homo sapiens
  misc_RNA (1)...(19): siRNA sense strand
acacaugacauuaccaaau

SEQ ID NO: 389980 - RNA, 19 nt, Homo sapiens
  misc_RNA (1)...(19): siRNA sense strand
uaauuacuuugcugagguu

SEQ ID NO: 389981 - RNA, 19 nt, Homo sapiens
  misc_RNA (1)...(19): siRNA sense strand
acugggaucucguuggaaa

SEQ ID NO: 389982 - RNA, 19 nt, Homo sapiens
  misc_RNA (1)...(19): siRNA sense strand
caagcugguuaaugcaaau

SEQ ID NO: 389983 - RNA, 19 nt, Homo sapiens
  misc_RNA (1)...(19): siRNA sense strand
uuacuuugcugagguugaa

SEQ ID NO: 389984 - RNA, 19 nt, Homo sapiens
  misc_RNA (1)...(19): siRNA sense strand
gguuugcagugaaauuuua

SEQ ID NO: 389985 - RNA, 19 nt, Homo sapiens
  misc_RNA (1)...(19): siRNA sense strand
guaggagacaaacuuaaug

SEQ ID NO: 389986 - RNA, 19 nt, Homo sapiens
  misc_RNA (1)...(19): siRNA sense strand
acuuugaggucacacauga

SEQ ID NO: 389987 - RNA, 19 nt, Homo sapiens
  misc_RNA (1)...(19): siRNA sense strand
agaggaaacgucuguguga

SEQ ID NO: 389988 - RNA, 19 nt, Homo sapiens
  misc_RNA (1)...(19): siRNA sense strand
uuaaaccggaauccaguua

SEQ ID NO: 389989 - RNA, 19 nt, Homo sapiens
  misc_RNA (1)...(19): siRNA sense strand
gaucacauacuuucaagcu

SEQ ID NO: 389990 - RNA, 19 nt, Homo sapiens
  misc_RNA (1)...(19): siRNA sense strand
gaagacucccaucgcaguu

SEQ ID NO: 389991 - RNA, 19 nt, Homo sapiens
  misc_RNA (1)...(19): siRNA sense strand
gugcucgaguggccaacua

SEQ ID NO: 389992 - RNA, 19 nt, Homo sapiens
  misc_RNA (1)...(19): siRNA sense strand
ccucguggguuugcaguga

SEQ ID NO: 389993 - RNA, 19 nt, Homo sapiens
  misc_RNA (1)...(19): siRNA sense strand
gcaguccggaucucacuug

SEQ ID NO: 389994 - RNA, 19 nt, Homo sapiens
  misc_RNA (1)...(19): siRNA sense strand
acacugccaaugaugauaa

SEQ ID NO: 389995 - RNA, 19 nt, Homo sapiens
  misc_RNA (1)...(19): siRNA sense strand
ugaggccaguccugacaaa

SEQ ID NO: 389996 - RNA, 19 nt, Homo sapiens
  misc_RNA (1)...(19): siRNA sense strand
accggaauccaguuaauua

SEQ ID NO: 389997 - RNA, 19 nt, Homo sapiens
  misc_RNA (1)...(19): siRNA sense strand
gaacgugcugaaugaggaa

SEQ ID NO: 389998 - RNA, 19 nt, Homo sapiens
  misc_RNA (1)...(19): siRNA sense strand
ugaaugaggaacagaggaa

SEQ ID NO: 389999 - RNA, 19 nt, Homo sapiens
  misc_RNA (1)...(19): siRNA sense strand
acauccaggucaugacauu

SEQ ID NO: 390000 - RNA, 19 nt, Homo sapiens
  misc_RNA (1)...(19): siRNA sense strand
caacacugccaaugaugau

SEQ ID NO: 390001 - RNA, 19 nt, Homo sapiens
  misc_RNA (1)...(19): siRNA sense strand
ggagcacagcauccaauau

SEQ ID NO: 390002 - RNA, 19 nt, Homo sapiens
  misc_RNA (1)...(19): siRNA sense strand
caaauggggaggcaguuua

SEQ ID NO: 390003 - RNA, 19 nt, Homo sapiens
  misc_RNA (1)...(19): siRNA sense strand
acaaguacaaugcugagaa

SEQ ID NO: 390004 - RNA, 19 nt, Homo sapiens
  misc_RNA (1)...(19): siRNA sense strand
aaacgucugugugagaaca

SEQ ID NO: 390005 - RNA, 19 nt, Homo sapiens
  misc_RNA (1)...(19): siRNA sense strand
gaaugaggaacagaggaaa

SEQ ID NO: 390006 - RNA, 19 nt, Homo sapiens
  misc_RNA (1)...(19): siRNA sense strand
ugccaaugaugauaacguu

SEQ ID NO: 390007 - RNA, 19 nt, Homo sapiens
  misc_RNA (1)...(19): siRNA sense strand
uugcugagguugaacagau

SEQ ID NO: 390008 - RNA, 19 nt, Homo sapiens
  misc_RNA (1)...(19): siRNA sense strand
gacauuuaaucaggcagaa

SEQ ID NO: 390009 - RNA, 19 nt, Homo sapiens
  misc_RNA (1)...(19): siRNA sense strand
ugaaggauccggacauggu

SEQ ID NO: 390010 - RNA, 19 nt, Homo sapiens
  misc_RNA (1)...(19): siRNA sense strand
aggcucuucuggacaagua

SEQ ID NO: 390011 - RNA, 19 nt, Homo sapiens
  misc_RNA (1)...(19): siRNA sense strand
ucaacacugccaaugauga

SEQ ID NO: 390012 - RNA, 19 nt, Homo sapiens
  misc_RNA (1)...(19): siRNA sense strand
ucaggguggugcuccaaau

SEQ ID NO: 390013 - RNA, 19 nt, Homo sapiens
  misc_RNA (1)...(19): siRNA sense strand
uaaaccggaauccaguuaa

SEQ ID NO: 390014 - RNA, 19 nt, Homo sapiens
  misc_RNA (1)...(19): siRNA sense strand
caaaagagaaauccucaga

SEQ ID NO: 390015 - RNA, 19 nt, Homo sapiens
  misc_RNA (1)...(19): siRNA sense strand
uuacucaggugcgggcauu

SEQ ID NO: 390016 - RNA, 19 nt, Homo sapiens
  misc_RNA (1)...(19): siRNA sense strand
gagaagugcggagauucaa

SEQ ID NO: 390017 - RNA, 19 nt, Homo sapiens
  misc_RNA (1)...(19): siRNA sense strand
ucacacaugacauuaccaa

SEQ ID NO: 390018 - RNA, 19 nt, Homo sapiens
  misc_RNA (1)...(19): siRNA sense strand
gagagaguugugcaugcua

SEQ ID NO: 390019 - RNA, 19 nt, Homo sapiens
  misc_RNA (1)...(19): siRNA sense strand
gccaaugaugauaacguua

SEQ ID NO: 390020 - RNA, 19 nt, Homo sapiens
  misc_RNA (1)...(19): siRNA sense strand
ggaaggaacuggaaacauu

SEQ ID NO: 390021 - RNA, 19 nt, Homo sapiens
  misc_RNA (1)...(19): siRNA sense strand
gcaguuagcuuaucaagga

SEQ ID NO: 390022 - RNA, 19 nt, Homo sapiens
  misc_RNA (1)...(19): siRNA sense strand
gcaaagugcucaaucagaa

SEQ ID NO: 390023 - RNA, 19 nt, Homo sapiens
  misc_RNA (1)...(19): siRNA sense strand
gaaggaacuggaaacauua

SEQ ID NO: 390024 - RNA, 19 nt, Homo sapiens
  misc_RNA (1)...(19): siRNA sense strand
gauagugccuuuacuucuu

SEQ ID NO: 390025 - RNA, 19 nt, Homo sapiens
  misc_RNA (1)...(19): siRNA sense strand
gaucagacuuugugagcuu

SEQ ID NO: 390026 - RNA, 19 nt, Homo sapiens
  misc_RNA (1)...(19): siRNA sense strand
ggaauauggccaagcauuu

SEQ ID NO: 390027 - RNA, 19 nt, Homo sapiens
  misc_RNA (1)...(19): siRNA sense strand
gaaacauuauuccguauac

SEQ ID NO: 390028 - RNA, 19 nt, Homo sapiens
  misc_RNA (1)...(19): siRNA sense strand
guagauacgcccaugaauu

SEQ ID NO: 390029 - RNA, 19 nt, Homo sapiens
  misc_RNA (1)...(19): siRNA sense strand
cacacaaucuucucaguga

SEQ ID NO: 390030 - RNA, 19 nt, Homo sapiens
  misc_RNA (1)...(19): siRNA sense strand
cagguuggcugagugauuu

SEQ ID NO: 390031 - RNA, 19 nt, Homo sapiens
  misc_RNA (1)...(19): siRNA sense strand
uagauacgcccaugaauug

SEQ ID NO: 390032 - RNA, 19 nt, Homo sapiens
  misc_RNA (1)...(19): siRNA sense strand
ggaaaggucucaggaagcu

SEQ ID NO: 390033 - RNA, 19 nt, Homo sapiens
  misc_RNA (1)...(19): siRNA sense strand
ggccaagcauuucugcaaa

SEQ ID NO: 390034 - RNA, 19 nt, Homo sapiens
  misc_RNA (1)...(19): siRNA sense strand
gcccaugaauugcaguuug

SEQ ID NO: 390035 - RNA, 19 nt, Homo sapiens
  misc_RNA (1)...(19): siRNA sense strand
ugacauaacacacaaucuu

SEQ ID NO: 390036 - RNA, 19 nt, Homo sapiens
  misc_RNA (1)...(19): siRNA sense strand
ggaagcuucuugcaguuag

SEQ ID NO: 390037 - RNA, 19 nt, Homo sapiens
  misc_RNA (1)...(19): siRNA sense strand
ugauaggucuugcgcuuug

SEQ ID NO: 390038 - RNA, 19 nt, Homo sapiens
  misc_RNA (1)...(19): siRNA sense strand
gccuuuacuucuucugaua

SEQ ID NO: 390039 - RNA, 19 nt, Homo sapiens
  misc_RNA (1)...(19): siRNA sense strand
gaauugcaguuugaauauc

SEQ ID NO: 390040 - RNA, 19 nt, Homo sapiens
  misc_RNA (1)...(19): siRNA sense strand
gaauauggccaagcauuuc

SEQ ID NO: 390041 - RNA, 19 nt, Homo sapiens
  misc_RNA (1)...(19): siRNA sense strand
uaucaaggaucagacuuug

SEQ ID NO: 390042 - RNA, 19 nt, Homo sapiens
  misc_RNA (1)...(19): siRNA sense strand
caucuugggucuucuugau

SEQ ID NO: 390043 - RNA, 19 nt, Homo sapiens
  misc_RNA (1)...(19): siRNA sense strand
gcaaugaggaguggaagga

SEQ ID NO: 390044 - RNA, 19 nt, Homo sapiens
  misc_RNA (1)...(19): siRNA sense strand
ggaacuggaaacauuauuc

SEQ ID NO: 390045 - RNA, 19 nt, Homo sapiens
  misc_RNA (1)...(19): siRNA sense strand
ucaaucagaaucagcauga

SEQ ID NO: 390046 - RNA, 19 nt, Homo sapiens
  misc_RNA (1)...(19): siRNA sense strand
gggaauauggccaagcauu

SEQ ID NO: 390047 - RNA, 19 nt, Homo sapiens
  misc_RNA (1)...(19): siRNA sense strand
gagcugcacucuggaaagg

SEQ ID NO: 390048 - RNA, 19 nt, Homo sapiens
  misc_RNA (1)...(19): siRNA sense strand
gaaaaugacauaacacaca

SEQ ID NO: 390049 - RNA, 19 nt, Homo sapiens
  misc_RNA (1)...(19): siRNA sense strand
gaaacaaaaucuggucuca

SEQ ID NO: 390050 - RNA, 19 nt, Homo sapiens
  misc_RNA (1)...(19): siRNA sense strand
gcaugaaaaugacauaaca

SEQ ID NO: 390051 - RNA, 19 nt, Homo sapiens
  misc_RNA (1)...(19): siRNA sense strand
gcaccauucggucauuuga

SEQ ID NO: 390052 - RNA, 19 nt, Homo sapiens
  misc_RNA (1)...(19): siRNA sense strand
cccaugaauugcaguuuga

SEQ ID NO: 390053 - RNA, 19 nt, Homo sapiens
  misc_RNA (1)...(19): siRNA sense strand
ucaaggaucagacuuugug

SEQ ID NO: 390054 - RNA, 19 nt, Homo sapiens
  misc_RNA (1)...(19): siRNA sense strand
ggugauagugccuuuacuu

SEQ ID NO: 390055 - RNA, 19 nt, Homo sapiens
  misc_RNA (1)...(19): siRNA sense strand
gacauaacacacaaucuuc

SEQ ID NO: 390056 - RNA, 19 nt, Homo sapiens
  misc_RNA (1)...(19): siRNA sense strand
caggaagcuucuugcaguu

SEQ ID NO: 390057 - RNA, 19 nt, Homo sapiens
  misc_RNA (1)...(19): siRNA sense strand
uuugugagcuuccagaaca

SEQ ID NO: 390058 - RNA, 19 nt, Homo sapiens
  misc_RNA (1)...(19): siRNA sense strand
uuugcuacuuccauuguua

SEQ ID NO: 390059 - RNA, 19 nt, Homo sapiens
  misc_RNA (1)...(19): siRNA sense strand
ugagggaauucguagauac

SEQ ID NO: 390060 - RNA, 19 nt, Homo sapiens
  misc_RNA (1)...(19): siRNA sense strand
ggaguggaaggaacuggaa

SEQ ID NO: 390061 - RNA, 19 nt, Homo sapiens
  misc_RNA (1)...(19): siRNA sense strand
ucucaggauucuacccaaa

SEQ ID NO: 390062 - RNA, 19 nt, Homo sapiens
  misc_RNA (1)...(19): siRNA sense strand
gugcugaugggacauggua

SEQ ID NO: 390063 - RNA, 19 nt, Homo sapiens
  misc_RNA (1)...(19): siRNA sense strand
gccaagcauuucugcaaag

SEQ ID NO: 390064 - RNA, 19 nt, Homo sapiens
  misc_RNA (1)...(19): siRNA sense strand
ccaagcauuucugcaaagu

SEQ ID NO: 390065 - RNA, 19 nt, Homo sapiens
  misc_RNA (1)...(19): siRNA sense strand
ucugcaaagugcucaauca

SEQ ID NO: 390066 - RNA, 19 nt, Homo sapiens
  misc_RNA (1)...(19): siRNA sense strand
cagcuugugugccaugucu

SEQ ID NO: 390067 - RNA, 19 nt, Homo sapiens
  misc_RNA (1)...(19): siRNA sense strand
agugacaccugcccacguu

SEQ ID NO: 390068 - RNA, 19 nt, Homo sapiens
  misc_RNA (1)...(19): siRNA sense strand
gcgcuuugguucaggaaac

SEQ ID NO: 390069 - RNA, 19 nt, Homo sapiens
  misc_RNA (1)...(19): siRNA sense strand
uugagggaauucguagaua

SEQ ID NO: 390070 - RNA, 19 nt, Homo sapiens
  misc_RNA (1)...(19): siRNA sense strand
aaucagaaucagcaugaaa

SEQ ID NO: 390071 - RNA, 19 nt, Homo sapiens
  misc_RNA (1)...(19): siRNA sense strand
ggucucaggaagcuucuug

SEQ ID NO: 390072 - RNA, 19 nt, Homo sapiens
  misc_RNA (1)...(19): siRNA sense strand
agaaucagcaugaaaauga

SEQ ID NO: 390073 - RNA, 19 nt, Homo sapiens
  misc_RNA (1)...(19): siRNA sense strand
caaucagaaucagcaugaa

SEQ ID NO: 390074 - RNA, 19 nt, Homo sapiens
  misc_RNA (1)...(19): siRNA sense strand
caaagugcucaaucagaau

SEQ ID NO: 390075 - RNA, 19 nt, Homo sapiens
  misc_RNA (1)...(19): siRNA sense strand
gugaagcacagcagucuag

SEQ ID NO: 390076 - RNA, 19 nt, Homo sapiens
  misc_RNA (1)...(19): siRNA sense strand
gcuucuugcaguuagcuua

SEQ ID NO: 390077 - RNA, 19 nt, Homo sapiens
  misc_RNA (1)...(19): siRNA sense strand
gugauagugccuuuacuuc

SEQ ID NO: 390078 - RNA, 19 nt, Homo sapiens
  misc_RNA (1)...(19): siRNA sense strand
guuagcuuaucaaggauca

SEQ ID NO: 390079 - RNA, 19 nt, Homo sapiens
  misc_RNA (1)...(19): siRNA sense strand
gagcuuccagaacaauuca

SEQ ID NO: 390080 - RNA, 19 nt, Homo sapiens
  misc_RNA (1)...(19): siRNA sense strand
ggggaaacuucagcaauga

SEQ ID NO: 390081 - RNA, 19 nt, Homo sapiens
  misc_RNA (1)...(19): siRNA sense strand
uuaucaaggaucagacuuu

SEQ ID NO: 390082 - RNA, 19 nt, Homo sapiens
  misc_RNA (1)...(19): siRNA sense strand
ggucuugcgcuuugguuca

SEQ ID NO: 390083 - RNA, 19 nt, Homo sapiens
  misc_RNA (1)...(19): siRNA sense strand
ccucucuccuuccauguca

SEQ ID NO: 390084 - RNA, 19 nt, Homo sapiens
  misc_RNA (1)...(19): siRNA sense strand
caucuuggcggugauagug

SEQ ID NO: 390085 - RNA, 19 nt, Homo sapiens
  misc_RNA (1)...(19): siRNA sense strand
uggcggugauagugccuuu

SEQ ID NO: 390086 - RNA, 19 nt, Homo sapiens
  misc_RNA (1)...(19): siRNA sense strand
ucauuugagggaauucgua

SEQ ID NO: 390087 - RNA, 19 nt, Homo sapiens
  misc_RNA (1)...(19): siRNA sense strand
auagugccuuuacuucuuc

SEQ ID NO: 390088 - RNA, 19 nt, Homo sapiens
  misc_RNA (1)...(19): siRNA sense strand
cugcccacguuucaucuug

SEQ ID NO: 390089 - RNA, 19 nt, Homo sapiens
  misc_RNA (1)...(19): siRNA sense strand
ccagugacaugcaagauga

SEQ ID NO: 390090 - RNA, 19 nt, Homo sapiens
  misc_RNA (1)...(19): siRNA sense strand
gcaggcaagucaugagaga

SEQ ID NO: 390091 - RNA, 19 nt, Homo sapiens
  misc_RNA (1)...(19): siRNA sense strand
gaugguacguauauuguca

SEQ ID NO: 390092 - RNA, 19 nt, Homo sapiens
  misc_RNA (1)...(19): siRNA sense strand
caauugcuaucgccaguga

SEQ ID NO: 390093 - RNA, 19 nt, Homo sapiens
  misc_RNA (1)...(19): siRNA sense strand
ccagaaggccgucucagaa

SEQ ID NO: 390094 - RNA, 19 nt, Homo sapiens
  misc_RNA (1)...(19): siRNA sense strand
guacguauauugucaugac

SEQ ID NO: 390095 - RNA, 19 nt, Homo sapiens
  misc_RNA (1)...(19): siRNA sense strand
ucagaaggguacaaggauu

SEQ ID NO: 390096 - RNA, 19 nt, Homo sapiens
  misc_RNA (1)...(19): siRNA sense strand
cuucaaagggugcaacaua

SEQ ID NO: 390097 - RNA, 19 nt, Homo sapiens
  misc_RNA (1)...(19): siRNA sense strand
caaagggugcaacauagaa

SEQ ID NO: 390098 - RNA, 19 nt, Homo sapiens
  misc_RNA (1)...(19): siRNA sense strand
cagaaggguacaaggauuu

SEQ ID NO: 390099 - RNA, 19 nt, Homo sapiens
  misc_RNA (1)...(19): siRNA sense strand
gcaagucaugagagaguuu

SEQ ID NO: 390100 - RNA, 19 nt, Homo sapiens
  misc_RNA (1)...(19): siRNA sense strand
caagccggaugguacguau

SEQ ID NO: 390101 - RNA, 19 nt, Homo sapiens
  misc_RNA (1)...(19): siRNA sense strand
caacuggcccguguacaug

SEQ ID NO: 390102 - RNA, 19 nt, Homo sapiens
  misc_RNA (1)...(19): siRNA sense strand
ucaaagggugcaacauaga

SEQ ID NO: 390103 - RNA, 19 nt, Homo sapiens
  misc_RNA (1)...(19): siRNA sense strand
gauuuuaucucuccaugug

SEQ ID NO: 390104 - RNA, 19 nt, Homo sapiens
  misc_RNA (1)...(19): siRNA sense strand
gauuucagggcaauugcua

SEQ ID NO: 390105 - RNA, 19 nt, Homo sapiens
  misc_RNA (1)...(19): siRNA sense strand
gcaccaacuggcccgugua

SEQ ID NO: 390106 - RNA, 19 nt, Homo sapiens
  misc_RNA (1)...(19): siRNA sense strand
ccaacuggcccguguacau

SEQ ID NO: 390107 - RNA, 19 nt, Homo sapiens
  misc_RNA (1)...(19): siRNA sense strand
cugcugcccuccuccuuug

SEQ ID NO: 390108 - RNA, 19 nt, Homo sapiens
  misc_RNA (1)...(19): siRNA sense strand
uucaaagggugcaacauag

SEQ ID NO: 390109 - RNA, 19 nt, Homo sapiens
  misc_RNA (1)...(19): siRNA sense strand
ccaagaagucagccuacug

SEQ ID NO: 390110 - RNA, 19 nt, Homo sapiens
  misc_RNA (1)...(19): siRNA sense strand
gugcugaacggaccgcuau

SEQ ID NO: 390111 - RNA, 19 nt, Homo sapiens
  misc_RNA (1)...(19): siRNA sense strand
aaagggugcaacauagaaa

SEQ ID NO: 390112 - RNA, 19 nt, Homo sapiens
  misc_RNA (1)...(19): siRNA sense strand
ggccugaggaccugcagaa

SEQ ID NO: 390113 - RNA, 19 nt, Homo sapiens
  misc_RNA (1)...(19): siRNA sense strand
ggcaagucaugagagaguu

SEQ ID NO: 390114 - RNA, 19 nt, Homo sapiens
  misc_RNA (1)...(19): siRNA sense strand
cugaggaccugcagaagac

SEQ ID NO: 390115 - RNA, 19 nt, Homo sapiens
  misc_RNA (1)...(19): siRNA sense strand
ccugaggaccugcagaaga

SEQ ID NO: 390116 - RNA, 19 nt, Homo sapiens
  misc_RNA (1)...(19): siRNA sense strand
gcugcugcccuccuccuuu

SEQ ID NO: 390117 - RNA, 19 nt, Homo sapiens
  misc_RNA (1)...(19): siRNA sense strand
ucucagaaggguacaagga

SEQ ID NO: 390118 - RNA, 19 nt, Homo sapiens
  misc_RNA (1)...(19): siRNA sense strand
ccggaugguacguauauug

SEQ ID NO: 390119 - RNA, 19 nt, Homo sapiens
  misc_RNA (1)...(19): siRNA sense strand
gccagugacaugcaagaug

SEQ ID NO: 390120 - RNA, 19 nt, Homo sapiens
  misc_RNA (1)...(19): siRNA sense strand
uaucgccagugacaugcaa

SEQ ID NO: 390121 - RNA, 19 nt, Homo sapiens
  misc_RNA (1)...(19): siRNA sense strand
acaaggauuucagggcaau

SEQ ID NO: 390122 - RNA, 19 nt, Homo sapiens
  misc_RNA (1)...(19): siRNA sense strand
cagaaggccgucucagaag

SEQ ID NO: 390123 - RNA, 19 nt, Homo sapiens
  misc_RNA (1)...(19): siRNA sense strand
gugacaugcaagaugauuu

SEQ ID NO: 390124 - RNA, 19 nt, Homo sapiens
  misc_RNA (1)...(19): siRNA sense strand
ugacaugcaagaugauuuu

SEQ ID NO: 390125 - RNA, 19 nt, Homo sapiens
  misc_RNA (1)...(19): siRNA sense strand
gugaagaucugguuccaaa

SEQ ID NO: 390126 - RNA, 19 nt, Homo sapiens
  misc_RNA (1)...(19): siRNA sense strand
gagaaggaguuucauuaca

SEQ ID NO: 390127 - RNA, 19 nt, Homo sapiens
  misc_RNA (1)...(19): siRNA sense strand
gcaaaggagcgcaaaguga

SEQ ID NO: 390128 - RNA, 19 nt, Homo sapiens
  misc_RNA (1)...(19): siRNA sense strand
caaaggagcgcaaagugaa

SEQ ID NO: 390129 - RNA, 19 nt, Homo sapiens
  misc_RNA (1)...(19): siRNA sense strand
gcaaagugaacaagaagaa

SEQ ID NO: 390130 - RNA, 19 nt, Homo sapiens
  misc_RNA (1)...(19): siRNA sense strand
gcuaugugcuggacaagga

SEQ ID NO: 390131 - RNA, 19 nt, Homo sapiens
  misc_RNA (1)...(19): siRNA sense strand
aagaggaguuucugccaua

SEQ ID NO: 390132 - RNA, 19 nt, Homo sapiens
  misc_RNA (1)...(19): siRNA sense strand
uggagaaggaguuucauua

SEQ ID NO: 390133 - RNA, 19 nt, Homo sapiens
  misc_RNA (1)...(19): siRNA sense strand
gccuggagcuggagaagga

SEQ ID NO: 390134 - RNA, 19 nt, Homo sapiens
  misc_RNA (1)...(19): siRNA sense strand
ggagaaggaguuucauuac

SEQ ID NO: 390135 - RNA, 19 nt, Homo sapiens
  misc_RNA (1)...(19): siRNA sense strand
guaagacucggaccaagga

SEQ ID NO: 390136 - RNA, 19 nt, Homo sapiens
  misc_RNA (1)...(19): siRNA sense strand
gaagaaacagcagcagcaa

SEQ ID NO: 390137 - RNA, 19 nt, Homo sapiens
  misc_RNA (1)...(19): siRNA sense strand
agaaggaguuucauuacag

SEQ ID NO: 390138 - RNA, 19 nt, Homo sapiens
  misc_RNA (1)...(19): siRNA sense strand
uuacagccguuacaucaca

SEQ ID NO: 390139 - RNA, 19 nt, Homo sapiens
  misc_RNA (1)...(19): siRNA sense strand
cauuacagccguuacauca

SEQ ID NO: 390140 - RNA, 19 nt, Homo sapiens
  misc_RNA (1)...(19): siRNA sense strand
gaacggcaggugaagaucu

SEQ ID NO: 390141 - RNA, 19 nt, Homo sapiens
  misc_RNA (1)...(19): siRNA sense strand
caaagugaacaagaagaaa

SEQ ID NO: 390142 - RNA, 19 nt, Homo sapiens
  misc_RNA (1)...(19): siRNA sense strand
gagcgcaaagugaacaaga

SEQ ID NO: 390143 - RNA, 19 nt, Homo sapiens
  misc_RNA (1)...(19): siRNA sense strand
agaaacagcagcagcaaca

SEQ ID NO: 390144 - RNA, 19 nt, Homo sapiens
  misc_RNA (1)...(19): siRNA sense strand
acaaguaccgcguggucua

SEQ ID NO: 390145 - RNA, 19 nt, Homo sapiens
  misc_RNA (1)...(19): siRNA sense strand
gggcaaaggagcgcaaagu

SEQ ID NO: 390146 - RNA, 19 nt, Homo sapiens
  misc_RNA (1)...(19): siRNA sense strand
ggcaaaggagcgcaaagug

SEQ ID NO: 390147 - RNA, 19 nt, Homo sapiens
  misc_RNA (1)...(19): siRNA sense strand
acaaggauucgcccgugua

SEQ ID NO: 390148 - RNA, 19 nt, Homo sapiens
  misc_RNA (1)...(19): siRNA sense strand
gcgcaaagugaacaagaag

SEQ ID NO: 390149 - RNA, 19 nt, Homo sapiens
  misc_RNA (1)...(19): siRNA sense strand
ggccaccuccucuccaaug

SEQ ID NO: 390150 - RNA, 19 nt, Homo sapiens
  misc_RNA (1)...(19): siRNA sense strand
cgacuucuccagcuacucu

SEQ ID NO: 390151 - RNA, 19 nt, Homo sapiens
  misc_RNA (1)...(19): siRNA sense strand
ggagcuggagaaggaguuu

SEQ ID NO: 390152 - RNA, 19 nt, Homo sapiens
  misc_RNA (1)...(19): siRNA sense strand
cuccaaugccugugaaaga

SEQ ID NO: 390153 - RNA, 19 nt, Homo sapiens
  misc_RNA (1)...(19): siRNA sense strand
ggaggcaaaugauugauaa

SEQ ID NO: 390154 - RNA, 19 nt, Homo sapiens
  misc_RNA (1)...(19): siRNA sense strand
ggacaagagugaagugaug

SEQ ID NO: 390155 - RNA, 19 nt, Homo sapiens
  misc_RNA (1)...(19): siRNA sense strand
gggaggaucugccuacaaa

SEQ ID NO: 390156 - RNA, 19 nt, Homo sapiens
  misc_RNA (1)...(19): siRNA sense strand
gccaugaucuggucuauug

SEQ ID NO: 390157 - RNA, 19 nt, Homo sapiens
  misc_RNA (1)...(19): siRNA sense strand
gcucucaucucaucuauuc

SEQ ID NO: 390158 - RNA, 19 nt, Homo sapiens
  misc_RNA (1)...(19): siRNA sense strand
ggaauucauuaacuccaua

SEQ ID NO: 390159 - RNA, 19 nt, Homo sapiens
  misc_RNA (1)...(19): siRNA sense strand
gaccaagguucaguucuua

SEQ ID NO: 390160 - RNA, 19 nt, Homo sapiens
  misc_RNA (1)...(19): siRNA sense strand
ucacugugcugauucauga

SEQ ID NO: 390161 - RNA, 19 nt, Homo sapiens
  misc_RNA (1)...(19): siRNA sense strand
gaucuggucuauugacaug

SEQ ID NO: 390162 - RNA, 19 nt, Homo sapiens
  misc_RNA (1)...(19): siRNA sense strand
caacaagguuaucaucaag

SEQ ID NO: 390163 - RNA, 19 nt, Homo sapiens
  misc_RNA (1)...(19): siRNA sense strand
gcagggaggcaaaugauug

SEQ ID NO: 390164 - RNA, 19 nt, Homo sapiens
  misc_RNA (1)...(19): siRNA sense strand
ccaagaaucccaaacugaa

SEQ ID NO: 390165 - RNA, 19 nt, Homo sapiens
  misc_RNA (1)...(19): siRNA sense strand
acaacaagguuaucaucaa

SEQ ID NO: 390166 - RNA, 19 nt, Homo sapiens
  misc_RNA (1)...(19): siRNA sense strand
caaaagaucuggauuucau

SEQ ID NO: 390167 - RNA, 19 nt, Homo sapiens
  misc_RNA (1)...(19): siRNA sense strand
ugaguuagcagaagccuuu

SEQ ID NO: 390168 - RNA, 19 nt, Homo sapiens
  misc_RNA (1)...(19): siRNA sense strand
gggccaagcuccuacuaca

SEQ ID NO: 390169 - RNA, 19 nt, Homo sapiens
  misc_RNA (1)...(19): siRNA sense strand
ggaaaggcuucucuugacu

SEQ ID NO: 390170 - RNA, 19 nt, Homo sapiens
  misc_RNA (1)...(19): siRNA sense strand
uaacuuugauggacuggau

SEQ ID NO: 390171 - RNA, 19 nt, Homo sapiens
  misc_RNA (1)...(19): siRNA sense strand
ugacauggaugacuucacu

SEQ ID NO: 390172 - RNA, 19 nt, Homo sapiens
  misc_RNA (1)...(19): siRNA sense strand
cuacuacaauguggaauau

SEQ ID NO: 390173 - RNA, 19 nt, Homo sapiens
  misc_RNA (1)...(19): siRNA sense strand
aaaauucucuuguccauug

SEQ ID NO: 390174 - RNA, 19 nt, Homo sapiens
  misc_RNA (1)...(19): siRNA sense strand
caagaaucccaaacugaaa

SEQ ID NO: 390175 - RNA, 19 nt, Homo sapiens
  misc_RNA (1)...(19): siRNA sense strand
agaccaagguucaguucuu

SEQ ID NO: 390176 - RNA, 19 nt, Homo sapiens
  misc_RNA (1)...(19): siRNA sense strand
ugaggaaccauaacuuuga

SEQ ID NO: 390177 - RNA, 19 nt, Homo sapiens
  misc_RNA (1)...(19): siRNA sense strand
gguggauucuucuacauca

SEQ ID NO: 390178 - RNA, 19 nt, Homo sapiens
  misc_RNA (1)...(19): siRNA sense strand
ugaagaguauggagaccaa

SEQ ID NO: 390179 - RNA, 19 nt, Homo sapiens
  misc_RNA (1)...(19): siRNA sense strand
gaggaaccauaacuuugau

SEQ ID NO: 390180 - RNA, 19 nt, Homo sapiens
  misc_RNA (1)...(19): siRNA sense strand
cuacaucacgcuuggaauu

SEQ ID NO: 390181 - RNA, 19 nt, Homo sapiens
  misc_RNA (1)...(19): siRNA sense strand
gggaggcaaaugauugaua

SEQ ID NO: 390182 - RNA, 19 nt, Homo sapiens
  misc_RNA (1)...(19): siRNA sense strand
acacuggccucugcagaaa

SEQ ID NO: 390183 - RNA, 19 nt, Homo sapiens
  misc_RNA (1)...(19): siRNA sense strand
ccuaugcucucaucucauc

SEQ ID NO: 390184 - RNA, 19 nt, Homo sapiens
  misc_RNA (1)...(19): siRNA sense strand
uagcagaagccuuucagaa

SEQ ID NO: 390185 - RNA, 19 nt, Homo sapiens
  misc_RNA (1)...(19): siRNA sense strand
gaucugccaguuccugaaa

SEQ ID NO: 390186 - RNA, 19 nt, Homo sapiens
  misc_RNA (1)...(19): siRNA sense strand
ugacuucacuggcaaaucc

SEQ ID NO: 390187 - RNA, 19 nt, Homo sapiens
  misc_RNA (1)...(19): siRNA sense strand
gaccaucaacagucucaaa

SEQ ID NO: 390188 - RNA, 19 nt, Homo sapiens
  misc_RNA (1)...(19): siRNA sense strand
gggcuaugaugaugugaag

SEQ ID NO: 390189 - RNA, 19 nt, Homo sapiens
  misc_RNA (1)...(19): siRNA sense strand
ucauuucacugugcugauu

SEQ ID NO: 390190 - RNA, 19 nt, Homo sapiens
  misc_RNA (1)...(19): siRNA sense strand
cuacccagaucagaaagaa

SEQ ID NO: 390191 - RNA, 19 nt, Homo sapiens
  misc_RNA (1)...(19): siRNA sense strand
ggaggguaccuguuugguu

SEQ ID NO: 390192 - RNA, 19 nt, Homo sapiens
  misc_RNA (1)...(19): siRNA sense strand
gccaagcuccuacuacaau

SEQ ID NO: 390193 - RNA, 19 nt, Homo sapiens
  misc_RNA (1)...(19): siRNA sense strand
ccaagguucaguucuuaaa

SEQ ID NO: 390194 - RNA, 19 nt, Homo sapiens
  misc_RNA (1)...(19): siRNA sense strand
acaagguuaucaucaagga

SEQ ID NO: 390195 - RNA, 19 nt, Homo sapiens
  misc_RNA (1)...(19): siRNA sense strand
uccauaauccuguuucuga

SEQ ID NO: 390196 - RNA, 19 nt, Homo sapiens
  misc_RNA (1)...(19): siRNA sense strand
gagccaugaucuggucuau

SEQ ID NO: 390197 - RNA, 19 nt, Homo sapiens
  misc_RNA (1)...(19): siRNA sense strand
ccacauaugggcacuccuu

SEQ ID NO: 390198 - RNA, 19 nt, Homo sapiens
  misc_RNA (1)...(19): siRNA sense strand
ggcaaaugauugauaacag

SEQ ID NO: 390199 - RNA, 19 nt, Homo sapiens
  misc_RNA (1)...(19): siRNA sense strand
aaggaaaggcuucucuuga

SEQ ID NO: 390200 - RNA, 19 nt, Homo sapiens
  misc_RNA (1)...(19): siRNA sense strand
auaagggaaugccaucaga

SEQ ID NO: 390201 - RNA, 19 nt, Homo sapiens
  misc_RNA (1)...(19): siRNA sense strand
cuauugacauggaugacuu

SEQ ID NO: 390202 - RNA, 19 nt, Homo sapiens
  misc_RNA (1)...(19): siRNA sense strand
augaugaugugaagaguau

SEQ ID NO: 390203 - RNA, 19 nt, Homo sapiens
  misc_RNA (1)...(19): siRNA sense strand
ucaucaaccuccuguccuu

SEQ ID NO: 390204 - RNA, 19 nt, Homo sapiens
  misc_RNA (1)...(19): siRNA sense strand
ggugggcuaugaugaugug

SEQ ID NO: 390205 - RNA, 19 nt, Homo sapiens
  misc_RNA (1)...(19): siRNA sense strand
ccaagcuccuacuacaaug

SEQ ID NO: 390206 - RNA, 19 nt, Homo sapiens
  misc_RNA (1)...(19): siRNA sense strand
caucucaucuauucauucg

SEQ ID NO: 390207 - RNA, 19 nt, Homo sapiens
  misc_RNA (1)...(19): siRNA sense strand
guauggagaccaagguuca

SEQ ID NO: 390208 - RNA, 19 nt, Homo sapiens
  misc_RNA (1)...(19): siRNA sense strand
ugugcugauucaugaguua

SEQ ID NO: 390209 - RNA, 19 nt, Homo sapiens
  misc_RNA (1)...(19): siRNA sense strand
aaacaacaagguuaucauc

SEQ ID NO: 390210 - RNA, 19 nt, Homo sapiens
  misc_RNA (1)...(19): siRNA sense strand
cauuggaggguaccuguuu

SEQ ID NO: 390211 - RNA, 19 nt, Homo sapiens
  misc_RNA (1)...(19): siRNA sense strand
ccuacuacaauguggaaua

SEQ ID NO: 390212 - RNA, 19 nt, Homo sapiens
  misc_RNA (1)...(19): siRNA sense strand
ggccacaacagcccucuga

SEQ ID NO: 390213 - RNA, 19 nt, Homo sapiens
  misc_RNA (1)...(19): siRNA sense strand
gugaagugaugcucuacca

SEQ ID NO: 390214 - RNA, 19 nt, Homo sapiens
  misc_RNA (1)...(19): siRNA sense strand
gcaggaaccaggaaaauuc

SEQ ID NO: 390215 - RNA, 19 nt, Homo sapiens
  misc_RNA (1)...(19): siRNA sense strand
uaugguggauucuucuaca

SEQ ID NO: 390216 - RNA, 19 nt, Homo sapiens
  misc_RNA (1)...(19): siRNA sense strand
ggagaccaagguucaguuc

SEQ ID NO: 390217 - RNA, 19 nt, Homo sapiens
  misc_RNA (1)...(19): siRNA sense strand
gggaaugccaucagagaag

SEQ ID NO: 390218 - RNA, 19 nt, Homo sapiens
  misc_RNA (1)...(19): siRNA sense strand
gggcagguguaguggucuu

SEQ ID NO: 390219 - RNA, 19 nt, Homo sapiens
  misc_RNA (1)...(19): siRNA sense strand
ucugaggaaccauaacuuu

SEQ ID NO: 390220 - RNA, 19 nt, Homo sapiens
  misc_RNA (1)...(19): siRNA sense strand
gaaaacaacaagguuauca

SEQ ID NO: 390221 - RNA, 19 nt, Homo sapiens
  misc_RNA (1)...(19): siRNA sense strand
gaaaauucaccccugagaa

SEQ ID NO: 390222 - RNA, 19 nt, Homo sapiens
  misc_RNA (1)...(19): siRNA sense strand
gaggaucugccuacaaacu

SEQ ID NO: 390223 - RNA, 19 nt, Homo sapiens
  misc_RNA (1)...(19): siRNA sense strand
aggaaaggcuucucuugac

SEQ ID NO: 390224 - RNA, 19 nt, Homo sapiens
  misc_RNA (1)...(19): siRNA sense strand
gcuuggaauucauuaacuc

SEQ ID NO: 390225 - RNA, 19 nt, Homo sapiens
  misc_RNA (1)...(19): siRNA sense strand
gcuaugaugaugugaagag

SEQ ID NO: 390226 - RNA, 19 nt, Homo sapiens
  misc_RNA (1)...(19): siRNA sense strand
ggcaaaagaucuggauuuc

SEQ ID NO: 390227 - RNA, 19 nt, Homo sapiens
  misc_RNA (1)...(19): siRNA sense strand
aaccaagaaucccaaacug

SEQ ID NO: 390228 - RNA, 19 nt, Homo sapiens
  misc_RNA (1)...(19): siRNA sense strand
cagggaggcaaaugauuga

SEQ ID NO: 390229 - RNA, 19 nt, Homo sapiens
  misc_RNA (1)...(19): siRNA sense strand
aaaccaagaaucccaaacu

SEQ ID NO: 390230 - RNA, 19 nt, Homo sapiens
  misc_RNA (1)...(19): siRNA sense strand
auuaugagaucugccaguu

SEQ ID NO: 390231 - RNA, 19 nt, Homo sapiens
  misc_RNA (1)...(19): siRNA sense strand
ccaaggaaaggcuucucuu

SEQ ID NO: 390232 - RNA, 19 nt, Homo sapiens
  misc_RNA (1)...(19): siRNA sense strand
gaauauugaccccuuccua

SEQ ID NO: 390233 - RNA, 19 nt, Homo sapiens
  misc_RNA (1)...(19): siRNA sense strand
uguccaagcagucaagaga

SEQ ID NO: 390234 - RNA, 19 nt, Homo sapiens
  misc_RNA (1)...(19): siRNA sense strand
ggucuauugacauggauga

SEQ ID NO: 390235 - RNA, 19 nt, Homo sapiens
  misc_RNA (1)...(19): siRNA sense strand
uugagaaacuggcaaaaga

SEQ ID NO: 390236 - RNA, 19 nt, Homo sapiens
  misc_RNA (1)...(19): siRNA sense strand
ucaucaaggacaagaguga

SEQ ID NO: 390237 - RNA, 19 nt, Homo sapiens
  misc_RNA (1)...(19): siRNA sense strand
gaguauggagaccaagguu

SEQ ID NO: 390238 - RNA, 19 nt, Homo sapiens
  misc_RNA (1)...(19): siRNA sense strand
gaugaugugaagaguaugg

SEQ ID NO: 390239 - RNA, 19 nt, Homo sapiens
  misc_RNA (1)...(19): siRNA sense strand
uaugaugaugugaagagua

SEQ ID NO: 390240 - RNA, 19 nt, Homo sapiens
  misc_RNA (1)...(19): siRNA sense strand
acaucacgcuuggaauuca

SEQ ID NO: 390241 - RNA, 19 nt, Homo sapiens
  misc_RNA (1)...(19): siRNA sense strand
cacacuggccucugcagaa

SEQ ID NO: 390242 - RNA, 19 nt, Homo sapiens
  misc_RNA (1)...(19): siRNA sense strand
ggaaaagccccuuaucacu

SEQ ID NO: 390243 - RNA, 19 nt, Homo sapiens
  misc_RNA (1)...(19): siRNA sense strand
aaagaucuggauuucauca

SEQ ID NO: 390244 - RNA, 19 nt, Homo sapiens
  misc_RNA (1)...(19): siRNA sense strand
gcugauucaugaguuagca

SEQ ID NO: 390245 - RNA, 19 nt, Homo sapiens
  misc_RNA (1)...(19): siRNA sense strand
cugaggaaccauaacuuug

SEQ ID NO: 390246 - RNA, 19 nt, Homo sapiens
  misc_RNA (1)...(19): siRNA sense strand
uaacuccauaauccuguuu

SEQ ID NO: 390247 - RNA, 19 nt, Homo sapiens
  misc_RNA (1)...(19): siRNA sense strand
acuacaauguggaauaugc

SEQ ID NO: 390248 - RNA, 19 nt, Homo sapiens
  misc_RNA (1)...(19): siRNA sense strand
ggaaaauucaccccugaga

SEQ ID NO: 390249 - RNA, 19 nt, Homo sapiens
  misc_RNA (1)...(19): siRNA sense strand
caucagagaagguggucau

SEQ ID NO: 390250 - RNA, 19 nt, Homo sapiens
  misc_RNA (1)...(19): siRNA sense strand
ggccaagcuccuacuacaa

SEQ ID NO: 390251 - RNA, 19 nt, Homo sapiens
  misc_RNA (1)...(19): siRNA sense strand
ucuggucuauugacaugga

SEQ ID NO: 390252 - RNA, 19 nt, Homo sapiens
  misc_RNA (1)...(19): siRNA sense strand
gugggguacuggauacaua

SEQ ID NO: 390253 - RNA, 19 nt, Homo sapiens
  misc_RNA (1)...(19): siRNA sense strand
gaagagaccugacaauugc

SEQ ID NO: 390254 - RNA, 19 nt, Homo sapiens
  misc_RNA (1)...(19): siRNA sense strand
uggaagagguuagcuauua

SEQ ID NO: 390255 - RNA, 19 nt, Homo sapiens
  misc_RNA (1)...(19): siRNA sense strand
gcacacauccgauuaaaug

SEQ ID NO: 390256 - RNA, 19 nt, Homo sapiens
  misc_RNA (1)...(19): siRNA sense strand
agaaacagcuacaacagua

SEQ ID NO: 390257 - RNA, 19 nt, Homo sapiens
  misc_RNA (1)...(19): siRNA sense strand
gaaacaacauuugaagaga

SEQ ID NO: 390258 - RNA, 19 nt, Homo sapiens
  misc_RNA (1)...(19): siRNA sense strand
gacaguggaugauauagaa

SEQ ID NO: 390259 - RNA, 19 nt, Homo sapiens
  misc_RNA (1)...(19): siRNA sense strand
gaaaccagcuacaauggau

SEQ ID NO: 390260 - RNA, 19 nt, Homo sapiens
  misc_RNA (1)...(19): siRNA sense strand
ggaauccucuucucuuugu

SEQ ID NO: 390261 - RNA, 19 nt, Homo sapiens
  misc_RNA (1)...(19): siRNA sense strand
caauggauuuccugucaua

SEQ ID NO: 390262 - RNA, 19 nt, Homo sapiens
  misc_RNA (1)...(19): siRNA sense strand
ggaagagguuagcuauuau

SEQ ID NO: 390263 - RNA, 19 nt, Homo sapiens
  misc_RNA (1)...(19): siRNA sense strand
cuacagaaaugacaugaau

SEQ ID NO: 390264 - RNA, 19 nt, Homo sapiens
  misc_RNA (1)...(19): siRNA sense strand
aaagauauccuccggcaua

SEQ ID NO: 390265 - RNA, 19 nt, Homo sapiens
  misc_RNA (1)...(19): siRNA sense strand
gagcagguguuauuaugga

SEQ ID NO: 390266 - RNA, 19 nt, Homo sapiens
  misc_RNA (1)...(19): siRNA sense strand
ccacgaaauuuggaaagua

SEQ ID NO: 390267 - RNA, 19 nt, Homo sapiens
  misc_RNA (1)...(19): siRNA sense strand
gaaaacaugggcagaauua

SEQ ID NO: 390268 - RNA, 19 nt, Homo sapiens
  misc_RNA (1)...(19): siRNA sense strand
ugacaugaaugccaguaaa

SEQ ID NO: 390269 - RNA, 19 nt, Homo sapiens
  misc_RNA (1)...(19): siRNA sense strand
gcagggaaggcauuuauga

SEQ ID NO: 390270 - RNA, 19 nt, Homo sapiens
  misc_RNA (1)...(19): siRNA sense strand
gaagcacacauccgauuaa

SEQ ID NO: 390271 - RNA, 19 nt, Homo sapiens
  misc_RNA (1)...(19): siRNA sense strand
ggcaucagguuugaguuua

SEQ ID NO: 390272 - RNA, 19 nt, Homo sapiens
  misc_RNA (1)...(19): siRNA sense strand
uggagcagcuugccuacua

SEQ ID NO: 390273 - RNA, 19 nt, Homo sapiens
  misc_RNA (1)...(19): siRNA sense strand
ggaaggcauuuaugaagca

SEQ ID NO: 390274 - RNA, 19 nt, Homo sapiens
  misc_RNA (1)...(19): siRNA sense strand
gcaguucucggguguguuu

SEQ ID NO: 390275 - RNA, 19 nt, Homo sapiens
  misc_RNA (1)...(19): siRNA sense strand
uaaagguauuugcuccaua

SEQ ID NO: 390276 - RNA, 19 nt, Homo sapiens
  misc_RNA (1)...(19): siRNA sense strand
gagcagcuguuccauagag

SEQ ID NO: 390277 - RNA, 19 nt, Homo sapiens
  misc_RNA (1)...(19): siRNA sense strand
gaagagguuagcuauuauu

SEQ ID NO: 390278 - RNA, 19 nt, Homo sapiens
  misc_RNA (1)...(19): siRNA sense strand
aaagguauuugcuccauau

SEQ ID NO: 390279 - RNA, 19 nt, Homo sapiens
  misc_RNA (1)...(19): siRNA sense strand
ggaggcagcauuaacaguu

SEQ ID NO: 390280 - RNA, 19 nt, Homo sapiens
  misc_RNA (1)...(19): siRNA sense strand
gaaaguccucggccauuga

SEQ ID NO: 390281 - RNA, 19 nt, Homo sapiens
  misc_RNA (1)...(19): siRNA sense strand
uuaaguggauucaucauca

SEQ ID NO: 390282 - RNA, 19 nt, Homo sapiens
  misc_RNA (1)...(19): siRNA sense strand
gcacuggccggauuaauag

SEQ ID NO: 390283 - RNA, 19 nt, Homo sapiens
  misc_RNA (1)...(19): siRNA sense strand
gaaucagcaugggaaauga

SEQ ID NO: 390284 - RNA, 19 nt, Homo sapiens
  misc_RNA (1)...(19): siRNA sense strand
ggcacuggccggauuaaua

SEQ ID NO: 390285 - RNA, 19 nt, Homo sapiens
  misc_RNA (1)...(19): siRNA sense strand
gaugauuuccauacuauug

SEQ ID NO: 390286 - RNA, 19 nt, Homo sapiens
  misc_RNA (1)...(19): siRNA sense strand
uaugagaccucgaaggaau

SEQ ID NO: 390287 - RNA, 19 nt, Homo sapiens
  misc_RNA (1)...(19): siRNA sense strand
gugauagccuucccuaauc

SEQ ID NO: 390288 - RNA, 19 nt, Homo sapiens
  misc_RNA (1)...(19): siRNA sense strand
cauuacaccuggccuuuau

SEQ ID NO: 390289 - RNA, 19 nt, Homo sapiens
  misc_RNA (1)...(19): siRNA sense strand
gccuggcacucauauuuaa

SEQ ID NO: 390290 - RNA, 19 nt, Homo sapiens
  misc_RNA (1)...(19): siRNA sense strand
gguccugguucuuauauca

SEQ ID NO: 390291 - RNA, 19 nt, Homo sapiens
  misc_RNA (1)...(19): siRNA sense strand
gaagguaucguuggcaguu

SEQ ID NO: 390292 - RNA, 19 nt, Homo sapiens
  misc_RNA (1)...(19): siRNA sense strand
agaagagaccugacaauug

SEQ ID NO: 390293 - RNA, 19 nt, Homo sapiens
  misc_RNA (1)...(19): siRNA sense strand
uacaauggauuuccuguca

SEQ ID NO: 390294 - RNA, 19 nt, Homo sapiens
  misc_RNA (1)...(19): siRNA sense strand
gagguuagcuauuauuuuc

SEQ ID NO: 390295 - RNA, 19 nt, Homo sapiens
  misc_RNA (1)...(19): siRNA sense strand
aaaagaagguccccuggua

SEQ ID NO: 390296 - RNA, 19 nt, Homo sapiens
  misc_RNA (1)...(19): siRNA sense strand
gaagagagggauaaauguc

SEQ ID NO: 390297 - RNA, 19 nt, Homo sapiens
  misc_RNA (1)...(19): siRNA sense strand
aauagaaagugccaggaaa

SEQ ID NO: 390298 - RNA, 19 nt, Homo sapiens
  misc_RNA (1)...(19): siRNA sense strand
cagcaggcauuggaguaua

SEQ ID NO: 390299 - RNA, 19 nt, Homo sapiens
  misc_RNA (1)...(19): siRNA sense strand
cgacgcaaguccacgaaau

SEQ ID NO: 390300 - RNA, 19 nt, Homo sapiens
  misc_RNA (1)...(19): siRNA sense strand
cagaagagaccugacaauu

SEQ ID NO: 390301 - RNA, 19 nt, Homo sapiens
  misc_RNA (1)...(19): siRNA sense strand
aaacagcuacaacaguaua

SEQ ID NO: 390302 - RNA, 19 nt, Homo sapiens
  misc_RNA (1)...(19): siRNA sense strand
cacgaaauuuggaaaguau

SEQ ID NO: 390303 - RNA, 19 nt, Homo sapiens
  misc_RNA (1)...(19): siRNA sense strand
gcauuacaccuggccuuua

SEQ ID NO: 390304 - RNA, 19 nt, Homo sapiens
  misc_RNA (1)...(19): siRNA sense strand
caaaguauagcacaaacga

SEQ ID NO: 390305 - RNA, 19 nt, Homo sapiens
  misc_RNA (1)...(19): siRNA sense strand
gcgccuccuuggcauuaua

SEQ ID NO: 390306 - RNA, 19 nt, Homo sapiens
  misc_RNA (1)...(19): siRNA sense strand
ugaagcacacauccgauua

SEQ ID NO: 390307 - RNA, 19 nt, Homo sapiens
  misc_RNA (1)...(19): siRNA sense strand
agacauugcugccgauugg

SEQ ID NO: 390308 - RNA, 19 nt, Homo sapiens
  misc_RNA (1)...(19): siRNA sense strand
gaagcauucuugacaugag

SEQ ID NO: 390309 - RNA, 19 nt, Homo sapiens
  misc_RNA (1)...(19): siRNA sense strand
ggaaugauccucccuuagc

SEQ ID NO: 390310 - RNA, 19 nt, Homo sapiens
  misc_RNA (1)...(19): siRNA sense strand
cacgacugguuuaucuuua

SEQ ID NO: 390311 - RNA, 19 nt, Homo sapiens
  misc_RNA (1)...(19): siRNA sense strand
cauacaccaugguaccuuu

SEQ ID NO: 390312 - RNA, 19 nt, Homo sapiens
  misc_RNA (1)...(19): siRNA sense strand
cagaggguccugguucuua

SEQ ID NO: 390313 - RNA, 19 nt, Homo sapiens
  misc_RNA (1)...(19): siRNA sense strand
gauggagcagguguuauua

SEQ ID NO: 390314 - RNA, 19 nt, Homo sapiens
  misc_RNA (1)...(19): siRNA sense strand
ccuuauggcugcagucaug

SEQ ID NO: 390315 - RNA, 19 nt, Homo sapiens
  misc_RNA (1)...(19): siRNA sense strand
ccacgacugguuuaucuuu

SEQ ID NO: 390316 - RNA, 19 nt, Homo sapiens
  misc_RNA (1)...(19): siRNA sense strand
uuuaguggcugcauuuguu

SEQ ID NO: 390317 - RNA, 19 nt, Homo sapiens
  misc_RNA (1)...(19): siRNA sense strand
gaaccaauuccagguguug

SEQ ID NO: 390318 - RNA, 19 nt, Homo sapiens
  misc_RNA (1)...(19): siRNA sense strand
ggagcagcuugccuacuau

SEQ ID NO: 390319 - RNA, 19 nt, Homo sapiens
  misc_RNA (1)...(19): siRNA sense strand
ugagguccaucaauccauu

SEQ ID NO: 390320 - RNA, 19 nt, Homo sapiens
  misc_RNA (1)...(19): siRNA sense strand
gaggcagcauuaacaguuc

SEQ ID NO: 390321 - RNA, 19 nt, Homo sapiens
  misc_RNA (1)...(19): siRNA sense strand
guuaugagaccucgaagga

SEQ ID NO: 390322 - RNA, 19 nt, Homo sapiens
  misc_RNA (1)...(19): siRNA sense strand
ucagcuauauggcaguuau

SEQ ID NO: 390323 - RNA, 19 nt, Homo sapiens
  misc_RNA (1)...(19): siRNA sense strand
ggaagucauuauuguugca

SEQ ID NO: 390324 - RNA, 19 nt, Homo sapiens
  misc_RNA (1)...(19): siRNA sense strand
guaaagguauuugcuccau

SEQ ID NO: 390325 - RNA, 19 nt, Homo sapiens
  misc_RNA (1)...(19): siRNA sense strand
aaacaugggcagaauuaau

SEQ ID NO: 390326 - RNA, 19 nt, Homo sapiens
  misc_RNA (1)...(19): siRNA sense strand
cuacaacaguauaacaagu

SEQ ID NO: 390327 - RNA, 19 nt, Homo sapiens
  misc_RNA (1)...(19): siRNA sense strand
ccugacaauugcaauagaa

SEQ ID NO: 390328 - RNA, 19 nt, Homo sapiens
  misc_RNA (1)...(19): siRNA sense strand
uggauuuccugucauaaug

SEQ ID NO: 390329 - RNA, 19 nt, Homo sapiens
  misc_RNA (1)...(19): siRNA sense strand
acuggaggcuuggaauaua

SEQ ID NO: 390330 - RNA, 19 nt, Homo sapiens
  misc_RNA (1)...(19): siRNA sense strand
uggagcagguguuauuaug

SEQ ID NO: 390331 - RNA, 19 nt, Homo sapiens
  misc_RNA (1)...(19): siRNA sense strand
ccaguaaaauugucgauga

SEQ ID NO: 390332 - RNA, 19 nt, Homo sapiens
  misc_RNA (1)...(19): siRNA sense strand
ccucuucucuuugugacua

SEQ ID NO: 390333 - RNA, 19 nt, Homo sapiens
  misc_RNA (1)...(19): siRNA sense strand
cuggaauccucuucucuuu

SEQ ID NO: 390334 - RNA, 19 nt, Homo sapiens
  misc_RNA (1)...(19): siRNA sense strand
agccauuacugcugugaua

SEQ ID NO: 390335 - RNA, 19 nt, Homo sapiens
  misc_RNA (1)...(19): siRNA sense strand
gcaaguccacgaaauuugg

SEQ ID NO: 390336 - RNA, 19 nt, Homo sapiens
  misc_RNA (1)...(19): siRNA sense strand
gcaucagguuugaguuuag

SEQ ID NO: 390337 - RNA, 19 nt, Homo sapiens
  misc_RNA (1)...(19): siRNA sense strand
gaaaggcauagacggauca

SEQ ID NO: 390338 - RNA, 19 nt, Homo sapiens
  misc_RNA (1)...(19): siRNA sense strand
gaaacagcuacaacaguau

SEQ ID NO: 390339 - RNA, 19 nt, Homo sapiens
  misc_RNA (1)...(19): siRNA sense strand
caauagaaagugccaggaa

SEQ ID NO: 390340 - RNA, 19 nt, Homo sapiens
  misc_RNA (1)...(19): siRNA sense strand
gauuugcccucagaagaga

SEQ ID NO: 390341 - RNA, 19 nt, Homo sapiens
  misc_RNA (1)...(19): siRNA sense strand
gaaugauccucccuuagcu

SEQ ID NO: 390342 - RNA, 19 nt, Homo sapiens
  misc_RNA (1)...(19): siRNA sense strand
uuaaauggauacccuuucu

SEQ ID NO: 390343 - RNA, 19 nt, Homo sapiens
  misc_RNA (1)...(19): siRNA sense strand
uaacagccgucugguccuu

SEQ ID NO: 390344 - RNA, 19 nt, Homo sapiens
  misc_RNA (1)...(19): siRNA sense strand
ggaaaauggacuuuaauga

SEQ ID NO: 390345 - RNA, 19 nt, Homo sapiens
  misc_RNA (1)...(19): siRNA sense strand
cugagcagcuguuccauag

SEQ ID NO: 390346 - RNA, 19 nt, Homo sapiens
  misc_RNA (1)...(19): siRNA sense strand
aaagacagagaaaggcaua

SEQ ID NO: 390347 - RNA, 19 nt, Homo sapiens
  misc_RNA (1)...(19): siRNA sense strand
agaaaguccucggccauug

SEQ ID NO: 390348 - RNA, 19 nt, Homo sapiens
  misc_RNA (1)...(19): siRNA sense strand
gggauuugcccucagaaga

SEQ ID NO: 390349 - RNA, 19 nt, Homo sapiens
  misc_RNA (1)...(19): siRNA sense strand
gauuaaauggauacccuuu

SEQ ID NO: 390350 - RNA, 19 nt, Homo sapiens
  misc_RNA (1)...(19): siRNA sense strand
gcagucaugaccaguaaau

SEQ ID NO: 390351 - RNA, 19 nt, Homo sapiens
  misc_RNA (1)...(19): siRNA sense strand
gaauauauuguuccccuua

SEQ ID NO: 390352 - RNA, 19 nt, Homo sapiens
  misc_RNA (1)...(19): siRNA sense strand
ccaauuggaggaguucuuu

SEQ ID NO: 390353 - RNA, 19 nt, Homo sapiens
  misc_RNA (1)...(19): siRNA sense strand
gcaccagcaugaagacaua

SEQ ID NO: 390354 - RNA, 19 nt, Homo sapiens
  misc_RNA (1)...(19): siRNA sense strand
uaaauucuguggaguaugu

SEQ ID NO: 390355 - RNA, 19 nt, Homo sapiens
  misc_RNA (1)...(19): siRNA sense strand
gaagacauaccgagcuaaa

SEQ ID NO: 390356 - RNA, 19 nt, Homo sapiens
  misc_RNA (1)...(19): siRNA sense strand
gcacaagggccucuucugu

SEQ ID NO: 390357 - RNA, 19 nt, Homo sapiens
  misc_RNA (1)...(19): siRNA sense strand
acaagggccucuucuguga

SEQ ID NO: 390358 - RNA, 19 nt, Homo sapiens
  misc_RNA (1)...(19): siRNA sense strand
aagcugaccuggaagagaa

SEQ ID NO: 390359 - RNA, 19 nt, Homo sapiens
  misc_RNA (1)...(19): siRNA sense strand
acaaugacaucuuugaauc

SEQ ID NO: 390360 - RNA, 19 nt, Homo sapiens
  misc_RNA (1)...(19): siRNA sense strand
gcuaaauucuguggaguau

SEQ ID NO: 390361 - RNA, 19 nt, Homo sapiens
  misc_RNA (1)...(19): siRNA sense strand
cggagacaaugacaucuuu

SEQ ID NO: 390362 - RNA, 19 nt, Homo sapiens
  misc_RNA (1)...(19): siRNA sense strand
ccacccggguuaccaauga

SEQ ID NO: 390363 - RNA, 19 nt, Homo sapiens
  misc_RNA (1)...(19): siRNA sense strand
agacauaccgagcuaaauu

SEQ ID NO: 390364 - RNA, 19 nt, Homo sapiens
  misc_RNA (1)...(19): siRNA sense strand
uugcgaagcugaccuggaa

SEQ ID NO: 390365 - RNA, 19 nt, Homo sapiens
  misc_RNA (1)...(19): siRNA sense strand
gcgaggucaugaagaagaa

SEQ ID NO: 390366 - RNA, 19 nt, Homo sapiens
  misc_RNA (1)...(19): siRNA sense strand
gacaaugacaucuuugaau

SEQ ID NO: 390367 - RNA, 19 nt, Homo sapiens
  misc_RNA (1)...(19): siRNA sense strand
uggaagagaacauuaagaa

SEQ ID NO: 390368 - RNA, 19 nt, Homo sapiens
  misc_RNA (1)...(19): siRNA sense strand
gagacaaugacaucuuuga

SEQ ID NO: 390369 - RNA, 19 nt, Homo sapiens
  misc_RNA (1)...(19): siRNA sense strand
ccagacccaacuaugauua

SEQ ID NO: 390370 - RNA, 19 nt, Homo sapiens
  misc_RNA (1)...(19): siRNA sense strand
auaccgagcuaaauucugu

SEQ ID NO: 390371 - RNA, 19 nt, Homo sapiens
  misc_RNA (1)...(19): siRNA sense strand
ggucaggccuugcgaagcu

SEQ ID NO: 390372 - RNA, 19 nt, Homo sapiens
  misc_RNA (1)...(19): siRNA sense strand
gaccuggaagagaacauua

SEQ ID NO: 390373 - RNA, 19 nt, Homo sapiens
  misc_RNA (1)...(19): siRNA sense strand
ggaagagaacauuaagaag

SEQ ID NO: 390374 - RNA, 19 nt, Homo sapiens
  misc_RNA (1)...(19): siRNA sense strand
gugcauccguacucccaaa

SEQ ID NO: 390375 - RNA, 19 nt, Homo sapiens
  misc_RNA (1)...(19): siRNA sense strand
gaagcugaccuggaagaga

SEQ ID NO: 390376 - RNA, 19 nt, Homo sapiens
  misc_RNA (1)...(19): siRNA sense strand
gcgaggaguggguguguga

SEQ ID NO: 390377 - RNA, 19 nt, Homo sapiens
  misc_RNA (1)...(19): siRNA sense strand
ggcccagacccaacuauga

SEQ ID NO: 390378 - RNA, 19 nt, Homo sapiens
  misc_RNA (1)...(19): siRNA sense strand
gacauaccgagcuaaauuc

SEQ ID NO: 390379 - RNA, 19 nt, Homo sapiens
  misc_RNA (1)...(19): siRNA sense strand
gaacauuaagaagggcaaa

SEQ ID NO: 390380 - RNA, 19 nt, Homo sapiens
  misc_RNA (1)...(19): siRNA sense strand
acggcgaggucaugaagaa

SEQ ID NO: 390381 - RNA, 19 nt, Homo sapiens
  misc_RNA (1)...(19): siRNA sense strand
gcccagacccaacuaugau

SEQ ID NO: 390382 - RNA, 19 nt, Homo sapiens
  misc_RNA (1)...(19): siRNA sense strand
augaagacauaccgagcua

SEQ ID NO: 390383 - RNA, 19 nt, Homo sapiens
  misc_RNA (1)...(19): siRNA sense strand
gcgaagcugaccuggaaga

SEQ ID NO: 390384 - RNA, 19 nt, Homo sapiens
  misc_RNA (1)...(19): siRNA sense strand
agacaaugacaucuuugaa

SEQ ID NO: 390385 - RNA, 19 nt, Homo sapiens
  misc_RNA (1)...(19): siRNA sense strand
ggagacaaugacaucuuug

SEQ ID NO: 390386 - RNA, 19 nt, Homo sapiens
  misc_RNA (1)...(19): siRNA sense strand
agacccaacuaugauuaga

SEQ ID NO: 390387 - RNA, 19 nt, Homo sapiens
  misc_RNA (1)...(19): siRNA sense strand
ggcgaggucaugaagaaga

SEQ ID NO: 390388 - RNA, 19 nt, Homo sapiens
  misc_RNA (1)...(19): siRNA sense strand
gaccugugccugccauuac

SEQ ID NO: 390389 - RNA, 19 nt, Homo sapiens
  misc_RNA (1)...(19): siRNA sense strand
ccagagcagcugcaaguac

SEQ ID NO: 390390 - RNA, 19 nt, Homo sapiens
  misc_RNA (1)...(19): siRNA sense strand
agaccugugccugccauua

SEQ ID NO: 390391 - RNA, 19 nt, Homo sapiens
  misc_RNA (1)...(19): siRNA sense strand
gauggugucugcuauugua

SEQ ID NO: 390392 - RNA, 19 nt, Homo sapiens
  misc_RNA (1)...(19): siRNA sense strand
gcugaaacaugcaguugua

SEQ ID NO: 390393 - RNA, 19 nt, Homo sapiens
  misc_RNA (1)...(19): siRNA sense strand
gauaaaggcuacuguugga

SEQ ID NO: 390394 - RNA, 19 nt, Homo sapiens
  misc_RNA (1)...(19): siRNA sense strand
ccacuaauguccagcguuu

SEQ ID NO: 390395 - RNA, 19 nt, Homo sapiens
  misc_RNA (1)...(19): siRNA sense strand
guacguaccaugcagaaua

SEQ ID NO: 390396 - RNA, 19 nt, Homo sapiens
  misc_RNA (1)...(19): siRNA sense strand
acaaguagcugauauugau

SEQ ID NO: 390397 - RNA, 19 nt, Homo sapiens
  misc_RNA (1)...(19): siRNA sense strand
ugacaaaacugcuaaauga

SEQ ID NO: 390398 - RNA, 19 nt, Homo sapiens
  misc_RNA (1)...(19): siRNA sense strand
gguacgagcugcuauguuc

SEQ ID NO: 390399 - RNA, 19 nt, Homo sapiens
  misc_RNA (1)...(19): siRNA sense strand
gaucccaucuacacaguuu

SEQ ID NO: 390400 - RNA, 19 nt, Homo sapiens
  misc_RNA (1)...(19): siRNA sense strand
gaccagcucucucuucaga

SEQ ID NO: 390401 - RNA, 19 nt, Homo sapiens
  misc_RNA (1)...(19): siRNA sense strand
ggacacagcagcaauuugu

SEQ ID NO: 390402 - RNA, 19 nt, Homo sapiens
  misc_RNA (1)...(19): siRNA sense strand
gaaugagacugcugaucuu

SEQ ID NO: 390403 - RNA, 19 nt, Homo sapiens
  misc_RNA (1)...(19): siRNA sense strand
gauccuagcuaucguucuu

SEQ ID NO: 390404 - RNA, 19 nt, Homo sapiens
  misc_RNA (1)...(19): siRNA sense strand
gaacaaguagcugauauug

SEQ ID NO: 390405 - RNA, 19 nt, Homo sapiens
  misc_RNA (1)...(19): siRNA sense strand
gccacaagauuacaagaaa

SEQ ID NO: 390406 - RNA, 19 nt, Homo sapiens
  misc_RNA (1)...(19): siRNA sense strand
uaaugaggaccuauacuua

SEQ ID NO: 390407 - RNA, 19 nt, Homo sapiens
  misc_RNA (1)...(19): siRNA sense strand
caaccgaauuguuaucaga

SEQ ID NO: 390408 - RNA, 19 nt, Homo sapiens
  misc_RNA (1)...(19): siRNA sense strand
uaaccucacuugcaauaau

SEQ ID NO: 390409 - RNA, 19 nt, Homo sapiens
  misc_RNA (1)...(19): siRNA sense strand
uguagaagcugguggaaug

SEQ ID NO: 390410 - RNA, 19 nt, Homo sapiens
  misc_RNA (1)...(19): siRNA sense strand
agaaauaguugaagguugu

SEQ ID NO: 390411 - RNA, 19 nt, Homo sapiens
  misc_RNA (1)...(19): siRNA sense strand
gaacagggauuuucucagu

SEQ ID NO: 390412 - RNA, 19 nt, Homo sapiens
  misc_RNA (1)...(19): siRNA sense strand
ggaaugagacugcugaucu

SEQ ID NO: 390413 - RNA, 19 nt, Homo sapiens
  misc_RNA (1)...(19): siRNA sense strand
caagaaagcaagcucauca

SEQ ID NO: 390414 - RNA, 19 nt, Homo sapiens
  misc_RNA (1)...(19): siRNA sense strand
ggacaaggaagcugcagaa

SEQ ID NO: 390415 - RNA, 19 nt, Homo sapiens
  misc_RNA (1)...(19): siRNA sense strand
aagcagagauggcccagaa

SEQ ID NO: 390416 - RNA, 19 nt, Homo sapiens
  misc_RNA (1)...(19): siRNA sense strand
gaagaaauaguugaagguu

SEQ ID NO: 390417 - RNA, 19 nt, Homo sapiens
  misc_RNA (1)...(19): siRNA sense strand
guagaaacagcucguugua

SEQ ID NO: 390418 - RNA, 19 nt, Homo sapiens
  misc_RNA (1)...(19): siRNA sense strand
gaucuuggacuugauauug

SEQ ID NO: 390419 - RNA, 19 nt, Homo sapiens
  misc_RNA (1)...(19): siRNA sense strand
guuaucagaggacuaaaua

SEQ ID NO: 390420 - RNA, 19 nt, Homo sapiens
  misc_RNA (1)...(19): siRNA sense strand
ggguucagaugauauaaau

SEQ ID NO: 390421 - RNA, 19 nt, Homo sapiens
  misc_RNA (1)...(19): siRNA sense strand
uuacuucacucuaggaaug

SEQ ID NO: 390422 - RNA, 19 nt, Homo sapiens
  misc_RNA (1)...(19): siRNA sense strand
gcaguucgccuucacuaug

SEQ ID NO: 390423 - RNA, 19 nt, Homo sapiens
  misc_RNA (1)...(19): siRNA sense strand
gaaagcaagcucaucauac

SEQ ID NO: 390424 - RNA, 19 nt, Homo sapiens
  misc_RNA (1)...(19): siRNA sense strand
ggacuucaccugacagauc

SEQ ID NO: 390425 - RNA, 19 nt, Homo sapiens
  misc_RNA (1)...(19): siRNA sense strand
ccaagugggugguauagag

SEQ ID NO: 390426 - RNA, 19 nt, Homo sapiens
  misc_RNA (1)...(19): siRNA sense strand
gcguuuggcugaaccauca

SEQ ID NO: 390427 - RNA, 19 nt, Homo sapiens
  misc_RNA (1)...(19): siRNA sense strand
ggacaagccacaagauuac

SEQ ID NO: 390428 - RNA, 19 nt, Homo sapiens
  misc_RNA (1)...(19): siRNA sense strand
cuaaauaccauuccauugu

SEQ ID NO: 390429 - RNA, 19 nt, Homo sapiens
  misc_RNA (1)...(19): siRNA sense strand
ucaagaugaugcagaacuu

SEQ ID NO: 390430 - RNA, 19 nt, Homo sapiens
  misc_RNA (1)...(19): siRNA sense strand
ucacagaugcugaaacaug

SEQ ID NO: 390431 - RNA, 19 nt, Homo sapiens
  misc_RNA (1)...(19): siRNA sense strand
ucugucugcucuaguaaua

SEQ ID NO: 390432 - RNA, 19 nt, Homo sapiens
  misc_RNA (1)...(19): siRNA sense strand
guuaauaaggcugcaguua

SEQ ID NO: 390433 - RNA, 19 nt, Homo sapiens
  misc_RNA (1)...(19): siRNA sense strand
uaagccggcuauuguagaa

SEQ ID NO: 390434 - RNA, 19 nt, Homo sapiens
  misc_RNA (1)...(19): siRNA sense strand
aaagcaagcucaucauacu

SEQ ID NO: 390435 - RNA, 19 nt, Homo sapiens
  misc_RNA (1)...(19): siRNA sense strand
ugauauugauggacaguau

SEQ ID NO: 390436 - RNA, 19 nt, Homo sapiens
  misc_RNA (1)...(19): siRNA sense strand
gaggacaagccacaagauu

SEQ ID NO: 390437 - RNA, 19 nt, Homo sapiens
  misc_RNA (1)...(19): siRNA sense strand
gcagagauggcccagaaug

SEQ ID NO: 390438 - RNA, 19 nt, Homo sapiens
  misc_RNA (1)...(19): siRNA sense strand
cuaucugucugcucuagua

SEQ ID NO: 390439 - RNA, 19 nt, Homo sapiens
  misc_RNA (1)...(19): siRNA sense strand
gacagacugccuucaaauu

SEQ ID NO: 390440 - RNA, 19 nt, Homo sapiens
  misc_RNA (1)...(19): siRNA sense strand
agaaagcaagcucaucaua

SEQ ID NO: 390441 - RNA, 19 nt, Homo sapiens
  misc_RNA (1)...(19): siRNA sense strand
acagacugccuucaaauuu

SEQ ID NO: 390442 - RNA, 19 nt, Homo sapiens
  misc_RNA (1)...(19): siRNA sense strand
guccuucacucaagaacaa

SEQ ID NO: 390443 - RNA, 19 nt, Homo sapiens
  misc_RNA (1)...(19): siRNA sense strand
gaaaagcggcuguuaguca

SEQ ID NO: 390444 - RNA, 19 nt, Homo sapiens
  misc_RNA (1)...(19): siRNA sense strand
ccgcaaaucaugcaccuuu

SEQ ID NO: 390445 - RNA, 19 nt, Homo sapiens
  misc_RNA (1)...(19): siRNA sense strand
ccacuggccucugauaaag

SEQ ID NO: 390446 - RNA, 19 nt, Homo sapiens
  misc_RNA (1)...(19): siRNA sense strand
gauggacaguaugcaauga

SEQ ID NO: 390447 - RNA, 19 nt, Homo sapiens
  misc_RNA (1)...(19): siRNA sense strand
caagaacaaguagcugaua

SEQ ID NO: 390448 - RNA, 19 nt, Homo sapiens
  misc_RNA (1)...(19): siRNA sense strand
gaggaccuauacuuacgaa

SEQ ID NO: 390449 - RNA, 19 nt, Homo sapiens
  misc_RNA (1)...(19): siRNA sense strand
gucaacgucuuguucagaa

SEQ ID NO: 390450 - RNA, 19 nt, Homo sapiens
  misc_RNA (1)...(19): siRNA sense strand
gaaacaugcaguuguaaac

SEQ ID NO: 390451 - RNA, 19 nt, Homo sapiens
  misc_RNA (1)...(19): siRNA sense strand
uaaaggcuacuguuggauu

SEQ ID NO: 390452 - RNA, 19 nt, Homo sapiens
  misc_RNA (1)...(19): siRNA sense strand
aaugcaagcuuuaggacuu

SEQ ID NO: 390453 - RNA, 19 nt, Homo sapiens
  misc_RNA (1)...(19): siRNA sense strand
ugcauaaccuuucccauca

SEQ ID NO: 390454 - RNA, 19 nt, Homo sapiens
  misc_RNA (1)...(19): siRNA sense strand
aagaacaaguagcugauau

SEQ ID NO: 390455 - RNA, 19 nt, Homo sapiens
  misc_RNA (1)...(19): siRNA sense strand
guuugauacugaccuguaa

SEQ ID NO: 390456 - RNA, 19 nt, Homo sapiens
  misc_RNA (1)...(19): siRNA sense strand
aggacaagccacaagauua

SEQ ID NO: 390457 - RNA, 19 nt, Homo sapiens
  misc_RNA (1)...(19): siRNA sense strand
guaccaugcagaauacaaa

SEQ ID NO: 390458 - RNA, 19 nt, Homo sapiens
  misc_RNA (1)...(19): siRNA sense strand
gcugcuauguucccugaga

SEQ ID NO: 390459 - RNA, 19 nt, Homo sapiens
  misc_RNA (1)...(19): siRNA sense strand
aaaggcuacuguuggauug

SEQ ID NO: 390460 - RNA, 19 nt, Homo sapiens
  misc_RNA (1)...(19): siRNA sense strand
gaaaacauccaaagaguag

SEQ ID NO: 390461 - RNA, 19 nt, Homo sapiens
  misc_RNA (1)...(19): siRNA sense strand
gauguucacaaccgaauug

SEQ ID NO: 390462 - RNA, 19 nt, Homo sapiens
  misc_RNA (1)...(19): siRNA sense strand
gacuaaauaccauuccauu

SEQ ID NO: 390463 - RNA, 19 nt, Homo sapiens
  misc_RNA (1)...(19): siRNA sense strand
ugagacugcugaucuugga

SEQ ID NO: 390464 - RNA, 19 nt, Homo sapiens
  misc_RNA (1)...(19): siRNA sense strand
ucacugagccugccaucug

SEQ ID NO: 390465 - RNA, 19 nt, Homo sapiens
  misc_RNA (1)...(19): siRNA sense strand
ggugcugacuauccaguug

SEQ ID NO: 390466 - RNA, 19 nt, Homo sapiens
  misc_RNA (1)...(19): siRNA sense strand
gaagguguggcgacauaug

SEQ ID NO: 390467 - RNA, 19 nt, Homo sapiens
  misc_RNA (1)...(19): siRNA sense strand
gcuuuauucucccauugaa

SEQ ID NO: 390468 - RNA, 19 nt, Homo sapiens
  misc_RNA (1)...(19): siRNA sense strand
ggaagaaauaguugaaggu

SEQ ID NO: 390469 - RNA, 19 nt, Homo sapiens
  misc_RNA (1)...(19): siRNA sense strand
cuaguucaguugcuuguuc

SEQ ID NO: 390470 - RNA, 19 nt, Homo sapiens
  misc_RNA (1)...(19): siRNA sense strand
aagcugauuugauggaguu

SEQ ID NO: 390471 - RNA, 19 nt, Homo sapiens
  misc_RNA (1)...(19): siRNA sense strand
ccucccaaguccuguauga

SEQ ID NO: 390472 - RNA, 19 nt, Homo sapiens
  misc_RNA (1)...(19): siRNA sense strand
augaagguguggcgacaua

SEQ ID NO: 390473 - RNA, 19 nt, Homo sapiens
  misc_RNA (1)...(19): siRNA sense strand
ucagaggacuaaauaccau

SEQ ID NO: 390474 - RNA, 19 nt, Homo sapiens
  misc_RNA (1)...(19): siRNA sense strand
gaugauggucugccaagug

SEQ ID NO: 390475 - RNA, 19 nt, Homo sapiens
  misc_RNA (1)...(19): siRNA sense strand
uuucagaugcugcaacuaa

SEQ ID NO: 390476 - RNA, 19 nt, Homo sapiens
  misc_RNA (1)...(19): siRNA sense strand
ccaugcagaauacaaauga

SEQ ID NO: 390477 - RNA, 19 nt, Homo sapiens
  misc_RNA (1)...(19): siRNA sense strand
gaaauaguugaagguugua

SEQ ID NO: 390478 - RNA, 19 nt, Homo sapiens
  misc_RNA (1)...(19): siRNA sense strand
gcaaugacucgagcucaga

SEQ ID NO: 390479 - RNA, 19 nt, Homo sapiens
  misc_RNA (1)...(19): siRNA sense strand
gcugaucuuggacuugaua

SEQ ID NO: 390480 - RNA, 19 nt, Homo sapiens
  misc_RNA (1)...(19): siRNA sense strand
guucaccaguggauucugu

SEQ ID NO: 390481 - RNA, 19 nt, Homo sapiens
  misc_RNA (1)...(19): siRNA sense strand
gggcuuacuggccaucuuu

SEQ ID NO: 390482 - RNA, 19 nt, Homo sapiens
  misc_RNA (1)...(19): siRNA sense strand
gcauaaccuuucccaucau

SEQ ID NO: 390483 - RNA, 19 nt, Homo sapiens
  misc_RNA (1)...(19): siRNA sense strand
ugaaacaugcaguuguaaa

SEQ ID NO: 390484 - RNA, 19 nt, Homo sapiens
  misc_RNA (1)...(19): siRNA sense strand
ccauggaaccagacagaaa

SEQ ID NO: 390485 - RNA, 19 nt, Homo sapiens
  misc_RNA (1)...(19): siRNA sense strand
agacugccuucaaauuuua

SEQ ID NO: 390486 - RNA, 19 nt, Homo sapiens
  misc_RNA (1)...(19): siRNA sense strand
ccgcauggaagaaauaguu

SEQ ID NO: 390487 - RNA, 19 nt, Homo sapiens
  misc_RNA (1)...(19): siRNA sense strand
ggaccuauacuuacgaaaa

SEQ ID NO: 390488 - RNA, 19 nt, Homo sapiens
  misc_RNA (1)...(19): siRNA sense strand
cugcugaucuuggacuuga

SEQ ID NO: 390489 - RNA, 19 nt, Homo sapiens
  misc_RNA (1)...(19): siRNA sense strand
aaccucacuugcaauaauu

SEQ ID NO: 390490 - RNA, 19 nt, Homo sapiens
  misc_RNA (1)...(19): siRNA sense strand
ucuaaccucacuugcaaua

SEQ ID NO: 390491 - RNA, 19 nt, Homo sapiens
  misc_RNA (1)...(19): siRNA sense strand
gaaauuugcugucuacuua

SEQ ID NO: 390492 - RNA, 19 nt, Homo sapiens
  misc_RNA (1)...(19): siRNA sense strand
gaacuaaacugcaaaauga

SEQ ID NO: 390493 - RNA, 19 nt, Homo sapiens
  misc_RNA (1)...(19): siRNA sense strand
ccucguggcugcaauauua

SEQ ID NO: 390494 - RNA, 19 nt, Homo sapiens
  misc_RNA (1)...(19): siRNA sense strand
gaucauagcuacuacuuca

SEQ ID NO: 390495 - RNA, 19 nt, Homo sapiens
  misc_RNA (1)...(19): siRNA sense strand
gggaacagaucaaaguaaa

SEQ ID NO: 390496 - RNA, 19 nt, Homo sapiens
  misc_RNA (1)...(19): siRNA sense strand
gaugagagcugggacuuug

SEQ ID NO: 390497 - RNA, 19 nt, Homo sapiens
  misc_RNA (1)...(19): siRNA sense strand
gaacagaucaaaguaaaug

SEQ ID NO: 390498 - RNA, 19 nt, Homo sapiens
  misc_RNA (1)...(19): siRNA sense strand
caucagacaucaugcuaaa

SEQ ID NO: 390499 - RNA, 19 nt, Homo sapiens
  misc_RNA (1)...(19): siRNA sense strand
guaaauggaaggcuuauga

SEQ ID NO: 390500 - RNA, 19 nt, Homo sapiens
  misc_RNA (1)...(19): siRNA sense strand
gcucugaucugugcuuuga

SEQ ID NO: 390501 - RNA, 19 nt, Homo sapiens
  misc_RNA (1)...(19): siRNA sense strand
gacaguuacucccugauaa

SEQ ID NO: 390502 - RNA, 19 nt, Homo sapiens
  misc_RNA (1)...(19): siRNA sense strand
ggacaguuacucccugaua

SEQ ID NO: 390503 - RNA, 19 nt, Homo sapiens
  misc_RNA (1)...(19): siRNA sense strand
ucagacaucaugcuaaaua

SEQ ID NO: 390504 - RNA, 19 nt, Homo sapiens
  misc_RNA (1)...(19): siRNA sense strand
uguauuggcucucagguuu

SEQ ID NO: 390505 - RNA, 19 nt, Homo sapiens
  misc_RNA (1)...(19): siRNA sense strand
gaucucagcuggacauacu

SEQ ID NO: 390506 - RNA, 19 nt, Homo sapiens
  misc_RNA (1)...(19): siRNA sense strand
agggaaagaugaccaguuu

SEQ ID NO: 390507 - RNA, 19 nt, Homo sapiens
  misc_RNA (1)...(19): siRNA sense strand
acaaaucugugucagcauu

SEQ ID NO: 390508 - RNA, 19 nt, Homo sapiens
  misc_RNA (1)...(19): siRNA sense strand
ugaagcagauuuccagcaa

SEQ ID NO: 390509 - RNA, 19 nt, Homo sapiens
  misc_RNA (1)...(19): siRNA sense strand
gcacagagcaaaauuuuau

SEQ ID NO: 390510 - RNA, 19 nt, Homo sapiens
  misc_RNA (1)...(19): siRNA sense strand
agaauguacucuuauguca

SEQ ID NO: 390511 - RNA, 19 nt, Homo sapiens
  misc_RNA (1)...(19): siRNA sense strand
cuucauagcugccuguaca

SEQ ID NO: 390512 - RNA, 19 nt, Homo sapiens
  misc_RNA (1)...(19): siRNA sense strand
cuacuucauugcaaccuuu

SEQ ID NO: 390513 - RNA, 19 nt, Homo sapiens
  misc_RNA (1)...(19): siRNA sense strand
cuacccaccuugugaaauc

SEQ ID NO: 390514 - RNA, 19 nt, Homo sapiens
  misc_RNA (1)...(19): siRNA sense strand
cagcuggacauacuaauug

SEQ ID NO: 390515 - RNA, 19 nt, Homo sapiens
  misc_RNA (1)...(19): siRNA sense strand
ucauggagcucugaucugu

SEQ ID NO: 390516 - RNA, 19 nt, Homo sapiens
  misc_RNA (1)...(19): siRNA sense strand
ggacauacuaauugaucaa

SEQ ID NO: 390517 - RNA, 19 nt, Homo sapiens
  misc_RNA (1)...(19): siRNA sense strand
aaaguaaauggaaggcuua

SEQ ID NO: 390518 - RNA, 19 nt, Homo sapiens
  misc_RNA (1)...(19): siRNA sense strand
ucugaucugugcuuugaaa

SEQ ID NO: 390519 - RNA, 19 nt, Homo sapiens
  misc_RNA (1)...(19): siRNA sense strand
gaccacaucagacaucaug

SEQ ID NO: 390520 - RNA, 19 nt, Homo sapiens
  misc_RNA (1)...(19): siRNA sense strand
cacugaagauccuuggaaa

SEQ ID NO: 390521 - RNA, 19 nt, Homo sapiens
  misc_RNA (1)...(19): siRNA sense strand
acaugacaguguugaacua

SEQ ID NO: 390522 - RNA, 19 nt, Homo sapiens
  misc_RNA (1)...(19): siRNA sense strand
gagcucugaucugugcuuu

SEQ ID NO: 390523 - RNA, 19 nt, Homo sapiens
  misc_RNA (1)...(19): siRNA sense strand
uauuaaaggugaagaugag

SEQ ID NO: 390524 - RNA, 19 nt, Homo sapiens
  misc_RNA (1)...(19): siRNA sense strand
ugacaguguugaacuaaac

SEQ ID NO: 390525 - RNA, 19 nt, Homo sapiens
  misc_RNA (1)...(19): siRNA sense strand
acuaauugaucaagggaaa

SEQ ID NO: 390526 - RNA, 19 nt, Homo sapiens
  misc_RNA (1)...(19): siRNA sense strand
gaugcuacccaccuuguga

SEQ ID NO: 390527 - RNA, 19 nt, Homo sapiens
  misc_RNA (1)...(19): siRNA sense strand
ccacugaagauccuuggaa

SEQ ID NO: 390528 - RNA, 19 nt, Homo sapiens
  misc_RNA (1)...(19): siRNA sense strand
cauagcuacuacuucauug

SEQ ID NO: 390529 - RNA, 19 nt, Homo sapiens
  misc_RNA (1)...(19): siRNA sense strand
uauuggcucucagguuuaa

SEQ ID NO: 390530 - RNA, 19 nt, Homo sapiens
  misc_RNA (1)...(19): siRNA sense strand
aagcagauuuccagcaaca

SEQ ID NO: 390531 - RNA, 19 nt, Homo sapiens
  misc_RNA (1)...(19): siRNA sense strand
aauguacucuuaugucaca

SEQ ID NO: 390532 - RNA, 19 nt, Homo sapiens
  misc_RNA (1)...(19): siRNA sense strand
uugcaacccuguacucugu

SEQ ID NO: 390533 - RNA, 19 nt, Homo sapiens
  misc_RNA (1)...(19): siRNA sense strand
uugcaaccuuuauuacuga

SEQ ID NO: 390534 - RNA, 19 nt, Homo sapiens
  misc_RNA (1)...(19): siRNA sense strand
guguugaacuaaacugcaa

SEQ ID NO: 390535 - RNA, 19 nt, Homo sapiens
  misc_RNA (1)...(19): siRNA sense strand
ucauagcuacuacuucauu

SEQ ID NO: 390536 - RNA, 19 nt, Homo sapiens
  misc_RNA (1)...(19): siRNA sense strand
auagcugccuguacagaaa

SEQ ID NO: 390537 - RNA, 19 nt, Homo sapiens
  misc_RNA (1)...(19): siRNA sense strand
ucuuuuagauggacaguua

SEQ ID NO: 390538 - RNA, 19 nt, Homo sapiens
  misc_RNA (1)...(19): siRNA sense strand
gaaaaccaacuacagaaug

SEQ ID NO: 390539 - RNA, 19 nt, Homo sapiens
  misc_RNA (1)...(19): siRNA sense strand
caugcuaaauaccugaaug

SEQ ID NO: 390540 - RNA, 19 nt, Homo sapiens
  misc_RNA (1)...(19): siRNA sense strand
ugaaauuugcugucuacuu

SEQ ID NO: 390541 - RNA, 19 nt, Homo sapiens
  misc_RNA (1)...(19): siRNA sense strand
guauuggcucucagguuua

SEQ ID NO: 390542 - RNA, 19 nt, Homo sapiens
  misc_RNA (1)...(19): siRNA sense strand
ggaacagaucaaaguaaau

SEQ ID NO: 390543 - RNA, 19 nt, Homo sapiens
  misc_RNA (1)...(19): siRNA sense strand
cccaaaggaugucuauuuu

SEQ ID NO: 390544 - RNA, 19 nt, Homo sapiens
  misc_RNA (1)...(19): siRNA sense strand
aaugaaauuugcugucuac

SEQ ID NO: 390545 - RNA, 19 nt, Homo sapiens
  misc_RNA (1)...(19): siRNA sense strand
gcagauuuccagcaacaag

SEQ ID NO: 390546 - RNA, 19 nt, Homo sapiens
  misc_RNA (1)...(19): siRNA sense strand
caaaggcagaaacaggaaa

SEQ ID NO: 390547 - RNA, 19 nt, Homo sapiens
  misc_RNA (1)...(19): siRNA sense strand
gcuaaauaccugaaugcau

SEQ ID NO: 390548 - RNA, 19 nt, Homo sapiens
  misc_RNA (1)...(19): siRNA sense strand
cagaucaaaguaaauggaa

SEQ ID NO: 390549 - RNA, 19 nt, Homo sapiens
  misc_RNA (1)...(19): siRNA sense strand
ucagcuggacauacuaauu

SEQ ID NO: 390550 - RNA, 19 nt, Homo sapiens
  misc_RNA (1)...(19): siRNA sense strand
ccaaaggcagaaacaggaa

SEQ ID NO: 390551 - RNA, 19 nt, Homo sapiens
  misc_RNA (1)...(19): siRNA sense strand
uaaauaccugaaugcauga

SEQ ID NO: 390552 - RNA, 19 nt, Homo sapiens
  misc_RNA (1)...(19): siRNA sense strand
uaaauggaaggcuuaugau

SEQ ID NO: 390553 - RNA, 19 nt, Homo sapiens
  misc_RNA (1)...(19): siRNA sense strand
gcugucuacuuaccaccaa

SEQ ID NO: 390554 - RNA, 19 nt, Homo sapiens
  misc_RNA (1)...(19): siRNA sense strand
ggucauggagcucugaucu

SEQ ID NO: 390555 - RNA, 19 nt, Homo sapiens
  misc_RNA (1)...(19): siRNA sense strand
gaagauccuuggaaaacca

SEQ ID NO: 390556 - RNA, 19 nt, Homo sapiens
  misc_RNA (1)...(19): siRNA sense strand
cagaauguacucuuauguc

SEQ ID NO: 390557 - RNA, 19 nt, Homo sapiens
  misc_RNA (1)...(19): siRNA sense strand
aaaagaaaauccccguugu

SEQ ID NO: 390558 - RNA, 19 nt, Homo sapiens
  misc_RNA (1)...(19): siRNA sense strand
caacucauaaaugccaauu

SEQ ID NO: 390559 - RNA, 19 nt, Homo sapiens
  misc_RNA (1)...(19): siRNA sense strand
gagcuuccccaacucauaa

SEQ ID NO: 390560 - RNA, 19 nt, Homo sapiens
  misc_RNA (1)...(19): siRNA sense strand
cauagcugccuguacagaa

SEQ ID NO: 390561 - RNA, 19 nt, Homo sapiens
  misc_RNA (1)...(19): siRNA sense strand
cagacaucaugcuaaauac

SEQ ID NO: 390562 - RNA, 19 nt, Homo sapiens
  misc_RNA (1)...(19): siRNA sense strand
caugacaguguugaacuaa

SEQ ID NO: 390563 - RNA, 19 nt, Homo sapiens
  misc_RNA (1)...(19): siRNA sense strand
ggugcuggauuuuauguug

SEQ ID NO: 390564 - RNA, 19 nt, Homo sapiens
  misc_RNA (1)...(19): siRNA sense strand
uaauugaucaagggaaaga

SEQ ID NO: 390565 - RNA, 19 nt, Homo sapiens
  misc_RNA (1)...(19): siRNA sense strand
aaaaccaacuacagaaugu

SEQ ID NO: 390566 - RNA, 19 nt, Homo sapiens
  misc_RNA (1)...(19): siRNA sense strand
caaaaucugguuaucauca

SEQ ID NO: 390567 - RNA, 19 nt, Homo sapiens
  misc_RNA (1)...(19): siRNA sense strand
cacaucagacaucaugcua

SEQ ID NO: 390568 - RNA, 19 nt, Homo sapiens
  misc_RNA (1)...(19): siRNA sense strand
gaugaccaguuucuuuuag

SEQ ID NO: 390569 - RNA, 19 nt, Homo sapiens
  misc_RNA (1)...(19): siRNA sense strand
ugggaacagaucaaaguaa

SEQ ID NO: 390570 - RNA, 19 nt, Homo sapiens
  misc_RNA (1)...(19): siRNA sense strand
ggaaaaccaacuacagaau

SEQ ID NO: 390571 - RNA, 19 nt, Homo sapiens
  misc_RNA (1)...(19): siRNA sense strand
aaauggaaggcuuaugaug

SEQ ID NO: 390572 - RNA, 19 nt, Homo sapiens
  misc_RNA (1)...(19): siRNA sense strand
cagaggagcuuccccaacu

SEQ ID NO: 390573 - RNA, 19 nt, Homo sapiens
  misc_RNA (1)...(19): siRNA sense strand
gaaauuugcugucuacuua

SEQ ID NO: 390574 - RNA, 19 nt, Homo sapiens
  misc_RNA (1)...(19): siRNA sense strand
gaacuaaacugcaaaauga

SEQ ID NO: 390575 - RNA, 19 nt, Homo sapiens
  misc_RNA (1)...(19): siRNA sense strand
ccucguggcugcaauauua

SEQ ID NO: 390576 - RNA, 19 nt, Homo sapiens
  misc_RNA (1)...(19): siRNA sense strand
gaucauagcuacuacuuca

SEQ ID NO: 390577 - RNA, 19 nt, Homo sapiens
  misc_RNA (1)...(19): siRNA sense strand
gggaacagaucaaaguaaa

SEQ ID NO: 390578 - RNA, 19 nt, Homo sapiens
  misc_RNA (1)...(19): siRNA sense strand
gaugagagcugggacuuug

SEQ ID NO: 390579 - RNA, 19 nt, Homo sapiens
  misc_RNA (1)...(19): siRNA sense strand
gaacagaucaaaguaaaug

SEQ ID NO: 390580 - RNA, 19 nt, Homo sapiens
  misc_RNA (1)...(19): siRNA sense strand
caucagacaucaugcuaaa

SEQ ID NO: 390581 - RNA, 19 nt, Homo sapiens
  misc_RNA (1)...(19): siRNA sense strand
guaaauggaaggcuuauga

SEQ ID NO: 390582 - RNA, 19 nt, Homo sapiens
  misc_RNA (1)...(19): siRNA sense strand
gcucugaucugugcuuuga

SEQ ID NO: 390583 - RNA, 19 nt, Homo sapiens
  misc_RNA (1)...(19): siRNA sense strand
gacaguuacucccugauaa

SEQ ID NO: 390584 - RNA, 19 nt, Homo sapiens
  misc_RNA (1)...(19): siRNA sense strand
ggacaguuacucccugaua

SEQ ID NO: 390585 - RNA, 19 nt, Homo sapiens
  misc_RNA (1)...(19): siRNA sense strand
ucagacaucaugcuaaaua

SEQ ID NO: 390586 - RNA, 19 nt, Homo sapiens
  misc_RNA (1)...(19): siRNA sense strand
uguauuggcucucagguuu

SEQ ID NO: 390587 - RNA, 19 nt, Homo sapiens
  misc_RNA (1)...(19): siRNA sense strand
gaucucagcuggacauacu

SEQ ID NO: 390588 - RNA, 19 nt, Homo sapiens
  misc_RNA (1)...(19): siRNA sense strand
agggaaagaugaccaguuu

SEQ ID NO: 390589 - RNA, 19 nt, Homo sapiens
  misc_RNA (1)...(19): siRNA sense strand
acaaaucugugucagcauu

SEQ ID NO: 390590 - RNA, 19 nt, Homo sapiens
  misc_RNA (1)...(19): siRNA sense strand
ugaagcagauuuccagcaa

SEQ ID NO: 390591 - RNA, 19 nt, Homo sapiens
  misc_RNA (1)...(19): siRNA sense strand
gcacagagcaaaauuuuau

SEQ ID NO: 390592 - RNA, 19 nt, Homo sapiens
  misc_RNA (1)...(19): siRNA sense strand
agaauguacucuuauguca

SEQ ID NO: 390593 - RNA, 19 nt, Homo sapiens
  misc_RNA (1)...(19): siRNA sense strand
cuucauagcugccuguaca

SEQ ID NO: 390594 - RNA, 19 nt, Homo sapiens
  misc_RNA (1)...(19): siRNA sense strand
cuacuucauugcaaccuuu

SEQ ID NO: 390595 - RNA, 19 nt, Homo sapiens
  misc_RNA (1)...(19): siRNA sense strand
cuacccaccuugugaaauc

SEQ ID NO: 390596 - RNA, 19 nt, Homo sapiens
  misc_RNA (1)...(19): siRNA sense strand
cagcuggacauacuaauug

SEQ ID NO: 390597 - RNA, 19 nt, Homo sapiens
  misc_RNA (1)...(19): siRNA sense strand
ucauggagcucugaucugu

SEQ ID NO: 390598 - RNA, 19 nt, Homo sapiens
  misc_RNA (1)...(19): siRNA sense strand
ggacauacuaauugaucaa

SEQ ID NO: 390599 - RNA, 19 nt, Homo sapiens
  misc_RNA (1)...(19): siRNA sense strand
aaaguaaauggaaggcuua

SEQ ID NO: 390600 - RNA, 19 nt, Homo sapiens
  misc_RNA (1)...(19): siRNA sense strand
ucugaucugugcuuugaaa

SEQ ID NO: 390601 - RNA, 19 nt, Homo sapiens
  misc_RNA (1)...(19): siRNA sense strand
gaccacaucagacaucaug

SEQ ID NO: 390602 - RNA, 19 nt, Homo sapiens
  misc_RNA (1)...(19): siRNA sense strand
cacugaagauccuuggaaa

SEQ ID NO: 390603 - RNA, 19 nt, Homo sapiens
  misc_RNA (1)...(19): siRNA sense strand
acaugacaguguugaacua

SEQ ID NO: 390604 - RNA, 19 nt, Homo sapiens
  misc_RNA (1)...(19): siRNA sense strand
gagcucugaucugugcuuu

SEQ ID NO: 390605 - RNA, 19 nt, Homo sapiens
  misc_RNA (1)...(19): siRNA sense strand
uauuaaaggugaagaugag

SEQ ID NO: 390606 - RNA, 19 nt, Homo sapiens
  misc_RNA (1)...(19): siRNA sense strand
ugacaguguugaacuaaac

SEQ ID NO: 390607 - RNA, 19 nt, Homo sapiens
  misc_RNA (1)...(19): siRNA sense strand
acuaauugaucaagggaaa

SEQ ID NO: 390608 - RNA, 19 nt, Homo sapiens
  misc_RNA (1)...(19): siRNA sense strand
gaugcuacccaccuuguga

SEQ ID NO: 390609 - RNA, 19 nt, Homo sapiens
  misc_RNA (1)...(19): siRNA sense strand
ccacugaagauccuuggaa

SEQ ID NO: 390610 - RNA, 19 nt, Homo sapiens
  misc_RNA (1)...(19): siRNA sense strand
cauagcuacuacuucauug

SEQ ID NO: 390611 - RNA, 19 nt, Homo sapiens
  misc_RNA (1)...(19): siRNA sense strand
uauuggcucucagguuuaa

SEQ ID NO: 390612 - RNA, 19 nt, Homo sapiens
  misc_RNA (1)...(19): siRNA sense strand
aagcagauuuccagcaaca

SEQ ID NO: 390613 - RNA, 19 nt, Homo sapiens
  misc_RNA (1)...(19): siRNA sense strand
aauguacucuuaugucaca

SEQ ID NO: 390614 - RNA, 19 nt, Homo sapiens
  misc_RNA (1)...(19): siRNA sense strand
uugcaacccuguacucugu

SEQ ID NO: 390615 - RNA, 19 nt, Homo sapiens
  misc_RNA (1)...(19): siRNA sense strand
uugcaaccuuuauuacuga

SEQ ID NO: 390616 - RNA, 19 nt, Homo sapiens
  misc_RNA (1)...(19): siRNA sense strand
guguugaacuaaacugcaa

SEQ ID NO: 390617 - RNA, 19 nt, Homo sapiens
  misc_RNA (1)...(19): siRNA sense strand
ucauagcuacuacuucauu

SEQ ID NO: 390618 - RNA, 19 nt, Homo sapiens
  misc_RNA (1)...(19): siRNA sense strand
auagcugccuguacagaaa

SEQ ID NO: 390619 - RNA, 19 nt, Homo sapiens
  misc_RNA (1)...(19): siRNA sense strand
ucuuuuagauggacaguua

SEQ ID NO: 390620 - RNA, 19 nt, Homo sapiens
  misc_RNA (1)...(19): siRNA sense strand
gaaaaccaacuacagaaug

SEQ ID NO: 390621 - RNA, 19 nt, Homo sapiens
  misc_RNA (1)...(19): siRNA sense strand
caugcuaaauaccugaaug

SEQ ID NO: 390622 - RNA, 19 nt, Homo sapiens
  misc_RNA (1)...(19): siRNA sense strand
ugaaauuugcugucuacuu

SEQ ID NO: 390623 - RNA, 19 nt, Homo sapiens
  misc_RNA (1)...(19): siRNA sense strand
guauuggcucucagguuua

SEQ ID NO: 390624 - RNA, 19 nt, Homo sapiens
  misc_RNA (1)...(19): siRNA sense strand
ggaacagaucaaaguaaau

SEQ ID NO: 390625 - RNA, 19 nt, Homo sapiens
  misc_RNA (1)...(19): siRNA sense strand
cccaaaggaugucuauuuu

SEQ ID NO: 390626 - RNA, 19 nt, Homo sapiens
  misc_RNA (1)...(19): siRNA sense strand
aaugaaauuugcugucuac

SEQ ID NO: 390627 - RNA, 19 nt, Homo sapiens
  misc_RNA (1)...(19): siRNA sense strand
gcagauuuccagcaacaag

SEQ ID NO: 390628 - RNA, 19 nt, Homo sapiens
  misc_RNA (1)...(19): siRNA sense strand
caaaggcagaaacaggaaa

SEQ ID NO: 390629 - RNA, 19 nt, Homo sapiens
  misc_RNA (1)...(19): siRNA sense strand
gcuaaauaccugaaugcau

SEQ ID NO: 390630 - RNA, 19 nt, Homo sapiens
  misc_RNA (1)...(19): siRNA sense strand
cagaucaaaguaaauggaa

SEQ ID NO: 390631 - RNA, 19 nt, Homo sapiens
  misc_RNA (1)...(19): siRNA sense strand
ucagcuggacauacuaauu

SEQ ID NO: 390632 - RNA, 19 nt, Homo sapiens
  misc_RNA (1)...(19): siRNA sense strand
ccaaaggcagaaacaggaa

SEQ ID NO: 390633 - RNA, 19 nt, Homo sapiens
  misc_RNA (1)...(19): siRNA sense strand
uaaauaccugaaugcauga

SEQ ID NO: 390634 - RNA, 19 nt, Homo sapiens
  misc_RNA (1)...(19): siRNA sense strand
uaaauggaaggcuuaugau

SEQ ID NO: 390635 - RNA, 19 nt, Homo sapiens
  misc_RNA (1)...(19): siRNA sense strand
gcugucuacuuaccaccaa

SEQ ID NO: 390636 - RNA, 19 nt, Homo sapiens
  misc_RNA (1)...(19): siRNA sense strand
ggucauggagcucugaucu

SEQ ID NO: 390637 - RNA, 19 nt, Homo sapiens
  misc_RNA (1)...(19): siRNA sense strand
gaagauccuuggaaaacca

SEQ ID NO: 390638 - RNA, 19 nt, Homo sapiens
  misc_RNA (1)...(19): siRNA sense strand
cagaauguacucuuauguc

SEQ ID NO: 390639 - RNA, 19 nt, Homo sapiens
  misc_RNA (1)...(19): siRNA sense strand
aaaagaaaauccccguugu

SEQ ID NO: 390640 - RNA, 19 nt, Homo sapiens
  misc_RNA (1)...(19): siRNA sense strand
caacucauaaaugccaauu

SEQ ID NO: 390641 - RNA, 19 nt, Homo sapiens
  misc_RNA (1)...(19): siRNA sense strand
gagcuuccccaacucauaa

SEQ ID NO: 390642 - RNA, 19 nt, Homo sapiens
  misc_RNA (1)...(19): siRNA sense strand
cauagcugccuguacagaa

SEQ ID NO: 390643 - RNA, 19 nt, Homo sapiens
  misc_RNA (1)...(19): siRNA sense strand
cagacaucaugcuaaauac

SEQ ID NO: 390644 - RNA, 19 nt, Homo sapiens
  misc_RNA (1)...(19): siRNA sense strand
caugacaguguugaacuaa

SEQ ID NO: 390645 - RNA, 19 nt, Homo sapiens
  misc_RNA (1)...(19): siRNA sense strand
ggugcuggauuuuauguug

SEQ ID NO: 390646 - RNA, 19 nt, Homo sapiens
  misc_RNA (1)...(19): siRNA sense strand
uaauugaucaagggaaaga

SEQ ID NO: 390647 - RNA, 19 nt, Homo sapiens
  misc_RNA (1)...(19): siRNA sense strand
aaaaccaacuacagaaugu

SEQ ID NO: 390648 - RNA, 19 nt, Homo sapiens
  misc_RNA (1)...(19): siRNA sense strand
caaaaucugguuaucauca

SEQ ID NO: 390649 - RNA, 19 nt, Homo sapiens
  misc_RNA (1)...(19): siRNA sense strand
cacaucagacaucaugcua

SEQ ID NO: 390650 - RNA, 19 nt, Homo sapiens
  misc_RNA (1)...(19): siRNA sense strand
gaugaccaguuucuuuuag

SEQ ID NO: 390651 - RNA, 19 nt, Homo sapiens
  misc_RNA (1)...(19): siRNA sense strand
ugggaacagaucaaaguaa

SEQ ID NO: 390652 - RNA, 19 nt, Homo sapiens
  misc_RNA (1)...(19): siRNA sense strand
ggaaaaccaacuacagaau

SEQ ID NO: 390653 - RNA, 19 nt, Homo sapiens
  misc_RNA (1)...(19): siRNA sense strand
aaauggaaggcuuaugaug

SEQ ID NO: 390654 - RNA, 19 nt, Homo sapiens
  misc_RNA (1)...(19): siRNA sense strand
cagaggagcuuccccaacu

SEQ ID NO: 390655 - RNA, 19 nt, Homo sapiens
  misc_RNA (1)...(19): siRNA sense strand
gaugaaagccggauacuug

SEQ ID NO: 390656 - RNA, 19 nt, Homo sapiens
  misc_RNA (1)...(19): siRNA sense strand
caauguaccuccacacaga

SEQ ID NO: 390657 - RNA, 19 nt, Homo sapiens
  misc_RNA (1)...(19): siRNA sense strand
ggacuucgccuacgacuca

SEQ ID NO: 390658 - RNA, 19 nt, Homo sapiens
  misc_RNA (1)...(19): siRNA sense strand
gggcagagcaacggaauuu

SEQ ID NO: 390659 - RNA, 19 nt, Homo sapiens
  misc_RNA (1)...(19): siRNA sense strand
ccgauacuauuaugagaaa

SEQ ID NO: 390660 - RNA, 19 nt, Homo sapiens
  misc_RNA (1)...(19): siRNA sense strand
gcaguuuguuccugauuuc

SEQ ID NO: 390661 - RNA, 19 nt, Homo sapiens
  misc_RNA (1)...(19): siRNA sense strand
ccaccaggaucaagaagga

SEQ ID NO: 390662 - RNA, 19 nt, Homo sapiens
  misc_RNA (1)...(19): siRNA sense strand
agacagugaugagcaguuu

SEQ ID NO: 390663 - RNA, 19 nt, Homo sapiens
  misc_RNA (1)...(19): siRNA sense strand
ccaaggguggcuacucuua

SEQ ID NO: 390664 - RNA, 19 nt, Homo sapiens
  misc_RNA (1)...(19): siRNA sense strand
gaauggaguucaagcucau

SEQ ID NO: 390665 - RNA, 19 nt, Homo sapiens
  misc_RNA (1)...(19): siRNA sense strand
ccagacaaaucgccaucaa

SEQ ID NO: 390666 - RNA, 19 nt, Homo sapiens
  misc_RNA (1)...(19): siRNA sense strand
gaaauuugaaggagacauc

SEQ ID NO: 390667 - RNA, 19 nt, Homo sapiens
  misc_RNA (1)...(19): siRNA sense strand
caagugcccuacaccuuca

SEQ ID NO: 390668 - RNA, 19 nt, Homo sapiens
  misc_RNA (1)...(19): siRNA sense strand
gaaccggccagccaugaau

SEQ ID NO: 390669 - RNA, 19 nt, Homo sapiens
  misc_RNA (1)...(19): siRNA sense strand
ggccagccaugaauuacga

SEQ ID NO: 390670 - RNA, 19 nt, Homo sapiens
  misc_RNA (1)...(19): siRNA sense strand
cguugucccugagaaauuu

SEQ ID NO: 390671 - RNA, 19 nt, Homo sapiens
  misc_RNA (1)...(19): siRNA sense strand
agacaaaucgccaucaagu

SEQ ID NO: 390672 - RNA, 19 nt, Homo sapiens
  misc_RNA (1)...(19): siRNA sense strand
agaaaccucugcgaccauu

SEQ ID NO: 390673 - RNA, 19 nt, Homo sapiens
  misc_RNA (1)...(19): siRNA sense strand
gggcuauggcuaugagaaa

SEQ ID NO: 390674 - RNA, 19 nt, Homo sapiens
  misc_RNA (1)...(19): siRNA sense strand
gcucgcuccgauacuauua

SEQ ID NO: 390675 - RNA, 19 nt, Homo sapiens
  misc_RNA (1)...(19): siRNA sense strand
agacggacuucgccuacga

SEQ ID NO: 390676 - RNA, 19 nt, Homo sapiens
  misc_RNA (1)...(19): siRNA sense strand
gccgcucgcuccgauacua

SEQ ID NO: 390677 - RNA, 19 nt, Homo sapiens
  misc_RNA (1)...(19): siRNA sense strand
cugcagcuguggcaauuuc

SEQ ID NO: 390678 - RNA, 19 nt, Homo sapiens
  misc_RNA (1)...(19): siRNA sense strand
gagcaguuuguuccugauu

SEQ ID NO: 390679 - RNA, 19 nt, Homo sapiens
  misc_RNA (1)...(19): siRNA sense strand
ggaggaugaaagccggaua

SEQ ID NO: 390680 - RNA, 19 nt, Homo sapiens
  misc_RNA (1)...(19): siRNA sense strand
aagcaagaauaccaugauc

SEQ ID NO: 390681 - RNA, 19 nt, Homo sapiens
  misc_RNA (1)...(19): siRNA sense strand
ggaugaaagccggauacuu

SEQ ID NO: 390682 - RNA, 19 nt, Homo sapiens
  misc_RNA (1)...(19): siRNA sense strand
ggaaggggucggugcauuu

SEQ ID NO: 390683 - RNA, 19 nt, Homo sapiens
  misc_RNA (1)...(19): siRNA sense strand
uaagcaagaauaccaugau

SEQ ID NO: 390684 - RNA, 19 nt, Homo sapiens
  misc_RNA (1)...(19): siRNA sense strand
ggaacauagcuccgucuuc

SEQ ID NO: 390685 - RNA, 19 nt, Homo sapiens
  misc_RNA (1)...(19): siRNA sense strand
gcguugucccugagaaauu

SEQ ID NO: 390686 - RNA, 19 nt, Homo sapiens
  misc_RNA (1)...(19): siRNA sense strand
gaccauucccagaugaugu

SEQ ID NO: 390687 - RNA, 19 nt, Homo sapiens
  misc_RNA (1)...(19): siRNA sense strand
agcguuacguguacaaguu

SEQ ID NO: 390688 - RNA, 19 nt, Homo sapiens
  misc_RNA (1)...(19): siRNA sense strand
ccucgacucugaagaucuc

SEQ ID NO: 390689 - RNA, 19 nt, Homo sapiens
  misc_RNA (1)...(19): siRNA sense strand
cuggaugacccaacaaaug

SEQ ID NO: 390690 - RNA, 19 nt, Homo sapiens
  misc_RNA (1)...(19): siRNA sense strand
gcguuacguguacaaguuu

SEQ ID NO: 390691 - RNA, 19 nt, Homo sapiens
  misc_RNA (1)...(19): siRNA sense strand
ccaccaccaggaucaagaa

SEQ ID NO: 390692 - RNA, 19 nt, Homo sapiens
  misc_RNA (1)...(19): siRNA sense strand
gagcguuacguguacaagu

SEQ ID NO: 390693 - RNA, 19 nt, Homo sapiens
  misc_RNA (1)...(19): siRNA sense strand
cuggugagcguuacgugua

SEQ ID NO: 390694 - RNA, 19 nt, Homo sapiens
  misc_RNA (1)...(19): siRNA sense strand
gauacuauuaugagaaagg

SEQ ID NO: 390695 - RNA, 19 nt, Homo sapiens
  misc_RNA (1)...(19): siRNA sense strand
gaagcucagguaccagaca

SEQ ID NO: 390696 - RNA, 19 nt, Homo sapiens
  misc_RNA (1)...(19): siRNA sense strand
agcaguuuguuccugauuu

SEQ ID NO: 390697 - RNA, 19 nt, Homo sapiens
  misc_RNA (1)...(19): siRNA sense strand
ucgcuccgauacuauuaug

SEQ ID NO: 390698 - RNA, 19 nt, Homo sapiens
  misc_RNA (1)...(19): siRNA sense strand
gacauuugccacuccuuca

SEQ ID NO: 390699 - RNA, 19 nt, Homo sapiens
  misc_RNA (1)...(19): siRNA sense strand
gacaaaucgccaucaaguc

SEQ ID NO: 390700 - RNA, 19 nt, Homo sapiens
  misc_RNA (1)...(19): siRNA sense strand
cugcgaccauucccagaug

SEQ ID NO: 390701 - RNA, 19 nt, Homo sapiens
  misc_RNA (1)...(19): siRNA sense strand
gagaaaccucugcgaccau

SEQ ID NO: 390702 - RNA, 19 nt, Homo sapiens
  misc_RNA (1)...(19): siRNA sense strand
gccacuccuucacaucuca

SEQ ID NO: 390703 - RNA, 19 nt, Homo sapiens
  misc_RNA (1)...(19): siRNA sense strand
gcuccgauacuauuaugag

SEQ ID NO: 390704 - RNA, 19 nt, Homo sapiens
  misc_RNA (1)...(19): siRNA sense strand
gaggaugaaagccggauac

SEQ ID NO: 390705 - RNA, 19 nt, Homo sapiens
  misc_RNA (1)...(19): siRNA sense strand
ggacagaucugcugguauc

SEQ ID NO: 390706 - RNA, 19 nt, Homo sapiens
  misc_RNA (1)...(19): siRNA sense strand
gaaaagagguacaaaucua

SEQ ID NO: 390707 - RNA, 19 nt, Homo sapiens
  misc_RNA (1)...(19): siRNA sense strand
gaaggaggcugagaaagug

SEQ ID NO: 390708 - RNA, 19 nt, Homo sapiens
  misc_RNA (1)...(19): siRNA sense strand
gcacugacauccaggacaa

SEQ ID NO: 390709 - RNA, 19 nt, Homo sapiens
  misc_RNA (1)...(19): siRNA sense strand
gaaacaggaugcugauagu

SEQ ID NO: 390710 - RNA, 19 nt, Homo sapiens
  misc_RNA (1)...(19): siRNA sense strand
gaccagaauucagauguuu

SEQ ID NO: 390711 - RNA, 19 nt, Homo sapiens
  misc_RNA (1)...(19): siRNA sense strand
gcaguguucuugcaauaug

SEQ ID NO: 390712 - RNA, 19 nt, Homo sapiens
  misc_RNA (1)...(19): siRNA sense strand
gaacggagaccagaauuca

SEQ ID NO: 390713 - RNA, 19 nt, Homo sapiens
  misc_RNA (1)...(19): siRNA sense strand
cagcaguguucuugcaaua

SEQ ID NO: 390714 - RNA, 19 nt, Homo sapiens
  misc_RNA (1)...(19): siRNA sense strand
cauuauggcucucauugaa

SEQ ID NO: 390715 - RNA, 19 nt, Homo sapiens
  misc_RNA (1)...(19): siRNA sense strand
caauguggaucuugucaga

SEQ ID NO: 390716 - RNA, 19 nt, Homo sapiens
  misc_RNA (1)...(19): siRNA sense strand
gccgggagcagcccuauua

SEQ ID NO: 390717 - RNA, 19 nt, Homo sapiens
  misc_RNA (1)...(19): siRNA sense strand
ggaaacaggaugcugauag

SEQ ID NO: 390718 - RNA, 19 nt, Homo sapiens
  misc_RNA (1)...(19): siRNA sense strand
gcagaaggaggcugagaaa

SEQ ID NO: 390719 - RNA, 19 nt, Homo sapiens
  misc_RNA (1)...(19): siRNA sense strand
guacauggcaggaauugau

SEQ ID NO: 390720 - RNA, 19 nt, Homo sapiens
  misc_RNA (1)...(19): siRNA sense strand
gacaguuacagccacauua

SEQ ID NO: 390721 - RNA, 19 nt, Homo sapiens
  misc_RNA (1)...(19): siRNA sense strand
aauaugaggaagacaguua

SEQ ID NO: 390722 - RNA, 19 nt, Homo sapiens
  misc_RNA (1)...(19): siRNA sense strand
gcacuucucccagaucguu

SEQ ID NO: 390723 - RNA, 19 nt, Homo sapiens
  misc_RNA (1)...(19): siRNA sense strand
gggugaaggcgcuauauga

SEQ ID NO: 390724 - RNA, 19 nt, Homo sapiens
  misc_RNA (1)...(19): siRNA sense strand
cugcagaguuccuaucaga

SEQ ID NO: 390725 - RNA, 19 nt, Homo sapiens
  misc_RNA (1)...(19): siRNA sense strand
ccuauuaccugaaccugau

SEQ ID NO: 390726 - RNA, 19 nt, Homo sapiens
  misc_RNA (1)...(19): siRNA sense strand
gcacgccaaugccaagaag

SEQ ID NO: 390727 - RNA, 19 nt, Homo sapiens
  misc_RNA (1)...(19): siRNA sense strand
uggaacugcugcaagcuuu

SEQ ID NO: 390728 - RNA, 19 nt, Homo sapiens
  misc_RNA (1)...(19): siRNA sense strand
gcaacgggccacuccagaa

SEQ ID NO: 390729 - RNA, 19 nt, Homo sapiens
  misc_RNA (1)...(19): siRNA sense strand
guacaagacagcuuucuac

SEQ ID NO: 390730 - RNA, 19 nt, Homo sapiens
  misc_RNA (1)...(19): siRNA sense strand
ucaaguacaagacagcuuu

SEQ ID NO: 390731 - RNA, 19 nt, Homo sapiens
  misc_RNA (1)...(19): siRNA sense strand
gauucaggaugauuaccuu

SEQ ID NO: 390732 - RNA, 19 nt, Homo sapiens
  misc_RNA (1)...(19): siRNA sense strand
ugauuaccuugaccucuuu

SEQ ID NO: 390733 - RNA, 19 nt, Homo sapiens
  misc_RNA (1)...(19): siRNA sense strand
ugacauccaggacaacaaa

SEQ ID NO: 390734 - RNA, 19 nt, Homo sapiens
  misc_RNA (1)...(19): siRNA sense strand
ggauuucguucagcacuuc

SEQ ID NO: 390735 - RNA, 19 nt, Homo sapiens
  misc_RNA (1)...(19): siRNA sense strand
agaaggaggcugagaaagu

SEQ ID NO: 390736 - RNA, 19 nt, Homo sapiens
  misc_RNA (1)...(19): siRNA sense strand
ccagaauucagauguuuau

SEQ ID NO: 390737 - RNA, 19 nt, Homo sapiens
  misc_RNA (1)...(19): siRNA sense strand
agacagcuuucuacuccuu

SEQ ID NO: 390738 - RNA, 19 nt, Homo sapiens
  misc_RNA (1)...(19): siRNA sense strand
agaccagaauucagauguu

SEQ ID NO: 390739 - RNA, 19 nt, Homo sapiens
  misc_RNA (1)...(19): siRNA sense strand
gcuccucccucagaaugaa

SEQ ID NO: 390740 - RNA, 19 nt, Homo sapiens
  misc_RNA (1)...(19): siRNA sense strand
ugacggugguaguagcauu

SEQ ID NO: 390741 - RNA, 19 nt, Homo sapiens
  misc_RNA (1)...(19): siRNA sense strand
ucuuucagauucaggauga

SEQ ID NO: 390742 - RNA, 19 nt, Homo sapiens
  misc_RNA (1)...(19): siRNA sense strand
gccauuggaggcaaguaua

SEQ ID NO: 390743 - RNA, 19 nt, Homo sapiens
  misc_RNA (1)...(19): siRNA sense strand
gaaugaacggagaccagaa

SEQ ID NO: 390744 - RNA, 19 nt, Homo sapiens
  misc_RNA (1)...(19): siRNA sense strand
ccauuggaggcaaguauaa

SEQ ID NO: 390745 - RNA, 19 nt, Homo sapiens
  misc_RNA (1)...(19): siRNA sense strand
gcaauaugaggaagacagu

SEQ ID NO: 390746 - RNA, 19 nt, Homo sapiens
  misc_RNA (1)...(19): siRNA sense strand
gggaguucuuucagauuca

SEQ ID NO: 390747 - RNA, 19 nt, Homo sapiens
  misc_RNA (1)...(19): siRNA sense strand
gcagaguuccuaucagacu

SEQ ID NO: 390748 - RNA, 19 nt, Homo sapiens
  misc_RNA (1)...(19): siRNA sense strand
gagaccagaauucagaugu

SEQ ID NO: 390749 - RNA, 19 nt, Homo sapiens
  misc_RNA (1)...(19): siRNA sense strand
agaagauccugcuggagau

SEQ ID NO: 390750 - RNA, 19 nt, Homo sapiens
  misc_RNA (1)...(19): siRNA sense strand
caaaucuauugucaaguac

SEQ ID NO: 390751 - RNA, 19 nt, Homo sapiens
  misc_RNA (1)...(19): siRNA sense strand
gggccacuccagaacagua

SEQ ID NO: 390752 - RNA, 19 nt, Homo sapiens
  misc_RNA (1)...(19): siRNA sense strand
ccagagauaggagaugcua

SEQ ID NO: 390753 - RNA, 19 nt, Homo sapiens
  misc_RNA (1)...(19): siRNA sense strand
uuauggcucucauugaaca

SEQ ID NO: 390754 - RNA, 19 nt, Homo sapiens
  misc_RNA (1)...(19): siRNA sense strand
cacauuauggcucucauug

SEQ ID NO: 390755 - RNA, 19 nt, Homo sapiens
  misc_RNA (1)...(19): siRNA sense strand
ggcagaaggaggcugagaa

SEQ ID NO: 390756 - RNA, 19 nt, Homo sapiens
  misc_RNA (1)...(19): siRNA sense strand
ccagcaguguucuugcaau

SEQ ID NO: 390757 - RNA, 19 nt, Homo sapiens
  misc_RNA (1)...(19): siRNA sense strand
ucguuagggugcugacuga

SEQ ID NO: 390758 - RNA, 19 nt, Homo sapiens
  misc_RNA (1)...(19): siRNA sense strand
caguguucuugcaauauga

SEQ ID NO: 390759 - RNA, 19 nt, Homo sapiens
  misc_RNA (1)...(19): siRNA sense strand
augauuaccuugaccucuu

SEQ ID NO: 390760 - RNA, 19 nt, Homo sapiens
  misc_RNA (1)...(19): siRNA sense strand
agauguuuaugcccaagaa

SEQ ID NO: 390761 - RNA, 19 nt, Homo sapiens
  misc_RNA (1)...(19): siRNA sense strand
acaguuacagccacauuau

SEQ ID NO: 390762 - RNA, 19 nt, Homo sapiens
  misc_RNA (1)...(19): siRNA sense strand
ggugaaggcgcuauaugag

SEQ ID NO: 390763 - RNA, 19 nt, Homo sapiens
  misc_RNA (1)...(19): siRNA sense strand
gaagauccugcuggagaug

SEQ ID NO: 390764 - RNA, 19 nt, Homo sapiens
  misc_RNA (1)...(19): siRNA sense strand
ccacauuauggcucucauu

SEQ ID NO: 390765 - RNA, 19 nt, Homo sapiens
  misc_RNA (1)...(19): siRNA sense strand
gaaccugaucgagcucuuc

SEQ ID NO: 390766 - RNA, 19 nt, Homo sapiens
  misc_RNA (1)...(19): siRNA sense strand
cuacaagcggagaaaguga

SEQ ID NO: 390767 - RNA, 19 nt, Homo sapiens
  misc_RNA (1)...(19): siRNA sense strand
gggcugguguguggaacug

SEQ ID NO: 390768 - RNA, 19 nt, Homo sapiens
  misc_RNA (1)...(19): siRNA sense strand
uggcucucauugaacagua

SEQ ID NO: 390769 - RNA, 19 nt, Homo sapiens
  misc_RNA (1)...(19): siRNA sense strand
ggagaccagaauucagaug

SEQ ID NO: 390770 - RNA, 19 nt, Homo sapiens
  misc_RNA (1)...(19): siRNA sense strand
ccagggcaauguggaucuu

SEQ ID NO: 390771 - RNA, 19 nt, Homo sapiens
  misc_RNA (1)...(19): siRNA sense strand
gcagcccuauuaccugaac

SEQ ID NO: 390772 - RNA, 19 nt, Homo sapiens
  misc_RNA (1)...(19): siRNA sense strand
ggggacagaucugcuggua

SEQ ID NO: 390773 - RNA, 19 nt, Homo sapiens
  misc_RNA (1)...(19): siRNA sense strand
gaacugcugcaagcuuucu

SEQ ID NO: 390774 - RNA, 19 nt, Homo sapiens
  misc_RNA (1)...(19): siRNA sense strand
gcugguggagccaaggaaa

SEQ ID NO: 390775 - RNA, 19 nt, Homo sapiens
  misc_RNA (1)...(19): siRNA sense strand
ggggaguucuuucagauuc

SEQ ID NO: 390776 - RNA, 19 nt, Homo sapiens
  misc_RNA (1)...(19): siRNA sense strand
gggagcagcccuauuaccu

SEQ ID NO: 390777 - RNA, 19 nt, Homo sapiens
  misc_RNA (1)...(19): siRNA sense strand
ccuggaagcauguaucuac

SEQ ID NO: 390778 - RNA, 19 nt, Homo sapiens
  misc_RNA (1)...(19): siRNA sense strand
caacgggccacuccagaac

SEQ ID NO: 390779 - RNA, 19 nt, Homo sapiens
  misc_RNA (1)...(19): siRNA sense strand
aaagcaggauuucguucag

SEQ ID NO: 390780 - RNA, 19 nt, Homo sapiens
  misc_RNA (1)...(19): siRNA sense strand
guucuugcaauaugaggaa

SEQ ID NO: 390781 - RNA, 19 nt, Homo sapiens
  misc_RNA (1)...(19): siRNA sense strand
uauaugaggagcuggaucu

SEQ ID NO: 390782 - RNA, 19 nt, Homo sapiens
  misc_RNA (1)...(19): siRNA sense strand
gcacccagagauaggagau

SEQ ID NO: 390783 - RNA, 19 nt, Homo sapiens
  misc_RNA (1)...(19): siRNA sense strand
aggaauugauggcgagaag

SEQ ID NO: 390784 - RNA, 19 nt, Homo sapiens
  misc_RNA (1)...(19): siRNA sense strand
gcagaagcccuggcaauuu

SEQ ID NO: 390785 - RNA, 19 nt, Homo sapiens
  misc_RNA (1)...(19): siRNA sense strand
gguccaagcuguugcuguu

SEQ ID NO: 390786 - RNA, 19 nt, Homo sapiens
  misc_RNA (1)...(19): siRNA sense strand
uagcagcacuguccucuuc

SEQ ID NO: 390787 - RNA, 19 nt, Homo sapiens
  misc_RNA (1)...(19): siRNA sense strand
gcagugcccucuucagcau

SEQ ID NO: 390788 - RNA, 19 nt, Homo sapiens
  misc_RNA (1)...(19): siRNA sense strand
gaagaaggcauuggguaug

SEQ ID NO: 390789 - RNA, 19 nt, Homo sapiens
  misc_RNA (1)...(19): siRNA sense strand
ggacuucgaagauguaugg

SEQ ID NO: 390790 - RNA, 19 nt, Homo sapiens
  misc_RNA (1)...(19): siRNA sense strand
gggcuacugugucugguau

SEQ ID NO: 390791 - RNA, 19 nt, Homo sapiens
  misc_RNA (1)...(19): siRNA sense strand
cagaagcccuggcaauuuu

SEQ ID NO: 390792 - RNA, 19 nt, Homo sapiens
  misc_RNA (1)...(19): siRNA sense strand
cuucgaagauguauggaau

SEQ ID NO: 390793 - RNA, 19 nt, Homo sapiens
  misc_RNA (1)...(19): siRNA sense strand
ggacucugcacccugauau

SEQ ID NO: 390794 - RNA, 19 nt, Homo sapiens
  misc_RNA (1)...(19): siRNA sense strand
cagcuggacuucgaagaug

SEQ ID NO: 390795 - RNA, 19 nt, Homo sapiens
  misc_RNA (1)...(19): siRNA sense strand
ggcagaagcccuggcaauu

SEQ ID NO: 390796 - RNA, 19 nt, Homo sapiens
  misc_RNA (1)...(19): siRNA sense strand
ugaagaaggcauuggguau

SEQ ID NO: 390797 - RNA, 19 nt, Homo sapiens
  misc_RNA (1)...(19): siRNA sense strand
cugugggccugguuuauuu

SEQ ID NO: 390798 - RNA, 19 nt, Homo sapiens
  misc_RNA (1)...(19): siRNA sense strand
ucgaagauguauggaauuc

SEQ ID NO: 390799 - RNA, 19 nt, Homo sapiens
  misc_RNA (1)...(19): siRNA sense strand
aaugauuccuucccagaug

SEQ ID NO: 390800 - RNA, 19 nt, Homo sapiens
  misc_RNA (1)...(19): siRNA sense strand
gcaggccacacacacugua

SEQ ID NO: 390801 - RNA, 19 nt, Homo sapiens
  misc_RNA (1)...(19): siRNA sense strand
uagccugucuugccaucuu

SEQ ID NO: 390802 - RNA, 19 nt, Homo sapiens
  misc_RNA (1)...(19): siRNA sense strand
gcauuguggugcccgucuu

SEQ ID NO: 390803 - RNA, 19 nt, Homo sapiens
  misc_RNA (1)...(19): siRNA sense strand
ugccaucuuugucuuguug

SEQ ID NO: 390804 - RNA, 19 nt, Homo sapiens
  misc_RNA (1)...(19): siRNA sense strand
cuucccagauggagacuau

SEQ ID NO: 390805 - RNA, 19 nt, Homo sapiens
  misc_RNA (1)...(19): siRNA sense strand
gcuggacuucgaagaugua

SEQ ID NO: 390806 - RNA, 19 nt, Homo sapiens
  misc_RNA (1)...(19): siRNA sense strand
ggaguggcugcccuacuga

SEQ ID NO: 390807 - RNA, 19 nt, Homo sapiens
  misc_RNA (1)...(19): siRNA sense strand
aagaaggcauuggguaugg

SEQ ID NO: 390808 - RNA, 19 nt, Homo sapiens
  misc_RNA (1)...(19): siRNA sense strand
gcuacugugucugguaugg

SEQ ID NO: 390809 - RNA, 19 nt, Homo sapiens
  misc_RNA (1)...(19): siRNA sense strand
ggugagguccaagcuguug

SEQ ID NO: 390810 - RNA, 19 nt, Homo sapiens
  misc_RNA (1)...(19): siRNA sense strand
gacucugcacccugauaua

SEQ ID NO: 390811 - RNA, 19 nt, Homo sapiens
  misc_RNA (1)...(19): siRNA sense strand
gcagugaucuagucucuuu

SEQ ID NO: 390812 - RNA, 19 nt, Homo sapiens
  misc_RNA (1)...(19): siRNA sense strand
cuaacgagauucaagauua

SEQ ID NO: 390813 - RNA, 19 nt, Homo sapiens
  misc_RNA (1)...(19): siRNA sense strand
gauuggagcucugcaguaa

SEQ ID NO: 390814 - RNA, 19 nt, Homo sapiens
  misc_RNA (1)...(19): siRNA sense strand
caagagauccucagucaau

SEQ ID NO: 390815 - RNA, 19 nt, Homo sapiens
  misc_RNA (1)...(19): siRNA sense strand
caaccacacuaacgagauu

SEQ ID NO: 390816 - RNA, 19 nt, Homo sapiens
  misc_RNA (1)...(19): siRNA sense strand
aacaagggcuucuggaauu

SEQ ID NO: 390817 - RNA, 19 nt, Homo sapiens
  misc_RNA (1)...(19): siRNA sense strand
gaacugcugacgcggcuaa

SEQ ID NO: 390818 - RNA, 19 nt, Homo sapiens
  misc_RNA (1)...(19): siRNA sense strand
cccaagagauccucaguca

SEQ ID NO: 390819 - RNA, 19 nt, Homo sapiens
  misc_RNA (1)...(19): siRNA sense strand
ggaaggugguuguguucau

SEQ ID NO: 390820 - RNA, 19 nt, Homo sapiens
  misc_RNA (1)...(19): siRNA sense strand
gaaggugguuguguucauc

SEQ ID NO: 390821 - RNA, 19 nt, Homo sapiens
  misc_RNA (1)...(19): siRNA sense strand
caaacaagggcuucuggaa

SEQ ID NO: 390822 - RNA, 19 nt, Homo sapiens
  misc_RNA (1)...(19): siRNA sense strand
aaacaagggcuucuggaau

SEQ ID NO: 390823 - RNA, 19 nt, Homo sapiens
  misc_RNA (1)...(19): siRNA sense strand
acaagggcuucuggaauuu

SEQ ID NO: 390824 - RNA, 19 nt, Homo sapiens
  misc_RNA (1)...(19): siRNA sense strand
ucaauugcccaucaaacaa

SEQ ID NO: 390825 - RNA, 19 nt, Homo sapiens
  misc_RNA (1)...(19): siRNA sense strand
aacggugccucgagucuuu

SEQ ID NO: 390826 - RNA, 19 nt, Homo sapiens
  misc_RNA (1)...(19): siRNA sense strand
ugacgcggcuaaagcagau

SEQ ID NO: 390827 - RNA, 19 nt, Homo sapiens
  misc_RNA (1)...(19): siRNA sense strand
gcaggagggcccaagagau

SEQ ID NO: 390828 - RNA, 19 nt, Homo sapiens
  misc_RNA (1)...(19): siRNA sense strand
gaacggugccucgagucuu

SEQ ID NO: 390829 - RNA, 19 nt, Homo sapiens
  misc_RNA (1)...(19): siRNA sense strand
acacuaacgagauucaaga

SEQ ID NO: 390830 - RNA, 19 nt, Homo sapiens
  misc_RNA (1)...(19): siRNA sense strand
cgagauucaagauuauuug

SEQ ID NO: 390831 - RNA, 19 nt, Homo sapiens
  misc_RNA (1)...(19): siRNA sense strand
caggagggcccaagagauc

SEQ ID NO: 390832 - RNA, 19 nt, Homo sapiens
  misc_RNA (1)...(19): siRNA sense strand
aagagauccucagucaauu

SEQ ID NO: 390833 - RNA, 19 nt, Homo sapiens
  misc_RNA (1)...(19): siRNA sense strand
ccaccaaccacacuaacga

SEQ ID NO: 390834 - RNA, 19 nt, Homo sapiens
  misc_RNA (1)...(19): siRNA sense strand
gucaauugcccaucaaaca

SEQ ID NO: 390835 - RNA, 19 nt, Homo sapiens
  misc_RNA (1)...(19): siRNA sense strand
ucagucaauugcccaucaa

SEQ ID NO: 390836 - RNA, 19 nt, Homo sapiens
  misc_RNA (1)...(19): siRNA sense strand
cggaugcagugaucuaguc

SEQ ID NO: 390837 - RNA, 19 nt, Homo sapiens
  misc_RNA (1)...(19): siRNA sense strand
cugggaaggugguuguguu

SEQ ID NO: 390838 - RNA, 19 nt, Homo sapiens
  misc_RNA (1)...(19): siRNA sense strand
caauugcccaucaaacaag

SEQ ID NO: 390839 - RNA, 19 nt, Homo sapiens
  misc_RNA (1)...(19): siRNA sense strand
agagauccucagucaauug
